United States Patent Application Publication US 2004/0259086 A1 - sequence listing, part 2

SEQ ID NO: 5578 - DNA, 742 bp, Homo sapiens
  misc_feature 509, 545, 588, 628, 680, 685, 703, 712, 713: n = A,T,C or G
acttctagaattaattaacgcgggtctatcaacaaagaacccttaacacaccatactatattgcaatccctatggtaccagactgtcgcaaagaacatcttttgggaatgaagtcagaagacagtttgctgtgaccacctcagagtctcaaaacccttcctcctccagcaagacccaaccacaaaaactgtctaaaggcgccctgagtttgagaattttagtgtcctgctctgggtttttccaggctgcctttttcttgataccaggcttgccctgcctgtaccattttttactgcataggcaggctgacagctcagactgactgatggcggagcctgcctcacaaatgtgcatgcgctagtctcacagcaccaggcctgactgtgacctttcagtagagtgacaattaatgtcattggtgcctaatgccaaagtccctgtgaattggagaagaagggcacctctatacagttttgttgcccatggactcccacttgtcttcttttgtnaagacagacaggacagtcccatgatcccaaaaaganggcaagatgtgagaagtctgtagaaacatcaagccacaaattnccagaaattaaattctgaaaatcccaaaggatgccaaagnaaatctgtaggattcttcaagcctggcctaggcatttgtagttgggagtcantttgnaaacttgcccactggganttataggtnnttaacccctgtgttcccaaggccgggccg

SEQ ID NO: 5579 - DNA, 432 bp, Homo sapiens
agtacttctagaattaattaaccgcgggtctatcaacaaagaacccttaacacaccatactatattgcaatccctatggtaccagactgtcgcaaagaacatcttttgggaatgaagtcagaagaacagtttgctgtgaccacctcagagtctcaaaaccctttcttcctccagcaagacccaaccacaaaaactgtctaaaggcgccctgagtttgagaattttagtgtcctgctctgggtttttccaggctgcctttttcttgataccaggcttgccctgcctgtaccattttttactgcataggcaggctgacagctcagactgactgatggcggagcctgcctcacaaatgtgcatgcgctagtctcacagcaccaggcctgactgtggacctttcagtagagtgacaattaatgtcattgttgccta

SEQ ID NO: 5580 - DNA, 290 bp, Homo sapiens
agtacttctagaattaattaacgcgggtctatcaacaaagaacccttaacacaccatactatattgcaatccctatggtaccagactgtcgcaaagaacatcttttgggaatgaagtcagaagaacagtttgctgtgaccacctcagagtctcaaaacccttcctcctccagcaagacccaaccacaaaaactgtctaaaggcgccctgagtttgagaattttagtgtcctgctctgggtttttccaggctgcctttttcttgataccaggcttgccctgcctgtaccat

SEQ ID NO: 5581 - DNA, 413 bp, Homo sapiens
  misc_feature 65, 120, 157, 179, 199, 291: n = A,T,C or G
tttttttttttttttttttttttgggatgctcaacctataatacccaaaggctctatttcagtanaatttattggtttgctgattatagcagtgacatagttgcattctagagaccttanaaaatgcagaaaatttcaagaaaaacatttaaattgngctcatagtgaaactgagaggngaccactcttaatattttgnggcataagcattccagtcttttatctttctcaaagtttcacataaactttctcaaaggccattaaatacttttccatagcctgattttttgngaccacatagtatcctattatattgataataccataatttacctaacccatttttatatatttggattttttccaattcatcattattatgaataatggtgtatctcaagtggttattactt

SEQ ID NO: 5582 - DNA, 386 bp, Homo sapiens
  misc_feature 169, 174, 178, 185, 265, 293, 323, 326, 343, 364: n = A,T,C or G
ccgcggtggcggccgcttttttttttttttttttttttttttttggaccagagaggccccaaactagcagcctgtcctcctcagtagccccagcatcccttcatcattttgttgcccttctatgggcctagtttaggtctgagaggcatagttttaaaatttttattgntattnattnattctanagataaggtcttgctatgtttcccaggctggtcttgaactcctggcctcaagcaatcctcctgcagcagcctcccaaagngctgggattacaggcatgagccaccacntctggtcagacaggcatagttttacaaatntgngggtggataaatgctgnccagtcttactttatcacttntatcaattgaatgcttttggtt

SEQ ID NO: 5583 - DNA, 344 bp, Homo sapiens
  misc_feature 157, 160, 183, 276, 324: n = A,T,C or G
ctatagggcgaattggagctccccgcggtggcggccgcttttttttttttttttttttttttttttggaagtagattgtttctgctaggcaatataatctgctaatgtgacagtttccctgtaacaatgtgtagcaaaactctgcaggattaatganaanaatgtattgcctttgaagcagcnccacttgagtaaaaattcctcaaatgtgctctatgttatgctagtgtaagtatagcaccggaggatatttcttgggcctactttgcaagcctntgagaggtgctgtgcagctccgaccatgaactgctctcctaattgaanagggtcccaggaaggggaag

SEQ ID NO: 5584 - DNA, 621 bp, Homo sapiens
  misc_feature 197, 531, 598, 600: n = A,T,C or G
cgcttttttttttttttttttttttttgaggtggagtcttgctctgtcaccaggctggagtgcagtggtgcaatcttggctcactgcaaccttcccctcctggctgagttaacttaggagagcttcctggagagggcacctttgaagataggaaggatttcatgaagtctttactaggccactagagtagaagcagngggagacttcctggagaagagctcatggaaagaaaaacctaccgctggccctttgggaactgctttgggcctctttagtcctaggctcacacgccccttagaaacaaagtaagaataaagccagggataatacagtgagtggccaagaacacagactctggagccagactacctgggtttgaatcccagttaccagccatgtgactttgatcaagttgcttaacctttgtgtgcttcagtttcctcatctgtaaaataaggggatggtaattgtgacttcccagaactatggtggagagcaaatgggttaagagtgtgccgctgtaaactgtanaagtgctgggctttcattggggaagtattacctttcattgctgcagttgaaactggttgctggggcnanttgaaaaaggagttaaaaaaa

SEQ ID NO: 5585 - DNA, 574 bp, Homo sapiens
  misc_feature 1, 3, 24, 25, 75, 499: n = A,T,C or G
ntngagtacttctagaattaattnncgcgggcattgtttgcagaagacctggactggaatctaacactgtgagtnctccccaggatccgtgttcctctctttagcccaggcatgcagttacattacattttccaaccttccttgcagttagctacgatcacgtgactgcattctggccagtggaatgtgtgtggaagtgatgtgggccaattccaggcctggcctataaaaatcccccactttttgttctctttctccatccaccatctgcatggagagctcccagcactagagggagaaaaagccaccagagggaaggagcctgggtccctgaatcactgtgtagactacctgccaaacatacaccctgaattgttatggcaataacaaataaactcctaatgtgttaagccatttaaattctggggttgttacagctgttaagcccagtctgactaacatagcctcttaagaggctttggataagtttcctagcctncctgagcttcagtttcctcatctctaaaaatgataattggaaaaacctttctgaaaatgactggagctaatattt

SEQ ID NO: 5586 - DNA, 504 bp, Homo sapiens
  misc_feature 9, 19, 20, 21, 45, 49, 202, 226, 245, 269, 481: n = A,T,C or G
ccgcggtgngcggccgctnnntttttttttttttttttttttttnttgnagcacaaaaatctgggttttatttattcatttgtaaactcaagccagttctctattccactttttccaattatttgcttttgagagtctcaggattatccttcttcctctccttccacattttctcccctgtcccttctcctggccatgcttntctagtcccgacggtcttgtttanatcacaatgcggtttgtanattttccttcactctctctttcanaaaaaaatgccaaaatggtgttttaagaagcttttattgagccaactgaacttcaacaaagcaaacgaaaacataaagtagggaaaggaaccctcttcaacaaatggtgttgggataattggcaagccacatgtaggagaattaaactggatcctcatctctcaccttatacacaaatcaactcaaaatgccccgcgttaattaattctaanaagtactctcgagggggggcccg

SEQ ID NO: 5587 - DNA, 391 bp, Homo sapiens
  misc_feature 33, 185, 207, 226, 250: n = A,T,C or G
tttttttttttttttttttttttttttttaagnacaaaaatctgggttttatttattcatttgtaaactcaagccagttctctattccactttttccaattatttgcttttgagagtctcaggattatccttcttcctctccttccacattttctcccctgtcccttctcctggccatgcttctntagtcccgacggtcttgtttanatcacaatgcggtttgtanattttccttcactctctctttcanaaaaaaatgccaaaatggtgttttaagaagcttttattgagccaactgaacttcaacaaagcaaacgaaaacataaagtagggaaaggaaccctcttcaacaaatggtgttgggataattggcaagccacatgtaggagaa

SEQ ID NO: 5588 - DNA, 422 bp, Homo sapiens
  misc_feature 62, 157: n = A,T,C or G
ccgcggtggcggcccgcttttttttttttttttttttttttttaacttttgacagagactangatcttgctatgttgctgaggttgctcttgaactcctgggctcaaagaatcctctcatttcagcctcttcaactgctggtattacaagcatgacnccatatgggctggaagctgatttttaaaatactgagaccatatagatgacagcacccagagaaacagaaatattaactgaagttgttgctggcagaccattctttctttccacctttctttcttcctccctccccctcctccatctttttacttttcgcctcttcctttctcttctttctctccttcattatccctttcactgtttctctttctccctttcttttttcttttctttcccccgcgttaattaattctagaagtact

SEQ ID NO: 5589 - DNA, 681 bp, Homo sapiens
  misc_feature 2, 17, 22, 29, 75, 76, 88, 89, 124, 189, 595, 597, 629, 660,662, 672, 678: n = A,T,C or G
tnccggcgaattggatnttccngcggtgncggcccgctttttttttttttttttttattcctaattagatggggnngaaagtcttttnntaggaacctctacgttttacagccttaatatcatngtgtagtgagtctcaccactttattcttctttgtcaaggttgatttagctatctgagatctttgncttttcatatagattttagagtaagtttgtctatgtctacataaaagcttgctgggattcgaggccgggtacggtggctcacgcctttaatcacaacactttgggaggctgaggcaggtggattacttaagggcaggagtttgagaccagcctggctaacagtggaaccctgtctctaccaaaaaaatcaaaagctgggcgtggtggctcacgcctgtaatcccagtactttgggaggccgaggtgggtggatcacgagggcaggagatcgagaccatctggcaaaacatggtgaaaccccgtctccactaaaaaatcaaaaaaaattagctgggcttggttgccggcgcttgtagtcccaactacttaagaagcttgaggcaggaaaatggcgtgaaccccggangnggagcttgcagtgagcccagaccggccactgnactttacccgggcgaatgaccaaactttttntnaaccaaaccnaaaccnaaa

SEQ ID NO: 5590 - DNA, 491 bp, Homo sapiens
  misc_feature 2, 26, 27, 29, 31, 477: n = A,T,C or G
cntcctaaagggaacaaaagctgggnncngngccgggccccccctcgagagtacttctagaattaattaacgcgggactgctaacaattagtccatcactatcccctcaagtcaaaataatgcccatcagacctcaggggcggggtgactacccaagatagccatctgaacgtgcacacggacccaattttcctgtaacctcaaggtggtgtaaaaggggcaaccatctggtcatttcttcgagttttttttatattttgtataactcctgtgcacataataaaatatgtaagcctatttttctgctaatgtgtgtactatcagtttgttttatggactcacccctaaggagaaaaatgtaaatttacctacatgtgaaatttagtttggagcttggctgccgtggacctagctaaaactgggtggcctgggctctcccttcccagataaaacttctttttttttttctttctgaanatggtaagggtgga

SEQ ID NO: 5591 - DNA, 893 bp, Homo sapiens
  misc_feature 19, 72, 73, 460, 514, 535, 568, 632, 646, 650, 652, 674,678, 697, 704, 729, 744, 748, 752, 759, 770, 788, 805, 809,815, 820, 821, 835, 855, 874, 875, 876, 877: n = A,T,C or G
ccgcggtggcggcccgctnttttttttttttttttttttttttaacttttaatttctgatcgagtcacaganngatttgttgagtagcttcagcacttcttcctttgtcatttttttctgtctgataagtcatgccatggacgttacccatttttatcccagaggcctcttacgttgacttgaaaagacggactatgtctttcagagatcttgtgggtatcacatcaatcttgacaaattttctaccctccaagtcatgatcctaagaacagcttgcctcccatttctccggtttgtgctattatgaaggccttattgtttcagccttcttcaatcttgagggttgttgtcactgtatgggtggttcaagaaataaagtaggtcctgttactatgaagggggtcacaagcttttgttggcatatctaaactttgtggctcatggaacagtatgaatgcanaatgtagctttctccacttgtggactgctttgcatagctgccaaaggcctccanagaaaaccttcagggctttgnggtctttatctgtagcacggatcttaaatttgngggttcataggtcaactggatacagggcattttttgggacaatttctggcattttttgaacaanacaaaatttttttnccangnatatttgcattggaccttggtnccgnttgaagggaagtctgttgnccaactntttgcaatgcaaacccatgcccctngatttccaaaatttntgtngggnaacccanagaattggaangcttcaggggaaaatatnattttatagaatacttntttntaggcnggggnnggaacaaaaaaatngaccgcaccaaggctttttnctttttttcttttttgggnnnncccaaaaaaaaaaaaa

SEQ ID NO: 5592 - DNA, 269 bp, Homo sapiens
  misc_feature 82, 86, 90, 99, 100, 130, 135, 148, 149, 179, 187, 254, 259: n = A,T,C or G
agtacttctagaattaattaacgcggggaatccggtgcggacgcacgcgaactctgcccgggagccgaggtgactgatctanctgntctnggtaataannatttgcaaaacacatctgaccaaaatcctnttaanttcatgaaagctnnctttataggatgatttttgaagaaccagtnttattaangagattacaccaaaagcataaacaatttatacgtcaaactccgactgaaaaaaaaaaataaccgatnaaggnatgtttttta

SEQ ID NO: 5593 - DNA, 443 bp, Homo sapiens
  misc_feature 65, 74, 78, 243: n = A,T,C or G
agggcgaattggagctccccgcggtggcggccgcttttttttttttttttttttttttttttttnactagaatngttnttatagggcttccgttatttatttttattttttttattatactttaagttttagggtacatgtgcacaacgtgcaggtttgctacatatgtatacatgtgccatgttgggggggctgcactcattaactcgccatttatattaggtatatatacgtgttcattgnacccttatcgactttgcagcatgcttatccatctaactattcatctttatttgccttcgttttttgagttcccttattcatcctaaaacaaaatataatgcctgactcatagtcagacttcacagtatttttaaatgaattacattgcattggggaaatataaatagtaatgtccttttatagaggaagtctaaaagaaa

SEQ ID NO: 5594 - DNA, 337 bp, Homo sapiens
  misc_feature 120, 129, 179, 199, 250: n = A,T,C or G
tttttttttttttttttttttttgggatgctcaacctataatacccaaaggctctatttcagtagaatttattggtttgctgattatagcagtgacatagttgcattctagagaccttanaaaatgcanaaaatttcaagaaaaacatttaaattgtgctcatagtgaaactgagaggngaccactcttaatattttgnggcataagcattccagtcttttatctttctcaaagtttcacataaactttntcaaaggccattaaatacttttccatagcctgattttttgtgaccacatagtatcctattatattgataataccataatttacctaa

SEQ ID NO: 5595 - DNA, 404 bp, Homo sapiens
  misc_feature 216: n = A,T,C or G
ccgcggtggcggccgcttttttttttttttttttttttttgggatgctcaacctataatacccaaaggctctatttcagtagaatttattggtttgctgattatagcagtgacatagttgcattctagagaccttagaaaatgcagaaaatttcaagaaaaacatttaaattgtgctcatagtgaaactgagaggtgaccactcttaatattttgnggcataagcattccagtcttttatctttctcaaagtttcacataaactttctcaaaggccattaaatacttttccatagcctgattttttgtgaccacatagtatcctattatattgataataccataatttacctaacccatttttatatatttggattttttccaattcatcattattatgaataa

SEQ ID NO: 5596 - DNA, 337 bp, Homo sapiens
  misc_feature 85, 111, 161, 182, 210, 295, 322, 326: n = A,T,C or G
gaggaaggcacctacaaaacgaaagtgcctagggcttacaaaagtcatatgtagcctttacaaatattagctcagtcattttcanaaaggtttttccaattatcattttanagatgaggaaactgaagctcagggaggctaggaaacttatccaaagcctnttaagaggctatgttagtcanactgggctaacagctgtaacaaccccanaatttaaatggcttaacacattaggagtttatttgttattgccataacaattcagggtgtatgtttggcaggtagtctacacagngattcagggacccaggctccttccctntggnggctttttctc

SEQ ID NO: 5597 - DNA, 392 bp, Homo sapiens
  misc_feature 28, 90, 125, 185, 253, 266, 324, 366: n = A,T,C or G
tttttttttttttttttttttttttganagacaaacatgggccacatttttaagacaaacatggaccacaaccatgctgagagaacttanagtgaagtttacatggctatctttcttagtattanaaattttacctgataaacatcaaacatacgaccaacatagcatataaagcagctctacanatattttcctactgcccaaaatatcatataatgcacatgtaggtcacatgtgagtaggcaagagattntggaacacagaancaagacaacaggatcacagcaatttcagtatgctctgcttgttataggaaatccccanaacattctccaattactgaacaaaaaaagcaataaaactcanatttgtctgcctggggagaaataaac

SEQ ID NO: 5598 - DNA, 349 bp, Homo sapiens
  misc_feature 162, 165, 188, 215, 289, 329: n = A,T,C or G
tactactatagggcgaattgtagctccccgcggtggcggccgcttttttttttttttttttttttttttttggaagtagattgtttctgctaggcaatataatctgctaatgtgacagtttccctgtaacaatgtgtagcaaaactctgcaggattaatganaanaatgtattgcctttgaagcagcnccacttgagtaaaaattcctcaaatgngctctatgttatgctagtgtaagtatagcaccggaggatatttcttgggcctactttgcaagcctctgaaaggngctgtgcagctccgaccatgaactgctctcctaattgaanagggtcccaggaaggggaag

SEQ ID NO: 5599 - DNA, 357 bp, Homo sapiens
  misc_feature 131, 183, 189, 214, 238, 252, 278, 290, 353: n = A,T,C or G
gactacttagggcgaattggagctccccgcggtggcggccgcttttttttttttttttttttttttttgaaatatgcccacccatttcaggttgagccacggataaggagggcttagctcatgtctcctgngggaattgaggcatctcaggaaacagtatagagttggtacagttagaatganaagaancctggggaaagaaaccaagagtganaaatgcgtggctattttgacttanctggagcaaccctntcataacaggctgggaagtggacccncgttaattaacncgggggaaattgatgaacaaacaaaggtcatagtaaaagacagacttttggggataaaaacanaaac

SEQ ID NO: 5600 - DNA, 396 bp, Homo sapiens
agtacttctagaattaattaacgcgggactgctaacaattagtccatcactatcccctcaagtcaaaataatgcccatcaggacctcaggggcggggtgactacccaagatagccatctgaacgtgacacacggacccaattttcctgtaacctcaaggtggtgtaaaaggggcaaccatctggtcatttcttcgagttttttttatattttgtataactcctgtgcacataataaaatatgtaagcctatttttctgctaatgtgtgtactatcagtttgttttatggactcacccctaaggagaaaaatgtaaatttacctacatgtgaaatttagtttggagcttggctgccgtggacctagctaaaactgggtggcctgggctctcccttcc

SEQ ID NO: 5601 - DNA, 313 bp, Homo sapiens
agtacttctagaattaattaacgcggggggacgaagcgcagcctgcactcccagatccgctcattttcgttctgccctccgttttacgattcgcctacactgaaaatgcgtgagtggagtggaaagccttcctactcctgcctcagcgaccccttctaaaatactgcctcgtttggcctgaaaatgtgatttgcaggcttcctgagcaaagtagatttcactccattaaagaaaaaaaaaagaaaaggcaccgaacggggctcggctgtcgggagttttgctttaaaaaaaaaaaaaaaaaaaaaaaaaaaaa

SEQ ID NO: 5602 - DNA, 423 bp, Homo sapiens
  misc_feature 72, 85, 89, 186, 202, 234, 243, 295, 297, 317, 325, 365,388, 404, 409: n = A,T,C or G
tccttagggcgaattggagctccccgcggtggcggccgctttttttttttttttttttttttttttttgaanaatcaacagactntatntttgatcacaaagcaaaagtttaagtgtattacttaaaattttaagacaaaatctggaataattataactaacacaaattttgaggtagaggaaganaattctagagataggngagataaaattttcatctttgataatgagtanacaaaaacnctacctttaacaagggaagaatttaaaaaatttagagaagaggaaatcatangnggtttttaaaatttattatncatatcgnggtaaagataatccaacagaaaatgagatttgaacagacncttcacaggagatagacaaatgnctcaacctcattagtnaccanacaaatgccaaatt

SEQ ID NO: 5603 - DNA, 378 bp, Homo sapiens
agtacttctagaattaattaacgcgggactgctaacaattagtccatcactatcccctcaagtcaaaataatgcccatcagacctcaggggcggggtgactacccaagatagccatctgaacgtgacacacggacccaattttcctgtaacctcaaggtggtgtaaaaggggcaaccatctggtcatttcttcgagttttttttatattttgtataactcctgtgcacataataaaatatgtaagcctatttttctgctaatgtgtgtactatcagtttgttttatggactcacccctaaggagaaaaatgtaaatttacctacatgtgaaatttagtttggagcttggcttgcccgtgggacctagctaaaactggg

SEQ ID NO: 5604 - DNA, 388 bp, Homo sapiens
  misc_feature 179, 199: n = A,T,C or G
tttttttttttttttttttttttgggatgctcaacctataatacccaaaggctctatttcagtagaatttattggtttgctgattatagcagtgacatagttgcattctagagaccttagaaaatgcagaaaatttcaagaaaaacatttaaattgtgctcatagtgaaactgagaggngaccactcttaatattttgnggcataagcattccagtcttttatctttctcaaagtttcacataaactttctcaaaggccattaaatacttttccatagcctgattttttgtgaccacatagtatcctattatattgataataccataatttacctaacccatttttatatatttggattttttccaattcatcattattatgaataat

SEQ ID NO: 5605 - DNA, 353 bp, Homo sapiens
agtacttctagaattaattaacgcgggactgctaacaattagtccatcactatcccctcaagtcaaaataatgcccatcagacctcaggggcggggtgactacccaagatagccatctgaaccgtgacacacggacccaattttcctgtaacctcaaggtggtgtaaaaggggcaaccatctggtcatttcttcgagttttttttatattttggtataaactccctggtgcacataataaaaatatgtaaagcctatttttctgctaatgtgtgtactatcagtttgttttatggactcacccctaaggagaaaaatgtaaatttacctacatgtggaaatttagtttgggag

SEQ ID NO: 5606 - DNA, 356 bp, Homo sapiens
agtacttctagaattaattaaggcgggctatttgtaccactacactccagcctgggtgacagagtgagactctctcaaacaaagaagaaaagataaacaaacaaaaaaaagaaaattgacatgttaattctaaaattaatatgaaaatttaaaaatttaaaataccaaagtaattttgaaaaataacaaagctggaaactggtcttgcctgactttgagacttgtaaagctataaaaattaagacagtgtgataataatctcaaactatacaaatagttaaatatgacagaacaggtagacccacatatatatagatagctgattttcaagagacatgcaaagttaattcatgggc

SEQ ID NO: 5607 - DNA, 359 bp, Homo sapiens
  misc_feature 194: n = A,T,C or G
agtacttctagaattaattaacgcgggactgctaacaattagtccatcactatcccctcaagtcaaaataatgcccatcagacctcaggggcggggtgactacccaagatagccatctgaacgtgacacacggacccaattttcctgtaacctcaaggtggtgtaaaaggggcaaccatctggtcatttcttcnagttttttttatattttgtataactcctgtgcacataataaaatatgtaagcctatttttctgctaatgtgtgtactatcagtttgttttatggactcacccctaaggagaaaaatgtaaatttacctacatgtgaaatttagtttggagcttggctgcccgtgg

SEQ ID NO: 5608 - DNA, 392 bp, Homo sapiens
  misc_feature 177, 186, 192, 276, 279, 291, 312, 320, 329, 336, 338, 350,352, 386: n = A,T,C or G
ctatagggcgaattggagctccccgcggtggcggccgcttttttttttttttttttttttttttttggaccagagaggccccaaactagcagcctgtcctcctcagtagccccagcatcccttcatcattttgttgcccttctatgggcctagtttaggtctgagaggcatagtttnaaaattttntattgntatttattttattctaaaagataaggtcttgctatgtttcccaggctggtcttgaactcctggcctcaagcaatcctcctgcancangcctcccaaagngctgggattacaggcattganccaccacntttggtcanacaggcntngtttttacaaantntgtgggtgggataaatgctgtccaggcttacttnatcact

SEQ ID NO: 5609 - DNA, 535 bp, Homo sapiens
  misc_feature 44, 184, 284, 363, 439, 499, 521, 527: n = A,T,C or G
ccgcggtggcggccgctttttttttttttttttttttttttttnggaccagagaggccccaaactagcagcctgtcctcctcagtagccccagcatcccttcatcattttgttgcccttctatgggcctagtttaggtctgagaggcatagtttaaaatttttattgttatttatttattctanagataaggtcttgctatgtttcccaggctggtcttgaactcctggcctcaagcaatcctcctgcagcagcctcccaaagtgctgggattacaggcatganccaccacgtctggtcagacaggcatagttttacaaatatgtgggtggataaatgctgtccagtcttacttcatcacttntatcaattgaatgcttttggttggaaataacagaaaatccactaaaagtgacttaaacaaaggaaatgttattatntcatgtaccaggaattctggaggtagactggttcaagggtggattaattaattttagaantactctcgagggggggcccggncccaancttttgtt

SEQ ID NO: 5610 - DNA, 471 bp, Homo sapiens
agtacttctagaattaattaacgcgggtccaggtctctgagtccattctttgggtttggacaggtaggtttgtttctcacaataccaggtataataccagtagaatgtttcatataatttaacaagttcattataaaatgtacttgaaattgcaaagagccacaaaaaaaacccagacaatattgatgaagaaaagacgaagtcagaggacctatactacaagatatcaatataaattataaaggtaccataattaaaactgtggaactggagtaaacatggacaagtaagaccaatgtagttaaaaacaattctgaaaaagacccacgcatatatagatgcttgatttattaccatgttgctactataaacaagggaaaactgtttttttaaaataaattatgctgagtcaggccaggcacagtggctcgcgcctgcaatcccagcactttgggaggccaaggttggctg

SEQ ID NO: 5611 - DNA, 374 bp, Homo sapiens
  misc_feature 25, 35, 43, 56, 72, 152, 155, 187, 242, 268, 279, 289, 290,305, 343, 351, 362: n = A,T,C or G
tttttttttttttttttttttgaanaatcaacacnactctatntttgatcacaaancaaaagtttaagtgtnttacttaaaattttaagacaaaatctggaataattataactaacacaaattttgaggtagaggagagaattctagagatnggngagataaaattttcatctttgataatgagtanacaaaaacactacctttaacaagtgaagaatttaaaaaatttagagaagaggaantcataagtggtttttaaaatttattntacagtatcgnggtaaagatnntccatcagaaaatgngatttgaacagacacttcacaggagatagacaaatgtntcaacctnattagtcaccngacaaatgcaaa

SEQ ID NO: 5612 - DNA, 311 bp, Homo sapiens
  misc_feature 32, 119, 176, 233: n = A,T,C or G
ccgcggtggcggcccgcttttttttttttttnttttttttttttttaaaagcaaaactcccgacagcccgagccccgttcggtgccttttcttttttttttctttaatggagtgaaatntactttgctcaggaagcctgcaaatcacattttcaggccaacgaggcagttttttanaaggggtcgctgaggcaggagtaggaaggctttccactccactcacgcattttcagngtaggcgaatcgtaaaacggagggcaaaacgaaaatgagcggatctgggagtgcaggctgcgcttcgtccccccgcgt

SEQ ID NO: 5613 - DNA, 487 bp, Homo sapiens
  misc_feature 45, 182, 197, 203, 214, 233, 279, 303, 311, 329, 353, 358,370, 372, 386, 394, 410, 428, 436, 463: n = A,T,C or G
actggaatctaacactgtgagtactccccaggatccgtgttcctntctttagcccaggcatgcagttacattacattttccaaccttccttgcagttagctacgatcacgtgactgcattctggccagtggaatgtgtgtggaagtgatgtgggccaattccaggcctggcctataaaatcnccactttttggactntttctncatcccattgnatggagagctccagcctanagggagaaaaagccccaaaggaagagcctgggtcctgaatactggnaactacctgcaaacatacacctgnatgtatgnaatacaataactctatgngtaagcattaatctgggtgtacantgtancagctgctacananctttaaagcttganagttctanctctgcttagttctanttaaagaatggaaacttngaatgcgnctaattgaagccaatacttgagccagntcgttgaggctctaaaaaaaaaaa

SEQ ID NO: 5614 - DNA, 361 bp, Homo sapiens
agtacttctagaattaattaacgcgggttcgtcctaaggaccactgtctgtgctgtgtctttcaaaggtcagaagagattgaacctttgtgtttttattttccctgtgtttgctttttctcatggggaacctggggttgctgctttgaaggtatattcatactggcctttcaaatgccagctcttcaaattactagttaaggctttcaaaatatgttatttaaaaaattatcctctgtattttccatatgcagttataagtaggtttcatggttatgttttattcctcagtttatacatttgattattgtaccaagcagagtacctttgaaatttttttttcatttaaaaaatatgggatc

SEQ ID NO: 5615 - DNA, 557 bp, Homo sapiens
  misc_feature 185, 314, 346, 478, 511: n = A,T,C or G
agggcgaattggagctccccgcggtggcggcccgcttttttttttttttttttttttttttgctgagatcttcttattcaacccatatcaatttgactggacttgtagcattcaaatattaacacagatttcaaattttagaaagatatttgtactagaatacttgcaggtaactctgtggattnattagtatggaaattgtttataaagacacactctgaatttttgtggtcaagtagggtttgtagaatctttgatagcccagcatgttaaaatgtaaatgttctagaaaaataatctttcactttccctgngaaaagaccccgcaaaaagttttttgaggggngtgttaaatatataaattttgaaagacgtaaacaaaatagttaactatctacttatgatatttaatagtttggccaggcatggcaactcatgcctgttgtaatcccagcgtattgggcggctgaggtaggangattgtgtgaacccaggcgtttgagactgcagngagctatggatcctgcctggatgacagggcaagaccccaagtcaaa

SEQ ID NO: 5616 - DNA, 602 bp, Homo sapiens
  misc_feature 407, 492, 529, 582: n = A,T,C or G
ccgcggtggcggccgcttttttttttttttttttttttttgggatgctcaacctataatacccaaaggctctatttcagtagaatttattggtttgctgattatagcagtgacatagttgcattctagagaccttagaaaatgcagaaaatttcaagaaaacatttaaattgtgctcatagtgaaactgagaggtgaccactcttaatattttgtggcataagcattccagtcttttatctttctcaaagtttcacataaactttctcaaaggccattaaatacttttccatagcctgattttttgtgaccacatagtatcctattatattgataataccataatttacctaacccatttttatatatttggattttttccaattcatcattattatgaataatggngtatctcaaggggttattactttgcactgcatttcttatgaaagtattgagtaaaaggaagtaaagccctctcagagtgttttgnaggctggcacattcactccataatgcctagtgtttgntgccaccagtgatatatgaagggcccactgaaatgtacacctttttggttttnctttttaaaataaaaaataa

SEQ ID NO: 5617 - DNA, 386 bp, Homo sapiens
  misc_feature 145: n = A,T,C or G
agtacttctagaattaattaacgcgggactgctaacaattagtccatcactatcccctcaagtcaaaataatgcccatcagacctcaggggcggggtgactacccaagatagccatctgaacgtgacacacggacccaatttttnctgtacctcaaggtggtgtaaaaggggcaaccatctggtcatttcttcgagttttttttatattttgtataactcctgtgcacataataaaatatgtaagcctatttttctgctaatgtgtgtactatcagtttgttttatggactcacccctaaggagaaaaatgtaaatttacctacatgtgaaatttagtttggagcttggctgcccgtgggacctagctaaaactgggtggcctggg

SEQ ID NO: 5618 - DNA, 424 bp, Homo sapiens
agtacttctagaattaattaaggcgggagaaggaaagagaaagtggaattaagggacaagaaagaggaagtggaattaagggacaaggggagaaaagcttaggcgaatcaacggattgcaatctatcatctgctaggaatgaacaagacaacatcaaatgagggagctgtcagctggaccatacaaaaagctaaatgtacacaaaaggttttttttttttccttttaaatctaccatactgcttcagttcatttccaatgcaacaatctactcaacaccaaaaatggtcatatctatcataaatacagaaagtcagtttttaaaacttattttttttaagctacaagtcctcaacactctttgtgtgtgtgggttattatttttttttttttgaaagtggggagtgcttaacttttccccttga

SEQ ID NO: 5619 - DNA, 299 bp, Homo sapiens
  misc_feature 38, 66, 67, 105, 121, 173, 200, 205, 288, 293, 297, 298, 299: n = A,T,C or G
agtacttctagaattaattaacgcgggggaaaactgtnttacttaaacaaaatgtattttaggaanntgcctgtttcaagggtttattactgttttataactaanagacttgggactttantataccgaaaaggtgtcatttcaaatgggggaaaatgaattattcacccaantgatcttggggacaactgggatagccnttcanaaaaaaagtgaagctggaacactataacatgctttaccccacaataaatcacagttaaatgtaataaaaaaaaaaaataaaanacaanaaannn

SEQ ID NO: 5620 - DNA, 417 bp, Homo sapiens
  misc_feature 165: n = A,T,C or G
agtacttctagaattaattaacgcgggcattgtgtgcagaagacctggactggaatctaacactgtgagtactccccaggatccgtgttcctctctttagcccaggcatgcagttacattacattttccaaccttccttgcagttagctacgatcacgtgactgnatttttggccagtggaatgtgtgtggaagtgatgtgggccaattccaggcctggcctataaaaatcccccactttttgttctctttctccatccaccatctgcatggagagctcccagcactagagggagaaaaagccaccagagggaaggagcctgggtccctgaatcactgtgtagactacctgccaaacatacaccctgaattgttatggcaataacaaataaactcctaatgtgttaagccatttaaa

SEQ ID NO: 5621 - DNA, 350 bp, Homo sapiens
  misc_feature 127, 290: n = A,T,C or G
tttttttttttttttttttttttttgaaatatgcccacccatttcaggttgagccacggataaggagggcttagctcatgtctcctgtgggaattgaggcatctcaggaaacagtatagagttggtncagttagaatgagaagaagcctggggaaagaaaccaagagtgagaaatgcgtggctattttgacttagctggagcaaccctctcataacaggctgggaagtggacccgcgttaattaacgcgggggaaattgatgaacaaacaaaggtcatagtaaaagacanacttttggggataaaaacagaaactccaagtactgtatcaacaaatgcaagtacaccaca

SEQ ID NO: 5622 - DNA, 172 bp, Homo sapiens
  misc_feature 27, 28, 38, 40, 81, 161: n = A,T,C or G
ttttttttttttttttttttttttttnnggaggagtananaaatgactaattttttcattggtgagtaatatgctacaaanactcgtaaaatcatatacttttggacctggaaagtagcttaaggaccatctgattaaaattttaagttttattgatgaanaaattaagctc

SEQ ID NO: 5623 - DNA, 355 bp, Homo sapiens
  misc_feature 199: n = A,T,C or G
tttttttttttttttttttttttgggatgctcaacctataatacccaaaggctctatttcagtagaatttattggtttgctgattatagcagtgacatagttgcattctagagaccttagaaaatgcagaaaatttcaagaaaaacatttaaattgtgctcatagtgaaactgagaggtgaccactcttaatattttgnggcataagcattccagtcttttatctttctcaaagtttcacataaactttctcaaaggccattaaatacttttccatagcctgattttttgtgaccacatagtatcctattatattgataataccataatttacctaacccatttttatatatttg

SEQ ID NO: 5624 - DNA, 349 bp, Homo sapiens
  misc_feature 199: n = A,T,C or G
tttttttttttttttttttttttgggatgctcaacctataatacccaaaggctctatttcagtagaatttattggtttgctgattatagcagtgacatagttgcattctagagaccttagaaaatgcagaaaatttcaagaaaaacatttaaattgtgctcatagtgaaactgagaggtgaccactcttaatattttgnggcataagcattccagtcttttatctttctcaaagtttcacataaactttctcaaaggccattaaatacttttccatagcctgattttttgtgaccacatagtatcctattatattgataataccataatttacctaacccatttttata

SEQ ID NO: 5625 - DNA, 356 bp, Homo sapiens
  misc_feature 140, 143, 171, 343, 356: n = A,T,C or G
tttttttttttttttttttttttttgaaatatgcccacccatttcaggttgagccacggataaggagggcttagctcatgtctcctgtgggaattgaggcatctcaggaaacagtatagagttggtacagttagaatganaanaagcctggggaaagaaaccaagagtganaaatgcgtggctattttgacttagctggagcaaccctctcataacaggctgggaagtggacccgcgttaattaacgcgggggaaattgatgaacaaacaaaggtcatagtaaaagacagacttttggggataaaaacagaaactccaagtactgtatcaacaaatgcaagtncaccacaatcagn

SEQ ID NO: 5626 - DNA, 291 bp, Homo sapiens
  misc_feature 45, 239, 274, 277: n = A,T,C or G
ccgcggtggcggccgcttttttttttttttttttttttttttttngaagaatcaacagactctatatttgatcacaaagcaaaagtttaagtgtattacttaaaattttaagacaaaatctggaataattataactaacacaaattttgaggtagaggaagagaattctagagataggggagataaaattttcatctttgataatgagtagacaaaaacactacctttaacaagggaanaatttaaaaaatttagagaagaggaaatcataagnggnttttaaaatttatt

SEQ ID NO: 5627 - DNA, 223 bp, Homo sapiens
  misc_feature 32, 154, 156, 165: n = A,T,C or G
ttttttttttttttttttttttttttttgaanaatcaacagactctatatttgatcacaaagcaaaagtttaagtgtattacttaaaattttaagacaaaatctggaataattataactaacacaaattttgaggtagaggaagagaattctananataggtganataaaattttcatctttgataatgagtagacaaaaacactacctttaacaagtgaaga

SEQ ID NO: 5628 - DNA, 186 bp, Homo sapiens
  misc_feature 1, 20, 25, 26, 27, 29, 33, 130, 158, 168: n = A,T,C or G
nggggggggggggggtaagntaagnnngncccnactttttttttttttttttttttgggaggtttctatttttattcaactaccaagccaaacagccacaattaatggcaacatttcagccaactcaagnaccagcttttttcttaccccccattggnagaaaccgantcaatttaaaaaaaaaca

SEQ ID NO: 5629 - DNA, 352 bp, Homo sapiens
  misc_feature 129, 132, 200, 261, 290, 349: n = A,T,C or G
acttagggcgaattggagctccccgcggtggcggccgcttttttttttttttttttttttttttgagagacaaacatgggccacatttttaagacaaacatggaccacaaccatgctgagagaacttanagngaagtttacatggctatctttcttagtattagaaattttacctgataaacatcaaacatacgaccaancatagcatataaagcagctctacagatatttttcctactgcccaaaatatcatataatgcncatgtaggtcacatgtgagtaggcaaganattctggaacacagaagcaagacaacaggatcacagcaatttcagtatgctctgcttgntat

SEQ ID NO: 5630 - DNA, 338 bp, Homo sapiens
  misc_feature 61, 73, 77, 211, 214, 234, 241: n = A,T,C or G
acttagggcgaattggagctccccgcggtggcggccgcttttttttttttttttttttttnttttttttaaanattnaactctgatttattgggggggtaaagcatgttatagtgttccagcttcactttttttctgaatggctatccagttgtcccaagatcatttgttgaataattcattttcccccatttgaaatgaccactttttcnttnttactaaagtcccaagtctnttagttntaaaacagtaataaacccttgaaacaggcattttcctaaaatacattttgtttaagtaagacagttttcccccgcgttaattaattctagaagtact

SEQ ID NO: 5631 - DNA, 322 bp, Homo sapiens
  misc_feature 31, 98, 135, 315: n = A,T,C or G
tttttttttttttttttttttttttgcaaanaaccgtgccttttattgggcactggctctctttgagcccggagtcccgcccccgccctctctcgaanaactggccagactttttgcaaacgccttgaagggtanaattagcagcgagctcttgaaactgcctctggagatggaactcagcggaattctcgaaaagaagagggacattaaaaagacgggtgcatgcactgatttccaagcgcagtttgtccatgttagtcttgtacatgcttgactccagtcagccaccgtaggccccgccttaattaattctanaagtact

SEQ ID NO: 5632 - DNA, 524 bp, Homo sapiens
  misc_feature 45, 185: n = A,T,C or G
ccgcggtggcggccgcttttttttttttttttttttttttttttngaccagagaggccccaaactagcagcctgtcctcctcagtagccccagcatcccttcatcattttgttgcccttctatgggcctagtttaggtctgagaggcatagttttaaaatttttattgttatttatttattctanagataaggtcttgctatgtttcccaggctggtcttgaactcctggcctcaagcaatcctcctgcagcagcctcccaaagtgctgggattacaggcatgagccaccacgtctggtcagacaggcatagttttacaaatatgtgggtggataaatgctgtccagtcttacttcatcacttctatcaattgaatgcttttggttggaaataacagaaaatccaactaaaagtgacttaaacaaaggaaatgttattatctcatgtaccaggaattctggaggtagactggttcaagggtggattaattaattctagaagtactctcgagggggggcccggta

SEQ ID NO: 5633 - DNA, 370 bp, Homo sapiens
  misc_feature 76, 79, 102, 109, 111, 187, 195, 212, 214, 229, 236, 239,246, 250, 256, 278, 279, 300, 334: n = A,T,C or G
ctatagggcgaattggagctccccgcggtggcggccgcttttttttttttttttttttttttttttttgaggagtntanaaatgactaattttttcattggngagtaanangctacaaagactcgtagaatcatatacttttggacctggaaagtagcttaaggaccatctgattaaaattttaagntttattgntgaaaaaaattaaagcncnaagaaaagggctgtnacttggnccnaagatcnccanaaagtnattaacctatttgaagcttganngaaaacagcccagattctctngctcaaaattttcagctgaaaactacatttgtanaataaaaataactcaccataacattacaacagaata

SEQ ID NO: 5634 - DNA, 395 bp, Homo sapiens
  misc_feature 192, 216, 388: n = A,T,C or G
ccgcggtggcggccgcttttttttttttttttttttttttgggatgctcaacctataatacccaaaggctctatttcagtagaatttattggtttgctgattatagcagtgacatagttgcattctagagaccttagaaaatgcagaaaatttcaagaaaaacatttaaattgtgctcatagtgaaactganaggtgaccactcttaatattttgnggcataagcattccagtcttttatctttctcaaagtttcacataaactttctcaaaggccattaaatacttttccatagcctgattttttgtgaccacatagtatcctattatattgataataccataatttacctaacccatttttatatatttggattttttccaattcntcattat

SEQ ID NO: 5635 - DNA, 447 bp, Homo sapiens
  misc_feature 120, 157, 391, 406, 410: n = A,T,C or G
tttttttttttttttttttttttgggatgctcaacctataatacccaaaggctctatttcagtagaatttattggtttgctgattatagcagtgacatagttgcattctagagaccttanaaaatgcagaaaatttcaagaaaaacatttaaattgngctcatagtgaaactgagaggtgaccactcttaatattttgtggcataagcattccagtcttttatctttctcaaagtttcacataaactttctcaaaggccattaaatacttttccatagcctgattttttgtgaccacatagtatcctattatattgataataccataatttacctaacccatttttatatatttggattttttccaattcatcattattatgaataatggngtatctcagtggttnttantttgcactgcatttcttatgaaagtattgagtaaaag

SEQ ID NO: 5636 - DNA, 414 bp, Homo sapiens
  misc_feature 170, 184, 217, 235, 249, 286, 310, 314, 332, 340: n = A,T,C or G
ttttttttttttttttttttttttttttgaccagagaggccccaaactagcagcctgtcctcctcagtagccccagcatcccttcatcattttgttgcccttctatgggcctagtttaggtctgagaggcatagttttaaaatttttattgttatttatttattctaganataaggtcttgctntgtttcccaggctggtcttgaactcctggcctnaagcaatcctcctgcagnaagcctcccaaagngctgggattacaggcatgagccaccacgtctggttanacaggcatagttttacaaatatgngggnggataaatgctgtccagncttacttnatcacttctatcaattgaatgcttttggttggaaataacagaaaatccaactaaaagtgacttaaacaaaggga

SEQ ID NO: 5637 - DNA, 380 bp, Homo sapiens
  misc_feature 65, 111, 120, 175, 224, 302: n = A,T,C or G
tttttttttttttttttttttttgggatgctcaacctataatacccaaaggctctatttcagtanaatttattggtttgctgattatagcagtgacatagttgcattctanagaccttanaaaatgcagaaaatttcaagaaaaacatttaaattgtgctcatagtgaaactganaggtgaccactcttaatattttgtggcataagcattccagtcttttatntttctcaaagtttcacataaactttctcaaaggccattaaatacttttccatagcctgattttttgtgaccacatagnatcctattatattgataataccataatttacctaacccatttttatatatttggattttttccaattcatcattatta

SEQ ID NO: 5638 - DNA, 371 bp, Homo sapiens
  misc_feature 68, 82, 116, 210, 283, 322, 326, 337, 353, 363: n = A,T,C or G
ccgcggtggcggccgctttttttttttttttttttttttttttttggggattacgtaaataaatctanaaatgagtactacnctacataaagagtaggtttagcaattttatttgngttgccaaataatctccctttactttcacatatcctttcaaagtaaaataaaataatttatttataaccaaaaatttattttttaataccaatnaggaaaaaattcaaattccaacagttttctaaggttcacaaaccttcaggctgagtatcagatattaaaaganaaatgccatcatcctttcttcgtttttctttattgggcncagnctgctttgcanaattgtcatctactgncttacttcgntgggagcc

SEQ ID NO: 5639 - DNA, 474 bp, Homo sapiens
  misc_feature 174, 192, 196, 216, 267, 319, 408, 418: n = A,T,C or G
ccgcggtggcggccgcttttttttttttttttttttttttgggatgctcaacctataatacccaaaggctctatttcagtagaatttattggtttgctgattatagcagtgacatagttgcattctagagaccttagaaaatgcagaaaatttcaagaaaaacatttaaattgngctcatagtgaaactganaggngaccactcttaatattttgnggcataagcattccagtcttttatctttctcaaagtttcacataaactttntcaaaggccattaaatacttttccatagcctgattttttgtgaccacatagnatcctattatattgataataccataatttacctaacccatttttatatatttggattttttccaattcatcattattatgaataatggngtatctcagnggttattactttgcactgcatttcttatgaaagtattgagtaaaaggaagtaaagc

SEQ ID NO: 5640 - DNA, 404 bp, Homo sapiens
  misc_feature 59, 86, 101, 118, 126, 136, 147, 148, 159, 171, 186, 194,203, 211, 228, 235, 238, 251, 262, 263, 268, 271, 277, 282,319, 321, 326, 328, 365, 368, 394: n = A,T,C or G
ggcgaattggagctccccgcggtggcggccgcttttttttttttttttttttttttttngggaccaaaaaggccccaaactagcancctgtcctcctcagnagccccagcatcccttnatcatttngttgcccttntatgggcctannttaggtctganaggcatagtttnaaaatttttattggnattcattnattctaaanataaaggncttgctatgtttcccangctggtnttnaactcctggcctnaagcaatcctnntgcancancctccnaaagngctgggattacaggcatgagccaccacgtttggtcananaggcntntttctacaaatatgtgggtggataaatgctgcccagnctnacttcatcacttctataaatgggaangcttttggtt

SEQ ID NO: 5641 - DNA, 452 bp, Homo sapiens
  misc_feature 1, 42, 46, 165, 173, 210, 272, 356, 369, 418, 431: n = A,T,C or G
nccgcggcggcggccgcttttttttttttttttttttttttnactngaattgttgttatagtgcttccgttatttatttttattttttttattatactttaagttttagggtacatgtgcacaacgtgcaggtttgctacatatgtatacatgtgccatgttggngtgctgcnctcattaactcgtcatttatattaggtatatataccntgttcattgtacccttatcgactttgcagcatgcttatccatctaactattcatctttattngccttcgttttttgagttcccttattcatcctaaaacaaaatataatgcctgactcatagtcagacttcacagtatttttaaangaattacattgcnttgggggaaatataaatagtaatgtccttttatagaggaagtctaaaangaaattcttgggngaattgataatcaaacatttt

SEQ ID NO: 5642 - DNA, 435 bp, Homo sapiens
  misc_feature 137, 217, 268: n = A,T,C or G
ccgcggtggcggccgcttttttttttttttttttttttttgggatgctcaacctataatacccaaaggctctatttcagtagaatttattggtttgctgattatagcagtgacatagttgcattctagagaccttanaaaatgcagaaaatttcaagaaaaacatttaaattgtgctcatagtgaaactggagaggtgaccactcttaatattttgnggcataagcattccagtcttttatctttctcaaagtttcacataaactttntcaaaggccattaaatacttttccatagcctgattttttgtgaccacatagtatcctattatattgataataccataatttacctaacccatttttatatatttggattttttccaattcatcattattatgaataatggtgtatctcagtggttattactttgcac

SEQ ID NO: 5643 - DNA, 440 bp, Homo sapiens
  misc_feature 1, 69, 129, 201, 248, 267, 283, 312, 339, 371, 427, 429: n = A,T,C or G
nctatagggcgaattggagctccccgcggtggcggccgctttttttttttttttttttttttttttttngaggagtagagaaatgactaattttttcattggtgagtaatatgctacaaagactcgtanaatcatatacttttggacctggaaagtagcttaaggaccatctgattaaaattttaagttttattgatgaanaaattaagctcaagaaaggctgttacttgtccaagatcacagaagtnttaactattgaagcttganaaaacagccagttctntgctcaaatttcagctgaaactacattgnataataaaataactcaacataacattncaacagaatagtttaaactctttctagtcagnggcaacttagggtagggaagatccaaagggatttttaaacaagtttgttgaaattntntaagaaaatta

SEQ ID NO: 5644 - DNA, 401 bp, Homo sapiens
  misc_feature 40, 117, 137, 229, 241, 335: n = A,T,C or G
ccgcggtggcggccgctttttttttttttttttttttttngggatgctcaacctataatacccaaaggctctatttcagtagaatttattggtttgctgattatagcagtgacatanttgcattctagagaccttanaaaatgcagaaaatttcaagaaaaacatttaaattgtgctcatagtgaaactgagaggtgaccactcttaatattttgtggcataagcattncagtcttttatntttctcaaagtttcacataaactttctcaaaggccattaaatacttttccatagcctgattttttgtgaccacatagtatcctattatattganaataccataatttacctaacccatttttatatatttggattttttccaattcatcatttattatga

SEQ ID NO: 5645 - DNA, 363 bp, Homo sapiens
  misc_feature 63, 64, 65, 77, 81, 93, 97, 109, 112, 121, 126, 130, 135,136, 141, 152, 168, 240, 282, 284, 287, 294, 334, 346, 357: n = A,T,C or G
tttttttttttttttttttttttgggatgctcaacctataatacccaaaggctctatttcagnnnaatttattggtntggngattatagcagngacntagttgcattgntanagaccttanaaaangcangaaannttcangaaaaacattnaaattgtgctcatagngaaactgaaaggtgaccactcttaatattttgggggcataagcattccagtcttttatctttctcaaagttncacataaactttctcaaaggccattaaatacttttccatagncngantttttgngaccacatagtatcctattatattgataataccataattnacctaacccatntttatatattnggattt

SEQ ID NO: 5646 - DNA, 374 bp, Homo sapiens
  misc_feature 122, 134, 137, 146, 152, 196, 216, 233, 298, 327: n = A,T,C or G
ccgcggtggcggccgcttttttttttttttttttttttttgggatgctcaacctataatacccaaaggctctatttcagtagaatttattggtttgctgattatagcagggacatagttgcnttctagagaccntanaaaatgcanaaaatntcaagaaaaacatttaaattgggctcatagtgaaactgagaggngaccactcttaatattttgnggcataagcattccagncttttatctttctcaaagtttcacataaactttctcaaaggccattaaatacttttccatagccngattttttgtgaccacatagtatcctatnatattgataataccataatttacctaacccatttttatatatttgga

SEQ ID NO: 5647 - DNA, 398 bp, Homo sapiens
  misc_feature 73, 246, 248, 263, 302, 330: n = A,T,C or G
cgactcctatagggcgaattggagctccccgcggtggcggccgcttttttttttttttttttttttttttttngaagaatcaacagactctatatttgatcacaaagcaaaagtttaagtgtattacttaaaattttaagacaaaatctggaataattataactaacacaaattttgaggtagaggaagagaattctagagataggtgagataaaattttcatctttgataatgagtagacaaaancnctacctttaacaagngaagaatttaaaaaatttagagaagaggaaatcataagnggtttttaaaatttattatacatatcgnggtaaagataatccaacagaaaatgagatttgaacagacacttcacaggagatagacaaatgtctcaa

SEQ ID NO: 5648 - DNA, 608 bp, Homo sapiens
  misc_feature 120: n = A,T,C or G
tttttttttttttttttttttttgggatgctcaacctataatacccaaaggctctatttcagtagaatttattggtttgctgattatagcagtgacatagttgcattctagagaccttanaaaatgcagaaaatttcaagaaaaacatttaaattgtgctcatagtgaaactgagaggtgaccactcttaatattttgtggcataagcattccagtcttttatctttctcaaagtttcacataaactttctcaaaggccattaaatacttttccatagcctgattttttgtgaccacatagtatcctattatattgataataccataatttacctaacccatttttatatatttggattttttccaattcatcattattatgaataatggtgtatctcagtggttattactttgcactgcatttcttatgaaagtattgagtaaaaggaagtaaagccctctcagagtgttttgtaggctgtcacatttcactccataatgtcctagtgtttgttgccaccagtgatatatgaaggtacccactgaaatgtcacacctttttggttttcctttttaaaataaaaaataaaaaagacatttaaccatat

SEQ ID NO: 5649 - DNA, 530 bp, Homo sapiens
  misc_feature 1, 49, 131, 135, 140, 150, 154, 165, 173, 181, 183, 192,196, 197, 265, 276, 278, 281, 283, 289, 290, 295, 305, 324,327, 333, 339, 343, 354, 357, 361, 367, 370, 372, 374, 378,380, 382, 385, 389, 390, 408, 412, 417, 423, 427, 429: n = A,T,C or G
  misc_feature 432, 433, 436, 439, 442, 454, 461, 465, 479, 490, 503, 505,518: n = A,T,C or G
ncgcttttttttttttttttttttttttggtcttttctgtattttttcntttttaaatcaactaaaacaatttgatgcttaaaataaaagacaggaaatatttcctgatgagactttagtcgagaatatangatntattnctgatcccgngggngccggggtagnatcaaggngggccgtngnggtagtganaaanngaattgttgccccaccaagttggggtttccgccgaaggggtatccccgtttttccttcaagaccttcnaggggaagggngnagncnccttgnngcttngctccttggnaaccccccgtgggccttanggnggcacnccccangtangtcttgggggngcnttcnccaacntangngncccntngnacnccanngtgggtccccaggggtgntaangtaanagtaanctgngnganntgntantgnaagtggcaaatngtaaagnaaangggggctggggggnggcctttgggnccggggtctttgngngggggcccttttnggttaaaatttt

SEQ ID NO: 5650 - DNA, 414 bp, Homo sapiens
  misc_feature 4, 83, 106, 132, 174, 204, 218, 251, 284, 286, 362, 366, 375: n = A,T,C or G
actnctatagggcgaattggagctccccgcggtggcggccgctttttttttttttttttttttttttttttggaggagtaganaaatgactaattttttcattggngagtaatatgctacaaagactcgtanaatcatatacttttggacctggaaagtagcttaaggaccatntgattaaaattttaagttttattgatgaanaaattaagctcaanaaaggctgttacttgtccaagatcacagaagtnttaactattgaagcttgaaaaaacagccagttntntgctcaaatttcagctgaaactacattgtataataaaataactcaacataacattacaacagaatagtttaaactntttntagtcaggnggcaacttaggggtagggaagaatccaaaggggattttt

SEQ ID NO: 5651 - DNA, 330 bp, Homo sapiens
  misc_feature 120, 144, 226: n = A,T,C or G
ccgcggtggcggccgcttttttttttttttttttttttttttgaaatatgcccacccatttcaggttgagccacggataaggagggcttagctcatgtctcctgtgggaattgaggcatntcaggaaacagtatagagttggtncagttagaatgagaagaagcctggggaaagaaaccaagagtgagaaatgcgtggctattttgacttagctggagcaaccctntcataacaggctgggaagtggacccgcgttaattaacgcgggggaaattgatgaacaaacaaaggtcatagtaaaagacagacttttggggataaaaacagaaa

SEQ ID NO: 5652 - DNA, 432 bp, Homo sapiens
  misc_feature 59, 62, 69, 124, 151, 159, 188, 210, 266, 267, 322, 384, 387: n = A,T,C or G
cgaattggagctccccgcggtggcggccgcttttttttttttttttttttttttgggangcncaacctntaatacccaaaggctctatttcagtagaatttattggtttgctgattatagcagngacatagttgcattctagagaccttanaaaatgcngaaaatttcaagaaaaacatttaaattgngctcatagtgaaactgagaggngaccactcttaatattttggggcataagcattccagtcttttatctttctcaaagnntcacataaactttctcaaaggccattaaatacttttccatagcctgattttttgngaccacatagtatcctattatattgataatacccgtggtttaccctaacccattttttatanatntgggaattttttgccaatttcatcattattatggaaataaatggg

SEQ ID NO: 5653 - DNA, 424 bp, Homo sapiens
  misc_feature 169, 295: n = A,T,C or G
ccgcggtggcggccgcttttttttttttttttttttttttttttggaccagagaggccccaaactagcagcctgtcctcctcagtagccccagcatcccttcatcattttgttgcccttctatgggcctagtttaggtctgagaggcatagttttaaaatttttattgntatttatttattctagagataaggtcttgctatgtttcccaggctggtcttgaactcctggcctcaagcaatcctcctgcagcagcctcccaaagtgctgggattacaggcatgagccaccacgtntggtcagacaggcatagttttacaaatatgtgggtggataaatgctgtccaagtcttacttcatcacttctatcaattgaatgcttttggttggaaataacagaaaatccaactaaaagtgacttaaac

SEQ ID NO: 5654 - DNA, 484 bp, Homo sapiens
  misc_feature 34, 35, 36, 50, 59, 103, 383, 418, 437: n = A,T,C or G
gtggcggcccgctttttttttttttttttttttnnngggagagacaaacntgggccacntttttaagacaaacatggaccacaaccatgctgagagaacttanagtgaagtttacatggctatctttcttagtattagaaattttacctgataaacatcaaacatacgaccaacatagcatataaagcagctctacagatattttcctactgcccaaaatatcatataatgcacatgtaggtcacatgtgagtaggcaagagattctggaacacagaagcaagacaacaggatcacagcaatttcagtatgctctgcttgttataggaaatccccagaacattctccaattactgaacaaaaaaagcaataaaactcagattngtctgcctggggagaaataagcacaatttgaaagngaatagcaaaacaaagctntctggtgaaaagacattcttacttggaaggagttaaaattttgcccc

SEQ ID NO: 5655 - DNA, 307 bp, Homo sapiens
  misc_feature 38, 40, 41, 42: n = A,T,C or G
ccgcggtggcggccgctttttttttttttttttttttntnnntttacatttaactctgatttattgtggggtaaagcatgttatagtgttccagcttcactttttttctgaatggctatccagttgtcccaagatcatttgtgaataattcattttcccccatttgaaatgacaccttttcgtatactaaagtcccaagtctcttagttataaaacagtaataaacccttgaaacaggcattttcctaaaatacattttgtttaagtaagacagttttcccccgcgttaattaattctagaagtact

SEQ ID NO: 5656 - DNA, 640 bp, Homo sapiens
  misc_feature 27, 415, 549, 560, 565, 578, 604, 609, 625: n = A,T,C or G
cgctttttttttttttttttttttttnggggggaagatgaagaaatttcactcaagtattttgttactttaagattcaatgctggacactagaccagctataacattttcagatagagtgacttcatgcgtgaaatgatcacatacaatgaagaggttttaaaaaatacagatgacataacttgttcagttgaagaaaattaaaatactgatataaactaaatcattctcctcttcattttagggggatttttctctgcaattgtactgatttatgactagaaagctgaagactgatttgagcctctttagcaatactctatttcaccatttatcttccaaagaattatggctattttatttcttccaatgaagctggaaaattataatatgccagcagatcagtagaaaatgtnaaaaatattagtagttaccctttttagatccaacttacctgtagtggaaatagccagcaatgcattctctatttggagggccaaaacataaaaaccctggcttcataaacatagaggtatttaaaaaatctcanaagtttaatgnggtanacatttgcctaanaatttctgggaggtctcaacactcangtctngatttttaaaaaaccngaaaaaaaattttys

SEQ ID NO: 5657 - DNA, 395 bp, Homo sapiens
  misc_feature 70, 72, 87, 104, 107, 113, 153, 228, 298, 361, 373, 384: n = A,T,C or G
acttagggcgaattggagctccccgcggtggcggccgcttttttttttttttttttttttttttttttananggagtcttactccgncacccaggctggagtgnggnggtgtnatctcagctcacaacaacctgacctcaggtgattcacccncctttgtctcccaaagtgctgggattacaggcgtgagccactgcgcccggcgtctttgaattttttaaactgaantttaattgcctttgagtttgatcattcactatttgccatttgtatttcttttgttaattatgatgctcangctctaatttcataagtggaaatttaatggattaacatataacacccactatcaccctgcctnaattaattctanaagtactcttnagggggggccc

SEQ ID NO: 5658 - DNA, 430 bp, Homo sapiens
  misc_feature 24, 25, 85, 132, 215, 229, 232, 239, 285, 345, 357, 409: n = A,T,C or G
acttcttagggcgaattggagctnnccgcggtggcggccgctttttttttttttttttttttttttttttgggggattccatttntatgaaatgtccagaacagggaaaacctattttagacaacagagacncaaagtcgatcagcagttgccaggggaggaggaagacgggaggggaaatgattgcttcacggggtgatgacagaatgttccanaacgtgacagaggnggngcctacncaactttctggatgtactaaatgccgctgattgttcactttcaagngattgatttttaggttatttgaatttcatctcaattaaaaaacccaaacacgcaaactgntcccgccagctnagccccgagcagacggcgcagcccgtggaggatgctgagccacccaggcttntccccgccttaattaattcta

SEQ ID NO: 5659 - DNA, 253 bp, Homo sapiens
  misc_feature 11, 16, 22, 26, 27, 29, 31, 44, 45, 65, 67, 72, 73, 76, 81,82, 87, 99, 125, 133, 138, 142, 170, 171, 188, 193, 208,211, 225, 231: n = A,T,C or G
gagccacgganaaggngggctnagcnnangnctccggggggaanngaggcatcccaggaaacagnanagagnnggnacagnnagaangagaagaagccnggggaaagaaaccaagagggagaaangcggggcnatttngacnaagctggagcaaccctctcaaaacaggnngggaaggggacccgcgnaaaanaacgcgggggaaatngangaacaaacaaaggncaaagnaaaagacagactttgggggaaa

SEQ ID NO: 5660 - DNA, 429 bp, Homo sapiens
  misc_feature 6, 115, 117, 128, 143, 145, 148, 156, 157, 159, 161, 172,185, 187, 197, 200, 202, 205, 208, 209, 212, 213, 219, 224,229, 230, 232, 239, 242, 244, 247, 248, 250, 253, 255, 258,260, 264, 270, 276, 295, 300, 302, 307, 308, 310, 311: n = A,T,C or G
  misc_feature 320, 321, 327, 328, 332, 334, 335, 346, 349, 355, 358, 361,370, 373, 382, 389, 390, 393, 395, 401, 404, 405, 412, 413,414, 422: n = A,T,C or G
aattgnagctccccgcggtggcggccgcttttttttttttttttttttttttttttttttttttttttttttttttttttttttttttttttttttttttttttttttttttggncnaaaaaaaaaanttaaaaggaaaaaancnaanaaaaattnngnangggaaaaaccnaacaagggggccncncaaaaaaaanctnanttnggnnagnnaaaaanccccnaaganncncccaggnaananctnnanggncnccncnaaanttaaanaagggnccccaggaaaaaaaaaatnccaananccccnngnnaaaaaaatnnaaaaanncccncnngggggggcccngancccaanttntgnccccttaanggnggggaaaangcccccnnggncnaaaaanggnnaaagctnnnccccgggnaaaaaaa

SEQ ID NO: 5661 - DNA, 303 bp, Homo sapiens
  misc_feature 33, 35, 44, 46, 52, 72, 84, 94, 106, 128, 136, 139, 146,149, 180, 182, 197, 207, 222, 224, 233, 238, 259, 265, 268,280, 287: n = A,T,C or G
ggccgctttttttttttttttttttttgttttnanaaaggggcntnaagaanataattccttggaaggaaanatcattttatcnaagcaacagnaacatctgaaanacccttttttccccatggagcnacatctcngtnccagatnatnaagggtaaaaccagcaatccaatcatttttnancctggaaaacaaagnctaatcaaanatttccctgggggananaattggaanggaanaatttcataaacattaaagcnccccgngtnaataaattcaanaagtacnctcgagggggggcccg

SEQ ID NO: 5662 - DNA, 279 bp, Homo sapiens
  misc_feature 12, 115, 139, 146, 152, 157, 162, 166, 179, 208, 213, 224,250, 254: n = A,T,C or G
ctacttagggcnattggagctccccgcggtggcggccgctttttttttttttttttttttttttggagacggggttttgctgtgttggccgggctggtctccagctcctaaccgngagtgatccgccagcctcggcctnccgaggngccggnattgnagacngacnatcgttcactcantgctcaatggtgcccaggctggagtgcantggcnatgatcttggnctcgctacaaccttgcaccttcaatncganctgccttggccccccaaagtgccga

SEQ ID NO: 5663 - DNA, 307 bp, Homo sapiens
  misc_feature 30, 38, 39, 44, 58, 66, 80, 90, 98, 106, 112, 143, 152, 169,200, 210, 245, 289: n = A,T,C or G
agtacttctagaattaattaacgcgggttntcatacannaagtnctcaaatttttctntccatctntccacctgcttttngaatattggngcattttncaataagntcttcncttcatggtccaagataaacgtaaacaattnccaaggttncatgcatcctcatcttnaccccacactttaaaactatcatttctagtncacccctganatttgatctgattggactagcgttgatcaagtgtncaccccttgaacccatctctgtggccaggaaaaaggaacgatangctaggtcatatactcca

SEQ ID NO: 5664 - DNA, 209 bp, Homo sapiens
  misc_feature 88, 90, 91, 92, 93, 96, 99, 100, 104, 110, 126, 132, 134,138, 141, 142, 145, 164, 166, 167, 172: n = A,T,C or G
actacttagggcgaattggagctccccgcggtggcggccgctttttttttttttttttttttttttttttttggggcccgggctggantnnnntgnaannaatntgactnactgcaacctgcaccncccatntncaanctnntangaagcctcaccctcctgantnnctggnattacaagcacccgcgttaattaattctagaagtact

SEQ ID NO: 5665 - DNA, 436 bp, Homo sapiens
  misc_feature 124, 134, 211, 216, 232, 260, 373, 386: n = A,T,C or G
tccccgcggtggcggccgcttttttttttttttttttttttttttttttgaggaaggcacctacaaaacgaaagtgcctagggcttacaaaagtcatatgtagcctttacaaatattagctcantcattttcanaaaggtttttccaattatcattttagagatgaaggaaactgaagctcagggaggctaggaaacttatccaaagcctnttaanaggctatgttagtcanactgggctaacagctgtaacaaccccanaatttaaatggcttaacacattaggagtttatttgttattgccataacaattcagggtgtatgtttggcaggtaagtctacacagtgattcagggacccaggctccttccctntggtggctttttntccctctagtgctgggagctctccatgcaaatggtggatggaaaaagaaa

SEQ ID NO: 5666 - DNA, 410 bp, Homo sapiens
  misc_feature 1, 2, 105, 123, 132, 141, 227, 258, 259, 263, 335, 348, 381,400: n = A,T,C or G
nncgctttttttttttttttttttttttttgggattctgttccccttctgataatacagtataagaatataacaaatagatatttaattccccttaaatatgtgnggatattttctgaatggnctaagcatntcttactgngaagtcatttctgcaaatgaacaaactcattcattatgaagtaattcttactagtgtctctctgaaaatgacttttttttttttanctttaatctcttacctccaaattccaaaggnncatnttacagctcttatgaatgtcctgaagcatgctaggggagttattttgctgccttaacccttgggattagaanctttgtatagtantatatttaatgaatgtttatagggcttatgatnaaacttggtaaataagctntaaaaatgaa

SEQ ID NO: 5667 - DNA, 413 bp, Homo sapiens
  misc_feature 10, 13, 24, 72: n = A,T,C or G
ctaaaggganttnaagctggggtnccgggccccccctcgagagtacttctagaattaattaaggcgggggcncaggactgtacttttggtagcggtgcggggccgcccgcggactttagccctgcatagagatgggtagaccctaatttggaacagccattgactgggcacaggccagcactttgggaggccgagaggccgaggcaggaggatcgcttgaggccaggagtgccagactgcgagactagcctgggtaacatagtgagaccctctcttcaaaaaaaaaaaaaaaaaaaaaaaagcctgtcacggtggcctgcgcctgtaccccagctactcgagaaggatcgcctgagcccagtgaagctgcagcgagctgtgaggatgccaccgcactccggcctgggctaaaa

SEQ ID NO: 5668 - DNA, 270 bp, Homo sapiens
  misc_feature 32, 33, 34, 36, 37, 39, 49, 51, 55, 79, 104, 131, 168, 190,210, 215: n = A,T,C or G
cggcggccgctttttttttttttttttttttnnngnnangcccaacctntnatanccaaaggctctatttcagtagaanttattggtttgctgattatagcagngacatagttgcattctagagaccttanaaaatgcagaaaatttcaagaaaaacatttaaattgngctcatagtgaaactgagaggngaccactcttaatattttgnggcanaagcattccagtcttttatctttctcaaagtttcacataaactttctcaaaggcc

SEQ ID NO: 5669 - DNA, 223 bp, Homo sapiens
  misc_feature 14, 67, 77, 154, 162, 175, 185, 195, 219, 223: n = A,T,C or G
ttagggcgaattgnagctccccgcggtggcggccgcttttttttttttttttttttttttttttganatggagtttnactcttgtttgcccaggctagagtgcaatggcaggatctcagctcactgcaacctctgcctcccgggttcaagtgantctcctgntttatcctcccgnggtagctggnattacaggcncccgccttaattaattctaaaagnactn

SEQ ID NO: 5670 - DNA, 362 bp, Homo sapiens
  misc_feature 34, 111, 138, 156, 166, 255, 257, 339, 342, 345: n = A,T,C or G
taattaacgcggggcacttgatgaagaagacgcngccatcccggcacaccccgtaggaccaatgctcaggccaaaggtgtccaaactatacagacccacagaatctaacancagatgtctcaatattcctcgtcctanaactctcagaggatccanaactacagcncggtcctcgctgggctgttccttgtccatgtgcctggtcatggtgctggggaacctgctcatcatcctggccgtcagcccttgactccnanctttcacacccccatgtacttcttccttctccaaccttgtccttgcctgaccatggttttcaacctccaaccatggttcccnaangantgatttggtgggacatt

SEQ ID NO: 5671 - DNA, 399 bp, Homo sapiens
  misc_feature 9, 61, 146, 172, 189, 222, 227, 243, 329, 356: n = A,T,C or G
cggcgaatnttctccccgcgccggcggccgctttttttttttttttttttttttttttttngaggaaggttcctacaaaacgaaagtgcctagggcttacaaaagtcatatgtagcctttacaaatattagctcagtcattttcanaaaggtttttccaattatcattttanagatgaggaaactgaanctcagggaggctaggaaacttatccaaagcctnttaanaggctatgttagtcanactgggctaacagctgtaacaaccccaaaatttaaatggcttaacacattaggagtttatttgttattgccataacaattcagggngtatgtttggcaggtagtctacacagngattcaggggacccaggctccttccctctgggggctttttctc

SEQ ID NO: 5672 - DNA, 328 bp, Homo sapiens
  misc_feature 42, 48, 66, 288, 307: n = A,T,C or G
agtacttctagaattaattaacgcgggcattgtgtgcagaanacctgnactggaatctaacactgngagtactccccaggatccgtgttcctctctttagcccaggcatgcagttacattacattttccaaccttccttgcagttagctacgatcacgtgactgcattctggccagtggaatgtgtgtggaagtgatgtgggccaattccaggcctggcctataaaaatcccccactttttgttctctttctccatccaccatctgcatggagagctcccagcactanagggagaaaaagccaccanagggaaggagcctgggtccct

SEQ ID NO: 5673 - DNA, 437 bp, Homo sapiens
  misc_feature 72, 99, 144, 154: n = A,T,C or G
cactacttagggcgaattggagctccccgcggtggcggccgctttttttttttttttttttttttttttttnaccgggtgtgtggctgggggtgcaaanaggctgtgatgttgctgggcagtgtgggtctgggctaggggtctnttgccagctntgacacatccacccctaggcggaggcccacagccggaaccatggggtcaggctccaccggggaggctgatggatgccctggctcttcctgggcccaactcgaccctgcttgctcccaaggggcttctcacctctgtgctaggggtccacaacactggctttcctgctcccgatactgcctggctgcttggatggtgttttctggaggaagtcaaaaaatcctctgcaccaaaaaaatcaccggtctttcaggttggcaaacaaggaaatgtcattttgctttt

SEQ ID NO: 5674 - DNA, 439 bp, Homo sapiens
  misc_feature 68, 234, 253, 261, 265, 378: n = A,T,C or G
tagggcgaattggatttccccgcggtggcggccgcttttttttttttttttttttttttttttttganatggagtttcgctctgttgcccaggctggaatgcagtaggagcgatctcggcttactgcaacctctgcctcccaggttcaagcaattctcctgcctcagccttccaagtagctgggattacaggcgtgtaccaccacagctggttaattttttgtatttttagtanagactggggtttcaccatnttggccangctnggtctcgaactcctgacctcaagtgatttccccgccttggcctcccaaagtgctggggattacacgcattgagccaccacgccctgccagaggctctgagaattcttatagcnaaagttaattttattgacataagcttataactaatggaggtcaaaactacaaaattaaaaa

SEQ ID NO: 5675 - DNA, 432 bp, Homo sapiens
  misc_feature 16: n = A,T,C or G
tagggcgaattggagntccccgcggtggcggccgctttttttttttttttgtgtttcaataaaactttatttacaaaaacaggtagtgggctggattggccaacttctgatgaatagcatttctttataaattctgaacatgagtactttaaaaaaatgtagcaaatatcttctactattatgtggttcatcttttccacctagtgtatcatatttttgatgaacagaatttcctgttttgatttttttaaaatagtaaacaagatttgctgatccttaatacctgcctgggtttatttcccatcttgtcttcagtatgatctaggccttctggaagttgaatgggggagcgtctaacaaatagctacctaatacctagacagatgacatcatctccgtgtgcaggtagggacattagatggtttctctagg

SEQ ID NO: 5676 - DNA, 389 bp, Homo sapiens
agtacttctagaattaattaacgcgggtccaggtctctgagtccattctttgggtttggacaggtaggtttgtttctcacaataccaggtataataccagtagaatgtttcatataatttaacaagttcattataaaatgtacttgaaattgcaaagagccacaaaaaaaacccagacaatattgatgaagaaaagacgaagtcagaggacctatactacaagatatcaatataaattataaaggtaccataattaaaactgtggaactggagtaaacatggacaagtagaccaatgtagttaaaaacaattctgaaaaagacccacgcatatatagatgcttgatttattacccatgttgctacctataaacaaggggaaaactggtt

SEQ ID NO: 5677 - DNA, 374 bp, Homo sapiens
  misc_feature 290, 329, 349: n = A,T,C or G
agtacttctagaattaattaaggcgggcgcctgtaatctcagctactttggaggccgaggcaggagaattgctagaacccaggaggcagaggttgcagtgagctgagatcgcgccactgcactccagcctgggagacagaatgagactccatctccaaaaaaaaaagaaagaaagaaagaaagaaagaaagaaggctctattttgatactgggagcctaaactgaatgattctggagaaattcacagatggggctgaggctcaccttcatgacagctgtatcaaaggccnaaatttctaaggctcaggaaatcactacaataagcctancaacagcaatgtgatacctntccaagcattttgcaaccttaacat

SEQ ID NO: 5678 - DNA, 411 bp, Homo sapiens
  misc_feature 88, 121, 162, 167, 176, 186, 188, 207, 238: n = A,T,C or G
ttagggcgaattggagctccccgcggtggcggccgcttttttttttttttttttttttttttttgggctgaatcaggaaacatttatncttccccataaatttaaatggaggtgaaactgngaatatgaagcaaagaacatttatctcacaaggtaactctnaattnttttaatanctgaaaccananacattgtacaacacttacngcattcacacaacactattttcaaaataggnttttgacccctaaaaatgaaaattcttagcgacaagctttagatatgaaacttagcccagcagggtattcactttgtcacaaaaagcaactaccgacaaatagtttttccctctccccgacacaaaaactgaaattacagacttttaaaagcagaaaaaattttctccaaaat

SEQ ID NO: 5679 - DNA, 327 bp, Homo sapiens
  misc_feature 79, 99, 102, 106, 111, 121, 139, 143, 148, 177, 181, 184,189, 192, 194, 195, 202, 214, 216, 222, 225, 226, 232, 242,251, 252, 273, 298, 302, 307, 314, 320: n = A,T,C or G
ctatagggcgaattggagctccccgcggtggcggccgcttttttttttttttttttttttttttttttttccttttttnacaaaagtttattcttaaangtncaanagctncaaaacaacncttaattccagctatacntggnaaaanatgttatggcagggaataagagaggtttnaatncanaatgnaantnnaaggggncaccaattattntnagggcncannggaaanagctttactnttttgccannatttttttaaattccacctgnggccaagggccccttcccccgcctnaatnaatantagaagnactttngaggggg

SEQ ID NO: 5680 - DNA, 327 bp, Homo sapiens
  misc_feature 120, 149, 159, 217, 320: n = A,T,C or G
agtacttctagaattaattaacgcgggggagggaggtcacggcgtaaaggtgcagctgccgccaccgccgcttctgcaaggtctcagggacgggctgcagccatgtcctattgccggcanggaagggaaggatcgaatcatattttgtnaccaaagaanatcatgaaactccaagcagttgcataattggtggctgatgaccccaacgatccatacnaggagcatggattgatactgccaaatggaaacattaactggaactgcccatgccttggggggaatggccagcggtccctgttggagaacaagtttaaagtcanccctttt

SEQ ID NO: 5681 - DNA, 228 bp, Homo sapiens
  misc_feature 123, 176: n = A,T,C or G
ctatagggcgaattggagctccccgcggtggcggccgctttttttttttttttttttttttttttggggcgacctcggagcataacccaacctccgagcagtacatgctaagactttaccagncaaagcgaactactatactcaattgatccaataacttgaccaacggaacaagntaccctaggggaaacagcccaatcctattctaagagtccatatcaacaatag

SEQ ID NO: 5682 - DNA, 399 bp, Homo sapiens
  misc_feature 67, 88, 106, 109, 128, 131, 135, 142, 143, 148, 150, 153,164, 173, 181, 194, 201, 210, 218, 227, 230, 233, 234, 239,242, 259, 260, 265, 285, 294, 300, 303, 309, 311, 314, 324,328, 346, 355, 358, 364, 367, 398: n = A,T,C or G
ccccgcggtggcggccgcttttttttttttttttttttttttttttttttttttttttttttttttngggttctcttttcccaaaaanacttccatttaaaatagncanatgaaagccaatcaccaanaangganattgacnnacatncntangaaaaaagctnccgtacccntcccaccnccccaaagggggnggatttnaggttttgnttattttnttttaaacnaanggnnaaaanacngacccccccggatgacnncccanagggaagggatttaagggcngcccccatnaatttnttnaggccncnacngctacttccncctnttgtatctggatttaaanttaaaggtnccnccccgnctntgggggggcaagcccaacttggtttcctttnt

SEQ ID NO: 5683 - DNA, 198 bp, Homo sapiens
  misc_feature 33, 52, 55, 122, 145, 157, 166: n = A,T,C or G
agtacttctagaattaattaacgcgggggtcanaaggctgggcaaccatggngtnctatttcgatgaacacgactgcgagccgtcggaccctgagcaggagactgcgaaccatacatgctgnttggaagcttcgcaaggggtcancttttttcaatnagggaatgngaactttttgaaaattacttttgggggggttt

SEQ ID NO: 5684 - DNA, 161 bp, Homo sapiens
  misc_feature 73, 102, 104, 115: n = A,T,C or G
ttagggcgaattggagctccccgcggtggcggccgctttttttttttttttttttttttttttttttaggatngcaataaacagcttttattcttttatcananacacgatctanctttttagcccaggccggagtgcgggggcatcctcacagctcgctg

SEQ ID NO: 5685 - DNA, 554 bp, Homo sapiens
  misc_feature 439, 497, 526, 541: n = A,T,C or G
ccgcggtggcggcccgcttttttttttttttttttttttttttttttgaggaaggcacctacaaaacgaaagtgcctagggcttacaaaagtcatatgtagcctttacaaatattagctcagtcattttcagaaaggtttttccaattatcattttagagatgaggaaactgaagctcagggaggctaggaaacttatccaaagcctcttaagaggctatgttagtcagactgggctaacagctgtaacaaccccagaatttaaatggcttaacacattaggagtttatttgttattgccataacaattcagggtgtatgtttggcaggtagtctacacagtgattcagggacccaggctccttccctctggtggctttttctccctctagtgctgggagctctccatgcaaatggtggatggagaaagagaacaaaangtgggggatttttataggccagggcctggaattggcccacatcacttcacacacattncactggccagaatgcagtcacgtgaacgnagctactgcaaaggnaaggttggaaaat

SEQ ID NO: 5686 - DNA, 300 bp, Homo sapiens
  misc_feature 75, 102, 139, 236, 258, 282, 288: n = A,T,C or G
gcggcccgcttttttttttttttttttttttttgggatgctcaacctataatacccaaaggctctatttcagtanaatttattggtttgctgattatagcancgacatagttgcattctagagaccttagaaaatgcanaaaatttcaagaaaaacatttaaattgtgctcatagtgaaactgagaggtgaccactcttaatattttgtggcataagcattccagtcttttatcantctcaaagtttcacataaactntctcaaaggccattaaatactctnccatancctgattttttg

SEQ ID NO: 5687 - DNA, 208 bp, Homo sapiens
  misc_feature 80, 104, 143, 186, 190: n = A,T,C or G
acttagggcgaattggagctccccgcggtggcggccgctttttttttttttttttttttttttttttttaggattgcaanaaacagcttttattcttttatcanagacacgatctagctttttagcccaggccggagtgcggnggcatcctcacagctcgctgcagcttcactgggctcaggcgancctntcgagtagctggggtaca

SEQ ID NO: 5688 - DNA, 691 bp, Homo sapiens
  misc_feature 447, 457, 495, 508, 511, 512, 516, 536, 573, 581, 586, 590,595, 598, 604, 615, 622, 629, 635, 636, 638, 661, 662, 667,668, 670, 678, 687: n = A,T,C or G
ggaagatggaatctcactctgtcacccaggctggagtgcagtggcatgatctcagctcactggaagctctgcctcccaggttcacaccattctcctgcctcagcctctcaagcagctgggactacaggcgccagccgccatgcctggctaattttttttggtattttttagtacagatggggtttcaccgtgttagccaggatggtctcgatctcctgacctcgtgatctgcccacttcagcctcccaaagtgctgggattacaggcatgagccaccatgcccggccgatttcacctttcaatggcaattactataagacaggaaagttatttatttttatatatttacctaattttaagttaccttatacaaccctcattaatagtctgttagaactagaatttaaactctatgtgaatatggaccttatttaaacaatgtatccntagcacctanacaatgcctaacctgtcacattaacttaataaatattnaattatatttttnggnnattnattttttttgaacagaactnttgcttttgcacccaagctggaatgtaatgggtgccnacctggtnactgnaatntctgnctnccaagntcaagcagttnttttgtntaacttnccaaannantggggattaaaacacccccaccnncccanntnaattttgnattttaagnaaaa

SEQ ID NO: 5689 - DNA, 257 bp, Homo sapiens
  misc_feature 16, 153, 220: n = A,T,C or G
aactctgatttattgnggggtaaagcatgttatagtgttccagcttcactttttttctgaatggctatccagttgtcccaagatcatttgttgaataattcattttcccccatttgaaatgacaccttttcgtatactaaagtcccaagtctnttagttataaaacagtaataaacccttgaaacaggcattttcctaaaatacattttgtttaagtaanacagttttcccccgcgttaattaattctagaagtact

SEQ ID NO: 5690 - DNA, 389 bp, Homo sapiens
  misc_feature 179: n = A,T,C or G
agtacttctagaattaattaacgcgggtgatcaagtacatcaaagacaaataccctaatctccaagtcattggaggcaatgtggtcactgctgcccaggccaagaacctcattgatgcaggtgtggatgccctgcgggttggggcatggggaaagtgggctccatcttgcattacgcanggaagttgcttggccctgtgggccggccccaagcaacaagcagttgtacaaggtgtcagagtatgcacggcgctttggtgttccggtcattgctgatggaggaatccaaaatgtgggtcatattggcgaaagccttggcccttgggggcctccacagtcattgattgggctctctccttggcctgcccaccacctgagggccccctgggt

SEQ ID NO: 5691 - DNA, 441 bp, Homo sapiens
  misc_feature 5, 281, 354, 395, 423: n = A,T,C or G
gactnctatagggcgaattggagctccccgcggtggcggccgctttttttttttttttttgagacagagtctcactctgtcgcccaggctggagagcagtggcgtgatctcagctcactgcatgctccgcctcctgggttcacgccattctcccacttcagtctcctgagtagctgggattacaggcgtccaccgccacacctggctaattttgtttttgtatttttagtagagacagggtttcaccgtgttagccaggatggtctcgatctcctgacttnatgatccgcctgcatcagcctcccaaagtgctgcgattacaggcatgagccaccgtgctcggccagctctctnttaaatgtagcagctggaaacattctttttgtttgattttntgctggtcccgctgttaattaattctangaagtactctcgaggggg

SEQ ID NO: 5692 - DNA, 378 bp, Homo sapiens
  misc_feature 258, 263, 267, 274, 276, 289, 295, 312, 325, 350, 364, 367: n = A,T,C or G
agtacttctagaattaattaatggcgggttaactgcttgagtccaggaattcgagaccagtctagtctaggcaacacagcaaaaccccatctctataaaaataagccaggtatggtggcaccgtgcctgtaattcccactacttgggaggctgagctgagagggtcgcctgagcctgggaggtcaagaatgcgtaagccgtgattgtaccactgcacgccagcctgggtgagaccctgtctcaaaaaaaaaaaaaaantaaanaaanaaaaaangnggccgccacccgnggtggngctccaattcgccctantagtgagcccttntttacgccgcgctcaactggcccgntcggttttcaaccntcntgactgggaaa

SEQ ID NO: 5693 - DNA, 266 bp, Homo sapiens
  misc_feature 103, 104, 107, 110, 114, 117, 122, 125, 130, 138, 158, 160,163, 170, 180, 192, 207, 229, 231, 240, 244, 245: n = A,T,C or G
cactacttagggcaattggagctccccgcggtggcggccgctttttttttttttttttttttttttttttttttttttttttttttttttttttttttttttnnaanaanaaanctnctttnaanacttngggggganccccacaggaaaaaaaaacncnggnaaggggnaacccccccnccccccgggagnggcccagggggaaanaggctacctggggggaaggaancncaaaagggncccnntgcaaactcagggcaaaggga

SEQ ID NO: 5694 - DNA, 375 bp, Homo sapiens
  misc_feature 28, 36, 76, 82, 89, 91, 95, 96, 98, 101, 133, 164, 179, 182,201, 206, 231, 234, 240, 250, 291: n = A,T,C or G
cggccgcttttttttttttttttttttntttttganacacaaactttggccacattttaaagacaaacatggaccncaaccntgctgananaacnnanagngaagtttacatggctatctttcttagtattanaaattttaccctggaaaaaacatcaaacatnccgacccaacattancanataaagcagctctacaganatttncctactgcccaaaatatcatataangcncatggngggcacatgngagtaggcaagagattctggaacacaggaagcaagacaacnggatcacagcaatttcagtatgctctgcttggtataggaaatccccagaacattctccaattactgaacaaaaaaagcaataaa

SEQ ID NO: 5695 - DNA, 400 bp, Homo sapiens
  misc_feature 30, 39, 43, 106, 124, 143, 146, 155, 163, 182, 194, 198,204, 218, 223, 230, 265, 278, 290, 297, 301, 316, 319, 325,341, 352, 356, 361, 365, 369: n = A,T,C or G
agtacttctagaattaattaacgcgggggnaaaaaaaanaganaagaaagcgccttcaaggccatctgtttctcgtgctactaccctttatggaaagacaaatctncttcccctccctgtcctnacttgcttctacattcccntanggctgagtncctctatnatcagcgtgccctgcctcngggccttgtgtngcanggccangtctgactttccanattancttgctntcctaagctgcatcattgctatgactctaatcttnctaacctttcctnaaatcttgcatntcccttnatgntggtgaatgaaatanatnaaacgncacacaatcacagggngggggttctcnaccnccggnattnaaantttctttccaggcccgaaagaaaaagggaag

SEQ ID NO: 5696 - DNA, 388 bp, Homo sapiens
  misc_feature 127, 160, 161, 170, 181, 206, 212, 251, 267, 363, 367, 379: n = A,T,C or G
cttagggcgaattggagctccccgcggtggcggccgctttttttttttttttttttttttttttgaaggagagagactttttccgctctctcgctccctgttaaagccgggtctagcacagctgcanacgccaccagcgagaaagagggagaggaagacnnatagggggnggggggaagancaaaaagaaaaggtaaaaagtcttntagganaacctttcacatttgcaacaaaagacctaggggctgganagagattcctgggacncagggctggagtgtctatttcgagctcagcggcagggctcgggcgcgagtcgagaccctgctcgctcctctcgcttctgaaaccgacgttcaggancggntttttaaaaacncaaggcaca

SEQ ID NO: 5697 - DNA, 305 bp, Homo sapiens
  misc_feature 1, 39, 46, 48, 64, 68, 70, 71, 85, 98, 117, 123, 125, 142,161, 163, 168, 169, 172, 180, 182, 241, 261, 263, 272, 298,304: n = A,T,C or G
nggcggccgcttttttttttttttttttttttttttttngaccaananttgttttatttttctngcancnnctttgttaattgcncaaaatcatgttntgtttttgccatttaaacnttatcncncaatcctattttgaaanacaaatgtttcattaaaancngaccnnaantaaaaatncncaaccttaattacctagatttgtcatttaaaggtttaaagaaaaaagggaggggctttnttacaagctttttcacaagngncacattttntccttaaaagggaaggatttcaaaanaaaggng

SEQ ID NO: 5698 - DNA, 255 bp, Homo sapiens
  misc_feature 27, 86, 96, 102, 123, 128, 135, 146, 160, 169, 171, 178,192, 218, 232, 255: n = A,T,C or G
cactactatagggcgaattggagctcnccgcggtggcggccgctttttttttttttttttttttttttttttttttcgggcgacanagtttcgctnttgtcnccaggctggggtgcaatggcnccatntcggctnactgcaatctntgtctcccaggctnaagcaattntnctgcctnaaccttcctgaagnggcgggggactgcaggcgcccgccantacgcccgacccgngttaattaattctagaagtactn

SEQ ID NO: 5699 - DNA, 467 bp, Homo sapiens
  misc_feature 154, 322, 329, 427, 447: n = A,T,C or G
ccgcggtggcggccgcttttttttttttttttttttttttttttttgagatagggtttcactcctgtcacccaggctggagtgcagtggcacgatcttggctcactgcagcctccgtctcccacacttaagcgattctcctgtctcaacctctngtagctgggactacaggcacatgccactacatctggctaatttttttttttttttttttttttagtaaaaacagggttttggcatgttgcctaggctagtctcaaactcctgagctcaagtgatctgcccaccttaccctcccaaagggctgggattacaggtttganacaccanacctggcctcaagtgctttttgacaggactgaacttcacatctactcatctaaatttcattcatcctcctacctagttattcatcctccttacctagntactcattccatttgccatnataactttggttttagggaa

SEQ ID NO: 5700 - DNA, 582 bp, Homo sapiens
  misc_feature 1, 36, 41, 49, 56, 58, 62, 72, 87, 94, 149, 256, 545, 568: n = A,T,C or G
nccggccgcttttttttttttttttttttttttttnagganggaatttnactctgncntttnacgctgcagngcagcagcatgatgncggcttnctgcaacctccacctctcgggttcaagtgattctcctgcctcagcctcctgagantggtattataggcgtgcgccaccacaccctgctaatttttgtatttttagtaaagatggggtttcaccatgttggtcagtctggtctcgaactcccgaccttgtganctacctgccccatcctcccaaagtgctgggattataggcctgagccaccgcaccggtctctccttctcttttaagctctggtcccaaactgctacccgcttccccagccaggcctccccctgagcagacacactgaccaagagaaagcctccacctactgcctggacatgcaaaccctgccgcagcccaaggccttggagagctagagttatgcttccggccaacgctgaacccttcttagcttaaaccggggtaactgggggatcttttgaaaggaaaggattcttanatgctcaagaaaattccagtttngagaaacttgaaaa

SEQ ID NO: 5701 - DNA, 796 bp, Homo sapiens
  misc_feature 34, 54, 123, 144, 155, 165, 168, 191, 205, 223, 235, 242,246, 248, 261, 275, 291, 292, 295, 312, 313, 319, 323, 324,333, 340, 350, 361, 370, 372, 383, 400, 405, 408, 414, 415,433, 442, 449, 457, 469, 481, 490, 493, 500, 512, 517: n = A,T,C or G
  misc_feature 526, 537, 554, 556, 563, 587, 595, 643, 650, 657, 662, 667,677, 678, 692, 706, 708, 709, 723, 733, 737, 738, 744, 752: n = A,T,C or G
aagccgcgcaatttaaaacccttcacttaaaagngggaaacaaaaaagacttgngggttacccggggccccccccccttcggaggaggttacctttcttaagaaatttaaaattaaaccgccngggggggccaagaaaaaaaangggggggccgnggcggggacnttncgggcttttgttttgtggttttngctttcctttgaanatttcccccggaaaaacnggttcccttgcntttcttncccncnaaaattccctttncccaaacttttttncccaaccaaatttttnngtnccccacccttaaatttnnaagacnccgnncttcccgtnccctttntttgtcaaancaaaaccaaanccaaaccanancttttttttgnaggggggaaaaaaattngtaangcnaagttnnttttttttttttttttcnccccccccngggggtnggggtgtncctttttaaaanaaaaaatataanttttttctnttnggggggntgggggaatttnctttncccccccanttagaaaaaanccaaggccaaattttantnttggggnccaaaatttggaatttaaaaattngggggccnaaattttgggggggaaaaaaaaaaaatttggggggggggggggggtcntttgggnaaaaaanccaanccggntttaaccccnnaattacactttttnaaattccccctttnannaatttcccccaaanaaaaaatttngggnnaaatanaaaccaantttgggggaaaggaaaaaaaggaaattttttctttttttttttg

SEQ ID NO: 5702 - DNA, 551 bp, Homo sapiens
  misc_feature 438, 440, 466, 542: n = A,T,C or G
cgctttttcttttctttctttctttttttttttttagacggagtctccctctgtcacccagactggagtgcaatggtgtgatcttggctcactgcaacctccgcctcccgagttcaagtgattctcctgtctcagcctcctagtagctgggattacaggcgcctgccatcatgtgccggctaattttggtatttttagtagagatgtggtttcaccatatcggccaggttggtctcaaactcctgacctcaggtgatcagcccgcctctgcatcccaaactgctgggattacaggcgtgaggccaccacacccagcccggattacccttaagtaggaggtacattctcttccattgaaaaagagagagagcagagaatagatgcacaggcaagcagatctgtatccattttggtgtgggaagttgcttcctctctgangntctctctctctctctctctctggctntctctctctctggttttctctctcgggcttcaagtagggaatgattaagtgaggggatactggttgctaaagtagnaagaaaata

SEQ ID NO: 5703 - DNA, 477 bp, Homo sapiens
  misc_feature 212: n = A,T,C or G
ccgcggtggcggccgcttttttttttttttttttttttttttttggagacagagttttgctcttgtcacccaggctggagtacaatggcacaatcgcggctcactgcaacctccacctcccgggttcaagtgattctcctgcctcggcctcctgagagctgggattacaggcacctgccaccatgcctggctgtttttcatatttttagtanagacggggtttcaccatgttggccaggctggtcttgagctcgcgacctcaggtgattcgcccacctcagcctcccaaagtattgggattacagatgtgagccactgtgcccggcacttttctgcttttaaatacaatgattttagaaagtctgtatatgaactttgggcttgtacctagatatcccagtgtgtgtagggagccctgtatatctgcaaggggatccattagaccaaggatattagatccagcacttctccttttta

SEQ ID NO: 5704 - DNA, 709 bp, Homo sapiens
  misc_feature 4, 44, 53, 95, 104, 154, 184, 196, 201, 223, 251, 271, 274,281, 291, 296, 300, 301, 322, 325, 327, 337, 347, 361, 368,382, 402, 420, 427, 428, 436, 461, 477, 502, 503, 513, 514,521, 530, 542, 544, 546, 553, 560, 564, 565, 566, 567: n = A,T,C or G
  misc_feature 576, 586, 591, 597, 599, 607, 620, 625, 645, 646, 659, 673,682, 705: n = A,T,C or G
aagncgcgcaattaaacccctcactaaaagggggaacaaaaagnctggggggntaccggggggcccccccctcgggaggaggtactttcttaagnaaattaaantttaaacggccgggggattgggcaaccattgccatggccggccaaaggtnaggggttcttaccaatgggaacggcttacntttcccccttanttcantaaaggaaagggaagccttttnttcaacccttttttcaatggatttcaanccgccccccttagtaaatcncanttttttncccttttaantactngggnnttttcccttaagttccccttnggnanttggcccccnttttttttcnccttaaaaaaaccntttcaanaaaaaaccaaaaanaaaactttataaccttaaantaaccttaaaaccatttnttttaannaaaccggnccttcaaaggggaaaaaattattgnaaaaaaccccgggggntttggaaaactttaatttttccttnngggccccggnngccaaanttcaaattncccctttaaagngntnccctttnaaatttngggnnnnccccttttncccaaatttnccccnttaacngngccaattntccctttttttanccaanttaaaaaccaaagaaacccnnaaggggggttccnaaaaccggaatttnccccccttncccccctttttaacccaattttnaaaa

SEQ ID NO: 5705 - DNA, 837 bp, Homo sapiens
  misc_feature 105, 178, 376, 382, 457, 482, 489, 539, 548, 601, 623, 658,668, 686, 692, 707, 724, 761, 766, 770, 773, 790, 792, 825: n = A,T,C or G
tacttagggcgaattggagctccccgcggtggcggccgcttttttttttttttttttttttttttgagacaagatcttgtcctgtcacccaggctggaatactgnggtgcaatcatagctcactgcagcctcaaacttctgggctcaagtgatcctcccacctcagcctcctgagtantgggaatgcaggcacataccaccatacctggctaattaaaaaaattttttttaatctcactgtattactgaagctggctggaactcctggccttgaacgatcatctcagcctccccaaactctgggattacaggcatgaaccattacacctggcttgaagagaagaggttcttaatattgaagaagccatttatctgnttttgntttttttcccctcatgtattgggtttttggtattggatctaaagagattgttgcttaactcaagaccacaaaganctttttctatttttttcttctaagntttttgnagttctaggttttacatttaagtctccaatcattttgagttaaattttgngtatggggngatgtatggacaatggtcattttttttgcatatgaataaccattattttaacnccatttattgaaaagactatcnttttgcccatgaaattaactttgcatggcttttgnaaatcaactntctatatatatggggggnctaccnggtctggcatatttnactatttggataagttngagaatattaaccaccccgggcttaatttttaatagntttanaagnctnaaaggcaggcaagaacnantttccactttggtatttttcaaaaaataccttnggattttaaaat

SEQ ID NO: 5706 - DNA, 360 bp, Homo sapiens
  misc_feature 52, 203, 224, 262, 279: n = A,T,C or G
agtacttctagaattaattaaggcgggggataaagttaaggtgtagagtatntattaggttatttggcttgtttgtttgtttatgcaaatcatgttaggttgttatcaccttaacaataatgggttataagatagtatgttctggcctcatggtaacctcaaaccaaaatacatacaatggatacacgaaagataaaaagcangaaactaaatcatgtcttcanagaaaatcatcttcactaaaaggaagacagaaaggaangaaataaggaagagaanatcacaaaacaactggaaaagaaataacaaaccggcaggagtaaaatccttatttatgaacaataatatggaatgtaaatc

SEQ ID NO: 5707 - DNA, 507 bp, Homo sapiens
  misc_feature 31, 69, 171, 206, 214, 271, 279, 281, 349: n = A,T,C or G
cgctttttttttttttttttttttttttttnggaccagagaggccccaaactagcagcctgtcctcctnagtagccccagcatcccttcatcattttgttgcccttctatgggcctagtttaggtctgagaggcatagtttaaaatttttattggtatttatttattctanagataaggtcttgctatgtttcccaggctggtctngaactccnggcctcaagcaatcctcctgcagcagcctcccaaagtgctgggattacaggcatganccaccacntntggtcagacaggcatagttttacaaatatgtgggtggataaatgctggccagtcttacttcatcactnctatcaattgaatgcttttggttggaaataacagaaaatccaactaaaagtgacttaaacaaaggaaatgttattatctcatgtcccaggaattctggaggtagactggttcaagggtggattaattaattctagaagtactctcgagggggggcccg

SEQ ID NO: 5708 - DNA, 298 bp, Homo sapiens
  misc_feature 7, 11, 14, 29, 62, 70, 91, 144, 153, 174, 191, 201, 209,248, 251, 257: n = A,T,C or G
attaatncacnctngtaccaggctacctncagaattcctggtacatgagataataacatttnctttgttnaagtcacttttagttggattntctgttatttccaaccaaaagcattcaatttgatacgaagtgatggaagtaanactggacancatttatccacccacatattngtaaaactatgcctgtntgaccagacntggtgggntaatgcctgtaatcccagcactttgggaggctgctgcangangattgnttgaggccaggagttcaagaccagcctgggaaacatagcca

SEQ ID NO: 5709 - DNA, 816 bp, Homo sapiens
  misc_feature 2, 46, 47, 49, 61, 438, 479, 551, 609, 610, 636, 642, 686,692, 701, 709, 735, 754, 784, 795, 809: n = A,T,C or G
cngccccccctcgagagtacttcttttttaattaacgcgggggatnnangtcacggttttnaggtgcagctgccgccaccgccgcttctgcaaggtctcagggacgggctgcagccatgtcctattgccggcaggaagggaaggatcgaatcatatttgtaaccaaagaagatcatgaaactccaagcagtgcagaattggtggctgatgaccccaacgatccatacgaggagcatggattgatactgccaaatggaaacattaactggaactgcccatgccttgggggaatggccagcggtccctgtggagaacagtttaagtcagccttttcctgcttccactatagcacggaggagatcaaggggtcagactgtgtagaccagttccgggccatgcaggaatgcatgcagaaatacccagacctctatccccaanaggatgaggatgaggaagaggaaagagagaagaagccagcngaacaagcagaaaaacaagcttccatttgaggccactgcaaccaaagaagaagagggatcaagttaatgaangccacaaggcactgggcaccagtccttttggagtggaccttttgcaaaagggccttgnnattacctttcaagaaaggtttccttntgttgnctggtgccttataatataccaaaaaaccttattttgatgaacanaaggtnttggagggnttgacatnttggacatattcccctgaaaaaaaangggggttggatgtatgtgngtcctacccaaacctttgggcgcccctttngaattctaaantggcccgaattttncccttta

SEQ ID NO: 5710 - DNA, 220 bp, Homo sapiens
  misc_feature 40, 42, 64, 95, 113, 185, 198: n = A,T,C or G
tcgagagtacttctagaattaattaacgcggggagttatnanagataatgcacaccttaaaatnttactactgggttattaatcctgctgacagntgtggcattacacctaanggatgaggtgcccattcccaggtccaatcggtgcagtctggggctgaggtgaggaaacctgggtcctcagtnaaggtgatcccanatacaccttcaccttccactac

SEQ ID NO: 5711 - DNA, 833 bp, Homo sapiens
  misc_feature 422, 440, 450, 513, 550, 569, 629, 641, 645, 651, 670, 678,689, 691, 694, 703, 726, 729, 767, 789, 799, 807, 816: n = A,T,C or G
agtacttctagaattaattaacgcggggtggggtggcatctgcgattcaagacagttttttacatctcttcagtgcctctttcagctatatgaattaaaaaccaggtactgtgggtgctcacctgaattctggttcttatgaaggtgcttttatggtgtaaatagtttttaaattggtgtccttgtagaggggacaatcggtagagccttctattctgccatcttgccccatctcctcaccttgaaatttatattatatgttaactataaaagctttacttaaaaagaaaattctgaacatcggtcatacccatttatcaaaaatgactattattttttaaactggaagatcttactattgcaggtattttgataacaaaggttataatgggagtacgtttttattctaagtcataacattnatcattttaacagatagntaaaatattnaactctgcgtaattaccagtaagtcattttatatgctttctggcttttaagaaagatttattntccactaccttaaacaatcttatagtatggtgggcanaataattgcacccaccaangatgcccacaccctatctctggaatttgtgaatatgttggaattcaggggcaaaaggganttgccaatgtgntaangctaanaaatgttgggatgaggaanattatccnggattattccnantgnacccaaatntaatcacatgaagcccctaaagnggntaattattaccggttggggtcagagatggggagaaccngtgggagaccggagggcccaanaccttcaatntgaacagncctcacggnttttacctttaaagggg

SEQ ID NO: 5712 - DNA, 463 bp, Homo sapiens
  misc_feature 10, 47, 49, 50, 53, 81, 142, 168, 374, 428: n = A,T,C or G
ttggagcttnccgcggtggcggcccgctttttttttttttttttttntnnttnttttgaggaaggcacctacaaaacgaangtgcctagggcttacaaaagtcatatgtagcctttacaaatattagctcagtcattttcanaaaggtttttccaattatcattttanagatgaggaaactgaagctcagggaggctaggaaacttatccaaagcctcttaagaggctatgttagtcagactgggctaacagctgtaacaaccccagaatttaaatggcttaacacattaggagtttatttgttattgccataacaattcagggtgtatgtttggcaggtagtctacacagtgattcagggacccaggctcctnccctctggggggctttttctccctctagtgctgggagctctccatgcaaatggnggatggagaaagagaacaaaaagtgggggattttt

SEQ ID NO: 5713 - DNA, 392 bp, Homo sapiens
  misc_feature 62, 63, 64, 65, 71, 268, 305: n = A,T,C or G
atagggcgaattggagctccccgcggtggcggcccgcttttttttttttttttttttttttnnnnaaaagnccgttcttacgtatttttttttaaacttttatttcagtagtgtttggggaacaagtagtgtttggttgcatggaaaagttcttcagtggtgatttctgagattttggccacccatcacccaagggtaagtcttttttatccatcaagtctgtacccaatgtgtagtctttgtttttttctttttttttttttttganactgagtctcattctatcacccaggctggagtggagnggcatgatcttgactcactgcaacatctgcctcccgggttaattaattctagaagtactctcgagggggggcccggtcccaactttt

SEQ ID NO: 5714 - DNA, 432 bp, Homo sapiens
  misc_feature 204: n = A,T,C or G
tttttttttttttttttttttttttgctatggagtcttgccatattgcccaggctggtcttgaactcctgggctcaagcgatcctcctgcctcagtcccctaaagtgctgggattacaggcgtgagccaccacactcggcgaggttcatttttctcatgtgaaagacttgacattcatctctgcccacactttgatcatatcanaaaacaacctgtgcagccgctttctgattgctgaagccgcttcattcttcctcagcaggacccatgtctcggacataggaatccggccgctgcatcttcaccttttttcccgtactggtatctatccaggtgtcggacccgtagatcatagtgataggcacatcttttcgaatcaagtgaattcgctccagcatagggcgccgggcccagccaaaggactccatcatg

SEQ ID NO: 5715 - DNA, 353 bp, Homo sapiens
  misc_feature 313, 315, 316, 322, 326, 328, 329, 330: n = A,T,C or G
tcgagagtacttctagaattaattaacgcggggggcgcagtggctcacgcctgtaatcccagaactttgggaggccgaggcgggcggattacctgaggtgaggagttcgagatcagcctgggcaacacggtgaaaccccgtctctactaaaaatacaaaattagccgggcgtggtcacacatgcctgtaatcccagctactcgggagcctgaggcaggagaatcgcttggacctgggaggcggaggatgcggtgagccaagatcgcgccattgcactccagcctgggcaacgagtaaatctccgtctcacccnannaaaaanaaanannnaaaaagcggccgccaccgcggtg

SEQ ID NO: 5716 - DNA, 270 bp, Homo sapiens
  misc_feature 15, 37, 90: n = A,T,C or G
actctgatttattgnggggtaaagcatgttatagtgntccagcttcactttttttctgaatggctatccagttgtcccaagatcatttgntgaataattcattttcccccatttgaaatgacaccttttcgtatactaaagtcccaagtctcttagttataaaacagtaataaacccttgaaacaggcattttcctaaaatacattttgtttaagtaagacagttttcccccgcgttaattaattctagaagtactctcgagggggggcc

SEQ ID NO: 5717 - DNA, 589 bp, Homo sapiens
  misc_feature 77, 81, 85, 88, 89, 92, 104, 112, 123, 128, 135, 152, 215,244, 245, 246, 250, 259, 262, 269, 273, 275, 294, 302, 304,320, 328, 353, 365, 379, 400, 410, 415, 424, 436, 437, 460,462, 478, 491, 510, 515, 520, 522, 523, 528, 531, 549: n = A,T,C or G
  misc_feature 555, 578, 580: n = A,T,C or G
ctatagggcgaattggagctccccgcggtggcggccgcttttctttctttctttttctttcttaattgacgaacaanggantccngtnntgntgcccatgctgnaatggagngacacaatccnggctnactgcancctccacctgcctggtncaagtgatcaagtgattctcctgcctcagctactgagtagctgggattacaggcacctgccancatgcccagctaattttttttattttttnnnttancagagacanggntccaccntgtngnccaggctggtcttgaactnctgacctnangagattcacctgcccngcctcaanctccaaagtgcttggattacaggcntgagccactgcncccagccatttttntttttattaaaaaagaaaatnttatctttgngggtnataaacagnaaacatttgggnntaataaaaacttgggagcatttngntatgtgtgtgcctgtntgtgtgcgcaccngtgtgttttaaagatggantcttnctatntnncccangtnggagtgcagacgctcccncgttantttaattctagaaagaccggtcnanggggggccc

SEQ ID NO: 5718 - DNA, 848 bp, Homo sapiens
  misc_feature 14, 337, 485, 511, 617, 623, 638, 644, 665, 684, 707, 712,731, 735, 744, 748, 773, 789, 792, 794, 795, 799, 817, 828,829, 833: n = A,T,C or G
ggaacaaaagctgngtccgggcccccctcgagagtcttctagaattaattaaagtcagcatgatgtattaaaacaaagcataataataataaaattttaaaaaatgtaaacttttacaatcattgaaaggcaaaaataaaataaaacaaaataaaatacagttgatccttaatatctgtggtacatttattccaggacgcccctcttcaccctccagataccaaagtctatagatgctcaagtcactaatataaaatggtgtagtatttgcatataacctatgcacatcctctcatagactttatttctaattaattttattatttttaatttttgngggtacatagtatgtatttatatgtgtatatatatacatatatatggggtcattacatgttttgatatagtgatagcttaacaggatgactatagtcaataataacttgattgtacattttaaataagagtgcaattggattgtttgnaactcctgtatactttaaatcatctncagtttactaatacctaatacaatgtaaatgcaagggaaataattggtatacctggattggttaaggggttatggccaagaaataaaggctgtacatgttcactgnagaaanaagccttcattcttntttttnaaaaaaattttttggactagnggatcccaaggctggccgnattctcaaaaaatgccataaaantttcntaaaagacagaataaaccnggtnggacaaaanaggntccagaccccgaggggacccctttnagtgaacttgtttaanatncnnattnttgggttttgcccttttntttggggttanntttnaaaatccccaaaatt

SEQ ID NO: 5719 - DNA, 450 bp, Homo sapiens
  misc_feature 43, 132, 373, 413, 418: n = A,T,C or G
ccgcggtggcggcccgctttttttttttttttttttttttttnttttgaggaaggcacctacaaaacgaaagtgcctagggcttacaaaagtcatatgtagcctttacaaatattagctcagtcattttcanaaaggtttttccaattatcattttagagatgaggaaactgaagctcagggaggctaggaaacttatccaaagcctcttaagaggctatgttagtcagactgggctaacagctgtaacaaccccagaatttaaatggcttaacacattaggagtttatttgttattgccataacaattcagggtgtatgtttggcaggtagtctacacagtgattcagggacccaggctccttccctctggnggcttttttctccctctagtgctgggagctctccatgcanatggngggatggagaaagaaaacaaaaagtgggggat

SEQ ID NO: 5720 - DNA, 698 bp, Homo sapiens
  misc_feature 23, 24, 467, 503, 536, 539, 542, 545, 547, 552, 554, 610,612, 638, 662, 666, 670, 680, 695: n = A,T,C or G
ttttttttttttttttttttttnngggttttgaggcagagttttgctctgtcgcccaggctggagtgcagcggtatgattatggctcactgcagcctcgacctcctggccccaggcgatcctcccacctcagtcccctaagagctgggaccataggtatgtgccaccacacccggctaatttcattttttgtagagatgaggtcttactatgttgactaggctggtctcgaactcctgggctcaagcaggccttgtgcctcggcctccccaactgttgggattatgggcgtgagccactgtgcccggtctgctcgctgaatttctaatgagcttgaattacaggaagtaaaaataaattttccacttacagaccactaaccagtttagagcaaatctgtaaggagtgtatagattatgccacacgagcgcatgaagctccacatgtttaaaagacaaagtttacctnttggggaacagcaagtgttcaactagggagggcatnaaccatgaacctggaaaaaacccaagacattanggnggnggntnggggngncttttattttaaaaaacctatttttaaaacgttcctttttcccccaaaaaatttancnacgaaaggcaatgcccttattgttanaaacttccttactttcgaactaanccangggngaacttttgngccgggggggtaaanaag

SEQ ID NO: 5721 - DNA, 308 bp, Homo sapiens
  misc_feature 86, 192, 284: n = A,T,C or G
gggagtcttactccgtcacccaggctggagtgtggtggtgtgatctcagctcacagcaacctgacctcaggtgattcacccgcctntgtctcccaaagtgctgggatacaggcgtgagccactgcgcccggcgtctttgaattttttaaactgaagtttaattgcctttgagtttgatcattcactatttgncatttgtatttcttttgttaattatctgctcaagctctaatttcataatggaaatttaatggattaacatataacacccactatcacccgcnttaattaattctagaagtactctt

SEQ ID NO: 5722 - DNA, 345 bp, Homo sapiens
  misc_feature 68, 83, 100, 110, 122, 153, 170, 183, 187, 195, 245, 254,293, 300, 314: n = A,T,C or G
ccgcggtggcggcccgctttttttttttttttttttttttttttttgaccagagaggccccaaactancagcctgtcctcctnagtagccccagcatccnttcatcattntgttgcccttcnatgggcctagtttaggtctgagaggcatagntttaaattttaattgcnatttatttattcnaganataaggtnttgctatgtttcccaggctggacttgaactcctggcctaaagcaatcctnctgcaggancctcccaaagtgctgggattacaggcatgagccaccacnttgtggncagacaggcatagntttacaaatatgtgggtggataaatgctgtc

SEQ ID NO: 5723 - DNA, 712 bp, Homo sapiens
  misc_feature 129, 316, 396, 400, 423, 432, 478, 568, 570, 611, 652, 655,663, 666, 674, 687, 693, 695, 705: n = A,T,C or G
ctatagggcgaattggagctccccgcggtggcggccgctttttttttttttttttttttttttttggcgatgcaggctcttttttggttccatatgaactttaaagtagttttttccaattctgtgaanaaagtcattggtagcttgatggggatggcattgaatctataaataccttgggcaatatggccattttcacgatattgattcttcctacccatgagcattgaatgttattccatttgttcgtatcctcttttatttcattgagcagtaagtttgtagttctccttgaagaggccttcacgtcccttgnaagttggattcctagggattttattctctttgaaagcaattgtgaatgggagttcactcatgatttggctctctggttgnctgntattggggaaaaaaaaagcttgngaattttgnaccattgattttgtatcccggagactttgctgaagttgcctatcantttaaaggagaattttgggcctgaaatgaagggggtttctaaaaaataaaaaacatggtcatctgcaaacaagaaaccaatttggacttncnggttttcccaaatggaaagcccttttaatttccttctcctngccggaattggccctgaccaaaaacctttcaaacactattnttnaaattggnaantggttaanaaaaagggccatnccctgncnttgggccccngttttta

SEQ ID NO: 5724 - DNA, 358 bp, Homo sapiens
  misc_feature 51, 53, 54, 55, 58, 59, 69, 77, 83, 88, 89, 90, 91, 96, 109,113, 130, 148, 150, 157, 168, 169, 190, 192, 217, 233, 280,289, 318, 321, 327: n = A,T,C or G
gcccccctcgagagtcttctagaattaattaacgcgggggcagaaaagggntnnnttnnctcggcttgntgtgttgnggggtnattgnnnnagacnggtcctgctgctnccgnagcctgccagctgtccnacgatgcttccacctaantnaagccgncgtcgcccctnnacaacaacaacaacaactgcnangaaaatgaccattctttgcccccgncggccggccttaacangttcctggggtggagctacccatgaacagcagcaatggcaatgatantggcaatgngaaaaatggggggctggacacgtaccatnctnatcctncatccacaatggagacattggagaagatctt

SEQ ID NO: 5725 - DNA, 345 bp, Homo sapiens
  misc_feature 24, 26, 30, 32, 68, 90, 92, 93, 97, 103, 110, 115, 116, 118,119, 168, 201, 239, 242, 248, 251, 265, 282, 324: n = A,T,C or G
tgggtcccgggcccccctcgagantnagantncttctagaattaatcaacgcggggggcttttttttngacctacctggagctggccagngnntgtnatggancaacatncgggnntnnagatcgagtcgcgcctcgggggcacaggtgaggctcgcataacacctgntgggtgcctttgagatagagataaatggacagntggtgttctccaagctggagaatgggggctttccctanganaaaganctnattgaggccattcnaagagccagtaatgganaaaccctagaaaagatcaccaacagccgccctccctgcggtnatcctgtgactgcacaggact

SEQ ID NO: 5726 - DNA, 448 bp, Homo sapiens
  misc_feature 417: n = A,T,C or G
agtacttctagaattaattaaggcgggcagtgttcatgtttcaaaagctaacactggcatgactgactcaatgttggacccagacaaattaaaaaatggtagataaaaatacatataatacgccgggcgcggtggctcaagtctgtaatcccagcactttgagagtccgaggcaggtggatcacaagctcaggagttcaagaccagcctagccaataatggtaaaaccccgtctctgctaaaaatacaaaaatcagctgggcatgttggtaggcacctgtactcccagctactcgggaggctgaggcaggagaattgcttaaagctgggaggtagaggttgcagtgagccaagattgagccactgcccttccagcctgggctacagagcaaagacttccgtctcaaaacaacaacancaaaaaacataaaatactcaaacaattaaat

SEQ ID NO: 5727 - DNA, 370 bp, Homo sapiens
gcgggggataaagttaaggtgtagagtatttattaggttatttggcttgtttgtttgtttatgcaaatcatgttaggttgttatcagcttaaaataatgggttataagatacgtatgttctggcctcatggtaacctcaaaccaaaatacatacaatggatacactgaaagataaaaagcaagaaactaaatcatgtcttcagagaaaatcatcttcactaaaaggaagacagaaaggaaagaaataaggaagagaagatcacaaaacaactggaaaagaaataacaaaacggcaggagtaaatccttatttatgaacaataatattggaattgtaaatcaactaaaatctccaatcaaaacacagactg

SEQ ID NO: 5728 - DNA, 433 bp, Homo sapiens
agtacttctagaattaattaacgcgggtatcaaagtactcaaactatatatcatatactgtacataaaatatcaaagtacccaaactgtgtattattatatactgtatataaaatatcaaagtacctgaaatatatattgtatactgtacataaaatatcaaagtccccaaaatatatactatatactgtacataaaatatgaaggtacatcaaatatatattatatcctgtacataaaatatcaaagtacacctaatatatattgtgtactgtacataatatattaaatcgcccaaatatatattgtatactgtatataaaatatgaaggtacttcaaatatatattatatgctgcacataaaatatcaaagtaccaaaaatatgtattatatactgtacataaaatatgaaagtacccaaccatttataat

SEQ ID NO: 5729 - DNA, 122 bp, Homo sapiens
  misc_feature 22, 30, 32, 38, 46, 57, 60, 61, 67, 71, 73, 75, 85, 91, 97,100, 103, 108, 109, 111, 114: n = A,T,C or G
agtacttctagaattaattaangcgggcgngntggcgngcacctgnagtcccagcanctnnggaggntgangnanaagaatggcntgaacncggganacngancttgnntnganccgagatc

SEQ ID NO: 5730 - DNA, 152 bp, Homo sapiens
  misc_feature 120, 151: n = A,T,C or G
agtacttctagaattaattaaggcgggggttggaggtggggactctggaaaagcagcccccatttcctcgggtaccaataaataaaacatgcaggctgaaaaaaaaaaaaaaaaaaaaancaaaaaaaaaaaaaaaaaaaaaaaaaaaaang

SEQ ID NO: 5731 - DNA, 428 bp, Homo sapiens
  misc_feature 67, 116, 131, 207, 228, 256, 341, 372, 402: n = A,T,C or G
ccgcggtggcggccgcttttttttttttttttttttttttttttttgaggaaggcacctacaaaacnaaagtgcctagggcttacaaaagtcatatgtagcctttacaaatattanctcagtcattttcanaaaggtttttccaattatcattttaaagatgaggaaactgaagctcagggaggctaggaaacttatccaaagcctnttaagaggctatgttagtcanactgggctaacagctgtaacaaccccanaatttaaatggcttaacacattaggagtttatttgttattgccataacaattcagggtgtatgtttggcaggtagtctacacagngattcagggacccaggctccttccctttggnggctttttctccctctagtgctgggagctntccatgcaaatggtggatggaaaaaa

SEQ ID NO: 5732 - DNA, 349 bp, Homo sapiens
  misc_feature 66, 67, 68, 69, 70, 76, 102, 107, 112, 120, 150, 151, 153,167, 169, 177, 178, 192, 193, 199, 209, 210, 234, 263, 268,289, 298, 313, 319, 336, 338: n = A,T,C or G
tacttagggcgaattggagctccccgcggtggcggccgcttttttttttttttttttttttttttnnnnnaacatnaaactctgatttattggggggtaaancatgntatantgttccancttcactttttttctgaatggctatccagnngncccaagatcatttntngaataatnnattttcccccattnnaaatgncaccttttcnnatactaaagtcccaagttttttanttataaaacacgtaataaacccttgaaanaggcnttttcctaaaatacattttgnttaagtaanacagttttcccccgngttaantaattctagaagtactntngagggggggcc

SEQ ID NO: 5733 - DNA, 342 bp, Homo sapiens
  misc_feature 28, 34, 47, 63, 71, 75, 94, 99, 117, 122, 155, 156, 176,233, 235, 247, 261, 286, 287, 289, 320, 323, 332: n = A,T,C or G
agtacttctagaattaattaaggcgggngatagngggtgtgatatgntaatccattaaatttncattatgnaatnagagcttgagcagataatnaacanaagaaatacaaatgacanatagngaatgatcaaactcaaaggcaattaaacttcannttaaaaaatttaaaaagacncccgggcgcaagtgggctcacagcctgtaactcccagcactttgggagacagaggcngntgaatcacctgnggtcaggttgctgngagctgagatcacaccaccacactnnancctgggtgacggagtaagactccatctacgnaangagtaaatncttatttatt

SEQ ID NO: 5734 - DNA, 375 bp, Homo sapiens
  misc_feature 100, 116, 131, 211, 222, 232, 260, 278, 335, 346: n = A,T,C or G
ccgcggtggcggccgcttttttttttttttttttttttttttttttgaggaaggcacctacaaaacgaaagtgcctagggcttacaaaagtcatatgtancctttacaaatattanctcagtcattttcanaaaggtttttccaattatcattttaaagatgaggaaacctggaaccttaagggagggctaggaaacttatccaaagcctnttaagaggctntgttagtcanactgggctaacagctgtaacaaccccanaatttaaatggcttaacncattaggagtttatttgttattgccataacaattcagggtgtatgtttggcaggtantctacacagtngattcagggacccaggctccttccctctg

SEQ ID NO: 5735 - DNA, 306 bp, Homo sapiens
  misc_feature 26, 72, 76, 182, 185, 187, 266, 274, 283, 302: n = A,T,C or G
actactatagggcgaattggagctcnccgcggtggcggccgctttttttttttttttttttttttttttttnattnggcatagtccttccttcatctcactccaactcttctttcctggctccccgctcggctccaccgccgcgggcctcccttcacacatagcacaggtagaggtaccgtnttntntatccttcaatccgggccgggaatctcctcgggcttgtggcccttcatgtgcttctgcatggaggaaaggctggggcantactctgngcaaatggngcactggtagggcgaggcncccg

SEQ ID NO: 5736 - DNA, 314 bp, Homo sapiens
  misc_feature 69, 106, 181, 206, 218, 242, 296, 302: n = A,T,C or G
tttttttttttttttttttttttttgctatggagtcttgccatattgcccaggctggtcttgaactccngggctcaagcgatcctcctgcctcagtcccctaaagngctgggattacaggcgtgagccaccacactcggccgaggttcattttttctcatgtgaaagacttgacattcatntctgcccacactttgatcatatcanaaaacaacctgngcagccgctttctgattgctgaanccgcttcattcttcctcagcaggacccatgtctcggacataggaatccggccgntgcatnttcacctttttt

SEQ ID NO: 5737 - DNA, 371 bp, Homo sapiens
  misc_feature 149, 350: n = A,T,C or G
agtacttctagaattaattaaggcggggggatggtaaaatgtcacttgcgagtaacagtatccataggcagaacctgtggagcaagaaagtttgctaataaaattttgtttaccctaacataggttcttcatggagagcagtacttaanagttatataaaccacttcccagagcaggaaaattaaaatgtgaagcagttgttgctgatgtcctagataaaggatccggtgtagtgattattatgggatgtctattcttattctgagaaggaacttatatgccacaatcagttctctctctttcttgttggctctggaggctttggtggaaaacggacatcagacaaagtnaaggtagctgtagccatacct

SEQ ID NO: 5738 - DNA, 257 bp, Homo sapiens
  misc_feature 23, 25, 51, 65, 94, 99, 100, 101, 115, 121, 122, 137, 157,168, 177, 184, 185, 193, 196, 227, 236, 240, 244, 252: n = A,T,C or G
agtacttctagaattaattaaananataaaaaccaacattaaccagagttnggaagaagttgatnccaaccttcataggtgactctgaggggtncaagnnntcagaggaaaaagnaactgnngatgtgatggaaaanagagaactagaattagaagnggagcctgaanatgtgacanaattgtnncaatctcntgnaaaaacttgaacagatgagaggctgctttgnctagataancctngaangtggtttnctgaa

SEQ ID NO: 5739 - DNA, 341 bp, Homo sapiens
  misc_feature 29, 99, 114, 140, 157, 190, 195, 211, 239, 324: n = A,T,C or G
ttttttttttttttttttttttttttttngaggaaggcacctacaaaacgaaagtgcctagggcttacaaaagtcatatgtagcctttacaaatattanctcagtcattttcanaaaggtttttccaattatcattttanagatgaggaaactgaanctcagggaggctaggaaacttatccaaagcctnttaanaggctatgttagtcanactgggctaacagctgtaacaaccccanaatttaaatggcttaacacattaggagtttatttgttattgccataacaattcagggtgtatgtttggcaggtagtctacacagngattcagggacccaggc

SEQ ID NO: 5740 - DNA, 396 bp, Homo sapiens
agtacttctagaattaattaaggcgggcaggggcttgggaagccggtagtgctcattggtcaggttggagatggaatcacagggggccggaagtgagtttttcttgctgtctgctgttcccgagtgcgatggcagaactggtttggggccagattaccggtttgggtggtgtcagctgatccaccaggtgcagggtctgcaacatatctcaagcactgatgttaggttttacaatagtgatgtgatcccaggagcaatttggggaggttcagacttggaaccagaggctgcatgacccctaaaccataatgtctaatcttacagctaatttgttagtcctgcaaagacagactggttccccaggcaagaaggggggttcttttcggggaaaggggc

SEQ ID NO: 5741 - DNA, 270 bp, Homo sapiens
  misc_feature 2, 33, 94, 106, 125, 129, 136, 138, 185, 216, 236, 246, 253: n = A,T,C or G
anagaggccccaaactagcagcctgtcctcctnagtagccccagcatcccttcatcattttgttgcccttctatgggcctagtttaggtctganaggcatagtttnaaaatttttattgttattnattnattctananataaggtcttgctatgtttcccaggctggtcttgaactcctggcctnaagcaatcctcctgcagcagcctcccaaagngctgggattacaggcatganccaccacgtntggtcanacaggcatagttttaca

SEQ ID NO: 5742 - DNA, 220 bp, Homo sapiens
  misc_feature 54, 71, 129, 153: n = A,T,C or G
agtacttctagaattaattaacgcgggaccgcgggcaaagaaggtaggccgggntgtctggtggaagcggnggaagtcctgctgcttgaagtcattggaggagccagccttctgtccacctacctgcanagcattgcgggaaccttcttgganatgaccgactggccctgggacttcttcattcaacctgagtgccggctcgactaccccatcaggacaa

SEQ ID NO: 5743 - DNA, 340 bp, Homo sapiens
  misc_feature 29, 81, 161, 163: n = A,T,C or G
ggccccgggccccccctctagagtacttntagaattaattaaggcgggggttctttctagggtgatggaaattctaaaatngaatctgaggatagctgcctatatccgtaaatatgtgaatatgctgaaaaaccattgactcgtgcactttaaatgactgnanttgtatgggtacataaaactgtatctcgataacaccttctcaaaaagaataaatgcagtggctcacacctgtaatcccagcactttgggaagcaaaggagggccaatcacctgagatcaggagttcgagaccagcctgaccaacatggtgaaaccccatctcgactaaaaatacaaa

SEQ ID NO: 5744 - DNA, 307 bp, Homo sapiens
  misc_feature 73, 79, 111, 112, 162, 183, 199, 207, 213, 221, 297, 300: n = A,T,C or G
ctacttagggcgaattggagctccccgcggtggcggccgcttttttttttttttttttttttttttttttttnaaaaanatggcttgtttattctttttctcccctttttnntttatttcttaaatttttttctcattttcccttttaatttctttattggnggtttatttattttgaaacanagtcttacttttgttnccccaagnctggangtgcaagnggccgtgatctcagctcattgcagccttgacctttccaggctcagttgatcctcccacccccgccttaattaattntanaagtact

SEQ ID NO: 5745 - DNA, 141 bp, Homo sapiens
  misc_feature 74, 79, 111, 117: n = A,T,C or G
ctacttagggcgaattggagctccccgcggtggcggccgctttttttttttttttttttttttttttccgggtncgganccgttccggatgctttaggctgccggatgtcngatctncggataactgaggcgtttctgtac

SEQ ID NO: 5746 - DNA, 240 bp, Homo sapiens
  misc_feature 7, 12, 16, 26, 30, 64, 88, 90, 92, 97, 99, 102, 107, 109,110, 112, 115, 117, 123, 126, 131, 134, 137, 138, 146, 154,156, 169, 170, 182, 191, 204, 206, 223: n = A,T,C or G
ggggggnccggnaaanttttgggggnaagnccttcccccacccccggccgggggtttggggggnccccgggggcccccgggccttttntntnttttntnttntattntnntnttntnttattnttnttttnttnttnntggtaatnttatcttntntaaaaaaaaaatnnccttttggggtnaccaatttnccttttggggggncnacctttggttttttttnttaaaaaaagaaaaaaa

SEQ ID NO: 5747 - DNA, 260 bp, Homo sapiens
  misc_feature 130, 149, 173, 187, 193, 202, 235: n = A,T,C or G
agtacttctagaattaattaacgcgggacgcgggcaaagaaggtaggccgggctgtctgctggaagcggtggaagtcctgcggcttgaagtcattggaggagccagcctcctgtccacctacctgcagancatgcgggacctcctgganatgaccgactggccctgggacttntttatcaacctgantgcggncgactaccncatcatggacaaatgaccagttggtggcgtttntctcccgataccgagatatgaattt

SEQ ID NO: 5748 - DNA, 549 bp, Homo sapiens
  misc_feature 197, 506, 519, 527, 540, 543: n = A,T,C or G
cgcggcggcggccgcttttttttttttttttttttttttttgaagatggaatctcactctgtcacccaggctggagtgcagtggcatgatctcagctcactggaagctctgcctcccaggttcacaccattctcctgcctcagcctctcaagcagctgggactcagggccagccgccatgcctggctaatttttttnggtattttttagtacagatggggttcaccgtgttagccaggatggtctcgatctcctgacctcgtgatctgcccacttcagcctcccaaagtgctgggattacaggcatgagccaccatgcccggccgatttcacctttcaatggcaattactataagacaggaaagttatttatttttatatattacctaattttaagttaccttatacaaccctcattaatagctggtagaactagaattaaactctatgtgaatatggccttatttaaacaatgtatccctagcacctaaacaatgcctaacctgncacataactaaanatatattnaattaatattttnggnaattaa

SEQ ID NO: 5749 - DNA, 319 bp, Homo sapiens
  misc_feature 20, 21, 22, 45, 145: n = A,T,C or G
tttttttttttttttttttnnnaacatttaactctgatttattgnggggtaaagcatgttatagtgttccagcttcactttttttctgaatggctatccagttgtcccaagatcatttgttgaataattcattttcccccatttnaatgacaccttttcgtatactaaagtcccaagtctcttagttataaaacagtaataaacccttgaaacaggcattttcctaaaatcattttgtttaagtaagacagttttcccccgcgttaattaattctagaagtactctcgagggggggcccggacccagcttttgttccct

SEQ ID NO: 5750 - DNA, 436 bp, Homo sapiens
  misc_feature 417: n = A,T,C or G
cgcttttttttttttttttttttttttttttttgaggaaggcacctacaaaacgaaagtgcctagggcttacaaaagtcatatgtagcctttacaaatattagctcagtcattttcagaaaggtttttccaattatcattttagagatgaggaaactgaagctcagggaggctaggaaacttatccaaagcctcttaagaggctatgttagtcagactgggctaacagctgtaacaaccccagaatttaaatggcttaacacattaggagtttatttgttattgccataacaattcagggtgtatgtttggcaggtagtctacacagtgattcagggacccaggctccttccctctggtggctttttctccctctagtgctgggagctctccatgcaaatggtggatggagaaaganaacaaaaagtgggggattt

SEQ ID NO: 5751 - DNA, 295 bp, Homo sapiens
  misc_feature 186, 190, 232, 234, 237, 286: n = A,T,C or G
gggcgaattggagctccccgcggtggcggccgcttttttttttttttttttttttttttttgaagaatcaacagactctatatttgatcacaaagcaaaagtttaagtgtattacttaaaattttaagacaaaatctggaataattataactaacacaaattttgaggtagaggaagagaatctangatnggtgagataaaattttcatctttgataatgagtagacaaaancnctncctttaacaagtgaagaatttaaaaaatttagagaagaggaaatcatangtggttttt

SEQ ID NO: 5752 - DNA, 216 bp, Homo sapiens
  misc_feature 7, 26, 27, 28, 46, 56, 57, 61, 72, 77, 78, 79, 106, 137, 145: n = A,T,C or G
ggggaanccggcccgggcccgttttnnnttttaaaaaaacccgggnaaaacctttnncccnaactttttttnaaaannnagggggggggggccccggggaaaaaantattttggggggggggaaaaaaccccttttncccccccnaaaccccccggggcccggggggggttttggggggggggcccccgggggggggccccccccccggggcccct

SEQ ID NO: 5753 - DNA, 537 bp, Homo sapiens
  misc_feature 390, 441: n = A,T,C or G
tttttttttttttttttttttttttttttggagagggacatgatttaaactatggcaggtatcagcccacctcccaattcactgtggattcatgatccacagaaaaatagaaaacctggaccccgcagtccaagcaaagccacacagacagggcacataaaggtttggtgactcaaaaaaaagaagcaatgaagtgcattatccacagtcatttaagcagactccacttacaggcacacacacatacacacacacacaaaaccacacaatgtctcacacacacacacacagacatccaacatttacaacactcccacagaaacacacagcgtgggaactcctaaggctgcctggtactgcaggacatttgagtgtgggagagagcccctntccccgccccgccctggggaacacaggcgtgatgtacctataaatcacagnggggcaagtttcaaaatgactcacaactacaatgcctaggcaggcttgaagaatcctacagatttctttgcatcctttgggatttcagaatttatt

SEQ ID NO: 5754 - DNA, 439 bp, Homo sapiens
  misc_feature 379, 387: n = A,T,C or G
tttttttttttttttttgagatggagtcttggtctgtcgcccaggctggagtgcaatggtgcagtctcagctcactgaaacctctgcctcccgggttcaagtgattctcctgcctcagcctaccgagtagctgggattacaggggcctaccaccatgcctggctaatgtttgtatttttagtagagatggggcttcaccatgttggccatgctggtctcgaagtgctgacctcgtgatctgtccgcctcggcctcccaaagtgctgggattataggcgtgagccactgctcccggccacaatctacaactggatttgtgctttgcaatttacgctttcgaacatgcaggaatgtagtttgggcatttgtctggaacttnggattctngggactccagggtggccaaggcgcggaggtgactaaatgacattgaccggcc

SEQ ID NO: 5755 - DNA, 469 bp, Homo sapiens
  misc_feature 304, 455: n = A,T,C or G
tttttttttttttttttttttttttttttggagtctcgctcttttgcccaggctggagagtgcaatggtgccatctcagctcactacatccctgattcaagtgattctcctgcctaagcctcctgagtagctgggattacaggcacttgccatcatgcctggctaatttttgtatttttgtagagacggggtttcaccatgttggccagtctggtcttgaactcttgacctcaggcgatccatccacctcggcttcccaaagtgctggaattataggcgtgagccaccgcacccagccttctgngtgtattttcttatgatgtagaatgagtgataaagcaccataggagtcacctagtgttgccttttccatttttgagttgataaatggaggtctcagtctctgttaattagtggtacatctgggaaaagtcaaatgtgttgagctcgaaggngttggtttgtttgt

SEQ ID NO: 5756 - DNA, 560 bp, Homo sapiens
  misc_feature 460, 477, 478, 489, 494, 498, 512, 525, 531, 560: n = A,T,C or G
ttttcttttctttctttctttttttttttttagacggagtctccctctgtcacccagactggagtgcaatggtgtgatcttggctcactgcaacctccgcctcccgagttcaagtgattctcctgtctcagcctcctgagtagctgggattacaggcgcctgccatcatgtgccggctaattttggtatttttagtagagatgtggtttcaccatatcggccaggttggtctcaaactcctgacctcaggtgatcagcccgcctctgcatcccaaactgctgggattacaggcgtgaggccaccacacccagcccggattacccttaagtaggaggtacattctcttccattgaaaaagagagagagcagagaatagatgcacaggcaagcagatctgtatccattttgttgtgggaagttgcttcctctctgatgttctctctctctctctctctctgnctctctctctctctggnnttctctctcgngcttnaagnagggaatgattagngagtgatactggnttgctnagtagtaaagaaaataaagaaggggaacn

SEQ ID NO: 5757 - DNA, 316 bp, Homo sapiens
ttttttttttttttttttttttttacttgaattgttgttatagtgcttccgttatttatttttattttttttattatactttaagttttagggtacatgtgcacaacgtgcaggtttgctacatatgtatacatgtgccatgttggtgtgctgcactcattaactcgtcatttatattaggtatatatacgtgttcattgtacccttatcgactttgcagcatgcttatccatctaactattcatctttatttgccttcgttttttgagttcccttattcatcctaaaacaaaatataatgcctgactcatagtca

SEQ ID NO: 5758 - DNA, 151 bp, Homo sapiens
  misc_feature 28, 92, 131: n = A,T,C or G
tttttttttttttttttttttttgggangctcaacctataatacccaaaggctctatttcagtagaatttattggtttgctgattatagcanttgacatagtgtgcattctagagaccttagaaaatgcanaaaatttcaagaaaaacatt

SEQ ID NO: 5759 - DNA, 581 bp, Homo sapiens
  misc_feature 518, 574: n = A,T,C or G
ttttttttttttttttttttttttacttgaattgttgttatagtgcttccgttatttatttttattttttttattatactttaagttttagggtacatgtgcacaacgtgcaggtttgctacatatgtatacatgtgccatgttggtgtgctgcactcattaactcgtcatttatattaggtatatatacgtgttcattgtacccttatcgactttgcagcatgcttatccatctaactattcatctttatttgccttcgttttttgagttcccttattcatcctaaaacaaaatataatgcctgactcatagtcagacttcacagtatttttaaatgaattacattgcattggggaaatataaatagtaatgtccttttatagaggaagtctaaaagaaattcttgggtgaattgataatcaaacatttttaagaaggtatatttgctagcaaagaaagaaaaaatatgacagcttatttatatagaaaacctatgtattctgggatttttctttgnttcaagtctgtatatgaatatcatgctatcccttcccccgccttaattaattctanaagtact

SEQ ID NO: 5760 - DNA, 536 bp, Homo sapiens
  misc_feature 114, 140, 190, 211, 239, 355: n = A,T,C or G
tttttttttttttttttttttttttttttgaggaaggcacctacaaaacgaaagtgcctagggcttacaaaagtcatatgtagcctttacaaatattagctcagtcattttcanaaaggtttttccaattatcattttanagatgaggaaactgaagctcagggaggctaggaaacttatccaaagcctnttaagaggctatgttagtcanactgggctaacagctgtaacaaccccanaatttaaatggcttaacacattaggagtttatttgttattgccataacaattcagggtgtatgtttggcaggtagtctacacagtgattcagggacccaggctccttccctctggnggctttttctccctctagtgctgggagctctccatgcagatggtggatggagaaagagaacaaaaagtgggggatttttataggccaggcctggaattggcccacatcacttccacacacattccactggccagaatgcagtcacgtgatcgtagctaactgcaaggaaggttggaaaatg

SEQ ID NO: 5761 - DNA, 294 bp, Homo sapiens
  misc_feature 29, 109, 110, 128, 194, 239, 253, 254, 257, 294: n = A,T,C or G
ttttttttttttttttttttttttttttncaacattaaactctgatttattggggggtaaagcatgttatagtgttccagcttcactttttttctgaatggctatccanntgtcccaagatcatttgntgaataattcattttcccccatttgaaatgacaccttttcgtatactaaagtcccaagtctcttanttataaaacagtaataaacccttgaaacaggcattttcctaaaanacattttgtttaannaanacagttttcccccgcgttaattaattctagaagtacn

SEQ ID NO: 5762 - DNA, 416 bp, Homo sapiens
  misc_feature 31, 189: n = A,T,C or G
ttttttttttttttttttttttttttttganacagggtctcactctgtcacccaggctggagtgcagtggcgcaatctcagctcactgcagcctctgcctcccaggttcaagcggttctcctgcctcagtctcccgagtagctgggattacaccaccacacctggctaatttttgtatttttggtatanacgggttttcgccatgttggccaggctggtgtcaactcctgatctcaagtgatctgccagcctcggcctcccaaagtgctattacaggcgtgagccaccacgcctggcttaggctgcttaaatattctttcttaggtatccttggttttggaaaaaaaaagaataacagaaaactaaaaattcccagtggcagtctctgtatcactggaatttaactttttgtttgt

SEQ ID NO: 5763 - DNA, 594 bp, Homo sapiens
  misc_feature 465, 475, 490, 565, 582: n = A,T,C or G
tttttttttttttttttttttttgggatgctcaacctataatacccaaaggctctatttcagtagaatttattggtttgctgattatagcagtgacatagttgcattctagagaccttagaaaatgcagaaaatttcaagaaaaacatttaaattgtgctcatagtgaaactgagaggtgaccactcttaatattttgtggcataagcattccagtcttttatctttctcaaagtttcacataaactttctcaaaggccattaaatacttttccatagcctgattttttgtgaccacatagtatcctattatattgataataccataatttacctaacccatttttatatatttggattttttccaattcatcattattatgaataatggtgtatctcagtggttattactttgcactgcatttcttatgaaagtattgagtaaaaggaagtaaagccctctcanagtgttttgnaggctgtcacatttnactccataatgtcctagtgttgttgccaccagtgatatatgaaggtacccactgaaatgtcacaccttttttggntttccttttttaaaatnaaaaataaaaaa

SEQ ID NO: 5764 - DNA, 452 bp, Homo sapiens
  misc_feature 40, 43, 47, 54, 76, 81, 109, 110, 112, 124, 131, 165, 216,255, 257, 294, 297, 324, 325, 362, 367, 376, 377, 379, 380,394, 396, 399, 411: n = A,T,C or G
ctccaccgcggtggccggcccgcttttttttttttttttnatnatanataggangaagggatttcaactctttgtnggccnagcctggaagtggcaattggcaatgatnntnaagcttcaccanaaccttnacctcccaggtttcaagccgctttctcctgcctnggccttccggagatagctgggaattacaaggcattgcactacacaacgccnggctaattttgaatttttttaagtagaagaccgggggtntncatactatgtttggggtaaagggctggggttcttcgnaancttctcccggaactcttataagggttnnaaatccaacacccggctctttaaattttaaattttcntaagnaaaagttanntnntttcggaggggggngnggnccccgggtaacnccaagacttttttggtttcccctttttaagatggagggggt

SEQ ID NO: 5765 - DNA, 480 bp, Homo sapiens
  misc_feature 1, 34, 42, 49, 51, 68, 74, 81, 210, 251, 364, 390, 417, 421,425, 450, 453, 462: n = A,T,C or G
ncgctttttttttttttttgggtttcaataaaantttatttnaaaaaancnggtagtggggctgggantgggcnaactttngaggaatagccatttctttataaattctgaacatgagtactttaaaaaaaatgtagcaaaatatcttctactaattatgtgggttcatcttttccaccctagttgtatcatatttttgaatggaacagnaatttcctgttttttgaatttttttttaaaaaataggtaanacaaggatttggctgattcccttaataaccctggcctggggttttattttccccattcttggtctttcagtatggatctagggccttctgggaaagtttgaatgggggggagncgttctaaacaaaaataggctacccntaataaccctaggaccaggatgacatnattncttncccgtgtggccagggtagggaccanttnagaatgggntttcctctagggggaaaa

SEQ ID NO: 5766 - DNA, 214 bp, Homo sapiens
  misc_feature 67, 72, 73, 77, 80, 94, 95, 96, 97, 103, 110, 119, 123, 148,162, 165, 169, 172, 182, 184, 185, 187, 189, 192, 200: n = A,T,C or G
acttagggcgaattggagctccccgcggtggcggccgcttttttttttttttttttttttttttttntaaanntttnttnaaaaaaaacccccnnnngggccnacttttnttttatttnatcntttaaggggccaatttttaaaaagnaaaggggaatgaanccntttntanttaagatccntnngncngancttttaangtaaaaaaaaaaaa

SEQ ID NO: 5767 - DNA, 439 bp, Homo sapiens
  misc_feature 67, 69, 70, 71, 109, 146, 158, 166, 223, 233, 238, 242, 255,257, 271, 275, 287, 302, 304, 321, 324, 328, 334, 338, 341,348, 358, 365, 377, 397, 406: n = A,T,C or G
gcgaaattgggagactccaccgccgggtggggccgggccgctttttttttttttttttattataaanannnggggggggggaaaggaatggaaaaaaaaaatttttcancttcaaaagttattttttgggttacctttttaaaaanaatttccaaatngccttggngaacaacttatgaaccccaggccttattaaaacaattttttcaggaaataggaaggntgggactttnaattngccngttggaaaaaatngnattcaaccaattanccanaattggaaaaanaaggggtttttttananaaaaaaaattaaacagntantggnatcaantaanaancttttgnttatccaagnattttgntaaagtaaaaanaatttttaaaaaaaattaanctttggaanttatttaaaaaaaccttaaaaaaattccaattt

SEQ ID NO: 5768 - DNA, 344 bp, Homo sapiens
  misc_feature 64, 68, 92, 97, 123, 142, 150, 157, 181, 187, 199, 209, 211,224, 233, 235, 239, 245, 249, 253, 262, 269, 278, 291, 329,330, 334, 338: n = A,T,C or G
agggcgaattggagctccccgcggtggcggccgctttttttttttttttttttttttttttganaganacagggtctcacccaggctggcgngcagnggtacaatcacggcttacgcattctngacctcccaggctcaggcnaccctatnagctcancctcccaagtagtgggaattacangcacgngccaccataccntggcttattntnatagagatggggntttgcctgngnttcnaaaaantaanaccnagggcttgnaattccntgggacatnaacctctttaaanactcctgcccagcctataatttaaatttctaggaaagnnaccnctcnaggggg

SEQ ID NO: 5769 - DNA, 439 bp, Homo sapiens
  misc_feature 77, 80, 86, 91, 99, 104, 111, 117, 123, 125, 133, 135, 146,161, 165, 190, 192, 195, 200, 215, 216, 256, 259, 262, 267,270, 282, 284, 285, 287, 289, 290, 299, 307, 321, 323, 337,341, 343, 345, 350, 356, 370, 373, 392, 395, 397, 403: n = A,T,C or G
  misc_feature 410, 417, 422, 425, 429: n = A,T,C or G
tagggcgaattggagctccccgcggtggcggccgctttttttttttttttttttttttttttttttttttttttttnganacggantctcnctctgtcncccangctggantgcaanggcggnanctcggctnantgcaagctccncctcccgggttcacnccantctcctgcctaaacctcccaaaaancnggnactanaaggcccccgtaaannaacccccggaaaaatttttgaaatttaaaaaaaaaaaaanggnggnttcanccncccattaaaccngnnangnntctttgatntaacttanaccaaccctaaaantngaacacaacccttnaacncnanccttnaaacanatcaccaaaaagtnctntagggaaataacagagcantgnanaccaanttgcaancccaacncattnttnttcntttttaatta

SEQ ID NO: 5770 - DNA, 507 bp, Homo sapiens
  misc_feature 137, 159, 162, 168, 191, 197, 198, 202, 207, 209, 211, 213,214, 224, 228, 243, 247, 249, 250, 258, 269, 272, 289, 294,295, 300, 301, 303, 311, 322, 323, 324, 338, 345, 347, 359,362, 367, 368, 369, 372, 380, 382, 384, 387, 394, 431: n = A,T,C or G
  misc_feature 446, 465, 490, 494: n = A,T,C or G
actcctatagggcgaattggagctccccgcggtggcggccgcttttttttttttttttttttttttttttgggaagggagtggtttagggaagactcgaaagtgacaatggagctatcaagttcaagaaggagttantaggggaggaggctgcaagaanaantgcacncctggaggcaagaacagcatgtntccccnnaaantacanangncnncccggcccangctngatgaaaaaaagggncaancnnaaaaaggnaattgaacaangantacccccaaacactaanacctnnaaaanntncccctgancaccccagatnnncaccaccccccccncttaaananccctacccaaancgnggacnnngangaataacnangntgntgaagcncacccgtgcccggccctgaactttttgtaaaggcaanagaaccactgggagnggagaaggaacaattgacntccccgccttaattaaatctaaaantacnctcaagggggggc

SEQ ID NO: 5771 - DNA, 212 bp, Homo sapiens
  misc_feature 85, 90, 101, 189, 192, 203: n = A,T,C or G
ttttttttttttttttttttttttttccccaagagaagatgccattttcatcacaacatgtttacatactcaaggtaggaacttnaacantttgctccttntgaccatacccatttacataaacatatgcagggctcccctggcctgccggcagctatccacaccaaaaagaggaaaaggtagactggnaanactcaggcttncaagttatt

SEQ ID NO: 5772 - DNA, 293 bp, Homo sapiens
  misc_feature 108, 123, 137, 141, 155, 159, 184, 185, 187, 206, 210, 227,230, 247, 248: n = A,T,C or G
attggagcctccccgcggtggcggccgctttttttttttgttttttttttttgggatgctcaacctataagtacccaaaggctctatttcagtagaatttattggttngctgattatagcagngacatagttgcatnctanagaccttacaaaangcanaaaatttcaagaaaaacgtttaaanngngctcatagtgaaacatganaggngaccactcttaatattntgnggcataagcattccagnnttttatcttcctcaaagtttcacataaactttctcaaaggccatt

SEQ ID NO: 5773 - DNA, 421 bp, Homo sapiens
  misc_feature 53, 55, 57, 63, 64, 65, 66, 70, 88, 90, 92, 94, 98, 100,104, 114, 115, 117, 118, 130, 133, 134, 148, 153, 154, 155,156, 187, 188, 190, 191, 192, 203, 216, 218, 224, 226, 233,239, 250, 253, 264, 265, 266, 267, 268, 276, 282, 283: n = A,T,C or G
  misc_feature 290, 292, 298, 307, 308, 309, 316, 322, 326, 327, 348, 359,375, 382, 385: n = A,T,C or G
gcggtggcggccgcttttttttttttttttttttttttaaaaaaaaaaaaaanantnggcccnnnncccnaagagaaaaaaaaaaatntntnantttngnaaancccccccccnncnnaaaaaaaaaaanttnncccccccccccccnaaaannnnaaaaaaaaaaaggcccccccccccccccccnnannnttttttttttnaaaaaaaaaaaananaaaaantnggggggngggggnaaaaaaaaaanctnaaaaaaaaaannnnncccccccnaaaaannaaaaatntnaaaaanaaaaagggnnnccccccncccccncccnnaaaaaaaaaaaaaaaaaattnaaagggggggncccccaaaaaaaaaantttcccnttnaccgggggaaaaaaccccctttaaaaaaaaaaaaaa

SEQ ID NO: 5774 - DNA, 417 bp, Homo sapiens
  misc_feature 33, 44, 45, 64, 65, 70, 71, 72, 75, 78, 83, 88, 100, 112,113, 115, 121, 122, 128, 136, 138, 140, 150, 157, 163, 167,169, 170, 171, 178, 192, 194, 198, 203, 210, 219, 224, 225,230, 234, 235, 246, 256, 257, 271, 274, 275, 281, 282: n = A,T,C or G
  misc_feature 284, 310, 311, 312, 320, 321, 333, 364, 365, 366, 378, 379,388, 389, 405, 406, 416: n = A,T,C or G
cctccaccgcggtggcggccgcttttttttttnttttttttttnnttttttttttttttttttnnttttnnnttnttnttttnttttntttttttttttnaaaaaaaaaaanncncctttnnttatantgaaagcnancnaaaaaaaaanaaaaaanaaaaanggangnnncaaaaanaaaaaaaaaaaaananactnttaanaaaaacnccccccccnccccnnccttncttnngaggagggggnaaaaaaaccnnaaaaaaaaaaaaangannaacttnntnaaaaaaaaaaaaaaaccccccccccnnnaaaaaaanncccccccccccnaaaaaaaaaaaaaaaaaaaaggggggggggnnncccccccccccnnttttttttnnaaaaaaaaaaaaaaanncccccccccna

SEQ ID NO: 5775 - DNA, 254 bp, Homo sapiens
  misc_feature 20, 21, 22, 23, 25, 40, 44, 46, 55, 56, 58, 59, 76, 85, 90,91, 92, 99, 108, 111, 112, 113, 120, 121, 123, 126, 129,140, 151, 154, 179, 180, 182, 183, 184, 185, 186, 187, 188,189, 197, 206, 209, 228, 235: n = A,T,C or G
tagggggggggggggggggnnnnanagagaaaaaaaaaancccncntcttttttnnanncccccccccccccccanaaaaaaaanccccnnnccccccncgggggggnatnnnccccccnngnggnggnggggggggggnttttttttttnttnggggggggggggggggggggggggnnannnnnnnncccccccnccccccccnggnagggggggggccccggccntttcttnttttttttttttttttttt

SEQ ID NO: 5776 - DNA, 432 bp, Homo sapiens
  misc_feature 24, 29, 30, 35, 40, 64, 66, 69, 72, 145, 180, 207, 218, 227,230, 242, 248, 271, 406, 421, 429, 431: n = A,T,C or G
ctccaccgcggtggcggccgcttnatatnnctgantcatntgtttgaggagcggtcagttgacncnatngancgggcaagggatcccttacacctgagacgaacctacagaacagcaccgtaccagaggtggaagtccaagtcanacgccagaaggactgccttcacttgagcaaccaangagtgtcacttgtacccccacgcgttnttcatcattancaagtaccnggnggtggattttcnatgctngaactgaggcaggcattctttancctgaaacaccaagaggtggttaaagccatattaggagtagcgaggaatctgattccaaacaaaaaccaggctccatctactcttttgaagcttctgcccaacttggattgtttcttaggagaacccgcgtttantttaattctagaaantaactctncna

SEQ ID NO: 5777 - DNA, 614 bp, Homo sapiens
  misc_feature 16, 24, 41, 164, 177, 344, 351, 375, 381, 390, 392, 410,418, 423, 424, 442, 444, 446, 461, 462, 466, 467, 469, 478,481, 483, 492, 521, 522, 526, 527, 530, 550, 557, 560, 561,562, 586, 587, 597, 605: n = A,T,C or G
cgcggtggcggccgcntttttttntattttttttttttttnagaaggcgggggataaagttaaggtgtagagtatttattaggttatttggcttgtttgtttgtttatgcaaatcatgttaggttgttatcagcttaaaataatgggttataagatagtatgtnctggcctcatggnaacctcaaaccaaaatacatacaatggatacacgaaagataaaaagcaagaaactaaatcatgtcttcagagaaaatcatcttcactaaaaggaagacagaaaggaaagaaataaggaagagaagatcacaaaacaactggaaaagaaataacaaaacggcaggagnaaatccntatttatgaacaataatatggaanggaaancaactaaancnccaaacaaaacacagacnggctgaangaatnnaaaaaaaaaaaacaaaancngnggcccccaaaaaacnncccnnancccaaaaanacncnccccaaccngaaaaaaaagggagaaaaaaaaaaaaaannccannccnggggaaacccaaaaaaaccnaaaaaanccnnnccccccacccaaaaaaaaaaaaanncaagggccanggaagggnaaaaaaaaa

SEQ ID NO: 5778 - DNA, 555 bp, Homo sapiens
  misc_feature 31, 50, 51, 54, 57, 59, 60, 79, 80, 89, 93, 95, 96, 97, 111,117, 118, 130, 147, 155, 156, 158, 160, 164, 170, 173, 230,231, 232, 233, 236, 245, 260, 266, 274, 288, 301, 302, 306,314, 337, 341, 346, 354, 363, 366, 370, 374, 377: n = A,T,C or G
  misc_feature 379, 387, 395, 396, 405, 406, 420, 422, 428, 434, 435, 441,442, 443, 444, 445, 447, 452, 453, 454, 455, 456, 457, 458,459, 460, 461, 462, 464, 466, 467, 468, 469, 470, 471, 472,475, 476, 477, 478, 479, 481, 482, 484, 485, 486, 487: n = A,T,C or G
  misc_feature 488, 491, 492, 495, 496, 497, 498, 500, 505, 506, 507, 526,527, 530, 532, 533, 534, 535, 536, 537: n = A,T,C or G
tccaacgcggtggcggccgcttttttttttnttttttttttttttaaagnnggnggngnnttttttttaaaaaaaattnnaaaaaaaantttnannnaaaaaaaaaaaaanaaaaannaaaaaagaaaantttttaaaaaaaaaaangggggggnnangnaaanaaacanttnaaaaaaaaaaaaaaaagggggggaaaaacccccaaaaaaaaaaaaaaaaaaaaaaannnnaanaaaaaaatngggaaaaaaaacccnaaaaanaaaaaggnaaaaaaggggtttnaaaaaaaaaaaannaccnaaaaaaancccctttaaaaaaaaaaaaaaangaanagggnaaaaaaangggaaaaanttngaangggnttntnaaaaaaantaaaaagnnaaaatttgnnaaaaaaaaagcccntnaaaaanaaaaanntaaaannnnnanaaaannnnnnnnnnnanannnnnnnaannnnnannannnnnttnnaannnntnaaaannnaaaaaaaaaaaaaaaaaanngangnnnnnnaaaaaaaaaaaaaaaaaa

SEQ ID NO: 5779 - DNA, 274 bp, Homo sapiens
  misc_feature 91, 136, 157, 160, 188: n = A,T,C or G
ccgcggtggcggccgcttttttttttttttttttttttttttgaaatatgcccacccatttcaggttgagccacggataaggagggcttanctcatgtctcctgtgggaattgaggcatctcaggaaacagtatanagttggtacagttagaatganaanaagcctggggaaagaaaccaagagtganaaatgcgtggctattttgacttagctggagcaaccctctcataacaggctgggaagtggacccgcgttaattaacgcgggggaaat

SEQ ID NO: 5780 - DNA, 396 bp, Homo sapiens
  misc_feature 44, 67, 70, 79, 82, 85, 86, 90, 91, 131, 134, 141, 143, 151,152, 154, 155, 161, 162, 164, 169, 218, 233, 237, 244, 251,260, 283, 293, 302, 312, 359, 365: n = A,T,C or G
ccgcggtggcggccgctttttttttttttttttttttttttttnggaccagagaggcccaaaactancancctgtcctnctnagnngccnnagcatcccttcatcattttgttgcccttctatgggcctanttnaggtctnanaggcatanntnnaaaatnntnattgntatttatttattctagagataaggtcttgctatgtttcccaggctggtnttgaactcctggccngaancaatccncctgcancagcctccnaaagtgctgggattacaggcatnagccaccacntttggtcanacaggcatanttttacaaatatgtgggtggataaatgctgtccagacttacttcatnactttntataaattgaatgctttttggtttggaaata

SEQ ID NO: 5781 - DNA, 144 bp, Homo sapiens
  misc_feature 69, 72, 85, 96, 98, 109, 122, 124, 128, 137: n = A,T,C or G
cttagggcgaattggagctccccgcggtggcggccgctttttttttttttttttttttttttttttttnttntttttttctggcnctaaagggggnanagggggtgctntagggtaaatacngncccnatttcaaanattttta

SEQ ID NO: 5782 - DNA, 134 bp, Homo sapiens
  misc_feature 77, 107, 125: n = A,T,C or G
actcctatagggcgaattggagctccccgcggtggcggccgcttttttttttttttttttttttttttttgggaatnattatttaatgagaaaaaaatccacgtgtntacaacatttcaaaacanaagttaaat

SEQ ID NO: 5783 - DNA, 262 bp, Homo sapiens
  misc_feature 131, 174, 182, 185, 188, 207, 212, 221, 226, 231, 244, 250: n = A,T,C or G
ccgcggtggcggccgctttttttttttttttttttttttttttttggaggaaggcacctacaaaacgaaagtgcctagggcttacaaaagtcatatgtagcctttacaaatattagctcagtcattttcanaaaggtttttccaattatcattttaaagatgaggaaactgaanctcagggnggntangaaacttatccaaagcctnttaanaggctattntttanttcanactgggctaacantctgtnacaaccccaaaa

SEQ ID NO: 5784 - DNA, 352 bp, Homo sapiens
  misc_feature 72, 94, 160, 162, 174, 209, 229, 248, 249, 294, 298, 312,328, 338: n = A,T,C or G
ctacttagggcgaattggagctccccgcggtggcggccgctttttttttttttttttttttttttttttttnacattaaactctgatttattgnggggtaaagcatgttatagtgttccagcttcactttttttctgaatggctatccagttgtcccaanancatttgttgaanaattcattttcccccatttgaaatgacaccttttngtatactaaagtcccaagtnttttagttataaaacagtnntaaacccttgaaacaggcattttcctaaaatacattttgtttaantaanacagttttcccccncgttaattaattctanaagtactctngagggggggcccgg

SEQ ID NO: 5785 - DNA, 375 bp, Homo sapiens
  misc_feature 111, 122, 128, 135, 147, 155, 156, 170, 172, 173, 174, 178,181, 184, 188, 196, 197, 202, 203, 219, 221, 229, 233, 235,236, 238, 248, 251, 252, 258, 259, 261, 265, 267, 270, 274,276, 278, 281, 295, 296, 307, 315, 317, 320, 328, 347: n = A,T,C or G
  misc_feature 354: n = A,T,C or G
tatagggcgaattggagctccccgcggtggcggccgctttttttttttttttttttttttttttttttttttttttttttttttttttttttttttttttttggggggaanccatttatatnaaatgnccaaaanagggaaaacctnttttaaannacaaaaacccaaantnnntcancanttnccangggaggannaaaannggagggggaaaattantnctttacangggnannanaaaatttttntcnnaacctnnanaaangnggngccnananaantttcttggatgtannaaaagcccctnattgttcncnttnaagggganttgaattttagggtttttngaatttnattctcaattaaaaaaaaacc

SEQ ID NO: 5786 - DNA, 149 bp, Homo sapiens
  misc_feature 81, 124, 126: n = A,T,C or G
ccgcggtggcggccgcttttttttttttttttttttttttttttttaaagcaaaactccctacagccgagccccgttcggngccttttcttttttttttctttaatggagtgaaatctactttncncaggaagcctgcaaatcacattt

SEQ ID NO: 5787 - DNA, 177 bp, Homo sapiens
  misc_feature 107, 110, 125, 126, 130, 135, 138, 143, 144, 146, 147, 158: n = A,T,C or G
cactacttagggcgaattggagctccccgcggtggcggccgcttttttttttttttttttttttttttttttttttttttttttttttttttttttttttttggaantanaaagctacttttaanncttnggggnganccccnnannaaaaaaaaacnctgggaaggggaaaccccc

SEQ ID NO: 5788 - DNA, 311 bp, Homo sapiens
  misc_feature 44, 80, 81, 85, 94, 104, 133, 147, 172, 177, 187, 189, 194,228, 230, 259, 295, 296, 298, 299: n = A,T,C or G
cgcggtggcggccgcttttttttttttttttttttttttgaggngaatgaatttaatataatctctataaaaaccctaannaggncagtttttnacagaaatanaaattattttttttttttattttttttanatggagtctcactntattgccaggctggagtgcagtggntgtantggcctgatntnggctnactgcaacctctgcctcccggattcaagtgattntnctgcctcagcctcccgagcagctgggaanacaggcaccccgccttaattaattttagaagtactnntnnaggggggggggc

SEQ ID NO: 5789 - DNA, 325 bp, Homo sapiens
  misc_feature 9, 76, 137, 164, 298: n = A,T,C or G
aaacgactnctatagggcgaattggagctccccgcggtggcggccgcttttttttttttttttttttttttgaggngaatgaatttaatataatctctataaaaaccctaatcacacagttttttacagaaatatantttattttttttttttattttttttanatggagtctcactctattgccaggctggagtgcagtggctgtagtggcctgatctcggctcactgcaacctctgcctcccggattcaagatgattctcctgcctcagcctcccgagcagctgggaatacaggcncccgccttaattaattctagaagtact

SEQ ID NO: 5790 - DNA, 180 bp, Homo sapiens
  misc_feature 96, 101, 104, 113, 118, 141, 147, 148, 151, 154, 156, 158,163, 166, 171: n = A,T,C or G
actcctatagggcgaattggagctccccgcggtggcggccgctttttttttttttttttttttttttttttttttttttttttttttttttttaanggggncancctattttnagggngctttcattattttattttttanacaaanncanacncntngctanaancaaancaaaaattt

SEQ ID NO: 5791 - DNA, 504 bp, Homo sapiens
  misc_feature 43, 65, 140, 159, 180, 184, 185, 210, 220, 223, 230, 234,235, 247, 253, 256, 291, 297, 310, 337, 341, 348, 351, 367,371, 377, 380, 384, 385, 388, 410, 423, 425, 431, 444, 448,450, 456, 480, 482, 487, 500: n = A,T,C or G
tttttttttttttttttttttttgggatgctcaacctataatncccaaaggctctatttcagtanaatttattggtttgctgattatagcagggacatagttgcattctagagaccttagaaaatgcatgaaaatttcangaaaaacatttaaattgtngctcatagttgaaacctgaanaggnngacccacctctttaataatttttgngggggcatanagncatttcncagnnccctttttttantccttntcnttcaaaaggttttccaccaataaagacctttttcntttcanagaggaggcccanttttaaaaaattacctttttttcccantaangcacctnggnattttttttttttggntggnaccccnccnactnnagnggaatcccctcaattttaattnaatgtgggaagtnanaattancccccagttaaantttntnaccgcnttaaaaaccccccaattttttttntnaattnaataaattttttngggg

SEQ ID NO: 5792 - DNA, 415 bp, Homo sapiens
  misc_feature 83, 84, 96, 98, 114, 137, 205, 231, 321, 374, 379: n = A,T,C or G
ctatagggcgaattggagctccccgcggtggcggccgcttttttttttttttttttttttttttttgggggagagaatcattnntgcaggctgcananaaagcacttgctaganaaattttcataactataagggancaaaaaactaatagccaagaccatgggataaagacctggaaagcatttatcctatttattcatttcgncgctcatttatttttttgtttatttnattggaatataagctctataaaataaaatggaccttgctgctcttgccgtatcactgtatgtcaagaagttatcatacagtttgaggcanagtgggcactaaacaaatgtttattttgatgaggaaaagatggataaattgantgacnaaggttgtgacatatttcttgtccaaaaaaaaatga

SEQ ID NO: 5793 - DNA, 355 bp, Homo sapiens
  misc_feature 59, 63, 79, 85, 89, 90, 93, 97, 98, 100, 111, 114, 117, 118,126, 141, 146, 151, 152, 153, 154, 164, 167, 172, 173, 174,180, 203, 207, 242, 301, 314, 319, 323, 329: n = A,T,C or G
ccgcggtggcggccgcttttttttttttttttttttttttgggatgcacaacctataanaccnaaaggctctatttaangagaanatannggntagnngnttataccaganacntanntgcattcnacagaccttacaaantgcanaaaannnnaagaaaaacnttnaaatnnngctcanaaggaaaactggaaaggtgaccnctcntaatatttatggggcataaccattccatgtctttnatctttctcaaagtttcacataacctttctcaaaggccatataaatacttttccataancctgattttttgngaccncatngtatcntattatatttgataataccataattt

SEQ ID NO: 5794 - DNA, 204 bp, Homo sapiens
  misc_feature 83, 86, 91, 109, 128, 131, 140, 146, 155, 159, 165, 177,182, 183, 186, 188, 192, 195, 197: n = A,T,C or G
ctatagggcgaattggagctccccgcggtggcggccgcttttttttttttttttttttttttttttttttttttttttttttnatnacccnctcacaggaccaactttnatttaattaattcattaanggncaaattttnaaaagnaaagggaangaanccattngtaattaaaatncatanncanancttnaangnaaaaaaa

SEQ ID NO: 5795 - DNA, 378 bp, Homo sapiens
  misc_feature 46, 131, 157, 177, 214, 224, 227, 229, 237, 238, 252, 314: n = A,T,C or G
ccgcggtggcggccgctttttttttttttttttttttttttttttngaggaaggcacctacaaaacgaaagtgcctagggcttacaaaagtcatatgtagcctttacaaatattagctcagtcattttcanaaaggtttttccaattatcattttanagatgaggaaactgaagctnaggggagggctttgggaaaaccttatccaaagccctntttaagaggnttntnttagtcannacttgggctaacangcgtgtaacaaccccagaatttaaatggcttaacacattaggagtttatttgttattgccanaacaattcagggtgtatgtttggcaggtagtctacacagtgattcagggacccaggctccttcc

SEQ ID NO: 5796 - DNA, 306 bp, Homo sapiens
  misc_feature 73, 82, 119, 154, 203, 209, 210, 220, 236, 265, 271, 281,295: n = A,T,C or G
ctatagggcgaattggagctccccgcggtggcggccgcttttttttttttttttttttttttttttttttagnacaaaaatntgggttttatttattcatttgtaaactcaagccaggnctctattccactttttccaattatttgcttttganagtctcaggattatccttccttcctctccttccacattttctcccctgncccttnntcctgggcangcttctctagtccccnacggtctttgtttaaaacacaatgcgggnttgganattaaccttnactctctctttcanaaaaaaatgcc

SEQ ID NO: 5797 - DNA, 144 bp, Homo sapiens
  misc_feature 20, 66, 68, 70, 74, 81, 111, 115: n = A,T,C or G
ttagggcgaattggagctcnccgcggtggcggccgctttttttttttttttttttttttttttttnangnctgntcttacntatttttttttaaacttttatttcagtagngttnggggaacaagtaagtgtttggttgcatgg

SEQ ID NO: 5798 - DNA, 623 bp, Homo sapiens
  misc_feature 46, 47, 54, 127, 181, 185, 189, 204, 211, 232, 262, 271,429, 575, 594, 609, 613: n = A,T,C or G
ccgcggtggcggccgctttttttttttttttttgcagacggagatnngctctgncacccaggctggagtgcaatggcatgatcttggctcactgcaacctccacgtcccgggtacaagcgattctcntgcctcagcctcccaagtagctgggactacaggtgtgtgcaaccacatccaggnaatnttgnatttttagtagagangggattncaccatgttggccaggctggncttgaactcctgaccttgtgatctgcctgncttggcctncaaagtgctgggattataggcatgagccaccgcgcccagctagaaaatacatttttgaagcaataataaagatgtgaaccaaatttagtgttctcaacatgtcaagccttaccgacaatgcaaagcaatagaaactcaaagcaatagaaactgctggngagatataacctggttcaacccggtggaaatactttggcattaaacatgccaaactaaaagtaaatacccacataatctacattctggcaatttcaccactaggcatttaccttaaaaaaaatctcaaacatatgccccaaagatntgtaaaaagaatgcttatnggaacactattcttnacanggaaaaatcc

SEQ ID NO: 5799 - DNA, 628 bp, Homo sapiens
  misc_feature 22, 24, 25, 26, 111, 113, 175, 332, 382, 403, 415, 471, 475,476, 484, 497, 503, 520, 530, 551, 563, 564, 604, 608, 613,614: n = A,T,C or G
cgcttttttttttttttttttntnnntttttggggtcacatgcgcatttattattgtctggaacatcaaggcctttcctcccctggcagtggcacaagggagggccaactntnaagaggcggcacgcttgccaccaacagcaggcccatggggtgggcagggtcatgggcggcanaaacagcgccttcagcttgcctgacaggctggcgatctcaggatcctgggcttcgtagggacttgaccaagcgagcaaaacttaaggacaccttcccgtcgcaactgaaccatagctttgataaccctctgctggatctggcgtggccacgggcagnacgaattgcagcatcttacccatgtcgttgcaggcgttatcccgagcctngtccatgccgcactgcatttnttcggggcgganaaacgcctggatcacctccgcgagggaccacctttgcttgcttcaagcgctcaaangccnnccgttggngtcaaggcggacnccatanggcggttttgaaaactnttaggttcancgggaggtaaaatgggaaaantcacgaataaannagccacgtctaaaaaccgttccccccgggttaattaattnttanaaatnntttttaaggggggg

SEQ ID NO: 5800 - DNA, 384 bp, Homo sapiens
  misc_feature 55, 63, 64, 213, 230, 274, 324, 336, 340, 342, 362: n = A,T,C or G
ccgcggtggcggcccgcttttttttttttttttttttttttttttttgaggaagncacctacnnaacgaaagtgcctagggcttacaaaagtcatatgtagcctttacaaatattagctcagtcattttcagaaaggtttttccaattatcattttagagatgaggaaactgaacctcagggaggctaggaaacttatccaaagccttttaanaagctatgttaagtcanactgggctaacagctgtaacaaccccaagaatttaaatggcttnacacattagggagtttattttgttattgccataacaattcaagggtggtnttttttggcaangtantntacacagtgatttaagggancccaggctccttccctttgggg

SEQ ID NO: 5801 - DNA, 506 bp, Homo sapiens
  misc_feature 71, 362, 388, 392, 394, 472: n = A,T,C or G
gactactatagggggcgaattggagctcaccgcggtggcggccgctttttttttttttttttttttttttngggaaggagtttcactcctgttgccaaggctggagtgcaatggcgcaattaggctcactgcaacctcctcttcccgggctcaagtgattctcctgcctcagcctcccgagtagctgggattacaggtacccaccaccatgcccagctaattttttgtatttttaatagagatggggtttcaccatgttggccaggctggtcttgaactcctgacctcaggtgatccacctgcctcggccttccaaagtgctgggattacaggtgtgagccatggtacccaaccttcctcancattttttgtctgtccccacacacangctnancaaccaaagaaagccaagggcatataggcagggcaacaacatctgtgcaccttgcgggctgcctgctaattttcctanaaacatatttttttaaaacattccttaaaaaaaa

SEQ ID NO: 5802 - DNA, 535 bp, Homo sapiens
  misc_feature 348: n = A,T,C or G
ccgcggtggcggccgctttttttttttttttttttttttttttgagacggattttcactcttgttgcccaggctggagtgcaatgggcgggggtcttggctcaccgcaacctctgcctccctggttcaagcaattcttctcctcacctcccgagtagctgggattacaggcacctgccaccacgccctagctaatttttgtatttttagtagagacagggtctcactgacttcaggtgacgcccgcctcggcctcccaaagtgctgggattacaggcgtgagccatcacgcccagctggaaccattataacttgtaacaaaatatagaatataaattattggtttatnggggagttcaaatatgaattttaataaaaccaaatcttttacaagttgaatataacatttcttactgtgcccatttagacaggggtccatccaaagggcattttatctgattttctgaaagatcattaagtatctaattttagataacccgcgttaattaattctagaagtactctcgagggggggc

SEQ ID NO: 5803 - DNA, 374 bp, Homo sapiens
  misc_feature 42, 49, 99, 118, 120, 148, 176, 186, 210, 223, 234, 250,292, 317, 336, 360: n = A,T,C or G
ccgcggtggcggcccgcttttttttttttttttttttttttntttttanatggagtcttactccgtcacccaggctggagtgtggtggtgtgatctcanctcacagcaacctgacctnangtgattcacccgcctctgtctcccaaantgctgggattacaggcgtgagccactgngcccggcgtntttgaattttttaaactgaagttnaattgcctttgantttgatcattnactatttggcatttgnatttcttttgttaattatctgctcaagctctaatttcataantggaaatttaatggattaacatatnacacccactatcacccgcnttaattaattctagaagtactctngagggggggcccgg

SEQ ID NO: 5804 - DNA, 500 bp, Homo sapiens
  misc_feature 37, 46, 50, 55, 72, 116, 175, 176, 180, 192, 200, 206, 207,236, 238, 239, 248, 251, 280, 287, 301, 305, 306, 345, 352,366, 395, 403, 418, 419, 428, 430, 443, 464, 491: n = A,T,C or G
cgctttttttttttttttttttttttgagacagactnactttgtcnccangctgnagtgtggagtgcagtgncacaatcttggctcactgcaacctctgcctcctgggttcaagcnattctcctgcttcagcctcctaagtagctgggattacaggcacaccccaccacacccgnntaanttttatattttnagtagaantggggnnccaccatgttggccaggctggtctagaantnntgacctggnganccacctgcctcgggttcccaaagtgtgantcactgnacccagccttgctnaatnnttttaaaactttttttttctgacatcttgagttaaaagnctttggntattctttgagacnggatctggctcttttacccaacctggagngcaatggntcaaatcacaggtanntgtcccttngncttctgggcttcngcccaaacctcacagtaacanacactgttgggaaaacacacccatttnactttttta

SEQ ID NO: 5805 - DNA, 288 bp, Homo sapiens
  misc_feature 42, 43, 98, 99, 101, 102, 171, 261: n = A,T,C or G
ccgcggtggcggccgctttttttttttttttttttttttttnnggggtctgtatttcttattaaaatgattggctaagaccaaagatcttgtccctgnngnnctctattgtattccttgttcctaaaaggttcctgggacatacagttcaaaaatatatatctgatgtacnaatgactgaataagtgaatgtgaccataacgcagaaattcctaagaaatgctttgtcctgataggtctccagtctctgcagaggacaaanaaaaatattctaaggtcccaaaaagtc

SEQ ID NO: 5806 - DNA, 812 bp, Homo sapiens
  misc_feature 44, 49, 130, 183, 214, 249, 265, 289, 332, 338, 396, 501,519, 534, 600, 601, 607, 609, 615, 666, 667, 681, 710, 711,712, 717, 732, 745, 753, 765, 771, 785, 795, 796, 798: n = A,T,C or G
ccgcggtggcggccgctttttttttttttttttttttttttttnggagnactatgataggtgaaatggtatgactataaaaaggatttgtttctttttgtctcctggaatgacatgatgcctttctaganaaagaaaaattgcaggctacaggaaaatgataaaaactactggattcatttanactattcgatttaaggaaggtcaaccacttntttaacatcaagctaaaagtgggggaaagtctcantctccaggtaggtctnctctcacactgtcctgggtggcangcgctgtttatacatgcccgctatcgctctggcttgcctgtanatcatntggccgacgggacatcccagtaaatgccatgtgccaatcagtcccggctgacattcantaaacttttttccaggacttcacccactgtcaccaaaaggcctgaccaccttaaaattatagtcctggggagttaaactttgagcctgctgtacaaaattcaaangcactggtgtggctttgngtaaatgtttttaanatgaaagcccttggacaggatcttttaaccccaaaaaaccaatggtcaaaccattttgtcagggannaaattntncaatgnaaattttttacttgacccaaacttgcttttttttattggatccccccattnnacccaagctttttntccgttctggaccccttttatccacttgnnnacccntggtggggggcaatnttggactgtcaanttcccttnaacccaagttanccaaanacctctggaagggntttgggcagnnanaacttttatttttt

SEQ ID NO: 5807 - DNA, 448 bp, Homo sapiens
  misc_feature 419: n = A,T,C or G
ccgcggtggcggccgctttttttttttttttttttttttttgggggaagatgaagaaatttcactcaagtattttgttactttaagattcaatgctggacactagaccagctataacattttcagatagagtgacttcatgcgtgaaatgatcacatacaatgaagaggttttaaaaaatacagatgacataacttgttcagttgaagaaaattaaaatactgatataaactaaatcattctcctcttcattttagggggatttttctctgcaattgtactgatttatgactagaaagctgaagactgatttgagcctctttagcaatactctatttcaccatttatcttccaaagaattatggctattttatttcttccaatgaagctggaaaattataatatgccagcagatcagtngaaatgtaaaaatattagtagttaccctt

SEQ ID NO: 5808 - DNA, 283 bp, Homo sapiens
  misc_feature 49, 53, 55, 60, 67, 69, 91, 117, 147, 158, 163, 174, 189,195, 206, 208, 217, 238, 243, 250, 259, 261, 269, 271, 274: n = A,T,C or G
ccgcggtggcggccgcttttttttttttttttttttttttttttttaangatngntttcntttaatntnaaagagataagtggactaacgnggataaagggctccatcttggacaanttgatcagtcttttcttctgtgctgaacanggcctgccaanaacangaaattcaacnccatttacaaagctntcttgncttactctcananaaagccatnactgttcacatcattcaagangctgncaagctnacacctttntnaaataagngntanctttttggg

SEQ ID NO: 5809 - DNA, 451 bp, Homo sapiens
  misc_feature 45, 186, 238, 260, 283, 326, 334, 339, 391, 408, 433, 435,443: n = A,T,C or G
ccgcggtggcggccgctttttttttttttttttttttttttactngaattgttgttatagtgcttccgttatttatttttattttttttattatactttaagttttagggtacatgtgcacaacgtgcaggtttgctacatatgtatacatgtgccatgttggtgtgctgcactcattaactcgtnatttatattaggtatatatacgtgttcattgtacccttatcgactttgcagnatgcttatccatctaactattnatctttatttgccttcgtttttngagttcccttattcatcctaaaacaaaatataatgcctgactnatagtcanacttnacagtatttttaaatgaattacattgcattggggaaatataaatagtaatgnccttttatagaggaagnctaaaaaaaatttcttgggtgaaantnggataatncaaacatt

SEQ ID NO: 5810 - DNA, 390 bp, Homo sapiens
  misc_feature 45, 51, 67, 102, 105, 120, 134, 151, 152, 169, 182, 185,218, 226, 237, 251, 252, 254, 285, 302, 328, 332, 363, 369: n = A,T,C or G
ccgcggtggcggccgcttttttttttttttttttttttttttttngaccanagaggccccaaactancagcctgtcctcctcagtagccccagcatcccttnatnattttgttgcccttntatgggcctagttnaggtctgagaggcatanntttaaaatttttattgntatttatttattntanagataaggtcttgctatgtttcccaggctggtnttgaactnctggcctcaancaatccttctgcannancctcccaaagtgctgggattacaggcatganccaccacgtttggtcanacaaggcatagtttttacaaatatgngggnggataaatgctgtccagtctttactttcatnaacttntatcaattgaatgcttttggt

SEQ ID NO: 5811 - DNA, 508 bp, Homo sapiens
  misc_feature 47, 55, 61, 136, 162, 212, 214, 232, 261, 277, 279, 307,375, 393, 395, 398, 399, 408, 410, 413, 416, 431, 438, 439,448, 458, 474, 476, 491, 495, 498: n = A,T,C or G
ccgcggtggcggccgctttttttttttttttttttttttttttgganaaggagtntcgctntgtggtccaggctggagtgcagtggtgcaatctcagctcaatgcaagctccgcctcctgggttcacaccattctnttgtctcagcctcccgagtagctganattacaggcacctgccaccacgcccggctaattttttgtatttttagtananatggggtttcaccgtgtnagtcaagatgatctcgatcttctgacctngtgatccacccgcctnancctcccaaagtgctgggattacaggcgngagccaccgcacccggcctttcctgtcatttttaaatggatataatggggaggttattcaaggaaacnctgccttcttaaaaaatntnccnnttcccctgnantgngtnttaaaaacctttttnaaataanntgtttattnaaaaacaaanatattttctaaagtantntggaagctccccaangaanatnccccaatttt

SEQ ID NO: 5812 - DNA, 502 bp, Homo sapiens
  misc_feature 26, 76, 86, 92, 166, 173, 242, 244, 249, 264, 336, 339, 347,349, 372, 466, 471, 489: n = A,T,C or G
actactatagggcgaattggagctcnccgcggtggcggccgctttttttttttttttttttttttttttttttganacggagtctngctctntcacccggggctggagtgcagtggcgtgatctcagctcactgccagctccgccttccgggttcatgccattctnttgcctnagcctcccgagtagctggggctacaggcgcctgccaccacgcccggctaattttttgtatttttagtananacganatttcaccgtgttancaggatggtctcaatctcctgacctcgtgatccacccgcctcggcctcccaaagtgctgggattacaggcgnganccaccgcntncggcctggacccttttaattaanaaattttaaagcaaaactgtggggcgattttgctgtgcattaaaagaattgctataaaagatagaaattctgggacttaactggaaaaaacttngattntttaagggccctttggtnccttaaaaaaaat

SEQ ID NO: 5813 - DNA, 443 bp, Homo sapiens
  misc_feature 4, 175, 317, 346, 393, 399: n = A,T,C or G
gaanatggaatctcactctgtcacccaggctggagtgcagtggcatgatctcagctcactggaagctctgcctcccaggttcacaccattctcctgcctcagcctctcaagcagctgggactacaggcgccagccgccatgcctggctaattttttttggtattttttagtacanatggggtttcaccgtgttagccaggatggtctcgatctcctgacctcgtgatctgcccacttcagcctcccaaagtgctgggattacaggcatgagccaccatgcccggccgatttcacctttcaatggcaattactataanacaggaaagttatttatttttatatattnacctaattttaagttaccttatacaaccctcattaatagtctgttanaactanaatttaaactctatgtgaatatggaccttatttaaacaatgtat

SEQ ID NO: 5814 - DNA, 563 bp, Homo sapiens
  misc_feature 165, 310, 344, 467, 517: n = A,T,C or G
acagagttttgctcttgtcacccaggctggagtacaatggcacaatcgcggctcactgcaacctccacctcccgggttcaagtgattctcctgcctcggcctcctgagtagctgggattacaggcacctgccaccatgcctggctgtttttcatatttttagtanagacggggtttcaccatgttggccaggctggtcttgagctcgcgacctcaggtgattcgcccacctcagcctcccaaagtattgggattacagatgtgagccactgtgcccggcacttttctgcttttaaatacaatgattttanaaagtctgtatatgaactttgggcttgtacctanatatcccagtgtgtgtagggagccctgtatatctgcaaggggatccattagaccaaggatattagatccagcacttctcctttttaatgcatgtcataagcacatgattttatatcatgtcanaaaaaggctgttgatataaaggaagagaacaaagaatgagaagaactatntcccgcgttaattaattctagaagtactctcgagggggggcccgga

SEQ ID NO: 5815 - DNA, 619 bp, Homo sapiens
  misc_feature 52, 57, 65, 191, 372, 596: n = A,T,C or G
ttttttttttttttttttttttttttggacggagtcttgctctgttgcccanactanagcacagnggtgcgatcttggctcactgcaacctccgcctcccaggttcaagcgattctcctgcctcagcctcatgagtagctgggatgacaggcgcccaccaccacgccgtctaatttttgtatttttagtanagactgggtttcaccatcttggccaggctggtctcgaactcctgacctcaggtgatccgcctgcctcggcctctcaaagtgctgggattacaggcgtgagccactgtgcatggccagcttgacaaactttctaattgactggctcctgtgcattgctcatccttctctctcatttgttagnggctaggaaaaagaaagaagtttgttatctgagaaatgtgagtccttttaaagtctcaggataacagaggcatttaaaatgcaacagcagtctcttctcactcttcctggcactaaataatgacctcttgaagccacttgctatatgggctttacactgactgaagccaagtaaccataaaatgccatatgctggacaccataacccataccctatagttcagnaatctatagccaaaccctatcca

SEQ ID NO: 5816 - DNA, 556 bp, Homo sapiens
  misc_feature 487, 525: n = A,T,C or G
ttttttttttttttttttttttttacttgaattgttgttatagtgcttccgttatttatttttattttttttattatactttaagttttagggtacatgtgcacaacgtgcaggtttgctacatatgtatacatgtgccatgttggtgtgctgcactcattaactcgtcatttatattaggtatatatacgtgttcattgtacccttatcgactttgcagcatgcttatccatctaactattcatctttatttgccttcgttttttgagttcccttattcatcctaaaacaaaatataatgcctgactcatagtcagacttcacagtatttttaaatgaattacattgcattggggaaatataaatagtaatgtccttttatagaggaagtctaaaagaaattcttgggtgaattgataatcaaacatttttaagaaggtatatttgctagcaaagaaagaaaaaatatgacagcttatttatatanaaaacctatgtattctgggatttttctttgtttcaagnctggatatgaatatcatgctatcccttcccc

SEQ ID NO: 5817 - DNA, 626 bp, Homo sapiens
  misc_feature 504, 526, 539, 561, 564, 574, 578, 589, 592, 613, 614: n = A,T,C or G
ttttttttttttttttttttttttacttgaattgttgttatagtgcttccgttatttatttttattttttttattatactttaagttttagggtacatgtgcacaacgtgcaggtttgctacatatgtatacatgtgccatgttggtgtgctgcactcattaactcgtcatttatattaggtatatatacgtgttcattgtacccttatcgactttgcagcatgcttatccatctaactattcatctttatttgccttcgttttttgagttcccttattcatcctaaaacaaaatataatgcctgactcatagtcagacttcacagtatttttaaatgaattacattgcattggggaaatataaatagtaatgtccttttatagaggaagtctaaaagaaattcttgggtgaattgataatcaaacatttttaagaaggtatatttgctagcaaagaaagaaaaaatattgacagcttatttatatagaaaacctatggattcnggggatttttctttgttcaagnctgtataatgaanatcatggctatcccttcccccngcnttaattaatnctanaaggtcctctncgnggggggggccccggacccaanntttggtcccctt

SEQ ID NO: 5818 - DNA, 226 bp, Homo sapiens
  misc_feature 63, 67, 87, 91, 95, 108, 112, 115, 123, 130, 131, 140, 141,150, 155, 156, 165, 170, 174, 175, 177, 178, 183, 187, 191,195, 200, 201, 207, 210, 215: n = A,T,C or G
ttttttttttttttttttttttttttttttttttttttttttttttttttttttaaaaaaaanaacncagcttttttttttttttanccangggnggacaaaaaattnaatnccntcactatnttttcgnnggaaaaacnnaaaattatngccannttaggggangcccncccnnannaggancccncgtnaatnaattnnaaaagnccnctcgngggggggcccg

SEQ ID NO: 5819 - DNA, 429 bp, Homo sapiens
  misc_feature 8, 14, 24, 29, 35, 43, 49, 58, 60, 66, 75, 84, 88, 94, 129,132, 136, 146, 152, 183, 186, 205, 212, 230, 239, 243, 254,257, 302, 334, 368, 371, 376, 379, 382, 384, 414: n = A,T,C or G
agtgcagnggcacnatttcggctnactgnaacctntgcctccnaggttnaagcaattntntgcctnagctgcccnagtagctanattnacaggngcctgccaccacacccagctaatttttgtattttnagnaaanacggggtttnaccatnttggccaggctggtcttgaactcctgacctnttnatccatccacctaaacctntaaaagngctgggattacaggcgtnaaccaccgngtgnggctggaactnttntttttaaaactatcaaattttatgaggcttattcactatcacganaacagcatgataaaaaagtgcccccatgattnaattacctcccactgggtccctcctacaacatgnggnaattnaanatnanatttgggtggggacacagccaagccacatnattccacccccggcc

SEQ ID NO: 5820 - DNA, 499 bp, Homo sapiens
  misc_feature 107, 159, 235, 240, 242, 244, 293, 320, 331, 375, 385, 390,409, 440: n = A,T,C or G
tttttttttttttttttttttttttttggagctgaatttattataatcctttttttttttttttttaaagatggaatctcactctattgcccaggttggagtacagnggcgcaatctcggctcaccgcaacctccgctttccacctcctgggttcaagngattctcctgcctcagcctccctagtagctgggattacaggcacatgccaccatgcccagctaattttgtattttnactanananaaggtttcaccatgttggccaggctggtcttgaactcctgacctcaagngatccacccacctcagcctcccaaagngctgggattanaggcgtgagtcactgcacccagcataatcctctttcttaaacanaattattttnatttnatttggatttttctatttnacttactttactctttatgatctttaatatnggagttacattcaacatgactttatgcattaaaattatttttcattggcaatcaaatat

SEQ ID NO: 5821 - DNA, 632 bp, Homo sapiens
  misc_feature 575: n = A,T,C or G
cctatagggcgaattggagctccccgcggtggcggccgctttttttttttttttttttttttggggatgctcaacctataatacccaaaggctctatttcagtagaatttattggtttgctgattatagcagtgacatagttgcattctagagaccttagaaaatgcagaaaatttcaagaaaaacatttaaattgtgctcatagtgaaactgagaggtgaccactcttaatattttgtggcataagcattccagtcttttatctttctcaaagtttcacataaactttctcaaaggccattaaatacttttccatagcctgattttttgtgaccacatagtatcctattatattgataataccataatttacctaacccatttttatatatttggattttttccaattcatcattattatgaataatggtgtatctcagtggttattactttgcactgcatttcttatgaaagtattgagtaaaaggaagtaaagccctctcagagtgttttgtaggctgtcacatttcactccataatggcctagtgtttggtgcccccagtgatatatgaangtacccactgaaatgtccacacctttttgggtttcctttttaaaataaaaaattaaa

SEQ ID NO: 5822 - DNA, 571 bp, Homo sapiens
  misc_feature 540, 560: n = A,T,C or G
ggctgagatcttcttattcaacccatatcaatttgactggacttgtagcattcaaatattaacacagatttcaaattttagaaagatatttgtactagaatcttgtcaggtaactctgtggtatttctattagtatggaaattgtttataaagacacactctgaatttttgtggtcaagtagggtttgtagaatctttgatagcccagcatgttaaaatgtaaatgttctagaaaaataatctttcactttccctgtgaaaagaccccgcaaaaagttttttgaggggtgtgttaaatatataaattttgaaagacgtagacaaaatagttaactatctacttatgatatttaataagtttggccaggcatggcaactcatgcctgttgtaatcccagcgtattgggccggctgaggtaggagggattgtgtgagcccaggcgtttgagactgcagtgagctatggatcctgcctggatgacagggcaagaccccaagtcaaaaaaaaaaagtaattgtttaatgaacatttaaaaaccncattggttggaataatgtgnggttaaaaaat

SEQ ID NO: 5823 - DNA, 396 bp, Homo sapiens
  misc_feature 24, 37, 61, 62, 63, 64, 65, 66, 67, 73, 74, 76, 91, 101,109, 117, 124, 131, 132, 134, 161, 166, 180, 187, 198, 200,202, 228, 229, 233, 238, 244, 248, 257, 263, 271, 287, 305,307, 310, 336, 341, 345, 347, 362, 393: n = A,T,C or G
tttttttttttttttttttttttngggggtttaattnaatttttttttttttttttttttnnnnnnnaaaaannanggggggttttaccanttttattttnaaactttnatgtttgntttttgncttttgnngnaaaaattccggtaaaattttggtgctngaaanccccccgttcaacnaaaaatnaaaaaaccaancntnccgttgccaaaaactttaaaatttgnncttnaaaanaaaaanttcnttttgcccngtgcanttgccacnaacctttggctttttnaaacaaaaaaaattcagnanttntgcctttgccccattaaagaaaaaanaaagnggtncnttaaaggcccccgcnttaatttaattttaaaaaattcttttttaanggg

SEQ ID NO: 5824 - DNA, 310 bp, Homo sapiens
  misc_feature 1, 42, 177, 226, 269, 282: n = A,T,C or G
ngggggaattattatttaatggagaaaaaaatccacgttgtntacaacatttcaaaacagaaagttaaatcattaaatagtactttttatttaaatgtttataaggcagatctatgagaaatgatagaaaaccatgggtggggtaatttggatagccaatatttttgggagattacnggagttttagtaattcccaattaccccgttaaaaaagaagataattttnttccaagcccgattccaaaatatctaatgaaaggatcaaggcncggaaaatgagtnttactaattggccaatgggaaaatcaat

SEQ ID NO: 5825 - DNA, 634 bp, Homo sapiens
  misc_feature 618: n = A,T,C or G
tagggcgaattggagctccccgcggtggcggccgctttttttttttttttttttttttggggatgctcaacctataatacccaaaggctctatttcagtagaatttattggtttgctgattatagcagtgacatagttgcattctagagaccttagaaaatgcagaaaatttcaagaaaaacatttaaattgtgctcatagtgaaactgagaggtgaccactcttaatattttgtggcataagcattccagtcttttatctttctcaaagtttcacataaactttctcaaaggccattaaatacttttccatagcctgattttttgtgaccacatagtatcctattatattgataataccataatttacctaacccatttttatatatttggattttttccaattcatcattattatgaataatggtgtatctcaagtggttattactttgcactgcatttcttatgaaagtattgagtaaaaggaagtaaagccctctcagagtgttttgtaggctgtacatttcactccataatgtcctagtgtttgttgccaccagtgatatatgaagggacccactggaaatgtcacacctttttgggtttcctttttaaaatnaaaaattaaaaagact

SEQ ID NO: 5826 - DNA, 252 bp, Homo sapiens
  misc_feature 26, 28, 196, 235: n = A,T,C or G
cgcttttttttttttttttttttatntnggggttttggcggctgtaatgtgcaatgatgtgttttattttccttgagcttaacattactaacaattgcaaaaataatctgaggagcctactttgcattgtttgaagttggagttttggatactgacataaatcatgaatctggcgtattaatgcttaacttcagcncctttgggtggggggatggggtattttttctccccccanccccgcccttttttttt

SEQ ID NO: 5827 - DNA, 472 bp, Homo sapiens
  misc_feature 68, 138, 153, 210, 231, 236, 242, 252, 298, 392, 396, 435,458: n = A,T,C or G
ctatagggcgaattggagctccccgcggtggcggccgctttttttttttttttttttttttttttttngaggaaggcacctacaaaacgaaagtgcctagggcttacaaaagtcatatgtagcctttacaaatattanctcagtcattttcanaaaggtttttccaattatcattttagagatgaggaaactgaagctcagggaggctanggaaactttatccaaagcctnttaanaggctntgttagtcanactgggctaacagctgtaacaaccccagaatttaaatggcttaacncattaggagtttatttgttattgccataacaattcagggtgtatgtttggcaggtagtctacacagtgattcagggacccaggctccttccctntggnggctttttctccctctagtgctgggagctctccatgcanatggtggatggagaaagagaacnaaaagggggggatt

SEQ ID NO: 5828 - DNA, 443 bp, Homo sapiens
  misc_feature 56, 176, 203, 204, 254, 281, 364: n = A,T,C or G
ccgcggtggcggccgcttttttttttttttttttttttttttaacttttgacaganactagatcttgctatgttgctgaggttgctcttgaactcctgggctcaaagaatcctctcatttcagcctcttcaactgctggtattacaagcatgagccaccatatgggctggaagctnatttttaaaaaaactgagaccatatannatgacagcacccagagaaacagaaatattaactgaagttgttgctggcanaccattctttctttccacctttctttnttcctccctccccctcctccatctttttacttttcgtcctcttcctttctcttctttctctccttcattatccctttcactgnttctctttctccctttcttttttcttttctttcccccgcgttaattaattctagaagtactctcgagggggggcccggg

SEQ ID NO: 5829 - DNA, 374 bp, Homo sapiens
  misc_feature 44, 147, 174, 184, 187, 196, 200, 210, 268, 317, 330, 335: n = A,T,C or G
ttttttttttttttttttttttttacttgaattgttgttatagngcttccgttatttatttttattttttttattatactttaagttttagggtacatgtgcacaacgtgcaggtttgctacatatgtatacatgtgccatgttggngtgctgcactcattaactcgtcatttnatattagggnatntataccgtngttnatttgtaccnttatcgacttttgcagcatgcttatccatctaactatttcatctttatttgccttccnttttttttgagttcccttattcatcctaaaaacaaaaatataatgcctnactcaatagtcanacttnacaagtatttttaaaatgaattaccattgccatttgggg

SEQ ID NO: 5830 - DNA, 302 bp, Homo sapiens
  misc_feature 47, 49, 87, 94, 104, 130, 164, 185, 188, 190, 193, 209, 210,234, 243, 252, 255, 257, 265, 269, 283, 286, 287: n = A,T,C or G
ccgcggtggcggccgcttttttttttttttttttttttttttttttnanagggaaaattttgctgttttgcccaaactggagtgaantggtatnatcttggctnactgcaacctccgcccacccaggttnaagctattctcctgcctcaaccttctgagtaagntgggattataggcacccctgncananatngctaatttttgtattnntagtaaaaacggggtttaaccacnttggccagnctggtctcnaantnctgacctnaggngattcacccgcctnaannaattctaaaaatact

SEQ ID NO: 5831 - DNA, 134 bp, Homo sapiens
  misc_feature 7, 15, 67, 75, 114: n = A,T,C or G
ttggcanctccaccngcggtggcggccgcttttttttttttttttttattttttttggggcgacctnggtagcanaacccaacctccgagcagtacatgctaagacttcaccantcaaagcgaactactatact

SEQ ID NO: 5832 - DNA, 273 bp, Homo sapiens
  misc_feature 82, 207, 230, 236, 238: n = A,T,C or G
actacttagggcgaattggagctccccgcggtggcggccgcttttttttttttttttttttttttttgaaaaagaatcacanccaaaataagacattaactgcaaaatccaaaatggctgcgcttaccctatgtataaaaatgcgtccagtccggtcggggcacggcctatgctttcccggggatcttggcccgcttgcgtgcaatnagccatcctccacggccttcagntgtttnancagctcctcccgccttaattaattctagaagtact

SEQ ID NO: 5833 - DNA, 482 bp, Homo sapiens
  misc_feature 10, 78, 163, 189, 209, 261, 289, 370, 401, 405, 445, 468: n = A,T,C or G
aatacgactnctatagggcgaattggagctccccgcggtggcggccgctttttttttttttttttttttttttttttngaggaaggcacctacaaaacgaaagtgcctagggcttacaaaagtcatatgtagcctttacaaatattagctcagtcattttcanaaaggtttttccaattatcattttanagatgaggaaactgaagctnagggaggctaaggaaacttatccaaagcctcttaagaggctatgttagtcanactgggctaacagctgtaacaaccccanaatttaaatggcttaacacattaggagtttatttgttattgccataacaattcagggtgtatgtttggcaggtagtctacncagtgattcagggacccaggctccttccctntggnggctttttctccctctagttgctgggagctctccatgcanatgggggatggagaaagagaacnaaaagtgggggatt

SEQ ID NO: 5834 - DNA, 331 bp, Homo sapiens
  misc_feature 46, 167, 169, 175, 223, 309: n = A,T,C or G
ccgcggtggcggccgctttttttttttttttttttttttttttttnaaagcaaaactcccgacagccgagccccgttcggggccttttcttttttttttctttaatggagtgaaatctactttgctcaggaagcctgcaaatcacattttcaggccaaacgaggcantnttttanaaggggtcgctgaggcaggagtaggaaggcttttccactccactcacncattttcagtgtaggcgaatcgtaaaacggagggcagaacgaaaatgagcggatctgggagtgcaggctgcgcttcgtccccccgngttaattaattctagaagtact

SEQ ID NO: 5835 - DNA, 521 bp, Homo sapiens
  misc_feature 73, 76, 80, 90, 128, 155, 159, 164, 230, 259, 274, 282, 290,292, 294, 310, 311, 315, 363, 393, 402, 419, 433, 453, 456,466, 483, 484, 495, 497, 502, 511, 517: n = A,T,C or G
aacactacttagggcgaattggagctccccgcggtggcggccgcttttttttttttttttttttttttttttnganacanagttttgctnttgtcacccaggctggagtacaatggcacaatcgcggntcactgcaacctccacctcccgggttnaagngattntcctgcctcggcctcctgagtagctgggattacaggcacctgccaccatgcctggctgtttttcanatttttagtaaaaacggggtttcaccatnttggccaggctggtnttgagctngcgacctnangngattcgcccaccttanncctnccaaagtattgggattacaaatgtgagccactgtgcccggcacttttntgcttttaaatacaatgattttaaaaagtnttgtatatnaaactttgggcttgggncctaaatatcccantggtgtgtagggagcccctnttnttattttgcnagggggatcccatttannacccaagggananttaanaatccagcncctttntccc

SEQ ID NO: 5836 - DNA, 291 bp, Homo sapiens
  misc_feature 124: n = A,T,C or G
actacttagggcgaattggagctccccgcggtggcggccgcttttttttttttttttttttttttttttggagacagggttttgacatgttggtcaggctggtcatgaactcctggcctcaagngatccacctacctcggcctcccaaagtgctgggattacaggtgtgagccaccgcgcccaaccctgtgtttattcttaggtctgtactacgctttatgcctcaagtttccacaggtaaaacacgttattttattcctcacgttataggagcaatttgtattcataaac

SEQ ID NO: 5837 - DNA, 161 bp, Homo sapiens
  misc_feature 59, 73, 83, 102, 115, 118, 130, 135: n = A,T,C or G
ctacttagggcgaattggagctccccgcggtggcggccgcttttttttttttttttttntttttttttttttnggattcatanaaagacttttatctattgngcaaagagagggncanctggctccccanaaggntctcaaccccatcaagactgtccatt

SEQ ID NO: 5838 - DNA, 140 bp, Homo sapiens
  misc_feature 64, 69, 120: n = A,T,C or G
ctatagggcgaattggagctccccgcggtggcggccgcttttttttttttttttttttttattnaaggnagtgggtgttgagcttgaacgctttcttaattggtggctgcttttaggccnactatgggtgttaaaatttt

SEQ ID NO: 5839 - DNA, 115 bp, Homo sapiens
  misc_feature 3, 11, 46, 86: n = A,T,C or G
ggnggaaggcncctacaaaacgaaagtgcctagggcttacaaaagncatatgtagcctttacaaatattagctcagtcattttcanaaaggtttttccaattatcattttagaga

SEQ ID NO: 5840 - DNA, 449 bp, Homo sapiens
  misc_feature 74, 88, 111, 138, 170, 298, 311, 316, 359, 431: n = A,T,C or G
acactacttagggcaattggagctccccgcggtggcggccgcttttttttttttttttttttttttttttgganacagggtctcactntgtcacccaggctggagtgcagnggcgcaatctcagctcactgcagcctntgcctcccaggttcaagcggttctcctgcctnagtctcccgagtagctgggattacaccaccacacctggctaattttttgtatttttgggtatagacgggttttcgccatgttggccaggctggtgtcaactcctgatctcaagtgatctgccagcctnggcctcccaaagngctantacaggcgtgagccaccacgcctggcttaggctgcttaaaaantctttcttaggtatccttggttttggaaaaaaaaagaataacagaaaactaaaaattcccagtggcagtctntgtatcactggaatttaa

SEQ ID NO: 5841 - DNA, 313 bp, Homo sapiens
  misc_feature 59, 64, 152, 230, 259, 263, 303: n = A,T,C or G
tagggcgaattggagctccccgcggtggcggccgctttttttttttttttttttttttngaggngaatgaatttaatataatctctataaaaaccctaatcacacagttttttacagaaatatagtttattttttttttttattttttttanatggagtctcactctattgccaggctggagtgcagtggctgtagtggcctgatctcggctcactgcaacctctgcctnccggattcaaagtgattctcctgcctcancctnccgagcagctgggaatacaggcacccgccttaattaattntagaagtact

SEQ ID NO: 5842 - DNA, 414 bp, Homo sapiens
  misc_feature 235, 251, 267, 271, 275, 292, 293, 317, 354, 367, 395, 401: n = A,T,C or G
actacttagggcgaattggagctccccgcggtggcggccgctttttttttttttttttttttttttaagacggagtcttgcactgtcgcctaggctggagtgcaatagtgcgatcttggctcactgtaagctccacctccggcgttcacgccattctcctgtctcagcctcccgagtagctggaattacaggctcccgccaccacgcccggcctttttttgtatttttttagtanagacagggttttactntgttggccagactggncttnaacntctgacctcgtgatccnnctgcttcggcctcccaaaagtgcntgggattacaggtgtaagcccacacgtgccccgcctnaaattaaattctngaaagtactctccagggggggcccgggncccagncttttgttccctt

SEQ ID NO: 5843 - DNA, 206 bp, Homo sapiens
  misc_feature 48, 86, 131, 169: n = A,T,C or G
ccgcggtggcggccgctttttttttttttttttttttttttttgaagnacaaatgcttttatattcagcccctgtaaagccatcanatgtttgaaagttgttaaacaccaaccaaagggtttaattttaanaacttagctaggaatgggtgaaatcctacccaattaanaggagttctgcaaattattaacaaagtgtaaaatgaa

SEQ ID NO: 5844 - DNA, 266 bp, Homo sapiens
  misc_feature 30, 76, 80, 82, 90, 93, 108, 142, 155, 165, 189, 207, 208,211, 212, 222, 244, 254, 262: n = A,T,C or G
atcgactactatagggcgaattggagctcnccgcggtggcggccgcttttttttttttttttttttttttttttgnaagnanattgtttntgntaggcaatataatcngctaatgggacagtttccctgtaacaatgtgtancaaaactctgcangattaatganaagaatgtattgcctttgaagcancaccacttgagtaaaaannccnnaaatgggctntatgttatgctagtggaagaanagcaccggangatatttnttgg

SEQ ID NO: 5845 - DNA, 474 bp, Homo sapiens
  misc_feature 131, 157, 207, 212, 228, 256, 341, 342, 373, 388, 392, 403,431, 441: n = A,T,C or G
ccgcggtggcggccgcttttttttttttttttttttttttttttttgaggaaggcacctacaaaacgaaagtgcctagggcttacaaaagtcatatgtagcctttacaaatattagctcagtcattttcanaaaggtttttccaattatcattttanagatgaggaaactgaagctcagggaggctaggaaacttatccaaagcctnttaanaggctatgttagtcanactgggctaacagctgtaacaaccccanaatttaaatggcttaacacattaggagtttatttgttattgccataacaattcagggtgtatgtttggcaggtagtctacacagnngattcagggacccaggctccttccctttggnggctttttctccctntagngctgggagctntccatgcaaatggtggatggagaaaganaacaaaaagngggggatttttataggccaggcctggaattggc

SEQ ID NO: 5846 - DNA, 326 bp, Homo sapiens
  misc_feature 124, 148, 160, 237, 242: n = A,T,C or G
actacttagggcgaattggagctccccgcggtggcggccgctttttttttttttttttttttttttttctctctttagacagagtcttactctgtcacccaggctggagtgcagtagtgcaatnttggctcactgcaacctccacgtntcatgttcaagngattctgctgcctcagcctcctgagtatctgggattataggcacacaccaccatgcccggctaatttttgtattttnagtanagactgggtttcaccatgttggccaggctggtctggaactcctgacctcatgatctgcccgccttaattaattctagaagtact

SEQ ID NO: 5847 - DNA, 796 bp, Homo sapiens
  misc_feature 9, 14, 29, 35, 55, 69, 71, 79, 84, 92, 93, 100, 116, 118,120, 126, 136, 144, 151, 154, 158, 181, 200, 210, 233, 235,243, 253, 255, 260, 261, 287, 296, 306, 308, 310, 335, 337,344, 346, 358, 376, 383, 409, 449, 455, 461, 462, 474: n = A,T,C or G
  misc_feature 479, 488, 492, 495, 502, 515, 521, 543, 546, 548, 556, 562,567, 571, 582, 594, 601, 603, 608, 619, 627, 636, 645, 651,660, 662, 663, 665, 685, 691, 699, 706, 720, 735, 740, 749,754, 770, 776, 785: n = A,T,C or G
ccttgccgnaaggnccgggggctccgtcnccaagngttgggtttggtaaattggnggtgaattaatttncnttgggccnaaggnaaaaaatnnttccggnccccctcctttttttncngnaagggnccgggggccntccgaccncaccggnggngganccaaggggggtttaacccttgtnaaaaaatttttaatagggnttgggaaaanggggggttaaaaaacatcgttcncnccaaagtnaaagattttnangggcnnccaagggcctccttattttctaaggnaggtttttngtaaaaaggntncnatccaatgaccgttttatggggggnanttttccnanaaaaaaattggnaaggcccttaccctttanaaaaaanaaccaaccctttaaaatttttaaggnttttaattttaaggaaggaaaaaccctttcccgggggggnttttcnccaacnntttttttctaanggggnaattccccnaacnccnttttggnggttattgggggnctccanggattgggggtataaaaaaaanccnanccaaaagnggtcanttttncttnttccaattttnccaaaacccaanaggtttnanccccnttttcgtggtntccggctnggaacctcnaacctggcntttaanagggggggncnngnaaataatttttccccaagancaaacnaacctttnggggtcnggggcttccgggtnttaaccttaaggttngtggnattaccccnggagncctttctggggtttanccccanaagggcctntttgggggccc

SEQ ID NO: 5848 - DNA, 313 bp, Homo sapiens
  misc_feature 266, 278: n = A,T,C or G
cccttagcgtggtcgcggccgaggtacccagttaagttttgatggtttaaattccactaaagaacatattcttctaataactagcatttattacatgaaatttaagagtttaagttccatcaaactagcccttgtggtaagattattatttcttctctataacttcaaaataagatatttcattcaaactgttcaggtgagaaaacataatggatttttttttttttcctctggagctgcctgttcagtgagatggaggaggtggncacatttaaggntcagttcactaacctatggttcagagtttctgatc

SEQ ID NO: 5849 - DNA, 293 bp, Homo sapiens
ccctttcgagcggccgcccgggcaggtaccattcttatctcagaatgctgtaaaccatcagtagaagcagtttagatttggactgcatggtaaaatgaaaagtaataaccctccaaccacaacctagtcagggtattaataattatatgtagcaagaaaacaaagaagaaaataatattgaaaaaatggagattccccaaccagtttcatatttgaaggatctgagttgtatttttattaaggaaattttttttctgaatactgtcttccaaaatgttaacattaaaatctga

SEQ ID NO: 5850 - DNA, 361 bp, Homo sapiens
cccttagcgtggtcgcggccgaggtactctacggtgtcaataattatttcagtctctgctgcaattagtgctaattacaatacctgagctatgaaaataaaagatttcattatagcaaagttcacaaatatcgttttagttcagttatccacattgttcgtctaaaataatacattttctttacatataactgtcttagacttgtaattgaggatatttgatgaaacagatctgtatctgaaacagcactatgatgctaaacatttgcataaggaatgaaaaaagttagcaacctagttttttcaatattcagaatattttgagatttacacagaaaactacatccaagatgaatgactga

SEQ ID NO: 5851 - DNA, 356 bp, Homo sapiens
  misc_feature 317, 344, 351: n = A,T,C or G
cccttagcgtggtcgcggccgaggtacacatataccgtatttagctcagtttggtattttatagaggtatatttggtattagagtttaaattgtctcaaggagcttttagaccttgatttttttcatgtcataaaatgagctacgagaccctttaactgagtagtaatgaaggtagccagttttatataaatagcatttattattttatgatcattttatttagtttgttatgtgcagatgttttccccactagaatttaaagtggtaatgaatggaggggatcttgtttgtcttgcacagcattgaatttcccacntaacctctcaattaaaatacttacctngttcaantgaaa

SEQ ID NO: 5852 - DNA, 254 bp, Homo sapiens
  misc_feature 10, 26, 158, 221: n = A,T,C or G
cccttagcgnggtcccggccgacgtncgcggggagagagaaggttaagagcaacaagatgggaggcagctgcatggaacctgtcccactgaggaagtaaaacaggaatccaaaataatacgtttgctgggaattataaagaatttcattgagaaagtnaaaaagaaaaatctatgcaaaggaagtgattctgttgtttaatgccattacctgtcattctgnctcttaccatggctggcttggctagtggcacca

SEQ ID NO: 5853 - DNA, 392 bp, Homo sapiens
cccttagcgtggtcgcggccgaggtacaggttatctaaaatttacaacagtcctcttttcttaaaaaaaatgcagatatgattaggattgtatttaacacaaaagctttgtaattcctgctttaaatctacttggctataaaaattttaagggaattttatcgtgaaagcagcccaaatctattcaaaggagcaagcctttcaagccagtgacccccaatgcctttttttctttgccattcaatagtgcaaatcacccatctgttacaaacaggaacctgaaaaagcaacaacatcctggcagtgactagccttaaaaaccattcccaactctacctccagacctgacactgtattcaagtgaatgtgcctgaggtgtgatcaccacaagga

SEQ ID NO: 5854 - DNA, 375 bp, Homo sapiens
  misc_feature 102, 104: n = A,T,C or G
ccctttcgagcggccgcccgggcaggtaccattcttatctcagaatgctgtaaaccatcagtagaagcagtttagatttggactgcatggtaaaatgaaaantnattaacccttccacccccaacctagtccagggtattaataattatatgtagcaagaaaacaaaagaagaaaataatattgaaaaaatggagattcccccaaccagtttcatattttgaagggatctggagttgtattttttattaagggaaatttttttttctgaatactgtcttccaaaatgttaacattaaaacctgaatcagaggactctgaatggaaaagaagtttgatcactgacacctagggctctgaagcgtgtgtggccacat

SEQ ID NO: 5855 - DNA, 324 bp, Homo sapiens
  misc_feature 40, 41, 49, 79, 100, 107, 108, 113, 114, 148, 168, 171, 192,201, 225, 255, 256, 263, 270, 281, 288, 307: n = A,T,C or G
ccctttcgagcggccgcccgggcaggtacattcattcccnngggctatncagtcatactgaagagcaatgctgatcatnacttctccactttacaggatnttctctnngaccnnaaagtgaatctggcttaacttggcacaagggagnggacagggtcattgtgggcngcnccaggagagacatatttgatnggccacaanattcaatgcctctaagaaatgganggctaatacaaaaaaaggtgggatccttgnnagcaaanacactgnccaagaaatanaccaaanttgaccaaaaacctgaatnggagtgctgaggctctg

SEQ ID NO: 5856 - DNA, 336 bp, Homo sapiens
  misc_feature 315, 332, 336: n = A,T,C or G
ccctttcgagcggccgcccgggcaggtactcttaaaaatctgttaagagagtggatctcattttaagggttcttaccacaataaaattaaatttttgaaataaatcagtcatatttgagtgaaatgaaaccctttccgagtagtttcagacaattgataatacctagtttacagttcctgtagtcattttggagggtgaggacttgatgtgtttagtaaagttgagaaataaatacatgaaagaatgtgtgggggaagagaaagtgtgggggaagagaaattgtctcagaggaccattcttagtggcactggggnaaattcttggcacccanaagn

SEQ ID NO: 5857 - DNA, 368 bp, Homo sapiens
cccttaggtggtgcggccgaggtaccattcttatctcagaatgctgtaaaccatcagtagaagcagtttagatttggactgcatggtaaaatgaaaagtaataaccctccagccacaacctagtcagggtattaataattatatgtagcaagaaaacaaagaagaaaataatatcgaaaaaatggagattccccaaccagtttcatatttgaaggatctgagttgtatttttattaaggaaattttttttctgaatactgtcttccaaaatgttaacattaaaatctgaatcagaggactctgaatggaaaagaagtttgatcactgacacctagggctctgaagcgtgtgtggccacatggaaaagt

SEQ ID NO: 5858 - DNA, 378 bp, Homo sapiens
  misc_feature 206, 207, 297, 318: n = A,T,C or G
cccttagcgtggtcgcggccgaggtacgatcttggctcactgcaacctctccctcccgggttcaagtgattctcgtgcctcagcctcttgagtagctgggattacaggcgcgtgccactgcgtccggctaatttttgtatttttagtagagatggggtttcaccatgttggccaggctgatctcaaactcctgacctcatgtggtnnacccaccttggcctcccaaagtgctgggattacaggcgtgagccaccacgctcaaggcctacaagcaattttttaaaaactgacacctantactgataaaaaatatctctngtttttaaaaatccctatttactaatttttaaaagaataaagtattttaagttttttttt

SEQ ID NO: 5859 - DNA, 590 bp, Homo sapiens
  misc_feature 1, 4, 6, 7, 18, 19, 22, 23, 27, 32, 35, 40, 45, 50, 59, 76,104, 147, 167, 171, 186, 198, 212, 213, 234, 239, 245, 254,255, 260, 261, 262, 278, 282, 286, 314, 316, 318, 329, 353,355, 357, 366, 380, 382, 387, 419, 430, 431, 445, 458: n = A,T,C or G
  misc_feature 466, 476, 488, 490, 496, 506, 508, 510, 513, 515, 516, 523,543, 568, 573: n = A,T,C or G
nccncnngtggggagggnnttnngcanaaatncgnccctnaccgnggtcncgggccganggtacccaggtcaagtngattttgaagactcagcacatctcatgncaaccagttccacaaataagccctgttaaacaaggaaccttangggtataattcctaccattncagnatccaaggggtcacntcagcctccttngtacatttttccannactccaaggactcccaaaagnttttngctaanccaaatcannttcannnaaataaatttttttcnaggnaggnaaattctcaccaattggttttttacccnangnagtaccaaccncaatttcttccccccttctccttncncnttgggggtnccccccctcttggngnaaggnaggggcaaccttaattttccaaccaacccagnggggaaggggnnttaatttttccctnttggggaaaaaantgggttgngaaaaaggtnctcccccaaaantngggccnctaaggattncngnggngnnccaaagntccccccaagggggtaattnaggcaaaaagataaaaagggggttnggggntttaattttcccctttt

SEQ ID NO: 5860 - DNA, 906 bp, Homo sapiens
  misc_feature 3, 14, 16, 20, 26, 31, 38, 40, 42, 46, 49, 54, 56, 60, 62,67, 69, 71, 73, 75, 78, 80, 82, 85, 88, 91, 93, 99, 106,108, 112, 114, 117, 123, 126, 130, 136, 138, 142, 144, 155,161, 165, 167, 177, 179, 185, 189, 206, 213, 222, 229: n = A,T,C or G
  misc_feature 230, 233, 234, 241, 258, 281, 282, 284, 292, 296, 297, 309,311, 318, 321, 322, 324, 332, 338, 343, 346, 348, 355, 356,363, 370, 377, 382, 384, 394, 405, 415, 424, 426, 428, 450,456, 461, 468, 473, 475, 478, 482, 485, 518, 520, 536: n = A,T,C or G
  misc_feature 598, 625, 631, 638, 643, 648, 661, 678, 682, 685, 689, 701,704, 712, 714, 723, 732, 737, 748, 752, 784, 788, 835, 843,847, 858, 862, 882, 887, 897: n = A,T,C or G
cgnaaattgggggncncctnctaagnatggnccatggncntnccgnagnccggncnccgncnccagntngntngnatngngnatnatnctngnccaggnaaaaatntncggncnccntttttncgnaagnccgggncncggncncccgggggacnaggggnttancnttcgcttgcngncaaagntggncctttcccttttgggtnaattttncaaagtgcnccccaannggnnaattaancccccttttactttacntttaaaaggggggaacccaaagnntncccaaccncccnnccaattcctttncnaaaaagnggnncnccttcccnttcccncaaanggntnaattttnnggggacnaattttnccaattnttggngngtaaatttgnaaccaaacccntttttttttnggaaccccncncnaacccctctcgaaaaccaaagngggaanaattngattggntggtncnaanatanccnagttaaggacattttcgggaggaccaaaagttntngccctttcccattttncaacaaaaggcggccatttgggggtaaaccaaattacaaacccttttattcgaaataccgtnaaaaaaattatggggggattttgcatnttaaantccgaanaaggnccggngtaaccaaacacnaaccgaaggtttttggnattnggntacnaaaaaactcccnggnaacctaancnccaaccgcntttgggggnggggnaataaaccttnaacnttggggccttttccaaaggggggggttccaantttnccaatttaatttccaaaaaaaaggggcctttgggcccccaatttggnttttaccncccnaaaaaattaanggcnaaaaaaaacccccccaattnaattncccctttggnaaaattggg

SEQ ID NO: 5861 - DNA, 373 bp, Homo sapiens
ccctttcgagcggccgcccgggcaggtacccttgattatttccttgtgttgactctgagatgctgaccccaagctggctgccataggagttgattcccatcatgccactgtgcgctggggagctagagaagggctggaagctggctgggattcctggggacgctgtagagagcttcagcaatgtctgcggctcgcttcaaaatgatgtcctggttattgtgtggtgtgccataaagagcttccactagatctgcagctcttttcaacagcatctccttagctagtctctcagggatctccagggatgccctaggggatggacccttctgcagtctcttgggaagcccataagtctatgggtgggggttcaatt

SEQ ID NO: 5862 - DNA, 302 bp, Homo sapiens
cccttagcgtggtcgcggccgaggtaccattcttatctcagaatgctgtaaaccatcagtagaagcagtttagatttggactgcatggtaaaatgaaaagtaataaccctccaaccacaacctagtcagggtattaataattatatgtagcaagaaaacaaagaagaaaataatattgaaaaaatggagattccccaaccagtttcatatttgaaggatctgagttgtatttttattaaggaaatcttttttctgaatactgtcttccaaaatgttaacattaaaatctgaatcagaggact

SEQ ID NO: 5863 - DNA, 461 bp, Homo sapiens
  misc_feature 110, 144, 146, 152, 172, 179, 186, 190, 215, 233, 238, 241,251, 258, 302, 308, 323, 324, 401, 409, 411, 417, 424, 427,439, 455: n = A,T,C or G
ccctttggccgcccgggcaggtacgatcttggctcactgcaacctctccctcccgggttcaagtgattctcgtgcctcagccacttgagtagctgggattacaggcgcgntgccacttgcagtctcggctaatttttcgtattntntagtangaagattgggggttttcacncatggtntggccanggtnttgatctcaaaactccttgaacccnttcattggtgagtcacanccccnacnctttggggcncttcccncaaaaagatgcttgggggatttaaccaagggttgtttgaagacncaaccnggccagcctttcaanncccttatcaaaagtctaaaatttttttttttaaaaaaaaaaccccggaaccaaccccttaatataaccttggaattnaaaaaaantnttcttncttggtnttntaaaaaaaattncccttaatttttaccnttaatt

SEQ ID NO: 5864 - DNA, 251 bp, Homo sapiens
  misc_feature 139, 234: n = A,T,C or G
ccctttcgagcggccgcccgggcaggtacctcttattccagagaagtggggagcagagaggaagatggagtggaaaggggcgaggcaaggccctcctgaaatacctcaacccaaatcttcaagaaatccccaagtcctnacagtgctttttgtggatttttgtggaaaccggtaaaaggggctgatttgctgaccccagtgggtagaaaacagagactgtcaagagaacataanagaaggcagaaagggga

SEQ ID NO: 5865 - DNA, 331 bp, Homo sapiens
cccttagcgtggtcgcggccgaggtacacttatggtcctagttactcaggagacttaggcaggaggattgcttgatcctaggaattcgaggctgcagtgagctatgattgcacctctgcacccaagcctgggcgacacagcgagaccctctctcttaaaaaaaaaaatagcagagctcaccaaagtgatgttcacctttttatgacattcctttttcttagcttaagaaaagaaagctgctagatgagagtcttagttttcctgcataagacctcctttatgaatagaataaaagactgtcaaagtaggctgggcttgggcccaggctaat

SEQ ID NO: 5866 - DNA, 680 bp, Homo sapiens
  misc_feature 54, 116, 149, 203, 205, 213, 282, 289, 372, 403, 434, 446,447, 462, 463, 464, 470, 474, 505, 506, 510, 517, 533, 535,546, 554, 555, 562, 569, 583, 586, 589, 593, 594, 602, 625,641, 655, 659, 668, 676: n = A,T,C or G
cccttagcgtggtcgcggcccgaggtacagagaggggctcgctgcgctgggtanaggaagcaggaagtttgctgaactcagacggaagaaaaaggattccttggagaatcccagcnggtttctgattggacatgggtccatgtccttgngaagtctcctcctcctgaacctgccctgctctgtgacttgcttttgaccaccancntgctgcangaagtgatgccgtgtgacttctgagcgggtcataggaagccttgcagtgtggcctgggtcttcaggaangcttgcntgaggaaaaccactgtcatgtaagaagtatggctaccctgagactgtcatggtgtgaggactcctaaatgagtcacatgtggntggccacctattcaggcctcagttcttccanccattgcgactgtggcccacgcatgtggggnaagaagccattnntcacgcccattccannncgagtntttnagatgatccctttctggggctacagctgacnntaancatactncaggcagggaaccacntnagaaactgggnccagtttnncaaccangcttttngaagggatgataangcnttngtgnnttaaaagncactgcaatttggaatggctggnggtttccaccctaatnaaaacaagactttnattncctttttcnaaaaaaanaaaa

SEQ ID NO: 5867 - DNA, 350 bp, Homo sapiens
  misc_feature 299, 331: n = A,T,C or G
ccctttcgagcggccgcccgggcaggtacagaggaggagggcgccaaagctgagagaggcaacccctcaaatattaaaaaggaagaaatggcgtgataggctagcacattttatggaaagccattgtctttaaattaaatgttttccctacaaatgttctcttgtatcaaggaacctggcacatagggaatgcatgaaacctgatttataatcagattcagtctacttaagtaataacctatatctagatgatagattgtcaactgtgctactttagccatcatcacatacccagcgtnttctatccttagtgacaccagctgggcccagnagggcaagggcctgcattc

SEQ ID NO: 5868 - DNA, 198 bp, Homo sapiens
  misc_feature 5, 8, 31, 38, 45, 65, 72, 73, 83, 84, 85, 87, 91, 106, 122,137, 143, 148, 154, 159, 162, 167, 178, 183, 187, 189, 198: n = A,T,C or G
gaaanttnggggggcccccttccttagaaanggccatnggcttcngaagccggggccccgcccanttggttnnaatagggaannntntctnggcaaggaaattttnccccccccttttaagnccgttggggttcccncgggcncccgnaagggnaaccnttnttttnttttttttttnttttntttntnttttttttn

SEQ ID NO: 5869 - DNA, 531 bp, Homo sapiens
  misc_feature 387, 519: n = A,T,C or G
cccttgcggccgcccgggcagctacagaatttccttttatattattcctctaccctccacctgtaaatgaatgttagtgcagtaattgtttgaaataatgcctcatccagtgttaggtcagtagctccacagtctacacagtccagaattctttctctaattgtcccaaagggggacattgtggaggcagggttagggggaaccacttcaagtggttagggacagataaataataggcagtatagcacatgaaagaaaacacacacttggaagccaggagacttgtgtcctagtcaaaactctggcattatgtgaccttggacaggtcatctaactactctgaaatttatcatcagtcaaataagattttattctgttttgttttgnttgagatggggatttgctcttgttgtccaggccgaactgcaatgttgtggtctcggctgactgcaaccttcacctccagattcaagcgattcttctgtctcagccttcacaggagctgggattttttttttntttttttggatt

SEQ ID NO: 5870 - DNA, 351 bp, Homo sapiens
  misc_feature 6, 8, 20, 24, 27, 41, 66, 96, 117, 163, 176, 322: n = A,T,C or G
cccttncnagcggccgcccnggcnggnactaaatgttaggnttcttgaacccagcatgtttttttntctcttcttatcaggcagaacacacgttgntctctttacttggaacgccgnctctgacagatggtcacctcaccatcactcattcatccttcaagtnttcgatacaattncttccaagaaaacttacctgattatttgagcttgagatagcactctctggaaagccctagaatttttatagcttgcggtaattgcttactgaaatctccagtgggcttgggaaaattaggggaaggtattttcatgtatctattgnttaatttttttcatttaccacaagctagc

SEQ ID NO: 5871 - DNA, 253 bp, Homo sapiens
ccctttcgagcggccgcccgggcaggtacagaggcttaggggaagtgagacataagcttgtaggaataataaacgttctacaataaacgttttggctatcttaagccattgtatgggggggattaggaagtaggagggattgtcctacaacaggcccttatacttcaacagcccaaatattttggtttattcctttttatccataaagtctttattcttcaagtttgggtattatagattaccattgttagcc

SEQ ID NO: 5872 - DNA, 436 bp, Homo sapiens
  misc_feature 12, 14, 18, 22, 24, 25, 27, 71, 98, 105, 114, 118, 164, 166,175, 187, 207, 212, 226, 258, 265, 274, 281, 285, 286, 292,320, 326, 327, 354, 361, 382, 386, 396, 399: n = A,T,C or G
cccttagcgggncncggnccangnncnaggctaagcattttaactttatactggcaaaaaaaatcaaacanaagggggaggggataataggacttaanttcagtnctttggcancttngaaaaaaccaaaaaattatggttaatttaaaaaatttcccattagncntgcaatgtnaacaattgtaantttcttcccaggcttaaaanaatanaagttaatccctgntgatatctaatgtgaatgacatattctgaggntcctttngaggaatgntgcacanaaanntgtggnaaaatcgaaatttttcaggtattggggncaaaannaccacctggagggattgaattgcttgnatttagnattaaatttcactcccgtganatgnatcatgcctngtngtggcttaggtaaaagttattaaacccctggggaaaa

SEQ ID NO: 5873 - DNA, 368 bp, Homo sapiens
cccttagcgtggtcgcggccgaggtacaatataaaccataattgtgatttaccttaagtaggtataactcttatgggatatacagtatagtttttgtgaatctttacatgatagcattatctttttataattttttttcctaagataaacaaatgcatagttttcttctatgggtgatagaaacagctttttgaagtaatgaaaacctcaaaagatcatgttgattcttaatttttgccttttgcataagcctctttataacatgtatctttaaaacaattaagtccttaggaatgtgtaaccaggaactatgttaagtattgcttataaaaaactttagtttaggttccaatatataccatatatac

SEQ ID NO: 5874 - DNA, 298 bp, Homo sapiens
cccttagcgtggtcgcggccgaggtacctgtatgaggcccctggcaacttcacacgacctaactgaactctctcaagccatcctttcaaaaggaatgaaaattgaggtctcttgttttatgctgaagactctacgatgcctgcagagtcaggaactctggaatcttaggtgtcctccttacatatccatctccatcacccttggctgaacatgctgagaaagaatgacccggcatgcatgcagagaagagtcactactttctgtgttcaaacatgttcgggccctgtgtacctgcccg

SEQ ID NO: 5875 - DNA, 376 bp, Homo sapiens
  misc_feature 107, 125, 184, 348: n = A,T,C or G
cccttagcgtggtcgcggccgaggtacttttttttttttttttttttttttttttttaataatcacagtaagttcattcgtatttgtcaaaactaggaacgctcaanaagttctgtaggtgagtngataaacagcccggcagtaaattcatagaataatattcagtaattataaacaagagctntcaaaccataaaaatacataaatgaattttaaatgcatattgttaagtgaaagaaacaagtctgaaaaagctacataatatgttatttatttgatattctgggaaaaagtccaaacacacaaagtggattctgtattcgcgaggaaatttaagggagatgatgnaaaatggggtaaaaaaaataggatttaa

SEQ ID NO: 5876 - DNA, 359 bp, Homo sapiens
  misc_feature 339: n = A,T,C or G
cccttagcgtggtcgcggccgaggtactctacggtgtcaataattatttcagtctctgctgcaattagtgctaattacaatacctgagctataaaaataaaagatttcattatagcaaaagttcacaaatatcgttttagtttcagttatccacattgttcatctaaaataatacattttctttacatataactgtcttagacttgtaattgaggatatttgatgaaacaggatctgtatctgaaacagcactatgatgctaaaacgtttgcataaggaatgaaaaaaagttagcaaccctagtttttttcaataattcaggatattttgaggatttancaccaggaaaaactaccatc

SEQ ID NO: 5877 - DNA, 314 bp, Homo sapiens
cccttagcgtggtcgcggccgaggtaccattcttatctcagaatgctgtaaaccatcagtagaagcagtttagatttggactgcatggtaaaatgaaaagtaataaccctccaaccacaacctagtcagggtattaataattatatatagcaagaaaacaaagaagaaaataatattgaaaaaatggagattccccaaccagtttcatatttgaaggatctgagttgtatttttattaaggaaattttttttctgaatactgtcttccaaaatgttaacattaaaatctgaatcagaggactctgaatggaaaa

SEQ ID NO: 5878 - DNA, 394 bp, Homo sapiens
  misc_feature 60, 341, 349: n = A,T,C or G
cgccagtgtgatgggatatctgcagaattcgcccttagcgtggtcgcggccgaggtacanaagacgctgcatccctcggaggaggaggtgaaccagctgcaccagcgttatatcaaagagctgtgcaacctcttcgaggcccacaaacttaagttcaacatccctgctgaccagcacttggagttctgctgagtccaaagggcagggccaacattagggagcccagcaggaggtgctgtgctgagaagacttcctggaggtgtttgttgaacatatctgcagagccttcccagactcctgcaaatccaacccatatcaggctgtaagtcaagaagcagggnaatgcagnaaggaggagaccaagaccaaagggggttcagcctggggggctagg

SEQ ID NO: 5879 - DNA, 303 bp, Homo sapiens
  misc_feature 291: n = A,T,C or G
ccctttcgagcggccgcccgggcaggtacggggggagagtgttttgagaaagaagtggtgggacgtcactgtctgtggaaaatttcaaggaaaactgaaggatcattgagatgaacagtgtggcagaattgagaactcttgatgtttcagtgagctttaatggaggaaaatctgtcatttcaggatcattaattgtcacagccacagaatgttctaacgggatcgcagccatcatttgttattttggtgttactgctactcctggggatcggtttgatgtgggcggttttngcccctttgctg

SEQ ID NO: 5880 - DNA, 352 bp, Homo sapiens
  misc_feature 302: n = A,T,C or G
cccttagcgtggtcgcggccgaggtactccagcctgggcgacagaccttgccttttcaaaaaaaaaagaaagaaagaaagaaaagaaaagtatttggacacatttctcccaatatgttcaaatattccaaagcaattatatcaagggtattgggctccttggttaagaactgggctttattttcacacactccctgaaatgacacagccagagatcaggtaggacccagagagaacaaagttacaaaccctgtgtccaaacagcatcctaaaatgaaatactcctggatggaacccttgggnaaaaactcagttgtttgaccatatttcccagtttacccataaaaacttat

SEQ ID NO: 5881 - DNA, 294 bp, Homo sapiens
ccctttcgagcggccgcccgggcaggtacaaccagaaccaacaattgtatttctctatagttattttaaaatagtaatcaatgctatgtatttgatgtatatgtttctaaattagaaatttcttttggctttgtgtttttttaatgtgcgttaaatatgtaaactgaacctgttcctaaaatgcattaaacttgaatgctgcgtctatccaatgccaaaatgctcagaagaaaagtgaataattcagtcattcatctggatgtagttttctgtgtaatctcaaatatctgaata

SEQ ID NO: 5882 - DNA, 327 bp, Homo sapiens
  misc_feature 121, 279, 282, 289, 300, 317: n = A,T,C or G
cccttagcgtggtcgcggccgaggtactttctattttttttttttttttttgagatggagtcttgctcagtcgcccaggctggagtgctaacctctcctttcatgtggagatggacagggntggcagggagcactgagtgctcttgacaacaccattgaagatgatgctgacgatcagctaccctgtggagaaggcaggccaggctgggtgagaggggagctccttggaagtcagggggtctgtaagggacagcaagggatctctttgtcccaaccttncancagcccntttatggggtnccttctagtggttgggncctttgtttt

SEQ ID NO: 5883 - DNA, 361 bp, Homo sapiens
  misc_feature 6, 7: n = A,T,C or G
cccttnnagcggccgcccgggcaggtactcttaaaaatctgttaagagagtggatctcattttaagggttcttaccacaataaaattaaatttttgaaataaatcagtcatatttgagtgaaatgaaacctttccgagtagtttcagacaattgataatacctagtttacagttcctgtagtcattttggagggtgaggacttgatgtgtttagtaaagttgagaaataaatacatgaaagaatgtgtgggggaagaagaaagtgtggggggaagaagaaaattgtctcaagaggacccattctttagtgggccactgggggaaattcttggcaccccagaagaaattcaactgccgcttc

SEQ ID NO: 5884 - DNA, 178 bp, Homo sapiens
  misc_feature 74, 97, 118, 158, 161, 169: n = A,T,C or G
attggggatatcttgcagaattcgccccttagcgtgggtcgcggccgagggtacaaagtccaaggcccgggcancggtggctcacaacctataaatnccaagcaccccttggggaggnccaaaggcggggttgggattcaacccccggaaagggttcnaangttttccnaaggggaaa

SEQ ID NO: 5885 - DNA, 359 bp, Homo sapiens
  misc_feature 292: n = A,T,C or G
cccttagcgtggtcgcggccgaggtacacctttcaaaggactttgtgcccgtggtatatcatgatcttacctgttgtttgactatgaaaaagaaatttgatgctgatccagttgaattatttgaaattccagtaaaagaattaacatttgaccaactccagttgttaaagctcactcatgtgactgcactgaaatctaaggatcggaaagaatctgtggttcaggaggaaaattccttttcagaaaatcagccatttccttctcttaagatggttttagagtctttgccagnaagatgttaggggtttaacatttgaaataaaaatgggattctgccagccaaaggggatgggaatgtg

SEQ ID NO: 5886 - DNA, 311 bp, Homo sapiens
ccctttcgagcggccgcccgggcaggtaccccctaaaatttacaaaaatttaaaaaatttcatttgtgcttactgtctttactgaaatgttaaatatttactcatgagttgattactctgtgcacgtgagattgtcttttgtagttataaagaagggatgcttagaagtagtatcagtgttctttcttattcctatccctcccaaatctcacaccagaaaatgctggaattttttggaaggaaatagagaagagtggaattaggtttagggatggtagtcctaggaggaggggagtaatggaagttataga

SEQ ID NO: 5887 - DNA, 204 bp, Homo sapiens
  misc_feature 55, 100, 152, 156, 160, 176, 191, 201: n = A,T,C or G
ccctttcgagcggcccggccccggggccaagggttaccacaaacatagtggctgncattccttcaaatggcaaaaacccagcccctgttggaaggagtancctcatttgggccttgaaattaaactttaaaatttttgaatttaaacttttnaaancccnaatctggggctgaaantttttttggaacctntttttttttnaaa

SEQ ID NO: 5888 - DNA, 351 bp, Homo sapiens
cccttagcgtggtcgcggccgaggtacccgaaaagaaaggaagctttagtaatgaaaggattgctgccaaaatcctgtttcccccttgcagatcttacagaaaacagccacagaatcccaaggcatcagcaccaagagagcctgtagaaactatctggtctaagctcctgaagcccagagataagaatgacttaacccaagctgcacagcctcttaacagtccactgttaaccccagaaacagatgcatttgaatctgaaaggagacaggaatcctaatcctactgctcaggggacttgcttgatttactttgctgtccattagccttttcttgtgacatgaattttctac

SEQ ID NO: 5889 - DNA, 376 bp, Homo sapiens
ccctttcgagcggccgcccgggcaggtactaagttaaaataaggtcttgggcaaattaaactctgggttttagtttccttatcaggtaaaatgatgctagtaggagctaaagattactttgaaggttctgtgggaattaaggtaacatgcttaatataataagggttcagtaaatgttacctattgtttgctgttaatcagataagcagaatacattctatgtgacctacctttctttataggtgaaatgtgggaacgttaggaatttctttaccacaaagtccctcttcatatgccagtcactaaagttgtaggaatttaaaggtgtttttgggataattggctatactgagaaggttcaggattctaaaaagta

SEQ ID NO: 5890 - DNA, 314 bp, Homo sapiens
cccttagcgtggtcgcggccgaggtactttcatcagacccctgttttgtgatatatattacctgctttcatatttgtattttagaactcactcttcattccctattccactacccaacttcataccaaaaatcctgccaagtatttcagaaaacttggttattaacttggattaattacagtagacatacataggagatgtgtctatagaatgccaaaatatttaattgtgtcagaaatttagtcattcatccaaatattttgtccatatgatgccaaacatacttaatgaattatgttagctgacaaaattct

SEQ ID NO: 5891 - DNA, 426 bp, Homo sapiens
cccttagcgtggtcgcggccgaggtacccgaaaagaaaggaagctttagtaatgaaaggattgctgccaaaatcctgtttcccccttgcagatcttacagaaaacagccacagaatcccaaggcatcagcaccaagagagcctgtagaaactatctggtctaagctcctgaagcccagagataagaatgacttaacccaagctgcacagcctcttaacagtccactgttaaccccagaaacagatgcatttgaatctgaaaggagacaggaatcctaatcctactgctcagggacttgctgatttactttgctgtctattagcctttctgtgacatgattttctaccaagcaaagtcttttattcaagtctcccagagatttcctatttaagcgtttgctatttggcccttaaaaaagacagaaga

SEQ ID NO: 5892 - DNA, 356 bp, Homo sapiens
  misc_feature 300: n = A,T,C or G
ccctttcgagcggccgcccgggcaggtacttacatgattgaggttgactatatgaggtattgttagtctgttagtctttcaaattgacttttaaaaatacatatctttatgattttcatcataaagactggcaatattataactaaaaatcttactataatgaaagaaatcatacataaaaatgtagcctgccttacatataagctaatgtagaaaagtttagacttataaaaaggcagatagtatatatatatttatatacatgtatgtatatggtatattatacattttggtggcagnaaaaaggaagatactggcattttcaccattgaaaaagaaatacctttgaatttttg

SEQ ID NO: 5893 - DNA, 283 bp, Homo sapiens
  misc_feature 264: n = A,T,C or G
ccctttcgagcggccgcccgggcaggtacaaagaaaaatttgaacgttgcggcttaaaattcagttaagagaattaaaaagcaagtcataaatgccacatttttcctcaataaaaagttttgactactgtgtttatctgttgtcttgagtaacttattcatgaagctctcctattcttccccaagaccatttcgaagaaagaaaatacaggttgttcttgctttgtaagcaagaaaaaaaaaaatattgtatatttttttttgnccctaggaagctgcttaat

SEQ ID NO: 5894 - DNA, 349 bp, Homo sapiens
  misc_feature 3: n = A,T,C or G
ccntttcgagcggccgcccgggcaggtactaggagggtattgatgtttgaggtccaaactgaaaacccatcacctccttcccactgctatagcagcgttagccctggggttcattatctagccagttcacaccttctaaagtggggctctgaaaatgtcttacttccctcacagacaaagcaattctcaagcctcctgagatcacccaccaaccagagcaactgctgtcacttggaggtgcagctgaattcttctaattgtgacacaaactcttgaaactgtaaatgctgaaagattaaatgaggttataacactcagaaggttttataagtaaaagtaaggtcaaatc

SEQ ID NO: 5895 - DNA, 302 bp, Homo sapiens
  misc_feature 229: n = A,T,C or G
ccctttcgagcggccgcccgggcaggtacaaatatgcttcataacaaattacaaacacttgaaatatactgggattgtgtttattctctgtttagttagatagctgtattgaagtctctgtaaatgaaaaatttacccctatccctcaacatgtaggttgagaacagaaatattaatgggtgtgatttattaattcctgagggctattagcccatcaatagactacttnaaataaccattagtctcaatagtattgattaattccccaaatacatttaaagcaatagtatatgaagtgccct

SEQ ID NO: 5896 - DNA, 295 bp, Homo sapiens
ccctttgagcggccgcccgggcaggtacaacaaaccaataatgataaaaaatacttctctttttctccctgtttccctttttcccttggccacagccaaatgctaattgctgctttaattacagagatgtgtaaatgtattcagattacaaactctacaggaatacatcaacattttaactcttttgcgtttttactgtttaactgttttaaatgcaagttattttagggtgacactccttccagttctggccagatcatgagtttcaagatcaagagtaaaaagttattagaat

SEQ ID NO: 5897 - DNA, 497 bp, Homo sapiens
  misc_feature 472: n = A,T,C or G
ccctttcgagcggccgcccgggcaggtacagtatacaagtttttccaagaaatcctaaccctgggggctcaggcgaatgaggagggtcaaatgctgagggtgggagaaagcagatctagacagcattctggaattgttgctttgccattatttgcccagaaaacatttatggcaaggaagcctgaaaacatggcaatggttgtaagatgggttgcgatacaactggtgatgtgagaagtgaaaatgaaactgactcctttagggaggacattggtttatagtaaacaggtttgcctcatcagaaatgaatatggatattgctacacaataaaaagaggaaaaacaccaacaacagtaacaatggtaatcacaataatgataatgactctgtaggtatagaacctcagttttttgtgttctgaaggttatttcaaaagtttcttgcaagagagaaaacaaatcagaaaaaaangggaagagagaagatgggaaaataa

SEQ ID NO: 5898 - DNA, 339 bp, Homo sapiens
  misc_feature 23, 257, 276, 299, 305, 309: n = A,T,C or G
cccttagcgtggtcgcggccgangtacttgaaacttgaaagcgtctcttaataacacagcacagcaattaacagctcgcaaacttttgttttatacacaccgtgtcacgacttccagatacctttcggcatggagtccaagtccttgcgtttgtttggtcgttcgtcctctttccaggcaggagagtgtcacctccgcgttttctcccttgtgtagtcggaatccatctattgcagggtgctcggatggagtctgcnagtgtgtctttcctggagncgaattactttctcccttttagnctgctncggncttgcagacctaaaacaccccgttgaattt

SEQ ID NO: 5899 - DNA, 561 bp, Homo sapiens
  misc_feature 453, 506, 517, 532, 545: n = A,T,C or G
ccctttcgagcggccgcccgggcaggtacaagatgagacagaattagaggatgaaaatcaagaaggcatgactgtgcacagttctgttcacagcaataacctcaactctatgccaactgctgaaaagggtaaagacacattaaaatcagcttatgatgatacagaaaatgacctaaaaggagcagctattcatatctcaaaagggatgctccacgaagaaaagcctggagagcagattttggaaggtggctcagagagtgaatctgcacagaaagctgcagggaatcaaatgaatgacagaaagattcaacaggaatccctgggtagtgtaccactcatgggagatgaccaccctaacgcatccagagacagtgtggaggggagacgctttggtaaatggggccaaactgccacgcttttcagtggacatcaaccgtgagggaattgaaagangaattagttcttaaaactcaaaaccaacctagattcttccttttccagatganattgaatttgncccagagaaactggnaagacgaaggttncccatttttgggaaaa

SEQ ID NO: 5900 - DNA, 369 bp, Homo sapiens
  misc_feature 4, 5, 6, 9, 12, 25, 29, 54, 171: n = A,T,C or G
gatnnntcnttnccgtggtcgcggncgangtactcaaagaactcacccagcctnaacttgaaaatgattcatatgccaaggaaaaaccattcaaatccattccgaaatttcctgtcaactttttaagttcaagaacagactctattaaaaatacttccctaattgaatcanctgctgcattctcttcccaaccatcacgaaaatgcttgctggagaaaattgatgttataacaggggaggaaacagaacatatgtgttaaagataaactgcaagcttttcatattcaacaaaacaacacaatcctggattgaaaggggcagaggaaccgttgagactgaatgacacagcaagcacttgactgtggaaca

SEQ ID NO: 5901 - DNA, 364 bp, Homo sapiens
ccctttcgagcggccgcccgggcaggtactcatttaattagggttgcagaggagatggaaaaacaagctgtttgattatgaaggcaacacttctgtcagtagaattgctttggattgtaaatatgtttacttcagaggaaatcagtcagagtggatggctcagcaaaacccatcacaactgcggaaaaaggaagtgactggctagaggtaaggaaatagattttctctaagttaactggcctacgtgtgaatcgaaccctgcaccctggcctcattagcaccaacactgtgaagaacagcttgtggcagaaaaagtgccacggccccaccccatcaccagattcagtagaaaaggcccttggaa

SEQ ID NO: 5902 - DNA, 258 bp, Homo sapiens
cccttagcgtggtcgcggccgaggtactaaaattccttggttcactgattcgaagaagaacatcagcaagaacatcagctcggatgggcccttagagagcaacaatagatttgaaataagggacaagccaggaggttgccggggggcgggtagggggatagttgcaaaaatgttctgaactttaaaataacggtcccttgcaaacagaagttttttctccaaagtgtctcttcctccagatctcccatctaccatttc

SEQ ID NO: 5903 - DNA, 304 bp, Homo sapiens
  misc_feature 239, 276, 280: n = A,T,C or G
cccttagcgtggtcgcggccgaggtactcaatggtggcatatttatagtattatcccccaaatttttcctatctacaaaagtttttaaaatctttgaagccacattatttgaagacttaacaggaacaagagatggcgtaaaaggctgtagattatcttggaaaatccatttcactggagcagcttgagaatgcttgaccacctttcaattgtgtctctgtaacaacattctttggaantttgtgtggtatttagtaattactggcatttgctatntctnttaacaggttttttgggtaaaatg

SEQ ID NO: 5904 - DNA, 285 bp, Homo sapiens
ccctttcgagcggccgcccgggcaggtactggaacatttgtagctgaaggaaaatctccaaaaaagatttcaaagagactaaagtaggaatgggtgctggagaatgagcaagaagggtgagagtcccacgggtgaagggagaaagcagcagagaatgaatataagcccggagaatgaacataaatgtgaggggaagaggccagaggccaacactggaaggacagtgagggccaagaaaggaactactaatgtttctgagacctgcagggaaccatggtattaagc

SEQ ID NO: 5905 - DNA, 660 bp, Homo sapiens
  misc_feature 20, 549, 574, 576, 584, 592, 637, 641, 646: n = A,T,C or G
cccttagcgtggtcgcggcncgaggtacagtgaaaagagccaaggctgtgtgaccccctcatcacttagccaggcgtatggtcctggtttctgaggctgcagaaagcatcttagcaatttgtgtttggatggtccatgcctgactattctaggctggaggttcctaaagagtaacaagaggaagagaaacaagaatctctgacacttgttgagaatagagcacagtcccatttgtttgaaaagagacaccaggtagccatgtttatgtgccagaaatgcattccacctcaaggaggacttaatttatggacccgtgtgtgccaggctgagctgggcaagatctttctcaggacaaactctgccatgcagctaaaagcctggaaactaaaggatttcatgtagtaaactatcttccaacccctgtaggcatcagaccacaggatgaggtttcaagaaggtcataaggcagaatagttaagcctacagggcttacagtctgacagacctgggttcagttcttgggtcttcatcactagttttgtgacttcnggaagatgactccccggagccttantnagccttanttaccttnattatgtaaatgaagtaatactacctacttcaccgagggctgttnaaangattnaatggagaatgggt

SEQ ID NO: 5906 - DNA, 133 bp, Homo sapiens
ccctttcgagcggccgcccgggcaggtacaagaagagaggatggagacgagggtaggcttcttttcagattatacattctggatcagaaagtctatatcagtgggattttctgaatgacccaggttttttttg

SEQ ID NO: 5907 - DNA, 444 bp, Homo sapiens
ccctttcgagcggccgcccgggcaggtacacagtgaaaaggtatttggctgtgtttctatttacattcactgtccttgataaatactaattggccagtgattgtaagtctcaagaatttttgctgcagagcgtgtggtaaaactcattttaagtggtgtaggagtcatgcagtgtttatcacttaagtgggtaatctgacagctgtattttactgcctgactgcagctttattcttgatcattctcttccttgagtagtgtgttatggtcatgttgtcttagctgcaattaattcccaacctttttttgttttccaagtctttgtcttttgcatttatttttctgctcctgcaatgccttactttgctgtctcttgcctcgctatttcctatttattctacaaagctcaccttaaagtgtcacgttttcagggacatgtttacc

SEQ ID NO: 5908 - DNA, 333 bp, Homo sapiens
cccttagcgtggtcgcggccgaggtaccattcctatgatggtagccattcttctctttataaaatatttcctctttgaaaagcgtcctaaaacattaatttcaaatcccctcttggatgcaaagtgtccctaagaccgtccattcaacagtatttatgtgagccaacttactagagccgctacaactaatcatgatagacagtccagaatctccctggactttatactgggccagcctcattgtccctaagatttctctttttatgtctcacggattacttctctttttaattgccccaggcaccattccaaatgagaacctggtaaaagtca

SEQ ID NO: 5909 - DNA, 352 bp, Homo sapiens
  misc_feature 2, 8, 21, 24, 40, 66, 68, 79, 82, 87, 91, 98, 166, 167, 168,172, 178, 183, 185, 194, 196, 207, 208, 209, 211, 212, 213,214, 220, 221, 222, 223, 224, 225, 226, 227, 228, 229, 231,235, 247, 249, 250, 251, 252, 272, 278, 289, 290: n = A,T,C or G
  misc_feature 295, 296, 301, 302, 303, 315, 317, 336: n = A,T,C or G
gncggaanttgggggcccctnctnagaatggccatggctncggagccggccccgccccagttggtngnattgggggggnaantttantttnccctttnggggcaagaaatttccgcccctttttccgaagccggggcccgccccggggccaagggtaaactttttnnntttntttttnttttntnttttttttntnttttttggggnnncnnnngggggnnnnnnnnnnanaaanaaaaaaaaaaanannnnccttaaaaggggtttttttnattttnaaaaaaaattnngggcnnttttnnntttttaaaaaantnggaaaaattttttaaaaancctttagggggggggg

SEQ ID NO: 5910 - DNA, 374 bp, Homo sapiens
  misc_feature 189: n = A,T,C or G
ccctttcgagcggccgcccgggcaggtacctgcaatatatttggagtattatgtctttattgttgttaaaaagtttttattgaatgtatgaaaattatcaaattgtattcatcaattattaacatgtcctggggaaggaagggaaactttctaggacagaagtcactttcagatgtcatgtatgtattngggtgttcaatcatatctaacactgttttgatttttgtgggaaaatattccaggaaacgctaattctctttagactccttgttcttttatgactacaatgaacatatgtctatgtgatagctaaagatattttttgaattgtatggtgtgcttaattatcgggtaaggtataaatatttggaaga

SEQ ID NO: 5911 - DNA, 347 bp, Homo sapiens
  misc_feature 268: n = A,T,C or G
ccctttcgagcggccgcccgggcaggtacttctatgatatagttgtcaaaatcaactggaggataataaaatattgtgggttctcagcattcttagaatccaaattacaaccatatcagtacgggtttggtccacatgagccaactgaagtcattttcctcaaggttggaatttgtgccaacctaaatacgttgtttctttgatggtgtttattgctattggtattattttgaactaataacaattattttgtctaaataatgctaanacaattctgttaagaaattttgtcagctaacataattcattaagtatgtttggcatcatatggacaaaaatattttgga

SEQ ID NO: 5912 - DNA, 331 bp, Homo sapiens
  misc_feature 300: n = A,T,C or G
ccctttcgagcggccgcccgggcaggtactaggttgagaagtttctaatgtgaaaaatcttgttcatctgttcatgcaacagacatttattaggcatctgtagaccatataattgagacagagaaacattttggagaattagaagctcacactatttatggcataggttatataattatgataatttatgatttactttcttgacaaaaacagctacaaccatgtatacctactatttctcctacaaagtaggtggagattttttgattttacattagtgggggaggggtttttggtttnggtttttgctttaagataggcattggactat

SEQ ID NO: 5913 - DNA, 297 bp, Homo sapiens
ccctttcgagcggccgcccgggcaggtacacagtcattgtgatcttagttatcatttctaagtaattaaatttgtatttttacttgcttatattagaaatgcttattaccaatgagaaacagaaaatgccacataagtgaacatttaaatgttacaaaaatttataatatatgtaacgctactaaaatatataatgaacttttcaaacatgtaaatataaatcaggaaaacctgatatgtaataattgggccaaaaatgaaaatcacaaaacacagtaagggggggttaaaagaaat

SEQ ID NO: 5914 - DNA, 484 bp, Homo sapiens
  misc_feature 452: n = A,T,C or G
cccttagcgtggtcgcggccgaggtaccaaatatgttactacaaagcaactgttcaagtgtgctaaaaacaggtgtcttctcccttttcagaggctcccctagtcatttgcaatatattttgcctacttctctaaaaatcaaaataggtcctaataagtaagatacaggtcttcaatcccaacagcaactaagggattttcctgaataaaaaaaaacaaaaacaaaaacaaaaaaaactctgctgccagtttgcagacagagtgccgtgtttcaccccaacctatggaggctaaatcacagtcaaaaacaaactgcgtgactgggaattatagtaagaggagttaaaaacaagggcaggtgcagtggctcacgctcgtaatcccagcactttgggaggccgaggcaggtagatcacctgagttagggtgttggagacagcctggccaacacngagaaaccccgtctttactaaaaaatcaaaat

SEQ ID NO: 5915 - DNA, 360 bp, Homo sapiens
ccctttcgagcggccgccggggcaggtacactcttcttcttttatttatttatttatttatttttaggccattcttctggtttgccaaattctattaagacagtgatacatttgcttccttatttatgcatgcttagatcatgaacatgatgcccttcttttttttttttctttggtcaagtagggattaatgccataggtttagagagaaggattgttttcagtttttaagagaattttttaaaaatacattttatggttctcttaaggaattaatattcacttctgaaggacttacttgtaatatataatttatcattttagccagcagggaaataaatcatttttaatccccagaag

SEQ ID NO: 5916 - DNA, 361 bp, Homo sapiens
ccctttcgagcggccgcccgggcaggtacataggaatgcatctttgtttgcacgtgtgtgtgttgaggaaacaggaggaatattcatctttttgttgtttggattttggcccagtcccttatgttaaggactgactgattcctctgacagaattcagaccaagtcattaaactttgttgcttatggaaagtaatcttagtatctgttggcctttatttaaaaaaataattttttaaaataagcatgaacaatattcattatcccattataaccttattattaggtgagtcagatcagtctctaagtagtgagtatgaagcaccttaaattcttcctaaaaacaaggattaaatttaaatat

SEQ ID NO: 5917 - DNA, 428 bp, Homo sapiens
ccctttcgagcggccgcccgggcaggtacccgaaaagaaaggaagctttagtaatgaaaggattgctgccaaaatcctgtttcccccttgcagatcttacagaaaacagccacagaatcccaaggcatcagcaccgagagagcctgtagaaactatctggtctaagctcctgaagcccagagataagaatgacttaacccaagctgcacagcctcttaacagtccactgttaaccccagaaacagatgcatttgaatctgaaaggagacaggaatcctaatcctactgctcagggacttgctgatttactttgctgtctattagcctttctgtgacatgattttctaccaagcaaagtcttttattcaagtctcccagagatttcctatttaagcgtttgctatttggccacttaaaaaagacagaag

SEQ ID NO: 5918 - DNA, 469 bp, Homo sapiens
ccctttcgagcggcccgcccgggcaggtactctagaaccaaagttaaagtgagtctcaatttctcacctgaataaaacttcatttttccacttttcttatcagtccttaaaaaacgatgagcagtctgccaaaactgatgttcagaaacttctggaattaggacagaaacaaagagaagaaatgaagtctcttcaggaggccctgcaaaatcagcttaaggagacatcagagaaagcagaaaaacaccaggctactattaattttttaaagactgaagttgaaagaaagagcaaaatgatccgagacctccagaatgagaataaaaacttgaaaaacaaactcttgtcaggaaacaagctctgtggcattcacgcagaagagtcaaaaaaaatccaagcccagctgaaggagcttcgttatgggaaagaaggatttattatttaaggcgcagcagcttactgatctgga

SEQ ID NO: 5919 - DNA, 330 bp, Homo sapiens
  misc_feature 15, 46, 51, 53, 64, 72, 86, 99, 118, 119, 133, 174, 186,203, 272, 278: n = A,T,C or G
cccttagcgtggtcncggccgaggtacaaccagaaccaacaattgnatttntntatagttattntaaaatantaatcaatgctatntatttgatgtatntgggtctaaatgagaaatnnacttttggctttgngtctttttaatgtgcgttaaatatgtaaactgaacctgttnctaaaatgcatnaaacttgaatgctgtgnctatccaatgccaaaatgctcaaaagaaaagtgaataattcagtcattcatctggatgtagttttctgngtaatntcaaatatctgaaatattggaaaaaactagggttgctaactttttttcattc

SEQ ID NO: 5920 - DNA, 348 bp, Homo sapiens
  misc_feature 90: n = A,T,C or G
ccctttcgagcggccgcccgggcaggtacgcatcttcccattcgaccttgtcctccaggttcactcacgccaaggaggaggatgactcanatcaggttgaagtccctcgagaccaagagaatgatgtcggggataagcagtcggctgtgaagatgaagatgtttgggaagctcacccgagacacgtttgagtggcaccctgacaagcttctatgtaagagatttaatgtccctgacccttatccagattcaactttagtttggcttaccaagagtgaagcgtgacaagtaccgtgccttgaattaattattaatatttaaaaataccttcattccttaactctccctc

SEQ ID NO: 5921 - DNA, 350 bp, Homo sapiens
ccctttcgagcggccgcccgggcaggtaccattcttatctcagaatgctgtaaaccatcagtagaagcagtttagatttggactgcatggtaaaatgaaaagtaataaccctccaaccacaacctagtcagggtattaataattatatgtagcaagaaaacaaagaagaaaataatattgaaaaaatggagattccccaaccagtttcatatttgaaggatctgagttgtatttttattaaggaaattttttttctgaatactgtcttccaaaaatgttaacattaaaatctgaatcagagggactctgaatgggaaaaggaagttttggattcactggaccaccctagg

SEQ ID NO: 5922 - DNA, 337 bp, Homo sapiens
  misc_feature 108: n = A,T,C or G
ccctttcgagggccgcccgggcaggtacaaccagaaccaacaattgtatttctctatagttattttaaaatagtaatcaatgctatgtatttgatgtatatgtttctnaaattagaaaatttcttttggctttgtgtttttttaatgtgcgttaaatatgtaaactgaacctgttcctaaaatgcattaaacttgaatgctgtgtctatccaatgccaaaatgctcagaagaaaagtgaataattcagtcattcatctggatgtagtttttctgtgtaatctcaaatatctgaatattgaaaaaactaggttgctaacttttttcattccttatgca

SEQ ID NO: 5923 - DNA, 351 bp, Homo sapiens
  misc_feature 258: n = A,T,C or G
ccctttcgagcggccgcccgggcaggtacagtgaaaagagccaaggctgtgtgaccccctcatcacttagccaggcgtatggtcctggtttctgaggctgccagaaagcatcttagcaatttgtgtttggatggtccatgcctgactattctaggctggaggttcctaaagagtaacaagaggaagagaaacaagaatctctgacacttgttgagaatagagcacagtcccatttgtttgaaaagagacaccaggcanccatgtttatgtgccagaaatgcattccacctcaaggaggacttaatttatggacccgtgtgtgccaggctgagctgggcaagatctttctca

SEQ ID NO: 5924 - DNA, 416 bp, Homo sapiens
ccctttcgagcggccgcccgggcaggtacagtgaaaagagccaaggctgtgtgaccccctcatcacttagccaggcgtatggtcctggtttctgaggctgccagaaagcatcttagcaatttgtgtttggatggtccatgcttgactattctaggctggaggttcctaaagagtaacaagaggaagagaaacaagaatctctgacacttgttgagaatagagcacagtcccatttgtttgaaaagagacaccaggcagccatgtttatgtgccagaaatgcattccacctcaaggaggacttaatttatggacccgtgtgtgccaggctgagctgggcaagatctttctcaggacaaactctgccatgcagctaaaagcctggaaactaaaggatttcatgtagtaaactatcttc

SEQ ID NO: 5925 - DNA, 367 bp, Homo sapiens
  misc_feature 329: n = A,T,C or G
ccctttcgagcggccgcccgggcaggtacctatatcttcagtgtggaggtgaaggcagtattaacaatatcctatagttgactgaagagttggttacagcaaagctctccattgcccttaaattttctctctccttaatacagtaggatcaattttaagtgcattttatgtgtgcattttaaaactcttttttaaaaacagaatagaaatggttttcagagtgatgctgatattggttgatgatgccaaggcaccaatggagagcatattttttaaattgaatatgtttttattttcttgtttgttgatttttaaagtgaatccaaaangtgaagaggaaaaaaatcaaaattctgccaatttgaaa

SEQ ID NO: 5926 - DNA, 148 bp, Homo sapiens
  misc_feature 126: n = A,T,C or G
cccttaacgtggtcgcggccgaggtaccattcttatctcagaatgctcgtaaaccatcagtagaagcagtttagatttggactgcatggtaaaatgaaaagtaataaccctccaaccacaacctantcagggtattaataattatatg

SEQ ID NO: 5927 - DNA, 347 bp, Homo sapiens
  misc_feature 66, 67: n = A,T,C or G
tgcatgctcgagcggcccgccagtgtgatgtgatatctgcagaattcgcccttagcgtggtcgcgnncgaggtacctctttcagtttcccaattagttatttgttttagattaaacaatagtgtaatgcatcaattccttgggtaatttaccgattggaattcctagtgtcatccttgagacacaagcaaaaaactcaacaatattatccacgtgaaatgggacctctaaactgtcctgttttgttacagcctctaatgagctaaaatagtataagaatcttgaagattaagaatttctgtagtgctctacttgcctgaaatttggggtgctaagcattaaaaaaat

SEQ ID NO: 5928 - DNA, 360 bp, Homo sapiens
  misc_feature 13, 15, 21, 39, 147, 152, 171, 177, 226, 248, 249, 258, 264,265, 267, 329: n = A,T,C or G
cccttagcgtggncncggccnaggtacaagagggtgcantaacaaaggtctgatttaagtgcttttattcaacccagtgaagggaaaatgacagtaatacatctaagccatgcaaaaaggattcaggcttccttgaaaaggattcangtggnataaaatggtttgtttctncacagnaattgacatttattaaaatagataataggcataatcattgtcaaaatanagcttctaccctgtataatatnntagtacatnccccgnntncataaaatatatctaactattgataaatgtggggggtgggataatactgggctgtggaaatnatgtaaagaagctttttttactttaaaaaaa

SEQ ID NO: 5929 - DNA, 390 bp, Homo sapiens
  misc_feature 1, 2: n = A,T,C or G
nncggccgccagtggtggatggatatctgcagaattcgccctttcgagcggccgcccgggcaggtacagaaagttcagccagtcttcagagaagtaaaagtgatgtctattgtgcattgaagtaaatattacaaacattccagtttcgcaatacaatacttgagctttcgaacacctcagacactagaatgtgtaatgcgagtcaaaaaagctgacatacaaaacaattcccatttggctcagggttcctaaatgtcacaatatcttgggtaaaatatactttttgatttcctgattgatgtccttctaatcccttctgacttttgattcctaacagccagggcacctgtttggacatgaaatcattaacttccaaacccctttaaaatc

SEQ ID NO: 5930 - DNA, 202 bp, Homo sapiens
  misc_feature 143: n = A,T,C or G
cccttttagcggccgcccgggcaggtacgttcttggagacacagcaatgcagaagatggccaagtcccatgttttcttaagtgggatgggtgggtcttggttttggaaaattgcaaaagaatcttgttcttgcagggattaangcagttacaatttcatgatacagaaaaatgccaagcatgggatctaggaaccaactttt

SEQ ID NO: 5931 - DNA, 323 bp, Homo sapiens
  misc_feature 105, 310: n = A,T,C or G
ccctttcgagcggccgcccgggcaggtacctggcactacagacatgcacaagcatgcatggctaattttaaaaaaatttttgtagaaatggagtcatgaactctnggctcaagtgatcctcccacctcaacttcccagagtgttgagtgagattacagttatgagccaccatccctggccaataaaggtgtttttaatacctataagaatattgcctgcaaggatgtttgataggtttcttgatatttcattctctcttgaaatgtttgcttcgtcaattttttatttttcataaaagctttactcaagnaattaggatgacc

SEQ ID NO: 5932 - DNA, 632 bp, Homo sapiens
  misc_feature 517, 526, 561, 590, 592, 607: n = A,T,C or G
ccctttcgagcggccgcccgggcaggtactgccctccttatttcagcgctgtcattctgatcactctaggaccggttgagactttttcgtgaacagtttcctacctttttaggcaaccatctgtaagacaaggtagaatgctaccataaccatgattaacatttgcaaacactctgccacagtgcagccactttctttgcctccagctgaagaaattgaggtgcacagaggttaaatttgatgctcaaagcaatacaactagaaaatataggaggctgggctgcctgattgattcccagcttagagattgaaagtcacatgcgaagcgctttagcagatagagaagggggagtcatactccagcgtgcattttaatttgtgcttttctgtccttgaattaagaagtgtgacgtgtgcctccaacagcatagcatgctacagaaatggatttcttttcctggggttgataatctgctggccaaatctttatctctgtagtatcccgtgtttcctgggngcattttancattttggttaaattgtaggggaaaaagggtttgnggtctttatatctggattggcctattaanancaccgtttttttggnggttggtatttggccgctttttttt

SEQ ID NO: 5933 - DNA, 328 bp, Homo sapiens
  misc_feature 128, 313: n = A,T,C or G
cccttagcgtggtcgcggccgaggtactagatatccaaatgaaccgggagaattacatgttagatagcatttgagttaaaccagaccaatttatatgggacaatttactgttgacaacaaaatatttntgactgtgggtattcaattcaattgaggttattgcttaaggatcataattggtctggaatctttgaaaatgtgtaaggctactttataaagttacataaaattgtgaaaaagtttgcatgcttttagaaacagaatttccatcaagcttgtggtctaaaaagaatattgaagacaatagcaaatnggatgtttttaacac

SEQ ID NO: 5934 - DNA, 284 bp, Homo sapiens
  misc_feature 61, 106, 133, 169, 230, 246, 278: n = A,T,C or G
cccttagcgtggtcgcggccgaggtacgcgggggagccgaggaaaactgagcgtgggcctnagaaagaagttaaggcacccgcgagccgggcaactgccctccttncgcgccggcggagcgattaaagtgaanaaacaatggccagcaatcacaaatcttcagcagctngccctgtttcaagaggtggagttgggttaacaggaaggcctccttctgggatacagacccntatcatggaaatattnttagtggcaactgcaatgccacctgggacagnaaggac

SEQ ID NO: 5935 - DNA, 191 bp, Homo sapiens
ccctttcgagcggccgcccgggcaggtactcagctggtggaagtcaaccctttaagcccactcccatgcataagagtaactttcactcttttccctattttaagactatttcaatagtaaatgctatttgtcacaaggaagttagatggaaaggaatgaatcaccattcaggacaaatgtataaccactgt

SEQ ID NO: 5936 - DNA, 229 bp, Homo sapiens
  misc_feature 158, 161, 195, 202: n = A,T,C or G
cccttagccgtggcgccggccgaggtacactatcctgtggtttctaaattctgcttctttattaagaagcgattaactgtaaggtagaggaactaccatgttatacttctctgcaaatctcagaaacaagcacccaaatgtagatcaccctgctgaanctnaaatcacaggactccttgggtatagatgccttanaatgctncaggggctgctaccgtctttcttcgac

SEQ ID NO: 5937 - DNA, 351 bp, Homo sapiens
ccctttcgagcggccgcccgggcaggtacccgaaaagaaaggaagctttagtaatgaaaggattgctgccaaaatcctgtttcccccttgcagatcttacagaaaacagccacagaatcccaaaggcatcaagcaccaagagagcctgtagaaactatctggtctaagctcctgaagcccagagataagaatgacttaacccaagctgcacagcctcttaacagtccactgttaaccccagaaacagatgccatttgaatctgaaagggagacagggaatcctaatcctactgctcaggggaccttgcctgattttacttttgcctgtctattagcctttttctgtgacca

SEQ ID NO: 5938 - DNA, 363 bp, Homo sapiens
cccttagcgtggtcgcggccgaggtaccttacaatgttagtaactgtcttttattaagtaagaaaaagttaaaatggcatgtaacttaagaaggtgggaaaataataaaggaaaaaattaagaacaaaacgaaaagaatcatgaaatagtaaaacagtaaaattaagatataaatctcagagttggttatttgaaaagatcaatgaaacagagtaattctggaaaaaccaatgagaacaaaaagggaaagcacacgcaacatgggaatgaggaagcagaatactacaactccaggccaacaaatctgaaaataggaacagaatcacctattttagggaaaattcaccttaattaaaaaaaatt

SEQ ID NO: 5939 - DNA, 357 bp, Homo sapiens
ccctttcgagcggccgcccgggcaggtacgcgggacacattactcagttgtgagggggaaggtagactctttccagacctttgataaaggggctgctcaaaaaagccacgaccttgggcctctgctaaaaccatggctttaagtaaggagggagcagatatataaaaaaccttatccctctttctaatctcttatgtcctgtgagtgtcacccattgagtaaacccaagtgggaagtcagtagggaaagtagctggggatgatgccagtctttaccaggggtctctctgtcacccaggctggaagtgaaattgggtggtgatcttcggctcactgcaacctctgcctccttgggttt

SEQ ID NO: 5940 - DNA, 381 bp, Homo sapiens
ccctttcgagcggccgcccgggcaggtacttgaacatacctagctattatctctctttcatagattaaaaaaaacaaggttcagagaatccaagtgaatggctcaagatcatccaattagtaaagtagtagctgaaagaatgacaaataagtcttaaccataaaccagtgagaaagaactttaggagcaatatgatcaaatagtatggaagaatacgcagagagagttatttgcttttcttcagaaaagggtgggggaagaagagtcaggggaagtctttgtgaaggagaggaaaatgtaatctacctaggtggcccagttcaattccataaaacaatttgggagtttgactaaatgtgggaaaaaatattttttcttttt

SEQ ID NO: 5941 - DNA, 526 bp, Homo sapiens
ccctttcgagcggccgcccgggcaggtacgagaactggagcaagaggtgcaaagacttaaaaaggaacaggccaaaaataaggaggactcaaacattagagaaaattcagcaggagctggaaaaactaagcgtgcatttgatttcagtgctcatggccgaagacacgtagccctaagaatagcctatatgggctggggataccagggctttgctagtcaggaaaacacaaataataccattgaagagaaactgtttgaaagctctaaccaagactcgactagtagaaagcagacagacatccaactatcaccgatgtgggagaacagataaaggagttagtgcctttggacaggtgatctcacttgaccttcgctctcagtttccaaggggcagggattccgaggactttaatgtaaaagaggaggctaatgctgctgctgaagagatccgttatacccacattctcaatcggtatggctgtagaatttcctctagtcttatatgactgtaaagtttgaaaaatgt

SEQ ID NO: 5942 - DNA, 580 bp, Homo sapiens
  misc_feature 412, 417, 419, 420, 432, 434, 442, 451, 467, 473, 479, 505,524, 525, 544, 552, 564, 570: n = A,T,C or G
ccctttcgagcggcccgcccgggcaggtactgccttatcattttattggtgttgtgttactagagatttgacttgaagtccttaaggcagcatactttgcagataataatctgagagaatctggtaggtcaacagatctgctgtctgtgagctaacactaaagaaatagaagaagaggaaatctttgaaaaatcgagaaaagatcctttgatcccaaaagtcttggtttgaaggaactttttatccattagatcatctaattctggaagaataaccaaagtgcagcatccttgtattcttcctctaagaggctcatcctcataggggatgtaaattgagccaagttttctaagtgtctaaatgttaagtgctccagggctcagtccttggactctctagtctcttctttggngaagngnnatttgtgtggcntnaaacaccntattgccanctctttccaaattacnctcttnttgtcngaccattttctgaactccagtcatgnattatgcactagaccattnngccctcaaatttaagattnactgaacngaactctgcccnggtttnttttttgggg

SEQ ID NO: 5943 - DNA, 312 bp, Homo sapiens
  misc_feature 42: n = A,T,C or G
ccctttcgagcggccgcccgggcaggtaccagaagagcccantgcccagaaaccaatatcagttctatacagatacaaggtgatgctgattatttcatcaaccatcttggagttcccatcgtgcagtttgcttacgaggacatcaaaacattagagggtccaagttttctctccgaggcccgtttttctacacgagcaacaaaaattgaagaaatggatccctctttcaaccttcatgaaaccattactaagctctcaggagaagcgattttgcgaattgccaacgaacctgttctgccctttaatgcactt

SEQ ID NO: 5944 - DNA, 355 bp, Homo sapiens
ccctttcgagccgccgcccgggcaggtacatgtgtaattcatgggtagtatgatgtatgtgttataacagcatactggagaatgagaagctcacaatagtggtttcttttggggaatgggcttagggagatgggcatgtaagggaacttcatctggagataatgatttattttcttaagaaaaagtagatagaagaagaatgttagaatatcttaaaaaaataggaatcccattctgtattattggataacattagcacacccaatgaaatcaattccttagttttatccaatgcccagtttatcctcatctttctccagttatccataaaatatcctttaaagctgtttttccc

SEQ ID NO: 5945 - DNA, 210 bp, Homo sapiens
  misc_feature 82, 123, 136, 151: n = A,T,C or G
ccctttcgagcggccgcccgggcaggtacttggatcagtagaataaatatttattgaatcaatcagtcagccaattaatatngatgttagtgatagacctgcctccttttatggaagaggtancagatccagaganatgcaagtaatttanttgtagactgaaaaatatattaaagcctttgctgcaatcatatgtaacaaaaagaacca

SEQ ID NO: 5946 - DNA, 442 bp, Homo sapiens
cccttagcgtggtcgcggccgaggtacttttgataataactcactctgtgcgatattcctgaataagtccatctcaaaagtttgggattttcctcctcttaactttcttaatatttggacatgcagttgtccgccaaacttgggtattcatggaatttctagtaaatgaaatacctatactttgatactgaagactgccaaatacataggaattttctttcttaaaaaacagtaatgaagactatatctcctttccagcactgaatgtttactagcactgggtgctcaccatgcaactgaagaaaatgtggaaactcaaaaggtcaggacaagacttccaaagcacttgcaactgatgttactgtcttcaattttaataattacacatatttgtatatttcagagaaagttttaatatttctctgccactttttataagctt

SEQ ID NO: 5947 - DNA, 392 bp, Homo sapiens
ccctttcgagcggccgcccgggcaggtacattatgtagctatgcacccatctaaagaagttaggaaaatgacatcaagtagagcatcaaaagaaagaaggaaaggataacttaaaacagaaatgaatgaaataaaaccagaatagaagagacgatctacaaatccaaaagttggtttgttgaaaatactagtagagctgacatacttgtggtgagactgatggaaatagtgcagttacaactaaccaatatcataattggaaaggaaatcactataggtgctgtaaaaattaaaaagataatagaatattatgaacaattttctgccaatattattgaaagtttagataaaatggaaaattcatttaaaaatataatttgacagtattatgt

SEQ ID NO: 5948 - DNA, 379 bp, Homo sapiens
  misc_feature 313: n = A,T,C or G
ccctttcgagcggccgcccgggcaggtactagacttattcaaatcccttagtcccaagcctgaattgattccaagggcaaggatgtctccatttgtgagaaaaaaaagagcaagagaaacgaaaccaagaagtgcttgacatcctgagcaattcccggatgctgctttgccagagagtaggatgccaaatatttcgagaaagcctttctggacttgaaaaggaaaaatgagagccagtcttgtcgtgtcatttgacttttaaatcatctcctggagggaaggttatatgggggaggatcttcaggcatggagnatgaattctttaataagggctaaaatttaaaggcaaagggattttttcccttagcccaattaaccc

SEQ ID NO: 5949 - DNA, 393 bp, Homo sapiens
  misc_feature 269: n = A,T,C or G
cccttagcgtggtcgcggccgaggtactgaaaatttaacaggtgcttttatgtggcaatattacctcacccactttcaaaagatgtcagcaagctaggtcaaggatcaggtgccacgttatagacttgaagaacttggctgattttttcccaggatttatccatcagcagtcctattagcagcagaaaattagaaatcctgaattttaacaaagtccctaaagagtcaaagaacactgggtgatcacaatcaaccaaagctaccacttntccagagcatttttctaaagagaaacagctacacaaaaaacttaactcctccttcaggaaagatttcctcttcgccggtagtctctcctgttcgtcctctgcatcgaggcggccaagcgggagc

SEQ ID NO: 5950 - DNA, 369 bp, Homo sapiens
  misc_feature 290: n = A,T,C or G
cccttagcgtggtcgcggccgaggtacaaactgatggtaaaacagatagcaccccaaaatatttccacatgcacaaacaaccttgaaacgtgtgttcgcatatcttacaagcaggtatttttccaatgccactcacagccaattagtgggtcattaaattaactcagtgactcccaaccaacatatatttcccataaatagaatgaaattgaaaaggtggactagaatagaaaatatcagagtgcctgacatatgtaggtatatcttgtttcatgaaaagtttgttttanaaaatataaaatgttgttatagatacatgtgaacatgtaaaatggatttcttattgtaggttaaagtccaaaaagttta

SEQ ID NO: 5951 - DNA, 396 bp, Homo sapiens
ccctttcgagcggccgcccgggcaggtacattttaatttacatgttgtgtagaacatagatgagaactccgggaaaacttgggaatggcaaccaaccaaaatcatttttaatcatttattagaaatttctcaatattgtgtctttttcttttgaaactctaaacacttcagaaaaaaacactatcagtgtagttcatgttagtataattatagatttacatatatttgaatagttaatttgctttgttttacacgtagcccactgcctcattataggtaaaaggcatttataactgctcaggggattacgagaactcaactgaaactgaatttttgtaacaagaatgttaatagtggcaaagtcctctgtcagtaaactctttaagcttggtgccg

SEQ ID NO: 5952 - DNA, 244 bp, Homo sapiens
  misc_feature 2, 30, 52, 73, 120, 143, 186, 189, 216, 227: n = A,T,C or G
cnttaattaaaggggggggcccggaaaaantgtggggggggccccccctttnctttaaagcaaatgggcccanttgggccctttcccggaaaggacccgggggcctccggccccccaggnttgggtttgggaaattggggggnaaattaaattcctttgggcccaaggtaaaaaatttttcccggnccncccctttttaaaggcccgggtttgggnggtttcccggnaccggggggccccccgc

SEQ ID NO: 5953 - DNA, 340 bp, Homo sapiens
ccctttcgagcggccgcccgggcaggtacagtgaaaagagccaaggctgtgtgaccccctcatcacttagccaggcgtatggtcctggtttctgaggctgccagaaagcatcttagcaatttgtgtttggatggtccatgcctgactattctaggctggaggttcctaaagagtaacaagaggaagagaaacaagaatctctgacacttgttgagaatagagcacagtcccatttgtttgaaaagagacaccaggcagccatgtttatgtgccagaaatgcattccacctcaaggaggacttaatttatggacccgtgttgtgccaggctgagctgggca

SEQ ID NO: 5954 - DNA, 422 bp, Homo sapiens
  misc_feature 318, 347, 371, 408, 412, 421: n = A,T,C or G
ccctttcgagcggccgcccgggcaggtacccgaaaagaaagggagctttagtaatgaaaggattgctgccaaaatcctgtttcccccttgcagatcttacagaaaacagccacagaatcccaaggcatcagcaccaagagagcctgtagaaactatctggtctaagctcctgaagcccagagataggaatgacttaacccaagctgcacagcctcttaacagtccactgttaaccccagaaacagatgcatttgaatctgaaaggagacaggaatcctaatcctactgctcaggggacttgctgatttactttgctgnctattagcctttctgtgacatgatttttntaccaagcaaagtctttttatttnaagtcttccagagatttctatttaaagcgtttggctntttngcccctttna

SEQ ID NO: 5955 - DNA, 332 bp, Homo sapiens
  misc_feature 319: n = A,T,C or G
ccctttcgagcggccgcccgggcaggtactcacgttgcctcgtgtcaccaaaattggtgtggctgctgtggtgcggggggctgcactgatggcaccccttctgtcttcatcaagcagctgcccttctgccgctccaatatcctttcccattcctactgcctacaccaagatgtcatgaagctggcctgtgatgatatccgggtcaatgtcgtctatggccttatcgtcatcatctccgccattggcctggactcacttctcatctccttctcatatctgcttatcttaagactgtgttgggcttgacacgtgaacccangccaaggcatttg

SEQ ID NO: 5956 - DNA, 376 bp, Homo sapiens
cccttagcgtggtcgcggccgaggtactttttctcctgagcccagacttgataatcactttctcaatctctgcttgttaaatggcttctaaaaattcttgggtaaatatgggtatggttgcataaaaagaaaaatcccttaaaggataagccaaaatttttcagtgatagtgcataaaagccttgttatctttaaggcttgtcttttggtgcatagagccaaataaattgccaaggcaaaaacaaaaagaaagaaaatctagtctctgatttagtgcccaaaagtttttaatgctttgggtcctccagttgctctaaagaattttttttgtgggctttgaagcctttttatcagggttttaattttatccttatat

SEQ ID NO: 5957 - DNA, 375 bp, Homo sapiens
ccctttcgagcggccgcccgggcaggacagtgaaaagagccaaggctgtgtgaccccctcatcacttagccaggcgtatggtcctggtttctgaggctgccagaaagcatcttagcaatttgtgttttggatggtccatgcctgactattctaggctggaggttcctaaagagtaacaagaggaagagaaacaagaatctctgacacttgttgagaatagagcacagtcccatttgtttgaaaagagacaccaggtagccatgtttatgtgccagaaatgcattccacctcaaggaggacttaatttatggaccccggtgtgtgccaagggctggagcctgggccaaggatcttttctcaggacaaaactcttgg

SEQ ID NO: 5958 - DNA, 852 bp, Homo sapiens
  misc_feature 31, 53, 55, 58, 67, 76, 87, 93, 97, 113, 116, 123, 131, 143,155, 163, 166, 183, 184, 212, 219, 220, 228, 238, 253, 254,269, 270, 273, 285, 288, 293, 296, 303, 305, 308, 318, 320,330, 333, 335, 346, 368, 371, 379, 391, 397, 477: n = A,T,C or G
  misc_feature 481, 482, 484, 501, 503, 524, 533, 540, 552, 557, 560, 562,577, 581, 596, 597, 621, 626, 629, 637, 660, 671, 676, 684,696, 699, 714, 715, 730, 733, 735, 741, 749, 763, 771, 776,777, 783, 784, 803, 807, 812, 818, 820, 828, 830, 833: n = A,T,C or G
  misc_feature 842: n = A,T,C or G
actttaatttaaagggggggggccgggaaanatttttgggggggggacccccncnttnctttaaagncaaattggncccaatttggncctttnccgnaaaggacccggggggnccnccggccnccaaaggntttgggtttggnaaattggggggnaaattaanttncctttgggcccaagggnnaaaaaatttttcccggcccccccctttnttaaggnnccgggttnggggggattnccgggcccggggggnnctccggctaagcggnnttnaacccaaacccnttnccaanccnaaccaancnaanccaatccaancnaacccaatcnaancnatggggggggncctttcttttttaaaaaccaanaanccattggnggttcctccttngtaagntttaagacattccttattttggttaacaaattttcctttttaattttgggcccaaggggaagttgggaaacccccttaanaaanntngggctttcaaccaaaangnaagtttggcccctaattttcntttttccanaatttanaccttaaccaanggggnacnanataaccaacaattcntttntaaaaaaggttttgnnaaggaattaaaaaggttgggatcnccaanggntaatttgnaaattttttttggcccccaaaanaaaaattttcnttaanaaaaaggnctggccaaaccnttncaaaccccaatttgnnaaaaaaattggtggnaantnataaanaagggggnttttttaaaccccntttttttnggggnngggggnnaattttttttgcctaaacntttnggttnaaaatngnaaaaattntnacnttgggttgnggaaaaaaaa

SEQ ID NO: 5959 - DNA, 735 bp, Homo sapiens
  misc_feature 543, 566, 581, 619, 646, 666, 691, 700, 712: n = A,T,C or G
ccctttcgagcggccgcccgggcaggtacctcttattccagagaagtggggagcagagaggaagatggagtggaaaggggcgaggcaaggccctcctgaaatacctcaacccaaatcttcaagaaatccccaagtcctcacagtgctttttgtggatttttgtggaaaccggtaaaaggggctgatttgctgaccccagtgggtagaaaacagagactgtcaagagaacagaagaggaggcagaaaggggatggggaagtggggttcgccatgttcacgagctcctggagccacagggccccccaggaacaacagagctgagactgggtggccttgtttctggcccaattccctgggaccaccaccctggaaggacacttgagccctactcaaggacccaccacaacatctcagcattgtcggtccttaaatgccaaggtctgtgctcaccatttcatccttaaattctcacagggaagaacccacaccaacagctttgtcccttgcgactctgggtgagtttctgacacttggcctgggctnccgttttgcccgtcaccaacttntcacagtttactatncaagaaaaagtagcatttgatgtcagggaaatcaaaanggctaaagctcgggaagcccaaggcangtgaatcactttgtaatcanggagttcgagaacccccctgacccnacattaatngaaaccccattntttacttaccattccaaaaaaat

SEQ ID NO: 5960 - DNA, 365 bp, Homo sapiens
cccttagcgtggtcgcggccgaggtacctgaaggaacgaagaagaggaatttctcaaggtgagaagcagttctccatggacactgatgacagcacaggcaaagtttcctatgactaggggatcactgtccacacagagtctggcttcccaggtatccagcaggtagacaaaacagctaactccactgccactcctttctccacatccgttcctatttctcagccatctcagtgacatccgccatcttgagagtcaactactgactggactgagttgtgtggtatatgcttctgtttacttctcttctgtcttttttaagtggcccaaattagcaaacgccttaaaatagggaaatctctggggga

SEQ ID NO: 5961 - DNA, 364 bp, Homo sapiens
ccctttcgagcggccgcccgggcaggtacccgaaaagaaaggaagctttagtaatgaaaggattgctgccaaaatcctgtttcccccttgcagatcttacagaaaacagccacagaatcccaaggcatcagcaccaagagagcctgtagaaactatctggtctaagctcctgaagcccagagataagaatgacttaacccaagctgcacagcctcttaacagtccactgttaaccccagaaacagatgcatttgaatctgaaaggagacaggaatcctaatcctactgctcagggacttgctgatttactttgctgtctattagcctttctgtgacatgattttctaccaagcaaagtctttta

SEQ ID NO: 5962 - DNA, 584 bp, Homo sapiens
  misc_feature 508, 542, 564: n = A,T,C or G
ccctttcgagcggccgcccgggcaggtaccactttaaattccccagttaagctttttggaccacacaggtagcctaagcttggactgaaagcccatagaaggccatttgtggttataaatcatcagggaaaatattctatagtttccatgtgccactaaggttgagacaaatgagttccttgctgcgcccttctatggagtgtttatttcttgttcacctttacactgagggtgtccagctttatgagggaacctactagatttctcatttcctgttgcccatactttgtgtaatcactaaaatagaaggttatggtctgctgaatttggcaaaaattctggggaaaagctggctttggcagttacttcctaggattccagcttttgcttcattttgaagagccgtaggttccttactttcgtgcctgctcagcaatatgtttaaaagtattttttataaatatatttacccagtatcttggttgcttctgctgaaaggacttttcanaattatctaatccagcatactgccaaaaacaganccctgaattagtttcaaatacncacaccaacgcactccccct

SEQ ID NO: 5963 - DNA, 569 bp, Homo sapiens
  misc_feature 9, 51, 65, 105, 113, 154, 158, 163, 182, 185, 187, 189, 198,208, 215, 217, 222, 224, 226, 230, 234, 239, 241, 246, 249,251, 253, 257, 266, 268, 274, 279, 285, 287, 294, 298, 305,310, 314, 319, 323, 325, 327, 332, 339, 340, 342: n = A,T,C or G
  misc_feature 355, 357, 359, 369, 378, 383, 387, 389, 401, 405, 408, 409,432, 435, 452, 453, 457, 460, 463, 464, 466, 470, 476, 483,485, 489, 491, 497, 499, 500, 508, 514, 536, 555: n = A,T,C or G
actttcacnttattaaaggggggggcccggaaaaaatttgggggggccccnctttcctttaaagnaaatgggcccattgggcccttccgggaaaggacccggggncgcccggnctccaagattgggtttggtaaattggggggaaattaaattncttnggccnaaggtaaaaattttccagnccncncnttttaaagncccggttggngattacngnccggngncnccgnaagnggatnanccttnttntntntttntatctattntntatatntagtntatatntnttatggnaagnacttagnctggngagnggacntaantngnaattngtgtggnngnaattatggccttngncnaattaatttntaaataccnaaagntttngnggaattggattncatntannccactttttttggaaacaaagtntangatttataaatttttgnntttnatnggnngngggncccaanggaaaantntgananttttcnanntttttaancaaccntatttcaatttaaaaaaaaaanaagtgggtatgtaggaagnattaaattaaaaac

SEQ ID NO: 5964 - DNA, 145 bp, Homo sapiens
ccctttcgagcggccgcccgggcaggtaccaatcagaaggacgtgttgcttcagaaattcaatgaaaaagatttggaagtaatacagcagaactgctatttaatggctgcagaggatcttgagctcaggagtgaaggcttaataa

SEQ ID NO: 5965 - DNA, 403 bp, Homo sapiens
  misc_feature 135, 151, 172, 185, 188, 192, 205, 207, 248, 253, 270, 278,285, 315, 322, 333, 334, 335, 336, 353, 376: n = A,T,C or G
ccctttcgagcggccgcccgggcaggtactttttttttttttttttttttttttcttttttttttttttttttttgggcacaaatatcgttttagttcagttatccacattgttcatctaaaataatacattttntttacatataactgtnttaaacttgtaattgaggatntttgatgaaacanatntgtntctgaaacagcantntgatgctaaacatttgcataaggaatgaaaaaagttagcancctanttttttcaatattcagnatatttgngattacncagaaaactacatccagatgaatgactgantttttanttttttttctnnnnattttggctttggatanacacagcattcaagtttaatgcnttttagggaacaggttcaagtttacat

SEQ ID NO: 5966 - DNA, 265 bp, Homo sapiens
  misc_feature 100, 133, 172, 177, 182, 206, 245, 248, 265: n = A,T,C or G
cccttagcgtggtcgcggccgaggtacccattgcccgaatagtgaacactctacccagtcgtttttcatccctcactttcctaccaccctccaacatttntggagcctccagtgtctcttattccactctgtntacccatcgtttagctcccatttccaaatgagaaacatngcagnttctngacttttctgtctctggagtcatnttcacttacgataagggcttctaggtccatccatattgnctncaaaaagatgtgatttn

SEQ ID NO: 5967 - DNA, 249 bp, Homo sapiens
  misc_feature 151: n = A,T,C or G
ccctttcgagcggccgcccgggcaggtacaaccagaaccaacaattgtatttctctatagttattttaaaatagtaatcaatgctatgtgtttgatgtatatgtttctaaattagaaattttctttttggcttttgtgttttttttaatgntgcgttaaatatgtaaactgaacctgttcctaaaatgcattaaacttgaatgctgtgtctatccaatgccaaaaatgctcagaagtaaaagtgaataa

SEQ ID NO: 5968 - DNA, 339 bp, Homo sapiens
  misc_feature 298, 315, 331: n = A,T,C or G
cccttagcgtggtcgcggccgaggtaccatcgctttttaggaaacagagagccctcctctggtcaggaaactgagatccaacaggtgaacagtaattgcttaaccctgcaggagatggaagatttggtgtaaactgcattgtctcactgtggtttttctactccatctgcctctttctcaaagagcttgtgctagagtcatcacttcccattgggctgaggacatgaagcctttattacaaatgaaaaagtgggtgtgaaatattttcattcttaaggaaatattacataccttttgnaattttgggaattctgnaatttaaattccaccnttttctgg

SEQ ID NO: 5969 - DNA, 269 bp, Homo sapiens
  misc_feature 1, 23, 30, 31, 54, 55, 58, 59, 65, 69, 75, 93, 95, 111, 127,128, 137, 177, 180, 181, 182, 192, 196, 219, 224, 250, 252,256, 259: n = A,T,C or G
ncccccattgtaatgaatatctncaaaagnnggccctttcaagcaacccccccnncanntacttntatntatctnaaaatggaaaaaaaattntnctcataacaccttctnaattcatatttctttnnaaatatttnaaattaaaaaatatcttatcttctaaaaacctttcatttnccnnntccggggggngcgntcataccttaaaaaacaattctnttaanttccacccaaaataaaaaaactttantnaatnctntttttataaa

SEQ ID NO: 5970 - DNA, 346 bp, Homo sapiens
  misc_feature 242, 292, 296, 318, 322, 331: n = A,T,C or G
cccttagcgtggtcgcggccgaggtacaaccagaaccaacaattgtatttctctatagttattttaaaatagtaatcaatgccatgtatttgatgtatatgtttctaaattagaaatttcttttggctttgtgtttttttaatgtgcgttaaatatgtaaactgaacctgttcctaaaatgcattaaacttgaatgctgtgtctatccaatgccaaaatgctcagaagaaaagtgaataatntcagtcattcatctgggatgttagtttttctgtggtaattctcaaatatnctgnaatattggaaaaaacttagggntgcntaacctttntttcattcccttatg

SEQ ID NO: 5971 - DNA, 833 bp, Homo sapiens
  misc_feature 18, 57, 64, 76, 81, 89, 94, 98, 104, 111, 113, 136, 141,156, 168, 178, 182, 200, 209, 213, 222, 230, 238, 240, 246,248, 250, 252, 254, 256, 258, 260, 262, 264, 266, 268, 272,274, 276, 278, 280, 282, 284, 286, 288, 292, 294, 299: n = A,T,C or G
  misc_feature 301, 303, 314, 316, 335, 339, 360, 366, 383, 403, 407, 408,412, 419, 428, 430, 438, 452, 453, 465, 469, 483, 486, 490,491, 493, 500, 502, 511, 514, 524, 529, 543, 559, 581, 583,598, 602, 614, 626, 628, 633, 652, 657, 661, 692, 697: n = A,T,C or G
  misc_feature 701, 706, 712, 713, 724, 725, 726, 728, 731, 735, 747, 752,756, 788, 821: n = A,T,C or G
tttttaaccggaacattncaaccttattaaggggggcccggaatttttttggggggnccccccntactttaaggcnatggnccaatggnccttnccgnaaaggnccggggncnccggcctctaaggttgggttggnaaatngggggaattaatttntttggcccaagnaaaaattttnccgnctctctttttaagaccgntgggggttnccgnccggggccnccggaagngataaccntntgtgtntntntntntntntntntntntntatntntntntntntncncnggtncntcgcncncntcaaacacgcnanaaaggtaatttcttaattncctnggggaaccttggtaaccttanaaaaanaaaaaaaaaaaggggtntgggggcgagggacccaacnaatnnaaanttggganactttgggncnataaaaanaaagtgaccatttnnccatttaaaaanaaancaaaagaccataanccnacanncnaatcttntnaattttttnccnctttttcacntatanaaaaaacaaattanccccttttttaaaaantttacacacaaacactcacacntnatttcttaaatatgnaaancacgtgaccccntggccctatggnanttaanagagggaaaaggggttacncctcntccncttggttaattatgtgaaaacgccgtaaccncgtgntcgnggggnttgcgnnggccttggggnnntncgnttanccggaaaaaggnggaanaggnaccaaaataccccttttgcacttaagatagcnaaaattgcttattttggccaatttgaagccganaagaggggtaaa

SEQ ID NO: 5972 - DNA, 284 bp, Homo sapiens
cccttagcgtggtcgcggcccgaggtactcttttcaaggctttacttccaatcttccccttaagtgctagtgtccagaggaaaaattatttcttctctgtagaagtcattttgaagacagtatttttctgagatccaatgtggttgggagttctgaagaggaagttatagttttaagctagattatctcattttattatattctgtgtttattttcctttgccgtgcttaggcctttggcaaatgttctctagatgtacctgcccgggcggccgctcgaaaggg

SEQ ID NO: 5973 - DNA, 359 bp, Homo sapiens
ccctttcgagcggccgcccgggcaggtacaaccagaaccaacaattgtatttctctatagttattttaaaatagtaatcaatgctatgtatttgatgtatatgtttctaaattaagaaatttcctttgggctttgtgtttttttttatgtgcgttaaatatgtaaactgaacctgttcctaaaatgcattaaacttgaatgctgtgtctatccaatgccaaaatgctcagaagaaaagtgaataattcagtcattcatctggatgtagttttctgtgtaatctcaaatatctgaatattgaaaaaactaggttgctaacttttttcattccttatgcaaatgtttagcatcatagtgct

SEQ ID NO: 5974 - DNA, 345 bp, Homo sapiens
  misc_feature 275, 298: n = A,T,C or G
ccctttcgagcggccgcccgggcaggtacttactaccaaataaagattttacctatagattgaaactaaattgtaaatgtcccaaatacttttcccgatgaaattcaaacaaaattagacttttatacacacaaagcaaaacaaaacacaacctatatataatttcaagattaagaaaaacaaaacaaataaaagcattctctcaagaccttgcttcagttgtgtaaaataattaaatgtgctattccaagttgattttagtttttaaatacagnaatttgataaaaaggataaagtnaaaggaaggccttggggttcaggggtgggcagatatttagtgccacc

SEQ ID NO: 5975 - DNA, 431 bp, Homo sapiens
  misc_feature 157, 159, 388, 423, 431: n = A,T,C or G
ccttagcgtggtcgcggccgaggtacagaaaatgcggtgataacataggcaaaccatctacttcccagtcttctttctagatttattcctttccagagcatggatgccatattgaaatacaaatgccaatcatcagcatggtgaaggggagagagcngnaaacgctgccaatctttttgctggtaacacttctccacactaaggcaggagctatacagtggcttctgagggttcaagaagaaccagatgttgagggccaaagttgctagggtgacaggtggaatattgttgatcccaacatggaagatttgagaaaggagtagaataagtccagtatttatccctcttgatctccgttgcatggccagatatcagggaaacagctcancaatgggaaaacgtacctgcccgggcggccgctcnaaagggcn

SEQ ID NO: 5976 - DNA, 543 bp, Homo sapiens
  misc_feature 111, 134, 136, 140, 152, 162, 169, 180, 193, 200, 236, 242,247, 250, 257, 258, 261, 262, 276, 279, 324, 349, 351, 356,358, 374, 377, 436, 439, 445, 487, 489, 497, 513, 522, 527,532, 534: n = A,T,C or G
ccctttcgagcggccgcccgggcaggtacctagtaacattcatcctcttgattcctggtgaacacggttaaattcatgcacatttgttcttgtagctttctaaaaaattangaatccaaatttatttttgttancncagncaaaattggaanaattcccatntatttangatttaattgnaaaatttttttgnctcatgnctttataaagttataaccgaacctggtaaaattctngaaatnttttnaanattttannatnnttttaaattcaaanatntatttttttaatggcaattatttttttcatttttaaaatattagnaagttattatccaaattcgaatttngnaaagncncttttttcaccaaagntanggtggccgcctggaagacatttttttcttttattttggaaaagtaagtaggttggaaanttntaagcntttttccttggaaggaaaaggtttcaaaattccttaattttngntaggaaanaaaaggttttttcaanggaattggnaaagnaaatntnaattttttt

SEQ ID NO: 5977 - DNA, 954 bp, Homo sapiens
  misc_feature 7, 19, 37, 44, 47, 56, 64, 68, 72, 75, 89, 95, 132, 159,234, 243, 263, 271, 281, 285, 300, 307, 335, 336, 342, 344,352, 355, 366, 394, 438, 446, 465, 479, 492, 512, 529, 549,552, 596, 601, 621, 635, 639, 642, 651, 663, 683, 684: n = A,T,C or G
  misc_feature 687, 692, 695, 712, 713, 714, 720, 723, 725, 726, 738, 745,758, 766, 784, 791, 798, 803, 814, 821, 822, 827, 829, 842,846, 858, 861, 884, 885, 903, 905, 910, 920, 934, 953: n = A,T,C or G
actcacnttattagggggnccgaaaaatttggggggnccccctnctnagaaatggnccaatggncctncggnagnccggggccccgccnccaagntggttgggaatgggggaattaattccttggccaaggnaaaattttccggccccccttttaaagnccggttggggttccggccggggccccgggaagggggttaaccttggggggggggaattggaaaaaggccaagggncaaaaaaantttccttggccccccttggncttggttnggggggaaantggnctttggccccaaggntgggggnctttcggttctggcctttccccaaaggnngaaccncnttaaccanggnaaccccggaantcccaaaggcccccttggtttggttttngggggaaccaaattcctttggaccccccaatttttttggaaggngggttggnaaaacccccggttaaaaancaagggcctttaancctttttgggggncctttaaccccctttttaanaaccaaagggaaagggnaaaaaaggtaaattgggggnttncgccaaccaaatttactttaatttaaaaaggttttggggggggnaaaanggttgggggaaacctttggnttggggggttcccnttcncgnaaaaaaaancccctttttggnaaaaaggggggccaaattgnnccnttggnccnttggggggtttttaaannnaaattnggntnnttggggttattnttgggcnttttaagggcccngccccccnttaaaagacccaaagganccccccnccaaaanaaggncccaaaaaagngaaattnnccccncnttggggttatttntaanttttgggttacnttnggcccaaaaggtttcttttaaannaaaaaacccaattttttngnggggntaaaaaattnccaatttggggggnttttttttgggtttttttng

SEQ ID NO: 5978 - DNA, 404 bp, Homo sapiens
ccctttcgagcggccgcccgggcaggtacccgaaaaggaaggaagctttagtaatgaaaggattgctgccgaaatcctgtttcccccttgcagatcttacagaaaacagccacagaatcccaaggcatcagcaccaagggagcctgtagaaactatctggtctaagctcctgaagcccagagataagaatgacttaacccaagctgcacagcctcttaacagtccactgttaaccccagaaacagatgcatttgaatctgaaaggagacaggaatcctaatcctactgctcagggacttgctgatttactttgctgtctattagcctttctgtgacatgattttctaccaagcaaaggtctttttatttcaagtctccccaggagatttttccttattttaagc

SEQ ID NO: 5979 - DNA, 276 bp, Homo sapiens
  misc_feature 252, 253: n = A,T,C or G
ccctttcgagcggccgcccgggcaggtaccctaccactgttggaccagtggagagcagtggattgagatctcgctaccgttcttcacctaccgtctacaactcacctactgacaaagaagactacatgaccgacctacgaactttggatacttttctcggaagtgaagaggagaaacagcatagggttaagctggggagcccagattctacctctccttccagcagtcctactttctggaactatagtcagnnctatgggggattatgcacaaact

SEQ ID NO: 5980 - DNA, 342 bp, Homo sapiens
ccctttcgagcggccgcccgggcaggtaccggaaggaacgaagaagagggatttctcaaggtgagaagcagttctccatggacactgatggcagcacaggcaaagtttcctatgactagggatcactgtccacacagagtctggcttcccaggtatccagcaggtagacaaaacagctaactccactgccactcctttctccacatccgttcctatttctcagccatctcagtgacatccgccatcttgagagtcaactactgactggactggagtttgtgtggggtatatgctttctgttttactttctcttctgtctttttttaaagtgggccaaaatag

SEQ ID NO: 5981 - DNA, 360 bp, Homo sapiens
cccttagcgtggtcgcggccgaggtacccacaatggaaagatggtcttcctgcattgtgaaggttgttctcatcaaccaagcctgcaatgactagacattctaaagagaagagtgatggcaatggaaagaggacacatccacttgccaggtcacttctatcagttgatgacatgccatatgttatggctaggtcagctttccacaagtatgcacatgcaaaatagaacttgggaaaaaaatctttgatttggccctctaccaagtggatcagtgtgtcagagttcagttgagcaaaggtcagagtttaagttgaatctccagtcactcttttgaagatatttggtgatgccaaatttaat

SEQ ID NO: 5982 - DNA, 210 bp, Homo sapiens
  misc_feature 1, 130, 152, 153, 154, 162, 173, 175, 178, 196: n = A,T,C or G
ntttgccatgtcttctaataagagtgaaaaagtgaaaatgaatctgtatgcaacattatttttatttcttaatatattttgggaaacttaattgcaactgtgtggttcagggatttagtgcaagaagaanaacaagttgatggaaaaaaaannntaattaanaaaaaaaggangngtnccttgcccggcggccggnttcgaaaggggccg

SEQ ID NO: 5983 - DNA, 342 bp, Homo sapiens
  misc_feature 94, 96, 251: n = A,T,C or G
cccttagcgtggtcgcgggcgaggtacctaaatttcctctaaccactctcagaaactgaaacaatgtctttgctcttaaaagagaagagacttnanatgtaatcaaagaaaacattgtgtaacttgcctctaagctcttcagagccaattttactatggcaggatattccttcctgataaggtgattaatgaagtttttggtgctcacttttctctcatagtctataagctcagtataccaaaaaaaaaanaaaattagataaaataaaacaaaacccccaataggtcttgaaaataatataaatattttggggggagtcccagtcacataaatactccact

SEQ ID NO: 5984 - DNA, 883 bp, Homo sapiens
  misc_feature 26, 39, 56, 63, 75, 80, 82, 86, 90, 99, 101, 105, 113, 137,145, 178, 186, 188, 194, 208, 220, 225, 235, 247, 274, 278,282, 286, 288, 296, 300, 304, 306, 329, 332, 334, 342, 344,368, 386, 407, 438, 444, 449, 463, 468, 470, 472, 484: n = A,T,C or G
  misc_feature 487, 496, 502, 504, 505, 508, 510, 515, 527, 535, 537, 550,560, 562, 565, 568, 571, 591, 592, 603, 605, 611, 614, 618,634, 637, 646, 651, 653, 659, 662, 667, 670, 685, 698, 711,718, 721, 728, 737, 739, 742, 748, 750, 759, 761, 762: n = A,T,C or G
  misc_feature 763, 765, 779, 783, 788, 799, 811, 815, 816, 822, 823, 827,835, 850, 855, 857, 861, 868, 869, 875: n = A,T,C or G
atttggttaaattaccgaacttcacnttattaagggggnccgaaaatttggggggnccccctncttagaaatggnccatngncctnccgnagaccgggncnccgnccccaagntggttgggaatgggggaataattncttggccnaaggaaaaattttccgcccccctttttaagccngttggggntnccgccngggcccccgaaagngttaacccgggnttttngaaccttggncttggggggggntggttaagggggggggaaaattggccnccgnaggntttntntggggggntagngatngngaaagatttggccaaggggaagnggntnggaatggngnccccttggttggcccccttttccncccctttttggggaaagnggaaactttttggccttttgnaaaaggggaaaagaaattaaaaaaccccttnacccgnaaggntttttttttccccngaaangngngggggggggggnccnttggggggnaaattngnnttncnccttnctttttgggggngggaaagngnggccctttttccnttttttggtngnttnggnggnttgggtaaaccccccggctnngtaaaaacccngnaaatgnaanttgnaaaaaaagtaaaaggnggnaaattaggnaattngnaaaagnccnttaanccnttcccccccaaaagnaaacccaaaaaangggggtaaattgngcccttnggnaacccgnaaaaaaccngnttncctttntncttttttanannntnccctttttaaaccntttnggggnaaagtaaattnctttaacctttncccnntttttnnattnaatttggncccccctttttcggngattngngggnaaaaaannaaaagngggcccaa

SEQ ID NO: 5985 - DNA, 347 bp, Homo sapiens
cccttagcgtggtcgtggccgaggtacctacttgaaggacttcataagcaaattacgatttaatttacaagaacactatgtcacacgtatacacacaggttttttatatttgttgtcttttccgtgattatctcttacagtgttgtatatttaatatattcattttattttaattttatgtaggttcctcattccttcatatgtgtattacatttccctggaactatcacgtattttatatacttagcaatggaaagctcctggtttcagttgtctgtgcagcaggcagggggaggaagaagaaaaatggggtcacactcctgacccctgcctgcatagccaccagg

SEQ ID NO: 5986 - DNA, 330 bp, Homo sapiens
  misc_feature 118, 319, 323: n = A,T,C or G
ccctttcgagcggccgcccgggcaggtacttttcgctcagctgttttcatcactgtgttcagaggtttgtctttttttttcccctaaaaggtgctgagatgttatgagtgctttatgntgtgggttacctggaataagttttgaaatgtcacttgtgttataaactgcatgattatcgattttggaaattttgttttttttaaatgattaatttaaataaaatggagaattttgatccataagaaaagcaggactgaaatctccagggatgggagccttttggggtttcacttttgttcagtgttgtttcctttgaaanactntcctact

SEQ ID NO: 5987 - DNA, 414 bp, Homo sapiens
  misc_feature 324, 347, 381, 393: n = A,T,C or G
tatctgcagaattcgcccttagcgtggtcgcggccgaggtaccattcttatctcagaatgctgtaaaccatcagtagaagcagtttagatttggactgcatggtaaaatgaaaagtaataaccctccaaccacaacctagtcagggtattaataattatattgtagcaaggaaaacaaagaagaaaataatattgaaaaaatggagattccccaaccagtttcatatttgaaggatctgagttgtatttttattaagggaaattttttttctgaatactgtcttccaaaaatgttaaacatttaaaaaatctgaattcaggagngactcttgaaatgggaaaaaagnaaggttttgattcacttggaccaccctaaggggnctcttgaaaagncgttggtgttgggccccacca

SEQ ID NO: 5988 - DNA, 346 bp, Homo sapiens
  misc_feature 165, 189, 194, 202, 206, 209, 214, 216: n = A,T,C or G
ccctttcgagcggccgcccgggcaggtaccaggagggtattgatgtttgaggtccaaactgaaaacccatcacctccttcccactgctatagcagcgttagcccttggggttcattatctaaccagttcacacccttctaaaaggtgggggctcttgaaaatgtnttacctccctcacaggcaaagcanttttnaagcctcntganatnacccncnaaccaaagcaactgctgtcacttggaggtgcagctgaattcttctaattgtgacacaaactcttgaaactgtaaatgctgaaagattaaatggaggttttaacactcagaaaggttttaccaagtaaaag

SEQ ID NO: 5989 - DNA, 370 bp, Homo sapiens
  misc_feature 283, 302, 338, 355, 370: n = A,T,C or G
cccttagcgtggtcgcggccgaggtacagtgaaaagagccaaggctgtgtgaccccctcatcacttagccaggcgtatggtcctggtttctgaggctgccagaaagcatcttagcaatttgtgtttgggatggtccatgcctgactattctaggctggaggttcctaaagagtaacaagagggaaagagaaacaagaatctctgacacttgttgagaatagagcgcagtcccatttgtttgaaaagagacacccaggccagcccatgttttatgttgcccagnaaatgcatttcccaccctnaaagggagggaccttaatttttatggaccccggtgntgttgcccaaggcctgnagccttggggcaagn

SEQ ID NO: 5990 - DNA, 896 bp, Homo sapiens
  misc_feature 43, 52, 59, 64, 69, 92, 113, 134, 137, 164, 213, 217, 230,240, 242, 273, 285, 291, 323, 329, 368, 416, 449, 451, 454,456, 470, 487, 498, 511, 519, 540, 545, 555, 562, 564, 569,572, 584, 587, 589, 599, 621, 632, 643, 659, 668, 673: n = A,T,C or G
  misc_feature 726, 729, 744, 747, 756, 764, 774, 777, 813, 835, 836, 842,845, 868, 869, 881: n = A,T,C or G
ctttaagggaaaatgggcccatttgggcccttccgggaaaggncccgggggncccccgnccccnaaggnttgggtttgggaaattggggggnaatttaatttcctttgggccnaagggaaaaaattttcccggnccnccctttttcctttaaattcccgggggnaaaaattaaagggggggggcccgggaaaaaatttttcccccaaagtccnaacnaaccctttggggncccggggggncnccgggttttaacccttaaagggtttgggggnaatttccccccngaaagncccttccgggggtttaaaccccccaaaaaggncccttnttgggggcccgggttaaaaattttccaatttgggggttnccaattaaagggacctttgggtttttttccccttgggttgggttgggnaaaaaaaaatttgggttttaaaatttccccggncnttncnaaccaaaaattttncccaaccaaccaaaaancaaattaaccngtaaaggcccccngggggaanaaggccaaattaaaaaaaggnttggntcaaaaaaangtccccntnggggnggnggttgggccccnttnanaatttggaangggttgggaaaaggcccttaanaaaccctttcnaaaccaaattnttaaaaattttttggnccggttttnggccnggcccttccaaccattgggccgccccggccttttttttccccaaaggatttcnggngggggaaaaaaaacnccnttggtttcnggtttggncccccaaggnccnttggcccaatttttaaaaaattggggaaaaattccnggggcccccaaaacccggcccnncccggngtngggtaaaggtaaagggggcccgnngtttttttgggnccggtttaaattttg

SEQ ID NO: 5991 - DNA, 502 bp, Homo sapiens
  misc_feature 116, 126, 148, 161, 213, 218, 247, 250, 253, 259, 262, 268,280, 291, 298, 307, 309, 310, 316, 319, 322, 336, 338, 340,342, 355, 366, 370, 382, 388, 423, 434, 441, 450, 453, 457,458, 461, 462, 469, 494: n = A,T,C or G
ccctttcgagcggccgcccgggcaggtactcgggacatcaatgcagagtccctctgtgaatttacaacacccaacacccatgagttcagtccttaagaaggaaaattgagcaagtntttaattggntggacattgcataaaaagaggnccatatccaggcntaacttctagaaaattttattctcaaactttagtttggcctcttcttttctntctgntccaggagggacccaattccttttaagcnggncancttggnggnaaaatnctttgggccacncccagcaaagnaattttncaaacttgncnncttcanctngcnaaaaaaaaattacnanantngggccccttaacnaattttggggnattntttggttaatgnaagggnaagtaaaaaagggggaaggccccccttggttattntggttggaagncccttgnttgggcctnaanttgnnagnnaaaaaanttttccttttttttggccccccccnttggaaaa

SEQ ID NO: 5992 - DNA, 342 bp, Homo sapiens
ccctttcgagcggccgcccgggcaggtacactctagcattgtaactttttccccctgagaagtgattttaagatctatcagtctcaatttaaatgatctgttaatcagccagagttttagtttcataatatcgttccattgcctgacaaagatatacacactgaagtgcctttagcagacctgggaccgtcaagaatcttgttaccctgattattgcaagatgacatatttcttaagccatttataatcccatattcgggttgaatctgaatttacaaataaaagggttaaattgaggcagtttcaagcagcatttaggaaaatgaagtggcttcaaatttt

SEQ ID NO: 5993 - DNA, 355 bp, Homo sapiens
  misc_feature 331, 332, 341: n = A,T,C or G
ccctttcgagcggccgcccgggcaggtacctctctttcttgttggaaatgttgaagtattgaaatacttcttttctgtagaaggtggttctcccttctacccaggaataattttgtggcaagtcattgagtcagcagttattttgaccctaactgaaagagataaagttcctaagaatttattatatatgtttcttgccactgagtgagcaagaaaaatacacacccatcagtgctgactggttggtaatttctgaaacacaatgccacatctcttcatgaataacacagtaacagaattacagagaatttggaaagagatcaatctctannatgggatgngttagttctataaa

SEQ ID NO: 5994 - DNA, 277 bp, Homo sapiens
ccctttcgagcggccgcccgggcaggtacataaccgtgtaatctgtaagatagtatgacatttctgcctttctgcaaaattactgaatcaaagtttgaagtagtgcgttctttaatggattttatttataaaatcatctttactgtaatcccagcactttgggaggccagggtgggtggatcacctgaggtcaggagttcaggaccagcctggccaacatggtgaagcctgtctctactaaaaatataaaaattagccagatgttggtgggttgggt

SEQ ID NO: 5995 - DNA, 420 bp, Homo sapiens
  misc_feature 411: n = A,T,C or G
cgccagtgtgatgggatatctgcagaattcgccctttcgagcggcccgcccgggcaggtacaaggacactaagacagtgtagcctgctgacttgagaatgttctgtaaggactggaaacactagaatcttgaagaaacgcctggctagaggtgagggtaagctgttaattacactgattacagtttgtgcctctcagactgagaactcttttcttcttgctgggggcattgctatctctaggatgtttgccctgaagtcctgatagtctctttggggttttaataaatggctgaaaaaattgttgtggggtttcaacaggcgttcataggcacccttgcttggcaatataacatggcttttgatgtttgggtgttggaagggatctttgaaagtgctgaaaagggactcantctttttcc

SEQ ID NO: 5996 - DNA, 652 bp, Homo sapiens
  misc_feature 481, 537, 539, 554, 557, 576, 582, 592, 635, 641: n = A,T,C or G
ccctttcgagcggccgcccgggcaggtgctgttaaccttccgggaaatgcaggtcttcagtggattcctgttagagacataaaaacgtagagagaagactttcagttaaaagcctcctcccttcagcaaagtatattctgattccattatcgtgttaggctcctatatagttataagtaatcccatgcggttttagaattcttaaatattcacacacatagtcatctgaaaatgaataaatccatgaatgactaaacaaaatttattcctatatcatttcaatatccttaaattatgcttacatccttaaatcggttgcctcattctgaaagcacatagtctgtaactcgtaaaaaacacctgtcggccgggcacggtggctcacgcctgtaatcccagcactttgggaggccgaggtgggccgtatcacctaaggtcgggagtttgagaccagcctgaccaccatggagaaaccccgctntaataaaacagaaaaaatagccgggcgcgggggtgcatgcctgtaatccagcttcntngggaggctgaggganggngaatacttgaactttggangcggangttgccggtnagccaagaacgggccagcctgggcaacaaataccaaaacttcnttttcnaaaaaaaaaac

SEQ ID NO: 5997 - DNA, 328 bp, Homo sapiens
  misc_feature 14, 38, 44, 65, 74, 82, 89, 98, 110, 117, 124, 140, 144,151, 163, 214, 245, 249, 269, 275, 276, 296, 306, 326: n = A,T,C or G
ccggaaactttccnaactttaatttaaaaggggggggncccggnaaaaaatttttgggggggggnccccccccnttcctttnaaggganaaattgggncccaaattgggnccctttncccgganaagggacccggggggncccncccgggnccccccaaaggntttgggttttggggaaaattgggggggaaaatttaaattttccctttgggncccaaagggtaaaaaaatttttttcccgggncccncccccctttttttaaaaggncccggnntttgggggggttttcccggncccggggggncccccccgggaaaagggggntt

SEQ ID NO: 5998 - DNA, 374 bp, Homo sapiens
ccctttcgagcggccgcccgggcaggtacttctatgatatagttgtcaaaatcaactggaggataataaaatattgtgggttctcagcattcttagaatccaaattacaaccatatcagtaggggtttgatccacatgagccaactgaagtcattttcctcaaggttggaatttgtgccaacctaaataccgttgtttctttgatggtgtttattgctattggtattattttgaactaataacaattattttgtctaaataatgctaagacaattctgttaagaattttgtcagctaacataattcattaagtatgtttggcatcatatgggacaaaatatttgggatgaaatgactaaattttctggacacca

SEQ ID NO: 5999 - DNA, 374 bp, Homo sapiens
  misc_feature 154, 227, 267, 314: n = A,T,C or G
ccctttcgagcggccgcccgggcaggtacgatcttggctcactgcaacctctccctcccgggttcaagtgattctcgtgcctcagcctcttgggtagctgggattacaggcgccgtgcccactgcgtccggctaatttttgtatttttaagtanagatggggtttcaccatgttggccaggctgatctcaaactcctgacctcatgtggtccacccaccttggcctnccaaagtgctgggattacaggcgtgagccaccgcgctcancctacaagcaattttttaaaaactgacacctattactgataaaattntctgtttaaaaatcctatttactattttaaagattaaagtattagtttttttttttaaat

SEQ ID NO: 6000 - DNA, 371 bp, Homo sapiens
  misc_feature 239, 283, 299: n = A,T,C or G
cccttagcgtggtcgcggccgaggtacgcggggattctcaatcctacccatgatgcagacagattgcctcatttcagctcaataaaacatcaccaaattcccttaggcagaaaaagggtggggagtgccctttcttgaaggaatcccttaagtgcacgtctcccgttttcttttcacatcaatgcagagtccctctgtgaatttacaacacccaacacccatgagttcagtccttaagnaaggaaaattgagcaagtatttaaattggtttggacatttgcantaaaaagagggtccantattcccaagggcttaacctctaagaaaaattttaattcttcaaaacctttaagttggggccctcttttttt

SEQ ID NO: 6001 - DNA, 299 bp, Homo sapiens
cccttagcgtggtcgcggccgaggtacaagaactatgcagagtcatgtttgatgctttggaacagaaatggaagcaaacagaacaggctgatcttataaatgagctatatcaaggcaagctgaaggactacgtgagatgtctggaatgtggttatgagggctggcgaatcgacacatatcttgatattccattggtcatccgaccttatgggtccagccaagcatttgctagtgtggaagaagcattgcatgcatttattcagccagagattctggatggcccaaatcagtatttttgt

SEQ ID NO: 6002 - DNA, 375 bp, Homo sapiens
  misc_feature 117, 121, 129, 139, 156, 190, 194, 197, 205, 207, 208, 210,214, 226, 230, 236, 244, 255, 257, 259, 265, 270, 272, 275,276, 279, 280, 291, 293, 304, 311, 312, 345, 355, 360, 362,366: n = A,T,C or G
cccttagcgtggtcgcggccgaggtacaaaaattagctgggcatagtggcacatgcctgtagtcccagctactcgggaggctgatgaacaagaatcacttgaacctgggaggagganggtncctgttancttaaaatcntgctactggcactccangccttgagccgacagagcaagactgtttcaaaanaatntantaagatananntntttnaaaaagggaaanacanaagccncttttatnaaaaaaaccananangccctntttgnanaannagnnattgatacaanantttggaaattnattattnnggaattaccaaattttattttttttaaaaaaanaggttttttnattangnaaanaaaaaatta

SEQ ID NO: 6003 - DNA, 783 bp, Homo sapiens
  misc_feature 20, 25, 32, 50, 57, 69, 76, 80, 84, 93, 95, 99, 101, 107,111, 133, 139, 141, 145, 154, 160, 172, 174, 185, 189, 195,197, 201, 205, 226, 228, 235, 271, 274, 282, 288, 296, 298,300, 316, 319, 321, 327, 329, 358, 381, 414, 442, 443: n = A,T,C or G
  misc_feature 482, 491, 498, 503, 507, 513, 515, 517, 535, 545, 558, 562,581, 592, 593, 616, 619, 620, 635, 655, 665, 675, 677, 684,686, 689, 699, 701, 702, 704, 709, 710, 716, 737, 745, 747,748, 760, 766, 783: n = A,T,C or G
aaattaccgggaacttcacnttatnagggggnccgaaaattttggggggnccccctncttagaaatggnccatggncctncggnagaccgggncnccgncnccaagntggntgggaaatgggggaattaattncttggncnaagnaaaattttncggccnccctttttaagncngttgggggttnccgnccgggncncggnaagnggttaacctcaaaaccaaaantnggaattntttggggcctttttttaattaatttaaccttgggtnaangaaatggntttaanttaaaatngntntaaaaatggttggggnatngnttaagntnggccttttttttaacctttttaaccaagnaattttggaattttggggaaaanttaaaaggaatttaattttggccaattaattgnaaaattttttaaccccccaaccaagggnnaaccttcctttggaaaattacaattggtttttaaccccnccaaccttnccccccntttcnaacnaaaaantngntttttgattcctccaacntttttaaggnttggaaaggattntggnccaatttttgggaaatccnttaatttcccnngttaaccccctttggccaccccntgnngtccgggggaccccngtctttcctgtaaaaaaagnggggtccggnaaaaattttncnccaaagncnaancaaactttgngnncnggggnnacccgntttttaccttaaaggttgggngaaattcncnngtaaagaccttncggtgntttaacccccaaaaagn

SEQ ID NO: 6004 - DNA, 328 bp, Homo sapiens
ccctttcgagcggccgcccgggcaggtaccattcttatctcagaatgctgtaaaccatcagtagaagcagtttagatttggactgcatggtaaatgaaaagtaataaccctccaaccacaacctagtcagggtattaataattatatgtagcaagaaaacaaagaagaaaataatattgaaaaaatggagattccccaaccagtttcatatttgaaggatctgagttgtatttttattaaggaaattttttttctgaatactgtcttccaaaatgttaacattaaaatctgaatcagaggactctgaatggaaaagaagttttgatca

SEQ ID NO: 6005 - DNA, 215 bp, Homo sapiens
ccctttcgagcggccgcccgggcaggtacccagcagggaaatcactttgggaagtagattggctgtttgagccacacaaccttagatcacattcactgtcagaagaagactgtctacaaacctggaggaaaacattaagatagttcctcttctcctagcagcatgtgaaataaataaataaataaataaaaggttagaaatattttctttgaatc

SEQ ID NO: 6006 - DNA, 364 bp, Homo sapiens
cccttagcgtggtcgcggccgaggtactttgatcttggacttgcagcctccagaactgtgaggcttgtccattttaatgagaagcttatgcggcatggaactgagttcacccccaaccaacagctggtgaggaatggagctcttcgttcaatgactcataatgagctttgagacaaccaaagccccctagctaacctgtgcctggattcctggcccacaaagacagtgagagagggacccaactcagcccatgaagccactgaaatacaggaaagagcatcttcattgaagccactggagcatggggaaagagcaccaccaggctccctgctcgctaggctgtggaacctcagggatgggaatt

SEQ ID NO: 6007 - DNA, 329 bp, Homo sapiens
cccttagcgtggtcgctggccgaggtacctctacggtgtcaataattatttcagtctctgctgcaattagtgctaattacaatacctgagctataaaaataaaagatttcattatagcaaagttcacaaatatcgttttagttcagttatccacattgttcatctaaaataatacattttctttacatataactgtcttagacttgtaattgaggatatttgatgaaacagatctgtatctgaaacagcactatgatgctaaacatctgcataaggaatgaaaaaagttagcaacctaggtttttcaatattcagatatttgagattac

SEQ ID NO: 6008 - DNA, 641 bp, Homo sapiens
  misc_feature 400, 507, 525, 532, 540, 542, 575: n = A,T,C or G
cccttagcgtggtcgcggccgaggtacctaagatagagctgttagaatttagatagacattagatagacagtgaaaatattttagtctacagttgaaactgtaacaatattggtattgttctcaactacccctggtctagttaagggctttcaagtatgtgtttggaccaagtattttcatgtccaccatctagatagtccttggtctatttcccaccccatgtgctttctggtgggatgatcacatctgcacctctagtccccaagctgtccctgagctctgtgtcctcactgtctccacatggagtgtccccttccacctcaaacttgacaagggttgtgtctccacaccaccctgctcctcctggattccagcccaagtctgtccttccttttctgntggttgccctggttcagagccctgggacctctcatgttcctctcccagagtctctttccaagccttactctacccgccagaccacttcttggtcaagcatacattgngcatttccccaggtttgngcctttnctatattngnctcctccacctaaaaggcccaatctggttaagnttctgctcaatcccatcttcttcacaaacctgctgaatctcttcattggaattcaatctttctctt

SEQ ID NO: 6009 - DNA, 429 bp, Homo sapiens
ccctttgcggccgcccgggcaggtacccgaaaagaaaggaagctttagtaatgaaaggattgctgccaaaatcctgtttcccccttgcagatcttacagaaaacagccacagaatcccaaggcatcagcaccaagagagcctgtagaaactatctggtctaagctcctgaagcccagagataagaatgacttaacccaagctgcacagcctcttaacagtccactgttaaccccagaaacagatgcatctgaatctgaaaggagacaggaatcctaatcctactgctcagggacttgctgatttactttgctgtctattagcctttctgtgacatgattttctaccaagcaaagtcttttattcaagtctcccagagatttcctatttaagcgtttgctatttggccacttaaaaaaggacagaagaga

SEQ ID NO: 6010 - DNA, 264 bp, Homo sapiens
cccttagcgtggtcgcggccgaggtacccgaaaagaaaggaagctttagtaatgaaaggattgctgccaaaatcctgtttccccctcgcagatcttacagaaaacagccacagaatcccaaggcatcagcaccaagagagcctgtagaaactatctggtctaagctcctgaagcccagagataagaatgacttaacccaagctgcacagcctcttaacagtccactgttaaccccagaaacagatgcatttgaatctgaaggga

SEQ ID NO: 6011 - DNA, 201 bp, Homo sapiens
  misc_feature 30, 47, 60, 83, 109, 141, 143, 161, 169, 170, 172: n = A,T,C or G
aaggcaatgggcccaatgggcccttcccgnaaagggccgggggcccnccggccccaaggntttgggttggcaaattggggggnaaattaatttcctttgggcccaaggnaaaaatttttccgggcaccacttttttttccngnaaggtcccggggggcctnccgggccnncnccgggggggggcccaaggggggtttaacc

SEQ ID NO: 6012 - DNA, 373 bp, Homo sapiens
  misc_feature 254, 309: n = A,T,C or G
cccttagcgtggtcgcggccgaggtacgcggggattctcaatcctacccatgatgcagacagattgcctcatttcagctcaataaaacatcaccaaattcccttaggcagaaaaagggtggggagtgccctttcttgaagggaatcccttaagtgcacgtctcccgttttcttttcacatcaatgcagagtccctctgtgaatttacaacacccaacacccatgagttcagtccttaagaaggagaaattgagncaagtattttaattgggttgggaccatttgccataaaaaggagggtcccattatnccagggctaacttctaggaaaatttttatttctcaaaactttaagttgggcccttctttttttc

SEQ ID NO: 6013 - DNA, 201 bp, Homo sapiens
  misc_feature 20, 26, 28, 39, 88, 104, 131, 163, 165, 167, 173, 176, 189: n = A,T,C or G
ccctttcgagcggccgcccngggcangntacctggttgnatccttttaagtgttttgtttgtgggtaatccttcacaaagaccggggnactgatgggaaaactnccttggctatttaaaaccttttttttnttggagggttaaaaaaaaaaaaaaaaaaaaanananaaaaanggnccttttttttttntttttttttttt

SEQ ID NO: 6014 - DNA, 895 bp, Homo sapiens
  misc_feature 4, 67, 91, 93, 102, 108, 116, 118, 122, 124, 145, 154, 163,171, 181, 183, 187, 202, 218, 224, 226, 228, 235, 240, 242,251, 253, 257, 264, 280, 282, 304, 321, 323, 326, 327, 333,351, 368, 386, 408, 418, 423, 425, 434, 438, 441, 447: n = A,T,C or G
  misc_feature 455, 476, 493, 496, 521, 523, 528, 529, 530, 535, 537, 554,560, 572, 573, 578, 581, 584, 592, 596, 610, 613, 618, 619,627, 645, 655, 657, 660, 663, 664, 665, 666, 671, 672, 675,693, 699, 702, 705, 710, 714, 720, 728, 733, 734, 738: n = A,T,C or G
  misc_feature 754, 757, 760, 761, 763, 768, 771, 773, 775, 777, 778, 779,798, 799, 806, 808, 810, 817, 831, 836, 847, 858, 860, 861,867, 870, 871, 880, 881, 889: n = A,T,C or G
aatnacccggaactttcaactttatttaaaggggggggcccggaaaaaatttgggggggcccccccnttcctttaagaaatgggcccaatngnccttcccgnaaaggncccggggncnccgncnccaaggttgggttgggaaatnggggaaatnaattccttngccaaagnaaaaattttncngccnccccttttaagaccngattggggattcccgncggggncncnggaaagnggttnancctttttgntnaagnaattggnttttttaattgggttngnccttttttttttgggttaattncccttaaaacctttttntnaannaaaaanttctttaaaaaaattaanaaaaaaattccaaaggnaaggggggttaaaaattnggttaaattttttttttggggnccaagggccnttttngntttttaaangggnttngaaagnaaaaattnctttttaaaaatgggaatttncaaattaaaaaaaaggnggnaaaatatttaaaataattccttaangnaattnnnattangnaaaaaaaaggttaaacncctttngtctacccctgnnggtgnccnggnggacaccngacntttaaaataaaggnggngaccnnataaaaanttttttccaaaatccaanccaaacattngnggnctnnnnggtcnnccnggttttataaccattaangatttnggnggnaaatntccnccctgnaaagaccntttcnnttgnatttaatcctccaaanaanganncnttttnggngntncnnnattataaaaaaattttacnnaaatttntngnggatttnccaaaaatttaaanagganccccttttganttttttttttntnnaccacnttnnggttttagnnttttgtgnaaaaaa

SEQ ID NO: 6015 - DNA, 345 bp, Homo sapiens
  misc_feature 260, 274, 342: n = A,T,C or G
cccttagcgtggtcgcggccgaggtacagtgaaaagagccaaggctgtgtgaccccctcatcgcttagccaggcgtatggtcctggtttctgaggctgccagaaagcatcttagcaatttgtgtttggatggtccatgcctgactattctaggctggaggttcctaaagagtaacaagaggaagagaaacgagaatctctgacacttgttgagaatagagcacagtcccattttgtttgaaaagagacaccaggcagccntgtttatgtgccanaaatgcattccacctcaaggaggacttaatttatggacccgagtgtgccaggctgagctgggcaaganctt

SEQ ID NO: 6016 - DNA, 265 bp, Homo sapiens
ccctttcgagcggccgcccgggcaggtacagtgaaaagagccaaggctgtgtgaccccctcatcacttagccaggcgtatggtcctggtttctgaggctgccagaaagcatcttagcaatttgtgtttggatggtccatgcctgactattctaggctggaggttcctaaagagtaacaagaggaagagaaacaagaatctctgacacttgttgagaatagagcgcagtcccatttgtttgaaaagagacaccaggcagccatgtt

SEQ ID NO: 6017 - DNA, 191 bp, Homo sapiens
  misc_feature 159: n = A,T,C or G
aaactatttaactctcttttgtctcatctttaatacctcttttcattgagaaactttagacaactccgggttgaaactgagtaaaaatcaactaaatttaaaaataaaagtttaatttcagagtggcaagtgtctcatttttaagaaatgaatacttgnaagtgaacttcaggaaacatatatttttataa

SEQ ID NO: 6018 - DNA, 194 bp, Homo sapiens
ccctttcgagcggccgcccgggcaggtaccaccttgatgacttctgtattcaccactaaaaactgaaatagaacatactatatacagcttcaagtttgtcactttttaataaaacttttcccacaaatgattataattacttgccctttgaagctattggatagatctgaaagtgaggtagggtgggggatggt

SEQ ID NO: 6019 - DNA, 530 bp, Homo sapiens
  misc_feature 445, 491, 515: n = A,T,C or G
ccctttcgagcggccgcccgggcaggtactccagcctgggcaacacagcgagactctgtctaaaaaaaaaaaaagtgcttcaaaagcaaccgtataacagagacatactgaacataggatttctgccattcttgtctgcctataaggatagacaaactatctcagataagtaactgagatatttattcaacggtattctcatccagcataaaatacttttttcaatgtagtaacaaacttaccatcttttactttaagtgttctgttatttttgatttgcaatcagagcaatagtaaattgagtgagaaagttctgagttttacagaaactagaaggtgtaggaattttcttaagaaatcctgttctcatagcaaaccatcccgtttcttgatgaaggagttcagataagtatatgaagtttggagtgtttattacgactctcanaccttttgaaatttacccatcacaaataccttctgtttttatgggngcagttaatatagatttaaatatntaccttgccttctga

SEQ ID NO: 6020 - DNA, 297 bp, Homo sapiens
ccctttcgagcggccgcccgggcaggtgcgcggggttgaagagtgtgtataggaaaggtctagaaataaataggcttgtgcatacctaggcattcatgctctttcttcctcttcagagatcatcagaaaagaggtgggaatacacaagcaggtgcatgtaagcccaaaagctagaaagccttatatttaaccaaaggttgatgtgttcattccagttattcacttacagatgaaactaaaacaaataaaggcaagctattatcagtttggtagttcattattttagaacaaatttct

SEQ ID NO: 6021 - DNA, 261 bp, Homo sapiens
  misc_feature 77, 98, 109, 138, 213, 215, 254, 259: n = A,T,C or G
cactatagggggcgaaattgggggccctctagaatgcatggctccgagccgggcccgccaagtgttgatgggaatantcttgccaggaaatttccgcncctttaagccntgggtccgcgggccccgaaggttacccantttgggttgggccaaatttggaatttttgaatgggttaaaggggggaagggggaatccgtttgaacccctcgtcntngttattgttaaaaaagggaattgccgttaaggggaaatnggggnaa

SEQ ID NO: 6022 - DNA, 273 bp, Homo sapiens
cccttagcgtggtcgcggccgaggtactctacggtgtcaataattatttcagtctctgctgcaattagtgctaattacaatacctgagctataaaaataaaagatttcattatagcaaagttcacaaatatcgttttagttcagttatccacattgttcatctaaaataatacattttctttgcatataactgtcttagacttgtaattgaggatatttgatgaaacagatctgtatctgaaacagcactatgatgctaaacatttgcataag

SEQ ID NO: 6023 - DNA, 439 bp, Homo sapiens
  misc_feature 228, 234, 262, 349, 356, 376, 391, 392, 398, 409, 414, 420,421, 427, 433: n = A,T,C or G
ccctttcgagcggccgcccgggcaggtactctaaaatcctttccagctgctattgaacataccatacagtgggcaagagataagtttgaaagtcccttttcccacaaaccttcattgtttaacaaattttggcaaacctattcatctgcagaaggagtcttacagaagatacagagtggacacagtttagaaggctgttttcaagttataaagttacttagcagaaanacctantaaattggtcccagtgtgtaagaattangcaaagattaaaaggtttgaaaaaatatttttaaccataaggctctttcagctttcttttcaactggttttccccttcttggggacnattaccngaattttaaaaaaaggaatnggggccaggttttanntttttnggccagggttnacccnggaaannaaaggnccccancccctt

SEQ ID NO: 6024 - DNA, 376 bp, Homo sapiens
  misc_feature 15, 23, 47, 56, 151, 260, 279, 291, 327, 333, 348: n = A,T,C or G
cccttagcgtggtcncggccgangtacctaatctttctggcctgaantttatgtanaggttgttccgctatcgtctagtatttaatgtggcagagattggacactacaggaaaaaaattctggatattttacatgctttgtattgtgacangaaaactaatcacggtgaattgaggattgagtttccatttcttactgaaatggggtaaacattgccagtttgcatccttgcttttattctcaattctgcaaagtttaanctataattaaaaattaacncattttaaaagncctggataagcattatgaagggtcaattagcaacanagggtngttgaaaagaccagnactgccctaaaattcaaaatttttttac

SEQ ID NO: 6025 - DNA, 312 bp, Homo sapiens
ccctttcgagcggccgcccgggcaggtacttctatgatatagttgtcaaaatcaactggaggataataaaatattgtgggttctcagcattcttagaatccaaattacaaccatatcagtaagggtttggtccacatgagccaactgaagtcattttcctcaaggttggaatttgtgccaacctaaatatgttgtttctttgatggtgtttattgctattggtattattttggactaataacaattattttgtctaaataatgctaagacaattctgttaagaattttgtcagctaacataattcattaagt

SEQ ID NO: 6026 - DNA, 790 bp, Homo sapiens
  misc_feature 16, 39, 61, 68, 90, 100, 103, 115, 116, 137, 144, 150, 151,157, 167, 171, 177, 178, 190, 197, 204, 224, 250, 261, 271,293, 297, 307, 316, 317, 346, 360, 361, 364, 375, 377, 380,381, 383, 390, 393, 398, 401, 409, 421, 426, 429, 444: n = A,T,C or G
  misc_feature 460, 461, 463, 471, 473, 480, 484, 492, 495, 498, 501, 509,510, 519, 522, 530, 542, 566, 574, 579, 583, 586, 587, 608,621, 648, 651, 663, 669, 671, 673, 674, 696, 698, 701, 707,708, 714, 716, 717, 738, 740, 743, 745, 751, 769, 770: n = A,T,C or G
  misc_feature 785: n = A,T,C or G
aattttgggttaaaanttaaaccggaaactttccaaacnttaatttaaaaggggggggggncccgggnaaaaaaatttttgggggggggncccccccccnttnccttttaaaggnnaaattgggtcccaaattgggnccctttncccggnnaaaggncccggggggncccncccggnnccccccaaaggntttgggntttgggnaaaattggggggggaaattnaaattttccctttgggcccaaaaggnaaaaaaatttntttcccgggnccacccccctttttttaaaggncccntttggggggntttacccgnncccggggggaccccccgggaaaggggggnttaaaccctttatnnttnatattatattntnttnntntcttatnttntcttnttntttttttnggggggcccttnccttnaanaaaagaggggggggnggttaaagggaaaggnngnggaggggntnggccttnattnatgggggntanaanatnaacctggnnacccccttnaantattttcnaaaaagggaatntttttaaatgggggggaaaaattnaaattttnattangtgnacnnaattgcgtgcaatgaaaaacnttgtaggtttgtntccacagatttcattagcattgaccgnagnatacccccggtngtgtancngnnaaagtggtttggttaaaacagntnggnaattannatatgntnntaagcctaatgtggggacagntnatnanatgcangacgtttttgttgatgannaatttattaataccnaaatg

SEQ ID NO: 6027 - DNA, 348 bp, Homo sapiens
  misc_feature 108: n = A,T,C or G
ccctttcgagcggccgcccgggcaggtacagatctactggcaactttgggtgccttttgctcccttttatataaaagtagaaaatcccaatgatctgatgtagtatanctgagcatgcccattctcattcccaatatccacactgtgtttctaacatatgtgtgtgccccacccacctctgggacctttttgctcgactttttctcttggcttccacttcagtcagggagaatagggataggaaaagaaagaaataaggtcctggaaaagccagttccttgggactccctaattccttgaaattctacttgtctccatctttccaaataggaagggtccctgagccct

SEQ ID NO: 6028 - DNA, 286 bp, Homo sapiens
ccctttcgagcggccgcccggcaggtactacaagatggaagtataaaattattggacaagtgaaatcgtatcagtagttcctgactgacagcttctggagccacactagagcagtgattctcagtctaacattaggttatcatgatgacgtatgagtaaattcttaatggttaaatgtgagacagttcacatttattcccatagaaatgtcattctcatttgaattcagagatacttctttgctggaagtatgaattatagctttacaccaaggagtgacacgtag

SEQ ID NO: 6029 - DNA, 374 bp, Homo sapiens
  misc_feature 186, 275, 279, 282, 302, 320, 325, 328, 370: n = A,T,C or G
cccttagcgtggtcgcggccgaggtacaatcacttttccatggtcaccctcttttctgctttatactaattgccctgttgaggtgtttccatgtcaaatgcagctcttgtcggaactgaaaatggcagtgccaagggagctgtgcaagtattaatcaaagccggaagatttcctccatccacccgnaaccccaaggcttaagcactcccttaggaaccaaagctgactctttgggaaagttatcacagccttattaggtttacaaccctgcaagnatgnttngtttgttttgacccttaaanattttgtggaaactggtntttgntgnaaacttggtgatggtggtgtggcaccacaccattgttggcanaaag

SEQ ID NO: 6030 - DNA, 365 bp, Homo sapiens
  misc_feature 7, 8, 9: n = A,T,C or G
cccttannntggtcgcggccgaggtacattatacaataaggcaagaaactaaaaacccatacaaatattggcaaagaagcagcaaattactttgtttatagattacagtattacacatttagaaaatataagagacttcggcagaaaacaatgtagtttacctcaggaaaacactaatattttaccagatggcatagaacagaaactgaaaaaagtgagagaaagaccatatttcttgataaaaatatttagtatcacaaaaatattaatgcttccacaattgtctaaaaaactcctccaatacaaatcacaattgcaatactttagttggggggaattggggaactgaaaaattagtttttgtt

SEQ ID NO: 6031 - DNA, 471 bp, Homo sapiens
  misc_feature 401: n = A,T,C or G
cccttagcgtggtcgcggcccgaggtactttaagaaaattttaatgtcataaataggcaacaaatattaaagcagagaaataagattaaaattagtgaaaggttaggtaaagagaacctaacagcagcagcagaaacagaaaacactacagatacgctacatccagatgtggcaagaaattgaacatatgaaacaaagactgtctctgacactaaaagcacaatggtgtcataaacaggaggggaaaaagactagagattgtggtgagttcaagagatttgatataaattgttacatatgttacccaattatctttatgaaatattgttttacatgaatattctgtatttttctccaagatgttataaatcactaaataagcaattcgagatataattacnagtagaatacaatatgaaataatacttctactctgcatttagacaagcaatatagattaaagggaatctt

SEQ ID NO: 6032 - DNA, 173 bp, Homo sapiens
  misc_feature 3, 22, 30, 44, 47, 65, 69, 71, 132, 156, 157, 160, 173: n = A,T,C or G
tgntaataccgactcacttatnagggccgnaattggggcccctnctnaaaatggccattggcctncggnanagccggcccgccagtgtggatgggatattcttgcagaaatttccgcccctttagccgtggntccgccgggcccgaggtaactttnnttnttttttttttttn

SEQ ID NO: 6033 - DNA, 328 bp, Homo sapiens
ccctttcgagcggccgcccgggcaggtacaaggacactaagacagtgtagcctgctgacttgagaatgttctgtaaggactggaaacactagaatcttgaagaaacgcctggctagaggtgagggtaagctgttaattacactgattacagtttgtgcctctcagactgagaactcttttcttcttgctgggggcattgctatctctaggatgtttgccctgaagtcctgatagtctctttggggttttaataaatggctgaaaaaattgttgtggggtttcaacaggcgttcataggcacccttgcttggcaatataacatggcttt

SEQ ID NO: 6034 - DNA, 297 bp, Homo sapiens
  misc_feature 246, 280, 293: n = A,T,C or G
ccctttcgagcggccgcccgggcaggtacctatctcacttagatttgtggactaggaaagcaagattcagagatcatgtgacttgcatgtggcctagagataaaattcaaatctggttccgtagactccagggacatattcaccatgccatgggtggtggctattaaaccttgataaatttgtgtttatggttaacaaatgtgaaagctattaaacattgctggttttgaattttttacagtgcanaaatgtaaaaatgaaaaaggattatttttctttnacaggtgttaccngaga

SEQ ID NO: 6035 - DNA, 197 bp, Homo sapiens
  misc_feature 4, 10, 11, 14, 23, 35, 92, 112, 125, 151, 152, 157, 158,165, 168: n = A,T,C or G
gggncccggnnaantttgggggnccccttcttagnatggccattggccttcggaaggccgggccccggccccagtttggttggaattggggnattattcccttggccaaggnaaaaatttttttnccccggggcccccccttttttttttnnccccnnaaaaagnccngggccccgccccccgggggcccaagggta

SEQ ID NO: 6036 - DNA, 542 bp, Homo sapiens
  misc_feature 3, 12, 164, 170, 192, 206, 208, 244, 250, 265, 268, 283,304, 384, 390, 402, 404, 434, 447, 450, 451, 464, 472, 482,487, 492, 501: n = A,T,C or G
gancgggcccgncagtgtgaatgggatatctgcagaaattcgccctttcgagcggccgcccgggcaggtacatgaaaagatcctcaacatcattagtcaccaaaaaaatgcagatcaaataccacaattgacatatcacttcacacccactagaatagctatanataaanaaaataatgtaacaagttatgngaaagaaggatgtngngaaaaaaacctggaaacccctcatggccacttactnggatangggaaatggtaaaanatntcctggcaagcccantttttccaaaaaaaaacaagnttttggggtaggtttccccttcaaaaaaagggggttttaaaaccaataaggaaggttttaaccccaattaaccgggggcncccttnggcttaattttncnccacccttttgcttaagggaattatttaanttacccccccaanagnnaaagggggaaccnttggtttntaaaaccaanttaanaaaanaaaaaaggnaaaaaaaaaccccccttgggccaaccaattggaaaattggg

SEQ ID NO: 6037 - DNA, 390 bp, Homo sapiens
  misc_feature 158, 263, 307, 332, 375: n = A,T,C or G
ccctttcgagcggccgcccgggcaggtacgcggggagaaaaagggtggggagtgccctttcttgaaggaatcccttaagtgcaccgtctcccgttttcttttcacatcaatgcagagtccctctgtgaatttacaacacccaacacccatgagttcangtccttaagaaggaaaattgagcaagtatttaattggttggacattgcataaaagaggtccatatccaggctaactctagaaattttattctcaaactttagttnggccctctttttttctttctgtcagaagggacccattcttagtngggcacttgggggaaaatcttgggncacccccaagaaaggaatttccaacttggcgcctcaactggcnaaaaaataccaaatt

SEQ ID NO: 6038 - DNA, 288 bp, Homo sapiens
ccctttcgagcggccgcccgggcaggtacatacgctctcagttgggatagcagttcatttccattaggcagacgtataaactaaggaatgttagtctgcagtattcattttaaaaatattgacatgcctttcccctcccctccatgaagtcagtgccagagtgagccagattgggaggttggggttttgtttggttggcttggttttcattaagggaaaaaacttgcattggacaatcaaattcccctgagtttcataatctcatcaatattttaagataggcgagca

SEQ ID NO: 6039 - DNA, 357 bp, Homo sapiens
  misc_feature 274: n = A,T,C or G
ccctttcgagcggccgcccgggcaggtacctctctttcttgttggaaatgttgaagtattgaaatacttcttttctgtagaaggtggttctcccttctacccaggaataattttgtggcaagtcattgagtcagcagttattttgaccctaactgaaagagataaagttcctaagaatttattatatatgtttcttgccactgagtgagcaagaaaaatacatacccatcagtgctgactggttggtaatttctgaaacacaatgccacagctnttcatgaataaccacagtaacagaattacagaggaatttggaaggagaatcaatctctagatgggatgaggttaggtctataa

SEQ ID NO: 6040 - DNA, 381 bp, Homo sapiens
  misc_feature 307, 318: n = A,T,C or G
ccctttcgagcggccgcccgggcaggtacactctagcattgtaactttttccccctgagaagtaattttaagatctatcagtctcaatttaaatgatctgttaatcagccagagttttaagtttcataatatcgttccattgcctgacaaagatatacacactgaagtgcctttagcagacctgggaccgtcaagaatcttgttaccctgattattgcaagatgacatatttcttaagccatttataatctcatattccggggttgaatctgaatttacaaataaaaagggggttaaaattgagggnagttttcaagncagcattttagggaaaatggaagtgggcttcaaattttagtgtttctggttaccattattttt

SEQ ID NO: 6041 - DNA, 323 bp, Homo sapiens
ccctttcgagcggccgcccgggcaggtacccggggcccttaggcagaaaaagggtggggagtgccctttcttgaaggaatcccttaagtgcacgtctcccgttttcttttcacatcaatgcagagtccctctgtgaatttacaacacccaacacccatgagttcagtccttaagaaggaaaattgggcaagtatttaattggttggacattgcataaaagaggtccatatccaggctaactctagaaattttattctcaaacttagtttggcctctttttcttctgtcagaggaccattcttagtggccactgggggaaatct

SEQ ID NO: 6042 - DNA, 306 bp, Homo sapiens
cccttagcgtggtcgcggccgaggtactctacggtgtcaataattatttcagtctctgctgcaattagtgctaattacaatacctgagctataaaaataaaagatttcattatagcaaagttcacaaatatcgttttagttcagttatccacattgttcatctaaaataatacattttctttacatataactgtcttagacttgtaattgaggatatttgatgaaacagatctgtatctgaaacagcactatgatgctaaacatttgcataaggaatgaaaaaagttagcaacctagttttttcaa

SEQ ID NO: 6043 - DNA, 308 bp, Homo sapiens
cccttagcgtggtcgcggccgaggtaccaggactctcacacataagaatgttcagggaatattatttgtaaaaactccaaataaatataaccctaatatccaattagtagaattaatagcagtatattcaaagaatggactgtcatatagccatcaaatggacaaaatatagtaaaatgcaacaatgtgcacaaaaatacacagatatatatgcataaagtttgacagcatacaaaactaatttacattatttagtgatgcatgcataagtggcagttatttttaaaagcaaggaagtaattacaaaa

SEQ ID NO: 6044 - DNA, 286 bp, Homo sapiens
  misc_feature 237, 259, 260: n = A,T,C or G
ccctttcgagcggccgcccgggcaggtaccctcattgtagccatgggaaaattgatgttcagtgggggatcagtgaattaaatggggtcatacaagtataaaaattaaaaaaaaagacttcatgcccaatctcatatgatgtggaagaactgttagagagaccaacagggtagtgggttagagatttccagagtcttacattttctagaggaggtatttaatttcttctcactcatncagtgttgtatttaggaatttnntggcaacagaactcatggctttaatc

SEQ ID NO: 6045 - DNA, 385 bp, Homo sapiens
  misc_feature 293, 357, 369, 372: n = A,T,C or G
cccttagcgtggtcgcggccgaggtactttttttttttcttttttcttttttttttttttttgagatgagtctcgctctgttgcccaaattggagtgcagtgcacaatctcggctcactgcaacatccgcctcccgagttcaagcaattctcctgcctcagcctcctaagtagctaggattacaggtgcccgccactatgcctagctagtatttctagttttagtagagatggggtttcaccatgttggccaggcctggatctcgaacctcctaaccttcaaatggatccacnccaccctcagccctcccaaaaagtgcttgggtattaaaaaagtttaatggagcccaactggtgntccaagcccagncanttttttttttttt

SEQ ID NO: 6046 - DNA, 260 bp, Homo sapiens
caacctgaaacaaatttgtgttaaagttcttaccacatatatctggctgatgtttaggctgttcatctctaattttattttcactgagaagcttttgatacttttcttcttcggtgaaatgcggaactgtgcttttaaatccacatatttgcatattagagctagttatatcactcagtctagaggagtgaatcttctgggattctatattctgtgtttcagaaacagaacgtacctgcccgggcggccgctcgaaaggg

SEQ ID NO: 6047 - DNA, 369 bp, Homo sapiens
  misc_feature 1, 8, 18, 30, 31, 39, 45, 46, 92, 132, 146, 158, 166, 167,193, 200, 207, 213, 216, 217, 218, 223, 225, 226, 228, 237,238, 240, 243, 244, 245, 246, 247, 250, 254, 255, 256, 257,258, 259, 260, 261, 262, 263, 264, 265, 266, 285, 289: n = A,T,C or G
  misc_feature 290, 304, 311, 317, 324, 331, 334, 338, 340, 341, 342, 345,352, 365: n = A,T,C or G
nccggaantttggggggncccccccctttnncttttagnatggcnntggcctccgaagcgggcccgccccagttggttggatggggataatncttggcaagaaattttccgcccccttttagccggtgggtncgccgggcccgganaggttaactatnaaggaacnnttattggaaaaggggggggggggccntttcccnaaaaaanaggggnccnnnccccncnnanaaaagaggnngnggnnnnnagnaggnnnnnnnnnnnnnagagggggaaaagcccttnaaanntgccccctaaaaanaaaaaanaagggntgggggnttttttnttnaaancnnnaangcttttnggagggggggganaaaa

SEQ ID NO: 6048 - DNA, 372 bp, Homo sapiens
  misc_feature 351: n = A,T,C or G
cccttagcgtggtcgcggccgaggtactccagcctgggcaacaagggtgaaactctgtctcaaaaaaaaaaaaaacagtgtaaataaaggcacctatccttacggggcttgtgggagggttgagggaaggactacagtctccttttatcttgtgtttatctttagttttagcaaacattctataaggtatgatttgtatcatattcagccgcatgaaaaacacaaatttgcatttcgattttgttcacaaaatttgggacacaaagtccgttttatcacttttaacatcctgaagtttgaactggttgcagcaagtagtatcgttatgcttgtcagccctttcataatccnttccctaaaggcaataaaaat

SEQ ID NO: 6049 - DNA, 351 bp, Homo sapiens
cccttagcgtggtcgcggccgaggtacacacagtcctttatttataaattccttaacagagaaaaacacctttgtaaggctcaacttacctattccagcaagcacactttttctgtcattttttctttcttttcaaatttgatattgtcattattttaaaatagtaagttttctttaatagtcttttgggacctaacataccctttctcatacaattcctaatgctctgtttatggcagataatctgtaatgttatgaagacctatcaaaaagttttaaaagtatttctgtcttcaaaggtagtaaggacaggattaaatttttattagaatagacaaatcagtgaatggg

SEQ ID NO: 6050 - DNA, 712 bp, Homo sapiens
  misc_feature 566, 586, 601, 618, 624, 676, 677, 678, 694, 697, 702: n = A,T,C or G
cgccagtgtgatgggatatctgcagaattcgccctttcgagcggcccgcccgggcaggtacttactttgttatagttggtgctattactgaatcaatcaagtagatgaaaaattagaagcatacggtgttcagggagggataattctttttttttgagtaggaattttgctcttgttgcccaggctggagtgcaatggcgctatctcagcttactgcaacctctgcctcctgggttcaagcgattcacctgcctcagcctcccgagtagctgggattacaggcatgtgccactacgcctggctaattttgtatttttagtaaagacaaggtttctccatgttggtcaggccggtcttgaactcccaacctcaggtgattcacctgcctcggcctcccaaaatgctgggattacaggcgtgagccactgcgcctggcctgaatttttattctataattctgttatagaataaaaaaggggggaggtatagtgtgttgcaaaagttttatgacaatttttgtagctagaagtattcgaaattaaaggaaaaagaaaaacacagaagtnaatacctaccaacatatgtncagtaatactatttncatctatggtaatccanaaaatnaaagtctattttgaaagaataagaagtagtggtggtccaaataccatactgnnngttgggtcaatttatnctngattnaatttttcta

SEQ ID NO: 6051 - DNA, 373 bp, Homo sapiens
  misc_feature 8, 24, 259, 272, 286, 289: n = A,T,C or G
ccctttcnagcggccgcccgggcnggtacatgggactacaggcacgccccaccatgcccagctcatttttgtatttttagtagagacagggtttcaccatgttggccaggatgatcttgatctcttgacctcatgatcccgcccctctttggcctcccaaagtgctgggatcacaggcgtgagccaccacacctggccctctatttattctctttaaagagagagaaaactatgagaggccaaaattatttaatttaanatctttaccttangccaccaagggganaanaaatgggaattttgccctaaataatggggtggatgaaagccattaccaccaattggaacaaggaaaacaaattcaacatttttt

SEQ ID NO: 6052 - DNA, 367 bp, Homo sapiens
  misc_feature 33, 102, 104, 109, 110, 131, 132, 133, 136, 137, 148, 150,153, 165, 166, 167, 174, 175, 176, 177, 178, 179, 180, 187,188, 194, 195, 197, 198, 207, 209, 218, 221, 222, 223, 230,231, 242, 243, 244, 245, 249, 259, 260, 265, 268, 270: n = A,T,C or G
  misc_feature 271, 272, 273, 279, 283, 285, 289, 295, 296, 297, 301, 308,309, 313, 316, 320, 321, 329, 330, 333, 334, 335, 341, 350,357: n = A,T,C or G
ccctttcgagcggccgcccgggcaggtactttntttttttttttttttttttttttttttcctttttttttttttttttttttttttttttttttttttttntnttaannttttttttttttttttttttnnnaannaaaaagggggngnttntttaccctttannnaaaaaannnnnnnttttaanngaaaanntnntttttgggncntttaaaccnaannnaaaaaannggtttccaaannnngggntttttttttnnagggnatntnnnngggcantttncntttngaaaannnggtnaaaaaanngggnaantccnnttaaaaannccnnnaaaaanttttttaanaaaaaantttttttttt

SEQ ID NO: 6053 - DNA, 318 bp, Homo sapiens
cccttagcgtggtcgcggccgaggtactatgatctgttgctaagaaatcttataaataaaagttatttaatgtttgatcattatctctggtgtgactaaaacaagtattgataaatcaggaacaagaatccccaaaggtcaagctaaataaacattaaaatattctatagttatttgcaaatgatggcattatattatatttgatttttgatatggaagtatcctctgaccaggtgtgggcagttcacgccgcctgtaatcccagcactttgggaggccgaagcgggaggattgctcaagcccagggggtcaaggctg

SEQ ID NO: 6054 - DNA, 310 bp, Homo sapiens
cccttagcgtggtcgcggccgaggtacaagatttcttagggcgaatccaattccatcaatacctggggaaacacaaaaacctggtgcagctggaaggctgctgcactgaaaagctgccactctatatggtgttggaggatgtggcccagggggacctgctcggctttctctggacctgtcggcgggatgtgatgactatggatggtcttctctataatctcacagaaaaacaagtatatcacatcggaaagcaggtccttttggcgctggaattcctgcaggagaagcatttgttccatggggatgtggc

SEQ ID NO: 6055 - DNA, 327 bp, Homo sapiens
  misc_feature 280, 291, 300: n = A,T,C or G
ccctttcgagcggcccgcccgggcaggtacagaggccctgaggcagatttgagaaagggcaaagaagtcactgtagctgtggttgaggtggaaagaaggagagtggtagaaaatggagttagagaggtaatgggggtgggaagaatgtgaggggcctcacaggccttatggactttggatatttctctgagagaaatggggaacctctgaagtgttttgatcgcaggagatgtattagtcatctgttacagggtaataaatacagccaaccaaaatgtantgggttaaaanaacactaantacctcggcccgcgaccacgctaaggg

SEQ ID NO: 6056 - DNA, 344 bp, Homo sapiens
ccctttcgagcggccgcccgggcaggtacaaccagaaccaacaattgtatttctctatagttattttaaaatagtaatcaatgctatgtatttgatgtatatgtttctaaattagaaatttcttttggctttgtgttttttttatgtgcgttaaatatgtaaactgaacctgttcctaaaatgcattaaacttgaatgctgtgtctatccaatgccagaatgctcagaagaaaagtgaataattcagtcattcatctggatgtagttttctgtgtaatctcaaatatctgaatattgaaaaaactaggttgctaacttttttcaattccttatgcaaatgttta

SEQ ID NO: 6057 - DNA, 309 bp, Homo sapiens
  misc_feature 1, 2, 7, 43, 65: n = A,T,C or G
nntttcncccttattttggtcgcggccgaggtacaacattgangagcattttcaagctacagctncgtggccaacaaagattatctatctgtatatctctcttttggctgccagacccaaatactattttgcatggacgctagctgatgccattaataatgctgcaggctttggtttcagagggtatgacgaaaatggagcagctcgctgggacttaatttccaatttgagaattcaacaaatagagatgtcaacaagtttcaagatgtttcttgataattggaatattcaagacagctctttggctca

SEQ ID NO: 6058 - DNA, 315 bp, Homo sapiens
  misc_feature 146: n = A,T,C or G
cccttagcgtggtcgcggccgaggtacaaataatagttgaattatgttaacgggttagaagtagatggatttcttgcctgtaatttccaaggagttacttttttataatgtaggcattccatttagttttgttaaataaaaaatantgagactaacaaagtcaatgagaatatttagaagggaaaaaaaaggtactatgtattaagacacccatgaatactgttttatatttacattctaagccttcgataggcctgaagttaaattaaagattccccaatctgcctatcagcattcattttctgtgtatgttga

SEQ ID NO: 6059 - DNA, 377 bp, Homo sapiens
  misc_feature 4, 15, 16, 18: n = A,T,C or G
tttngccctttcttnntnccgcccgggcaggtactttgtgtttgaaagtgatgcataaatggcctcttttcctattttagcgatcaagtgctagacagagatcaaagaagccatccaattgtctgtgccccagtgtgaagtagatgatgcagtgattcaaggaggtgatgggtggagcttttgaggagcccctactgtgtccaccaggattgaagccaagagagaaagtgaactgggcccaggctgcagtagaagctttttatccatcttctattccatcctgaggtccacagctagcgagcagggagctggtggtgctctttcccatgctccagtggcttcaatgaagatgctctttcctgtatttcaagtggctt

SEQ ID NO: 6060 - DNA, 388 bp, Homo sapiens
  misc_feature 306: n = A,T,C or G
cccttagcgtggtcgcggccgaggtacgcggggaaaaaagaagggcacatgagcaaacatgatggcccctttatgagaggtaatttactgaaatgcacagcgattacctgctcacccagccctgatgtaattaaaaatggcaggctaggggctctgtttcccccggctctggcagagaaacctgggtttcgacttgtgaagcttgaggttggatgtgggaattggcttggagtcataggcgatgagagggacattaggatattatgaagcccgtgaactcaactcctgagaagggacacaagcagnagcgaggagaaaaaggatgggaataaaaaaggcctaccctcatttgggcttcgtgttggggtgaaggaagaacctgaaagaa

SEQ ID NO: 6061 - DNA, 357 bp, Homo sapiens
cccttagcgtggtcgcggccgaggtacccgagagacccggcggtggggaagtcacttcctcccgaagacgctgtttcctagcaaccgccctccgcctctgttattagcccctcctcctcgctcgggtccaaggacccggctcttgcgggcgccgccaggcccagaccaagctactatcagaagttgaattctaataattagctattttataaaggtaacgagaaaaaatacactatgtctgatgaagtttttagcaccactttggcatatacaaagagtccaaaagttaccaaaagaactactttccaagatgagctaataagagcaattacagctcgctcagccagacaaaggagt

SEQ ID NO: 6062 - DNA, 557 bp, Homo sapiens
  misc_feature 97, 145, 190, 198, 224, 343, 345, 387, 407, 420, 452, 459,495, 501, 546: n = A,T,C or G
attcgccctttcgagcggccgcccccgggcaggtacaagtcaatggaatgggccacacttgtgggggggtgtcctgggtgccacccccagtggggtngctcacagcttgtcccattgccttaaagaaagaaattagccagggtcntggcctggggttcggcaacaaaccttgtttttgaagcctggaaanaacacaangcccagaagggggttccccttgttcnagccccaccaagtcttttccccaacaaccccgcttcttaccaaattattgaagccccttttcttggaaaagccaattcaaaaagccctttaagaaccccaggattggaaaaagaacttncnaagccccattggaaccccttcaatggctttggcttccccggnccttggttcaaagaaagccncttgtcccaaagnaattccaaccaggaattgtttttgttgaaaanggttccnttgggggcccctttgcccccaacccccaaggggaanccccangccactttggggggggaacccaacccttggtctttaaccggcccnttcaaaggctt

SEQ ID NO: 6063 - DNA, 252 bp, Homo sapiens
  misc_feature 194: n = A,T,C or G
cccttagcgtggtcgcggccgaggtacatgtggccctggacaacctgcaagcagctcaggtggccctgggcgacccatcagtggttcagttagttctgcaagacccttgggcagctctcgtggccctggccggcctgtgagcagtccacatgaacttcgacgaccagtgagtggcttgggccccccggggcggnctgtcagtggccctgggagatccataagatggctcaattccagccggacggggcttgt

SEQ ID NO: 6064 - DNA, 285 bp, Homo sapiens
cccttagcgtggtcgcggccgaggtacgcgggggaaaaagggtggggagtgccctttcttgaaggaatcccttaagtgcacgtctcccgttttcttttcacatcaatgcagagtccctctgtgaatttacaacacccaacacccatgagttcagtccttaagaaggaaaattgagcaagtatttaattggttggacattgcataaaagaggtccatatccaggctaactctagaaattttattctcaaacttagttagcctccttttcttctgtcagaggaccat

SEQ ID NO: 6065 - DNA, 167 bp, Homo sapiens
  misc_feature 115, 154: n = A,T,C or G
cccttagcgtggtcgcggccgaggtacttttaaaatattaagtttacaaagaatcattctaatgagtcatgtattagcacaaatatacaggttgagtgagtatcccctactcaanatgccttagggaccagaagtgtttttggattgctggggnttggggggatatt

SEQ ID NO: 6066 - DNA, 376 bp, Homo sapiens
cccttagcgtggtcgcggccgaggtacttatatatgtaaatgctatctctgagttgttataagataaattttaattttaaaaaacttgattattctatttcattattagaacaattcttgatttgttaagttatccagatgtgttacttactcttgatataagaatatttaaaaggctcatttaaaacaattttttaaataacctgagttttctctacagttttcatcaagcacatgagtgcagagtttgcagactgagcaagtttgtaggaatgaagattgtagtttctcacctgttaatttcattctgtagtatgcaccacaagcaggaacaagttaaagcagaattcctatgaattcaaaattagggatacat

SEQ ID NO: 6067 - DNA, 512 bp, Homo sapiens
  misc_feature 49, 53, 80, 96, 99, 150, 195, 201, 219, 224, 231, 254, 256,281, 311, 315, 324, 325, 330, 337, 338, 342, 347, 367, 392,397, 417, 426, 427, 444, 470, 477, 493: n = A,T,C or G
attcgccccttttttagcgggcccgccccggggccagggtccatggccntgcnaaggaacttgctggaaagcccagaaanggaatggacttgaatntancgccctcaatgggggtgggaaggggggacccactcccttgggggccctttncgatggaatttggttcaaaggaagccaaaggaacccttgaagaantggctnccccttgccctttcaaantgggngcccttnttgcaatttctttcccccttttncntaaaattggaaaagaattcccattnaagaaaatttttgggcttaccaattttttngaanaaaattttnncccanaatttanngggnaaacntttccaccaattggtttttntaaattccttgccccccttattccnaaatnttttttttttaaaacccttntggccttgnnaaaaaatttttaaaggnttttttttttttcaaaaaaaattccntggtttncctttttggtaaaaanattttaacctttttttttt

SEQ ID NO: 6068 - DNA, 222 bp, Homo sapiens
cccttagcgtggtcgcggccgaggtacgcggggagacagagatggagacggaaagacaaggacaagaagatggaatctgagctaatggcggagacatggaaccagtagagaagagacccactgtcttcagagagtgctgaccaggaagaggagaagccttggggactggatcaggtgtctgtccctaggtccccattcctgactcttctcctgccaccctga

SEQ ID NO: 6069 - DNA, 373 bp, Homo sapiens
  misc_feature 98, 146, 264, 284, 286, 293, 333, 361: n = A,T,C or G
cgagcgccgcccgggcaggtactcctcatgatcgtctacacaacattctgtgacacgttctctaacccaaatattgacctggataaattcagccttgntctcatactgttcataatattttctatccatgctgagttttatgcttntaactttcatcttttcaacaaggaataattcgggtttcacaccagcagacacagtggctatcattttctgttctacacacaaatcccttacattgggaattccgatgctgaagatcgngtttgcaggccatgagcatntntctttantatcctgtacgccggggctggattaatatattgtaatatnttggaatgaaaaaataggacatgttagnttgggaaaaaaa

SEQ ID NO: 6070 - DNA, 365 bp, Homo sapiens
ccctttcgagcggccgcccgggcaggtacctttccaactcaacagacatcatcgagagctggatgacggtgcaaaacctgtggatttatttagaagctgtctttgtgggaggagacattgccaagcagcttgcccaagggaagccaagccggttttctaacatagataaatcttgggtgaagatcatgactcgggcacatgaagtgcccagtgtagtccagtgctgtgttgggagatgagaccctggggcagctgttaccacacttgctggaccagttggaaatatgccagaaatcccttacggggtaaagttcactggctctttgatagctctcggtatccttgagacaaaagggatacagggg

SEQ ID NO: 6071 - DNA, 395 bp, Homo sapiens
  misc_feature 108, 132, 142, 239, 272, 298, 331, 343, 366, 367, 370, 395: n = A,T,C or G
ccctttcgagcggccgcccgggcaggtactgaagagtaaatggtgcaatttggatgtgcaagtcagtaaattgataattggcactcttgaatgcaaaatagaaactanattctcaactatactgaaagcttncattatccanaatgtcactgcatatacttggtgaattataaagtcaaacaagaaattcttctaactttgtcctttcttgtcaaaaatcctctcattaatatgctttnaatgtgcaaagtaaacaacgttgcattgattgngtttttcaagggtctaaattatttcnagtataaacttagatcctggaaatatttttaangaagattttaantttggggaatgttattattaaannatnttaaacctggaaggggtttcttttn

SEQ ID NO: 6072 - DNA, 281 bp, Homo sapiens
  misc_feature 240: n = A,T,C or G
ccctttcgagcggccgcccgggcaggtactcttagttaagtaacctttaaactacagttatttatcacaaccatggtgacatcaccaagggacattctaatggaactttaaaaaatccatctcaaaatattacagggattgtgaaatttgatgaactagtgaaatgagatccgaggctaaaaacaactttgaatcaggtagctcacattcctgataaccttcctcttctgttataagcangcgtctggccaggtttggacatatcatgccaaataaaatct

SEQ ID NO: 6073 - DNA, 556 bp, Homo sapiens
  misc_feature 78, 94, 154, 256, 273, 285, 310, 326, 334, 343, 356, 369,374, 380, 384, 386, 391, 399, 404, 409, 413, 448, 454, 459,477, 480, 487, 490, 508: n = A,T,C or G
ccctttcgagcggccgcccgggcaggtacaccaaggtggtgcattaccggaaagtgggatcaaaggacaccattcgtnggcccaaccccttganccacccccttatcaaactccctattggtagttaaaccttgggaaaccctttggaaaaatngacccaaggcccaaagaacttcaaaggcccttcccccaaggttttttaccttgaacccttttttggttcccctttaagggttggttggaaaggggtccccangggggtttggcctttangggaaaaaaaangaaaaaattcaagccaaggaaccancaaggggttggtttangaaccccnagaaagttngttttttctttanaaattggggtggnttaanttttgncggntnccctncttcttgnttggntcccntggnggggaaaattaactttggggcccaattgccccttngggaangaacnaattatttcaaccttccnaanttttttnttnttggaggggaccaccaangaattaaggggaattggggggggtggtccttggagggtttaatttttt

SEQ ID NO: 6074 - DNA, 293 bp, Homo sapiens
ccctttcgagcggccgcccgggcaggtaccttacaatgttagtaactgtcttttattaaggaagaaaaagttaaaatggcatgtaacttaagaaggtgggagaataataaaggaaaaaattaagaacaaaacgaaaagaatcatgaaatagtaaaacagtaaaattaagatataaatctcagagttggttatttgaaaagatcaatgaaacagagtaattctggaaaaaccaatgagaacaaaaagggaaagcacacgcaacatgggaatgaggaagcagaatactacaactc

SEQ ID NO: 6075 - DNA, 532 bp, Homo sapiens
  misc_feature 26, 36, 39, 48, 52, 61, 110, 138, 139, 142, 374, 435, 448,471, 512: n = A,T,C or G
ccctttcgagcgggccgcccgggcanggtaccttcntcnttaagaacnagcntggttaatnaaagggggaaggtcccttaacacttcttttaagcttgtggggaattttnggaaggcctttctaaaatcccaaaaagnngcntcttctggactcaatttaattaccgttggtggctggccacaagaacaacaatgcttcttccaacgtttttcttggatccaaaccaggtccaaaccaagaatgctttggccccttttcctttcccaaacctttttcttcttttttcctcggttttttttccctttcccccgtttttccttgggaatgggggtattaaccttttaattcaaccccctttggtaaaatcaattcnaggaagttttaaaccaattcttggctttggggaataaccaaggtcctggaagtttttttcnaggggggttgggnaccaccttggaatgggtggtttncaatttttccccccaatttttcctttcctttttttggggtngggggccttttcccaaaaaa

SEQ ID NO: 6076 - DNA, 330 bp, Homo sapiens
  misc_feature 45, 225, 231, 246, 262, 275, 282, 304, 308: n = A,T,C or G
gtacctggggtctcagggttgctctgggcctgatcatccactcanatctgtaaggaggatttgcaggatccatttagaaagatcctcccttacttccacaagcatggcctttggctcttaaatacctgtgctggggttttgtaattatagaaacaacaggagccaaaactcattaatgttgagctacaaaccagagggaagcttatttctcaaaacagggctcangcctanaaaaatctagttttntgaaatcgctagccancaacagcactganatggccntcccagaaacaaggccaacacngaancacccataaaggctgctggagg

SEQ ID NO: 6077 - DNA, 368 bp, Homo sapiens
  misc_feature 322: n = A,T,C or G
ccctttcgagcggccgcccgggcaggtactttttagtgatgtggcagaaatccctgttgattctaagttttagagtgtcttttcccctatttctgacctacaactataaactactctctattaggagaactagaccactttcttcattcttttctaaactgctgcagattgccggtgaactctatcaatagtctcttttccgcaggcaaagtggcattttctaaacatgtttgcttactgccagggtggtttgaaatctattgatttacttgcaagtaggtatgctgcttaaaacaactgtttgaggggtcttttaagcggngaaaaagttcaaaaggggaaagttgtcctgataaatgggtaccctt

SEQ ID NO: 6078 - DNA, 386 bp, Homo sapiens
  misc_feature 373: n = A,T,C or G
cccttagcgtggtcgcggccgaggtacctatcgtgggaagttgacagctgatatcaactgggcagtgaatggaatctcaaaaggaatcattaagcagtttcttggctatgttcccatcgtggtgaaatccaagctttgcaacttacgtaaccttcccccacaagccctcattgagcaccatgaggaggcagaggaaatggggggctagtttataatcaatggcattgaaaaagtcatccgaatgttgattatgcctcggagaaattttcccattgcaatggataaggaccaaaaatgggaaaacccaggagggccctgggttatacctcagttaccggggagtttttcaatggcacctgtgtggaggggaagnaacatttccgctt

SEQ ID NO: 6079 - DNA, 324 bp, Homo sapiens
ccctttcgagcggccgcccgggcaggtacagtgaaaagagccaaggctgtgtgaccccctcatcacttagccaggcgtatggtcctggtttctgaggctgccagaaagcatcttagcaatttgtgtttggatggtccatgcctgactattctaggctggaggttcctaaagagtaacaagaggaagagaaacaagaatctctgacacttgttgagaatagagcacagtcccatttgtttgaaaagagacaccagggcagcccatgtttatgtgccagaaaatggcattccacctcaaggagggactttaattttaatggacccg

SEQ ID NO: 6080 - DNA, 405 bp, Homo sapiens
cccttagcgtggtcgcggccgaggtacttttaagttatataaagatttttagcttcataacaccttttgtgggacaatttaatgtgggacagcttttgtgggacaattaatttaataaaatttaattccttatccaacttttaaatgtatgacatttcaaatttcaaatttagtaaggcctacgacatgccacacttgcttttccttcaggttatttacttggcattatttcccttgcaacttggctatacgagcaaatccatactaaagttgctaatatgctttcttaaaagcttagtcaactctaaaacatgcattggcgacacacataattcccttgatgagttatagactacaaacactgagtgcacttctgtgcacaacactgtaggttaaaggaaaaaa

SEQ ID NO: 6081 - DNA, 591 bp, Homo sapiens
  misc_feature 27, 60, 87, 94, 104, 123, 124, 157, 266, 299, 306, 337, 344,378, 441, 459, 553, 563: n = A,T,C or G
ccctttcgagcggcccgccccgggcanggtacccgcttttctggtttaataaaacttcancttcgaatcttcaagagggggtttccntggtccntagggaatcnacaaaggttttgaacctgnncgggtgggaagccaaaggggggggctttcaacntaaggggaatcaatgggtttccccgggtaaattccaatgggtctttggcccaaaatggtaagcgggttaaattggtgttgttttcaaggccccttccccaacggaaccnaaccccaagtttttccgccttgccccgggaatnaactttngaaacccaactttttggccccttggcttttncccgggnaattcccctttgccccttttcttaaggggaattncttccaaacccggttgtttccccccaaccaaggaaaccaagaattaaccccaagttccttttnaattccaagaaagaaatngggggttttcccaacaaaaacccaaccttggggggccgcccccggcccttggaattccccaatggggggggggggtttccttttcccttctttngttcttggcnaaacaaaaaaagccccttgggggggggg

SEQ ID NO: 6082 - DNA, 382 bp, Homo sapiens
ccctttcgagcggccgcccgggcaggtacaaatatttttgtttattaaaaaattagattgttttgttttattattgaatagtaagaattgtttatatattctggatacactctttttcagatatgtgtgttgtgactattcttagtctttagcttgccttttcattttcttaattatgtctttcaaagaacaagtttttcattttgacgaagcctagtttatcaattttttttatggttggtgctttttgtgtgttccaagaaatctttgcctactcatttaattacctgtgtgcccttgtcaaaatcatttaattttgactactcacttaattaccttgcctactcatttaattacctgtgtgcccttgtcaaaatttact

SEQ ID NO: 6083 - DNA, 377 bp, Homo sapiens
  misc_feature 359: n = A,T,C or G
ccctttcgagcggccgcccgggcaggtacatttgttgggggcgtgacattaacatataaccacttagagtggacatgcagttagagaaaagtcaatgagctggaaccaagctgggaattccaacatgcagaagttaaacacaagaggaggggccagcaaaggaaacagaaacagagcttccagcaggtggggggcatttggaagaaaacgatgccatagaagccaagatgaaatagacatcaaggagaaggaagtagtcaattgttttgaatgctatgaagaaagataagaataggtaaatagtccttatatttgataacagaggtcactagtgatcttgatgagggggtttcaatagnaatggtgggattatatac

SEQ ID NO: 6084 - DNA, 363 bp, Homo sapiens
  misc_feature 289, 319, 321: n = A,T,C or G
cccttagcgtggtcgcggccgaggtacgcggggagacagagatggagacggaaagacaaggacaagaagatggaatctgagctaatggcggagacatggaacccagtagagaagagacccactgtcttcagagagtgctgaccaggaagaggagaagccttggggactggatcaggtgtctgtccctaggtccccattcctgactcttctcctgccaccctgatctgggtgtagcatcatattaaatgctgtggattgccatccagtcccagactgtggggaggctggngagtgttgaagaaagcttttcccaaccctngncaggtaccatacaccaatcacttcaacttgggaacaatcaaa

SEQ ID NO: 6085 - DNA, 333 bp, Homo sapiens
  misc_feature 130, 264, 307: n = A,T,C or G
cccttagcgtggtcgcggccgaggtacaaccagaaccaacaattgtatttctctatagttattttaaaatagtaatcaatgctatgtatttgatgtatatgtttctaaattagaaatttcttttgggctntgtgttttttttatgtgcgttaaatatgtaaactgaacctgttcctaaaacgcattaaacttgaatgctgtgtctatccaatgccaaaatgctcagaagaaaagtgaataattcagtcattcatctggatgtanttttctgtgtaatctcaaatatctgaaatattgaaaaaactangtttgctaactttttttcattcctta

SEQ ID NO: 6086 - DNA, 412 bp, Homo sapiens
ccctttcgagcggccgcccgggcaggtacctgaaataaacttgaaactaaaacgatcatttgtggaggaaaatacaggattttccaaaacagtttcagagctacctttgcagatgggtaggcttttcacccacccacagaaagaaagagtcaacggggcttgagacaggacagggatgggtttcaggagcacaattaaaagtttttcgtatcttaaagaaaatatctatgttcagagagaaaattgagaagataagttactgcccagttcctctggtctttgacacttagaccacataagaatgttccatggtagaagggttgggacagagaatcttaggaatcctaagagagaatcaatactgctcccctaccccaggtttttcttgttttctttacaatagtatccttat

SEQ ID NO: 6087 - DNA, 413 bp, Homo sapiens
  misc_feature 10, 13, 15, 23, 26, 29: n = A,T,C or G
cccttagcgnggncncggccgangtnctnaacatatccattcacccctagtttatgtgccaaccttattttatattacattcccaaattatatatagctctgtttctaagctctattctgctctattggactattgtctgttcctaatgctaatcctaccttattttaatgtctgtgactttagtcataggacataccttgaagaataggaactcccttactgtttaaacagttcatttggctatatgtggaattttattctttctatataaactttaaggtttgtttatagagttccttaaaaatttgattggaattgtatgaattaatagggagaaagttgatatctttatgatatttgttccatccaagaagcatggaatgtctgtattttaaattatcatctatattgt

SEQ ID NO: 6088 - DNA, 372 bp, Homo sapiens
  misc_feature 14, 182, 197, 198, 199: n = A,T,C or G
ccctttcgagcggncgcccgggcaggtacgttgttctttaaccagaaaggttcactgctgactcccccacctctcaaaaaacaaacaaacaaacaaacaccaccaaagctttccgccattcatgcacatgcttattctgaccccaaccccatccctacaaaggggcagcagacagcacaatngtcaaggacaaggtnnntatttatttatttatttattatttatttatttattttttaaggagacaggcctcgctatgttgcccaggctggcctccaactttgggctcaagtgatccttctgcctcagccccccgagtcgctgtgcctaggagcacgcaccaccacacctggcttaagtagaagggtctga

SEQ ID NO: 6089 - DNA, 396 bp, Homo sapiens
  misc_feature 355: n = A,T,C or G
cccttagcgtggtcgcggccgaggtacagtgaaaagagccaaggctgtgtgaccccctcatcacttagccaggcgtatggtcctggtttctgaggctgccagaaagcatcttagcaatttgtgtttgggtggtccatgcctgactattctaggctgggaggttcctaaagagtaacaagaggaagagaaacaagaatctcttgacacttgttgagaataagagcacagtcccattttgttttggaaaagagacaccaggcagcccatgtttatgtgccagaaatgcattccacctcaaggaggacttaatttatggacccgtgttgtgccaggctgagctgggcaagatcttttntcaggacaaacttttgccatgcagcttaaaaagcctggaaa

SEQ ID NO: 6090 - DNA, 339 bp, Homo sapiens
  misc_feature 264: n = A,T,C or G
ccctttcgagcggccgcccgggcaggtacaacaaaccaataatgataaaaaatacttctctttttctccctgtttccctttttcccttggccacagccaaatgctaattgctgctttaattacagagatgtgtaaatgtattcagattacaaactctacaggaatacatcaacattttaactcttttgcgtttttactgtttaactgttttaaatgcaagttattttagggtgacactccttccagttctggccagatcatgantttcaagatcaagagtaaaaagttattagaattaaacagtttttattaaaggggaggcagccctttttcctcaag

SEQ ID NO: 6091 - DNA, 376 bp, Homo sapiens
  misc_feature 9, 10, 296: n = A,T,C or G
ccctttctnncggccgcccgggcaggtaccattcttatctcagaatgctgtaaaccatcagtagaagcagtttagatttggactgcatggtaaaatgaaaagtaataaccctccaaccacaacctagtcagggtattaataattatatgtagcaagaaaacaaagaagaaaataatattgaaaaaatggagattccccaaccagtttcatatttgaaggatctgagttgtatttttattaaggaaattttttttctgaatactgtcttccaaaatgttaacattaaaatctgaatnagaggactctgaatggaaaagaagtttgatcactgacacctagggctctgaagcgtgtgtggccaccatgggaaaaagtc

SEQ ID NO: 6092 - DNA, 399 bp, Homo sapiens
  misc_feature 127, 137, 273, 328, 388: n = A,T,C or G
cccttagcgtggtcgcggccgaggtaccaacaacgcacttacccactgttttaatctaggttattcttgaaagcagagcctgagacaaaggtagacacattctatttatgagtctaacacccaggancaggaatganagataggggagtgaactggggaaaggggaaactaagtccgagcaaaaccagatactgctcttatcaagtggtccacccctattaatggctacataatgcagaactttctcaggattcttcttaaactttatcccanaactgtctgcctcagggagaaaggagaagtattttctccatcagcagccacctcntgcgtgtgagggctgctcctttggggcattagcccactgccttacaccaccccaaccctntgggctgcaaa

SEQ ID NO: 6093 - DNA, 301 bp, Homo sapiens
  misc_feature 140, 142, 160, 225: n = A,T,C or G
cccttagcgtggtcgcggccgaggtactataggatacaaccagcgaaacagaattgatactctcatgtatctactagcatatccacaaaaacccatggttaagacaaaaaccattgaattgatagaatttgagaaactgncnagctgggacagaatgcancagttgctgtgatgaagctatagtggctatgatattgaagatgctcttgttttaaacaaggcctntttagacagaggctttgggcgttgccttgtatataaaaatgctaaatgtacctgcccgggcggccgctcgaaaggg

SEQ ID NO: 6094 - DNA, 294 bp, Homo sapiens
  misc_feature 159, 195, 239, 292: n = A,T,C or G
ccctttcgagcggccgcccgggcaggtaccaggagggtattgatgtttgaggtccaaactgaaaacccatcacctccttcccactgctatagcagcgttagccctggggttcattatctagccagttcacaccttctaaagtggggctctgaaaatgtnctacttccctcacagacaaagcaattctcaagcctnctgagatcacccaccaaccagagcaactgctgtcacttggaggngcagctgaattcttctaattgtgacacaaactcttgaaaactgttaaatgctnaa

SEQ ID NO: 6095 - DNA, 283 bp, Homo sapiens
  misc_feature 13, 39, 43, 118, 137, 146, 150, 156, 162, 164, 175, 178,187, 203, 209, 253, 267: n = A,T,C or G
ggtcgcggccgangtactctacggtgtcaataattattncagnctctgctgcaattagtgctaattacaatacctgggctataaaaataaaagatttcattatagcaaagttcacaanatatccgttgttagttcantttttccancatntgtttnattctnanaattaatacanttnttctttacntataacttgtctttanacttgnaatttgaggatatattgatgaaaacaaatctgtatctgaaacangctctatgatgctnaacatttgcataaagg

SEQ ID NO: 6096 - DNA, 372 bp, Homo sapiens
  misc_feature 333: n = A,T,C or G
ccctttcgagcggccgcccgggcaggtactctacggtgtcaataattatttcagtctctgctgcaattagtgctaattacaatacctgagctataaaaataaaagatttcattatagcaaagttcacaaatatcgttttagttcagttatccacattgttcatctaaaataatacattttctttacatataactgtcttagacttgtaattgaggatatttgatgaaacagatctgtatctgaaacagcactatgatgctaaacatttgcataaggaatgaaaaaagttagcaacctagttttttcaatattcagatatttgagattacacangaaaactacatccagatgaatgacttgaattattcactt

SEQ ID NO: 6097 - DNA, 394 bp, Homo sapiens
  misc_feature 38, 45, 63, 80, 101, 116, 160, 174, 196, 318, 332: n = A,T,C or G
cccttagcgtggtcgcgggccgaggtacctgtgatttnccctttngggtggtatttttggctnaagtggaaccttggttnaaatttttttttggttaaacntaaatttttttttcntttaaaaaataaaagacttttttcacaaattgactgggcaccangatttacttcaagntaaaaagaattaagccaaaacnggggttgggtttgaaagaataaatttccaatttttaaaatcggtaaatggtaattttttaggttggttggaaatttttaaaaaaaatttttccattacaatcaaaaattcttattaaattcnttccccctttaatnattttcctttaattggaattgaagggccttaaaaaataaaaaaaggttcttaaattaaaaaa

SEQ ID NO: 6098 - DNA, 360 bp, Homo sapiens
  misc_feature 29, 160, 187, 230, 232, 260, 270, 279: n = A,T,C or G
cccttagcgtggtcgcggccgaggtactngataccatgcctagtgcatagttggtgcccaattaatacatgattggattatagcataatcactgatcactacatttaaagcagtccaatagtggaacaaggctgcctcacaaatagtgagctcttgtttnctctacacagattctactatgggccangatctcagccaagcagtggagccagaggctggacagacacaancngagattttggaaaaagactgagtccctntcagcacttnaaagatccnttccaacacccaaacatcaaaagccatgttatattgccaagcaagggtgcctatgaacgcctgttgaaaccccacaacaat

SEQ ID NO: 6099 - DNA, 387 bp, Homo sapiens
  misc_feature 8: n = A,T,C or G
ccctttcnagcggccgtccgggcaggtacttcatatcaggacgaacccaacaatttgtctgcccaaacatggtctcaggtctgagagtagcagccaccaagaaaatatttttacctttcaggccacttaatttagatgggtatggctcaagcaccttcaatttgagtaaagtatattcctgaggtccaacaccctctccagtttgtctatcatgatccatgcaaggctgtccatctttcggagagtaaattgtgtaccgcttcccaaatttaattttgtttctttctcttaatgttaaaaattgccatctgacaaatgaatcatagtaaggattaacatcagtggtgatgaaggaacgacgccagtctaccttcaaacccattcttt

SEQ ID NO: 6100 - DNA, 355 bp, Homo sapiens
  misc_feature 254, 289, 297, 304, 318, 330, 336: n = A,T,C or G
cccttagcgtggtcgcggccgaggtacctggggtctcagggttgctctgggcctgatcatccactcagatctgtaaggaggatttgcaggatccatttagaaagatcctcccttacttccacaagcatggcctttggctcttaaatacctgtgctggggttttgtaattatagaaacaacaggaaccaaaactcattaatgttgagctacaaaccagagggaagcttctttctcaaaacagggctcaggcctanaaaaaatctagttttctggaaattcgcttggccangcaacagncactganaataggccattccnagaaaacaaggncccaancacaagaaagcaccccata

SEQ ID NO: 6101 - DNA, 384 bp, Homo sapiens
  misc_feature 317: n = A,T,C or G
cccttagcgtggtcgcggccgaggtaccaggagggtattgatgtttgaggtccaaactgaaaacccatcacctccttcccactgctatagcagcgttagccctggggttcattatctagccagttcacaccttctaaagtggggctctgaaaatgtcttacttccctcacagacaaagcaattctcaagcctcctgagatcacccaccaaccagagcaactgctgccacttggaggtgcagctgaattcttctaattgtgacacaaactcttgaaactgtaaatgctgaaagattaaatgaggttataacactcagnaaggttttacaagtaaaaagtaagtcaaatcaataggtctttattttcatattctggaaatgggttt

SEQ ID NO: 6102 - DNA, 409 bp, Homo sapiens
cccttagcgtggtcgcggccgaggtaccttggcccagatcaaaaattggcagtgatcaggacttgggtatagaattgctgaatgttctacatcgagtaattttaaccagagaatcaccttccattcagttggcttcactttgaaagtgggtaagggcagattatctgtgctgctcaagaacatgttgaaggaaaaaagacgaagtgcagaagttgatgatggggctgctgaaaaggaaactctgccagagtttggagagggaaaggacaccggaggacttgtgcctggaaagtctttggtctttgcaacactggaattgtgtgtatgcattctagttagacaactcccagaattaaaccctaaattgacaggtagcccaggagtaaaagctacgaagccacagatacta

SEQ ID NO: 6103 - DNA, 397 bp, Homo sapiens
  misc_feature 14, 347, 357, 389: n = A,T,C or G
ccctttcgagcggncgcccgggcaggtacactgagtctgcagaccatccagaaggatcctgctgcccccatgtgcctttgttcttggtatgtcagtgccattatactccaaattctccatttgatggagagaatctgtcccttctggaattaccgagatttatatgcacagtttgcaaataaagcatcatagcctttattttctgtatcaaaatcaccctgatccataatatgagtctttgctttgggatacatgttgtcattttgatgaacattcctgtccccttcatggtatttgataaattccttatcttcattgacaccatttcgaatctgaaaagctcacangctgaccatnagggataacctcccaggggaaccattgatatnaaatttgc

SEQ ID NO: 6104 - DNA, 123 bp, Homo sapiens
  misc_feature 53, 116: n = A,T,C or G
aggtacgcggggaaagagggtccatctctttgccagcgatgttcattttgcancatagtttgagagcaatctttttcaagtaaattgaatatgaatgcctggccccatcatacatntaatgaa

SEQ ID NO: 6105 - DNA, 385 bp, Homo sapiens
ccctttcgagcggccgcccgggcaggtacagtgccaggttcttttctgatgtaaaacaaaataggagaaaataaaaacccagcctggcaaaatagcttatctccaccaatcagcagaaaatggtaaaatagagacgcacgtggcactaactagacaggaaatcagaggtgggaagcaaaatgccagcctttattctgctctctaagatggctctggaaggtcatgttcattgtcactgaaaatgcctgcagggagcgatatgaaaagtcattgtctcttcttttttttcctcctgctatttttagctcttgctaggaagatcaattttagttaactgcagagaagggttttttaaaatggtgcttgagtttcaagttgcatgtgt

SEQ ID NO: 6106 - DNA, 412 bp, Homo sapiens
  misc_feature 51, 52, 59, 60, 62, 65, 66, 68, 69, 71, 72, 73, 76, 207,219, 224, 232, 270, 303, 310, 327, 362, 381, 392, 394, 404: n = A,T,C or G
agaattcccccttttcgaagccgggcccgccccgggccaggtacctttttnnttttttnntnttnntnntnnnggntaaatgtgggtggggccgaagttgaagccccatttgtgtttgtgggtaaaaataattgttaagaaggggaagttataaggggctttgtgaacctagtaatgttttgaagttccctggtaaagttagggaangaagttgattanttttngaattcangggaagaaaccgtgggtttttaccttaagccaccaaanaagaaggttttctttccccaagtaaggggtttnaaataangttggggggggggttanaagggcgaagggtttaagcccgaaggggcctttgncttatgaaaagttcaattnaaaaaaaaagncntattttaaantttggggg

SEQ ID NO: 6107 - DNA, 423 bp, Homo sapiens
  misc_feature 1, 3: n = A,T,C or G
ngngatggatatctgcagaattcgccctttcgagcggccgcccgggcaggtaccatcaaatcaagtttctctaaaaattatgaaattggcatattttatattttgctagagaatggtgtgaacaaggctgataatcaattagttctttttcctttttgattagtatatatttttcacatgatattaaagctaccattagctgattttattctcaatgtgcctcaattctaagaaccactgcattatttatgaacaagaatgtgcaataccaagaaccagccaataatttgaatcttatataaactaaagattcagaaattccaagagattatttaacaaatatcatttgaacatatgagctaattaacagagaaaattctttaaaatgtgaatttatcacattcataatttaactttcaagat

SEQ ID NO: 6108 - DNA, 429 bp, Homo sapiens
  misc_feature 19: n = A,T,C or G
cccttagcgtggtcgcggncgaggtacccgaaaagaaaggaagctttagtaatgaaaggattgctgccaaaatcctgtttcccccttgcagatcttacagaaaacagccacagaatcccaaggcatcagcaccaagagagcctgtagaaactatctggtctaagctcctgaagcccagagataagaatgacttaacccaagctgcacagcctcttaacagtccactgttaaccccagaaacagatgcatttgaatctgaaaggagacaggaatcctaatcctactgctcagggacttgctgatttactttgctgtctattagcctttctgtgacatgattttctaccaagcaaagtcttttattcaagtctcccagagatttcctatttaagcgtttgctatttggccacttaaaaaagacagaagaga

SEQ ID NO: 6109 - DNA, 366 bp, Homo sapiens
  misc_feature 230: n = A,T,C or G
ccctttcgagcggccgcccgggcaggtactctccagataacatatgcagggttttatatatgtttattagattaatcttactgactgtattacacaaatttatatacttataacattttgtctgcttaatctaccaaatactgagaaaatgtaaactaaatttcctactttggcagtggatctgttaagtttgtattttttgtttgtttgttttggggcttttttttatngttctggtcaatttttactttataaaattcatagtttaggtaactagaagcaaataagtttcgaattgttatctcttctcactgagctaagcttttatcagcatgtaatggatgatctctttttttaacgaatagt

SEQ ID NO: 6110 - DNA, 331 bp, Homo sapiens
ccctttcgagcggccgcccgggcaggtactcctcatgatcatctacacaacattctgtgacacgttctctaacccaaatattgacctggataaattcagccttgttctcatactgttcataatattttctatccagctgagttttatgcttttaactttcatcttttcaacaaggaataattcgggtttcacaccagcagacacagtggctatcattttctgttctacacacaaatcccttacattgggaattccgatgctgaggatcgtgtttgcaggccatgagcatctctctttaatatctgtacctcggccgcgaccacgctaaggg

SEQ ID NO: 6111 - DNA, 327 bp, Homo sapiens
  misc_feature 121, 125, 129, 131, 135, 139, 143, 144, 145, 149, 150, 151,153, 155, 161, 170, 178, 183, 184, 199, 201, 202, 212, 214,216, 234, 236, 251, 253, 270, 275, 280, 282, 285, 290, 297,305, 306, 309, 319, 321: n = A,T,C or G
ccctttcgagcggccgcccgggcaggtacttttttttttttttttttttttttttttttattttttttttttttttttttttttttttttttttttttttttttttttttttttttttttnaaangtananccanaaantttnnntaannntntnaaaganccattaaanttggaccnttttnngaaaaaaaaaatttngnnaaaaaaaaancnanttttaaaaaatttttttngnaaaaaaaaaaatttncnttattttcaattccccnaaaanaaaananttntaccnttttttnaaagggannccntaaaaaaaantncttttt

SEQ ID NO: 6112 - DNA, 395 bp, Homo sapiens
cccttagcgtggtcgcggccgaggtaccagaatctctaacagtgtggtcctgtgtagccacattgctacacttacagagatgctttggggcctttttggattaagacagttctaaaagaccaggcctcacctatgatctgtgtataaagaattagcatcgcactgtagatctgcaagagaaggccgcctcctgcagtgctctctcttggtgaatgctaactctgctcgagggccttttggggaaaggacagtgtaaaacccttagagaggtaagtttcccacccttccaacctctctccacctgcagcttgcttggtgctgtcaggatctggatttgggggggagtctctctgtagtggaactagtgacagaagctgttctttagaattttcagg

SEQ ID NO: 6113 - DNA, 391 bp, Homo sapiens
  misc_feature 3, 21, 23, 343: n = A,T,C or G
ttnccttagcgtggtttcggncnaggtacagtgaaaagagccaaggctgtgtgaccccctcatcacttagccaggcgtatggtcctggtttctgaggctgccagaaagcatcttagcaatttgtgtttggatgggccatgcctgactatttctaggctggaggttcctaaagagtaacaagaggaagagaaacaagaatctctgacacttgttgagaatagagcacagtcccatttgtttgaaaagagacaccaggcagccatgtttatgtgccagaaatgcattccacctcaaggaggacttaatttatggacccgtgtgtgccaggctgagctgggcaagnatctttctcagggacaaactctgcccatgccagctaaaagcctgggaa

SEQ ID NO: 6114 - DNA, 390 bp, Homo sapiens
ccctgtcgagcggccgcccgggcaggtacaaccagaaccaacaattgtatttctctatagttattttaaaatagtaatcaatgctatgtatttgatgtatatgtttctaaattagaaatttcttttggctttgtgtttttttaatgtgcgttaaatatgtaaactgaacctgttcctaaaatgcattaaacttgaatgctgtgtctatccaatgccaaaatgctcagaagaaaagtgaataattcagtcattcatctggatgtagttttctgtgtaatctcaaatatctgaatattgaaaaaactaggttgctaacttttttcattccttatgccaaaatgttttagcatcataagtgcctgtttcagatacagatctgttttcatcaaa

SEQ ID NO: 6115 - DNA, 257 bp, Homo sapiens
  misc_feature 1, 5, 6, 12, 36, 58, 64, 98, 118, 140, 155, 166, 180, 194,249: n = A,T,C or G
naacnngcattnacaaaaaaatcgaacgcttcaagntcagtaggtggctgaaacccgnacaggnacctattaaagataccaaggtcgtttttccccantggaaaggcttccctcgtgncgctctccttgtttcccgaccncttgcccgctttacncggtatacctngttcacgacacttntcttccctttcggngaaaagccgtgggccgccttttctcataagccttcacgcctgttaaggttaattnttcaagtt

SEQ ID NO: 6116 - DNA, 641 bp, Homo sapiens
  misc_feature 32, 393, 400, 424, 464, 476, 512, 529: n = A,T,C or G
gccccttagcgtgggtcgcgggcccgaggtancaaagaagtagcttgcccctttcttcaagggcagaattgaatgccttttgaagaaaccatacctttttgggcccatttaccccccaagctttttgaaggaaaaaatggggcctttttgggaatggaattaatttttaatggttttttaagggggacccccccaaaaccccttcaagggccaaatttcccttacccttctttcaacccttggaccccctggcccccccaactttggcccaataaaaaaacctttaagccttaaaaggttttttggttttttggtttttttttcaagccggttttaaatggttaaaaaaggggggggccaaggccaagttggccccaaaaaaattaattaaantccaagnaggaatttaaaaaggccttttaangggtccaaaaaaggttttcaattaaggaaggttttccccnattggaaaaccnttattaattggaacttggggccccaacccaaccaangggaatccttttttttnggtaatttttaaaaggggaatttttctttggaaggaatttttttggcctttgggaggccaaggggaattttaaggaattaaaaggggccttgggttttcttttttaaaaaat

SEQ ID NO: 6117 - DNA, 367 bp, Homo sapiens
  misc_feature 190: n = A,T,C or G
cccttagcgtggtcgcggccgaggtactgggattataggcatgagccaccatgcccggcctttgctcttaactactgatgttgtcttcctgatcttttctacaagaagcttttaaactttttggactttaacctacaataagaaatccattttacatgttcacatgtatctataacaacatttatatttntaaaacaaacttttcatgaaacaagatatacctacatatgtcaggcactctgatattttctattctagtccaccttttccatttcattctatttatgggaaatatatgttggttgggagtcactgagttaatttaatgacccactaataggctgtgagtggcattggaaaaaatacc

SEQ ID NO: 6118 - DNA, 406 bp, Homo sapiens
  misc_feature 19: n = A,T,C or G
cccttagcgtggtcgcggnccgaggtactcgtgataaagaatcaatagcaattcaaaggttccttttgttaggctgtatcccaaagagtagggaaagatctttacttcatgtcagtgggtgataccactattaaaggtaacttgtgtttttaaaacaaaatacttttatcacccagaattacaatttcttaaaaatattgttatgctgaatccctcaaacaaaaatggtttatcaatttctttggacataggtagcagggaagaaaaaccactttaggtaaaaaaatttaaatatacttatggagataaataacccaagatgaggatttcttgaaatataggaaatttattaattgaattaatcttgaaagttaaattatgaatgtgataaattcacattttaaag

SEQ ID NO: 6119 - DNA, 285 bp, Homo sapiens
  misc_feature 116, 249: n = A,T,C or G
ccctttcgagcggccgcccgggcaggtactgtaacacgggagagctgtcaaggaagttccatttcagggcaagcacaggaaaacactcctctccgtggatcaaagaagtcaagccnaaggaacaaatctctccacactttggctgggtgggcttgatttacctgcgaaagtaatttctgtgtgtccctgcttagaatccagggttttgtgaatgagaactatcattcaatctcaccaggcagaaactantcctcaagggctgtatgacgtctgtaagaaggcagt

SEQ ID NO: 6120 - DNA, 399 bp, Homo sapiens
cccttagcgtggtcgcggccgaggtacccgaaaagaaaggaagctttagtaatgaaaggattgctgccaaaatcctgtttcccccttgcagatcttacagaaaacagccacagaatcccaaggcattcagcaccaagagagcctgtagaaactatctggtctaagctcctgaagcccagagataagaatgacttaacccaagctgcacagcctcttaacagtccactgttaaccccagaaacagatgcatttgaatctgaaaggagacaggaatcctaatcctactgctcagggacttgctgatttactttgctgtctattagcctttctgtgacatgattttctaccaagcaaagtcttttattcaagtctcccaagagatttcctatttaaagcgtt

SEQ ID NO: 6121 - DNA, 465 bp, Homo sapiens
cttagggcgaattggagctccccgcggtggcggccgaggtacctcagttggaaatgcagaaatcacccgttttctgtgttgctcacgctgggagctgtagactggagctgttcctattcggccatcttggaaccggcacacaccaattttttagaacagaaacaggatcacaatctacatattgtcttaacacatattttaatcatagataacagtatatctattcaacacaaaaagttaattctgaaaatctgcatcttcatcttacataaaacatttaaacttcccagaacaattgggaatattaatgtttcatttattcatttattattaatattaatcagggtcctattaggagacagaaaccagataatttgaaagtttaatatgaacaaattattaactataacaagagataggctagaaagaaagagaattttaaggaatgtaggaaaagcagatatt

SEQ ID NO: 6122 - DNA, 315 bp, Homo sapiens
  misc_feature 42, 114, 131, 133, 144, 215, 225, 273, 274, 300: n = A,T,C or G
ccctttcgagcggccgcccgggcaggtacatcttgaggcctntcagcaggagacaaaggattccaaaaagagatgtggaggtgctgagggcacctctatctctttgttgtttantctgtccttgaatcaantntacttatcatnttggggtctttgagtattgtatgaaagatccttcgtgcacaccacacacagtcatgattttgttaaagtanccttcttcanatgcttttctaagggctagtcaccaactttatttctgtgtttctgtannaagaaacattttcagttcttcatttnagtttgattatggaa

SEQ ID NO: 6123 - DNA, 210 bp, Homo sapiens
ccgcggtggcggccgcccgggcaggtacaagccaatgccagcgtcagagctgcttttgtgcatgcccttggagatctatttcagagtatcagtgtgctaattagtgcacttattatctactttaagccagagtataaaatagccgacccaatctgcacattcatcttttccatcctgggtcttggccagcaccatcactatcttaaagga

SEQ ID NO: 6124 - DNA, 683 bp, Homo sapiens
  misc_feature 13, 34, 43, 74, 82, 94, 97, 109, 112, 115, 116, 118, 123,125, 130, 133, 134, 145, 176, 183, 204, 216, 231, 266, 277,279, 284, 293, 297, 316, 348, 358, 360, 397, 402, 412, 478,489, 512, 535, 545, 551, 552, 559, 563, 566, 572, 580: n = A,T,C or G
  misc_feature 610: n = A,T,C or G
atgcatggctcgnagccgggcccgcccagtggtngaatggggnattatcttgcaggaattttccgcccctttangccgtggntccgcgggcccngangggttccttttnttnccnncnaaaancnggttngannaggggttaganctttggaaagtttttggggaattggaaattnagaatcnaaaaaaagccttctttttggncccaggaacccnataccaccttgaaanttaaaaaaacctttcgccttcttaaattcccgganttccccttcgntngggtnaaccaattncttnaaaaattgggttccaaaantttttggggggaattggggggggggaattttngggtccaaancntttgccccaccttatttaaattccaattgtttttttngggcnttggaaaccnataattttccccttttggcctttttggaggtttttaatttggttggggcttttttttgggtgggtnggggaaccaangggccttggaaaaagttttcaanttggggggggggaaaaaggggcnaaagggaagnaattanngaaattnttgnttngggggncccccaanaaagaaaggggccttttgggccttttgggnggttggggccttgaaattttcctttggaattttaaagggggaccaaccccccttggaaatttagggaattgga

SEQ ID NO: 6125 - DNA, 386 bp, Homo sapiens
cccttagcgtggtcgcggccgaggtacttcatttaagagtcctggcttccagaaatcctttttttcatgtcttatcttctaattatgctttgtagtccagctaaattacatctcttgacattttggaatgttcccatctttacacctgtcttcaaattgtttattccacatggaatattcttttccccttatctccaattagagtatatggagtttggggaagaatcatgtcgttcactgtggcaggagggacagagtgagaaggtggacaggagccagataattggagagactttttacataatgctaattttaggagtttgcaattaacactgtggatttgatgaaaacagtggaggttttaatcagggggatgaatgatagga

SEQ ID NO: 6126 - DNA, 395 bp, Homo sapiens
  misc_feature 273, 336, 340: n = A,T,C or G
cccttagcgtggtcgcggccgaggtactcttaaaaatctgttaagagagtggatctcattttaagggttcttaccacaataaaattaaatttttgaaataaatcagtcatatttgagtgaaatgaaacctttccgagtagtttcagacaattgataatacctagtttacagttcctgtagtcattttggagggtgaggacttgatgtgtttagtaaagttgagaaataaatacatgaaagaatgtgtggggaagaagaaagtgtgggggaagnagaaattgtctcagaagggacccattcttagtgggcacctgggggaaatcttggcaccccagnaagnaattcaacctgcggctcacttggcaaaaaattacaatgggccctaccatttggga

SEQ ID NO: 6127 - DNA, 391 bp, Homo sapiens
  misc_feature 136, 152, 235, 268, 300, 303, 334, 335, 350, 355, 364, 371,373: n = A,T,C or G
cccttagcgtggtcgcggccgaggtacttttcgctcagctgttttcatcactgtgttcagaggtttgtcttttttttttcccctaaaaggtgctgagatgttatgagtgctttatgtgtggttactggataaagtnttgaaatgtcactggngtttataaactgcattgatttatcggatttttggaaattttgttttttttaaatgattaatttaaataaaatggagaattttngatccataagaaaagcaggactgaaatctccanggatgggagccttttgggttcaccttgttcantgntgttttctttgtagacttcctacttacttgnnaaaattgtttttggnactanaattatttncaacaangnaattacgcaaattttttt

SEQ ID NO: 6128 - DNA, 524 bp, Homo sapiens
  misc_feature 164, 169, 175, 187, 227, 260, 328, 335, 369, 386, 393, 398,407, 423, 434, 473, 476, 487, 492, 501, 508, 510: n = A,T,C or G
cggccgcccgggcaggtacttaactagggttagcccgaggtcaggagggtggatgccttattatgggattagtgcccttctaagagggacagtagagggcttgttcatgctctctctctccatgcacaagaaagagcacacagtgagaaggaaagaaggccctnaccanaacctngaccattgctgncacccgttgattgcagacttccagcctcacaggtattgtngagtaagataaatatctgtggttttaagtcacncaagtctgttggtgtgtttttatgggtcagcacaaaggtaaccccagtattgattgcttttttccacncacatgnggttggttcccaggcactttttcatgggaaagtntgttcagcctttctcantcctttngcaanaaaaatgcntttgcctgggttcacntcttattttgngtccttttccagtatggcctttttcttttaagatgggtngcncttttacccangggcncccctttgnacctttncnatttcctttttttt

SEQ ID NO: 6129 - DNA, 586 bp, Homo sapiens
  misc_feature 63, 67, 74, 75, 93, 102, 123, 155, 195, 200, 213, 245, 272,273, 287, 291, 293, 301, 323, 328, 346, 386, 399, 436, 445,447, 453, 460, 479, 484, 493, 494, 503, 514, 532, 542, 551,562, 564: n = A,T,C or G
cccttttccagccggcccgcccggccaggtccacagttatctggtgaaatattgatgctggtntgtnggtccgnngattttttttttttcacntctattgtngaaaattcttttttttcactngcaaggaggttaaacaagggaattttggtaanccctttgttgctttcctttggcttaagaagaaaaggaaanaaacnaaaaaatccaagnagggggccattttaaaaactgttttttttgtnaattggttggaaccaattgaattttannaaaaaaaaagggtngaantngccattcncttccctccaaccattaatggncattnccattaattgggcttttnggttcaaagggggaaggggttggaaaaccaatttggtttngccttggaagttntaaaaaatttcccaagggggttcttttcaaggaattngggttttangngaaccnaaaaaantttgggaattgggaattgncccgngggaaaagnnttttaaacnccttgggaagncccttttattggaattcncaaattgtancttgggaangaaattggggngnaaccttttccccaaaaaacccc

SEQ ID NO: 6130 - DNA, 520 bp, Homo sapiens
  misc_feature 13: n = A,T,C or G
ccctttcgagcgntcgcccgggcaggtactttgcattctgattctttgatatttgaacttggccatctgtgggtgctactctcgtaagactaaaaggcacctactaaatacgaacaaggataaccagttctaccaaaaacattaccaaccaaacctcccctgttcttttttcagactttccttttgctttcaacctcttaaactgtaaaggagagatttaatgtttccctattattctgctttgactcacatactaaaatgaccacatggcactccattgaatcttttcagttgttcacgaattaaaataatgcccatgttttacagtttttcgagtagtctcagcaatggatctgtagtttcaggacctgtttttaaaagatcaagatacttttatgtgtttcagaagtagctgttttttcattttttgtgggtttgtttttttgtgtttgtttggttggttggtttttggtttttttgctttttaaaggtcacaatgttgtgagcctggtgtaaatgc

SEQ ID NO: 6131 - DNA, 384 bp, Homo sapiens
  misc_feature 134, 154, 359: n = A,T,C or G
ccctttcgagcgccgcccgggcaggtactgcggtctttagagatcatttagagcttgcacacatctgtgtcttcttgtgggaaacctctaggtattctgtctgatcagcactgtgaggaagttggtgggaaaangggccactgataagaacaanacaatggggcagaagggaagcacattgcaataaatttccccagagagagttcctttacattccattcaccaaaaacctctctggaactgtcaggttcagaatatcaaccaagaccatatcatttagaattcattggcatgttagaggttgactcgattcctaaaagaagccctctctcccatgaaccaccgatgtacaggggagngaattttggaaggtagataggaaaa

SEQ ID NO: 6132 - DNA, 319 bp, Homo sapiens
  misc_feature 95, 143, 155, 246, 262: n = A,T,C or G
ccgcggtggcggccgaggtacgcggggagaatcaacgtgacgaagtgcttttagaaacatccatgcaggtatgaaggagctctaacatgccaggngagtggacaaggcttggggaaggttgacgatacctagagacatgtcancctttgggtcanagcctgcctaatctcatggggaactgatgggtggaataggcactctaggctccccctggcatgggcagggttgcagagaattcacaaattngtgtgtgttcacggangggaggccaagcttctgactgttgaagttagggtcagaatggagaggcaagcatgtg

SEQ ID NO: 6133 - DNA, 538 bp, Homo sapiens
  misc_feature 19, 67, 167, 179, 336, 379, 412, 419, 433: n = A,T,C or G
agaattcgcccttttcganccggcccgcccgggcaggtccgaagaacccgggctgttgagcttgttnacttgagttgtttacaagccaagcgatgaaagaactttgggcaagaacaagctgcttgggtcctatttccctggtggaaagctttggggggtgggaaaanccaaccttgtcntgggaagccttggccgggttgggaagggcccaccaagaaccccaagccatttttcaatttcggccccaagccctggggggttcccaagaaaatttttttcctttttcttaaagccaaattgggttaattgggaaggaggaatttttcccccggaagnaccaacccaaaagaaaccttggggaaaagaatttaattccctngttggtccttggtttttaatttaataacccccntttgggntggggggccttgtngggcctttttggttaattcaatttttaagggaaggggaaaaaccccttggttccggaaccaaaggccaccaaaaggaaaggccttgccttttcggggtaacccct

SEQ ID NO: 6134 - DNA, 363 bp, Homo sapiens
  misc_feature 120, 203, 268, 272, 337: n = A,T,C or G
cccttagcgtggtcgcggccgaggtaccaagggatttttctattggcagccagaccattcctacgaagtgaagggatccctaagaaggtcactgggatttttattacttagaggttcttnggaatgacgcttaatcccaaaaaatgtgatttttccccattattgaaagtttttcacctcttactttcttgggctttattganggattaaaaaatggaccatccccttaaagaaaaaagatgaaaaaaaatagcctggggcgcttctncaanaaaaaagctacactttgagctgaccacacaattgggggcacttgaaagatggatggaggacccanaagttaccaccaatggggcaatttca

SEQ ID NO: 6135 - DNA, 359 bp, Homo sapiens
  misc_feature 12, 62, 107, 125, 180, 202, 228, 251, 263, 279, 283, 302,306: n = A,T,C or G
cccttagcgtgngtcgcggcccgaggtacctcgggaaatctctcgttgactttgtccctcantgacccacctcgaagaagtcccttcaccctagaagaaaaagcatncacgtttggggcaccaanattggaagtggcctgcgccttcacaagctgtggggcatttttcttccttaaggtnggaaaccgaggagactttggantaaaagaaaagaccaacaagagacanaaggtataggaggaaaggaaaanttggggcccagngggacccggcgctcangcantattggagggaccccgcgncggncccggcgtaccctgccccgggccggccggcttcgaaagggggcgaatttccaa

SEQ ID NO: 6136 - DNA, 734 bp, Homo sapiens
  misc_feature 23, 63, 68, 76, 80, 104, 143, 157, 207, 235, 246, 282, 287,301, 325, 342, 350, 390, 408, 434, 445, 449, 455, 468, 480,489, 522, 528, 553, 558, 564, 576, 583, 601, 607, 630, 653,674, 695, 703, 706, 710, 727: n = A,T,C or G
tatagggggcgaaattggggccntctaagaatggccattgctcgaggcgggccgccagtggtngaatngggaatantctngcaagaaaattccggcccttttcnaaggccgggcccggcccggggccaagggtacccagaaanctcttccccagaangggggaaactcaattttaagcctattagaaaagaaaatcccatttttaanttttcaacaattaattcaccaatggccnttggtggccanggccattcaaagttggcttaggggaaaacccccttnaaagnaaaaccaaacccgncaaaattcccaacaaggaattggnaaaaaggttcttcttcnttggccanccccaatttttaaattaattccttttccattagggaattnaaaaaattaattcctttnaaaggttttccttaaaaataaatggnaaatttggggnaaantgggtnggggaattggccnaggaaaaaattnaaaaaattnggcccaaggttttttttgggccttccttttttnaaaggnaaaattttttttaattccaaaattnggttnaaaggnaaaccaattttngggtaanttttaaaaaaaatttttngggtantttaaaaaaaatttacccacccncccaaaattttcccccccctttnttaaccttaaaaggttttttnccaaattgggaaattcccaanccagggtnggncccnaagggaaaaggttgggnaaaaaga

SEQ ID NO: 6137 - DNA, 370 bp, Homo sapiens
cccttagcgtggttgcggccgaggtacactctagcattgtaactttttccccctgagaagtaattttaagatctatcagtctcaatttaaatgatctgttaatcagccagagttttagtttcataatatcggtcccattgcctgacaaaagatatacacacttgaagtgcctttagcagacctgggaccgtcaagaatcttgttaccctgattattgcaagatgacatatttcttaagccatttataatctcatattcgggttgaatctgaatttacaaataaaagggttaaattgaggcagtttcaagcagcatttaggaaaatgaagtggcttcaaattttagtgtttctggttacattattttgttt

SEQ ID NO: 6138 - DNA, 399 bp, Homo sapiens
cccttagcgtggtcgcggccgaggtacctgaaggaacgaagaagagggatttctcaaggtgagaagcagttctccatggacactgatgacagcacaggcaaagtttcctatgactagggatcactgtccacacagagtctggcttcccaggtatccagcaggtagacaaaacagctaactccactgccactcctttctccacatccgttcctatttctcagccatctcagtgacatccgccatcttgagagtcaactactgactggactgagttgtgtggtatatgcttctgtttacttctcttctgtcttttttaagtggccaaatagcaaacgcttaaataggaaatctctgggagacttgaataaaagactttgcttggtagaaaatcatgtcaca

SEQ ID NO: 6139 - DNA, 387 bp, Homo sapiens
ccctttcgagcggccgcccgggcaggtacaatatttacagcctggaggattcttgaagtaatgacagactcgtctgctgcaagtgactggttggcttcagtagagtcattgcttcctattactgctgtgatccctgcgcctgcctttcttctgctggctcacctccttgttgaagacaaaggacaaaatcttcaccaaatactcaaggtcactacagaattagcccaagcagattcctcccaggtgccaaatctgattccagttttgatgttcaaattgggaagaccactggaacctatattatataatgatatattgtatactttacctaagcttggtgttcacaaggtgtgtataggacaaattctacgaataatacaactactt

SEQ ID NO: 6140 - DNA, 420 bp, Homo sapiens
ccctttcgagcggccgcccgggcaggtacagatgcattcagttgtcattcattcgtgttaagccaagatcctggatcttctatcattaatgttaagaggaaacatgaattacaactatattgtatgactgccatattttattgaaactaaggtcaatgttgaaccatatcttgatttcagaatttaaaatgtgttaccttagaaataatgaaatatagtgtaacagttggtttctaaatgtggttttatttcaggggccattatttaacctgtgtgtatgctatgatggagttcttttgtgatttctttacttctaaatttaaatagtaattatgtttaaaaacaaatgtttttgtctttagttgcaaagcagcatatatctcatttccttcaaccttgcctcctcatacacaaatatat

SEQ ID NO: 6141 - DNA, 489 bp, Homo sapiens
  misc_feature 325, 442, 471: n = A,T,C or G
ccctttcgagcggccgcccgggcaggtacagtgaaaagagccaaggctgtgtgaccccctcatcacttagccaggcgtatggtcctggtttctgaggctgcagaaagcatcttagcaatttgtgtttggatggtccatgcctgactattttaggctggaggttcctaaagagtaacaagaggaagagaaacaagaatctctgacacttgttgagaatagagcacagtcccatttgtttgaaaagagacaccaggcagccatgtttatgtgccagaaatgcattccacctcaaggagggcttaatttatggacccgtgtgtgccangctgagctgggcaaagatctttctcaggacaaactctgccatgcaagctaaaagcctggaaactaaaggatttcatgtagtaaactatcttccaacccctgtaggcatcagacccangatgaggtttcagaaggtcataaggcaanaatagttaagcctacagg

SEQ ID NO: 6142 - DNA, 267 bp, Homo sapiens
  misc_feature 103, 105, 107, 123, 139, 162, 164, 168, 186, 199, 202, 210,212, 220, 221, 242, 252: n = A,T,C or G
cccttagcgtggtcgcggccgaggtacgaaaaaatcaggccactaagcccactgtttaatatagacgcagaccaatttgttaggaacaggtccaaatttggancnancattaaccaacaatcngtggatgcataaatgnagggctatttggaaacaaggttnangggncttatttttgctcttaanggtccctgggggnaanaaaatttnangtgtaccnnagggggaaaccaggccttttnccccttaatntaaattttcaaattt

SEQ ID NO: 6143 - DNA, 389 bp, Homo sapiens
ccctttgcggccgcccgggcaggtacgcggggccttacctcctgttcatgcaactttgcttgttttgcttctactaaaatggttctaggtgctgtgtggacaggtgatacaaaagcctgactcacacgggttgacattcattcattccattttcatttctctttgagtgatcctgacaagcagagggtctcaggtggatattactgtgtctttgagacctctctaatccttatctatctctcattttaatacagagagtttcatacgcagaccttaagtagacatagtatccagctaaaagggtctcactctgtcacccaggctggagtgcagtggccgcagtcatggctccctgtaacctcaacctctcagactccaagcaatcctcc

SEQ ID NO: 6144 - DNA, 430 bp, Homo sapiens
  misc_feature 56, 71, 75, 84, 132, 283, 396, 397, 428: n = A,T,C or G
ccctttcgagcggccgcccgggcagggtacgtgggctcaatggggagaatccccanaagaacttgcaacanggtngaaagggtnggccccccgaggcccagcccgtctcttatgttgttcactttctttgtngagctgttgagaagaaaaaaagtcttcaccttttcatccagtttccaactctagcaagccacagctcttgggcagaaaaatatttggcaaagaaatatccacatggggcaaacccaagggcaaaaaccggacagaagccagttctttgcanggcttcccactactctgtaacaattttccttccggccatggcccattggccattgcccctacaccccaccattctcattaattctggaacctgaaatgcttctggccccaggnntgtgggccccatcagggccttctagaagagnat

SEQ ID NO: 6145 - DNA, 232 bp, Homo sapiens
ccctttcgagcggccgcccgggcaggtacagtgaaaagagccaaggctgtgtgaccccctcatcacttagccaggcgtatggtcctggtttctgaggctgccagaaagcatcttagcaatttgtgtttggatggtccatgcctgactattctaggctggaggttcctaaagagtaacaagaggaagagaaacaagaatctctgacacttgttgagaatagagcacagtccca

SEQ ID NO: 6146 - DNA, 345 bp, Homo sapiens
  misc_feature 120, 126, 132, 140, 142, 156, 172, 178, 181, 204, 210, 217,253, 255, 261, 273, 317, 320, 332: n = A,T,C or G
cccttagcgtggtcgcggccgaggtaccccactgcagccaggaccagaatgctatcactctcaggaatgaaatcattcagagcatagctgcattcgggggcatgaccagcacttatcctnctcccntgaacncgcaattncncctggacctggccngctccaacccaacctntgatcngangggttaattgcaaggcccatccnttctcnctgaagnacaagctcaacatctcctttgggtcatcatttaaantnaaagcnaccttattcagnaaatgcagacgttctcatgtaggaccctgggccacattccgttncancagttgtaatangcaaccgggttct

SEQ ID NO: 6147 - DNA, 440 bp, Homo sapiens
  misc_feature 260, 376, 379, 383, 389, 398, 405, 428: n = A,T,C or G
cggccgccagtgtgatgggatatctgcagaattcgcccttagcgtggtcgcggccgaggtacatgggactacaggcacgccccaccatgcccagctcatttttgtatttttagtagagacagggtttcaccatgttggccagggattgatcttgatctctttgacctcatgatccgcccctcttggcctcccaaagtgctggggatcacaggcgtgagccaccacacctggccctctatttattctctttaaagagagangaaaactatgaagagggccaaaaattattttaattaaaatcttttacccttaacaccaaggggaaaaaaaaatggggaaattttgccctaaatattagggttgattgaaaagccantancacnaaattnggaaccagnaaaaacnaattcaccattttttaaagttanaaaaaggggcca

SEQ ID NO: 6148 - DNA, 558 bp, Homo sapiens
  misc_feature 52, 409, 422, 443, 486, 497, 500, 522, 527, 545, 547: n = A,T,C or G
gatatctgcagaattcgcccttagcgtggtcgcggcccgaggtactctactnttgtcaataattatttcagtctctgctgcaattagtgctaattcaatacctgagctataaaaataaaagatttcattatagcaaagtcacaaatatcgttttagttcagttatccacattgttcatctaaaataatacattttctttacatataactgtcttagacttgtaattgaggatatttgatgaaacagatctgtatctgaaacagcactatgatgctaacatttgcataaggaatgaaaaaaggtagcaaccctagttttttcaatattcagattttggagattcacagaaaaactacatccagatgaatgactgaattattcacttttcttctgagcattttgggcattnggatagacacacnattcaaagtttaatgcatttnaggaacaggttcagtttacatatttaacgcacattaaaaaaancacaaagcccnaangaaaatttctaatttaggaacnttttncatcaaataccataggcntnggattactatt

SEQ ID NO: 6149 - DNA, 370 bp, Homo sapiens
  misc_feature 360: n = A,T,C or G
cccttagcgtggtcgcggccgaggtaccccactgcagccaggaccagaatgctatcactctcaggaatgaaatcattcagagcatagctgcatcgggggcatgaccagcactatcctctccctgaccgcattccctgacctggctgcacaacccacttgatcgaggttaatgcaagccatctttctcctgaagacagtcactccctttgggcacatttaaattaaagcacctatcagaatacaagtccagaggccctggcccatccgtcacagtgtatagaacggtctctttctacagagtaagagtgaccctatcctggtgcctttaaatctaaaaactatttcagtttccttttggtngggcaatctt

SEQ ID NO: 6150 - DNA, 347 bp, Homo sapiens
  misc_feature 324: n = A,T,C or G
ccctttcgagcggccgcccgggcaggtacaaagccagtgagggaaaaactctatgagcaactcttaaagtgaaaaatctcatcaatacacaactgagtatactgccattgatcaactgctcttaaaatacttagataaaaatcaccgctgtaggaaaaagcaaaacaaaataatgattgaagcgtgttttgctctgggatgcttacatttgacgattcctgtcatacgctgtgtaagttcatacctagtgctcaatcgtatttcattaccagactgctgtataattagagggaaaaagaaaattcatttgaacaaaccactttnacagataaaccacaggattccac

SEQ ID NO: 6151 - DNA, 351 bp, Homo sapiens
  misc_feature 351: n = A,T,C or G
ccctttcgagcggccgcccgggcaggtacagtgaaaagagccaaggctgtgtgaccccctcatcacttagccaggcgtatggtcctggtttctgaggctgccagaaagcatcttagcaattttgtgtttggatggtccatgcctgactattctaggctggaggttcctaaagagtaacaagaggaagagaaacaagaatctctgacacttgttgagaatagagcacagtcccatttgtttgaaaagagacaccaggcagccatgtttatgtgccagaaatgcattccacctcaaggaggacttaatttatggacccgtgtgtgctaggctgagctgggcaagatctttctn

SEQ ID NO: 6152 - DNA, 397 bp, Homo sapiens
cccttagcggggtcgcggccgaggtaccccagtggactctatcaacaggcattgagcaataggcacacggtaaacggcagctgttgttattggtttgcaaggccttttattaattttaccataaaccacaagatggaaaagacaactaatacagacacagttaagttccagaagacttctggacttcaaatgatggactaaaaccagcataaatttacataaaaagaaacgaaatacctacatattttcataactcaatgagcctaatgcatgatagaagggacttgtttttatggcaattaatatgaggaagagcagggagttttttgctgagaacaagatcagtgtgagtcagtgggatggccttgttacttaaagaaaacataggctgcattat

SEQ ID NO: 6153 - DNA, 303 bp, Homo sapiens
cccttagcgtggtcgcggccgaggtacctaaacaggccaaatgttgcctttggggttcctgtttcaacagcatggtgtgaagcgctgcatcaaccttctctgcctcatcctgcaaggtggcaaattcctcaagaatatgaccaagcttatctctctgtcgagccctgttatgtccatggatctgaataagactacagaatggccgaacacagtgagtaacaaaggagtcgatacagtccttagcctggtgattattatataggtagcacttggggggaaagcaccggaggactgacaaaagac

SEQ ID NO: 6154 - DNA, 379 bp, Homo sapiens
  misc_feature 15: n = A,T,C or G
cccttagcgtggttncggccgaggtaccagctggagactggccttacccgccaccccgaggagaagcctgtgaggaaggacaagcgggatgagttggtggaagccattgaatcagccttggaggaccctgaaccaattcctgcagagaacagccccaatcaccgtccttacacggcctctgatttcatagaagggatctaccgaacagaaagggacaaagggacattgtatgagctcaccttcaaaggggaccacaaacacgaattcaaacggctcatcttatttcgaccatttcggccccatcatgaaagtgaaaaatgaaaagctcaacatggccaacacgcttatcaatgttattcgtgcctctagcaaaaaaggg

SEQ ID NO: 6155 - DNA, 519 bp, Homo sapiens
  misc_feature 379, 383, 397, 406, 429, 443, 457, 467, 477, 482, 501: n = A,T,C or G
cccttagcgtggtcgcggccgaggtacagtgaaaagagccaaggctgtgtgaccccctcatcacttagccaggcgtatggtcctggtttctgaggctgccagaaagcatcttagcaatttgtgtttggatggtccatgcctgactattctaggctggaggttcctaaagagtaacaagaggaagagaaacaagaatctctgacacttgttgagaatagagcacagtcccatttgtttgaaaagagacaccaggtagccatgtttatgtgccagaaatgcattccacctcaaggaggacttaatttatggacccgtgtgtgccaggctgagctgggcaagatctttctcaggacaaactctgccattgcggctaaaagcnctgnaaactaaaggattntcatgtaanaaactatcttccaacccctgtangcatcagaccacanggatgaggtttcanaaggtcatanggcagaatangtaancctacagggcttacagtcntgacagacctgggttcag

SEQ ID NO: 6156 - DNA, 387 bp, Homo sapiens
  misc_feature 159, 235, 253, 315, 318, 339, 354, 355, 380: n = A,T,C or G
cccttagcgtggtcgcggccgaggtactttaattagttaatagaaaccactgtaaatgagttatctatctccagaacattctcagagaatttacacgaactaaaacaggaatgaagtgctctcagagacttttttttcaggtaaaatgtatttaagtangtttgagtagttgatctgcaaaaactttaactttaattaactacatagatgaatattttttattttgaaatttganaatgtcctaagagggatntctacaggatatgaaactactgggtgcaggaaaattttttaaatgttagcaaattgtggcanagnaggaaaacaaacagttgggangaaaacttgtggttnnaagaaaagttaaaagaaagggggcnagggaga

SEQ ID NO: 6157 - DNA, 376 bp, Homo sapiens
  misc_feature 4, 126, 151, 222, 223, 266, 273, 291, 298: n = A,T,C or G
cctntcgagcggccgcccgggcaggtaccctagtcctatcttagtggtgtcaggtgcaaagtcactcattctgagaaattttacttctgtagccattcagattaaattttttaaaatagggagttnaactcagcttgaaattgaaggcttnctataatctgatcctaatgcatcttctctgagctttgcttctggcaattcacattatattatctatatgannaagccaaacttgtctattcattattccaggaataagtaatatnactcatntacctcaattacttttanttgcaancctctctcccttctacttacggaaattataatgggtttttagggtttcataattctatttccattaggcttcacagtc

SEQ ID NO: 6158 - DNA, 374 bp, Homo sapiens
  misc_feature 258, 282, 363: n = A,T,C or G
cccttagcgtggtcgcggccgaggtacttgtagtcttttaataaccatagaaagcactaaaagtaattttaaaagcctggaaagttaaatgaaaactgatattatatacaattaatttaaaattatagttttactctgtttatttacaaatttgctagataaaacataatctcagaaaaaaagtgtttctttttgttgcttctgcactatagtaaatatctagatatctataacaggcatataatatagttatatatntagggaatcctagtgaagagtatngcagttatagaaatatatatgggagagaaaatcttataaaaatggtttatgttctaaagtatcccttaatgaaaatccctnttaaatttttt

SEQ ID NO: 6159 - DNA, 361 bp, Homo sapiens
  misc_feature 353: n = A,T,C or G
cccttagcgtggtcgcggccgaggtactggaagagtttttgaagattgaatattgatacttaaattatttctgaagctcttcaataaagttttctaattataaaaactccacataatttggttcaagccaagaaacaaagtcattttactctaagatttattctctaaatatagtaatgagatctgtaaagtctgtgttttgctaattaaaagagtaaatctgcgtattttctgcagactgctttctttgaatctgtttctaaaccacaacttgataagtttttatgggtaactgggaatatggtcaacactgagttttccaaggggttccatccaggagtatttcattttangatgctgt

SEQ ID NO: 6160 - DNA, 335 bp, Homo sapiens
  misc_feature 34, 52, 70, 71, 147, 157, 184, 187, 229, 242, 252, 253, 268,275, 295, 309, 311, 312: n = A,T,C or G
cccttaccgtggtcacggccgaggtacatgggantacaggcacgccccaccntgcccagctcatttttgnnttttttagtatagacagggtttcaccatgtttggccaggattgatcttgatctcttgaccccatgatccgcccgtnttggcctccnaaaaggtgctggggatcacaaggctgngangcccaccacacccttggccctgctatttttatttcctctttntaaagtagaggangaaaatactnntgaaggaggggcccnaaaaatntattttaaattgataaattnttttaaccttcagncnnccatagggggaaaaaaaaaatgg

SEQ ID NO: 6161 - DNA, 339 bp, Homo sapiens
  misc_feature 14, 50, 92, 253, 268, 272, 287, 288, 292, 293, 307, 328, 331: n = A,T,C or G
ttcccttagcgtgntcgcggccgaggtacaaggacactaagacagtgtancctgctgacttgagaatgttctgtaaggactggaaacactanaatcttgaagaaacgcctggctagaggtgagggtaagctgttaattacactgattacagtttgtgcctctcaagactgagaactcttttcttcttgctgggggcattgctatctctaggatgtttgccctgaagtcctgatagtctctttggggttttaanaaatggccaaaaaanttgntgggggggttaaaannggcnntaatagcccccttngtggaaaaaaaaaacattgtnttnaaaagggg

SEQ ID NO: 6162 - DNA, 282 bp, Homo sapiens
cccttagcgtggtcgcggccgaggtacccgaaaagaaaggaagctttagtaatgaaaggattgctgccaaaatcctgtttcccccttgcagatcttacagaaagcagccacagaatcccaaggcatcagcaccaagagagcctgtagaaactatctggtctaagctcctgaagcccagagataagaatgacttaacccaagctgcacagcctcttaacagtccactgttaaccccagaaacagatgcatttgaatctgaaaggagacaggaatcctaatcct

SEQ ID NO: 6163 - DNA, 704 bp, Homo sapiens
  misc_feature 111, 509, 527, 540, 549, 568, 578, 592, 599, 606, 613, 624,639, 643, 648, 649, 655, 657, 671, 672, 685, 690: n = A,T,C or G
ccctttcgagcggccgcccgggcaggtacccgaaaagaaaggaagctttagtaatgaaaggattgctgccaaaatcctgtttcccccttgcagatcttacagaaaacagcncagaatcccaaggcatcagcaccaagagagcctgtagaaactatctggtctaagctcctgaagcccagagataagaatgacttaacccaagctgcacagcctcttaacagtccactgttaaccccagaaacagatgcatttgaatctgaaaggagacaggaatcctaatcctactgctcagggacttgctgatttactttgctgtctattggcctttctgtgacatgattttctaccaagcaaagtcttttattcaagtcttccagagatttcctatttaagcgtttgctatttggcccttaaaaaaagacagaagagaagtaaaccagaagcatataccacacaacccagtccagtcagtagttgactcttaaagatggcggatgtcacttgagatngcttgaaaaaaagaaccngatgtggagaaangagtggcantggaagttagctgttttgnctacctgctngatacctgggaagncagactnttgtggnggacagngatccctaatnaataggaaactttgnctgngctgnnatcagngnccattggagaactnntttttaccttggngaaanccttttttttgttc

SEQ ID NO: 6164 - DNA, 329 bp, Homo sapiens
  misc_feature 116, 125, 243, 251, 252, 255, 273, 285, 287, 288, 305, 313,314, 329: n = A,T,C or G
ccctttcgagcggccgcccgggcaggtacagagaggggctcgctgcgctgggtagaggaagcagaaagtttgctgaactcagacggaagaaaaaggattcctctggagaatcccancaaggattnctgatttggacatgggtccatgtccttgttgaagtctcctccttcctgaacctgccctgctctgtgacttgcttttgcaccaccagcatgctgcaacaagttgatgccaatgtggacnttctgtanncgnggtcataaggtaagtccntgccgtgtgcgngnnctggggttcttcaaggnaaatgctnngttttggagggaaan

SEQ ID NO: 6165 - DNA, 466 bp, Homo sapiens
  misc_feature 28, 115, 133, 137, 138, 153, 164, 174, 210, 227, 246, 257,272, 278, 279, 289, 295, 313, 316, 324, 330, 341, 350, 354,356, 363, 372, 376, 398, 416, 418, 425, 441, 453: n = A,T,C or G
ccctttcgagcggccgcccgggcaggtncaccaccatacctggctaatttttatttttcatagaaacaatctccttatgttgcccaggcttaaaactttttaagaagcttatctnctcatttttctttgcaangcanngctggcaactggctntccttaggggnaccctgtttncttggccaattggcatttcccccttttttaaatttntggtaatctttattttnggtaaaagaagcctttcanataaatttaanagttagatttgtaanctttgnntttaccaaantattancatataaggccataccancantaaggtcntatagnacttaaagtgngataataangaangncttcaancccttttgnaacnaatcccactaaggaagtttttntggaggtaaaaaaggggntncataacncttgttggttcaatgnaaaattaaaagnttggaaggaaggt

SEQ ID NO: 6166 - DNA, 347 bp, Homo sapiens
cccttagcgtggtcgcggccgaggtactgttttgataggcagctggctggtgtagaaaaaccagttagccatagaactgacatcacgcagagagccccgactccctgattagcccaccccaactcaaaatctgactccagggatgttttgttgaaaatgttatttctctaaaacagtatttcttttcctctcctgggggactaggaggggcaggagacaatgaggagcaggcctgggcccctggttccaacatcaagagtgacagggtggtctcaggggatgtcctgtgagggcagcctgagccactaaacaggtccagtagagatggtattttatctttaaaaaat

SEQ ID NO: 6167 - DNA, 323 bp, Homo sapiens
ccctttcgagcggccgcccgggcaggtactaaaaacgtgaaatttcctcatcactgaaaacacgctcatctgaaatctctgtaaaaaaggatttggctgttgaaacttgttatcaatgcctcttctcgtagccaccatgacaataaatttggctaaacatttaaatttaccctcagttttggttttcctttaaaaaaatatgtaaacaaatgaacaggaaatctctgcttgtaagaaaaatctgaatataacaggggaaggtcagcagacggtcaccggggaaagcatccaggcatcttgtcgcctcgctgggctggccgggg

SEQ ID NO: 6168 - DNA, 271 bp, Homo sapiens
cccttagcgtggtcgcggcccgaggtactttgaacgatagcaacccttctttgtgtaactctgaagctgaaaatattgagccttcagttatgaagatttcttcaaatagctttatgaatgtgcatttggaatcaaaaccagttatatgtgatagtagaaatttgacagatcactcaaaatttgcatgtgaagaatataagcagagcatcggtagcactagttcagcttctgttaatcattttgatgatttatatcaacctattgggagtca

SEQ ID NO: 6169 - DNA, 404 bp, Homo sapiens
ccctttcgagcggccgcccgggcaggtactacgagatgcactgggactcaacgtgaccttatcaagtgagcaggcttggtgcatttgacacttcatgatatcagccaaagtggaactaaaaaacagctcctggaagaggactatgacatcatcaggttgggagtctccagggacagcggaccctttggaaaaggactagaaagtgtgaaatctattagtcttcgatatgaaatcctctgtctccgtaaaagcatttcatatttacaagacacaggcctactcctagggcagcaaaaagtggcaacaggcaagcagaggggaaaagagatcatgaggcatttcagagtgcactgtcttttcatatatttctcaatgccgtatgtttggtttttatttttggccaa

SEQ ID NO: 6170 - DNA, 370 bp, Homo sapiens
ccctttcgagcggccgcccgggcaggtacgttcccttcccatatgtcataaaccaatgtattttaaagaaagcaaaagctaagtatttgaaaacgttatctttcttctaacacttgctgtgaaaggagtaaattcaggcaagcagttgaaaacattctttaaaatggccagtaaaagcaaaactctttgtgctatacggaacactcgggagtattacaaaaccagggagggagtaaaagaatggccatttctctataaccaaattgaagacagtaaagtagaaaatgtaatttccattgtgcaccaaatactcagaacacaaattaaagcaaaaacaaaatggatgtgcacaccaaaacaaaggtttttc

SEQ ID NO: 6171 - DNA, 367 bp, Homo sapiens
ccctttcgagcggccgcccgggcaggtacacataccccatctttgggcaagccctaaactattacaggttcccatacaactccttccccagtaggtaaatttagaacttatgaataaggaaaataagtctctagcttctgcttttactgaaggaagccaaacatagccgctaatactattcactccttatttcaaagagtgaattgaaaaagaaaataagttatttactccattgctatactctgaacttctataaatgggtgctagaaaatcttaataccatagtatttagccatacctttgtatttatttaatattgaactgaacacatcttgcaagcattctccctctctagctcactttgctt

SEQ ID NO: 6172 - DNA, 357 bp, Homo sapiens
  misc_feature 154, 285, 293, 297, 343: n = A,T,C or G
cccttagcgtggtcgcggccgaggtacccacagcattggctgttcttcataggagactcagagaagacttcataggagactcattattgtttactggacatcaggtgctatattgtatagcattcacattccacaggtgaggaaacaggctcanaggaataagtggcatgccaagatcactgagtatatcagtagcagaattaggattcagactttgttaggcctaactccaaagccctggcttttttttttttttttgagatggaatcttactctgtcaccggnctggagtngcantggcatgatctcagctcactgcaatctctgcctcctgggttcaagngattcccctgcctt

SEQ ID NO: 6173 - DNA, 392 bp, Homo sapiens
cccttagcgtggtcgcggccgaggtaccctctatctctacttcacctcaatgtctttcaccctccaattttaaggtgaaaatatctaggcttctgccctctgcaactgatttctattgagggcctatggaggtaaaatgacaataatcattgaatctagaaagaaaaagcatcaagcacaatttacacgaacaatagtttcagttgacatttaactgaatgcttctaacttatttaatcttattagataggcagtgttttaatcaatttacagatggagaaaccagggatggtgcaacttgcaagtggcagagccctgtttatctccaaagttcctgttcctctgagatgaagttataggattaacctaagtttgtcctttcttgatgtaac

SEQ ID NO: 6174 - DNA, 417 bp, Homo sapiens
  misc_feature 9, 18, 35, 310: n = A,T,C or G
tcaaccggnccgccagtngtgatggatatctgcanaattcgcccttagcgtggtcgcggccgaggtacaaggacactaagacagtgtagcctgctgacttgagaatgttctgtaaggactggaaacactagaatcttgaagaaacgcctggctagaggtgagggtaagctgttaattacactgattacagtttgtgcctctcagactgagaactcttttcttcttgctgggggcattgctatctctaggatgtttgccctgaagtcctgatagtctctttggggttttaataaatggccgaaaaaattgntgtggggtttcaacaggcgttcataggcacccttgcttggcaatataacatggcttttgatgtttggggtgttggaagggatctttggagtgctgagagggactcaa

SEQ ID NO: 6175 - DNA, 339 bp, Homo sapiens
ccctttcgagcggccgcccgggcaggtaccctaataaagtaatcaatagaagcctggattgttgttggaaaaagtaaggtaggaccaagaaacggaaaccaccaaattgccaagcaaagcagtatgataacactaaaggatataacacaagtctgcccttctgcattcatttagtgtcagttataatttcttccaaaggagaccttgaattttttaattatgttctcaaattacaacatttgaaatggtaactctagttgaatactccttcttctaggcgttgtatcttctaagaaatgtcccccattccagctctgtacgcggggggaacaaaatgaa

SEQ ID NO: 6176 - DNA, 621 bp, Homo sapiens
  misc_feature 170, 177, 204, 270, 395, 417, 440, 445, 519, 532, 534, 560: n = A,T,C or G
ccctttcgagcggccgcccgggcaggtacgcggggacagccatgaacagcacacttgaggagggacacaaaagaagtagacaagaatctctgcctctggctttagggaggtatgccaatttaattttgggggcggacaaaaactttaaaatgcttaagaaacccaaaatnaaaaaangaaaggaattaccaaaagccaaacttngccaaaatttcttggggaccaaattcaagggaaaggttcccaaaggccccaacaaaattggaattncccttggcccaaaaggaaaattccccttccccaaggggttttaaccccttttggaagggggaataaggttttttttggttaaaaaaaaattccttgggggaaggttccttttccaaaattggttnatttccaaagaaaaaccttttngtttaaaagggaaggttatttcnccaangaaaaaccggcccccccaattaaaacccccccaaggggggaaaaaccttgggggaaggttccaaaaccttttcnccccaaaattttngnggaaggaaaaaaattcccccaaaagncccccaaacccccatttaacttaatttcaattggaaccaattgggaaaaccttccgggggg

SEQ ID NO: 6177 - DNA, 496 bp, Homo sapiens
  misc_feature 124, 162, 179, 188, 225, 259, 291, 304, 307, 313, 314, 374,383, 392, 404, 407, 410, 478: n = A,T,C or G
ccctttcgagcggccgcccgggcaggtacgatcttggctcactgcaacctctccctcccgggttcaagtgattctcgtgcctcagcctcttgagtagctgggattacaggcgcgtgccactgcngtccggctaatttttgtatttttaagtaagaagaatgngggttttcacccattgnttggccaanggcctggatcctcaaaacttcctggaccctcatggtngttccacccccaccctttggtccttccccaaaantggcttgggggaatttaccaggggcggttgangcccaacccggcngcnttcaanncccttaaccaaaggccaaaattttttttttaaaaaaaaaaaactttggaaccaccccttnattttaacntgggaattnaaaaaaatttcnttnttngtttttaaaaaaaattcccttatttttaaccttaattttttttaaaaaggaataaaagttattttaangttatttttttttttttt

SEQ ID NO: 6178 - DNA, 456 bp, Homo sapiens
  misc_feature 24, 104, 108, 117, 129, 140, 168, 176, 204, 225, 231, 235,238, 245, 253, 261, 268, 281, 296, 317, 323, 329, 331, 351,364, 377, 386, 390, 402, 418: n = A,T,C or G
attcgccctttcgagcggcacgcnccgggcaggtaccgtctacttgtaaaacccatcccgagggcacaaagccaggagacaagaatgtatgaccctttttcctnccanaagtcacgncacatactccgntattcgcaatnaactttggggaaaaaatgggtttgtaanccttaatnggaaaagggaaatttattcaccaattcnaaggggaggttcaatgggggnaaaaangttnaancattggngaaaagcnaaaaaccnccccctnaaaaaaaggtttnacccccaatttcaanccggtttttcaaggttggtanaaaatngaaggntnaaaccttaattatgaaaagnaaccaatttggcngggtttaattccnttaattttntccncaaaaaaaacgngtttccccaaaccttnaaaaaaaaaaaccaatttttttccccttaattttaaaa

SEQ ID NO: 6179 - DNA, 482 bp, Homo sapiens
  misc_feature 30, 31, 32, 33, 40, 46, 47, 52, 53, 85, 151, 192, 218, 284,292, 305, 323, 334, 365, 379, 393, 397, 424, 425, 435, 436: n = A,T,C or G
tttcgagcggcccgcccgggcaggtacctnnnnattttgnttattnntactnngggggcctttgtaaaatttcttttattgcccnggagtggaacccctaaaggtgggctcacaaagaagtgccccttattttcttttcaattttaaactnaccaagggaccaaaaccaccattcttcaaaaaggtttgaanaataaaggtggaccccaggttattgnatttttgccccaaaaaatttcttaaaaagccgccaccttccaccccattggaaaaatggggaatanaaaggggnttacccctttttnggggggaatttttgccancttgccattgnaaaattttccttggggaaaaaaaggcctttngtttggggaataantttgggggaattanggangaattatggaagaaaaattggaaaagnnaattattttnntaattaaaggaataccttatttggaagggtttcccccctggccctt

SEQ ID NO: 6180 - DNA, 418 bp, Homo sapiens
  misc_feature 68, 80, 203, 296, 349, 354, 401: n = A,T,C or G
cccttagcgtggtcgcggccgaggtaccactcccctcactttccaaagagaagtaattcccagcttgnaccttcccttgntgggaggggcgcccaggtgtggcctctctgtgaccttggaccctggctccggcatatgccagcctggccttttccccagggtagggagctggcaccctgggcatttccccggccagcatccanccttcttgggcagggcctttccacaccattcctcccaaatcctcactggcccaccctggaacaaatgcaggcggaagctcgcatccccacctntgctgtttctgcttgggtccccaaagagctttctttagggaaaaagaaagcangccanttgcctgctccttttagacccccacaagtggggcatggggtgggccnttggtttggccttaatt

SEQ ID NO: 6181 - DNA, 357 bp, Homo sapiens
  misc_feature 173, 181: n = A,T,C or G
cccttagcgtggtcgcggccgaggtacactgacttatgtgaaatacaatataatattttaccagtttaatgaatgatcagttggaagtgggagcccctttgcaaatcacttaaattagaagtgatttgcaacgcttaggttaaggagaagagcgggctgtgtcattaatgcangaacttanggtatccagcggggtccagtcaggagacagaaaccacacatgattcaatcagagaaagtctgatgtgaagaattcttagttggggattgggttataagaaagtaatgatatgtgaattatatctcaataaagctgttatctttaaaaaaataaataaaaaagaaataaagaggacc

SEQ ID NO: 6182 - DNA, 616 bp, Homo sapiens
  misc_feature 567, 576, 595, 607: n = A,T,C or G
cccttagcgtggtcgcggccgaggtaccacagtttgcttaaccattcactttttgaaggacatctggattgtttccagttactgactactataattaaaactactacacatatttttgggtaaccttttgggtgggcataagttccgtttctgtgggataaatgcccaggtctccaggttccttatttggcctctgttgactctcaagttgtagcagggagtctgtctccaactgctagggttgggacttcaactccacacgaggtgtctgctggtaactcactgactgcgatggatatgagtgccttgtcatggctccctaaatggcctctactaataataccaccacaactaccaacactactaaagtcatgtggactctgctaacagtaaggtggactccttaccacccagtgagaatgaaactaccaattccttactcagctttcccagacgttaccctggaaggaagggtgaagtgccttgccacagtcaggcatgagtggaaagcttggcttccccacttggcttttgccatgggtggggtagagccacaagtttttttgntattggtgntggggctggctggagtaanagctgttattgnctaaaaagt

SEQ ID NO: 6183 - DNA, 403 bp, Homo sapiens
  misc_feature 101, 133, 213, 229, 289, 390: n = A,T,C or G
ccctttcgagcggccgcccgggcaggtactgccctccttatttcagcgctgtcattctgatcactctaggaccggctgagactttttcgtgaacagttttnctacctttttagggcaaccatctgtaagacanggtagaatgctaccataaccatgattaacattttgcaaacactctgccacagtgcagcccgttttcttttgtctccagcntgaagaaatttgaggngcacagaggttaaaattttgattgctcaaagcaatacaactagaaaaatatagggaggcngggctgcctgatttgattcccagcttagagattggaaagtcacattgccgaagccgcttttaagcaggatagagaaagggggagtcatacctcccagcggngccattttttaag

SEQ ID NO: 6184 - DNA, 216 bp, Homo sapiens
ccctttcgagcggccgcccgggcaggtaccttccaggatactactcccttatctacaagcaatccaaatgactaagggataatttccaaacacttctgcttgttaacccctcctctccagtgctgaaaaactcaagacaagtaaaagacacatttttaattaacatttggaagatggcttttgttagttaatagcaattgttaactctcaaaataa

SEQ ID NO: 6185 - DNA, 410 bp, Homo sapiens
cccttagcgtggtcgcggccgaggtacttgataccatgcctagtgcatagttggtgcccaattaatacatgattggattatagcataatcactgatcactacatttaaagcagtccaatagtgggaacaggctgcctcacaaatagtgagctctcgtttcctctacacagattctactatgggccaggatctcagccaagcagtggagccagaggctggacagacacaagcagagattttggaaaaagactgagtccctctcagcacttcaaagatcccttccaacacccaaacatcaaaagccatggttatattgcccaagcaaggggtggcctatgaacgcctgtttgaaaacccccacaaaccaattttttttcagcccattttattaaaaaaccccccaaaagaag

SEQ ID NO: 6186 - DNA, 378 bp, Homo sapiens
  misc_feature 141: n = A,T,C or G
cccttagcgtggtcgcggccgaggtaccaggagggtattgatgtttgaggtccaaactgaaaacccatcacctccttcccactgctatagcagcgttggccctggggttcattatctagccagttcacaccttcttaaagngggggctctgaaaatgtcttacttccctcacagacaaagcaattctcaagcctcctgagatcacccaccaaccagagcaactgctgtcacttggaggtgcagctgaattcttctaattgtgacacaaactcttgaaactgtaaatgctgaaagattaaatgaggttataacactcagaaaggttttacaagtaaaaagtaagtcaaaattcaataggtctttatttcatattctgta

SEQ ID NO: 6187 - DNA, 447 bp, Homo sapiens
  misc_feature 17, 53, 57, 58, 86, 112, 128, 130, 140, 143, 146, 179, 191,219, 239, 248, 262, 270, 273, 302, 321, 333, 335, 359, 372,374, 394, 398, 399, 406, 414, 434: n = A,T,C or G
ccctttcgagcggccgnccgggcaggttacgcgggattattggaagtgacagnaaanngttgcataatgccagttttactcattcngattgataatttgaaagaccaacttnaaaaaactccgaaccntnggctttttcncangtnggccccaacaagctattctaatgggaaattccncaatctttggtncaattcaaaattttcttggcccaaattntaaccgttggttattatttncctttgggnccttttggggaagnaaaaaagntcnttttaaaacccccttttggtatttcaacnccccaagcaattggcaaanatgggataaaancnttttttttaactccccggccccangcttttttttggngnaaaccttttcaatttcaaangggnnacaaaanggggcccnttaagtaataattttttaancttggggaagggg

SEQ ID NO: 6188 - DNA, 307 bp, Homo sapiens
cccttagcgtggtcgcggctgaggtactatgttttcaataatgtgcaaatatttaaacaacttaaatataaaatattcacttatatttttaatggatgtggtatctcaatccatttgtgtcactccagatcacaacataatttcttaagtaagatgcatattgagtcatgtaagtaacacataaaaagttataaaataaattgtgatcacacttgggctaaatatagaatacactaaatatctgatgggcatccacacattatagaaattagacattcaaccctatatagtaatttaaaaactaccg

SEQ ID NO: 6189 - DNA, 602 bp, Homo sapiens
  misc_feature 556, 557, 559, 563, 564, 565, 566, 567, 568, 569, 570, 571,572, 573: n = A,T,C or G
cccttagcgtggtcgcggccgaggtacatgtaaatatacatcatcccaagttaaatttgataggccttcctgacagtagccatatagataaatagaagttttcgttggtttagtggcaaaactgaattcttaatgtaggtatacaagttaaatatgatggttagaaatgaagttttctgaaagtagttcgttgtatgctccctaaaagaattagctttatatttatcttaagaatatctctaaacctatgcaaaaatatggcaaatagtcttctttccattagtctagttcaacaaaatctgactcagagacagtaaagaaagggcaagtagaagatctaatgccaactaagaagataattatttctgaaatatttagttgaagataactttctttcttaagacattactgtggttatgatgcacaagtcaaagaacatgtggcatttccaaagagtattaaatgcatgttacttttttataaaaataagataaatgagattaatgggcttggaactgcaatcttggtaaataaagttactgtatgtctttcaaannanaaannnnnnnnnnnaagtcctgcccgggcgggccgctcgaaag

SEQ ID NO: 6190 - DNA, 404 bp, Homo sapiens
  misc_feature 43: n = A,T,C or G
cccttagcgtggtcgcggccgaggtacttgcaaagtaatacanaaacgtgactttcggcagccacccaagatgatgcctattttcagtgttgatgtattcaggcagggaaaaggtttacttggtggaaactcctgttagaatttcattcggggtggaaagaatcttctcgagctctctgtaagtgaggatctaagaataaaaggctcagcctagtcatttttttctgtgccctactgtatgagttgggcagaattgagtgccacctaagccgggcttctgtgtgccaaaatgctggtgggtgaaattagtgaaattctttctattcattcctttgcccttctcccaagaaaacccatggggaaacaaattacaggggatgaattcctttagaactttccctact

SEQ ID NO: 6191 - DNA, 326 bp, Homo sapiens
  misc_feature 111: n = A,T,C or G
cccttagtttggtcgcggccgaggtaccattcttatctcagaatgctgtaaaccatcagtagaagcagtttagatttggactgcatggtaaaatgaaaagtaataaccctncaaccacaacctagtcagggtattaataattatatgtagcaagaaaacaaagaagaaaataatattgaaaaaatggagattccccaaccagtttcatatttgaaggatctgagttgtattttttattaaggaaattttttttctgaatactgtcttccaaaatgttaacattaaaatctgaatcaggaggactctgaatggaaaagaagtttgat

SEQ ID NO: 6192 - DNA, 677 bp, Homo sapiens
  misc_feature 113, 167, 198, 216, 269, 307, 308, 350, 358, 399, 449, 459,465, 476, 477, 483, 489, 507, 508, 509, 513, 519, 551, 553,554, 570, 571, 585, 591, 605, 625, 628, 665: n = A,T,C or G
cgcccgtggtgatggatatcttgcaggaattccgcccttttcgaagccggcccgccccgggccaggtacctggaagggcttggtataccagtccacaggccttcttcccccantcccctcccaagccccttaatcttggtccatccaacccattcaaaccccccttncccaatggcaacccttaaaaccaaaaaattnctaaaccttttggtaaanttccctttggaaaccaatggttccagggccataccaatttattttccctttcntggcccctggaaggaaaagccttcctttcccttttggnnctccttttaaaaattcttaagaaattggggttggttaaaaanggtttttntggaaaataaaagtttggaccttaatccttttaaccttttnaattggccaaaaaggaaaggggggaaccaaccaattatttggaggaaatntcaattccanttccanccattggaagnnacccangccaanaattaactttaaaaaaannnggtnaaaatntttggaattttaattaaaaggaaggttttttngnnatttaaaaggatttanntggaataaatcgtntatagnaaatgtccccaacnaagtagggggggaaaattgnttntttaattgggggggccaaccgttttttggttaaaggncccctgggggga

SEQ ID NO: 6193 - DNA, 321 bp, Homo sapiens
  misc_feature 210, 230, 260, 289, 310: n = A,T,C or G
ccgcggtggcggccgaggtacatatcatttccatcttccaatgggctgctgccgatcctactagcttatgacttagtgcttcccacaggacctagttaagatgagcagttctggatacagcatcactgggtctcaaagttccgtgtctaccagggcccagtagcacagcagaggctgtttttcaaaaagcatatgatcctctcctgtggntaagaaccaccttccttcanggccccagggacctgcactgggattctctnattgggccttgtcatctattcgacactgnatcttcttttcccactacctncaatacataaa

SEQ ID NO: 6194 - DNA, 329 bp, Homo sapiens
ggcgaattggagctccccgcggtggcggccgtgaacatattttttgggttgctggagttcatctataagtcatttttgaggaataagatttatgttaagactatcaaacacagtgttgcctacaatagcaaaaatgtgaaaataacaacaacaacaaaacagcagaggaattgttatgtattttgtagtctatctatatgatgcctatttttaggctttaaaaagtcttcaaaatctttaatgactgatttatctagttaaatgcttaatccttagcaggctcttattctttaattaaacgtgcctttgagtagatgtgaataaaataa

SEQ ID NO: 6195 - DNA, 429 bp, Homo sapiens
  misc_feature 32, 39, 48, 52, 55, 77, 85, 159, 360, 388: n = A,T,C or G
tggcggccgaggtacctttggtaataggaaanttcaaanctaggattntttnaanggaaaaatgagaattagagttnaggagaangcagatcactgaagttttaaaaataatgtggaatagttggtaagaacaacttattttatgaaagctgacatcangagtctcactgggaacattgtaggaggagaggttttctaggcatgtggaaatgcagtaagaggcatgggtaaaagcaccttttagtttttaaggaattaggttaaagaattagctgcatgcttgagtgtttattttggttatttctgatatgcagttctgaacctcaggaataatttgtttatctaactaaaatagtaagnttttaaaaataaagctcatttatatttncttctaggaataaataactgcttattacaggaaaatttgcc

SEQ ID NO: 6196 - DNA, 380 bp, Homo sapiens
aggtacatagaatatgaacacagcacacacatgagagacgcaagtgccaaatgccttggcctgggcttcacgtgtcaagcccaacacagtcttaagaataagcagatatgagaaggagatgagaagtgagtccaggccaatggcggagatgatgacgataaggccatagacgacattgacccggatatcatcacaggccagcttcatgacatcttggtgtaggcagtaggaatgggaaaggatattggagcggcagaagggcagctgcttgatgaagacaggaaggggtgccatcagtgcagccccccgcaccacagcagccacaccaattttggtgacacgaggcaacgtaagtacctgcccgggcggccgctctagaa

SEQ ID NO: 6197 - DNA, 367 bp, Homo sapiens
  misc_feature 298: n = A,T,C or G
ggtggcggccgaggtaccctgaggcctgccagttcctgccttaatgcatatgtagtcgtaattgagttctgacacggccttgggtgtttctgtcctaaatagctgacattgcatcttcaagactgtgtgagtaatcctgatatttttttttaagctcagtaaattaattacatgccctgggagggagtgattgtaagtagaaaatactgaactagcagatgattccgtttttaaggtgctatactatgtgtatcaagttcaagacgatgaatcttaaagcttctaagaactggcaggnttattccagcttttgtgccccccgccgtacctgccccgggcgggccgctctaagaacttagtggatccc

SEQ ID NO: 6198 - DNA, 407 bp, Homo sapiens
  misc_feature 45, 48: n = A,T,C or G
cggccgaggtactttctttatttacttgtaattatttcctctagnttnttgaacccgcgcatcacttttttggttttcctcattccaccacagcatttaggtgaccgttaccatttatgtttcattaagcttcactaggaatgtaaggataatattaagagcatttgcagaaaattgttatctccttttgtaggggattcgagacatatttgtagctacttcacggctgtagagttagtgggtgatcgggtattctgcattgttccttatccctttgtcagtgacagacacattgacataagagattcctacaggattataaggagagataaattattaaccatttttttacttgatccaactactccatgtcccatcaactagtggtaactgatgttgataggatt

SEQ ID NO: 6199 - DNA, 360 bp, Homo sapiens
  misc_feature 21, 36, 47, 48, 50, 54, 56, 57: n = A,T,C or G
ggccgaggtacataaaggttnccgaggacagttttngtggaatgatnntngcananncttcattggcatgggttcgagagagaaatgaaagaggattgaagacagtgagtatagacagctcaggaagtttagctgtgtaagtgaacacagagatgagtggtcactagaaggagaggtgagccaagagggaatgatgggagaagttataatatgttgatggtcaagatagaatgactgattaaaggggaattgctggggctctgttcctgagtaggcaagagcaggtgagatagaagacataggtggagggattggccctaaatacatgccgtggacagatcctccttatgaaaaaaagaa

SEQ ID NO: 6200 - DNA, 401 bp, Homo sapiens
  misc_feature 175, 184, 214, 240: n = A,T,C or G
tagggcgaattggagctccccgcggtggcggccgcccgggcaggtaccagctttatataccacttattagaggttgccaagtgtgatatctaggccttaatctagaaattaagctaatgaggccctatttacacaatagactcctctatccccctttgtcacttcagatttaaanaaattgtcnttgttctataaatcagatctcttgtgtgtnttctgttcccgttacccgaagcagcngttttcagactttagcaagcatcagagtcacctggagaggttggtgtatcacagattgtgggtcccaccctcagagtttcggaatcagtaggtctggggcgcaccctgaagaaatcttgcatttcttaagaagtttttaggtgatgctgatactgctgatt

SEQ ID NO: 6201 - DNA, 386 bp, Homo sapiens
ccgggcaggtacaagatttcttagggcgaatccaattccatcaatacctggggaaacacaaaaacctggtgcagctggaaggctgctgcactgaaaagctgccactctatatggtgttggaggatgtggcccagggggacctgctcggctttctctggacctgtcggcgggatgtgatgactatggatggtcttctctatgatctcacagaaaaacaagtatatcacatcggaaagcaggtccttttggcgctggaattcctgcaggagaagcatttgttccatgggggatgtggcagccaggaaatattctgatgcaaaggtggatctcactgctaaagctctgtgggattaggccctggcttatggaaagttttacaccccgga

SEQ ID NO: 6202 - DNA, 322 bp, Homo sapiens
  misc_feature 3: n = A,T,C or G
tgnggtgcggggggctgcactgatggcaccccttcctgtcttcatcaagcagctgcccttctgccgctccaatatcctttcccattcctactgcctacaccaagatgtcatgaagctggcctgtgatgatatccgggtcaatgtcgtctatggccttatcgtcatcatctccgccattggcctggactcacttctcatctccttctcatatctgcttattcttaagactgtgttgggcttgacacgtgaagcccaggccaaggcatttggcacttgcgtctctcatgtgtgtgctgtgtttcatattctatgtacctgcccg

SEQ ID NO: 6203 - DNA, 412 bp, Homo sapiens
  misc_feature 20, 372, 396: n = A,T,C or G
ttagggcgaattggagctcnccgcggtggcggccgcccgggcaggtacgcggggactggcgtccggtgtgcaggtggccacatggatcctggcagccggtggcggaacctgcccagcgggcctagcctaaagcacttgactgacccctcttatggaatcccgcgggaacagcaaaaggcagcgttgcaggagctgacgcgggcgcacgtggagtccttcaactacgctgtgcacgagggtctcggcctcgcggtgcaggctatacctccctttgaatttgctttcaaagatgagcgtatcttcttttactattctggatgctgttatcagtccacctacagtttccaaaagggaccatctgcaaagaaggcncaatggttttattccagcagaatncccgggggcccgaaag

SEQ ID NO: 6204 - DNA, 521 bp, Homo sapiens
  misc_feature 28, 58, 59, 60, 117, 145, 146, 160, 168, 178, 192, 213, 231,234, 238, 241, 251, 257, 260, 262, 264, 268, 270, 272, 273,280, 284, 292, 299, 315, 317, 326, 329, 341, 343, 346, 360,361, 365, 373, 381, 387, 389, 399, 410, 420, 422: n = A,T,C or G
  misc_feature 439, 440, 445, 447, 483, 485, 488, 489, 490, 495, 497, 500,502, 515: n = A,T,C or G
aggtacatcgcatcagctctgtcttcangaatctttggctcttattccatttctttgnnnaaatactggtatcattgaggctgggtgttctgacattaaagccatcagtaactgtancacatcaatggaaatattattcattccnncaatggctatttgnaaaaaganaggtcaaaantttttaaatactancttctagaaagatttacaatncctttcctcattggaccnccntctntgnaatcctaaantacccnttntnangggntngnntataatnggcncaaccttnaccttgntcccagaccaatgagnanttttaaaantanacccacccaagntnaangttaacaattaatnntganttaaaagnggtcggtnggccantnattaatttcnttttttaaaantaaaaccatngntatgtcccttaattctnncttgncntgttaattgagggttggggttggttaacgcaaattngnggnnnaaagngncangnttttcccccaaanaaaaaa

SEQ ID NO: 6205 - DNA, 215 bp, Homo sapiens
aattggagctccccgcggtggcggccgcccgggcaggtacttaaagcattattccgtatttcagcacagaatgactttggtgaaactgtagctgttagcgagtaattgcgttacaggcagacccagtcttaaattaacaaatctgggttcccttaactatcaggtttatgttggttttatttgcttctatctggatcccttctctttgcctggga

SEQ ID NO: 6206 - DNA, 197 bp, Homo sapiens
ctatagggcgaattggagctccccgcggtggcggccgtcctgggcctcggactaacaagcggctttaattgctgggcaggtcatgtggaaggtgctcctcccttcaacccagtaaattcaatctctctgagactttgttaggtgtaaaaatgttaatcagaaataattataacaacaatagtttatttacagtacct

SEQ ID NO: 6207 - DNA, 448 bp, Homo sapiens
  misc_feature 1, 7, 18, 31, 42, 43, 46, 47, 49, 52, 56, 61, 73, 381, 403,414, 416, 426, 427: n = A,T,C or G
naattgnagctccacccnggtggcccgcccncccggccgggnnctnncntgncctngggtnaccaaaattggngtggctgctgtggtgcggggggctgcactgatggcaccccttcctgtcttcatcaagcagctgcccttctgccgctccaatatcctttcccattcctactgcctacaccaagatgtcatgaagctggcctgtgatgatatccgggtcaatgtcgtctatggccttatcgtcatcatctccgccattggcctggactcacttctcatctccttctcatatctgcttattcttaagactgtgttgggctttgacacgtgaagcccaaggccaaggcatttggcacttgccgtctctcatgtgtgtgctgngttcatatttctatggtacctncggcccgctcnangaaactaagnnggattccccccggggcctgcc

SEQ ID NO: 6208 - DNA, 438 bp, Homo sapiens
tcttatagggcgaattggagctccccgcggtggcggccgaggtacaaaataaaactcattgctattgatagtttgactgtaaaggaagacaaaataacacaagaaagagaggtcagatagattggtagtatggatatttgtattaagaaagatgcagagggatagaggtgaggagaaccaagcggaaatgctgaaataatataggaagtcggaaattaatagaagtagcagataatcaatatttgtagtgagttaaagtatatcctttccttcttacatgttagctaacaacggcttaagaaaaattggtgcttagcatgaaattggaaatttggaattgctaaattctttcttaaggtctgctgtgcttgatttatttaatggtctacgctctttgcagtgtgacatcacagttcattagcaaagtggttatttggg

SEQ ID NO: 6209 - DNA, 390 bp, Homo sapiens
  misc_feature 56: n = A,T,C or G
gggcgaattttagctccccgccgtggcggccgaggtaccattcttatctcagaatnctgtaaaccatttttagaagcagtttagatttggactgcatggtaaaatgaaaagtaataaccctccaaccacaacctagtcagggtattaataattatatgtagcaagaaaacaaagaagaaaataatattgaaaaaatggagattccccaaccagtttcatatttgaaggatctgagttgtatttttattaaggaaattttttttctgaatactgtcttccaaaatgttaacattaaaatctgaatcagaggactctgaatggaaaagaagtttgatcactgacacctagggctctgaagcgtgtgtggccacatggaaaagtcgaaggatg

SEQ ID NO: 6210 - DNA, 742 bp, Homo sapiens
  misc_feature 1, 4, 24, 30, 32, 52, 54, 77, 101, 114, 122, 149, 158, 174,229, 234, 247, 249, 259, 260, 269, 301, 305, 317, 327, 333,337, 339, 343, 346, 369, 389, 391, 395, 396, 403, 417, 420,432, 457, 463, 469, 491, 504, 507, 519, 524, 525, 529: n = A,T,C or G
  misc_feature 530, 538, 546, 555, 557, 559, 573, 578, 585, 592, 593, 595,597, 602, 603, 611, 625, 627, 638, 642, 644, 648, 698, 710: n = A,T,C or G
nacncagcaaccagactcttaggnacattntncagtcgcgatatctaaaaantncttcgggcgtaaaaaacacgccnttgtaaagggggaaatttctcggntgggggcgcaatnttccttcnctcttggcttaacaccgcagagcccanccatttttnaccaccaaatgcaatnggggaccaattttacccatttttaatttttaagggtggccaatttccttttcttngaaantgggggccccccntnggataaaaannggaaatctntggggaaaaattaattggaaaaaggaaccccnaccnagggaaatattngggtttttcnaaaaanattnancccnttnttttaaaaaaagtcccccccttngggggggcccaaggaacaancncggnnccaaagngggggggaacccanggnaaatttaaattnttatcccccggttttccaaaaaacnaaaggnttgggntgggaaaatttttccctttaancctttttgccccnttnaaaaaaaaaaanccccnncctnngggaaagncccaaccnttttttttngnantgggggggatgggnttggncccaaanaccccanngngnaattnnccaaaaanaaaccaatcccggngngtgggggggcnttcncnaagntttccaaatttgggaaaaaaaccccaatttggggccccaagggggggggngggcccaaaggnaaaattttggggttgccaaaagggaaaaaagg

SEQ ID NO: 6211 - DNA, 155 bp, Homo sapiens
  misc_feature 9, 10, 21, 30, 33, 38, 39, 50, 53, 55, 63, 65, 68, 70, 78,82, 83, 84, 87, 93, 97, 98, 99, 101, 102, 118, 127, 137,143: n = A,T,C or G
ctggccgcnnaaccggaaaanccgggccgnccnttttnncccttgggganaangnggggggcncnttncncaaaaaancccnnnccngggggngggnnncnnaaaaaatcgggggggnggggggganggggcgaccnaaaaangggggggggggg

SEQ ID NO: 6212 - DNA, 281 bp, Homo sapiens
  misc_feature 7, 14: n = A,T,C or G
gagcttnccgcggnggccgccgaggtactcttggctttgctgattgcttccctgatgctgcttttgtcctccttcatcctgttttccacaggctttttctgttgattctctaccttgctatcccaaacacatgtgtcaccaaccttagattcagggataggatcctccacttttggccacttagatgctgcatttccaacattttcatattcttcagttggttcctcatcctcagtgctcgtcttcaaatgtgacatggctgtggcggcgccgcggaaacc

SEQ ID NO: 6213 - DNA, 367 bp, Homo sapiens
  misc_feature 72, 82, 90, 111, 132, 144, 167, 176, 178, 183, 226, 257,260, 277, 294, 302, 309: n = A,T,C or G
cgtttccccctggaaagcctccctccgtgccgctcctccctgttccgaccctgcccgcttacccgggatacnctgtcccgcncttttctnccctttccgaggaaagccgtnggcagctttttcttcattagnctcaccgcctgnttagggttattcttcaaggtttncgtgttgtnangggtncgtatccgcctccaaagacctggggggcctgttggtggcaacngatacccccccccgttttcaagcccccgacncgncttgccgccctttaatncccgggttaaaccttanttcggggncttttgnaggtacccaaaaccccccgggttataggaacaaccggaaccttttaattcggcccacc

SEQ ID NO: 6214 - DNA, 229 bp, Homo sapiens
tacttagggcgaattggagctccccgcggtggcggccgaggtacctttggtttgtgagtttgatagggaaaattaagacacctctgaggaaaatacagaaagtggttttatttaaaaccactcctggttgacaattgaacaaaaagattgtatttaaaatggaaactgcaatctttgtattgtttttctactaagtaaaaaggtcagacttggatatggtacctgcccg

SEQ ID NO: 6215 - DNA, 619 bp, Homo sapiens
  misc_feature 607: n = A,T,C or G
tcctatagggcgaattggagctccccgcggtggcggccgcccgggcaggtaccacttggcacaatgcgagctacaggagactttgtgactgtgaaagatggagagattttttttttgggacgaaaagacagtcagatcaaacgtcatggcaaacgtcttaacattgaacttgtgcaacaggttgctgaagagcttcagcaagtggagtcttgtgcagttacatggtataatcaggaaaaattaattctcttcatggtgtctaaagatgcttcagtaaaagaatacatctttaaagaactgcagaaatatcttccaagtcatgcagtcccggatgagcttgtattgatcgattctctaccatttacatcccacggcaaaattgatgtttctgagttaaacaagatatatttaaactacataaacttgaagtctgagaataagctcagtgggaaagaggacctttgggaaaaattacagtatttgtggaagtctactctgaatctcccagaagatcttttgaggggttcctgatgagtcactcttcttaaatagtggtgggagattccttaaagtccatccggctcctcagtgagattgaaaaacttgntggtacctcggc

SEQ ID NO: 6216 - DNA, 291 bp, Homo sapiens
ccgggcaggtacctgcagaatctcctcattcccagcagcctctcctcatggctccaggtttcaatcacttctcttgctgatctgttattcacaaccgcacagttccttgacctccccatttccacaccaaaccccatccttctggagaactcaaatcaggggagccttccagggacacaaagtgagaggactccccttcttgctgctagggttgcagcagaagacaatgtggtctcgctaacccaggtggaaataatatgttttcctagttttaaaacagcatctgtacct

SEQ ID NO: 6217 - DNA, 252 bp, Homo sapiens
ccgcggtggcggccgtctctgtcgataactgccgggctgtccaatctttcccctgatagaaaggcgcctgggggtcagcctgaagaagctctggagggaagaggcggctgtttgattcagagcctcctcgctgggctggaattaacctggctctttctctaatgaaactgactccaagggtccctgtgtgctagagattcaatggcccttaggagaagcaatgatgagaggtaatattaaagcagtgtacct

SEQ ID NO: 6218 - DNA, 331 bp, Homo sapiens
  misc_feature 8, 34, 91, 130, 146, 152, 155, 158, 168, 197, 243, 252, 260,266, 267, 291, 293, 295, 327: n = A,T,C or G
cgagcatnacaaaaaattcgacgctcaagtcagnaggtgggcgaaacccgtacagggactattaaagatatccaggcgtttccccctgggnaagcctccctcgtgccgctctcctgttccgacccctggncgcttacccgggatanccttgntcncgncctttttctnccactttcggggaaagtcgttggccgctntttcttcaataagcttcaccggcttgttaagaggttattcttcaanttatccggnttggttanaggttnngtttttcggctttcccaaaagacntngngggccttggtggttggccaaccctaaaacccncccc

SEQ ID NO: 6219 - DNA, 511 bp, Homo sapiens
  misc_feature 59, 98, 107, 197, 216, 254, 261, 278, 289, 295, 304, 315,336, 356, 393, 427, 435, 504: n = A,T,C or G
aggtactaaagttcaaaagaggaaagaccatgtaacagtcagtcagaacaggggcaagnaggttctagccaagagctgggatttgtaaggattcaagnagggacagntgatggttcactttaagtgtgaatttggagttatgccaccaaacttgaaagggtacccttgccccggggccgggcccgctttctaagaancttaggttgggaatccccnccggggcctgccagggaaaatttcgataatttcaaagncttttanttcggaataccccgttncgacccctttnaagggnggggggggncccccggggtnaacccccaaggcctttttttnggtttcccccttttttaagntggaagggggggttttaaaattttggccggcccgccnttttggggccgggttaaaattccaattgggggtncatttaanggcctttggtttttttcccctttggttggttggaaaaaattttggtttaatttccccggccttccaacnaaaattt

SEQ ID NO: 6220 - DNA, 476 bp, Homo sapiens
  misc_feature 101, 149, 168, 174, 196, 198, 205, 210, 242, 280, 318, 321,323, 326, 330, 332, 335, 337, 339, 344, 349, 355, 373, 381,397, 400, 401, 414, 417, 419, 430, 435, 443, 444, 447, 457,464, 475, 476: n = A,T,C or G
aggtaccaactaatatatttcttttttttttctttttcttacctattaacccactaaaatttctaatctaaaagcaatattcaagttacattttattacanaaattggaaagcaatttgcctgggaagcaaaatgttgatatgattcangtgattttaacatttaaanctaacnttgtaacaaaaaaacggatttntntttaagnataanataaaattgagactattattttgcatagcaanagaaagtcaaacatgacccacacatttatgcacatatnattaatttcaataaaatgtgttatatttattcaggaanaantncanaagnancanananaaatnaagcnaagggnaccttgccccgggccggnccggcatntaaaaaccaagttggnatnncccccgggtctgnaangnaatttccaatnttaangctttttnnaanacccggttcnaccctcntgggggggggnn

SEQ ID NO: 6221 - DNA, 376 bp, Homo sapiens
  misc_feature 1, 9, 26, 42, 52, 79, 80, 88, 107, 114, 127, 130, 133, 143,148, 157, 166, 184, 210, 231, 235, 236, 242, 260, 272, 288,293, 302, 305, 309, 312, 315, 317, 339, 348, 354, 361, 363: n = A,T,C or G
ngataccangcgtatttcccccctgnaaagactcccttcgangcgctctcantgttccggacccttgcacgctttaccnngtatacantgtcacgcactttctcccntttcggngaaaagccgttgngcntcnttttcttcantaagncatttacgncctggttangtgataatcctcaagatntccggggtggtaagggttcgttttcngcctcccaaaatccttggagncttnnttggtntcaaccagtaaacccccnctcccggttttncaagactctctgaacnccgcntttgtccgnccncttntanttncnccgggtttaaacctttaattcngggtacatntttggnaagatancncaaaaccccccgg

SEQ ID NO: 6222 - DNA, 411 bp, Homo sapiens
ccgcggtggcggccgcccgggcaggtacgcgggacagtcacagttaacatcctcattctcaatcctacccatgatgcagacagattacctcatttcagctcaataagacatcaccaaattcccttaggcagaaaaagggtggggagtgccctttcttgaaggaatcccttaagtgcacgtctcccgttttcttttcacatcaatgcagagtccctctgtgaatttacaacacccaacacccatgagttcagtccttaagaaggaaaattgagcaagtatttaattggttggacattgcataaaagaggtccatatccaggctaactctagaaattttattctcaaacttagttggcctctttttcttctgtcagaggaccattcttagtgggcactggggaaatcttggca

SEQ ID NO: 6223 - DNA, 321 bp, Homo sapiens
  misc_feature 310: n = A,T,C or G
ccgcggtggcggccgcccgggcaggtacatagaatatgaacacagcacacacatgagagacgcaagtgccaaatgccttggcctgggcttcacgtgtcaagcccaacacagtcttaagaataagcagatatgagaaggagatgagaagtgagtccaggccaatggcggagatgatgacgataaggccatagacgacattgacccggatatcatcacaggccagcttcatgacatcttggtgtaggcagtaggaatgggaaaggatattggaggcggtagaagggcagctgcttgatgaaagacaggaagngggttgccatc

SEQ ID NO: 6224 - DNA, 233 bp, Homo sapiens
  misc_feature 6: n = A,T,C or G
acactnctatagggcgaattggagctccccgcggtggcggccgaggtactaaatgctgtgtaagtagacgttaatctggctggaaccatgggaagcactttgcagtgttcagaagagaggctccatttgtggttattatgtagaactgggccagagccagtccattgcctgtttttttaaataaggttttactgagcacagccacactcatttgtttatgcagtacctgcccg

SEQ ID NO: 6225 - DNA, 380 bp, Homo sapiens
  misc_feature 16, 36, 39, 42, 54, 57, 58, 107, 108, 113, 119, 122, 141,144, 150, 170, 178, 190, 208, 250, 255, 258, 260, 272, 285,288, 290, 295, 297, 310, 316, 317, 323, 350, 351, 369: n = A,T,C or G
cttgcattaatgaatncgggccaaaccgccgccggnggnagnagggccgggttntgnngtattggggacgcctctttcccgcattccctcgcgtcacctgaacttcnncttgncgcctncgngtcagtttccgtgcctganggncggagncgggttattcaagacttcancttcaaanagggccgggttnaataccgggtttaaattnccaccaagaaaattcaagggggggaattaaaaccgccagggnaaaanagnanaccattggttgnaaggccaaaaaanggncncacgncnaaaaaaagtggcnccaagnnaaaacnccgttaaaaaaaaaggggccccggacnnttttggccttggggccgnttttttttttt

SEQ ID NO: 6226 - DNA, 136 bp, Homo sapiens
aggtacaaattgttccttgaaatgactcagagacattttctgaattggcttccatcagccaggcatttcttcagaactggaaaaatgctttaaatttggctttgtcatgattattaaaacactctgtacctgcccg

SEQ ID NO: 6227 - DNA, 106 bp, Homo sapiens
actacttagggcgaattggagctccccgcggtggcggccagggtgcggtagacgctggcggccgagcccgtcgccaggccgaactgcgccaccagctgttcgcctg

SEQ ID NO: 6228 - DNA, 165 bp, Homo sapiens
  misc_feature 41, 52, 82: n = A,T,C or G
ctcactcaaagggcgggtaaataccggtttattccaccagnaatcagggggnattaaacgcagggaaagaaacaatgttganccaaaaagggcccaggcaaaaagggccagggaaacccgtaaaaaaagggcccgcgtttgcttgggcgttttttccattagggc

SEQ ID NO: 6229 - DNA, 361 bp, Homo sapiens
  misc_feature 267, 268, 304, 324: n = A,T,C or G
ccgggcaggtacatctagagaacatttgccaaaggcctaagcacggcaaaggaaaataaacacagaatataataaaatgagataatctagcttaaaactataacttcctcttcagaactcccaaccacattggatctcagaaaaatactgtcttcaaaatgacttctacagagaagaaataattttttcctctggacactagcacttaaggggaagattggaagtaaagcctttgaaaagagtacctcggccgctctagaaactagnnggattcccccgggctggcaggaatttcgatatcaangctttatcgatacccgttcnacctcgaggggggggccccggtaccccagctttttgt

SEQ ID NO: 6230 - DNA, 434 bp, Homo sapiens
ccgcggtggcggcccgcccgggcaggtacctgaaggaacgaagaagagggatttctcaaggtgagaagcagttctccatggacactgatgacagcacaggcaaagtttcctatgactagggatcactgtccacacagagtctggcttcccaggtatccagcaggtagacaaaacagctaactccactgccactcctttctccacatccgttcctatttctcagccatctcagtgacatccgccatcttgagagtcaactactgactggactgagttgtgtggtatatgcttctgtttacttctcttctgtcttttttaagtggccaaatagcaaacgcttaaataggaaatctctgggagacttgaataaaagactttgcttggtagaaaatcatgtcacagaaaggctaatagacagcaaagtaaatcagcaa

SEQ ID NO: 6231 - DNA, 411 bp, Homo sapiens
cactacttagggcgaattggagctccccgcggtggcggccggtgattgctttccaaggccaccgagggtatctgagactcccaggccctggttggtcctgcctcttctccttcatagtgtcccagtgttgtcaggagggcgctggtggtagcttggaccttgtgtgccaacgcttcctcaggtctgggcctaacagcctccactgcctgggctcactcagggagcgcctcattatttgggcagccatggattctatcccagccccatcatcagttcggggacacaacctgactgaagatgccagacatcctgagagttggcagaacacaggaggctattctgaaggagatgcagtatcacagccacagatggcactagagggaggtgtcagcgtcagatccactgggcaag

SEQ ID NO: 6232 - DNA, 632 bp, Homo sapiens
  misc_feature 25, 40, 45, 57, 59, 86, 95, 118, 143, 151, 175, 183, 204,219, 247, 252, 258, 289, 297, 309, 327, 328, 342, 343, 416,432, 445, 452, 474, 482, 490, 500, 517, 541, 542, 552, 563,564, 588, 605, 622: n = A,T,C or G
gtggttattgaatagaaagggtggnttaccgggccggacnaaagnggaccccttgcntntagcaaggccaaggggcccaaaacggnaaggcagcncctttggtggggaagatttttgnctccttaaccgggaaaaaaggccgnggcattanatggggaaccattggttttggggncggatttngtctccgtcttgggggaccgnaagggggggccaaancccccaaaacaacccttaaaggcccttnaaaanaggccncccggtcggaaccaacctttggctaagtccnaaaggggntggccttggctnccccaaccggccttttgnncaacccccggtttnnccgggaaaagcaaaaaaaaaaaacccgccccgggggccccccttaaaaaaagaacccgacccggaaaggtttncctttggggggtgggnaaaccctttttgnggggccnaacccccccccaaaccccccgngtttgggncccaaaanccctttgggnaaatttgggggggtttnaccccccccccaaaaaagtccccnngccccccaanagggcccccgnnaaaccctttgggggggaaaaaaanaaaaatttgggtttttnttttttggggggggganaaaaaaaaaa

SEQ ID NO: 6233 - DNA, 180 bp, Homo sapiens
ccgcggtggcggccgcccgggcaggtaccaatcccagggatgaagaatgtgaaagaattgtggcaggaataaaccagttgatgacactagatattgcctcagcatttgtggcccccgtggatctgcaagcctatcccatgtattgcacagtagtggcatatccaacggatctaagtacct

SEQ ID NO: 6234 - DNA, 383 bp, Homo sapiens
  misc_feature 5, 359: n = A,T,C or G
cactnctatagggcgaattggagctccccgcggtggcggccgcccgggcaggtactcctcatgatcatctacacaacattctgtgacacgttctctaacccaaatattgacctggataaattcagccttgttctcatactgttcataatattttctatccagctgagttttatgcttttaactttcatcttttcaacaaggaataattcgggtttcacaccagcagacacagtggctatcactttctgttctacacacaaatcccttacattgggaattccgatgctggaagatcgtgtttgcaggccatggagcatctctctttaatatctgtaccttcggccgctcttagaactagnttggggatcccccccggggctggc

SEQ ID NO: 6235 - DNA, 323 bp, Homo sapiens
  misc_feature 1, 7, 15, 18, 52, 55, 62, 66, 85, 120, 133, 152, 165, 182,186, 198, 199, 210, 236, 278, 292, 301: n = A,T,C or G
ntggtgnaaaattgnttnatccgctcacaaatttccacacaaacaataccgnagncccgggngagncattaaaagttgtaaaaangctctggggggttgcccttaaatgaagttggaagncttaacctcacantttaaatttgccgtatgcngccttcacttgtnccgcctttttcccaagnttcngtgggaaaaacnnttggttctgtngccccagccttgccattttaaaatgnaaattcggggccccaaaccgtccgccggggagaaggtagggncgggttttttggcngttattttngggggccgccttccttttcccc

SEQ ID NO: 6236 - DNA, 370 bp, Homo sapiens
  misc_feature 37, 48, 353: n = A,T,C or G
cgcggtggcggccgaggtacatttagagaacattttncaaaggcctantttcggcaaaggaaaataaacacagaatataataaaatgagataatctagcttaaaactataacttcctcttcagaactcccaaccacattggatctcagaaaaatactgtcttcaaaatgacttctacagagaagaaataatttttcctctggacactagcacttaaggggaagattggaagtaaagccttgaaaagagtacctgcccgggcggccgctcgaagttccagcccagcttggccagcacgtttgtggtgcgcacgtccatcgggttggcttcggtacgcgccaaggccgtcaccgntgtgggccgccgggggg

SEQ ID NO: 6237 - DNA, 468 bp, Homo sapiens
  misc_feature 175, 195, 215, 216, 252, 262, 275, 281, 286, 307, 311, 312,322, 332, 334, 341, 342, 348, 353, 362, 373, 384, 410, 412,415, 430, 447, 448: n = A,T,C or G
ccgggcaggtacatgggactacaggcacgccccaccatgcccagctcatttttgtatttttagtagagacagggtttcaccatgttggccaggatgatcttgatctcttgacctcatgatccgcccctcttggcctcccaaaggtgccgggatcacaggcgtgagccaccacacnctggccctctatttattctntttaaaggagcagtagtaannacctattggagtagggcccaaaaatctattttaatntaaaatactntttactcttaagncaacantgggnaaaaaaaatggggaattttgncctnnataataaggntgaatggaangncattacnnccatantgganaccaggaanacacattcacnattttttaagnttaaataaagggcaaaataaattttngnagnaccttttattaaagncctatttattggggtanncctttaatttttttttgggg

SEQ ID NO: 6238 - DNA, 395 bp, Homo sapiens
  misc_feature 2, 35, 37: n = A,T,C or G
tncttagggcgattggagctccccgcggtggcggncngcccggccagggtccatagcacctcccctttttctctcttcctctatctccagtcatgtaagacatgcctgctatgccctctctcaccactcctattcaacatagtgttggaagttctggccagggcaattaggcaggagaaggaaagaaagggtattcaattaggaaaagaggaagtcaaattgtccctgtttgcagatgacatgattgtatatctagaaaaccccattgtctcagcccaaaatctccttaagctgataagcaacttcggcaaagtctcagggatacaaaatcaatgtaccctcggccgctctagaactaggtggggatcccccggggcctgcagggaaatttcgat

SEQ ID NO: 6239 - DNA, 453 bp, Homo sapiens
  misc_feature 16, 42, 55, 252, 419: n = A,T,C or G
gggcgttttggagctncccccggtggcggccgaggtaccctngcctaatccatantgggcactcaaatttttactgaatgactaaatgaaaagatggatgaacatctctataaactatggaaagaaaatgctgataaagcatttgccagaaattacttcactagtgccacacacgggacagaattgaggacatttagacttttttgtttgtttgagatggagtctcattctgtcgctcaggctggagtgcantggtgctatctcagctcactgcaacctctgcctgggcaagactctgtcccaaaaaataaaaaaataaataaaattaaaaagtctggaaagtaaagggaagaatgaatacaatttagttaagaatactgccaggattaaacaaacaaaaaatcaatcttggattgggntcatctttatttctagaaataatactatatacct

SEQ ID NO: 6240 - DNA, 458 bp, Homo sapiens
  misc_feature 8: n = A,T,C or G
tacgactnctatagggcgttttggagctccccgcggtggcggccgaggtacaatttcattgtatgtatctaccacggcctatttattcatccattagttgaagaacatttggatggtggaagagaatatctttgtcttattctgaattaaggggcattcagtctttcagcatggagtaggatgttagctgtagggtttttgtagacgccctttacagagttgaggaagttctcttttattcttagtttgctgaaagtttttaccatgaatacatgttctagtttgccaaatgctttttctgcttcaattaatatgatcatgtgtttctttcttcttcatactgatagtttgacagttccattgattcatttttgatgaacgaaccttacattcttgggataaattgcccttgccatggtgtattgttccttttaatgtattgttgggattttgaattt

SEQ ID NO: 6241 - DNA, 444 bp, Homo sapiens
  misc_feature 18: n = A,T,C or G
ctatagggcgaattgganctccccgcggtggcggccgaggtacccctcttggatcttcattaatgagaagacattcataaccagactgaagatggcaaactaattgttgaaggaatgctggacattttctggggagtaaaacgacctatacagctaaaaatacaagatgagaagccattctcttcttttactagtatgaagtcatcagacgtcttctccagcaaaggaatgacacgctggggggaatttgacgatctctatcgtattagtgagctggacaggacccagattcctatgtctgaaaaaaggaattcccaggaagcaacaccctgaagccacatgcaaaggatgaaccagactccccagtgctctatagaaccatgagtgaagcagctctggtgagaaaaaggatgaagcctctgatgatggacagaaaagaaagac

SEQ ID NO: 6242 - DNA, 386 bp, Homo sapiens
  misc_feature 9, 368: n = A,T,C or G
cttagggcnaattggagctccccgcggtggcggccgaggtaccaggagggtattgatgtttgaggtccaaactgaaaacccatcacctccttcccactgctatagcagcgttagccctggggttcattatctagccagttcacaccttctaaagtggggctctgaaaatgtcttacttccctcacagacaaagcaattctcaagcctcctgagatcacccaccaaccagagcaactgctgtcacttggaggtgcagctgaattcttctaattgtgacacaaactcttgaaactgtaaatgctgaaagattaaatgaggttataacactcagaaggttttacaagtaaaagtaagtcaaatcaataggnctttatttcatatctgta

SEQ ID NO: 6243 - DNA, 159 bp, Homo sapiens
  misc_feature 44, 130: n = A,T,C or G
ctaatgaggtgaggctaactcacatttaatttgccgttggcgcntcacctgcccgcctttccagttcgggggaaaaccttgttcgttgcccaggcttgcatttaaatgaaatcgggccaaccgcgccggngggaggagggccgggttttgccgttaatt

SEQ ID NO: 6244 - DNA, 208 bp, Homo sapiens
  misc_feature 176: n = A,T,C or G
agggtgccgcttgaggaaaacgtgagtttgtgaaggtgagcagtctgggtcggtagcgaaagcggagaccttagctgaccccgcagctgtctttctctttgttaacctcaacacatcgcgcccccttccgggaacacttgctcttctctccttggcttaactagtcccggtttttnattctttataccgtgacctttagggaaccgtg

SEQ ID NO: 6245 - DNA, 146 bp, Homo sapiens
ccgcggtggcggccgaggtacttttgataataactcactctgtgcgatattcctgaataagtccatctcaaaagtttgggattttcctcctcttaactttcttaatatttggacatgcaagttgtcgccaaactttgggttattca

SEQ ID NO: 6246 - DNA, 395 bp, Homo sapiens
ccgcggtggcggccgaggtactttgggaggccgaggcaggcagatcacaaggtcaagagattgagaccatcctggccaacacggtgaaacctcctctctactaaaaatacaaaaattagctgggcgtggtggtgcatgcctgtagtcccagctactcaggaggctaaggcaggggaatcacttgaacccaggaggcagagattgcagtgagctgagatcatgccactgcactccagcccggtgacagagtaagattccatctcaaaaaaaaaaaaaaagccagggctttggagttaggcctaacaaagtctgaatcctaattctgctactgatatactcagtgatcttggcatgccacttattcctctgagccctgtttcctcacctgtgggaat

SEQ ID NO: 6247 - DNA, 60 bp, Homo sapiens
  misc_feature 45: n = A,T,C or G
aaccgcgaattgttttccgcaaggcccccccatcttggcaccatntttggcaattccttt

SEQ ID NO: 6248 - DNA, 775 bp, Homo sapiens
  misc_feature 41, 81, 89, 103, 163, 166, 280, 361, 379, 389, 391, 416,446, 449, 470, 487, 501, 506, 527, 535, 558, 576, 578, 626,650, 691, 694, 712, 720, 729, 755, 764: n = A,T,C or G
ggccgaaattgggggagcttccaccgcgggtgggccgggtnatcaagccttcaacttcaaaaagggccgggttaaataacngggttaantccaacaagaaatnaagggggggattaaaacggccaagggaaaaaggaaacattgttgaagccaaaaaagggcncangccaaaaaaagggcccagggaaaacccggttaaaaaaaaagggccccgcggtttggcttggggccggttttttttcccattaagggccttcccggcccccccccttggaaccgnaaggccaattcaaccaaaaaaaaaattccggaacggccttccaaaaggttccaagaaaggggttggggccggaaaaaaacnccccggaaccaagggganccttaattananaaggaattaaccccaaggggcccgnttttttcccccccccctttggggaaaaagnccnttccccccctttccggttggnccggcccttaccttccnccttgggtttttcnccggnaacccccccttgggcccccgncccttttnaacccccgggggaaattaaaccncctttggttacccccggncncccttttttttcctttcccccccctttttcccggggggggaaaaaagnacccggttgggggggcccggcccntttttttcctttccaaattaaaggccctttccaaacccggnccnttggtttaaagggggttnaatttccnttccaaaantttttccggggggttgggtttaaagnggggttccnggtttttcccg

SEQ ID NO: 6249 - DNA, 105 bp, Homo sapiens
ccgcggtggcggccgaggtaccaatctaaaaacaggcacaaactgcttagcctatgacccttaactataaaaaaacaaatttataagttaaatacagaaaagtta

SEQ ID NO: 6250 - DNA, 302 bp, Homo sapiens
  misc_feature 57, 78, 79, 84, 94, 98, 103, 105, 116, 121, 123, 124, 125,130, 133, 134, 140, 141, 147, 156, 157, 159, 164, 166, 174,178, 180, 187, 192, 193, 195, 217, 218, 223, 233, 234, 235,257, 264, 265, 287, 295: n = A,T,C or G
aacactacttagggcgaattggagctccccgcggtggcggccgggcatctctaccanggatctaatgcgctaccattnngtgcntcctgtgtgngtgnatatntnaaggggctggnaatgngnnnaaacntgnnactacnnacacantatataganntnttgcngnctctagtnatgntnattatcntcatnncngcatatgtgccgcctaccatgnngaagngacccggccnnnattattttgtcacccctgccantgagganntctggtacgcctttctttgctngcactgantacctgg

SEQ ID NO: 6251 - DNA, 439 bp, Homo sapiens
  misc_feature 9: n = A,T,C or G
gtatcactnctatagggcgaattggagctccccgcggtggcggccgcccgggcaggtacagatggggttttaccatgttgctcaggctggtctcaaactcctggagtcaagggttctatttgcctcagcctctcaaagtgctgggattacaggtgtgagccacggctcctggctccttgctccagaatcagttttttaatggaagatagctcatactttgtttttgtttttaaagagactgggcaacatagcaaaaccttgtcactataaaaaatacaaaaattagccaggcgtggtggtgcacgcctgtggtctcagctgctcagtcggctgaggtgggaagatggcttcaagccgggagatggaggcttcaagtgacctgtgacctgtgatcacaccacttaattcctcaaagcatttgtgtcccaagttccctcca

SEQ ID NO: 6252 - DNA, 175 bp, Homo sapiens
  misc_feature 3, 30, 146, 155: n = A,T,C or G
ggncgaggtactgctactaacggaacccangctctgagttgtctcaagtttcctcttttcctgtttttctcaggtagagtttctctcctttagctcattctgtcctgagagaaacaccactcccggatgttgacccatctatagcnggaattctncaagtgtggcccctccccgg

SEQ ID NO: 6253 - DNA, 320 bp, Homo sapiens
aggtaccctgaggcctgccagttcctgccttaatgcatatgtagtcgtaattgagttctgacacggccttgggtgtttctgtcctaaatagctgacattgcatcttcaagactgtgtgagtaatcctgatatttttttttaagctcagtaaattaattacatgccctgggagggagtgattgtaagtagaaaatactgaactagcagatgattcgtttttaaggtgctatactatgtgtatcaagttcaagacgatgaatcttaaagcttctaagaactggcagggttattccagctttgtgcccccgcgtacctgcccg

SEQ ID NO: 6254 - DNA, 445 bp, Homo sapiens
  misc_feature 16: n = A,T,C or G
atagggcgaattgganctccccgcggtggcggccgcccgggcaggtacagtgaaaagagccaaggctgtgtgaccccctcatcacttagccaggcgtatggtcctggtttctgaggctgccagaaagcatcttagcaatttgtgtttggatggtccatgcctgactattctaggctggaggttcctaaagagtaacaagaggaagagaaacaagaatctctgacacttgttgagaatagagcacagtcccatttgtttgaaaagagacaccaggcagccatgtttatgtgccagaaatgcattccacctcaaggaggacttaatttatggacccgtgtgtgccaggctgagctgggcaagatctttctcaggacaaactctgccatgcagctaaaagtctggaaactaaaggatttcatgtagtaaactatcttccaacccctgt

SEQ ID NO: 6255 - DNA, 417 bp, Homo sapiens
  misc_feature 7: n = A,T,C or G
acgactncttagggcgaattggagctccccgcggtggcggccgaggtacctatgatttaaatactctccttttaaatactttgtaaaaactgcttttccgagccccttttatgctctgcagttgccatatccactaggtggtattgcaaataagtaaagcatcctggccatgacgctgctagtgagaatccctgaccaaagttactctcctcacctcactgcaaacctccaggaagcggaaactactacccctccacagacagagctcccctgccactccatgaggcgctgctgccggcatcagttaccgaagccctcacccacacccagcctgcaatggtccactctatattccacaatacaggaaaaagcccaaggagtcagatcagttacgcccctgggatgcagaaagaacca

SEQ ID NO: 6256 - DNA, 139 bp, Homo sapiens
  misc_feature 5, 77, 104, 108, 116: n = A,T,C or G
tgagnctaactcacattaatttgccgtttgccgcttcacttgccccgcttttccagtccggggaaaacactgttcgntgcccaagcttgcatttaaatgaaatncggnccaaacgncgccggggggaggagggcggttt

SEQ ID NO: 6257 - DNA, 249 bp, Homo sapiens
aggtacagtgtatgagaacatgttttcttaacacatacccactctgcctattcagtccttcctttttgatctttgtgaatttgatgggcaaaacatctgtgccacagtgttatttcaattttgagcagtcttaatggaggagttgttttggggaaccaaggtatagaacatgtgaaagaaactatctgaagagactgagcaatgtcttcaaaggcctgtagccctgcagctgcccctagtatctgcccg

SEQ ID NO: 6258 - DNA, 367 bp, Homo sapiens
ccgggcaggtaccattcttatctcagaatgctgtaaaccatcagtagaagcagtttagatttggactgcatggtaaaatgaaaagtaataaccctccaaccacaacctagtcagggtattaataattatatgtagcaagaaaacaaagaagaaaataatattgaaaaaatggagattccccaaccagtttcatatttgaaggatctgagttgtatttttattaaggaaattttttttctgaatactgtcttccaaaatgttaacattaaaatctgaatcagaggactctgaatggaaaagaagtttgatcactgacacctagggctctgaagcgtgtgtggccacatggaaaagtcgaaggatgcgc

SEQ ID NO: 6259 - DNA, 112 bp, Homo sapiens
  misc_feature 4, 16, 75: n = A,T,C or G
actnctatagggcgtnttggagctccccgcggtggcggccgatcttgtgattatttactatgtcctagattacanttcatggcccttgccaccacctccccaccgtgtacct

SEQ ID NO: 6260 - DNA, 231 bp, Homo sapiens
  misc_feature 8, 43, 161, 162, 168, 195: n = A,T,C or G
ccgggcanggtacagccaggtgtggtggcccgcatctgtaatnccagctactcaggagtctgaggtgagagaatcactcaaggccagaagtttgagcccagactggcaacatagcaagaccatgtctctttgccgtgggcccgctcctttccgaggccttnngctacngcctgacgtttcttgccactgctgtcngatgctgatgtggaacctctactcccccgcgtacct

SEQ ID NO: 6261 - DNA, 527 bp, Homo sapiens
  misc_feature 14, 34, 40, 56, 65, 71, 80, 82, 109, 149, 165, 173, 208,236, 293, 344, 369, 373, 378, 382, 386, 398, 406, 413, 428,436, 451, 477, 483, 484, 486, 496, 498: n = A,T,C or G
cggggttggggccngggcccccgaaggggttaancaaacnttttggggggaaaacntaaaaattntttaanaaaaaaatngnaagttggtggggccttggggaaattantaattggggaagaaaatggtttggggggcccccaagaaangggaaacccggttaanaaagaatncaaggaattattttaccaaaccaaggcctttttgnttttttggaagggggtttaaggaaaaantatttggaaaaatggaattttggggtttatttgaaaccgcccaccaaggttttaaanggccaagcaagggggccccaaggaaaattcccttggacccccttcttggcnccccccggttggggtttaattcttncccntcccncccnaagnccttttgggggncttggccncttccanttggtccaattccanccaaggtnattttcccaattttnttttggttttttgggttttggccaanttggtnncntttgggtggnanaaaggcccccattctcaaaaggaaatttt

SEQ ID NO: 6262 - DNA, 318 bp, Homo sapiens
  misc_feature 109, 110, 128, 172, 188, 252, 255, 271, 290, 309: n = A,T,C or G
tctctgctgcaattagtgctaattacaatacctgagctataaaaataaaagatttcattatagcaaagttcacaaatatcgttttagttcagttatccacattgttcanntaaaaataatacatttgncttttacatataactgtcttagacttgtaattgaggatatcttngatgaaacagatctgnatcttgaaacagcactatgatgctaaacatttgcataagggaatgaaaaaagttagcagcctanttnttttcaataattcagnatattttgagattacacanaagaactacatccagatgnaatgacctg

SEQ ID NO: 6263 - DNA, 891 bp, Homo sapiens
  misc_feature 5, 9, 15, 21, 28, 30, 38, 40, 58, 64, 78, 127, 133, 135,139, 144, 156, 157, 187, 192, 194, 205, 216, 225, 237, 247,255, 265, 290, 300, 305, 315, 319, 322, 326, 332, 336, 355,366, 368, 370, 378, 386, 389, 391, 413, 419, 423, 426: n = A,T,C or G
  misc_feature 428, 429, 432, 443, 446, 460, 464, 492, 494, 501, 502, 505,515, 518, 550, 557, 559, 560, 563, 569, 587, 606, 632, 642,651, 656, 657, 660, 668, 676, 677, 688, 694, 720, 724, 726,745, 757, 758, 770, 779, 803, 817, 819, 828, 841, 855: n = A,T,C or G
  misc_feature 866: n = A,T,C or G
ccacnccgncggggnttgtgnagtctgngnctccggcncnccgggtgtccaagggttnacccgnccgggggggtaaanatggggtaaaaaaaaacccagggccatataggaggggaataccaaaggntttggnanaaanaaaanaaccaattggannaaaggaattgcccaataaacgtaaccatanaattntnggggaaaaaanggtgggaaaanattgggggnaaagcaattggnccccttattncaatttgnaaaaacccanttccaaggggggccaaaaaaattcntttttttttnggccnggcccccaanaggnaantccnttgggnattngggaagggaaacccgtaanccaaggggggnananggtaaaantttttaanaangnaaacccggcccaattggggggnaaaaangggnaanannccnttttttccaanccnaataattttcccanaaanggataaaaaaataaattgggggccctangntaaaaannaancccggttttntantaaagggtaaaaaaaaatttgggtcccaacanttttttngnnaangggggncccataatggcaaaaggnggggaatgggggggaaaanaccccggaaaacctgggttttatgtnaaaaaaaagntaaaaggtnaaggnnggnaaaaatgntaaaaggnnaatttgggaanttgggnaattttttcccgggtttcccaaaaancccngnttttggtaaaggggtaaanttggggggtaannaaggtgaaaaancccaataanaaattggggaaaggtggggcccgntcccccccaaaagngngggggaaanggtaaaggggggngaaaaaaaaaaggntgtttttttanccccatggggcccccccgggaaaaa

SEQ ID NO: 6264 - DNA, 413 bp, Homo sapiens
ccgcggtggccaggtactagctcctgtcctgctgtctcaggacctttcagttcaagcatcctcctaacctgagtctctgtgtctcttacctcaaattctctctctcaaaaaaaaaaaggtgggggggattggctgggccagaatttggcccaaagccaccactggtctgtggtgaccaggagcaataccatatgaatttcccaggccccaccctttcagcaagaggctggaatttggggggagggtcgtgatgtttcctactaactggccattagctggatcatcatttccaaaggaatctaatacaataatgtccacaaaaagcagtgaaggatacagagaccacaaaatagatccacaacatgggacagagtgtcatttggcctcccaacagtttcacagggaaccccttg

SEQ ID NO: 6265 - DNA, 377 bp, Homo sapiens
  misc_feature 29, 35, 65, 79, 96, 98, 110, 121, 122, 145, 149, 157, 164,176, 205, 210, 211, 215, 217, 219, 220, 232, 245, 247, 252,276, 308, 323, 325, 326, 331, 339, 343, 347, 351, 352, 356: n = A,T,C or G
tgttccgaccctgcccgctttaccgagantactcngtactcgcctttcttcccttcgaggtaagncgttggcagactcntctcataagacctcacngncttgttaatganaatctggagtnnccggttgcaagtggttctgtttncgcntccacaangacatgngggcgtggttgntagctacggaaaactccctctcgcgtttnttcannctcncngnnctcgacatggcnacgcttttattcncngggtnaaacataattcggttatttggagnttctcaaaccacctggggtaaaggaacaaccngtaccttttaatccngnnccacnttgggtcnaagnccanggcnncaancattggggttaaaaccaaggg

SEQ ID NO: 6266 - DNA, 397 bp, Homo sapiens
  misc_feature 361: n = A,T,C or G
ctacttagggcgaattggagctccccgcggtggcggccgaggtacttttgataataactcactctgtgcgatattcctgaataagtccatctcaaaagtttgggattttcctcctcttaactttcttaatatttggacatgcagttgtcgccaaacttgggtattcatggaatttctagtaaatgaaatacctatactttgatactgaagactgccaaatacataggaattttctttcttaaaaaacagtaatgaagactatatctcctttcccagcactgaatgttttactagcactgggtgctcaccatgcaactgaagaaaatgtggaaactcaaaaggtcaggacagacttccaagncacttgcaactgatgttactgtcttcaattttaata

SEQ ID NO: 6267 - DNA, 413 bp, Homo sapiens
cgcgtaatacgactcctatagggcgaattggagctccccgcggtggcggccgcccgggcaggtacttcagaaggatggaagctgaattcagaagggaggaatgagaaggaaaagttgctaagaaatcgataaacacatagataaatctaaattaagcatagccattaaaaatcagtaacaacaatgatatgaggatgattaactgagatgactgaaagcaaggtgaagctaaaatataaaaaagtatgtaggatgagctggagggtgcatttacttgcatttctagcattggataggaggagattagagatgctgattggcattaaactcgagttaacactgcagacaaccagggatagtcgtatgtaacttctgagccagtagaacagaagtaacactgaagaaagttcagt

SEQ ID NO: 6268 - DNA, 321 bp, Homo sapiens
  misc_feature 24, 91, 237, 248, 280: n = A,T,C or G
tcccccgcggtggcggccgaggtnttatgcacttcccattctcctagggttttttaatagtttcaaacatgattggcagacataacaacgncaaatactcggactggggcataggactccagagtaggaaaaagacaaaagatttggcagcctgacacaggcaacctacccctctctctccagcctctttatgaaactgtttgtttgccagtcctgccctaaggcagaagatgaatngaagatgctgngcatgtttcctaagtccttgagcaatcatggnggtgacaattgccacaagggatatgaggccagtgccaccag

SEQ ID NO: 6269 - DNA, 161 bp, Homo sapiens
  misc_feature 28, 29, 43, 44: n = A,T,C or G
gcggtggcggccgcccgggcaggtacanngtcttaaaagagannccatatcccattgttgaagtggagcagttggaccgacttgaggagtttcccaacacctgcaaaatgagggaggagctaggagaactatcagagcagttttacaaatatgcagtacct

SEQ ID NO: 6270 - DNA, 178 bp, Homo sapiens
ctacttagggcgaattggagctccccgcggtggcggccgcccgggcaggtacatttacctacgttaatgaaagttgacacactgttctgagagttttcacagcatatggaccctgtttttcctatttaattttcttatcaaccctttaattaggcaaagatattattagtacctcggc

SEQ ID NO: 6271 - DNA, 219 bp, Homo sapiens
tatagggcgaattggagctccccgcggtggcggccgatttgcagagcctcaggggcctgagctaatggagttgctgccattttgaccattgccaaccatgataccagagggaaatgaaatgtgggtccaggggcactgttcaatccactgtagcatgggaagccctgataaaaagagacacaggacaaaattaaagttgtgaaaattatatacgtacct

SEQ ID NO: 6272 - DNA, 359 bp, Homo sapiens
aggtacttactaccaaataaagattttacctatagattgaaactaaattgtaaatgtcccaaatacttttcccgatgaaattcaaacaaaattagacttttatacacacaaagcaaaacaaaacacaacctatatataatttcaagattaagaaaaacaaaacaaataaaagcattctctcaagaccttgcttcagttgtgtaaaataattaaatgtgctattccaagttgattttagtttttaaatacagaatttgataaaagataagtaaaagaaggccttgggttcagggtggcagatatttagtgcaccctttatctagttcaggaaacacttgaaagatttatcaagtttcctt

SEQ ID NO: 6273 - DNA, 202 bp, Homo sapiens
  misc_feature 6: n = A,T,C or G
cgcggnggcggccgcccgggcaggtacttaaagcattattccgtatttcagcacagaatgactttggtgaaactgtagctgttagcgagtaattgcgttacaggcagacccagtcttaaattaacaaatctgggttcccttaactatcaggtttatgttggttttatttgcttctatctggatcccttctctttgcctggga

SEQ ID NO: 6274 - DNA, 418 bp, Homo sapiens
ccgcggtggcggccgaggtacacttttcatactaagaactagatcaatgtctttaattccttaaatgtcattagctcaagtttgaacagaaacatattacattactttttttttaaccaaaaggcttcattcatttaataaaacaagaacttacattttatttccttgaacggacagagaaatacctttcatttatcaagtgtgtaaataatgcccatgtgacagaaacatgcataataatctcataagagaatatccagagataaaagacaagttgaaactcagggacattttacccaagcaattaatttccagatgggagttgccttgatcagtcatgtaaccactgggtaagagttctaaactatcagaaagagttctaaactatcagaaatcaaaacaggacaatacaattaga

SEQ ID NO: 6275 - DNA, 433 bp, Homo sapiens
  misc_feature 208: n = A,T,C or G
ctacttagggcgaattggagctccccgcggtggcggccgaggtacatccaaaatcatttcagcgtataaccacattctcctagactttgtctctcttctactccaagaagcccagttaccctttctcctctcttttatccccaaggatacagaacatcaaccacatcagccatcttgtgccctgcgtgctgagaggagcttttcttcnatgaagaatcccttgatgcagagccctgtaaagactgcatcatcccagctactttcctgctgacttccacttgggtttactcaatgggtgacactcacaggacataagagattagaaagagggataaggtttttttatatatctgctccctccctacttaaagccatggttttagcagaggcccaaggtcgtggcttttttgagcagcccctttatcaaaggtct

SEQ ID NO: 6276 - DNA, 384 bp, Homo sapiens
ccgcggtggcggccgaggtacactctagcattgtaactttttccccctgagaagtaattttaagatctatcagtctcaatttaaatgatctgttaatcagccagagttttagtttcataatatcgttccattgcctgacaaagatatacaccactggaagtgcctttagcagacctggggaccgtcaagaatcttgttaccctgattattgcaagatgacatatttcttaagccatttataatctcatattcgggttgaatctgaatttacaaataaaagggttaaattgaggcagtttcaagcagcatttaggaaaatgaagtggcttcaaattttagtgtttctggttacattatttttgtttgaattatacaattacataa

SEQ ID NO: 6277 - DNA, 426 bp, Homo sapiens
  misc_feature 1: n = A,T,C or G
nctatagggcgaattggagctccccgcggtggcggccgaggtactagtgtgatctcacttatgctgtggttgcaattttcatttagatgttagtaacctctaaatttgtgtttccagctcagacccccttcaaaacttcagacttctacagccagctgcctaataaatattttgctttgaagatctcataggcatcttaattttaaaatatataaattctaatttggttattggttctggaatttgattctctatccatatttctccaatctgtaattagtatcaacagaaacttgagaatttccccagacttatcttattaatcattaaattatttcattactttctatattcctgtggttactaagtctattaactattgcatcagaaaatattcaaatgtagcccctaatttgtaatcttaac

SEQ ID NO: 6278 - DNA, 764 bp, Homo sapiens
  misc_feature 22, 33, 36, 40, 46, 50, 53, 55, 62, 68, 70, 73, 81, 85, 90,92, 108, 113, 125, 127, 129, 143, 152, 197, 206, 210, 211,213, 224, 234, 240, 242, 250, 290, 296, 320, 326, 332, 336,348, 359, 361, 363, 364, 366, 368, 380, 386, 389, 393: n = A,T,C or G
  misc_feature 400, 418, 421, 425, 435, 452, 463, 474, 486, 490, 500, 539,544, 545, 554, 563, 574, 576, 607, 614, 617, 631, 637, 640,644, 646, 653, 654, 656, 667, 672, 684, 697, 715, 737, 760: n = A,T,C or G
cccacggcccaaaaataggggnccccaaggggnaanaccncggttnaaanaananagggggncccggncnggntttggccntggnggccngntttttatatcctccanttaangggggcctttcncngncaccccccctcttnggaaccggnaagggcccaatttctaaccataaaaaaataatttcggtaaccggnccttccaanaagnntnccaagtaaagngggttggggncccggnanaaaaaccnccccgggaaccaaaggggaaacctttaattaaaaaaaggnaatttnaccccaaggggggccggttttttncccccncccctngggnaaaagggccttnccccctttccngntnngncngcccttcctttnctcttnggntttnccccagnaacccccacctttgggcnccnggcntttttaaccnccggggggaaaataaanccacctttggntttcccccggnccccattttttnttcntttccccccntttttccggggggggtaaaaaagaccctgggttgggggncccgnnccctttttntttcctttnccaatttaaangnccatttccaaacctggcccctttggtttaanggggggnttnaaatttccctttcnaagganttntttncnggggggnntnggatttaaagnggggntttcccggtttnttaccgggggccntttaccccaaaaaaggtncctttggggggggggccctttnggtgttgggtttgggcccaaccnggga

SEQ ID NO: 6279 - DNA, 491 bp, Homo sapiens
  misc_feature 18, 152, 158, 172, 204, 207, 219, 240, 245, 260, 264, 270,277, 288, 299, 301, 303, 312, 314, 315, 339, 354, 361, 369,372, 378, 384, 406, 413, 423, 435, 438, 445, 458, 461, 481: n = A,T,C or G
aggtacagaaaatatgtnttccttcaaaaatttctgggatccttccctctgggaaatgggtaactctgagtccattccccactaaacaggaccataaacggcagcatgagtcagcataccaccaccaatatttattacccaaagtcaatctngaaagnaatcgggcacaagngtcatgggccttatcccaggttttatcagagnaanaattcatgtaancccacttacataaacttcacnccttncactcccattagtcncaanagctanaaggganatctaaacagnggcttaattangncnttccaaagncnntattgataccaatcgggcctaacnttaatcatccgctancaaattnctttgtanagnaaaatnaagatncctccaaaacaggtccaacaanaagattnggggccaatnggaatggccaanttntttaagnggttcctaaaaanccnttttaactccaaggaaaaanaaaaaaaaac

SEQ ID NO: 6280 - DNA, 421 bp, Homo sapiens
  misc_feature 276, 344, 353, 404: n = A,T,C or G
tacttagggcgaattggagctccccgcggtggccaggtactagctcctgtcctgctgtctcaggacctttcagttcaagcatcctcctaacctgagtctctgtgtctcttacctcaaattctctctctcaaaaaaaaaaaggtgggggggattggctgggccagaatttggcccaaagccaccactggtctgtggtgaccaggagcaatacccatatgatttcccagggccccaccctttcagcaagaggctggaatttggggggagggtcgtgangtttcctactaactggccattagctggatcatcatttccaaaggaatctaatacaataatgtccacanaaaagcagngaagggatacagagaccacaaaatagatccacaaccatgggacagagtgtncattggcctcccaacag

SEQ ID NO: 6281 - DNA, 451 bp, Homo sapiens
  misc_feature 77: n = A,T,C or G
cttagggcgaattggagctccccgcggtggcgcgtggtcgcggccgaggtaccattcttatctcagaatgctgtaanccatcagtagaagcagtttagatttggactgcatgataaaatgaaaagtaataaccctccaaccacaacctagtcagggtattaataattatatgtagcaagaaaacaaagaagaaaataatattgaaaaaatggagattccccaaccagtttcatatttgaaggatctgagttgtatttttattaaggaaatttttttctgaatactgtcttctaaaatgttaacattaaaatctgaatcagaggactctgaatggaaaagaagttttgatcactgacacctagggctctgaagcatgtgtggccacatggaaaagtcgaaggatgcgctgtcgaatctcctttgtcttcactccatagacaattgggttgag

SEQ ID NO: 6282 - DNA, 229 bp, Homo sapiens
  misc_feature 17, 21, 44, 59, 67, 74, 78, 176, 187: n = A,T,C or G
ccggagcttttttgggnaaangccggcgcgcagccgctggccgntggtgaccaagcganttcgtcgnccagccnttcnatgcggcccgagaccgcccagcgccacaggtcggcattcggcagcccggtgagctcgctctggacgaagggctggcggcggtccaactggatgcgggntcaccggcgcngccagcccatgccgggcacgccggttgtggatgtagtccggc

SEQ ID NO: 6283 - DNA, 273 bp, Homo sapiens
  misc_feature 15, 25, 31, 48, 52, 59, 61, 64, 101, 111, 125, 159, 171,184, 221, 229, 239, 242: n = A,T,C or G
cgctcttccgctttnctcgctcacntgaacntcgcctgcgctccggancgtntcggctncnggncgtagcgggttattcagcttcacctcaaaaaggacgnttaattaccngtttatcccaccangatatcaagtgggcattaatcgccaggtaatagnaaccattggtgnagtcaaaaaaggncccagtcaaaaaagggcccaggggaaaccccggtaanaataaagngctcgcggtntgncttgggcgttttttttcccattaagggcttc

SEQ ID NO: 6284 - DNA, 361 bp, Homo sapiens
ccgggcaggtacttcagaaggatggaagctgaattcagaagggaggaatgagaaggaaaagttgctaagaaatcgataaacacatagataaatctaaattaagcatagccattaaaaatcagtaacaacaatgatatgaggatgattaactgagatgactgaaagcaaggtgaagctaaaatataaaaaagtatgtaggatgagctggagggtgcatttacttgcatttctagcattggataggaggagattagagatgctgattggcattaaactcgagttaacactgcagacaaccagggatagtcgtatgtaacttctgagccagtagaacagaagtaacactgaagaaagttcagtg

SEQ ID NO: 6285 - DNA, 179 bp, Homo sapiens
  misc_feature 15, 18: n = A,T,C or G
cggcgaatttttctnccngcggcggcggccgaggtactaatattatctttgcctaattaaagggttgatatttaaaattaaataggaaaaacagggtccatatgctgtgaaaactctcagaacagtgtgtcaactttcattaacgtaggtaaatgtacgcggggctttctggtctcggc

SEQ ID NO: 6286 - DNA, 477 bp, Homo sapiens
  misc_feature 15: n = A,T,C or G
tagggcgaattgganctccccgcggtggcggccgcccgggcaggtaccaaagtttgttaaaacacccagagagaagacgatgcttgagtaaatgtcttgctttcttgaaccctcaatcaacacatttaagccatttggtatatggagaactgccatagtgccagacaattgaataattctgctggattctgttggaacactgtcttgtcttcaagagaagactgaagatttctgaagtcatgaatcacctttattgcttgtcctctcgaaaattatacattcttcccctctgacttaaccaaatagaatgttgtcacgtgacttttttcctacatttcacaaataaatgttgcaaatcacagacagttctctagaaagtgaaagacatgtattttgcaataatacagtgatttttgtctctattattcaggatgattgatgtagatgtaatcagtctgtctcttagatattggtaaa

SEQ ID NO: 6287 - DNA, 312 bp, Homo sapiens
  misc_feature 27, 48, 79, 139, 149, 155, 233, 241, 285: n = A,T,C or G
aggtacacactgggtctccaggcagcngccgtcgccgcatccccggcngcagctccaggcaaagtgacaggaaaagacnatttctctctgattcacaatcctgaaaatgtgatctcccttaaaaagaggacagtgctgntgtgagtttnacgaantggacatcacctgcagtcagtccagagctgcccagtcttgaatataatcatggccaaaccttatgaatttaactggcngaaggaanttccctcctttttgcaagaaggaacagtttttgacagataccangaggaatcctttgtgtttgaacccaac

SEQ ID NO: 6288 - DNA, 203 bp, Homo sapiens
cactacttagggcgaattggagctccccgcggtggctgcccagcagcccatcactgtgtctttcacccctagggctcacagtgacattttctggccccatcagggtgtgctgcacacctgtgtggagtctttgccaggtgagctctccccatcccatccctgccttcatcaataaaaggctgagtcagggaaagggagtacct

SEQ ID NO: 6289 - DNA, 337 bp, Homo sapiens
aggtactctacggtgtcaataattatttcagtctctgctgcaattagtgctaattacaatacctgagctataaaaataaaagatttcattatagcaaagttcacaaatatcgttttagttcagttatccacattgttcatctaaaataatacattttctttacatataactgtcttagacttgtaattgaggatatttgatgaaacagatctgtatctgaaacagcactatgatgctaaacatttgcataaggaatgaaaaaagttagcaacctagttttttcaatattcagatatttgagattacacagaaaactacatccagatgaatgactgaa

SEQ ID NO: 6290 - DNA, 446 bp, Homo sapiens
  misc_feature 326, 405: n = A,T,C or G
ctatagggcgattggagctccccgcggtggcggccgaggtactttagtgtattgttcccttgctccacccttctatccccttatctaaatggagttactgttgcttcgtgtttttttaacccttccaattccagtccttgctttcctgagtttaaaatttatcctgggaaagaaatatattaaaataattgtggcaaacaattatactttgcttttaagaatgaattttttttgtaatatattaattctgatatcctttaagttaagtaaatgcacagccagtttatacatcttcattgctcattttgttggtttaagatacattngaaagaatattttatttcctaaaaattttatttcctgcataatccttctctaagaatctctggctagcaaaacatttgnttatatatgccataggtttaccaccttattagaagtaaaaa

SEQ ID NO: 6291 - DNA, 410 bp, Homo sapiens
  misc_feature 31, 64, 316, 368: n = A,T,C or G
gtggcggccgaggtacatagaatatgaacanagcacacacatgagagacgcaagtgccaaatgncttggcctgggcttcacgtgtcaagcccaacacagtcttaagaataagcagatatgagaaggagatgagaagtgagtccaggccaatggcggagatgatgacgataaggccatagacgacattgacccggatatcatcacaggccagcttcatgacatcttggtgtaggcagtaggaatgggaaaggatattggagcggcagaagggcagctgcttgatgaaaacaggaaggggtgccatcaagtgcagccncccgcaccacaagcagccacaccaattttggtgacacgaggcaacgtaagtnctgcccgggcgggccgctctaaactagtggatcccccgggct

SEQ ID NO: 6292 - DNA, 185 bp, Homo sapiens
  misc_feature 172: n = A,T,C or G
aggtacacttttcatactaagaactagatcaatgtctttaattccttaaatgtcattagctcaagtttgaacagaaacatattacattactttttttttaaccaaaaggcttcattcatttaataaaacaagaacttacattttatttccttgaacggacagagaaataccnttcatttatcaag

SEQ ID NO: 6293 - DNA, 302 bp, Homo sapiens
atacttagggcgaattggagctccccgcggtggcggccgaggtacaattttatcattcagctctatgaatctgcttaactatttcccaattagaggaagttgcagacacaggttacggcatagggcaaaaaggttgctgcctaattgaaaaaagatgctgtccagggacctataaatagctctttaaaaacctccacctttgctatcattttcattcaatttatgacttttaaaactgcagttccaaaactgggtgccagagtgccttggggcactaccatgaattccccgcgtcctgcccg

SEQ ID NO: 6294 - DNA, 428 bp, Homo sapiens
  misc_feature 52, 65, 75, 87, 93, 94, 199, 231, 256, 259, 275, 355, 399,400, 414, 415, 420: n = A,T,C or G
actacttagggcgaattggagctccccgcggtggcggccgcccgggccggtnccattcttatctnataatgctgnaaaccatcagtngaagcnntttatatttggactgcatggtaaaatgaaaagtaataaccctccaaccacaacctagtcagggtattaataattatatgttgcaagaaaacaaagaagaaaatanttatttgaaaaaaatggagattccccaccagnttcatatttgaaggatctgagttgnatntttattaaggaaattntttttctgaatactgtcttccaaaatgtgaacattaaaatctgaatcagaggactctgaatggaaaagaagtttgatcantgacacctagggctctgaagcgtgtgtggccacatggaaaagtnnaaggatgcgctgcnnaattntcctttgt

SEQ ID NO: 6295 - DNA, 203 bp, Homo sapiens
aggtacttggcagcttcgggcctctgcatgtgctttttcctttaggtctcactttggagactgccctccaccccaaccccactgcattatgaggggccactttttttcacagttctggtgaccctgtagtttcttgtttctgatcattaccaactgcctgtgagctctttgcagacctgagtggtctcacttgtacctgcccg

SEQ ID NO: 6296 - DNA, 408 bp, Homo sapiens
ccgcggtggcggccgaggtacatagaatatgaacacagcacacacatgagagacgcaagtgccaaatgccttggcctgggcttcacgtgtcaagcccaacacagtcttaagaataagcagatatgagaaggagatgagaagtgagtccaggccaatggcggagatgatgacgatatggccatagacgacattgacccggatatcatcacaggccagcttcatgacatcttggtgtaggcagtaggaatgggaaaggatattggagcggcagaagggcagctgcttgatgaagacaggaaggggtgccatcagtgcagccccccgcaccacagcagccacaccaattttggtgacacgaggcaacgtaaggtacctgcccgggcggccgctctagaactaggtgggatc

SEQ ID NO: 6297 - DNA, 910 bp, Homo sapiens
  misc_feature 14, 40, 49, 58, 75, 81, 91, 105, 112, 149, 158, 164, 166,173, 175, 193, 198, 214, 240, 285, 287, 294, 297, 301, 306,311, 316, 328, 333, 340, 415, 420, 425, 448, 458, 474, 516,519, 522, 532, 550, 553, 571, 578, 592, 652, 664, 672: n = A,T,C or G
  misc_feature 683, 710, 715, 729, 730, 733, 741, 750, 756, 780, 786, 794,820, 822, 850, 873, 876, 903: n = A,T,C or G
accttcaaccttantaaagggtgccggaaaattctggggnaaagccctncccaaaccncgggtccgggttggggncggggnccccgaaggngttaacctttaaanagggttncaaaaaaacaagaaaggggggaacaaaggcccaccantggaaacancgaggntntcaaggncnaagaaacacccagggggnggccnaagaagggaaagtttnttcattaaagacccaccaaagggaangtccttgggggggaaatttttgggaaaaggggggaacttccaaananggaaggnggnaccnaaggntgggnaattnggggcttccaanccttntaaaaangtttgggtttggaaaaaatttttttgggggaaaggttaaattggcccaacccccaaaaaaccttttggaaaaaanggggnttaanccccttttggcccccccgggggngcccggggcnccgttctttttttaanaaaaaacctttaagtttgggggaaattccccccccccggggnggnccnttgggccaanggggaaaaatttttcccnaanttaattccaaaaaggccnttttaanttcccggaattaanccccggttccggaaacccccttttccgaaagggggggggggggggggccccccccggggntttaaccccccncaaagacnttttttttttngggtattcccccccttttttttaaagnttggnaaaggggggggttnnttnaaaaattnttggccccnccccgncccttttttgggggccccggtatnaaaaanttcccaantttggggggatttccaattaaagggncntttgggtttttttcccctttgggttggntattggaaaaaaaaatttttggnttntaaatttcccccgggcttttccaaccnaaaaatt

SEQ ID NO: 6298 - DNA, 385 bp, Homo sapiens
  misc_feature 32, 71, 85, 89, 98, 112, 120, 125, 133, 154, 173, 209, 301,307, 324, 337, 342, 362, 375: n = A,T,C or G
tcttcccgcttcctcgctcacctgacttcgcntgccgcttcggtcgttccggcctgcggccggagccggtnattcaaggctcacntcanaaggggcgngttaaataacgggntttattcncaacnaggaatcnaggggggaataaaccgccagngaaaagcaaccaatgttgnagcacaaaagggcccaagccaaaaaagggcccacgngaaaccccgttaaaaaaaagggcccgccggttttggccttgggccgttttttttttcccaattaagggccttccccgcccccccccccttgnaaccgnaggcccatttcaaccanaaaaaaattccgnaccgnccttccaaaagtttccaagnaaggggttggggncggaaaaaaa

SEQ ID NO: 6299 - DNA, 349 bp, Homo sapiens
  misc_feature 25, 30, 51, 73, 84, 92, 97, 105, 114, 117, 120, 138, 143,157, 169, 173, 182, 187, 190, 194, 196, 215, 235, 249, 258,262, 270, 275, 281, 282, 283, 286, 289, 291, 310, 320, 327,331, 336: n = A,T,C or G
aacgttcggctgcggcgagcggganatcangctcactcataagggcgaganaatacggggttatccacaaganatacaggaggnataactgncaggnaaaagaancatgtttgnagncanaaaagggccagtcaatanagggncacggtaaacccgnttacaaataggncccnccgtatgcntgggncgntctntnacccattaagggcatccgnccccccccatggaccgaagncaattctaccaaanaaaattccngaanggccttcnaaaanatccannnagnggngnggccggaaaaaacccccgnaaccaggggnaccttantaanaaagnaaataaccccaag

SEQ ID NO: 6300 - DNA, 411 bp, Homo sapiens
ccgcggtggccaggtactagctcctgtcctgctgtctcaggacctttcagttcaagcatcctcctaacctgagtctctgtgtctcttacctcaaattctctctctcaaaaaaaaaaaggtgggggggattggctgggccagaatttggcccaaagccaccactggtctgtggtgaccaggagcaataccatatgatttcccaggccccaccctttcagcaagaggctggaatttggggggagggtcgtgatgtttcctactaactggccattagctggatcatcatttccaaaggaatctaatacaataatgtccacaaaaagcagtgaaggatacagagaccacaaaatagatccacaacatgggacagagttgtcattggcctcccaacagtttcacaggaaccccttg

SEQ ID NO: 6301 - DNA, 435 bp, Homo sapiens
  misc_feature 3, 26, 27, 39, 46, 60, 62: n = A,T,C or G
gtnccggccgcccgggcaggtacttnnggcaagagatcntttgccnaactgatttctctngntttcttgcaagatgaaaggagacaaccatgaatgagccactagactatttagcaaatgcttctgatttccccgattatgcagctgctttttggaaattgcactgatgaaaacatcccactcaagatgcactacctccctgttatttatggcattatcttcctcgtgggatttccaggcaatgcagtagtgatatccacttacattttcaaaatgagaccttggaagagcagcaccatcattatgctgaacctggcctgcacagatctgctgtatctgaccagcctccccttcctgattcactactatgccagtggcgaaaactggatctttggagatttcatgtgtaagtttatcccgcttcagcttccattt

SEQ ID NO: 6302 - DNA, 350 bp, Homo sapiens
  misc_feature 14, 34, 54, 62, 78, 130, 142, 180, 190, 194, 207, 209, 219,230, 231, 274, 281, 308, 326, 328: n = A,T,C or G
agggaaagtaacantgtggagcaaaaagggccangcaaaaaggctcaggcaacncgtaaaanaagggcccgcgttgcntggacgcttttttccattaggtctccgcccccctctgtacggaggcattcancaaaataatcgnacggcttccaagttcaagaagtgttgggcggaaatacncccggaccangggnacttattaaaagnanaacccagggncggtttttccnnccttggggaaggcttctcccttcggtggccgcctccttccctngttttcncggaaccccctggccccgcctttaacncggggataacccctggtncnccgccccttttttcttccccct

SEQ ID NO: 6303 - DNA, 362 bp, Homo sapiens
  misc_feature 352: n = A,T,C or G
gagctccccgcggtggcggccgaggtcttgagttttcctgagccaccttttctaaattagtgtcatttgtaatatcaataacacattttggtgtgggtggtctggatacaaacttctcctttggtagcaattccatggtatgtgttttatccatattgcattcctgaggaagtaaatcattagaattatgatcagaaactgtggactggttctgacgaatgaataatcatatcttcttgaagctgagtgtcaacagacttccgcttctctgcttcttcatgttttttatcttcctgtattttgatcccagggaggctggctattttttaggggtctcttctcctgccttctnattattatgg

SEQ ID NO: 6304 - DNA, 520 bp, Homo sapiens
  misc_feature 8, 179, 229, 236, 253, 261, 279, 281, 287, 293, 294, 305,311, 313, 315, 327, 334, 341, 343, 344, 345, 346, 349, 351,352, 353, 363, 366, 367, 372, 374, 376, 378, 381, 382, 383,384, 385, 388, 389, 394, 398, 444, 446, 452, 454, 456: n = A,T,C or G
  misc_feature 458, 459, 460, 462, 464, 467, 468, 477, 484, 496, 509, 514,516: n = A,T,C or G
tactactnctatagggcgaattggagctccccgcggtggcggccgaggtactccgttgctgggtttggacaatgaacatgggattagtcccaagtttgtagcttggaacggtagcatttttgcctgcgtgatccttgtcagctattcacagaaggaaatcttccgaaactccgtctttnatttcagccggtgaggctgttatccttctctgtcaattagcattcatgtnggttttngctctttccagctctgnaacttttngtttttaatttaaaaaantncccccncttttnngtttttatgcncttttncnanttttttttatanaattcanggggggntnnnnaangnnngcccccttanatnngtggnangnantannnnntcnnccccncaanaaaaaaaaaaaaaaaacttttttttttttttttttttataaaaaananaaaaanancncnnncngnccnnaccccctantataaanttttttatattntctcccccccctnggggngngggg

SEQ ID NO: 6305 - DNA, 420 bp, Homo sapiens
  misc_feature 90, 333, 391: n = A,T,C or G
atccggcgaattggagcttcccgcggtggcggcccgaggtacataaaggtcacccgaggacagttctggtggaatgatgagggcagaagnttcattggcatgggttcgagagagaaatgaaagaggattgaagacagtgagtatagacagctcaggaagtttagctgtgtaagtgaacacaagatgagtggtcactagaaggagaggtgagccaagagggaatgatgggagaagttataatatgttgatggtcaagatagaatgactgattaaaggggaattgctggggctctgttcctgagtaggcaagagcaggtgagatagaagacatangtggagggattggccctaaatacatgcgtggacagatcctccttatgaaaaaaagaangcaaagtgtatgaactcacacagtagtag

SEQ ID NO: 6306 - DNA, 141 bp, Homo sapiens
ctaacttcacattaatttgccgtttgccgcctcacctgccccgctttccagttcggggaaacctggtcgttgcccagcctggcattaaatgaaaatccggccaaacgccgccgggggaggaggccggttttgcgtaattgg

SEQ ID NO: 6307 - DNA, 648 bp, Homo sapiens
  misc_feature 17, 18, 39, 44, 143, 204, 219, 239, 243, 267, 272, 285, 286,298, 311, 322, 323, 330, 336, 342, 348, 363, 367, 368, 369,371, 373, 381, 391, 394, 399, 401, 411, 422, 441, 443, 456,463, 468, 480, 490, 491, 505, 509, 514, 531, 534: n = A,T,C or G
  misc_feature 537, 542, 551, 585, 586, 608, 615, 618, 621, 624, 631: n = A,T,C or G
cgcggtgggcggcccgnnctggggcctcgggactaacangcggntttaatttgctgggcaggtcatgtggaaggtgctcctcccttcaacccagttaattcaatctctctgaagactttgttaggtgtaaaaatgttaatcanaaataattataacaacactagtttatttacagttcctcgggcccgctcttaggaaactagntgggaatcccccccnggcctgcaaggaaattttcnaatnatacacagcctttaattcggatancccgntactgaacccctnngaaggggggggngggccccccgggntgaccccccanngcattantattgnttttcncccttntttaaggatggaaangggnnntnanaatattgnctgccagccntcnggggncngttaaaatancaaattggggntgcaaataaaggccttggntntattccccttggntggttgnaaaanaatattgggtantaattccccnnccttcaacccaaantttncccancaaccaaaaccaattanccnganggtcnccggggggnaaggcccaattaaaaaagggttgggtaataaaanngcccctgggggggggtagggcnccttaanatnggnagnttgggangccttaaaccttccaac

SEQ ID NO: 6308 - DNA, 164 bp, Homo sapiens
  misc_feature 2, 5, 12, 15, 19, 21, 55, 60, 63, 64, 66, 70, 73, 75, 115,116, 122, 142, 145, 150, 164: n = A,T,C or G
angtnctgggtnatntatnancctctccctgtgcctgaaggggcttgggagggantgacnttnnangaanaangncccaaaacatttacgcacctcctccgatttataactaaannaacctncgagctgcagtgaatgggtntantcaancttatctgataccn

SEQ ID NO: 6309 - DNA, 415 bp, Homo sapiens
  misc_feature 3: n = A,T,C or G
ctncttagggcgaattggagctccccgcggtggcggccgaggtacttcttggatcttacataggcctgaaagtttagttgcactactttaggaatctctttttatgcatttgttcaattaaaaggcaacaaagacaaatccttaagaaaataccagtatttttcctcatatgaaaatcaagggtccttgtctgacgatggattttactagttacgagaatcttcctatatttctagttgaatccctgtcatttcctgtaatagacttatattttaccagcagcccttatgcgatttctttgtgaaaaatatttctctgtatagaggaaagtttatcatttggaatgttaaatgcaattatatttgacatatggtgataatgggacaaagcatacgggttaaaggttgcaggaacc

SEQ ID NO: 6310 - DNA, 446 bp, Homo sapiens
  misc_feature 433: n = A,T,C or G
gactcctatagggcgaattggagctccccgcggtggcggccgaggtacagacaataagagagagaacctcaatgaggtagtatcggccttaacagcacaacaaatgcgttttgaacctgataacaaaaacactcaacgtaaagacccctattatggagcagactggggaatagggtggtggacagctgtagtgataatgttgatagtaggtataataacaccagtgttttatttgttgtattatgaaattttagctaaggtggatgttagtcatcattcaacagtggactcttcacatttacattcaaaaatcacacccccatcacagcagagagaaatggaaaatggaattgtgccaactaaaggaatacattttcagccaacaagatgatcattaaaactgtattagtcaagattctcagtcacctgctgnctcaacagggaaa

SEQ ID NO: 6311 - DNA, 390 bp, Homo sapiens
aggtacgtaactgtaagaggactgaaagttccagactgtataaagccatcttaccgctctatgatggctcttcaggaggaaaaaggtaaaccagtgcattgtgaacgtcaccatgagtcaagctcagtagacacagaacctggattagaagagtcaaaggaagtaataaagtggaaacgactccctgggcaggcttgccgtatcccaaacaaacacctcttctcactaaatgcaggagaacgaggatgtttttgtcttgatttctcccacaatggaagaatattagcagcagcttgtgccagccgggatggatatccaattattttatatgaaattccttctggacgtttcatgagagaattgtgtggccacctcaatatcatttatgat

SEQ ID NO: 6312 - DNA, 423 bp, Homo sapiens
atagggcgaattggagctccccgcggtggccgagcggccgcccgggcaggtacataaaaacaatcacatacaattaatgctggattgttcccacaattttttgatcaagtaattatgaattaaaactctcagttttctaaaaacaatcacaaagacaattctgttaagatgaagacattattatggaaaaacaatctataattgtatgtgtaagatatatttgttgaatttattgaccttcataggtctaaaatttaggaaagtaatgtttttgaattgatcagcacagctaattaactaaattcacatacttaaaatttgaaaattctagcaaagatgtatataaaaaaacaattagacaatgtccagctgaattttaagaattatccaaaggtattgctaagaattttgtagatggggccc

SEQ ID NO: 6313 - DNA, 395 bp, Homo sapiens
  misc_feature 376, 377: n = A,T,C or G
ccgggcaggtaccaaatcttcagaatcttgacttaagaaagtcagaattggaaacagagctgttacaatggcaatgacgagctgctcagctcctgaaacaaattttctttgtcctacagcaacggatctgcaaattaattttctttctttgctggaatctgttaccttgcatccactcatgggcagtcacctagaggcttccccaccaccggcccagacacatctccttcattcttatgttgttttagaaatgtgcacggatgctttctttttaataaaaaaaaatataaacttagtctataacagatatgcacttgtaatgaaagttttattaaatggaaatataagtgagagaaaaaaaaaaaaaaaaaaaaanngagtccctcggccgcgac

SEQ ID NO: 6314 - DNA, 621 bp, Homo sapiens
  misc_feature 16, 49, 95, 99, 140, 146, 154, 159, 164, 179, 191, 192, 193,212, 220, 228, 237, 243, 269, 274, 305, 313, 327, 344, 376,381, 386, 404, 409, 443, 446, 448, 458, 475, 499, 532, 539,541, 549, 553, 558, 566, 569, 573, 580, 581: n = A,T,C or G
ctcacactcgcagcgnggggcggtggcgccggagcgctgacgcgcccantagtatatcattttcatattcatgtcgcatttattgtacttggttnggcnatataccaaatctctatcgtgtgacgccgtacaacaagtanacctcnttgtgtanggaanaggtncaatcgaacgaagtnacgcgcacactnnnaaatggccttataaaaaanggggaggnaattaaanccaaggccnttctgnaatggggtgccctttcttgggggccnaattngaaaccttgggaagaggaaaaacctttttcntcccccanagggaaaccccttnggggcctttccaaaggnttaaatttaaaataaaaacccaacctaacccnaatanggggnaattaaagaagggggaanaattnggaattaaaaagttgggaaatttgggttcccttnggncnttaaatgggnaaaaaccctttttttgngtaatttttttcaaaccccttacnttttcccccgggaaaaccccacctttgggaaanatttccncnttccaaangaantgggnccttttgnccnattngaaaaanngaaaaaaaagtttttcccccggggggggggttttaaaaag

SEQ ID NO: 6315 - DNA, 284 bp, Homo sapiens
tatagggcgaattgggagctccccgcggtggcggcccgcccgggcaggtactcttttcaaggctttacttccaatcttccccttaagtgctagtgtccagaggaaaaattatttcttctctgtagaagtcattttgaagacagtatttttctgagatccaatgtggttgggagttctgaagaggaagttatagttttaagctagattatctcattttattatattctgtgtttattttcctttgccgtgcttaggcctttggcaaatgttctctagatgtacct

SEQ ID NO: 6316 - DNA, 370 bp, Homo sapiens
  misc_feature 1, 230, 234, 333: n = A,T,C or G
nggcggccgccgggcaggtacactgcatgtgaaatgtggaaactctacagcatacacaccacagcttctctccagacaatcataactgacttttcacacacacaagcttcatagcatctcaactttgggccttgtcaaaattatacattttggacttttggggttgcttgtgaataaatgcttccatatcaaatttgttaaagttgggggtctgttgcattagaaataangatncctctataaaccagaaaagctgaaatgatttataaaaaacaaaaattaaaaaaggatgaaaaacttacctcattaacatcatccttgaaagggaagatncaaaaccatggtagagtaatcataccttccagtacct

SEQ ID NO: 6317 - DNA, 357 bp, Homo sapiens
  misc_feature 140, 326, 330, 332, 345: n = A,T,C or G
ccgcggtggcggccgatggtgaagcgcagcgtgtcgtccttgtcggtcgtggcctcgtacatcgcctgggcgatgcgcagggccgcggcaaaggcatccttgcgggcggcgcgcggcgtggtgccggcatgcgcctcctngcccacgatctcgacgatatagcggcggctgccctgaatggcggtgacgacaccgatcgtcttccgctcgttttccaatcgcggaccctgctcgatatgggcctcgacatagccgtcgagcgggaaaccgggcttgccgtcgcgcatcggcgccggagcgaccttcaaggtctcggccagggcgtncttnancgcgacgcccttncagtcctttacg

SEQ ID NO: 6318 - DNA, 275 bp, Homo sapiens
tcggatcggccgcccgcgtctcgcccaggacggcgacgatgccggggcaacgcagcccttcttccatggcccagaagaggtcctcgtcgcgccgcgccgtgaccatcagcaggcgggccggatcgaaccaggtcgaaagcgcaggggcatagggcagggcatcgaaaacgcccgtagggcggcggcaccacaggatcgttccgccggcccgctgggcgaagcgaccgatcacgtgcccggcaaaacccagggcggcgccgtcatgcgcggcgaca

SEQ ID NO: 6319 - DNA, 323 bp, Homo sapiens
aggtacttacgttgcctcgtgtcaccaaaattggtgtggctgctgtggtgcggggggctgcactgatggcaccccttcctgtcttcatcaagcagctgcccttctgccgctccaatatcctttcccattcctactgcctacaccaagatgtcatgaagctggcctgtgatgatatccgggtcaatgtcgtctatggccttatcgtcatcatctccgccattggcctggactcacttctcatctccttctcatatctgcttattcttaagactgtgttgggcttgacacgtgcagcccaggccaaggcatttggcacttgcgtc

SEQ ID NO: 6320 - DNA, 358 bp, Homo sapiens
  misc_feature 216, 223, 357: n = A,T,C or G
ggtggcggccgcccgggcaggtaccgatgaatcggaatttgtctaatgaggagttaacaaaatcaaagccatctgctccacccaatgaaaaaggaaccagtgatttacttgcttgggaccccctatttggaccatctcttgattcatcttttatcttcactaacttcatcatcatcagccaggcccacaactcctctttctgtaggcaccattgtnccacctncgaggcctgcttccagaccaaagcttacttcaggcaaactcagtgggattaatgaaatacccaggccattcagcccacctgtaacttccaacaccagcccaccttctgctgcaccattagcccgggcagaaagnt

SEQ ID NO: 6321 - DNA, 256 bp, Homo sapiens
  misc_feature 234: n = A,T,C or G
ccgggcatggtaccagtcaatgtgatgagttgagaaagtgaaataagattacaaatatgggaataaaattatcaacctacccagaactattacccaactgaaaaaggcgaaagaaattaacaacagcaaaacctttagaataattcagtaactggctagttacaaaatcaataaccaatcgccaagttaaactattatacaactacacactactctcttatgcagaggtaagantgaggtagattgatgtgtacct

SEQ ID NO: 6322 - DNA, 199 bp, Homo sapiens
actacttagggcgaattggagctccccgcggtggcggccggcttgccgatcgtgctgatcaggttgccgaagaagccgccttgcggggtcaactggccttgttgctgttgcatctgctgcatctgctgcaattgctggagctgctgcagctcttgcagttgttgcgggtccagttgcgcgccgaggccgcccgacggat

SEQ ID NO: 6323 - DNA, 462 bp, Homo sapiens
  misc_feature 34: n = A,T,C or G
ctcctatagggcgaatcggagctccccgcggcgngctgccggctttcttctcatagttgtaagatggctgcctcataagataatatctcaagacagaaaggaagggtcattccctttcatgcattgctcttttgatttgcaaaaacatccctgagaagctccccagccagcatactctcgtgctccattgtctagaactggcttacttgcccaccagcaaaccagtcactggaaaatgggaatgggattgccatgatgggtttagaccaatagtggttcagctcttgggctggacctgccttttccgagcactttgctgcctgcctgatacctgagtaaaatcagggctctctcaggaagaaagatgggggaaatggctcttggtcaaataaccagttcttttatctttataataaccagtttttttagatgaattaacccgagtttccagaataactgggt

SEQ ID NO: 6324 - DNA, 322 bp, Homo sapiens
  misc_feature 24, 29, 32, 35, 40, 44, 55, 65, 71, 73, 116: n = A,T,C or G
ccgcggtggcggccgaggtacacnttatnatnctnataancaanaaatacacctntatccattgnccagantncccaaagaacacctttaatggttggtgaaaaatctggaatctnataggtagcggcattgactggacagtaaacaaatccatcactttttttatcaatggaaaactaatctgggtcccatttgggtcgggaaaaatctttttcacactgacaggatgtcgataatcattaacgaattgccagtcttcaatgtagaaatactgaacgacaccagtatctgtacctgcccgggccggccgctctagaactag

SEQ ID NO: 6325 - DNA, 176 bp, Homo sapiens
ccgcggtggcggccgtccggccctggcgatgcgccaggcggcctgacgccgacgattcgtgtcttcgtttgacgccgggctggtcccggcgtttttttatggcgtgaccggatcgaccggctcatagccggccgcgcggcggctcgagcgcgccagggtccaggcgaagccgatgc

SEQ ID NO: 6326 - DNA, 184 bp, Homo sapiens
ccgcggtggcggccgaggtacatccaatacccgaaagcacaagattagaagtctccaatgattcttgtttagcttcttccccagttacctcattattgtaagaacagatgaaattctggtcttcttgggtgtctggatcacactctcttgcaaaagtttttttctgttcattttgtcctgcccg

SEQ ID NO: 6327 - DNA, 251 bp, Homo sapiens
  misc_feature 2, 227: n = A,T,C or G
tncttagggcgaattggagctccccgcggtggcggccgaggtacatcaccctgctgagggacatccaggacaaggtcaccacactctacaaaggcagtcaactacatgacacattccgcttctgcctggtcaccaacttgacgatggactccgtgttggtcactgtcaaggcattgttctcctccaatttggaccccagcctggtggagcaagtctttctagataanaccctgaatgcctcattccattgg

SEQ ID NO: 6328 - DNA, 360 bp, Homo sapiens
  misc_feature 346: n = A,T,C or G
cggccgcccgggcaggtacttatgtatttcacgccctttaatttcaaaggccccaaccctacaaggtatagatcaactttgcctattttttagtgtggaaactgaggtttagagaggcctataaaatttgtctacagttccatagccataagcgtctgattgataaagcaaacccaagttctttgtagaagagctgttatactgcctttagtgtgtaactacttcatgaactcagagtccattatgattgtgtaaggtatgacagtttggcatttctaccaagaaatgaaggcttgaatggggcagaatgacagcacttggtggttaggaagagaagaaagttttnggataatgggataa

SEQ ID NO: 6329 - DNA, 347 bp, Homo sapiens
ccgggcaggtacatagaatatgaacacagcacacacatgagagacgcaagtgccaaatgccttggcctgggcttcacgtgtcaagcccaacacagtcttaagaataagcagatatgagaaggagatgagaagtgagtccaggccaatggcggagatgatgacgataaggccatagacgacattgacccggatatcatcacaggccagcttcatgacatcttggtgtaggcagtaggaatgggaaaggatattggagcggcagaagggcagctgcttgatgaagacaggaaggggtgccatcagtgcagccccccgcaccacagcagccacaccaattttggtgacac

SEQ ID NO: 6330 - DNA, 111 bp, Homo sapiens
aaaggagaacgtcacaaggcatggtaaggttgaactgcttggccgggaggtaggtcagaggcaggtgggagaatagggcctgagtctcctattttctacctatttgtacct

SEQ ID NO: 6331 - DNA, 342 bp, Homo sapiens
  misc_feature 3, 73, 100, 156, 231: n = A,T,C or G
ctncttagggcgaattggagctccccgcggtggcggccgaggtactttttttttttttttttttttttttttnggcccatcattctcttactcaattctnttgccttctttcctaaggggaggttttaccaaggacaacatatttcccacacactntacttattcccaatgacagggcagttgcccctggatgaggctccctgaaggctttattaaaagcttgggaatttntgatctgaacaattacaacctgatggtgttttacgaccagaagagaggataaaccatagtccattccatgatatttcaatcttgcatctctcctctagctgttcttatgct

SEQ ID NO: 6332 - DNA, 256 bp, Homo sapiens
ggcgaattggagctccccgcggtggcggccgtcggctcccagctactcacagagaacgtttctgtttctgacagcagagtaagagaagaggtgagaagagagacagcccattctcttttggcctaattcctaaggaatcatgcctctgccttcgggccattctcaagtcttgttcaaggataaaaatgatttattgatggccgtaattaaaaagcaatgccaacggaagcagcgtcagcatttttcatttgtacct

SEQ ID NO: 6333 - DNA, 366 bp, Homo sapiens
  misc_feature 235: n = A,T,C or G
ccgggctggtgcatagaatatgaacacagcacacacatgagagacgcaagtgccaaatgccttggcctgggcttcacgtgtcaagcccaacacagtcttaagaataagcagatatgagaaggagatgagaagtgagtccaggccaatggcggagatgatgacgataaggccatagacgacattgacccggatatcatcacaggccagcttcatgacatcttggtgtaggcagtangaatgggaaaggatattggagcggcagaagggcagctgcttgatgaagacaggaaggggtgccatcagtgcagccccccgcaccacagcagccacaccaattttggttgacacgaggcaacgtaagtacct

SEQ ID NO: 6334 - DNA, 294 bp, Homo sapiens
  misc_feature 28, 43, 53, 94, 109, 129, 174, 180: n = A,T,C or G
ccgcggtggcggccgaggtactcagaangtctttccccaactntgagattttnttaaaaatcctttgaggtttctccttgcatgtctatggttncatttctttctactncatcctctttaattcttcangaatttatcctgatgtgtgagataagaatcccactttcatttttntttaangcccgacagaattatatttaaaactagaacaaattcattttaaatccacatggggaaaatggcaagcaaaagaaaacaggaacattctgggggaaaaaaaggagtaaagggacc

SEQ ID NO: 6335 - DNA, 574 bp, Homo sapiens
  misc_feature 441, 514, 524: n = A,T,C or G
cgaggtacatgcccacgccagccacaccgaccaactggagggcagcccgagcaggcacggacacagctgtccagaccagggccaaccaacctgcaaacctgccacgtgaaaggagtgtcaggagaggagaaaggcacagctcccctgcagctgcacccctctgggtgcagttacggggctggctgatgagacagacaatgggtgtggcatgtgggtagtaaactgtctcatggtgtaaaaatgcttgtcacatttcatgtgaacagaatcaactaaaaagttctgccacaaatgtcataggaagaatgacaaaaaagaggttcagtgatccgcgtgcctataatcccgaggcatctacgtcactgagataagaaagggcagccggcatatcttccctcccacccctcatgtatctcttcccatcttgatttaaaacaaaanccagtgttagaggagactggagttttcagattggtggctttcttttttgctgccatttctattcctcaccaanaaaagaattnataaagctaatactggaaactttccaatttacaaacttcccagggtttgg

SEQ ID NO: 6336 - DNA, 487 bp, Homo sapiens
  misc_feature 4, 24, 241, 249, 288, 362, 380, 382, 388, 411: n = A,T,C or G
tccngaggtagctggagacaatanactgtcagggaaacgggaatctgaaacgcgtctgaactggttagatttgaaggcagtaaaggtctgccagcattgaaggatgagacactggcagtccacagtatctggtggtgaaagagatacttaaattatcccctgtgcttgtgggaaataaagtgcccatagaaggaaggctttggcaggctacatgtctactgtcgaggggcaaagtatggcnaaaatgangaagcacaattgactatggagtatgtcttggcttgtatncaactgtgttcaaaatcttaaagtcagaaaatgaaacactcaggactttttattctcacttatgacgtagtcantggaccaggtaacatttngnggcttntaaggctatcttattcgagcggnccgcccgggcaggacaacccttgaaaaagaggaggctggaccccttgtatagacttatgcaaagcttctgctttga

SEQ ID NO: 6337 - DNA, 320 bp, Homo sapiens
  misc_feature 269: n = A,T,C or G
aggtacttacgttgcctcgtgtcaccaaaattggtgtggctgctgtggtgcggggggctgcactgatggcaccccttcctgtcttcatcaagcagctgcccttctgccgctccaatatcctttcccattcctactgcctacaccaagatgtcatgaagctggcctgtgatgatatccgggtcaatgtcgtctatggccttatcgtcatcatctccgccattggtctggactcacttctcatctccttctcatatctgcttattcttaanactgtgttgggcttgacacgtgaaagcccaagccaaagcatttggcacttg

SEQ ID NO: 6338 - DNA, 696 bp, Homo sapiens
  misc_feature 533, 602, 609, 622: n = A,T,C or G
gatatctgcagaattcgcccttagcgtggtcgcggccgaggtacacagaaagggaggtgtcaacaaaagaagataagcccatacagtgcacacctcagaaagccaagccaatgcgggcagctgtgacctggggagggagaagatcctcaggccaccagtagaaaaatggaagagacaggatgacaaagacttaagagaaaaacgttgttttatttgtggaagagaagggcacattaaaaaggaatgcccacagtttaaaggctcttcaggtagcctttccagtaaatatatgactcagggaaaagcctcagcgaagaggacccagcaggaatcatgagggaaggaaaatgcagcactctaaatggccactcaggcgttcctattcactcggaaaattaggttcatttcacaggacacagcagtgtagatcaggcttcaacttaacatttaagggaaatgtcagattttttttttaatttaatgaaattggtaatgaggaaaaatttttaatatagtcttatctaccacacatncccatagatttaaggattttaatagaaagacatgatgtacgtatttaagccacgttaaaagaaaaaatntactatnggccggtattcantgaatacagttcatggttttaattctttcaaagcacattaaaaatggggtgctgataaaccccaagtaaattaa

SEQ ID NO: 6339 - DNA, 364 bp, Homo sapiens
aggtacatagaatatggacacagcacacacatgagagacgcaagtgccaaatgccttggcctgggcttcacgtgtcaagcccaacacagtcttaagaataagcagatatgagaaggagatgagaagtgagtccaggccaatggcggagatgatgacgataaggccatagacgacattgacccggatatcatcacaggccagcttcatgacatcttggtgtaggcagtaggaatgggaaaggatattggagcggcagaagggcagctgcttgatgaagacaggaaggggtgccatcagtgcagccccccgcaccacagcagccacaccaattttggtgacacgaggcaacgtaagtacctgcccg

SEQ ID NO: 6340 - DNA, 479 bp, Homo sapiens
  misc_feature 20, 27, 155, 160, 161, 394: n = A,T,C or G
cccgcggtggcggcacgcgntaccggnaagacaagatagggctacttaatgcaccacaagcattactgtcttcaaagtctccttcttcaagcagaaactgctggcctttaaaatgttctttttcataggcaacccacactccaccaatgacacgngctgnnccaattctgtgaaaatctccattatttttcaaaaaattaggaacagaatctatatgttcactaaactctttagcctgtccatggaagtgaggtttttcataaataataacctttaagttcatgggcatttccactttcagtccacccatttgaagtggatgtaatgatttcatttctgctgtagaaatctcaaagagcccatggtcttcctccagaactgtagcttggccctnaaaattaatatctgggtaggcaagccaaactcctgacttcacagtgaaggacacaaatttggagatattcagttcttccaaattg

SEQ ID NO: 6341 - DNA, 499 bp, Homo sapiens
  misc_feature 384, 487: n = A,T,C or G
ccgcggtggcggccgcccgggcaggtacacaggccgggcacagtggttcacacctgtaatcccaacactttgggaggctgaggcgggtggatcacaaggtcaggagatcgagaccatcctggccaacatggtgaaactctgtctctactaaaaaatcagaaaattagccagtcatggtggcacgttcctctagtcccagctactcgggaggctgaggcagaagaattacttcaacatgggatgtggaggttgcagtgagccgagatcgcgccactgcactccagcctggtgacagagcgagaccccatctcaaaaaaaaaaaaaagttgtatgtgacagctaaccataataaaaaaaaaagaaagaaaaaagagagagaaagtngggacaacactaaatcattagtaatttgagcacatttcctccaaggcatatgctatttttcaacttggtttcaatcatgtatctttattggttttcttaatgntataagcatgtt

SEQ ID NO: 6342 - DNA, 364 bp, Homo sapiens
  misc_feature 1, 2, 29, 38, 81, 83, 87, 106, 113, 131, 238, 245, 256, 274,281, 319, 327, 330, 351, 352, 364: n = A,T,C or G
nnaatacctgtccacctttctcccttaanaaaaacatnacactttcttcataacttcacacctgtaagtatctcaattcantntaantcatttcacttccaaactngaacctntatacaccaaaccccccnttcaacccaaccacttcaccttatccaataactatcatcttaaatccaacccaataaaacaccacttatccccttaccaacaaccacttattaacaaaattaaccanaccaaanttatttaaacnatactacaaaatttctanaaataantaacctaactacacttcacttaaaaaaacaatttttantttcttcnccnctattaaaccaattacctttnnaaaaaaaatttn

SEQ ID NO: 6343 - DNA, 184 bp, Homo sapiens
  misc_feature 2, 9, 24, 144, 177, 183: n = A,T,C or G
cnccgcggnggcggccgcaccgtntggatccccaagggagcgcaatggcgcacgctggacttcgaccgcaagcgccagggcgcctatggcgcgctgcagtggaagaaggacaataccctcaagagccacctgacctggttccgntccaaatacaatatgcgctgggacgagaacgcnctgttnt

SEQ ID NO: 6344 - DNA, 165 bp, Homo sapiens
actacttagggcgaattggagctccccgcggtggcggccgagtgtgaggcatttaagggtagtctgccagaacctctctgccttgggcagcccagaaggaccttgaagcacaagttcaccctgggacagaatataaccaagtgatagccactgacccaagtacct

SEQ ID NO: 6345 - DNA, 370 bp, Homo sapiens
ccgggcaggtacatactcccttaactattgccaagatccctatgaggcagcttcaattaatccccacaagtttccctattccagaacccctggcctgctcatgatcacagactctgccgccagaaaagaagactgttctcccagcctgggcagcatggcaataccccgtctctacaaaaaaatacaaaaattagccaggtgtggtggcacatgcctgtagtcccagctacttgggagactgaggtgggagaatcacttgagccccaggaggtggaggttgcagtgagtcaagatcgcaccactacactccagcctgggcaacagagtgagaccctatctcaggagggaaaaaaaaaaaaaaaaaagtcct

SEQ ID NO: 6346 - DNA, 386 bp, Homo sapiens
  misc_feature 366: n = A,T,C or G
ctacttagggcgaattggagctccccgcggtggcggccgaggtaccattcttatctcagaatgctgtaaaccatcagtagaagcagtttagatttggactgcatggtaaaatgaaaagtaataaccctccaaccacaacctagtcagggtattaataattatatgtagcaagaaaacaaagaagaaaataatattgaaaaaatggagattccccaaccagtttcatatttgaaggatctgagttgtatttttattaaggaaattttttttctgaatactgtcttccaaaatgttaacattaaaatctgaatcagaggactctgaatggaaaagaagtttgatcactgacacctagggctctgaagncgtgtgtggccacatggaaa

SEQ ID NO: 6347 - DNA, 432 bp, Homo sapiens
ccgcggtggcggccgaggtcccgaaaagaaaggaagctttagtaatgaaaggattgctgccaaaatcctgtttcccccttgcagatcttacagaaaacagccacagaatcccaaggcatcagcaccaagagagcctgtagaaactatctggctaagctcctgaagcccagagataagaatgacttaacccaagctgcacagcctcttaacagtccactgttaaccccagaaacagatgcatttgaatctgaaaggagacaggaatcctaatcctactgctcagggacttgctgatttactttgctgtctattagcctttctgtgacatgattttctaccaagcaaagtcttttattcaagtctcccagagatttcctatttaagcgtttgctatttggccacttaaaaaagacagaagagaagtaaacagaa

SEQ ID NO: 6348 - DNA, 247 bp, Homo sapiens
  misc_feature 1, 6, 27, 29, 64, 67, 81, 86, 89, 90, 91, 92, 94, 105, 112,117, 118, 135, 181, 192: n = A,T,C or G
nccggnccggtgcctttgtgtctagtnanaaccttttgatcccaggtcctgccatgaccttcancangggggccaggtctngagcntannnncncataggaccantgcacanaaacnnctcctgggctcccacangcaagggaaactgacctttgttgggaaccacacctggagaaggctngtgtccaaatntaccattgaagaaagcaggcattcgaatgctaccaccaatatcagagcccacacc

SEQ ID NO: 6349 - DNA, 237 bp, Homo sapiens
tctctgtcgataactgccgggctgtccaatctttcccctgatagaaaggcgcctgggggtcagcctgaagaagctctggagggaagaggcggctgtttgattcagagcctcctcgctgggctggaattaacctggctctttctctaatgaaactgactccaagggtccctgtgtgctagagattcaatggcccttaggagaagcaatgatgagaggtaatattaaagcagtgtacct

SEQ ID NO: 6350 - DNA, 645 bp, Homo sapiens
  misc_feature 9, 601: n = A,T,C or G
ccccgcggnggcggccgaggtccggaaagacaagatagggctacttaatgcaccacaagcattactgtcttcaaagtctccttcttcaagcagaaactgctggcctttaaaatgttctttttcataggcaacccacactccaccaatgacacgaattgatcaattctgtgaaaatctccattatttttcaaaaaattaggaacagaatctatatgttcactaaactctttagcctgtccatggaagtgaggtttttcataaataataacctttaagttcatgggcatttccactttcagtccacccatttgaagtggatgtaatgatttcatttctgctgtagaaatctcaaagagcccatggtcttcctccagaactgtagcttgtcccttaaaattaatatctggggtaggcaagccaaactcctgacttcacagtgaaggacacaagatttggagatattcagttcttccaaattggggactgctctctgtatgtagacaggacaacaggctgggtcagattgtgggaaaagctctatttctggaatgctgcagcctttaagacacgtttgagagaacccaatataaagtttctttgngggatgccttctgttctgaagaatccaggtcccgatttaaccac

SEQ ID NO: 6351 - DNA, 499 bp, Homo sapiens
ccctttcgagcggccgcccgggcaggtacaaccagaaccaacaattgtatttctctatagttattttaaaatagtaatcaatgctatgtatttgatgtatatgtttctaaattagaaatttcttttggctttgtgttttttttatgtgccgttaaatatgtaaactgaacctgttcctaaaatgcattaaacttgaatgctgtgtctatccaatgccaaaatgctcagaagaaaagtgaataattcagtcattcatctggatgtagttttctgtgtaatctcaaatatctgaatattgaaaaaactaggttgctaacttttttcattccttatgcgaatgtttagcatcatagtgctgtttcagatcagatctgtttcatcaaatatcctcaattacaagtctaagacagttatatgtaaagaaaatgtattattttagatgaacaatgtggataactgaactaaaacgatatttgtgaactttgctataatgaaatct

SEQ ID NO: 6352 - DNA, 412 bp, Homo sapiens
  misc_feature 2, 7: n = A,T,C or G
tngggcnattggagctccccgcggtggcggccgaggtactggtcacagcctgaagaccactgagagaaactttttcatgaatggtaaaatacatcacaaattaattctatattttgaaaagtgctacttcttatttgccataatgaatattatcattgatcttagttaaaatgtaaaaacacaatttaaaggaagcaaagaatgtgccaggcattttcatgtctattcatacattcattaataaacagaagcatgcataactatgatatagcaaaacaaagaaataattggtttaatgccacatgttgacctaaaatatttccgtaataaactatgacggtgaatcaccaatgaatctaccttgtcccagacccacagtgctgggctaacttatcacagttacttgctcaga

SEQ ID NO: 6353 - DNA, 389 bp, Homo sapiens
ccgcggtggcggccgaggtacttcttggatcttacataggcctgaaagtttagttgcactattttaggaatctctttttatgcatttgttcaattaaaaggcaacaaagacaaatccttaagaaaataccagtatttttcctacatatgaaatcaagggtccttgtctgacgatggattttactagttacgagaatcttcctatatttctagttgaatccctgtcatttcctgtaatagacttatattttaccagcagcccttatgcgatttctttgtgaaaaatatttctctgtatagaggaaagtttatcatttggaatgttaaatgcaattatattgacatatagtgataatgggacaaagcatacgggttaaaggttgcaggaac

SEQ ID NO: 6354 - DNA, 375 bp, Homo sapiens
  misc_feature 362: n = A,T,C or G
ccgcggtggcggccgaggtactgtatttttaaattaaggagttttagttataatgaaattgatttgtagtctgctttgccgtaaacttgtttttctttaaattgttcttacagtgatatcttactatttttaactgtctggggtttctgatatggggatttcagcccctggttaatcagtcttgtccctacaagtccctgatgcagtatgtttatttgtgatgtttaaagaacatttcttggctgggcgctgcggcttgcgcctgtaatctcagcactttgggaggctgaggtgggtggatcacctgaggttgggagttcgagaccagcctgacaaaacatagtgaaaccccgtctctactnaaaatacaaaaaa

SEQ ID NO: 6355 - DNA, 397 bp, Homo sapiens
ccgcggtggcggccgcccgggcaggtacgcgggatctctgggagacttgaataaaagactttgcttggtagaaaatcatgtcacagaaaggctaatagacagcaaagtaaatcagcaagtccctgagcagtaggattaggattcctgtctcctttcaaattcaaatgcatttgtttctggggttaacagtggactgttaagaggctgtgcagcttgggttaagtcattcttatctctgggcttcaggagcttagaccagatagtttctacaggctctcttggtgctgatgccttgggattctgtggctgttttctgtaagatctgcaagggggaaacaggattttggcagcaatcctttcattactaaagcttcctttcttttcgggtacctcggcc

SEQ ID NO: 6356 - DNA, 564 bp, Homo sapiens
  misc_feature 20, 33, 77, 89, 96, 100, 101, 107, 109, 114, 115, 126, 140,143, 186, 188, 199, 202, 206, 215, 217, 222, 231, 232, 267,287, 291, 293, 295, 301, 305, 307, 336, 338, 340, 355, 366,387, 402, 416, 420, 428, 429, 441, 442, 444, 446, 448: n = A,T,C or G
  misc_feature 479, 520, 531, 535, 553: n = A,T,C or G
caaccgtaaaaagggcccgngttgctgggccgnttttccataggggctccagcccccctgaccgaagccatcaccanaaaaaattccgnacggctnaaanntttaanangggtnngccgaaaaacncccgtaccaagggnacntaattaaaaagaataacccaagggccggttttcccccccttgngnaaaggccttcnccntacngttggccgncntactncacttggtnngcccgtaacccccttggcaccggcttttaccccgngtaattaaccccttggttcnccgncncntttttncctncnccctttcccggggggaaaaggccggttgngncnggccttttttccttnaattaaagacntccaaccggccttgggtaagngggttaattcccttncaagaatttaccgnggtngggtaaannggttacccgttnntncngnccttcccccaaaagggcccttgggggggccntgggttgattggccaacctgaaaaaccccccccccccgggntattcaaagtncccnccggaacccccggccttngccgggcccct

SEQ ID NO: 6357 - DNA, 582 bp, Homo sapiens
  misc_feature 185, 193, 200, 202, 204, 215, 329, 461, 476, 477, 479, 488,491, 493, 502, 506, 507, 508, 510, 511, 524, 525, 526, 530,547, 554, 556, 559, 566, 570, 571: n = A,T,C or G
ccgcggtggcggccgaggtactttttctttttttctttttttttgagatgtagtgtcgctctgtcatccaatctggaacgcagtggtgccatcttggctcactgcaacctccgcctcacaggttcaagcaattctcctgcctcagctcttggaaggctgaggcaggagaatggtgtgaaccctgnaggctgancttgcantnanccaaaatcatnccactgcactccaacctgacaatacaatgaaattccatctcaaaaaaataaaaataaataaaaatctacctgctactaatatatattataaaacctttatatatttctctaaanaaaaccaatactaaaactaacctttaaaacctaatatccaactttatttccaacacctctcccaacctaataatccttataaaaaaaactacctatccttacaccttaaaataaaaaaactttaatatctcnaataaaaacttaatnnanaaaaacatnaananaactacccntaannnannacaaacaaaattnnnactnccccaatcaaaatcatncactttnanaanacttttntacnncctaaaaaaaa

SEQ ID NO: 6358 - DNA, 622 bp, Homo sapiens
  misc_feature 491, 496, 519, 525, 539, 566, 580, 600, 604, 605, 610: n = A,T,C or G
aggtacattttaaaatgcgatttttccggagaatattgctctgtgctggatttttatttcttttacttaacagccaattttgaagttaattattttatttaaatactagaaaaagtagttaatgttgccaaatttaggagaaaaatctgtcaattaacatttagattatctgaagttatatttcttttcctagtgatagaggcactttttttaaactgtgaaaaggatgttgtagttgtgttcagccctttccaatttgatttattaaaggtttcctttcataatccaggaggggaagggtggaattactccagtatcacatctctctaataagaaaatttcagctgatttaggaatcttctccgcataaaagtaaaattttcttaaaaaatatcatcacttgttcttttagtgttttcctgttcccattgtgccaggcacacttgtttggctttggaaacttcgtggaatagtgaaaaaatgggtgttgnttcanattctaatgctgctacatgttanctttgngactttggataagngactttatcccctgacctttattttcntttgcttttaaaanggggaaaaggacatttagcntacnnattgncaggaaaatgaa

SEQ ID NO: 6359 - DNA, 625 bp, Homo sapiens
  misc_feature 454, 541: n = A,T,C or G
gatatctgcagaattcgccctttcgagcggcccgcccgggcaggtactccttccggatgtgcaaagcatactgatgaaacagagtatctgaaaagctgtccccaggaatcacgaaggctcagtcctgctgctataccattaaagaaacaaaaaacaaaagctgccctaaacatatgcagcgcgatcaatgcctcctgttgccccatatgttttacaatcatttgaaagaaatgtgcgaaaggcgcctaagctgtttttctttaaaaaaaaaaaaaaaaaagtgtattgctagtattgtctgagaacaagagagaaacagccaaatgggtcacaacattcagattaacagctatccagtggggacaaagacaaggttaatgtgagatttgacatcgttacctagccaagttgggggtttaattccttactgtccccactagaaactatggcttanatctgtcccggggagctggtcttcttggataaggcaactcaaccaggacacagtgggattgaacctactgctggttggttcttgcanagacccttaccctgaacaggagctgggtcaagcaagagaatgggaatcagtttcaaggagggagtgatggattcccaatgcttc

SEQ ID NO: 6360 - DNA, 185 bp, Homo sapiens
  misc_feature 11, 34, 132, 146, 149, 163: n = A,T,C or G
ccgggcaggtncaaagactattgtagagactatncgggttagtttgcaagggaagccaatgatgagtaatttgaaagaaattcacctggtgagcaatgaggaccttactgttgctgcctttaaagctgcttnagaattcatcctanggnagagtgagctgggnacaagaaaccaccccttctttc

SEQ ID NO: 6361 - DNA, 207 bp, Homo sapiens
ccgcggtggcggccggaatcgctgcaccagaccaggcccccagggcccagctactcgaagaacagccaatggattggaacgtcctaggacagatgccacggctttgacccaggctgggggtgcacggatctcactggggttagttggtcggaggggaaagccccatgggtccaccaggatgaggtgtttaactctatcagggtacct

SEQ ID NO: 6362 - DNA, 521 bp, Homo sapiens
gatatctgcagaattcgccctttcgagcggcccgcccgggcaggtacaaccagaaccagcaattgtatttctctatagttattttaaaatagtaatcaatgctatgtatttgatgtatatgtttctaaattagaaatttcttttggctttgtgttttttttatgtgcgttaaatatgtaaactgaacctgttcctaaaatgcattaaacttaaatgctgtgtctatccaatgccaaaatgctcagaagaaaagtgaataattcagtcattcatctggatgtagttttctgtgtaatctcaaatatctgaatattgaaaaaactaggttgctaacttttttcattccttatgcaaatgtttagcatcatagtgctgtttcagatacagatctgtttcatcaaatatcctcaattacaagtctaagacagttatatgtaaagaaaatgtattattttagatgaacaatgtggataactgaactaaaacgatatttgtgaactttgctataatgaaatctttta

SEQ ID NO: 6363 - DNA, 265 bp, Homo sapiens
  misc_feature 7: n = A,T,C or G
atcactncttagggcgaattggagctccccgcggtggcggccgaggtacctgaggtagctggagacaatagactgtcagggaaacgggaatctgaaacgcgtctgaactggttagatttgaaggcagtaaagtttctgccagcattgaaggatgagacactggcagtccacagtatctggtggtgaaagagatacttaaattatcccctgtgcttgtgggaaataaagtgcccattgaaggaaggctttggcaggctacatgtct

SEQ ID NO: 6364 - DNA, 363 bp, Homo sapiens
  misc_feature 93, 120, 204, 241, 274, 288, 305, 309, 322, 323, 337: n = A,T,C or G
agctcaccgcggtggcggccgcagcttctgctccgaccgctgctccgatcgtggcgccggtggcccaggccgccgaggaagcgccgaaagtcntgcgcacccgcgccgtgcgccgcgtcnagaccagcccggcagcccccgtgagcgccgtcggcgccgtcagcaagacaccgacgccgccgcgctggccgcgatcgacacctngggctacctgctgccgcaggtgaaggtcccgggccgncgcggccgcaagccgagcgagttcgtgccgganaacgatgaattcgnggcgctgaacgccgtcnagcngcgccgaactganngcggtctcaaagcncgcgagcgcaaggcaagggccttggc

SEQ ID NO: 6365 - DNA, 237 bp, Homo sapiens; identical to SEQ ID NO: 6349

SEQ ID NO: 6366 - DNA, 350 bp, Homo sapiens
aggtacttacgttgcctcgtgtcaccaaaattggtgtggctgctgtggtgcggggggctgcactgatggcaccccttcctgtcttcatcaagcagctgccgttctgccgctccaatatcctttcccattcctactgcctacaccaagatgtcatgaagctggcctgtgatgatatccgggtcaatgtcgtctatggccttatcgtcatcatctccgccattggcctggactcacttctcatctccttctcatatctgcttattcctaagactgtgttgggcttgacacgtgaagcccaggccaaggcatttggcacttgcgtctctcatgtgtgtgctgtgttcatattc

SEQ ID NO: 6367 - DNA, 211 bp, Homo sapiens
  misc_feature 201: n = A,T,C or G
ccgggcaggtacctatcaaactttacaatgttatttgtgtttccttctatttggtttagcaatttaaaatgtttatcgtgtaggtaattcctgagtgtgtgtttgttactatggcaggtttattttttttagcctgtaagtttgtgtcttaaatattatttagtatgccttagttgagatgatcttttgttgagtttttgnaaaaggcaaa

SEQ ID NO: 6368 - DNA, 407 bp, Homo sapiens
ccgcggtggcggccgaggtacatagaatatgaacacagcacacacatgagagacgcaagtgccaaatgccttggcctgggcttcacgtgtcaggcccaacacagtcttaagaataagcagatatgagaaggagatgagaagtgagtccaggccaatggcggagatgatgacgataaggccatagacgacattgacccggatatcatcacaggccagcttcatgacatcttggtgtaggcagtaggaatgggaaaggatattggagcggcagaagggcagctgcttgatgaagacaggaaggggtgccatcagtgcagccccccgcaccacagcagccacaccaattttggtgacaccgaggcaacgtaagtacctcggcccgctctagaactagttgggatcccccg

SEQ ID NO: 6369 - DNA, 571 bp, Homo sapiens
  misc_feature 20: n = A,T,C or G
cgcccgggcaggtacaaccnagaaccaacaattgtatttctctatagttattttaaaatagtaatcaatgctatgtatttgatgtatatgtttctaaattagaaatttcttttggctttgtgttttttttatgtgcgttaaatatgtaaactgaacctgttcctaaaatgcattaaacttgaatgctgtgtctatccaatgccaaaatgctcagaagaaaagtgaataattcagtcattcatctggatgtagttttctgtgtaatctcaaatatctgaatattgaaaaaactaggttgctaacttttttcattccttatgcaaatgtttagcatcatagtgctgtttcagatacagatctgtttcatcaaatatcctcaattcaagtctaagacagttatatgtaaagaaaatgtattattttagatgaacaatgtggataactgaactaaaaacgatatttgtgaactttgctataatgaaatcttttatttttatagctcagggtattgtaaattagcactaattgcagccagaagactgaaataattattggacaccgtagagtacct

SEQ ID NO: 6370 - DNA, 619 bp, Homo sapiens
  misc_feature 525, 557, 583, 587: n = A,T,C or G
aggtacccattgcccgaatagtgaacactctacccagtcgtttttcatccctcactttcctaccaccctccaacattttggagcctccagtgtctcttattccactctgtatacccatcgtttagctcccatttccaaatgagaacatgcagtttctgactttctgtctctgagtcatttcacttacgataagggcttctagttccatccatattgctgcaaaagatgtgatttcattatttttgatggttgcgtatgtattccatggtatatatgcacattttaaaatctaatcatctgttgatggacacataggttcagcccatgatgttgctattgcgaatagtgaacagttgattattagactgaagagagaaaaggccttcctcccccatgacttaacaggaacgaaggacgttgcatttataaaaggatggccatcaccagctactgggtaggctgaggcttttgatcaccataggttgcaattggtgtgttaggtggacgagggcaagaggatatggnaattagaaatatctaagttacacagcacgtantttttaggaaactgaaaatccacacncatnaatctaataaagacatgggtacctgcccgggc

SEQ ID NO: 6371 - DNA, 353 bp, Homo sapiens
ccgggcaggtacccgaaaagaaaggaagctttagtaatgaaaggattgctgccaaaatcctgtttcccccttgcagatcttacagaaaacagccacagaatcccaaggcatcagcaccaagagagcctgtagaaactatctggtctaagctcctgaagcccagagataagaatgacttaacccaagctgcacagcctcttaacagtccactgttaaccccagaaacagatgcatttgaatctgaaaggagacaggaatcctaatcctactgctcagggacttgctgatttactttgctgtctattagcctttctgtgacatgattttctaccaagcaaagtcttttattcaag

SEQ ID NO: 6372 - DNA, 261 bp, Homo sapiens
ccgcggtggcggccgcccgggcaggtacatctagagaacatttgccaaaggcctaagcacggcaaaggaaaataaacacagaatataataaaatgagataatctagcttaaaactataacttcctcttcagaactcccaaccacattggatctcagaaaaatactgtcttcaaaatgacttctacagagaagaaataatttttcctctggacactagcacttaaggggaagattggaagtaaagccttgaaaagagtaccc

SEQ ID NO: 6373 - DNA, 286 bp, Homo sapiens
  misc_feature 2, 5: n = A,T,C or G
cnctnctatagggcgaattggagctccccgcggtggcggccgaggtactcttttcaaggctttacttccaatcttccccttaagtgctagtgtccagaggaaaaattatttcttctctgtagaagtcattttgaagacagtatttttctgagatccaatgtggttgggagttctgaagaggaagttatagttttaagctagattatctcattttattatattctgtgtttattttcctttgccgtgcctaggcctttggcgaatgttctctagatgtacctgcccg

SEQ ID NO: 6374 - DNA, 278 bp, Homo sapiens
  misc_feature 147, 173, 227: n = A,T,C or G
ccgcggtggcggccgaggtacactctagcattgtaactttttccccctgagaagtaattttaagatctatcagtctcaatttaaatgatctgttaatcagccagagttttagtttcataatatcgttccattgcctgacaaagatantaccacactgaagtgccttttagcanacctgggaccgtcaagaatcttgttaccctgattattgcaagatgacatatttnttaagccatttataatctcatattcgggttgaatctgaatttacaaataaa

SEQ ID NO: 6375 - DNA, 245 bp, Homo sapiens
  misc_feature 13: n = A,T,C or G
tagggcgaattgnagctccccgcggtggcggccggtggatccccttttagtccaagctggttccatctctgccatgtctctcctttatatctcaccaatagcgatatatttcacgttgttatctttttcctaggataaaaattctgtgttaattttagtttttaatttgagtttaccattaatgaacatcaaagaataatggacttttaaactcgggctgggaatgagtgtgtgtgagtgtacct

SEQ ID NO: 6376 - DNA, 531 bp, Homo sapiens
atagggcgaattggagctccccgcggtggcggccgcccgggcaggtactaccttctctgctacaagtcgagcgaggagccccgcatgagccctgacacctgtgccaccattttggaaaaagctggtctcgataactgggctcttggaaaaacaaaagtgttccttaagtattatcacgtggagcagttaaatctaatgcgaaaggaagctattgacaagcttattttgattcaagcttgtgtcagagcattcttgtgttcaagaagataccaaaaaatacaggagaaaaggaaagaaagcgctataataatacagtcagctgcaagaggacaccttgtcaggaaacaaagaaaagaaattgttgacatgaaaaacacagcaagtaacaaccattcaaacttctgatcaggaattcgactacaagaaaaactttgaaaatacaaggtgtctgtaaaggagaggagccaaaaatattgagacccccaagacgaccccggaaacccaaaaaaaaaaaaaaaaaaaaaagtacct

SEQ ID NO: 6377 - DNA, 396 bp, Homo sapiens
ccgcggtggcggccgaggtacttttttttttttttgtaacatacaagggaaatgactatagattaaggccatagaagaggtgaagcattgttcctcatggatgcatcaaatgggaatgtattcataggtagagatgaaccattggagaaagaaagtttcaaaagaaatttcgaagaaatcagtgaaagtaatggaccaagttccatagattagaataaaaaattacatagtatttataatccaatagaaagacatttttatttaagagataagaagggagtaaaagtggactggtgaagatatgttggacaggggtaaaaaccaatggagaaatatgtgaataatatttttttgaacttcttttgtgagtgatgctttgtacctgcccgggcggcc

SEQ ID NO: 6378 - DNA, 424 bp, Homo sapiens
  misc_feature 336, 342: n = A,T,C or G
cttagggcgaattggagctccccgcggtggcggccgaggtacatggtctcaaaactagttagtgtttgagcaagaatctgaacccaggtcagtcacacatgatagccataccattgacaatagcatggagaatactgatgacactataaggtctagttcagcagattaagacagccacaagctatagcttataatagtgcaatgaaagaggagcatcattgtaatccgagtgggcagaaaaattagttgagagaatatagcttatttcacaagagagaaaatgaaagtatatatggattggagaggatgggtcggaaagattctagagtgaaggcngcacanaagagaagcttgggggcaaatttagtgcctccttctaaggatattcattagtccccctcttgtcttgaatataaacacttaa

SEQ ID NO: 6379 - DNA, 292 bp, Homo sapiens
  misc_feature 163, 174, 193, 215, 239, 244: n = A,T,C or G
agggcgaattggagctccccgcggtggcggccgaggtacatagaatatgaacacagcacacacatgagagacgcaagtgccaaatgccttggcctgggcttcacgtgtcaagcccaacacagtcttaagaataagcagatatgagaaggagatgagaagtgtngtccaggccantggccgggagatggaatgnccgattaaggccaatatgaccnacattgtaacccccgggtattatncaatncaccaaggggccccaagccggtttctattggaaccatttcctttttgg

SEQ ID NO: 6380 - DNA, 436 bp, Homo sapiens
  misc_feature 4, 419: n = A,T,C or G
actnctatagggcgaattggagctccccgcggtggcggccgaggtacagtggcacgatctcggctcactgcaagctccgcctcccgggttcacgccattctcctgcctcagcctcccaagtagctgggactacaggcgcccgccactacgcccggctaattttttgtatttttagtagagacggggtttcaccgttttagccgggatggtctcgatctcctgacctcgtgatccgcccgcctcggcctcccaaagtgctgggattacaggcgtgagcaattactgtgtttcttatccatgtagtgtgcatgcagtgacggcatcctaatacgggtcctccttctaagcatagatattggggggatcaagcacaaaacaaagcaaacagtagcattcttacaggccagcatggacagtanaaggcatttaggggggg

SEQ ID NO: 6381 - DNA, 299 bp, Homo sapiens
cgaagtaccactgctccctggctaatttttgtattttttgtaaagagagggttttgccatgttgcccaggctggtcttgaaatcctggactcaagtgctccgcccgccttggtgtcacagtgctggcattacaagcactttgtaatcttgaaaatggctctcatgagccaccctgctaggccaaaactggaagtatttaatggaactttgaaagggtaaaaagaaacaaagagcttctgccacagaagacaatccagctgatcctacagaaagtgacagaacacccgcgtacctgcccg

SEQ ID NO: 6382 - DNA, 300 bp, Homo sapiens
  misc_feature 194, 257: n = A,T,C or G
ggagctccccgcggtggcggcccgaggtaccaggctatatatggtattaaaattttttaaatttccaattgtttattactagtatataaaaatacaattaatttttgaatattaatcaaaacaaaaagcaaaactgctacactcacttattaattctagtaactttttgtaagaccgttgagtattctacatangacaatcatgttgtctgtgaacaaaaacagtttgtttcctttcctatctgggtgctttttgtntctgtttctaggcttattgcactggctacgaacctccagtacc

SEQ ID NO: 6383 - DNA, 412 bp, Homo sapiens
  misc_feature 4, 210, 270, 297, 338, 361, 363, 405, 411, 412: n = A,T,C or G
actnctatagggcgaattggagctccccgcggtggcggccgaggtacatagaatatgaacacagcacacacatgagagacgcaagtgccaaatgccttggcctgggcttcacgtgtcaagcccaacacagtcttaagaataagcagatatgagaaggagatgagaagtgagtccaggccaatggcggagatgatgacgataaggccatanacgacattgacccggatatcatcacaggccagcttcatgacatcttggtgtaggcagtangaatgggaaaggatattggagcggcanaagggcagctgcttgatgaagacaggaaggggtgccatcantgcagccccccgtaccacagcancnacaccaatttttggtgacacgaggcaaccgttaagtacctgncccggnn

SEQ ID NO: 6384 - DNA, 200 bp, Homo sapiens
ccgcggtggcggccgcccgggcaggtaccacaaggtgtctttttacacagctcatttgaatacaggtgttctgagaaggggtttctattttaaaattaccatatcaaaataaatgtgccttatttttttataagtcttgttaaatcagtgtccatattactgtttggggaagggggaatgttgtggggtctgggagaggg

SEQ ID NO: 6385 - DNA, 583 bp, Homo sapiens
  misc_feature 155, 165, 187, 194, 204, 253, 269, 273, 282, 293, 295, 310,318, 323, 346, 347, 352, 360, 377, 381, 387, 391, 398, 402,427, 430, 434, 435, 439, 456, 461, 468, 469, 470, 472, 492,494, 500, 504, 510, 544, 561, 562, 563, 572: n = A,T,C or G
ccgcggtggcggccgaggtacatctagagaacatttgccaaaggcctaagcacggcaaaggaaaataaacacagaatataataaaatgagataatctagcttaaaactataacttcctcttcagaactcccaaccacattggatctcagaaaaantactggtctntcaaaaatggaccttctacagnagaaagnaaaatatatntttttcctctgggacacttaggcacctttaaggggggaaagtaattggnataaggttataaaagncccnttggaaaanaggaagggtancncttgtctccccgggntccggggntccgnctttcttaaggtaaaacttaagnnggggnatttcccnctccccgggggtccttngtcnaggggnaaanttttttncggnaattaatttcaaaagtcctttttanttnccgnnaatntaacccccgggtttggnaaccnccttttnnnanggggggggggggggggggtncncccccngggngttaancccccccaaaggtcctttttttttttgggtttcncccccccttttttttannntttggtaanggggggttttt

SEQ ID NO: 6386 - DNA, 237 bp, Homo sapiens
ccgggcaggtaccatggaaacccactctttcattgaaaggaaattaggttgaacctccaggagcccgtcagagtctgaggagaggctggcttcatgtctagatacgacgacagcaaggctgcttagagctaacagcgcattgcctttcactaccggactctcctttgcagctgccttggtgatctcatcagtcagcatgtctctaacccagagccaggctgtgctttttttgtacct

SEQ ID NO: 6387 - DNA, 489 bp, Homo sapiens
ctatagggcgaattggagctccccgcggtggcggccgaggtacccccaggacccgcaaatagtaaatagtgagaagcaaaggctgaggaagcttccgcagagcagggagggcagaggtccacgccggactactatagagctcgtcagaatgaaactggccagttggctttacccaatgccaagcccaaggcattgagtcccaaagaaacactgggagaattggtcactggtgactttttggaaaaggtggccaagagacagaagaggaagaaggcatgcacaccagtgcccggacaccccacgcaccaacctgcccctccgcccacaaaccagcgtgtgaggtggagacctagaggaggagtgccagaatggggatgccaacaagaagttactcaaacggttactgactgtgcaagttactgcccacattccacagtcaatgccccccacccataaaaataatgtaagatggtcataagtacctgcccg

SEQ ID NO: 6388 - DNA, 295 bp, Homo sapiens
aggtacttcttgagagtgctttgttgtttaaactgcttattttttagcttgttttcaagtttgactttactagtttttattaacttgcgaaagcttgggatctgttttttatttcttctcgccttcatccttaggccttaaatgaatgccggccagacaagttcaccagaagcagggttactacagaaatcccggggaatgacacacgtgccgaagtccctacactaccagagccggaaacggccttcagtccctcccaatcctccgccgccggaagtccccgcgtacctgcccg

SEQ ID NO: 6389 - DNA, 639 bp, Homo sapiens
  misc_feature 205, 209, 211, 215, 219, 227, 248, 251, 255, 267, 271, 272,281, 315, 332, 336, 354, 356, 365, 369, 382, 389, 398, 399,401, 404, 405, 413, 418, 419, 422, 427, 431, 438, 444, 450,451, 456, 465, 474, 485, 494, 495, 497, 503, 505, 511: n = A,T,C or G
  misc_feature 512, 515, 516, 530, 531, 533, 551, 554, 560, 565, 568, 571,577, 585, 586, 587, 591, 601, 610, 615, 619, 620, 624, 634: n = A,T,C or G
ccgcggtggcggccgaggtactggtctctgtctttacagctgaagcatcagaggatggagtgaccaggctggttccaatgacagttatacggccatggggagtagacatggagtctaattcagtgcttgaggctaagaatgaagttgtatgcattgtaggaaattgttccaggtagatcttgcaaacttttcaagttttggaagntccntngttnttgntgaaccanttccaagggtaaatttctggnatngcangccttggttggnaaannaactcaagngttgggtaaaagggggttggttttcttggttaantaaaagtttttgtttgnccgnccctttttttcttggttngnggcccccgngagnggttggccttgtnttccccnattgggggnnanccnnttgggccnccccnnggngaccntggnctcccgncttttntttaannaaaanccttaaagntttgggggnaattctccccnccccggggnntncccttngntctaannggnnaaaaatttttccgnnanttttatttcataaaaggnccntttttnaattncgntantttaancccccggnnntccngataaccccnttttccatntaggngggnngggngtgggggccnccccc

SEQ ID NO: 6390 - DNA, 68 bp, Homo sapiens
  misc_feature 38, 47, 52, 54, 55: n = A,T,C or G
ctatagggcgaattggagctccccgcggtggcggccgnctatgtttnggccntnntgctgcgctcgga

SEQ ID NO: 6391 - DNA, 228 bp, Homo sapiens
  misc_feature 228: n = A,T,C or G
ccgggcaggtacctgtctgggcaacactgtcccacaggggcccccatgaccaaactaactctgcttctacccagaaagggtgcagagtagccactagacttttatgtggcaaatgggatggttatgcccacctgaaccaagatgccctttctggttgccttgatttgtgtttaacagctccaaatgcttaatgaggcagtaagagacgtctctcttgggcagtacctn

SEQ ID NO: 6392 - DNA, 237 bp, Homo sapiens
  misc_feature 150, 156, 173, 175, 181, 197, 201, 211: n = A,T,C or G
ccgcggtggcggccgaggtacctatcaaactttacaatgttatttgtgtttccttctatttggtttagcaatttaaaatgtttatcgtgtaggtaattcctgagtgtgtgtttgttactatggcaggtttattttttttagcctgtaagntttgtngtcttaaattattattnanggtatngcccttaagtttgganaatngattctctgntttagaagttttattttggttaaaat

SEQ ID NO: 6393 - DNA, 367 bp, Homo sapiens
cgaggtactcatggatatttgaaagagaacgtgacaaaaaaattttaaatattttatcatcgctacaaatgtagataaaattaatttttattttttaaagtattttaaaagtagataaaatacactcatttatattttacagaaagagttttaagagttctgttttagacatgtaagttcttaatctatttgaagttgactttttaatgtggcttgagataatgacccaattttatcttgtcaatatagaaaaccattttttgtggcctgaagcacagtggctcatgcctgtaatcccagcactctggaaggctgaggcaggtggatcacttgagcccaggagttggagaccagcctgggcaacttg

SEQ ID NO: 6394 - DNA, 226 bp, Homo sapiens
ccgcggtggcggccgtgggcgatctgggggccaggtatgcaagaagggtctctgggctcagccattgcctgggattccagtcacaatgacaggtgttttggcaatttgtatttactcttttgtaaataactttgtgtctataaccttggcttgaagtggatctgaaaaccacccaacggtttgggtgaatttttttttaaaccgtgaaatggtatgttctgtacct

SEQ ID NO: 6395 - DNA, 740 bp, Homo sapiens
  misc_feature 426, 574, 607, 625, 644, 649, 659, 661, 664, 666, 667, 672,674, 681, 690, 700, 715: n = A,T,C or G
ccgcggtggcggcccgaggtacagacaggattgacggggggaatccctaaactttttattctaacaagttttatttatttattttcttttttgacatggagtctcgctctgtcgcccaggctggagtgcaatggcgtggcctcggttcactgcaacctcgcctcccgggtttaagcaattctcctgcctcagcctcccaggtagctgggattacaggtgcatgctactgcgcccggctaatttatgtatttttattagagatggggtttcaccatattggccaggctggtctcaaactcctgacctcaagtgatccactcgcctcggcctcccaaagtgctgggattacaggcgtgactcactgtgcccggccagcaaacaagttttagatttaactttatttgaatgcaatagaaaaaaaattangcattaaattgaaggggctgctgaactttcagataaatgtttcttcattgggttcctaaaagggataaataagccagttattctcaaactcaaggtatgtgccagaaatcccctggagggactttgttaaatcacagaattgcttggncccacccccagggtttcttgattcaaggaaggnctggggtgggggcccaanaaatcttgcaatttttaancaagnttcttaaggngnatncnngatgntnctgggcntggggaccnacacctttgnagaacccacctggtntttaaggggcaaagggaaaaaaaaa

SEQ ID NO: 6396 - DNA, 192 bp, Homo sapiens
  misc_feature 142, 151: n = A,T,C or G
gttgttactctttaagctaaaatattctctctccacagctgcaattagagagccgcatggtgacctacttgaatcaacaaaatttgagacctgtgattataattctcattatgacgatatataatcaaaagctgtaaaatgntaataattntcaaaccttctgagattattttaaaatccatcttaatacct

SEQ ID NO: 6397 - DNA, 248 bp, Homo sapiens
ccgcggtggcggccgcccgggcaggtacatgaataaataatgagtgtttcttgtaggtattggtttggagattgttttacggtagtatgaactgttaactggaaaagaaacctgagattgcagtcagccaagattgtgccactgcaccccagcctgggcaacagagactccgtctcaaaaacaaaaaagaaaagaaaccaagaaacctcaggcatgaacctaatttaatctccatgaaagaggtacct

SEQ ID NO: 6398 - DNA, 204 bp, Homo sapiens
  misc_feature 28, 35, 176: n = A,T,C or G
gcggccgaggtactttcctgaatgcctntcctaantaaatggctctagtttctctattggccactgcactgccactaggattcctgcaagggatccgatgggcccagagcaggtagccaaccacttctctgttggatggaatgcaatgctgtttgccagcatgttttgagccagtncttcaagatggattctgagtgactaact

SEQ ID NO: 6399 - DNA, 600 bp, Homo sapiens
  misc_feature 20, 30, 55, 77, 79, 83, 99, 124, 135, 145, 155, 157, 170,207, 209, 212, 233, 235, 269, 272, 275, 278, 283, 291, 293,295, 296, 316, 340, 343, 348, 376, 381, 402, 407, 410, 411,419, 424, 429, 447, 448, 473, 474, 479, 487, 496, 523: n = A,T,C or G
  misc_feature 527, 545, 548, 555, 557, 563, 570, 579, 582, 587: n = A,T,C or G
gtccatggggttaccccagnaaaattatangtaaaaggggtttccatatatatgnagaagtaaattccgcctccttntntgcnagaaaaccctgtatgnggttaaccagaaattattaaattantttttaattanaaaaaaaggngtaaatttangnggttaaattaatnggttttaaaattgggggaaggaaaaattaaaaaccantncanttttattggaaaaaattggcntnattccttgtacaaaaccacaaaaaaaacattatntgnaanggnaaaanaaaattantntnngggttttttaaaaaaaaaanttaagggaaaacctttagtcaagngtnccggnaatcttttaaaaaaaaaaaaaaggccanatggnaaccccaaaaaaaacctttcnttttnaanngcctttanttggnccaanccaaagggaaaaaaaagnnttttaacctttttttaccaaccaannttttncaacccanaaaaatttnttttataaaaaagggggggggtttggngaanggaaaaaaaaaaacccanttnggggggnanttttantttgggnaaaaaaaanttntttgntgaaaaaaccccc

SEQ ID NO: 6400 - DNA, 401 bp, Homo sapiens
ccgggcaggtacagaatatttgccttttgattgccacaaagatgaagaatctggcaccaagactccagggccatgctagtgactttccctcctatctcctgaggacacggtgcttccaactctgaggatcaggatactgaaattgactgtgtgagaagagaaagtgggattttctgtgggaaaagactgttttgagcataattttcaagtaataaatatattctaccaggagacacactgccatcatgctgacggtgtatgttgcttttgacattaacattatgatcatcaatattattggggtgttccctagaaaatgaccaattatcacagaattaacgagtcattttcattttagttttttttcacacttccagctaaatccactgagtttactgagt

SEQ ID NO: 6401 - DNA, 373 bp, Homo sapiens
  misc_feature 1, 7, 57, 61, 202, 204, 358: n = A,T,C or G
nggagcnccaccgcggtggcggccgcccgggcaggtaccatttttagcccagtgccnaaancccaatatcagttctatacagatacaaggtgatgctgattatttcatcaaccatcttggagttcccatcgtgtagtttgcttacgaggacatcaaaacattagagggtccaagttttctctccgaggcccgtttttctacntnagcaacaaaaattgaagaaatggatcgctctttcaaccttcatgaaaccattactaagctctcaggagaagtgattttgcaaattgccaacgaacctgttctgccctttaatgcacttgatatagctttagaagttcaaaacaaccttaaaggngatcaacccaacact

SEQ ID NO: 6402 - DNA, 161 bp, Homo sapiens
ccgggcaggtacctaccatatgtgaaacagagttcaaggtgctatcaatacagctagtcttccaaagctcgtgaccttcagatcttttgttttagattctgttatgaaaatgtcactacgtgtaagccacatttttaatgcaatcaatgcccgttgtacct

SEQ ID NO: 6403 - DNA, 226 bp, Homo sapiens
  misc_feature 20, 192: n = A,T,C or G
atagggcgaattggagctcnccgcggtggcggccgcccgggcaggtactttcaagtcacctggttcccatacagctgacttttcccagcactggaaacacgacgcatgcctagacctttagagaatcctaattttgcccacccccaactgtcctgtaacaaagcttggttcacccaaaaatgccagggagtnttcaaacccaaggctagttaaaactattgggaaa

SEQ ID NO: 6404 - DNA, 317 bp, Homo sapiens
aggtacttacgttgcctcgtgtcaccaaaattggtgtggctgctgtggtgcggggggctgcactgatggcaccccttcctgtcttcatcaagcagctgcccttctgccgctccaatatcctttcccattcctactgcctacaccaagatgtcatgaagctggcctgtgatgatatccgggtcaatgtcgtctatggccttatcgtcatcatctccgccattggcctggactcacttctcatctccttctcatatctgcttattcttaagactgtgttgggcttgacacgtgaagcccaggccaaggcatttggcact

SEQ ID NO: 6405 - DNA, 367 bp, Homo sapiens
  misc_feature 2, 12, 270, 272: n = A,T,C or G
gnggcggccgangtacctgaaggaacgaagaagagggatttctcaaggtgagaagcagttctccatggacactgatgacagcacaggcaaagtttcctatgactagggatcactgtccacacagagtctggcttcccaggtatccagcaggtagacaaaacagctaactccactgccactcctttctccacatccgttccgatttctcagccatctcagtgacatccgccatcttgagagtcaactactgactggactgagttgtgtggnanatgcttctgtttacttctcttctgtcttttttaagtggccaaatagcaaacgcttaaatagggaaatctctgggagactttgaataaaagacttt

SEQ ID NO: 6406 - DNA, 429 bp, Homo sapiens
  misc_feature 1, 23, 28, 34, 46, 51, 54, 82, 83, 85, 96, 120, 123, 135,138, 142, 163, 174, 196, 204, 210, 213, 215, 218, 222, 226,244, 248, 254, 259, 265, 275, 285, 288, 294, 309, 318, 323,325, 336, 361, 362, 363, 367, 371, 388, 389, 391, 392: n = A,T,C or G
  misc_feature 403: n = A,T,C or G
ngattatggggtgattggttcancgtantgggcncatcgcctctgnatagnacnggattttttctgccccttttgacgcatnngnagttccaacgnttttctttttaaataagttggganctncttttgttttcncanaaancttggggaaaccaaaactacnttcaaaacccncttaattccttccgggggtacntaattttncttttnttngnaantttntaanttaaaggggggggaattntttntggccncgtantttttnccgggggccnccttaatttnggngttttnaaaaaaaaaaaattnggaaggccnttggnantttttaaaaancaaaaaaaaaaattttttaaaaccnnnccgnaaanttttttttaaaaccaannannaataattttanaaaccggccttttaaccaaaattttt

SEQ ID NO: 6407 - DNA, 317 bp, Homo sapiens
ccgggcaggtacttacgttgcctcgtgtcaccaaaattggtgtggctgctgtggtgcggggggctgcactgatggcaccccttcctgtcttcatcaagcagctgcccttctgccgctccaatatcctttcccattcctactgcctacaccaagatgtcatgaagctggcctgtgatgatatccgggtcaatgtcgtctatggccttatcgtcatcatctccgccattggcctggactcacttctcatctccttctcatatctgcttattcttaagactgtgttgggcttgacacgtgaagcccaggccaaggcattt

SEQ ID NO: 6408 - DNA, 322 bp, Homo sapiens
aggtacagaggaggagggccgccaaagctgagagaggcaaccccccaaatattaaaaaggaagaaatggcgtgataggctagcacattttatggaaagccatgtcttaattaaatgttttccctacaaatgttctctgtatcaagaaacctggcacatagggaatgcatgaaacctgatttataatcagattcagtctacttaagtaataacctatatctagatgatagattgtcaactgtgctacttttagccatcatcacatacccagccgtttctatccttagtgacacagctgggccagaggcaaggcctgcattcat

SEQ ID NO: 6409 - DNA, 345 bp, Homo sapiens
  misc_feature 280, 332: n = A,T,C or G
ccgcggtggcggccgaggtacttagcccttggggaacacaggtagttccttttcactgtgtttaatttgggaaaatccagatccacatcattgtagagtctgagggttagaaggaagtcattgtgtctaacataacaacagagcagtttgtgtcactgagctccagtctgtgctggattattgatattgttggtggcggtcaccattcctggaaagggactgtcccaagccacttaccttcccgaggagtctgctggttctccttgaggatagtgcttanataacagactcattaaacatttactgagtgtctgtcagggatcatttacatncacatcatcctcc

SEQ ID NO: 6410 - DNA, 314 bp, Homo sapiens
aggtacctacttgaaggacttcataagcaaattacgatttaatttacaagaacactatgtcacacgtatacacacaggttttttatatttgttgtcttttccgtgattatctcttacagtgttgtatatttaatatattcattttattttaattttatgtaggttcctcattccttcatatgtgtattacatttccctggaactatcacgtattttatatacttagcaatggaaagctcctggtttcagttgtctgtgcagcaggcagggggaggagaagaaaatgggtcacactcctgaccctgcctgcatag

SEQ ID NO: 6411 - DNA, 411 bp, Homo sapiens
ccgcggtggcggccgaggtacatagaatatgaacacagcacacacatgagagacgcaagtgccaaatgccttggcctgggcttcacgtgtcaagcccaacacagtcttaagaataagcagatatgagaaggagatgagaagtgagtccaggccaatggcggagatgatgacgataaggccatagacgacattgacccggatatcatcacaggccagcttcatgacatcttggtgtaggcagtaggaatgggaaaggatattggagcggcagaagggcagctgcttgatgaagacaggaaggggtgccatcagtgcagccccccgcaccacagcagccacaccaattttggtgacaccgaggcaacgttaagtacctgcccgggcggcccgctctagaactagtgggatccc

SEQ ID NO: 6412 - DNA, 410 bp, Homo sapiens
atcactacttagggcgaattggagctccccgcggtggcggccgaggtacagtgaaaagagccaaggctgtgtgaccccctcatcacttagccaggcgtatggtcctggtttctgaggctgccagaaagcatcttagcaatttgtgtttggatggtccatgcctgactattctaggctggaggttcctaaagagtaacaagaggaagagaaacaagaatctctgacacttgttgagaatagagcacagtcccatttgtttgaaaagagacaccaggcagccatgtttatgtgccagaaatgcattccacctcaaggaggacttaatttatggacccgtgtgtgccaggctgagctgggcaagatctttctcaggacaaactctgccatgcagctaaaagcctggaaactaa

SEQ ID NO: 6413 - DNA, 522 bp, Homo sapiens
  misc_feature 511: n = A,T,C or G
ccgggcaggtacttcagtcttttatcagttaaaatactaacagatagaaaataacaaagaatagactgttttcctgcctattgtaagacaaaatgaaatgtttactgttggaaacactatacctttttttagccttctcccctatcttcttattttccttgatggactctttctcttatctgagcaaactttttgtttgtttgtttgactcagtctctcagtgaacagtatagcgacccattagctccagcgttggactctgactgtgtcaagagtagaagtttgaagtgcaattcttatccatcatatttctccaattattaactctcctttactgccttttaaatacttcacaaaatggaaaccccttttgaataagaacagccgattttctgggagatggacaaggaaaagctatggagagatgctgggtttcttaagtttaacatgtggctgcttgaaagttggtattagatcccagagaacttttttggttaagtgtgattagagntcaaaagaaaa

SEQ ID NO: 6414 - DNA, 281 bp, Homo sapiens
actataggggcgaattggagctccccgcggtgggcggccgcccgggcaggtacgcggggaatctaagacctgaaactactgccacagccatgcataaaatgaaatgctgctgctttcctctctgttaaagagaatgttcaaggccgaggacacataaaaaagagcagcattgctggctctgtttttagctgtgtgttcttgaaaaagtcacttctccagacatatctcagcatttataacctaagactgaatcactgcattttacccttaatgaggtacct

SEQ ID NO: 6415 - DNA, 537 bp, Homo sapiens
  misc_feature 537: n = A,T,C or G
cgcccgggcaggtaccattcttatctcagaatgctgtaaaccatcagtagaagcagtttagatttggactgcatggtaaaatgaaaagtaataaccctccaaccacaacctagtcagggtattaataattatatgtagcaagaaaacaaagaagaaaataatattgaaaaaatggagattccccaaccagtttcatatttgaaggatctgagttgtatttttattaaggaaattttttttctgaatactgtcttccaaaatgttaacattaaaatctgaatcagaggactctgaatggaaaagaagtttgatcactgacacctagggctctgaagcgtgtgtggccacatggaaaagtcgaaggatgcgctgtcgaatctcctttgtcttcactccatacacaattgggttgagcacaggaggaaccagcagatagatattggccaagatgatgggcagcggagagtcacgccgttgctaaagcgatgcccatggacaatcaatgaaaggtcctcggccgtctagaactagtggatn

SEQ ID NO: 6416 - DNA, 461 bp, Homo sapiens
  misc_feature 12, 24, 45, 63, 69, 91, 112, 113, 117, 122, 132, 164, 208,218, 225, 236, 241, 270, 271, 281, 303, 317, 327, 331, 339,345, 354, 363, 373, 380, 401, 408, 417, 428, 439: n = A,T,C or G
agaaattcaagnggggataaccgncaggaaaaagaaacatggtgnaggcaaaaaaggcccatncaaaanaggtcgcagttagacccgttanaaaaagggcccggcggtatgnnttgngccgnttttttttcncaataaggacttcccgctcccccccttgtacngaagtcaattcaacaaaaaaaaaattcggaccggcttcaaaagntccaagaaanggttggnctgaaaaaacncccgnacaaggggaacttaatttaaaaaggaatnnccccaagtgnccggtttttttccccccccctngggaaaaggccctncaccctttcngatnggccggcntacctnccccttggnttttccccngaacctctcnttggccnccggcttttaacccccggggngaattanccccttggntttcccggacncctttttttcnttccccccctttttccgggggg

SEQ ID NO: 6417 - DNA, 257 bp, Homo sapiens
ccgcggtggcggccgcccgggcaggtacgcggggaatctaagacctgaaactactgccacagccatgcataaaatgaaatgctgctgctttcctctctgttaaagagaatgttcaaggccgaggacacataaaaaagagcagcattgctggctctgttatttagctgtgtgttcttgaaaaagtcacttctccagacatatctcagcatttataacctaagactgaatcactgcattttacccttaatgaggtacct

SEQ ID NO: 6418 - DNA, 239 bp, Homo sapiens
  misc_feature 39: n = A,T,C or G
ctatagggcgaattggagctccccgcggtggcggccgcntccacatcttgatacttgcaaagtattctaagtataaatgtataaaggatactcagcaaaaatatccttgaggaattacatattacagcaaatcctaacggatattcttcaagcaaaagaaagatgactccagtgtaagcagaggagcaaggtttcccagaacttggtgggctccggcctcatctctcccccgcgtacct

SEQ ID NO: 6419 - DNA, 364 bp, Homo sapiens
aggtacttacgttgcctcgtgtcaccaaaattggtgtggctgctgtggtgcggggggctgcactgatggcaccccttcctgtcttcatcaagcagctgcccttctgccgctccaatatcctttcccattcctactgcctacaccaagatgtcatgaagctggcctgtgatgatatccgggtcaatgtcgtctatggccttatcgtcatcatctccgccattggtctggactcacttctcatctccttctcatatctgcttattcttaagactgtgttgggcttgacacgtgaagcccaggccaaggcatttggcacttgcgtctctcatgtgtgtgctgtgttcatattctatgtacctgcccg

SEQ ID NO: 6420 - DNA, 737 bp, Homo sapiens
  misc_feature 411, 480, 593, 618, 663, 718, 723: n = A,T,C or G
tactataggggcgaattggagctccccgcggtggcggccgccggggcaggtacctatgatttaaatactctccttttaaatactttgtaaaaactgcttttccgagccccttttatgctctgcagttgccatatccactaggtggtattgcaaataagtaaagcatcctgccatgacgctgtagtgagaatccctgaccaaagttactctcctcacctcactgcaaacctccaggaagcggaaactactacccctccacagacagagctcccctgccactccatgaggcgctgctgccggcatcagttaccgaagccctcacccacacccagcctgcaatggtccactctatattccacaatacaggaaaaagcccaaggagtcagatcaagttacgcccctgggatgcanaaagaaccagtgattcttcagatatgacagcaggcaaagttctgccctctccttcccatcttctatcangaagcgatcccataaaatctcttccagggaaggaaagaggcagctctggcttcttggagagacagagaagcaggagggtgaggaaggagtcaccaagctatccaagcagccanaggcgagaaggtgggagcagggcangaaagaaaatgcagaagacttgttcttcctcaatggggcctcttncctgagtttggatttttgaggttgagattttacctaatttcaactcaaaaaaaangaaangaaaaaaaaaaaag

SEQ ID NO: 6421 - DNA, 184 bp, Homo sapiens
ccgggcaggtaccttccactttcctacccttccattcagaaaagacaagcagggcatgttaattcaaaagacaaaatgattacaatgccagataccgatctaaaatgtattctgcgttggatatggtctacatccatccatttatacttttgccatggccatatatatcactggtcaagtacct

SEQ ID NO: 6422 - DNA, 402 bp, Homo sapiens
ccgcggtggcggccgggggccattgagactgccatggaagacttgaaaggtcacgtagctgagacttctggagagaccattcaaggcttctggctcctgacaaagatagaccactggaacaatgagaaggagagaattctactggtcacagacaagactctcttgatctgcaaatacgacttcatcatgctgagttgtgtgcagctgcagcggattcctctgagcgctgtctatcgcatctgcctgggcaagttcaccttccctgggatgtccctggacaagagacaaggagaaggccctaggatctactggggggaagtccggagggagcagtctcttctgtcccgctggaacccatggtccacttgaagttccttatgttactttcactgagcatcctat

SEQ ID NO: 6423 - DNA, 343 bp, Homo sapiens
  misc_feature 299, 302, 306: n = A,T,C or G
tcactacttagggcgaattggagctccccgcggtggcggccgcccgggcacggtactggtctctgtctttacagctgaagcatcagaggatggagtgaccaggctggttccaatgacagttatacggccatggggagtagacatggagtctaattcagtgcttgaggctaagaatgaagttgtatgcattgtggaaattgttccaggagatcttgcaactttcaagtttgaagtcatgtctgtgacagtccaggaatctgatgcagctgtggaagaccaggtggaagggtgttctgtanaanttgngcgcctctctgtggccggggtgctgtccatggtacct

SEQ ID NO: 6424 - DNA, 586 bp, Homo sapiens
  misc_feature 551, 555, 557, 558, 560, 562, 563, 566, 568, 569, 570, 571,574, 577: n = A,T,C or G
cgaggtacaatttatatgtattaattataaccaattagaaaatataacaggagaatgagttttatatttcaactaaagctataagatctttctgcatacattaaacaaaatatgtgcacgttgcttggttttgatttttcttggttcatttggctggttttagaggaaacttggaaatacagctgagggacatgaaagaaaatattagtgagtggagtgattcaccacattcttaaatggaaaaactagtgttgatttaagaaagatgtcaggccgggcgcggtggctcacgcctgtaatcccagcactttgggaggccgaggcaggcggatcacaagatcaggagttcaagaccagcctggccaacatattgaaaccccgtctctattaaaaataaaaaaattagcttggcttggtggcgggcacctgtaatcccagctactcgggaggctgaggcaggagaatcgcttgaacctgggaggcggagtttgcagtgagccaagaatgcccattgcactccacctgggtgacagtgtgagactccatctaanaacnanncncnnaantnnnnaanggntcctgcccg

SEQ ID NO: 6425 - DNA, 403 bp, Homo sapiens
aggtactttgtaattatatttgggtgatgatttgacaatgtctatactaaatcatgaagctatacgtttcatgaaagcaagaactgtgtctaatttgccactacttgtatcctggcacataatatatattcatttgttgagaaaataaatgaataaataaatttgaattttgtctacttcatataatggatcaggaccttaaaaaaccatcatttaacagtatttatatctcacggactagtgttttgcatttacttccagccacaggatgctacttgattccccaactatggcaggtaattgggtgtaggcttggggcagggaatctgaaatcaatgagatcccaggacactggttattgtagttctttccccttcccctaaactgttggcaaacaaagtca

SEQ ID NO: 6426 - DNA, 485 bp, Homo sapiens
ccgcggtggcggccgaggtacttgataccatgcctagtgcatagttggtgcccaattaatacatgattggattatagcataatcactgatcactacatttaaagcagtccaatagtggaacaggctgcctcacaaatagtgagctctcgtttcttacacagattctactatgggccaggatctcagccaagcagtggagccagaggctggacagacacaagcagagattttggaaaaagactgagtccctctcagcacttcaaagatcccttccaacacccaaacatcaaaagccatgttatattgccaagcaagggtgcctatgaacgcctgttgaaaccccacaacaattttttcagccatttattaaaaccccaaagagactatcaggacttcagggcaaacatcctagagatagcaatgcccccagcaagaagaaaagagttctcagtctgagaggcacaaactgtaatcagtgtaattaa

SEQ ID NO: 6427 - DNA, 452 bp, Homo sapiens
  misc_feature 68: n = A,T,C or G
cgcccgggcaggtacctgggaccccaccacctacatcaccactacggatcctaaggatacaagttcanctcaggtctctacaccccactcagtgaggacactcagaaccacagaaaaccatccaaagacagagtccgcaccccagctgcttactctggaagtcctaaaatctcaagttcacccaatctcaccagtccggccacaaaagcatggaccatcacagacacaactgaacactccactcaattacattacacaaatttggcagaaaaatcatctggatttgagacacaagtcagctccaggacctgcctctgtagtaatccctacctcccctaccattggaagcagcacattggaactaacttttgatgtcccaggggaacccctggtccttgctcccagtgagcagaccacaatcactctccccatggcaacatggctgaagtcct

SEQ ID NO: 6428 - DNA, 273 bp, Homo sapiens
aattggagctccccgcggtggcggccgcccgggcaggtactcttttcaaggctttacttccaatcttccccttaagtgctagtgtccagaggaaaaattatttcttctctgtagaagtcattttgaagacagtatttttctgagatccaatgtggttgggagttctgaagaggaagttatagttttaagctagattatctcattttattatattctgtgtttattttcctttgctgtgcttaggcctttggcaaatgttctctagatgtacct

SEQ ID NO: 6429 - DNA, 350 bp, Homo sapiens
  misc_feature 192, 258, 275, 301, 319, 325, 327, 328, 332: n = A,T,C or G
cgcccgggcaggtacttgtgaaaggaaaatacatggtgcttgaatatagcagggaggcctgctgaagtcagagagggtgatctttaggaaaggctttcctgaagaagtggcactggtgaaatgatggctgaagcatgaatagaagtttcctaggaaggctgggtgtgtggtgtgtggtgtggtgtgtgtggngaaggtgctgggattacaggagtgagctgccgtgcccagccggcaaagttgattctgaaaccctgnattacctcaataatcgntgaagtgcctattatatgcaatgcancacagccgggtggctaangctgtnanntccngatccctgtgttaaaatc

SEQ ID NO: 6430 - DNA, 363 bp, Homo sapiens
ccggcaggtacttacgttgcctcgtgtcaccaaaattggtgtggctgctgtggtgcggggggctgcactgatggcaccccttcctgtcttcatcaagcagctgcccttctgccgctccaatatcctttcccattcctatgcctacaccaagatgtcatgaagctggcctgtgatgatatccgggtcaatgtcgtctatggccttatcgtcatcatctccgccattggcctggactcacttctcatctccttctcatatctgcttattcttaagactgtgttgggcttgacacgtgaagcccaggccaaggcatttggcacttgcgtctctcatgtgtgtgctgtgttcatattctatgtacct

SEQ ID NO: 6431 - DNA, 261 bp, Homo sapiens
ccgcggtggcggccgcccgggcaggtactcttttcaaggctttacttccaatcttccccttaagtgctagtgtccagaggaaaaattatttcttctctgtagaagtcattttgaagacagtatttttctgagatccaatgtggttgggagttctgaagaggaagttatagttttaagctagattatctcattttattatattctgtgtttattttcctttgctgtgcttaggcctttggcaaatgttctctagatgtacct

SEQ ID NO: 6432 - DNA, 381 bp, Homo sapiens
  misc_feature 8: n = A,T,C or G
gtgaaaangagccaaggctgtgtgaccccctcatcacttagccaggcgtatggtcctggtttctgaggctgccagaaagcatcttagcaatttgtgtttggatggtccatgcctgactattctaggctggaggttcctaaagagtaacaaggaggaagagaaacaagaatctctgacacttgttgagaatagagcacagtcccatttgtttgaaaagagacaccaggcagccatgtttatgtgccagaaatgcattccacctcaaggaggacttaatttatggacccgtgtgtgccaggctgagctgggcaagatctttctcaggacaaactctgccatgcagctaaaagcctggaaactaagctctagaactagtgggat

SEQ ID NO: 6433 - DNA, 464 bp, Homo sapiens
ccgcggtggcggccgaggacgcgggtgaagaggacaggagtagttcttgtctgcaggctaaactgacagatctacaggtcataaaaaatgaaactgatgctcgctggaaagagtttgaaattatttcattgaagttagaaaatcatgtgaatgacataaaaaagccttttgtaattaaggaaagagacacactaaaggaaagagaaagagagcttcagatgactcttaataccagaatggaatctttagagacagcactgcggcttgtgttacctgtagagaaggcatcacttcttctctgtggctcggacctgcctctccataaaatggccatccagggatttcatctcattgatgctgatcgcatctatcaacacctaaggaatatccaagattccatagcaaaacagattgaaatatgtaacccgcttagaagagccaggcaactttgtattaaaggagtt

SEQ ID NO: 6434 - DNA, 574 bp, Homo sapiens
  misc_feature 18, 344, 465, 507, 519, 555: n = A,T,C or G
cccgcggtggcggccgangtcaaatgtaatcaccaaagaaatctgtcacataaaaacactggtggcatttctcaagtgatgcccattactcttgactttactatgtcaatggaacacgcagctaagggcttctacatcttggaatggcagtctcagacttgcccacctcttaaattagacatgaaatagaaacatagaatagatgctactctaaagtcacaatggaaatgcccaacacatttcacaaatacaattatatgtaaacaaaaagagaactctatgtatcaaaatgactttgcaagtttaaatacaatattgatgcatctatggcaattttcacatancccttgaaaagcaccaggtagcttgggtgttattatatgactttatcccctagaaaagaatgaacaggtctgaaaagaccttctagattattcacatgagaaaaagggtaagaaaataatngttaccaataatataacctgtgatggtggagaaacctggaanggcatttatagnctaatatgatattaattactaagttaaacattttantttgggagaataaaaaaat

SEQ ID NO: 6435 - DNA, 235 bp, Homo sapiens
  misc_feature 58, 69, 77, 101, 104, 114, 122, 134, 139, 184, 186, 187,191, 207, 211, 213, 224: n = A,T,C or G
ctggaagctcccttcgtggcgctctcctgttaccggaccccttgcccgcttacccggnataaccctgtncacgcctnttcctcccctttcggggaagccgntgngccgcctttnttcttcantagacctcaccncctgntagggggtattcttcaagttttcgggtgttaggggttcgttttcngnnttcncaaaagacctgggggncttngntgttggccacngaaaccccccc

SEQ ID NO: 6436 - DNA, 468 bp, Homo sapiens
ccgcggtggcggccgaggtaccatgcacaccaactcagagatggaaagaacctaggcattgcaatcagttatgacttgtgtgggcataataatttttgggggaaattaaacactcacaaaagagctgtcgaagacctaagggtcaactcttgcaaggcatgcagcctaggttcaacctgcagcttttcccagtggaatctggcccatgcattttctcatagtttttcccccacagatccagaaagaaaccaaagacagcctagtctcagagtgccccatcaaactttcaaatacagaaaaaagaggggagactttcagcattttaacctttccatttaaaatttttttaggcagacagatttttcttatctataagttaatgagaaatgttgaggtctatggaatttaaaaattaacccttatatgtcttcataaaactccagacactattggctgggtacctgcccg

SEQ ID NO: 6437 - DNA, 386 bp, Homo sapiens
  misc_feature 299, 313, 353: n = A,T,C or G
acgactacttagggcgaattggagctccccgcggtggcggccgaggtacgcggggacatgattctccgggatattaccggagacggagtgttttattattagcctttcttaggtggacatttccatttgaattaaaagtcctttaggctgggcgtggtgtatggctgtaatctcagcaccttgggaggctgaggcaggaagatcacttgaggccaggcgttggagagcagcctgggcaaggtggcaagaaccttgtctctacaaaaaaaagcgtctgccatcatgggatgttctcgcanaagcaaatggcacnctttgccttaaacccttttgaaaaacgcctggggtaaagnacaacttcgaagaaatgtgttttttctcacccc

SEQ ID NO: 6438 - DNA, 258 bp, Homo sapiens
  misc_feature 122: n = A,T,C or G
tagggcgaattggagctccccgcggtggcggccgtcggctcccagctactcacagagaacgtttctgtttctgacagcagagtaagagaagaggtgagaatagagacagcccattctctttnggcctaattcctaaggaatcatgcctctgccttcgggccattctcaagtcttgttcaaggataaaatgatttattgatggccgtaattaaaaagcaatgccaacggaagcagcgtcagcatttttcatttgtacct

SEQ ID NO: 6439 - DNA, 123 bp, Homo sapiens
  misc_feature 18, 58: n = A,T,C or G
aagaccctggggggtgcnctaatgtaggtggaagcttaaacttcacaatttaatttgncagttgcagctcacttgcccgctttccagttcgggaaaccttgtcgttgccagctgcattaatgg

SEQ ID NO: 6440 - DNA, 261 bp, Homo sapiens
cgcccgggcaggtacacctctttctaagatgaaagagctcaaggtgaaatagcatgtggggaagattgtcttaatcgtcttctcatgattgaatgttcttctcggtgtccaaatggggattattgttccaatagacggtttcagagaaaacagcatgcagatgtggaagtcatactcacagaaaagaaaggctggggcttgagagctgccaaagaccttccttcgaacacctttgtcctagaatattgtggagaggtacct

SEQ ID NO: 6441 - DNA, 393 bp, Homo sapiens
ccgcggtggcggccgaggtaccctgcccagagatttctccaaaaggagctcttgtgaatgcaggcaagctaaagccacacaatgaagctgaaattcattcagcttagcttctcctgagagccttctttttgtgggggtaacattgcccttttgtttcacagcgaggtctgtgctaagacttgctacttagggagtcaaagctaataaaacataccgtctagaaatacagacataactggtagaactatacaagaaaaagaaagggcagaggaagaagaggaatgtgattgtgggaagaggtatgaagggggattacaaatccctgcttctcaggagcgtggtccatggactagcagtgtgggacatcactttcaaatctattagaaaatgtga

SEQ ID NO: 6442 - DNA, 677 bp, Homo sapiens
  misc_feature 587, 654: n = A,T,C or G
ccgcggtggcggccgcccgggcaggtacttcagtcttttatcagttaaaatactaacagatagaaaataacaaagaatagactgttttcctgcctattgtaagacaaaatgaaatgtttactgttggaaacactatacctttttttagcctctctccctatcttcttattttccttgatggactctttctcttatctgagcaaactttttgtttgtttgtttgactcagtctctcagtgaacagtatagcgacccattagctccagcgttggactctgactgtgtcaagagtagaagtttgaagtgcaattcttatccatcatatttctccaattattaactctcctttactgccttttaaatacttcacaaaatggaaaccccttttgaataagaacagccgattttctgggagatggacaaggaaaagctatggagagatgctgggtttcttagtttaacatgtggctgcttgaaagttgctattagatccagagaacttttttgttaagtgtgattagagttcaaagaaaatgtttatttcttagatacttctattgaaagaaacataaggggtctatatctgnatatctataataaaattcagaaggcaagtatatatttaaatctatattaactgcacacataaaaacngaagggatttgtgatgggtaaat

SEQ ID NO: 6443 - DNA, 136 bp, Homo sapiens
ccgcggtggcggccgagaaaaattcttatctctttaatgagttggggtgtgtgtgtgtggtttgtttattgggcccagttttgggtagaatatggactttttgtctaactgtgaaccccttccttgtacctgcccg

SEQ ID NO: 6444 - DNA, 366 bp, Homo sapiens
  misc_feature 343: n = A,T,C or G
cgagggtacattttgggattaaaatcaacatgatagtaggaccctataatgtttaattgtaacacattttcacttccatatattcagatatatgttttccattttcaaaggagatttgaggccactaaacattttttaaagcacaaatgcacagaattgaaaatgattaacctaattttgagcagataaggcaaaaatgaaggatgagaatgagatcatatggaagaccatagttaaaggatgctatttcaattgcgcaataacaaatcttagctgagaggcctagtagttatggccaaagggagacatatatttaggcataatcttaattttattttattgnttaatttagatgagatccaaatg

SEQ ID NO: 6445 - DNA, 291 bp, Homo sapiens
  misc_feature 271, 284: n = A,T,C or G
aggtacatttgttgggggcgtgacattaacatataaccacttagagtggacatgcagttagagaaaagtcaatgagctggaaccaagctgggaattccaacatgtagaagttaaacacaagaggaggagccagcaaaggaaacagaaacagagcttccagcaggtggggggcatttggaagaaaacgatgccatagaagccaagatgaaatagacatcaaggagaaggaagtagtcaattgttttgaatgccatgaagaaagataagaatnggtgagaaataanaaaggct

SEQ ID NO: 6446 - DNA, 401 bp, Homo sapiens
  misc_feature 1, 29, 52, 75, 87, 89: n = A,T,C or G
nctatagggcgaattttgctaaccgcggnggcggccgaggtacttacgttgnttcgtgtcaccaaaattggtgtngctgctgtggtntngggggctgcactgatggcaccccttcctgtcttcatcaagcagctgcccttctgccgctccaatatcctttcccattcctactgcctacaccaagatgtcatgaagctggcctgtgatgatatccgggtcaatgtcgtctatggccttatcgtcatcatctccgccattggcctggactcacttctcatctccttctcatatctgcttattcttaagactgtgttgggcctgacacgtgaagcccaggccaaggcatttggcacttgcgtctctcatgtgtgtgctgtgttcatattctatgtacctgcccg

SEQ ID NO: 6447 - DNA, 425 bp, Homo sapiens
ccgcggtggcggccgcccgggcaggtacatagaatatgaacacagcacacacatgagagacgcaagtgccaaatgccttggcctgggcttcacgtgtcaagcccaacacagtcttaagaataagcagatatgagaaggagatgagaagtgagtccaggccaatggcggagatgatgacgataaggccatagacgacattgacccggatatcatcacaggccagcttcatgacatcttggtgtaggcagtaggaatgggaaaggatattggagcggcagaagggcagctgcttgatgaagacaggaaggggtgccatcagtgcagccccccgcaccacagcagccacaccaattttggtgacaccgaggcaaccgtaagtacctcggccgctctagaactaggtgggatcccccggggcttgcagg

SEQ ID NO: 6448 - DNA, 229 bp, Homo sapiens
cactacttagggcgaattggagctccccgcggtggcggccggtctccagcacccacctgtcaccagggtgaacagtgaaccctaggtatccaggttcgaccacgtagatagtgctgttgggtaacctagaagcaccttgcatgcgaatactcctgtggccaaggacgaggctgctctgtcccagctgcagtgcagtgaccatcgacgtgtcctgggccaagacagccac

SEQ ID NO: 6449 - DNA, 523 bp, Homo sapiens
  misc_feature 326, 344, 366, 404, 431, 447, 448, 467, 475, 492, 494, 501,504, 509: n = A,T,C or G
gattataggcatgagccaccatgcccggcctttgctcttaactactgatgttgtcttcctgatcttttctacaagaagcttttaaactttttggactttaacctacaataagaaatccattttctgttcacatgtatctataacaacatttatatttctaaaacaaacttttcatgaaacaagatatacctacatatgtcaggcactctgatattttctattctaggtccaccttttcaatttcattctatttatgggaaatatatagttggttgggagtcactgagttaatttaatgacccactaataggctgtgagtggcattnggaaaaatacctgcttgnaagatatgcgaacacacctttnaagggttgtttgggcatgtggaaatattttggggtgcnaactgttttaccatcagtttggacctnggccgctctagaactnngtggattcccccgggctgnaggaattngatattcaagcttaatngnttcccgnccnccttngaggggggggcccc

SEQ ID NO: 6450 - DNA, 462 bp, Homo sapiens
  misc_feature 208: n = A,T,C or G
gtatcactacttagggcgaattggagctccccgcggtggcggccgaggtacgcgggcacagtgctttaaattaaagcaagtttgcccataggacaaaagagcatttgattcccttttttctgtcacatgtcccttgaggctggacttcaggaatcctggaaaattaatatgagtgcagcatgtgaggggtcagagacaggcccagcangggcgtctgcattcctccctgccacaggtctctccccagaggctggtttagtgtagggtattgccaggaaacggactgaggctgctttgctaagagctcctgaaaatgccctgggcctgtcctggcgtttctgaagagccctcatacagggacagccaccatctgggtcaagggaggtctgggttccctgctggtgggctccatcctgcgatggagtgaaccaggccgagaaaggatgaccgatgttcttcatg

SEQ ID NO: 6451 - DNA, 529 bp, Homo sapiens
  misc_feature 38, 64, 75, 77, 87, 88, 103, 106, 118, 119, 126, 208, 256,264, 286, 289, 304, 311, 320, 324, 335, 350, 357, 358, 366,369, 378, 392, 438, 460, 467, 473, 485: n = A,T,C or G
cgttaatacgactcactatagggggccgaaattggggnagctcccaccgccggttgggccggcncgggcgcgcgncntgtgctacanncgcatgccgaattantantggtacataatnncatatgngctccagggccatcgatagaactgcggaacacgaccatgtcggtatagaaggccatttttagccacaaaagggatattgcanttttgcaaatgtaatatttcaaaaccgaaaacgggacagaagatgcanaggacgtnggtctacagcaaacgcatcttnaantgcaaaacactttanctcgggngcccctttnaacntttccccaatntcgccaatttaaccnccccccnntttaatcnccntaagcactnggaacccaaaatancccggcccccaaaagtctttttgtgagtttctcccttcgactaggnagctcacccgccttccgggggncccaggnccttcnttcacggaaaanccataaagctcgaagaaaatgctcccttctctgggggggctttt

SEQ ID NO: 6452 - DNA, 245 bp, Homo sapiens
ccgggcaggtacatctagagaacatttgccaaaggcctaagcacggcaaaggaaaataaacacagaatataataaaatgagataatctagcttaaaactataacttcctcttcagaactcccaaccacattggatctcagaaaaatactgtcttcaaaatgacttctacagagaagaaataatttttcctctggacactagcacttaaggggaagattggaagtaaagccttgaaaagagtacct

SEQ ID NO: 6453 - DNA, 397 bp, Homo sapiens
  misc_feature 357, 382: n = A,T,C or G
ccgcggtggcggccggagtgatgccatctgcagttttgtgatctgcaatgattcttcccttcgaggtcagcccattatctttaatcctgacttttttgtggagaaactccgacatgagaaacctgagattttcactgagttggtggtcagcaatatcacaaggctcatcgatttacctggaactgagttggctcagctgatgggggaagtggaccttaagttgcctggcggggctggcccagcatcaggattcttccggtctctcatgtctctcaagcgaaaggaaaaaggagtgatatttgggtccccactgacggaggaaggcattgcccagatataccaactgatttgagtatntaccacaaaaaaacttgtcgagtangaggggttttgtttt

SEQ ID NO: 6454 - DNA, 183 bp, Homo sapiens
cgagtcttagtttctttatccggaaaggccacttcctcatattcaaggcctctgccaacccagtttttgttttcttctcacagcatgtgagagtctttgtttcacccatacatgttagaattccgtagacaatgtaatcattcaaaaactatttattgaatgcctactgtgtgcctggaacct

SEQ ID NO: 6455 - DNA, 386 bp, Homo sapiens
  misc_feature 322, 353: n = A,T,C or G
gctccccgcggtggcggccgcccgggcaggtacagatctgcgttaatttttgacagctcatatatacagatttttagaaatgtaatagaaaatgattttgcacatatggtgcaagtcttgctggtgtatgtttaatgtggcaacacgtgccagaactgtttggcaaaacatgtcaaatggagtgcttgagtcagaactctaatgtaaatgtgtctaaacagcagtatgtatcattatgatgtatttttgtaaacatagtgatggctgctttcagtcatgtaagtgctggataaaaataaccacttcagttggagtaatgtangaaaacgtcacccagcagatgggtagtcctntgcaaagttcactgtcagccagtggcactggtt

SEQ ID NO: 6456 - DNA, 262 bp, Homo sapiens
  misc_feature 206: n = A,T,C or G
cgcggtggcggccgaggtacttgtagtattgtgtaagtttaacgtgcgcattgccaaggttatatttgaatgacgtttttatgtaaatgtccatttattacacgtttcacgaacgctattgtttgtgattgtatgatacactctagctagattattatcttttcttttttttttccttttctttttttttaaaaggtggagtttcnctcttgttacccaagctggagtgcaatggcgtgatctcggctcacccgcaacctcc

SEQ ID NO: 6457 - DNA, 546 bp, Homo sapiens
  misc_feature 522: n = A,T,C or G
ccgggcaggtacaaaatcctttagccagaaatggcctgaaaacgcagaggaggtaggcacaatgaacagcctggaaatcagagtttcttcctctctctgtgctgtgctggtggcatgacaacttacttgttctcacaggtccttcagtgcctgggggcagtttcctgcctcagggttaaagggctgccttcccctccttactcagcttctgaagccaacagatccacctcctggtccgtttctgaacctgatacctgcagaaggaaattcatcaacaacctctccctgactgtcagggtgacttataatgagcttcttctccttctcccagatggggagattcctgtcctagcccaaagacttttttggctggaaaccaggttgccttaaattgccaggagagccagcctccctggcctggtcccagccctctgtgctcaccttccccctgctggtctgacttacaggctcccattttgtgtcagcttctcctctatcggtgggtgtgggcctaagacttangacccctttcctggctaattctta

SEQ ID NO: 6458 - DNA, 370 bp, Homo sapiens
cgaggtacatagaatatgaacacagcacacacatgagagacgcaagtgccaaatgccttggcctgggcttcacgtgtcaagcccaacacagtcttaagaataagcagatatgagaaggagatgagaagtgagtccaggccaatggcggagatgatgacgataaggccatagacgacattgacccggatatcatcacaggccagcttcatgacatcttggtgtaggcagtaggaatgggaaaggatattggagcggcagaagggcagctgcttgatgaaagacaggaaggggtgccatcagtgcagccccccgcaccacaagcaagccacaccaattttggtgacacgaggcaaccgtaagtacctgcccg

SEQ ID NO: 6459 - DNA, 369 bp, Homo sapiens
  misc_feature 1, 79, 113, 183, 198, 202, 204, 240, 248, 256, 260, 299,311, 351: n = A,T,C or G
ntggagctccccgcggcggcggccgaggtaccttccctaattcaccagcccagtatttatttgtatttgtgtttgtttngctggccggatttgactctctatgggaacatcanaaatattatttactccaggattctgaaataagatagatattttatttcatgttttttaaattctccaaanatttatttttatttntttncnttcccatttctggacattgatatatttcagaacttntgtgcagnttttcctncctncctacacctcctctcccttctccccttactcctttcttnctggaatgtaanttagtctatgaaacatgacagtaagctgaaatgtccctgntgattttcactcctctgg

SEQ ID NO: 6460 - DNA, 449 bp, Homo sapiens
  misc_feature 287, 346: n = A,T,C or G
actacttagggcgaattggagctccccgcggtggcggccgcccgggcaggtacgcggggagagagaaggttaagagcaacaagatgggaggcagctgcatggaacctgtcccactgaggaagtaaaacagagttttactcttgttgcccaggctggagcgcaatggtgcgatctcggctcaccgcaatctctgcctcctgagttcaagcgaggagcaaccctacctgatgggctggacttctgcctggattggagtttgatcatgcctccatatgggtgtttaccangcgtatgcattgaacctgagtttgttctcttcaatacaaggaaaatctctgccgcttantgattttccaagaaacatgagcttctgcctttcaatgagggaaggatactcaagaagtcatgtttcgagcactccgggaaaaatgtccttgggagttttcaaa

SEQ ID NO: 6461 - DNA, 451 bp, Homo sapiens
tcctatagggcgaattggagctccccgcggtggcggccgcccgggcaggtacaaatcactaataccactggactggcccaggctcctgggttagcctcccaaggcatcagctttggcattaagaataatctggggaccccattgcaaaaattgggagtgtcattttcttttgccaaaaaggctcctgtcaaactcgaatcaatagcatcagttttcaaggaccatgcggaggaagggacctctgaagatggaacaaaacccgatgagaagagttctgaccaaggactgcagaaggtaggagactctgatgggagcagtaatcttgatggtaaaaaagaggatgaagaccctcaggatggagggtcccttgcctcaacattatccaaattaaaaaggatgaaacgaggaagaaggagctggggctacagagcctgagtattaccacctacat

SEQ ID NO: 6462 - DNA, 458 bp, Homo sapiens
  misc_feature 16, 18, 19, 20, 22, 29, 30, 31, 36, 39, 40, 48, 55, 63, 87,103, 107, 109, 111, 113, 114, 115, 116, 122, 124, 127, 135,148, 155, 157, 159, 160, 162, 167, 171, 175, 176, 188, 189,194, 195, 196, 207, 219, 221, 265, 286, 299, 302, 308: n = A,T,C or G
  misc_feature 315, 318, 352, 373, 376, 377, 381, 396, 400, 444: n = A,T,C or G
ccgcggtggcggccgncnnncnaggttcnnnggganggnncctatgangaaaatnatcgggcnctggaaagtaaggcatctccattnggacggtttggaggcnatgntncncnnnntgcttnangcnatatactngcaagtgcagatntacttgnancnncnagtgncctnttgnncacggcctaccnnattannntagcactgctncacatgcatgtntncctatgcatctgcaagatctcgttggtcccgatcacggccaccncaaagtatgatccatctgatnacacgtcctcggnctnaaaganctaatcnccnaaagggtttatttttttaaattgaaatttccagnaacaattttttttttttcccnttnnttgnggattatttttttcnttcnccattccccttaaaaaaaaaaaaaggttggggccaaaaccccanagggggaaaaaaaa

SEQ ID NO: 6463 - DNA, 556 bp, Homo sapiens
  misc_feature 511, 539: n = A,T,C or G
cccttagcgtggtcgcggcccgaggtactttgatatctactatccactctccaaactggatttaattgctattcctgactttgcacctggagccatggaaaattggggcctcattacatatagggagacgtcactgctttttgaccccaagacctcttctgcttccgataaactgtgggtcaccagagtcatagcccatgaactggcgcaccagtggtttggcaacctggtcacaatggaatggtggaatgatatttggcttaaggagggttttgcaaaatacatggaacttatcgctgttaatgctacatatccagagctgcaatttgatgactattttttgaatgtgtgttttgaagtaattacaaaagattcattgaattcatcccgccctatctccaaaccagcggaaaccccgactcaaatacaggaaatgtttgatgaagtttcctataacaagggagcttgtattttgaatatgctcaaggattttctgggtgaggagaaattncagaaaggaataattcagtacctgcccnggccggccgctcgaaag

SEQ ID NO: 6464 - DNA, 361 bp, Homo sapiens
  misc_feature 333: n = A,T,C or G
ccctttcgagcggccgcccgggcaggtacgcatactaaaactagattttctgaaaatgcaaaatgtatccatactaaattccaagtcttcaagcatcagaggactcagaaaattgagaaaccccatgcatgcattgaatgtgagcaaaccttccttaggaagtctcagctcatttaccatgagaacatttgtatacaagagaatcctggaagtggtcaatgtgagaaattatccagaagtgtcctgttcactaagcatctgaaaactaatacaacagacaaaatctgtatacccaatgaatatagaaaaggctctactgtgaagagtagtctnattacacattaacaaacccatacaggaa

SEQ ID NO: 6465 - DNA, 276 bp, Homo sapiens
cccttagcgtggtcgcggccgaggtactataggatacaaccagcgaaacagaattgatactctcatgtatctactagcatatccacaaaaacccatggttaagacaaaaaccattgaattgatagaatttgaggaactgccagctggacagaatgcaacagttgctgtgatgagctatagtggctatgatattgaagatgctcttgttttaaacaaggcctctttagacagaggctttgggcgttgccttgtatataaaaatgctaaggggacttt

SEQ ID NO: 6466 - DNA, 355 bp, Homo sapiens
  misc_feature 127, 327, 329, 354: n = A,T,C or G
ccctttcgagcggccgcccgggcaggtacatgtggacatcaatctgtcccaggacatttttgaaaagactattcactccccattgaattgccttgtctcccttgtcaaagtcacaacaattactggncctcatttttgtatctgggtcacatgttcctagttagtaactataactaccctcttctactacgcattctgtattcccttagctttcagcaagcaactcagttggtcttgattctttatatgggggcaatgacccaaactttccttcctgaagggaattggggccattggccagctgtgccccgaattggggtttgttgntnagttttccatttaaaattaaatcanc

SEQ ID NO: 6467 - DNA, 170 bp, Homo sapiens
  misc_feature 73, 88, 149, 151, 155: n = A,T,C or G
cccttagcgtggtcgcggccgaggtatagtaaaaatagaatataaaaaatgctacacatgtgtagggcagttntcattataatttagnccatctttgactgaaacattattattcagcgtatgactatatatacaagaaaacatacacncncacncacacatacacacat

SEQ ID NO: 6468 - DNA, 257 bp, Homo sapiens
  misc_feature 54: n = A,T,C or G
ccctttcgagcggccgcccgggcaggtacatggttcgaagccactatgtaacanaaacactctctgaagaagaggctgggttccctttagcttacacagtgaccatccacaaagacttcggcacttttgagaggcccttcagggcgatttatgtgccccaaaatgtctactgtgtgcacctggatcagaaggcgacggatgcctttaaaggtgcagtgaaacagttactcagctgcttcccaaatgcttttctggct

SEQ ID NO: 6469 - DNA, 375 bp, Homo sapiens
cccttagcgtggtcgcggccgaggtacctgatcaatctgatagactctccaggacacgtggacttttcctcagaagtatcaaccgctgttcgcatttgtgatggatgcatcattgtggtagatgctgtggaaggagtctatccacagacgcaggcagttctgcgacaagcttggcttgaaaacatccgtccggttttagtgattaataagattgatcgcttgatagtggaactgaaattcaccccacaagaggcctattctcacctcaagaatattttagaacagattaatgcgctcacagggactctttttacttctaaagtcctagaagaaagagcagagagggagactgaatcccaagtgaatccaaattct

SEQ ID NO: 6470 - DNA, 421 bp, Homo sapiens
ccctttcgagcggccgcccgggcaggtacgcggggttttctttaatttttttcatgctcattattttcttcaaactttatttctattctgtaagtttttggcaatttaaattttcccggctaagcacagtggctcatgcttgtaattcccagcacttctggaggcggaggcaggaagattgcttgagcccaggagttcacaatcagcctgggcaacatagtcgctactaaaaattagctaggcatggtggtgtgtgcctgtagtcccagctactcaggaggttgaagcagtaggatcacttgagccctgggggccgaagctgcagtgagccgtgagcatgcctgggacacagagcaagaccctttctcaaaaaaaaattttttttaattaagtgaattttcctaaatagtgattctgttct

SEQ ID NO: 6471 - DNA, 328 bp, Homo sapiens
cccttagcgtggtcgcggccgaggtacaagatttcttagggcgaatccaattccatcaatacctggggaaacacaaaaacctggtgcagctggaaggctgctgcactgaaaagctgccactctatatggtgttggaggatgtggcccagggggacctgctcggctttctctggacctgtcggcgggatgtgatgactatggatggtcttctctatgatctcacagaaaaacaagtatatcacatcggaaagcaggtccttttggcgctggaattcctgcagggagaagcattttgttccatggggggatgtggcaagcccagggaata

SEQ ID NO: 6472 - DNA, 396 bp, Homo sapiens
ccctttcgagcggccgcccgggcaggtacgatcttggctcactgcaacctctccctcccgggttcaagtgattctcgtgcctcagcctcttgagtagctgggattacaggcgcgtgccactgcgtccggctaatttttgtatttttagtagagatggggtttcaccatgttggccaggctgatctcaaactcctgacctcatgtggtccacccaccttggcctcccaaagtgctgggattacaggcgtgagccaccacgctcagcctacaagcaatttttttaaaaactgacacctattactgataaaattctctgtttaaaatcctattttactattttaaagataaagtattagttttttttaaataccaataatttctggttattggataaaa

SEQ ID NO: 6473 - DNA, 657 bp, Homo sapiens
  misc_feature 28, 61, 65, 102, 117, 181, 188, 202, 210, 216, 220, 221,238, 264, 268, 274, 275, 289, 295, 314, 322, 335, 349, 352,354, 386, 393, 405, 417, 421, 426, 429, 445, 455, 472, 487,494, 499, 506, 525, 527, 535, 545, 551, 627, 636: n = A,T,C or G
cggcccgccagtgtgggatggatatctngcagaaattcgcccttagcgcgggtccgcggtngagngcactgcagtagtcgtgtctccgtatgtcatctcagnggagcttaaaatggngcctgatttaacattgttttttgtgttattttttgctttgaaaacaaacggcacacaatttttnaaacaancccaaaaaaaaatngaccaatnttcctnaagnntttaaggttaaattttncttaccaaaaatccaattcctttaantggnttaatnntaagccaaaggggnttaaanggaaccaattccttttttntttaaaanaaaaaaaaaattnaattaaggcctttnccntnacccccaaaaggagggaaaaaaccaacccttncaaaatnttttttttcctnagggaaggaatntttnggccnctnccttaaattccttttncccttttttncccctttcaaaggtccnttttccccccaaggnaaccttnggccnttaattncaaaaaggccctgggtggntnaaaaaaanaaaatttttnaacctntttttccaaccttgggggaaacccccccttaaaaaaattttaaatattgggtgccttccttggccttaattccctnggaaccctngggccccaagattaaaaattt

SEQ ID NO: 6474 - DNA, 427 bp, Homo sapiens
gactcctatagggcgaattggagctccccgcggtggcggccgaggtactgactgaaaagaactggataaaataccttcttccctggctgtgtattcagcctacacgtattgaggaattcagatgtgaagtagatgtccacatcacagaaaaagagaaggacgttgcttcccttccagaagcgggctccaacatcaagtccctttccccgagaaaattctccattcagctggatgaaggtaaagttcctgaagttggcagctttggaagtgttttcaagtattcctttgacttcatttatttcttctttcccaaagtaaacaacagtgagatggactctcccatcctgctcaatgcacatctccctgaaattctgcatgaactgccggaacttgtccaccctttttgctagaggcacgataacattga

SEQ ID NO: 6475 - DNA, 385 bp, Homo sapiens
actacctatcccctcttcctcagaggaccatccaaatttccaacatcatagattagttttgcgttcttttaaattgcatataaagagacttacacagtgtatatacccccttgtgtgcttcttttttcttatatttgtgcatttcatctatgtaggtaaagttttttcatccttactgttgtatgatattccattgtatgatataccagaatatatttacacattctgccattgatggtcatgtggattgtttccagttttgattagtgttgcattgaacattcttttacattcaggtctgctgtaacaacagataactttcctaaaaatcacccacactatgaaaaatggcacaatgaaaaaccacaggtgttatttcaaaaat

SEQ ID NO: 6476 - DNA, 224 bp, Homo sapiens
ccgcggtggctgcattctgtcaatacattcccaaatacagactccttttttggcatgcttttctcctttatcatcaaataaagttccgtgctctaatctttcatagtctgaatccaggagaaatgttttaaagcgattagacacatagtggaaagccaagaactttaagtaatagagattgaattcaaactcagttggatactggttgtgaacctggtgtacct

SEQ ID NO: 6477 - DNA, 265 bp, Homo sapiens
  misc_feature 62, 119, 133, 144, 163, 172, 174, 178, 181, 188, 191, 212,217, 218, 239, 248, 258, 263: n = A,T,C or G
acgccgaggtactcttatttgtagtttatttttttgactttgggattccctaagtcttcttnagacagattctgcatgttgtaataatttcagatgtaatccccttcagttattaactngaagccctgacctnataatggtcangtatggggtagagaaaaancacattttntnaatnctncacattnaanactcttcattccttttttaangatgnngcccttgttgttcttccttgnaagcccttngttgtacccnttttnaa

SEQ ID NO: 6478 - DNA, 210 bp, Homo sapiens
  misc_feature 1, 86, 184: n = A,T,C or G
ngtacaagttcctaggcaggtcccagcacactcataataagtgtgatacaacagggttttagtcatgatgttccccgaccacgtantgtgggtgcagtggaggcatccctcccagggttctccttttaacatggataaggggagtagcaagaacaaagtgatgaagtagcatgttcatacccancatggacagaaaaggctttttcctgg

SEQ ID NO: 6479 - DNA, 224 bp, Homo sapiens; identical to SEQ ID NO: 6476

SEQ ID NO: 6480 - DNA, 367 bp, Homo sapiens
  misc_feature 73, 324, 367: n = A,T,C or G
ccgcggtggcggccgaggtactcatttcccttcctcagccttatcacccagaatccatagtggggggataagnagaccacctccttccggtctacattttgcttacatactcccaggccccactcagacctgtctcccacctccacctcccagtagtgccggcctgaggagatgcactggcttcccaggacgatattatagcggtaaaatctctcaggattgtctggcagtttctggtttggtgtctccatagtgcacacgttttctgtcctcagacacgatgagacgggagtaagcagtatctggatccaagcgcacattcanctgcataagtcgctctagaactagtggattcccccgggctgcn

SEQ ID NO: 6481 - DNA, 414 bp, Homo sapiens
  misc_feature 17, 30, 31: n = A,T,C or G
aggtacggtttctcccncgtgtggcttcgnntgtgcgtcttcagcgttgactggttcctgaaggcctgccacactgcctacactcaactcgtttctttacaaggtgaacgctcatgtgcctccgccgggataaatagtcaccaaagactttcccgcaggcggcgcattcgtagcgtctctcttgcgtgtgtatcttcctgtgtgcggtgaggtttgaactcgcgctgaaagctttcccgcagagatcgcacccgtatggtttctctccagtgtgagagttcatgtgagtcttaaggatggactggtttcggaaggtcttcccgcactgccgacattccacgggtttcttgacgatgtgaatcctcatgtgtttcctccgggacacgagatcgccaaaggatttcccgcattctt

SEQ ID NO: 6482 - DNA, 146 bp, Homo sapiens
ccgcggtggcggccgtcagggaataaaggacagtgacttttaattaattaactagtaacaaatgaggtgagtcttattgcttccccagcttgttgctttgagagagtttccaggatgtggtgaagggagggagaacctaggtacct

SEQ ID NO: 6483 - DNA, 148 bp, Homo sapiens
cctcgcggtggcggccgaggtacctaggttctccctcccttcaccacatcctggaaactctctcaaagcagcaagctggggaagcaataagactcacctcatttgttactagttaattaattaaaagtcactgtcctttattccctga

SEQ ID NO: 6484 - DNA, 146 bp, Homo sapiens; identical to SEQ ID NO: 6482

SEQ ID NO: 6485 - DNA, 147 bp, Homo sapiens
ccgcggtggcggccgtcagggaataaaggacacgtgacttttaattaattaactagtaacaaatgaggtgagtcttattgcttccccagcttgttgttttgagagagtttccaggatgtggtgaagggagggagaacctaggtacct

SEQ ID NO: 6486 - DNA, 122 bp, Homo sapiens
ggttctccctcccttcaccacatcctggaaactctctcaaagcaacaagctggggaagcaataagactcacctcatttgttactagttaattaattaaaagtcactgtcctttattccctga

SEQ ID NO: 6487 - DNA, 131 bp, Homo sapiens
tcagggaataaaggacagtgacttttaattaattaactagtaacaaatgaggtgagtcttattgcttccccagcttgttgctttgagagagtttccaggatgtggtggagggagggagaacctaggtacct

SEQ ID NO: 6488 - DNA, 396 bp, Homo sapiens
ccgcggtggcggccgggggccattgagactgccatggaagacttgaaaggtcacgtagctgagacttctggagagaccattcaaggcttctggctcttgacaaagatagaccactggaacaatgagaaggagagaattctactggtcacagacaagactctcttgatctgcaaatacgacttcatcatgctgagttgtgtgcagctgcagcggattcctctgagcgctgtctatcgcatctgcctgggcaagttcaccttccctgggatgtccctggacaagagacaaggagaaggccttaggatctactgggggagtccggaggagcagtctcttctgtcccgctggaacccatggtccactgaagttccttatgctactttcactgagcatcct

SEQ ID NO: 6489 - DNA, 293 bp, Homo sapiens
ccgcggtggcggccgaggtacaagaaacttccaggactttgactgtcaggaacatgatatagaaacaactcatggtgtggtccacgtcactataagaggcttacccaaaggaaacagaccagttatactaacatatcatgacattggcctcaaccataaatcctgtttcaatgcattctttaactttgaggatatgcaagagatcacccagcactttgctgtctgtcatgtggatgccccaggccagcaggaaggtgcaccctctttcccaacagggtatcagtacctgcccg

SEQ ID NO: 6490 - DNA, 990 bp, Homo sapiens
  misc_feature 16, 37, 46, 48, 49, 60, 73, 81, 88, 91, 94, 106, 122, 127,131, 140, 148, 156, 187, 190, 195, 197, 200, 208, 210, 211,223, 225, 230, 232, 241, 243, 245, 255, 259, 268, 270, 277,284, 337, 357, 361, 411, 430, 435, 441, 451, 452, 461: n = A,T,C or G
  misc_feature 463, 464, 465, 482, 484, 487, 516, 526, 558, 638, 640, 642,650, 657, 658, 667, 690, 692, 730, 731, 737, 741, 742, 743,745, 759, 762, 770, 775, 776, 781, 790, 793, 799, 819, 822,851, 859, 878, 892, 893, 894, 900, 902, 918, 959, 980: n = A,T,C or G
  misc_feature 986, 987: n = A,T,C or G
cgcccccccccgaggntttttagggaaaaacccccgnatttttagngnnaaaaaagggcnccccggaaaaatntggggggnttttttnttncgnggagggaaaaanaacaaatcgccccttnccggnaagnccggggccncccggccncccaaggntgggtttggttattgggggggaaattaattnccntgggncnagnttattaananncccgcccccccntnttttntnttatgtccngngnacccccgccncccnggggggccnangggggtnaaccccnccttccttgcaagtgaatttaattgggccaaaaaaaaccaaaaaaattggccnaaggaaccctaagggggccncttncaaagggggccaagggaagggaaccttaaaaaagggggaaccaaattccntccttttggggggggggtngggtncccctnggaaaaaggnnggggaaatntnnngggggaacccccccccntnggnaaggggggggcccaaggaaaccaaccccntaaaaaaggnttaaagggggaaaaaattcccccccaaaaggntgggggggggaaaaagggccaaaaaaaagggcccccaatttaaaaaggggggaaaaaaggcccccccccaagggggaaantntncccccttnttggggnngggaaattncccaaagggggggaaaaaagggntnggggggggggcccccaaaggggggaaaaaagggggggnncccttngggnnntncccccaaagggccnttnccaaaccnaaatnnccttnccaaaattnccnttgggnccaaattggggccaaaaggnccnaaacccgggggggaaaccccccggggggnaaatgggncccggcccccccccaaccntttggggggggggnnncccttntngggggggccctttttnccccccccctttcccccccccaaattcccttttttcccttncaaaaaagggccccaaggggngggggnnccc

SEQ ID NO: 6491 - DNA, 284 bp, Homo sapiens
  misc_feature 188, 249, 256, 257: n = A,T,C or G
cccttagcgtggtcgcggccgaggtacccaaagaacacatttgctttgagaagtggtggtaggaggcagacaaaggcagaaaaaataaagaggtgagatctactcaggagagctcctgtcctttgtggcatgattaattttttttatctctacttgagttgtcttattttttaaggctataaacttangtgaccagctggataataaaagccagctggcagacttaaattgataaaacttttttgcaangacctcnngtgatcaaactatttttttactatact

SEQ ID NO: 6492 - DNA, 344 bp, Homo sapiens
  misc_feature 307, 308, 336: n = A,T,C or G
ccctttcgagcggccgcccgggcaggtacatgcagtaatggggtagatgtgtgtggtgtgtcttcattcctgcaagggtgcttgttagggagtgtttccaggaggaacaagtctgaaaccaatcatgaaataaatggtaggtgtgaactggaaaactaattcaaaagagagatcgtgatatcagtgtggttgatacaccttggcaatatggaaggctctaatttgcccatatttgaaataataattcagctttttgtaatacaaaataacaaaggattgagaaatcatggtgtctaatgtataaaannacccaggaaacataaatatatcaactgnataaatgt

SEQ ID NO: 6493 - DNA, 521 bp, Homo sapiens
ccctttcgagcggcccgcccgggcaggtacgcgggacacacacacagcacctgcacgcagatgcacacatctctagtcaaatgaggctctcagctttttgatagggctttttgatacgtgtataaccaatactttattctcactgtagtcaaggactcattgcaattcagaaatgagaagctgatccggaactccactacagctcaaagaaattctcgaatgttctcacctattaacagttattaaaatggaagaagctggggatgaaattgtgagcaatgccatctcctacgctctatacaaagccttcagcaccagtgagcaagacaaggataactggaatgggcagctgaagcttctgctggagtggaaccagctggacttagccaatgatgagattttcaccaatgaccgccgatgggagtctgctgaccttcaagaagtcatgtttacggctctcataaaggacagacccaagtttgtcccgcctctttctggagaatggcttgaacctacggaag

SEQ ID NO: 6494 - DNA, 363 bp, Homo sapiens
ccctttcgagcggccgcccgggcaggtaccacttaatgggcaagtttatgaacttttaactgtcttcatggactggatttcggatcatcatcttagcaaagtgaaacatgaagaatctggaatggatggtaaaaaaccacaactcaaatttgcttcccagagaaatgatattcaggagaagtgtgtaaagcttttgcctctaatgacagagcagctacagtggatgccatttgtgaatatcaaacttcacgagccttttgtaaaatttatatattggtccctaaggcagctagaatgctggagcacagcactcgactatgacatcaacattgagggagattgggtgaaagacatttttaaaag

SEQ ID NO: 6495 - DNA, 225 bp, Homo sapiens
  misc_feature 106, 110, 119, 125, 136, 175, 191: n = A,T,C or G
ccctttcgagcggccgcccgggctggtacaaatgacggaacattgcctaaaagttactttgcaatgactccataatattagcttgttttttgtctcgccttttctntccnaagaaaaanaaaaanaaaaaaaagtncaatagttccattgggccactaattcagcatctttgtcngaccttctcaaccttnttcggccccttcaccagttcatgcctcttgggga

SEQ ID NO: 6496 - DNA, 482 bp, Homo sapiens
  misc_feature 20, 76, 78, 163, 197, 218, 260, 267, 282, 305, 313, 321,344, 377, 384, 392, 403, 420, 426, 433, 437, 441, 442, 459,467, 473: n = A,T,C or G
cccttagcgtggtcgcggcncgaggtacaccaaggttggtgcattaccggaagtggatcaagggcaccatcgtggncnacccctgagcaccccttatcaaccccctattgtagtaaacttggaaacctttgggaaatgaccaggccaaggactcaaagccttnccccagttcttacttgaccctttttgtcctttangttgttgagcgtccaaggggntttgcctaaggaaaaaaggaaaattcaagctaggacacaagngttgttnattacccaagaggtngtttttcctttaaaaattgggtngttaaatntttatagntcccctcttttcttgatggttcnccttggggggggaaaataaccttggggccccanttggccncttggggnagggaaccaanttaatttccacccttcnataatntttttcnttcnttgnnagtggaaccaaccaatntattaagngggaantgggggggg

SEQ ID NO: 6497 - DNA, 299 bp, Homo sapiens
  misc_feature 165, 266, 276: n = A,T,C or G
cccttagcgtggtcgcggccgaggtacgcggggggctcacagggtgtcatggagcacgaggaaaggtgcagggaatcctagagaaagtcttgtgtttaaggagcaagacaggaaggagaaaccagtcagtgagatgggtcaaatgtaagtggagaaaggaacgtncaaggagaagcgggctgtcgctatggtgaatcatgcagagatgaaggcgggacgatggagcagtggccccttgggcttggcagctcttctggcagtgattnttgacagtgnaggttgacaaaaagtttaaagag

SEQ ID NO: 6498 - DNA, 347 bp, Homo sapiens
  misc_feature 323: n = A,T,C or G
cccttagcgtggtcgcggccgaggtactggagtgctgccggttgtcacccagactccagctagagtgttactataaacttcattctcttctattactccttgtcccttttcatgcacataaaatcccaccatgctggccatcatgaattttgttatgccgaacaattggacaactgtttgtcctaatttgaattcctgctaatgcattgccataaatgtcatttccttcaataaggcctcgtccatcaccaaagatgtaaactcctccttgatttccattaaaatattaggaatttccccttattgttggggtcacctatttngagggtaaatccataacacctggc

SEQ ID NO: 6499 - DNA, 325 bp, Homo sapiens
  misc_feature 255, 279, 280, 295, 305: n = A,T,C or G
cccttagcgtggtcgcggccgaggtacaccgactacggcggactaatcttcaactcctacatacttcccccattattcctagaaccaggcgacctgcgactccttgacgttgacaatcgagtagtacacacattgaagaacctgaaatggcccaaacccagaaagaaagcccaactagatcctcagaagacgcttctagggacaataaccgatgaggaaaagatggcctccttgcgccaccgtctgttatgattnctctccattgccagacaagaaagnncgttcttctaagccngtacagccangttgatgatgggcaaaatag

SEQ ID NO: 6500 - DNA, 930 bp, Homo sapiens
  misc_feature 7, 82, 95, 109, 110, 122, 149, 154, 166, 174, 230, 268, 276,277, 316, 325, 340, 351, 436, 439, 453, 456, 461, 470, 558,563, 577, 583, 585, 615, 617, 623, 636, 642, 644, 670, 671,685, 696, 709, 711, 736, 782, 792, 795, 813, 839: n = A,T,C or G
  misc_feature 845, 848, 869, 870, 872, 873, 889, 894, 899: n = A,T,C or G
aaatggnccaattgggcccttcccggaaaggacccgggggccccccggccccccaaggtttgggtttgggaaattggggggnaatttaatttccnttgggcccaaaggnnaaaaaatttttncgggccccccccttttttttcccgggnaaggncccggggggccnccgggccncccccgggggggggcccaaaggggggttttaacccccctttttaaaccctttgggnaagggaaaaaaaaatttttttccaaaatttccaaaggncccttttnnttttttttcccccctttaacccccaaaaaaaaggggggnccaaagggnaaacccaaatttccntttaaaaaccncccggttttttcccccgggaaaaaccccccccttttcaaaaaggggggggggggaaagggaaaattcccaaaaacccaatttaanggnaaaccaaagggccnaanggttngggggtttngtaaaaaaaaccaaaggttttttgggggaaattccttggggggaaaggaaaaaaaaagggaattggggttggtttccaaattgggggnccaanaatttggtcctttnggaaangnaaaaaagggggaagggggaaatttcccaangngggggnaatttggaaaggnaaaaangnaaacccccaaaaacccggttttttannggggggaaaaaagntttcctttggnccaaacctttggncnaaaggggggtttaatttttaaaggntttgggaaggggttaaatttttttttttggggaaaaaaaacccaancctttggttnggnaaattgggttccctttcnaaagggggccccaatttggtaaaaangtgggnaanaaggggaaacccccctttggnntnnggggggaaattttttnccttnggccnaaagggggggaaaccccccaagggtttggtt

SEQ ID NO: 6501 - DNA, 406 bp, Homo sapiens
cccttagcgtggtcgcggccgaggtaccccactgagcattggctgctgctggcttggagctcctgccatctgcacctgctgtaatcctgaggttcctgcaaggatcgtcccagctcctggctggcctgcctggccaggaccactgctgcctgaaggtctccaattagatagtcctttcccaaaggcaacagctgccaccaaggcattagtgtctgtagggttaaaggtctgcttgttcggccggagacctccactctctgattctcgctcctctttgctgattttctccagaaggtttgaacacattttattcaagctctggatctgcttctgggctgcatctgcaccaatgcgggcagcatctgtcgtcaagttgcttctcctgttcttccacttcagggtcagg

SEQ ID NO: 6502 - DNA, 612 bp, Homo sapiens
agaattcgcccttagcgtggtcgcggccgaggtacctatcttcacgaccgcatccgccagacaccggtcccacttcctgccgagctccgactcagacatgttccccacccgcgcctccccgcgtactaaatctctttttccccttctatcttttcttcatctctctcacatttactttatttttcctctttattttctgagtcattgactcctttatttagaagtaaaggatattatgtgccatatttcttctagaatcactggaagaataaatgggcctctcttagtagttatattaagttatgctttctcagttataaggaaggacaaaatgttgaacaattgtcataatcataatctgaaagacttaatttaaatttcatatgctaaactttcaggcggtagctgaagtttgacttaataaatacttatatatttttattattttataacaggtatggtaacacagtaatataacttttgaaaatgtgtgtttgcatatccaaacgaatattgttcttcgaagcatcacttagtgaaattacgccctcattccaaatatgttgtcattggtcagaacattttcagaaacatcttggaattatgaatttt

SEQ ID NO: 6503 - DNA, 435 bp, Homo sapiens
  misc_feature 114, 202, 212, 216, 220, 257, 267, 299, 308, 316, 349, 374,388: n = A,T,C or G
tagcggccgcccgggcaggtacatgaggcggatgtcttcatcgtgcaattcatggccttccacaacaatggtcccagtcttctggaactgctccagctcctcacttgctcaacntgcttgatggtacggtcatcactgccttaaaggctcccttcagacgcttccccagggactcatggtgtattctgggttcttgcccctntagaccaganatgnccantactttgtttttttatcctggtaagtaccaggtgtanacctttttcngaacatttgtaggtatccttcaaatggaatantaacttctnccaaaagnaacttggatgattcttttaaagaaagcctttcntgggatcctttggaatgggattaanccaaccaaattttnctttttcaaaaggggatacctttttatgggggaattaggttttttcc

SEQ ID NO: 6504 - DNA, 289 bp, Homo sapiens
  misc_feature 12, 22, 24, 27: n = A,T,C or G
cccttagcgttntcgcggccgntnttntatctacctcacagagctacgaaaatcaaatgagaaggggtatggcactgaccacagcagcatactgctatgaacgtggtaacagatagacaggcacgccccctggagggctgctcccttcactactggcgcattatcgtgcagttcactttggaaaatatttttcttctaaatctatttttagtattgaacagcacactggagtttttgtccagaagtttgactttagaagataagaaataactgagcgtattgcaagcag

SEQ ID NO: 6505 - DNA, 342 bp, Homo sapiens
ccctttcgagcggccgcccgggcaggtacctgctttgcatttcatttgctctgtttttcagaactacactttacgacatgagaaaaactggtataagcagaatgttcctacatttagttaatatcagttctaatttaatacataaatgacttgttcaaatacttacttagactccatgtaagggaggagaaaaggggagaaaattagagtgggggaagatgaatcaaatcacatttgtagaccacactacaacaattggaagctacttatcatatttcctaagataaagttttgttgggatcctaatatggggaaggatttaaaaagagatttaaaaaaggt

SEQ ID NO: 6506 - DNA, 335 bp, Homo sapiens
  misc_feature 244, 279: n = A,T,C or G
ccctttcgagcggccgcccgggcaggtactaaagtgtgtaatacatgttcaacttttcatttgattaaaagaagtattatttaatacattcttagtaaagaaaaatttttggattttttgttctaaaaataaattccaaattctggttttctaaacccaaatgaagaatgaatgacaatattcatttactttttctttcattcccttcatatcatatgtaaaaatttgtcagcaaagtgatatnttatggaattgctgtcaggaaacacaggtgaatanaaggtaatacacttccttctttgtggaaacttgaattattacagagaaagaaatat

SEQ ID NO: 6507 - DNA, 391 bp, Homo sapiens
cccttagcgtggtcgcggccgaggtaccattatgtgcccgaattccgaaaagtgtccatagcagctaccatcatctatgcctatgcctggctggttcctcttgcactctggggtttcctcatgtggagaaacagcaaagttatgaacatcgtctcctattcatttctggagattggtgtgtgtctatgggatatttccctcttcatttatatccccacccgcaatactgtgggattatcccccagaaagctgttcgttggattctagtcatgattgccctgggcatctcaggatctctcttggcaatgacattttggccagctgttcgtgaggataaccgacgcgttgcattggccacaattgtgacaattgtgttgctccatatgctgct

SEQ ID NO: 6508 - DNA, 300 bp, Homo sapiens
cccttagcgtggtcgcggccgaggtacacatatcctgagctatccacagtccccgaactctgcaacattgctttcaggtgatagagacaagatggtccatgcaaatgagctgacacaagtcatgtcgtgtgcaatcaagataggatcccagacatcttcagaatggtttacagtcacaagaaataaagttccaatgaagtggttggcatttggaagcacactgttttaaatatatctccctgagggtatgtttatatattagtgcactggtcaatatctgacactatctgtcattttatt

SEQ ID NO: 6509 - DNA, 793 bp, Homo sapiens
  misc_feature 11, 17, 119, 141, 158, 209, 232, 240, 243, 251, 254, 257,296, 341, 360, 382, 392, 424, 489, 493, 519, 536, 559, 565,576, 592, 623, 639, 650, 653, 677, 708, 734, 737, 741, 755,769, 775: n = A,T,C or G
gtcagcggcgnagtgtntggtatctgagaattcgcctttcgagcggccgcccgggcaggtacttcagctccaccacggtgcaggacagctcctcgtcccggaagtaaggtatagtcagngtggatgccaaaacttcaatcnattgggggccaccccantttaaccccccaacctttttttttttccttttgggccttccaaaagggttnaaggaaaaaaccccctttttggnaacccttnggnaatttggnaanggnttaaatttccctttttggggggggggggggggttttccnaaaaaaaaggggggggggccccaaatttcccttttcccccccccnaattttttttttggggggncccttttttttttaaaaaaaangggaaaaaangggaaaattggggtttaaaaaaattttttttnccaaacccccccaagggggggaaaaccccccaaattttcccaaaattttttggggtttccccttngggncccgggaaaagggttttcccaaaaangggggggtttccccccntttttggggaatttcccaagggnaaattncctttgggttngggaaaattttttttntttcccccccccccccctttaagggtttttncccccaattttttccnttttttccaanccnggttaaaggttttcccgggttttngggaattgggaagggcccttttccctttttnaaggccctttgggcccaaggcccttnggnaagntttcccccttgggnaaaaaaggggtttncaaggntttggggggcccaaaaaa

SEQ ID NO: 6510 - DNA, 200 bp, Homo sapiens
  misc_feature 87, 121, 171, 186: n = A,T,C or G
cccttagcgtggtcgcggccgaggtacctgaggagaatttcttcaatgttcctgctttcttaactgtctcaggacaacttcatctanaagtgatgtcaggagcttttactcaagtgtttgnctttggtccgaccttccgagctgaaaattctcagagccggaggcacctgncagagtttttatatnatagaaagcagaga

SEQ ID NO: 6511 - DNA, 353 bp, Homo sapiens
  misc_feature 335: n = A,T,C or G
ccctttcgagcggccgcccgggcaggtacagctctccgttgttttatggcctgggaccctgaagagaaaagccacaaattttaaagtagatactaagttgctagttactatccaagaggcaaacttctagatcaataatgaggaagaaacatcatggcaaatcaagtgaaaggtaattaacacaacaagaaacccgttactgatttctgtaacataaaaatctacctttttcattttgtaaactcaccttcccatcccaaatagcagtgaagccttcaaaaatcttgaatttattcatcatcgaacataaccaattctcacaattttgcactatntcaccaataaatatcttt

SEQ ID NO: 6512 - DNA, 292 bp, Homo sapiens
  misc_feature 111, 114, 143, 232, 278: n = A,T,C or G
cccttagcgtggtcgcggccgaggtaccagccagttactgagcccctgtcacccttgaagtgagttccacctgaccagtcttgagcagccaacaggctcaattaagcccgnctnggttttccatatggctcatgattctaatntaaggaacaagtaactaaaaatgttaagccagtgcaaaataatctgcttacctactcacattggaaaagccctctgagctgaataattntggccattcctgctgtcaacaatactgctgcccaaatgcggcttangaggctgcttctgc

SEQ ID NO: 6513 - DNA, 298 bp, Homo sapiens
cccttagcgtggtcgcggccgaggtactatctacctcacagagctacgaaaatcaaatgagaaggggtatggcactgaccacagcagcatactgctatgaacgtggttaacagatagacaggcacgccccctggagggctgctcccttcactactggcgcattatcgtgcagttcactttggaaaatatttttcttctaaatctatttttagtattgaacagcacactggagtttttgtccagaagtttgactttagaagataagaaataactgagcgtattgcaagcaggagttaga

SEQ ID NO: 6514 - DNA, 479 bp, Homo sapiens
  misc_feature 24, 124, 194, 231, 237, 404, 436, 437, 438, 447: n = A,T,C or G
cccttagcgtggtcgcggcccgangtacgcgggggtccagggttgctaggaaaagaaatcagcagacacaggtgtagaccagagtgtttcttaaatggtgaattttgtcctctctgtgtcctgnggaatactggccatgcctggagacatatcactcaatttctctgaggacacagataggatggggtgtctgngttatttgtggggtactacagcagtcaaagagatctncactanagatcagaaagaagcaccactattttcttctatgacgtgtatgtgttggtcatgaagcatgctagtatgaataaggcaatgtgttaagcactggcatacaaatgcagctaaaggtgctgaaggaaggcagtggggtggtgcaggcacacagcaatggagctcttccncgtgacacgttagtcatcttctcacagagcannngaagagctntcttatagtccccagatgtatctccttaatca

SEQ ID NO: 6515 - DNA, 339 bp, Homo sapiens
  misc_feature 1, 2, 14, 32, 143, 144, 150, 153, 158, 159, 160, 163, 164,165, 166, 188, 196, 205, 220, 229, 257, 280, 283, 285, 303,304, 307, 309, 311, 319, 320, 321, 326, 327, 332: n = A,T,C or G
nntaggggccgaanttggggccccttcttagnatgccatggcttcggagccggcccgcccagttgtggatgggatattctggcagaaattccgccccttttccgaagccgggcccgccccggggccagggttacccttttttnntttttnttnttttnnnttnnnnttccccggtctttccccaaaancctttttnatctgggcntttggaatttttttnaaaaaaaantttttggggggggccaaaaattttttgnaaattggggtttaaaaaaaaaanttngntttttttttaaaaaaacnnaancnancctttttnnnttttnnttttnccccttt

SEQ ID NO: 6516 - DNA, 817 bp, Homo sapiens
  misc_feature 5, 17, 24, 32, 33, 45, 50, 62, 67, 72, 80, 101, 102, 106,113, 114, 129, 159, 163, 164, 192, 193, 203, 204, 216, 220,227, 228, 231, 257, 261, 264, 265, 269, 273, 285, 287, 290,298, 299, 310, 323, 326, 338, 342, 346, 361, 370, 383: n = A,T,C or G
  misc_feature 390, 393, 396, 399, 421, 431, 440, 449, 452, 457, 458, 460,467, 478, 479, 495, 506, 512, 514, 521, 536, 542, 551, 553,559, 564, 578, 785: n = A,T,C or G
ccccncccccccttttnccctttnaaagggannaaaatttggggnccccnaaatttgggggnccccntttancccggggngaaggggatcccggggggggnncccncccgggnnccctccccaaagggnatttgggggttttggggttaaatttggggngggnnaaattttaaaattttttccctttggggnncccaaagggnnaaaaaaaatttntttncccgggnnccnccccccttttttttaaagggaacccngggnttnngggngggnttttaccccggnanccngggggggnnccctcccgggnaaaggggggggtnttnaaacccccaaanaaanaaanaataaagggtgaaanaacccaaanaaatttaaatttnaaaaaanttnttnttntttaccaaacccaaatttgggnaaaaaacccnccccccttnttgggcggnccnttggnntnaaagggnttattgggccnnccttttattcaccttnaaggcctttcnccaacntncattaanaagggggcttaaaangtccanttcttttcnanaaaggnaccgntttttttcccaatnattgggcctggtcattaaattcttttcactcattcacccttcttcccaatcatctggctggcatcctcacaattgagttgaagctgttcctcctaaaacaatcctgacttttattttgccaaaatcaatacaatcctttgaattttttatctgcataaattttacagtagaatatgatcaaaccttcatttttaaacctctcttctntttgacaaaacttccttaaaaaagaatacaag

SEQ ID NO: 6517 - DNA, 515 bp, Homo sapiens
ccctttcgagcggccgcccgggcaggtaccatggtaattgagatttggtgtaagtgtaaaatatataacagattttgaagacagcacaaaagaacgtaacataattcatttaaataataccgatgacgccaggcacggtgcctcacgcctgtaatcctagcactttgggaggccgaggtgggtggatcacctgaggtcaggagtttgagactagcctggccaacatggcgaaaccccatctctaaccaaaaatacaaaaattagtgggcatggtggcgggtgcctgtaatcccagctactcgggaggctgaggcaggagaatcacttgaacctggaaggtggaggttgcagtgagcccagattgtgccacttgcactccaacctgggcaacaaagcgaagcactatctcaaaaaaaaaaaactaaaaaaccgatgacatgttgaaatgctattttggatacattgggttaaagtaaaacatgttaaaatgaatttaacctggttccttttacttg

SEQ ID NO: 6518 - DNA, 512 bp, Homo sapiens
  misc_feature 8, 30, 128, 139, 174, 238, 427, 441, 500: n = A,T,C or G
ccctttcnagcggccgcccgggcaggtacncgggacaacacccaacacccatgagttcagtccttaagaaggaaaattgagcaagtatttaattggttggacattgcataaaagaggtccatatccangctaactctanaaattttattctcaaacttagttggcctctttttnttctgtcagaggaccattcttagtggcactggggaaatcttggcacccagaagaattcaactgngctcactgcaaaaatacaatggcctacattggatttgtagaggagaaaggagccctgtattgtgagctgtgctatgaagaaattctttgcccctgaatgtggtcgatgccaaaaggaagatccttggagaaagtcatcaatgcgttgaaacaaacttgggcatgttttctgtttgggtgtgtaacctgnggaaagcccattcngaaccaatgtttttcacttggaggatgggtgaaccctactgtgagacttgattattatnccctctttggta

SEQ ID NO: 6519 - DNA, 246 bp, Homo sapiens
  misc_feature 222: n = A,T,C or G
ccctttcgagcggccgcccgggcaggtacctgaggagaatttcttcaatgttcctgctttcttaactgtctcaggacaacttcatctagaagtgatgtcaggagcttttactcaagtgtttacctttggtccgaccttccgagctgaaaattctcagagccggaggcacctggcagagttttatatgatagaagcagagatttcttttgttgacaagccttnaagatcttatgcagggttataaga

SEQ ID NO: 6520 - DNA, 357 bp, Homo sapiens
  misc_feature 344: n = A,T,C or G
cccttagcgtggtcgcggccgaggtactttaattagaacaaaagaccgacattaacttcaatgcaacataataattcataataatgattgtatattaatctcttgagcttgtaggaatatagcacatgacatacggcatgatacaggcacctgtgtgatcctttggggacttaggtggtgcatattaattagcccctggaaaataaaatctgcttccttctgagaaaagctacctcagtgcttattggctttaagcccatcaaagaaaattaggatgcaaatactggttaaggcctggggtctggcaccttcatttaaaagcttttggtctaagaatgtaaagncacctggaattca

SEQ ID NO: 6521 - DNA, 369 bp, Homo sapiens
ccctttcgagcggccgcccgggcaggtactacatatgcagaatctgatacaatgttaatagactgattaaaatcttgttaacactgcaatgacggcaaccaactctgctctttgagtcaagtgatactgagttttgatgacccattcttttggcccggtgtaagccacttttccattgctggaaccatcagtaaacactgccagagcattttttaaaggcttatgtttggtaactttaggtaaaatccaagtagtcaattttaaaaactggaagatttttgttttggggtaaccgattgtcaataattcccacaaaatcggcaagaccaatctgccatgcaccagaaattgataaaggcttgtctaacc

SEQ ID NO: 6522 - DNA, 465 bp, Homo sapiens
  misc_feature 83, 117, 129, 149, 162, 271, 289, 325, 366, 367, 371, 382,383, 390, 403, 407, 408, 414, 417, 423, 428, 445, 453: n = A,T,C or G
ccctttcgagcggcccgcccgggcaggtacaaagaagagaggatggagaccagggtaggcttcttttcagattatacattctngatcagaaagtctatatcaagttgggattttctnaatgacccaagntttttttggttggtttttgnttgtttggtttgnttgttttaagaatttctgtgcttttgggagctagaagggatattattaaatgagaaaactgagaacaaaaagaaagagacaattttatttttgggttgcaagggataanaaaccttactccaacaanccaaagcaaaagggggggtttttattaggaaaaaanacattttgagccttttctatcaggaaattccaaaagggaanngaangttggatcaanncccaagncctttccaaaaancccnnaaattnaangggttnttttnaaaaacaccccccaggngccccccncttttttttttt

SEQ ID NO: 6523 - DNA, 380 bp, Homo sapiens
  misc_feature 45, 131, 134, 159, 174, 181, 183, 194, 214, 226, 253, 286,323, 354: n = A,T,C or G
ccctttcgagcggccgcccgggcaggtacctgtctcatatgtggnaactacgtggggcagcacactcaaggaatgaaggaagtttcagtgaatgacaactttataaagacagtgttgaggcagccccagtngcnctgtttggggagccatggaaaccancatgttgggcccggnagtgtgncnttgcaggacangaaggttcaaaaaataaggngttgaggggtgngaataagggaagaaccccgggaacgtnatcctgggagcttggagattttatttctacaantttctcttgttctttaaactattttaaggggttgatngggatctcttgccagataaagttggggaaanaagatttctttcattggggccccccc

SEQ ID NO: 6524 - DNA, 350 bp, Homo sapiens
cccttagcgtggtcgcggccgaggtacctcaaggaggcagagaagcagcaggcataaactttcctaaatcaagtaaacagtgtcaggaattccgagtgctggttataggtataccgaaacgcctgatgacccctatctaatttctagttatctacacttagtcatttacacacagtctcatttggcatccagaacatgtaccttgtgaaggctttccgtgcacatcgggtcaccagtgaaaagttgtgcagagcccaacatgagcttcatttccaagctgccacctatctctgcctcctgcgtagcatccggaaaacatgtggccctacatcagggaatttcatggcaag

SEQ ID NO: 6525 - DNA, 603 bp, Homo sapiens
  misc_feature 8, 103, 104, 111, 122, 130, 144, 148, 186, 201, 202, 206,211, 242, 247, 253, 258, 260, 262, 270, 279, 292, 299, 302,312, 315, 333, 335, 336, 340, 344, 374, 379, 382, 393, 402,410, 412, 424, 427, 436, 437, 440, 447, 450, 458, 470: n = A,T,C or G
  misc_feature 484, 489, 496, 510, 540, 545, 552, 558, 560, 569, 570, 582,590, 603: n = A,T,C or G
ccctttcnagcggccgcccgggcaggtacgcgggatcttatgagaaggctgcatgtgtgcctttaggatgcagacattgatcccggctttcactcagtttaanntaggganttctttaaatnaacaatcntgggtttttttaanggtnggggtgggaagtaaacccattggaactttttttttggnctttctttggcaagnnaatnttccnaagtgcccttggccccttaaaattaaaaaanggaanttatgnccccncntngtttaaangggccacantttatggcaaaanaaggggnaanaccttttaangtnaatttttgggaagggggngnnttcntttnttgtccttgggttcccatttaaaaaccttnggaanaancccccaattanttttttccnggtttaantnggggcttgggtnttnttttaaagnnttnaatttgnggnttagtaanaaaaggcccaanctttttaaaaattnggccnttaggtntccttttagggggnaaaaataaaaaacccaatttttatgggaanaattnaattggnttttgntngggggaacnngttttttttaangggtattnaagggaattttan

SEQ ID NO: 6526 - DNA, 668 bp, Homo sapiens
  misc_feature 104, 136, 144, 148, 151, 225, 228, 245, 250, 256, 257, 274,280, 288, 289, 295, 298, 312, 328, 338, 341, 374, 380, 386,389, 394, 395, 404, 409, 410, 416, 424, 430, 439, 448, 466,477, 486, 487, 496, 498, 502, 511, 525, 531, 537, 539: n = A,T,C or G
  misc_feature 543, 563, 568, 572, 577, 579, 595, 606, 634, 648, 654: n = A,T,C or G
ccctttcgagcggccgcccgggcaggtacgtgtgctcctggtcctcttccatgtcctcccgatgatagtaaaggatgaatgagaggtggttgtggcaggtaagnatctttgtttgaacaattcttgttggaaaagncccgaagncccnggntaagccccgttggttttccaaaaaaccttggcaacaattccttttttttttcccctttttctttttccttttgnttnccaatttccggaccttnggttncctttnncgggggtttttgggggnaaaggntttaaggnnaagggnccntttcccccaaaggncccccccggggggggntttggggggnccncccaaacccaaaggggggtcccaaagggggggntttttngggttnccnaaggnncccaaaaantttgnnaaaagnggggtttngggggnaaacccggntttaaaggnttttaaggatttcccttntttcctttggnttgggaaanntcccccggncntttncggggggcncccaacccggaaanttttcncggggncnttcnttggccttccccaactttgngttcnaaanggggntntcaacctttggggccntttgggttttnggggaaccttggggccttggccaccaangaaaaacttttttnaccaancttttccttttctt

SEQ ID NO: 6527 - DNA, 598 bp, Homo sapiens
  misc_feature 323, 375, 491, 500, 501, 502, 522, 560, 580, 589, 590, 596: n = A,T,C or G
cccttagcgtggtcgcggccgacgtactatacagagtgaacagcatgcagggaccatatgccacgcacggaggcggttacggtcctactcagagcactagccatgctccttaaagctccatcttcctagcttcacctgattttgagtctcagagatcttccagggccctcaattacaatgcaaatcccaaaagaaggcttaacctcagctaaagtccctcctcaactgacacctctaatacccaaataaggatgagcaggaaagacagaagggacaaaaagagtggcaggaagaggaggaataaggaaagtggaaaagccaanaaccttcaggtattctaaaattatatacccttttcttgcacaggatgttttncaaggaaaaaaaagtttaaaaataaaatatctgcaagtggacccttgacaatttttttatatccccgccactaaagggtactttcttttggctaaaggtacaaaaaacaccttatngagtttgcnnntcagtaaaatgatgaaaatnttgcccctgaaccacagtggtgtgcagtgaaacccctntgatgctgagggaaaaattnaggggattnngggggngg

SEQ ID NO: 6528 - DNA, 305 bp, Homo sapiens
  misc_feature 9, 15, 23, 35, 40, 41, 45, 46, 56, 59, 61, 63, 64, 93, 98,116, 119, 158: n = A,T,C or G
cccttagcntggtcncggccgangtaccatcaaanactgnngagnnattgatggtntgngngnnctcacccagaggggcctggtagtgcccgncgggncgatcttcccacgtgtanaangtttatttttatacaacacatactttgcgacactctaangaatggtttggcagtgttaaaaaaaaaaagttaatcctgtgatattaatggaatgacattttgaggtcttgagaatgggcacaaaagtgggaaatgaatttcagtatgggcaaagacactgaggatgatgttgattagataattcac

SEQ ID NO: 6529 - DNA, 403 bp, Homo sapiens
  misc_feature 345, 388: n = A,T,C or G
cccttagcgtggtcgcggccgaggtacacaaaatgttctttttgttacaagagctgagttgcatatactgtagataaatcatattatttttgccaatttcacaaattcctctggcccatcatgtcagtcattattgagtatatgcacacattgctacttatttgattatgtatcttttaaattgattcaggtgcatagaaaaactatctcttacaaactttaagtgctctgatatgacttcccccccaaattttattatgaacatttttttaaaaaaacaggaaaaaatttggaaaaaaactggtttggggtaaagccaccattggttatattctacccattttnagaaattccaagccaagtttgtttaaaatggtttttttggtcnattttggttttttcc

SEQ ID NO: 6530 - DNA, 366 bp, Homo sapiens
  misc_feature 287, 346, 360: n = A,T,C or G
cccttagcgtggtcgcggccgaggtacgcggggagaaaatgagagtttcagatactgagaatagaaccactaagaagcagaaaagagaagatattctcgtgggggagaacaacggctgggagggggggaagcatggccaaggcaaagaggtgggcattaataagaactgcttcttgctgccgccatatgaagaaggacgtgttcgcttccccttcctccatgattgtaagtttcctgagacctcgccagccatgctgaactgaatacaacatgtttaagaccacagnaacattctgcataggcttgtaaaatttcgctgaatgatggatgccaaaggatgggaagnacaggatgggatangaggga

SEQ ID NO: 6531 - DNA, 407 bp, Homo sapiens
ccctttcgagcggccgcccgggcaggacgcggggacacacagcacctgcacgcagatgcacacatctctagtcaaatgaggctctcagctttttgataggggctttttgatacgtgtataaccaatactttattctcactgtagtcaaggactcattgcaattcagaaatgagaagctgatccggaactccactacagctcaaagaaattctcgaatgttctcacctattaacagttattaaaatggaagaagctggggatgaaattgtgagcaatgccatctcctacgctctatacaaagccttcagcaccagtgagcaagacaagggataactggaatgggcagctgaaagcttctgctggagtggaaccagctgggacttaagccaatggatgagatttttcac

SEQ ID NO: 6532 - DNA, 367 bp, Homo sapiens
ccctttcgagcggccgcccgggcaggtactacatatgcagaatctgatacaatgttaatagactgattaaaatcttgttaacactgtaatgacggcaaccaactctgctctttgagtcaagtgatactgagttttgatgactcattcttttggcccggtgtaagccacttttccattgctggaaccatcagtaaacactgccagagcattttttaaaggcttatgtttggtaactttaggtaaaatccaagtagtcaattttaaaaactggaagatttttgttttggggtaacgattgtcaataattcccacaaaatcggcaagatcaatcttgccatgcaccagaattgataaaggcttgtctaac

SEQ ID NO: 6533 - DNA, 507 bp, Homo sapiens
  misc_feature 499: n = A,T,C or G
cccttagcgtggtcgcggccgaggtactacaataatcctcaagatactgaaagtaatgccaagtgaaagaccaagggggtgggtggagggctaatgggctggaagaaatagccacttgattgctagttcatacaagatgtggcagcaactccttttctggctggagatcttggatgtcacatcttagaatcaggtggcaaagcatctgtgaagggcaatgtggcatcccagacagtgggtggtgagatcaggaagaaaaaatggaaatcaacagatggtggatcctacagctgagaactgattcttcaatttgacatggttggcataaacattttaaatggagcttggtaaagatcaggttattttaccattgaccaagctcttggcttctaaaaggtcctaaatttttgtttcctttgctttcacgagtgtttatttgcttttccaggaacttcaagggaaaaaggttaaagtaatggaagggagggaaagaaggganggggttgg

SEQ ID NO: 6534 - DNA, 372 bp, Homo sapiens
ccctttcgagcggccgcccgggcaggtacttggcaacacaggggattgttatacctccagctactgaaaaacacaatcttattcagcatgcaaaagattactggcaaaagcaaccacaactgaaattgaaggaaacgccagagccagttacaaagacagaggacatccacctatttcaacaggaccacctcaagatgaatggggaccacagcacttctggcatgatgtgaagcttaggttttattacaacacatcagaacaaaatgttgtggactaccatggagcagaaatcgtgagccttcgtttgctgtcactaagtaaaagaaggaatttctttttctcagccccaacctagattcacatgggactgga

SEQ ID NO: 6535 - DNA, 464 bp, Homo sapiens
  misc_feature 126, 133, 158, 162, 174, 192, 206, 245, 263, 287, 385, 402,416: n = A,T,C or G
ccctttcgagcggccgcccgggcaggtacgcgggggctgagccgggagcgctgactggcccggctgggcaggtcttgactcgtctgctggaaccaaaatcctcttggaccctcaaggccccgggcnttgttgnaaaccgtaagtttccctggaggagnatangccaaaaacatngccccaaacaggtggagnccccgccattcttntggcttgggagcctgttcaacaagcaatcggccaacacnaaggggggaggctccgtnaagggtcccctcaaaaggcggggnaaaatggcgttcaaaagggatggaaattggatttcttgccagttaaaaagatgttttgggttggtcattttaaaaaaaatggaggcttaccaaaagcntgccccgccgggggggnagggatttacaaangggcttgacctggtcccttcccagggggaacccaagtccaccttaccc

SEQ ID NO: 6536 - DNA, 354 bp, Homo sapiens
ccctttcgagcggccgcccgggcaggtactttctgatttttctacaaagattgtgtattacttgtataataaaaataagagctttaaattgtgaaattcttctggatttggttttctcattttattatggaatttttcatacctaaataagatgaatagttgggtaattttttttctgctttgtcagttattggtgtttgttaacttcttaaaaaaaattaaaaagaacttgggaagctctgtttttctatgccctggaaacatttaaatatttagaattttttgctctttgaagtttttataacatgtatgaaactgtccaaatctaagtagtgcctttttaggaaatattgg

SEQ ID NO: 6537 - DNA, 442 bp, Homo sapiens
  misc_feature 239, 240, 257, 327, 353: n = A,T,C or G
ccctttcgagcggccgcccgggcatgtacgaaaaaaatcaggctactaagcccactgttaatatagacgcagaccaattgttaggaacaggtccaaattggagcaccattaaccaacaatcagtgatgcagaatgaggctattgaacaagtaagggctatttgcctcagggcctggggaaaaattcaggacccaggaacagctttccctattaattcaatttagacaaggcttctaaannagcccatatccttgacnttttgtgggccaagaattacaaggatgctgcttcaaaagttctattaccagaatggaccaattgccccgnaaaagtttatttgtagaaatttaatngggccttattggaaaaaattgccaaaaattcccaagaaatggttcaggtccgggcccattaaaaggccccattttaaaaaaggggaaaa

SEQ ID NO: 6538 - DNA, 344 bp, Homo sapiens
  misc_feature 282, 340: n = A,T,C or G
cccttagcgtggtcgcggccgaggtacctccagcaatgagaagcagagagggctaggttgacggtctcaaactggcaccggggagccccgtgactgggttttaagggtgtgtgaatgaagattaaaatcttgtttgatattaacatgggttcagtttttttttttaatgtcactaagccatgctgtagagcccttctggaaggacttaggtgggacaaagagccagagtccacaacttctgtattgttcacagggccctaatgcatcctggggaagtttctntggcaccggaggtggagttttcctagggtagggaaagcgaaaggttgccagggaaagnaaga

SEQ ID NO: 6539 - DNA, 365 bp, Homo sapiens
ccctttcgagcggccgcccgggcaggtacactcagagtcatcttataactggaaactgtcaggtggtcccccaccccagtgagtgtatgaaagagtcaagaaaaagattggaaacaaactattgggtgaataattggttgctctattattattattattattatttgcctttttttaatcaccatttatttgtgtaatctttctccattgattggctgtcattcttataatatctgaactaccccataaaataattctctgacttaaaggcatttaagctgttgcttatcgtttttacatcctctattcaactaagacacctgtctgggagagttatttttttccagatgggatcgttggcctaa

SEQ ID NO: 6540 - DNA, 411 bp, Homo sapiens
  misc_feature 117, 132, 139, 177, 229, 245, 254, 256, 273, 284, 313, 324,340, 354, 361, 381, 396: n = A,T,C or G
ccctttcggcggccgcccgggcaggtactttttacaatgaagggatatggcagcatggatactgggtagctggctaggctctaaatacctgatgactcaacgctttgcacaaaccanttcttgcttgattanttaaaantttgtcccttgggcaaaaaattaaagggcaaatggcantgcctaaaggctttcaaaatgccaaaagggatttcacttgtagtttggattncttttccaaggaaatnaggaaaatncnaccaattaacctttttnccttttattanaatcccaatggtggataaccaccttaacnacttattaaancaaggattattcttanctggttggtttttncaattgnattttcctggaaaattggtncaattaaaccaattnttggggaattttaaa

SEQ ID NO: 6541 - DNA, 502 bp, Homo sapiens
cccttagcgtggtcgcggccgaggtacaattttaagatgattttgagggttgtatttctttatcatttaaaaatatcctaaagtcagtaatttatatgaaggaaactcattcattattgaaggtattaaaaatagccatcatctgtattaggtagcagttttggaggatcatctttttcttttgctataaagccctattaatgaagaatacttccagtagagttaatagctgtagcttacctagtgtgttaatgaagtgtgtttatttatgtgacttgataccaagtagtcataatagagactgaagaggtatgcgttaagcacgcctacttctatgcagtaaacaggctgcagctgcctagattagattcttaagaaatgtcatattttgaattgttttatttcttggaggggaagctttgtcccacttcattcatttgtatgccataggaattcatattggttatcattaccgtatctacaagattcagaaaccaaaaat

SEQ ID NO: 6542 - DNA, 669 bp, Homo sapiens
  misc_feature 141, 156, 157, 161, 162, 196, 197, 212, 224, 231, 240, 258,267, 272, 303, 311, 326, 327, 331, 352, 358, 359, 360, 387,406, 408, 414, 419, 421, 435, 438, 445, 448, 461, 464, 472,474, 495, 505, 518, 539, 561, 563, 565, 578, 581, 584: n = A,T,C or G
  misc_feature 589, 592, 599, 621, 630, 635, 640, 647, 657: n = A,T,C or G
tatggatatctcgcagaattcgcccttagcgtggtcgcggccgaggtactatatgccatggatgtgaatttcccatagaagctggctgacatgttcctggaagctctgggctacacctggcatgacacttgcttttgttantggctccagatggtnntttnntggaaaaaagttttttgggaaaaggggttccaannaaccctttttttttnctttcccaaaanaaaaagnggaaccaanaagggccccccccttggnttggtttanaaggnaaaaaacccaattggccccttccaatttttncttggttnggaaaaatttttttnntttnggaaaaaaaggtttccaaggncccaannntttttccaacggggcaaggtaaaaagngaaaggaaaaagggggaananttgttnttggnantacggaaaggtaanacnataaaanggngggaataaaatanttntttataananaatttttaaacccttaaaaantttttaaaanttttttttttttnaaggcaatttttcccaaaaanttaaattttttttaattaactncngngggaagggttttngtnttnggaanaanaaaaaanttataatttaaaggcttggggnccccccccnttggnaaaanggggganaatttaaaanaatttttccccc

SEQ ID NO: 6543 - DNA, 964 bp, Homo sapiens
  misc_feature 5, 58, 61, 62, 68, 76, 80, 84, 93, 95, 99, 101, 107, 132,136, 138, 146, 173, 189, 191, 195, 197, 201, 205, 215, 217,219, 221, 223, 225, 227, 229, 231, 233, 235, 237, 239, 241,244, 246, 253, 255, 257, 259, 263, 292, 294, 318, 322: n = A,T,C or G
  misc_feature 336, 371, 388, 397, 415, 447, 455, 491, 496, 499, 511, 512,556, 570, 590, 593, 603, 604, 629, 675, 706, 709, 714, 715,749, 753, 754, 757, 768, 784, 792, 797, 798, 808, 812, 815,817, 818, 825, 829, 836, 861, 862, 864, 898, 903, 934: n = A,T,C or G
  misc_feature 939, 948, 953: n = A,T,C or G
accgnacttcacttaattaaggggggcccggaaaatttgggggggcccccccttcttnagnnaatggnccaattgncctnccgnagaccgggncnccgncnccaagntgggttgggaaatgggggaaattanttcntnggccaggnaaaaattttcgggccccccttttaagnccgttgggggttccgncngggncncggnaagnggtaaccctntntntntntntntntntntntntntnttntntattatntntntntatncgggccttcctttttgggtaaaaaaattntncttttttaatttggccccaggggnaagntggaaaaacccccnttaaaaaaaggttggggccttccaaccaaaaaganaaggttggccccccctnatttttttnctttttttcaaaattttnaaacctttaacccaaaagggggacccaaaaanccaaccantttctttcaaaaaaagtttttggaagaaaattaaanaaggnttnggaaacccccannggttaattgggaatttttttgggcccccaaaaaaaaaatttttntttaaaaaaaaggnccggcccaaccctttccaanccncaaaatttgnnaaaaaaaaattggggggtaattaanaaaaaagggggggtttttaaacccccttttttttgggggggggggngaaattttttttgggccaacccttggggccnaanttggnnaaaaattttttcctttgggttgggaaaaaaaaanaagnnccntttttgggttnttgggggggaaatttnaatttttngggtnngggaatttangggnaangnnaaattangggnaaagggnaaaaaaaaatttggggaaaaaaggnntnaatttaaattttttaaatttaattaaaaaagganaaatnaaccctttaatttggtaaagggggggttttnccccncctttgggnccccntttttttgggc

SEQ ID NO: 6544 - DNA, 361 bp, Homo sapiens
  misc_feature 296, 297, 299, 351: n = A,T,C or G
ccctttcgagcggccgcccgggcaggtacagatctcatcaggtatgagggcagtctctgacgcgaacgtctcttcctcgtggtttttattgtcagtattcacaccgaagtttaagtctcctagtgggcacccagacgggattgacgatctcctggtaaaacacaagcataccctcttccccacgttataattgttccaggttcccaggtattggtttgggagtttttccatgacactggcttgccttcgtttagggagaattttttgcctgtataatggcatttagctgcagtcannantatttgttttttagggaacatttaagaaaggcttaaaacaatgcctaaatantaattggggg

SEQ ID NO: 6545 - DNA, 531 bp, Homo sapiens
  misc_feature 102, 106, 111, 112, 123, 126, 142, 150, 192, 198, 204, 211,219, 224, 233, 246, 260, 264, 290, 295, 302, 318, 331, 434,458, 472, 508, 527: n = A,T,C or G
ccctttcgagcggccgcccgggcaggtacattgatgggctggagagcagggtggcagcctgttctgcacagaaccaagaattacagaaaaaagtccaggaancctngaagnngggccacaaancantcttccctttgggttnaggcttcnagcttacccacccaagccttggcaagaacggccttaaaattngccttncaaaancttttcncaaaccanaaagncctgtctcncaagaaactcaangccaccttttggtnggtnttttggaattttcctgtccttttttntttcnccctggngccttcctaccggttncattcacttggcncccaggccttttccaagattcccaatttccccaggaagtttccgaaccccaggaaaagccttgggtggtccttggaggggatttaccccaagcccttcaaccngggaagtttggaacttttccccangaaaaaaatttaanttcccttggaaccccccaaccaaaggggggaacccntttaaaaccaaggaaaaanaaat

SEQ ID NO: 6546 - DNA, 520 bp, Homo sapiens
cgccagtgtgatgggatatctgcagaattcgcccttagcgtggtcgcggccgaggtaccacctcccaggctaatgtgttaacagtgttttctatgattctaaacttgttttctttgtatttctaagaaatcaactaggccctaacttttggtctgtggtcagaggtcagtgtctgtgctattccaggatctattatttcagtttgcccttttattctctccgtttgtaacagtacgcggggcttttcacaagatggcgccgaaagcgaagaaggaagctcctgcccctcctaaagctgaagccaaagcgaaggctttaaaggccaagaaggcagtgttgaaaggtgtccacagccacaaaaagaagaagatccgcacgtcacccaccttcggcggccgaagacactgcgactccggagacagcccaaatatcctcggaagagcgctcccaggagaaacaagcttgaccactatgctatcatcaagtttccgctgaccactgagtctgccatgaagaaaga

SEQ ID NO: 6547 - DNA, 328 bp, Homo sapiens
  misc_feature 205, 295: n = A,T,C or G
ccctttcgagcggccgcccgggcaggtactgttacaaacggagagaataaaagggcaaactgaaataatagatcctggaatagcacagacactgacctctgaccacagaccaaaagttagggcctagttgtatttcttagaaatacaaagaaaacaagtttagaatcatagaaaacactgttaacacattagcctgggaggtggnactttttttttttttttttcgagactctagtcttgctctgttgcccaggtttgctgtgcagtggccgtgatcttggctcactgcaacctntgcctcctgggttcaagtgattctcctgtctca

SEQ ID NO: 6548 - DNA, 363 bp, Homo sapiens
  misc_feature 233: n = A,T,C or G
ccctttcgagcggccgcccgggcaggtacgattccttagtgtgggagttcctggaactggaggttgttcactttcctcattatccttctttaaaagggagccaaaatctataccagattttaggaactcagtgtaagtccccctctgcaccattttaccatctttcaatatcagaatctgacttgcagctttgaggtacatgctgccaagggtcgggtgccaagagagagcanaatgaagccaggtccccaaggaagtgagggcccaaaatagggagtgtgggtgatgagggtggagttcaaatccagatgtcagagctacaatcgcccccagggtagccggagctcatgggcaagggctggg

SEQ ID NO: 6549 - DNA, 386 bp, Homo sapiens
  misc_feature 327: n = A,T,C or G
cggccgccggtggtggatgggatatctgcagaattcgccctttcgagcggccgcccgggcaggtaccacaatttataaagaaaccaatgatctcaggagatatttttggtctgtcttccctgaaataagaattgtgttttggaaatctaaagggtgttctgttccaaaatcttaagttattagttatttccacatcaaatagcaaacactacaatacagccagggaaagaggatcttccaaacaaacaaaaaaggtatgttttctagattgctccactactaaatgagaacttttttttttgaggcataattataaattcaagttcnttgatccaattttacaaatctttcccagtggacaaggctcatattttccaataaaaaaa

SEQ ID NO: 6550 - DNA, 469 bp, Homo sapiens
  misc_feature 4, 10, 42, 48, 52, 59, 70, 81, 85: n = A,T,C or G
attncccccntttttaaaccgggccccccccgggccaaggtnctttgnaagnaaacctntgcccttgggnccttattttanccgnaccttgacctgaccttgcctcgatggtccagccacatgatgaccgtttcgatgggaatccccttcctggttgactggtaatgggtgaaactgcttatccaaaacaaccagagaacacgtggcatcaaacccaagtcctcgaatttggtttaaatcaatcccttgtacaccctggcacagtccaatctgaactggttcggcactcacctttcatgagatggatgtggtggcttttctcctttttcatcaagactcctcagcagggagcccagaccagcctgcactgtgccttaacagaaggtcttgagattctaagtgggaatcattccagtgactggcatgtggcatgggtctctgcccaagctcgtaatgagactatagcaag

SEQ ID NO: 6551 - DNA, 253 bp, Homo sapiens
ccctttcgagcggccgcccgggcaggtacaccgactacggcggactaatcttcaactcctacatacttcccccattattcctagaaccaggcgacctgcgactccttgacgttgacaatcgagtagtacgcgggggtcggtagaggcagaaggagaaggtcgggttgtagaagctggggtggccggcagctcgctcatcggtgttcgtgggctttgtcggtccgtgcctcgtctctccctggaaaggggaggg

SEQ ID NO: 6552 - DNA, 351 bp, Homo sapiens
  misc_feature 309: n = A,T,C or G
cccttagcgtggtcgcggccgaggtactatcattataccctttccctcaatgccatcttacattttagggataagttttaagccaaactataaggctacctggaatgctgagacaacacacaaaattctgctgagtccccgtcacagactacttctgaaggtcaccggtgagggcctaaacaagagtccacttcttgttagtataataactttttatttgacatctacaagattttggcatcctgcagctttttaccaggtttatacaatctcgatttttcaaatagtgcaaccctgtgggaaggcaanaaaaaaaagaaaaagggaaaaaagtccctttttttttttttt

SEQ ID NO: 6553 - DNA, 363 bp, Homo sapiens
  misc_feature 127: n = A,T,C or G
ccctttcgagcggccgcccgggcaggtactcttgagtctatttaggtctattacatctttacagtgaaaacaggatacaatattgtgctactgtgggtctcttcctgactgcagattcagtaacatnggtgttcgtagcttgaaactgtccacagtgggagtatttacaccatagaaactggctggcaaatgctacaaactagcaattttaattcctggaaaggcaattgtcgagcatttaccagcacacaatgaatgccatattcttttttttattaggaaataaattattggagggcagtataaaattatttaaaaaagtatcaaatggcaatcccttatcttcagatggctataattttt

SEQ ID NO: 6554 - DNA, 517 bp, Homo sapiens
  misc_feature 28, 322, 461: n = A,T,C or G
ccctttcgagcggccgcccgggcaggtnctattagtatcattttacagatgaaattgagacctaaaacagagcagcaatttgggttaacagaaatagagctccactgagaattaggagacctgaattcttgtcttgacctgcaggctgtgggaaagtctttacctcctctattgctattattaaataccagtaacaccttctcggcttacttcacaaagctcttggtgatgatcaaatgaaataatggtgaaaccggtttataaacctagagtattaatgttattccgtggaaaatacataaacacaaatatctttggaaanggtaatttaaacaaaggttgtggaaaagataaaataacattatgctaagtcctttcatggttttcattggccctatttatattaagtttagaaatcctttatttcaaaaatttaaaagtttaaatacttaaaagggttncaaatatttacagaattggggcttgaaaaattatgcccagaaggttggctattggt

SEQ ID NO: 6555 - DNA, 717 bp, Homo sapiens
  misc_feature 8, 44, 84, 137, 151, 162, 177, 178, 188, 194, 212, 216, 237,246, 247, 248, 252, 253, 272, 287, 288, 294, 298, 307, 322,353, 356, 361, 363, 369, 375, 381, 383, 389, 396, 405, 407,418, 441, 442, 451, 464, 473, 476, 481, 482, 486: n = A,T,C or G
  misc_feature 493, 501, 507, 511, 518, 524, 527, 528, 537, 538, 549, 550,555, 568, 575, 581, 603, 604, 619, 669, 676, 678, 682, 686,697, 701, 717: n = A,T,C or G
cgcccttnagcggtgggtcggcgggccgaagggtaccaaaccanctcccttttcctccccaaggttaggagctagaagcccttntgcgtgctcatattgctcattgggccagcaataagggccaggatttttagttngattcccttttcancaaaggggggnaaataattggttaannaaaaaaaggngtttgnaaaaaaaggcctttcctnaaanttttttgtaaaaagggggggncaatgtttnnnaaannaaaggggggggggcccttnggggtaaaggtttgnnggggcnaagnaaaggcaanagggggattccattncttcctcctttggggtcccccggggttgggnggnttccntngggggngtttgncccaangncccaanagggggnggtcccaancntttccttttgnaaaaggaaaaaaagggggcccannttaaaaaanttgggggggaaanaaaatcccnggnccaannaggnggccctnttgggggnataagngggnggggggncccaanttnngtggggggnncccaaccctannggggntttttttttgggnggggggngggggncccttcccattttttttccacnnaagggccacctttcnttaaacctttaatttgggttttttgggccacctccgccaccttttttcgnctccccnanaaanaagntcccccccttntttnaacctaaggggggggn

SEQ ID NO: 6556 - DNA, 342 bp, Homo sapiens
  misc_feature 1, 20, 23, 185, 186: n = A,T,C or G
ngtgtgatggatatctgcanaangggccctttgcggccgcccgggcaggtactcaaagtctttgggtaggcaattctgatgaagatgaggagcaagatgacaaaaatgaagagtggtatcgattgcaagaaaaaaaaatggaaaaagacccaagcagattgcttctttgggctgctgaaaaaaannggggtaaaaaaaaaaattacagagggaagtgtgacagtaggaaaagcactgggttcaagccagaagacctgcctttactgttatggccatcatacctatctcttgattgtgaggaccaaatgagacaatgtacctcggccgcgaccacgctaaggg

SEQ ID NO: 6557 - DNA, 666 bp, Homo sapiens
  misc_feature 17, 33, 37, 39, 46, 62, 63, 64, 67, 72, 74, 76, 80, 100,166, 192, 320, 428, 430, 598, 617, 632, 633, 639, 663: n = A,T,C or G
cctttcgagcgggcgcncgggcaggtacgaaanaatnangctactnagcccactgttaatannnacncttangntntgtnctgacaggtccaaattggancaccattaaccaacaatcagtgatgcagaatgaggctattgaacaagtaagggctatttgcctcanggcctggggaaaaattcaggacccangaacagctttccctattaattcaattagacaaggctctaaagagccatatcctgactttgtggcaagattacaaagatgctgctcaaaaagtctattacagatgacaatgcccgaaaagttattgtanaattaatggcctatgaaaatgcaaatccagaatgtcagtcggccataaagccattaaaaggaaaagttccagcaggagttgatgtaattcagaatatgtgaaggcttntnatgggattggaggagctttgcataaggcaatgctaatggctcaagcaatgagggggctcactctaaggaggacaagtttagaacatttgggaaaaaatgttataattgtggtcaaatcggccatcttgaaaaggagttggccaggctttaaataaaccgaattttatnaaatcaagcttttccagcnaaaaataaaaagccnntttggnccgtggtccaaaatgtggaaaggnaaa

SEQ ID NO: 6558 - DNA, 351 bp, Homo sapiens
  misc_feature 340: n = A,T,C or G
ccctttcgagcggccgcccgggaaggtacctttcattggattgtccatggtgaatcgctttagcaagcggcgtgactctccgctgcccgtcatcttggccaatatctatctgctggttcctcctgtgctcaacccaattgtctatggagtgaagacaaaggagattcgacagcgcatccttcgacttttccatgtggccacacacgcttcagagccctaggtgtcagtgatcaaacttcttttccattcagagtcctctgattcagattttaatgttaacattttggaaggacagtatttcagaaaaaaaaaatttccttaataaaaaatacaactcagnatcccttcaaa

SEQ ID NO: 6559 - DNA, 520 bp, Homo sapiens
  misc_feature 110, 114, 132, 145, 157, 162, 181, 230, 272, 283, 289, 290,312, 331, 349, 387, 412, 419, 436, 441, 450, 466, 478, 508: n = A,T,C or G
ccctttcgagcggccgcccgggcaggtacatgtgatttccttttgggtgtattttgctaagtgaaacttgttaaattttttgttaactaaaattttttttctttaaaatnaaangactttttttcacaatgnactgggccaccangattacctccanccaanaagattatgccaacaacgngggtgggttgtaaggataacttcattttttaaattcgaaaaatgttatnttttagttggtgaaattttaaaaaaattttcataccattcanaatcttattgnattctnncctttaatattttcctttattnaatggagggccttaaaaantaaaaaaagttcctaaantaaaaaaattgttttaaaaaattattgttggaaattgngttgggaaaaaattggggttggaancttaagnccaagccaaccaaccantttcnttggggggnaaaggccatttcaaanaattaagaaccnaccaaccgggggctcccccagtctccaacncttggccaaaac

SEQ ID NO: 6560 - DNA, 256 bp, Homo sapiens
ccctttcgagcggccgcccgggcaggtactcattaaatcttgtgatgacactcacatcaatgaaaggcttgggctctgaatctaaagcaatagattttgggaggggcaacagggatgaaatacaacagggaacattgcaccctgggttaactgattatcaacctgaagccagtactttattttcaaaacactcatatgttgcaaaaaacacatagaaaaataaagtttggtggggggtgctgactaaacttcaagt

SEQ ID NO: 6561 - DNA, 601 bp, Homo sapiens
  misc_feature 12, 18, 45, 47, 50, 57, 429, 544, 587: n = A,T,C or G
aaaaatttcccntttttnacggcccccccggcaggtccaggggtnanaanaagaacnttcacggagcttacattctagcaggaggacaatattaatgtttataggaaaatgatgagtttatgacaaaggaagtagatagtgttttacaagagcatagagtagggaagctaatccagcacagggaggtcacagagacatccctaaggaagtggagtttaaattgagagaagcaagtgcttaaactgaaggatgtgttgaagaagaagggagagtagaacaatttgggcagagggaaccttatagaccctaaggtgggaaggttcaaagaactgaaagagagctagaacagctggagccgttctccggtgtaaagaggagtcaaagagataagattaaagatgtgaagattaagatcttggtggcattcanggattggcacttctacaagaaatcactgaagggagtaatgtgacattacttttcacttcaggatggccattctaactccagggggtagactggctaggtaagactggaggcaggnagacctcttctaaggcctgcgatagtgaaaggcaaaaataagnggggaaattcaggg

SEQ ID NO: 6562 - DNA, 317 bp, Homo sapiens
  misc_feature 110, 117, 122, 124, 159, 172, 188, 191, 205, 233, 239, 246,247, 300: n = A,T,C or G
ccctttcgagcggccgcccgggcaggtacattattcaggtagctgagggaggggacaggaacctgaatcttcaacagaagcaaacaaactgggatggagggcccagcctnatgaaangtgancnagaaaggaacccctttgctgaagggcttgttgtgnggttaggcttgangcagaagcttagggcnggnttggactgtgaacncaacatcttctccagcttggtttggaangacaanctctcannaagacaaatgcttgcatgttcacatgccccagcaaaccaacaatcacccaagncctgaacaactttgctt

SEQ ID NO: 6563 - DNA, 348 bp, Homo sapiens
  misc_feature 231, 332: n = A,T,C or G
ccctttcgagcggccgcccgggcaggtacgcggggagactggttgagccgggtagggaaagcagcctaaagcccgggacaggcacacaggcccaggtgtgtaggccacagcagccgcagtccttgaaaggctgcaacacccagacctccaggagagaccaggcccaggatgcctcgcctgttcttgttccacctgctagaattctgtttactactgaaccaattttccagnagcagtcgcggccaaatggaaggaccgatgtttattaaattattgccggcccgcgaaattaagttcgcgccgccagattgcccattttgccggcatggagncacctgggagccaaaa

SEQ ID NO: 6564 - DNA, 385 bp, Homo sapiens
  misc_feature 302, 332, 342, 351, 354, 355, 357, 362: n = A,T,C or G
cccttagcgtggtcgcggccgaggtactgtggcatggcgcagtgggtgacagatggccacatagcggtcaaaagccatggccagcagcactgtggattccatgccagatgaggagtggatggcaaacatcttgtagcagacaagcatcaaactggatggtagtggaattgaaccagaagatggccagcattttgggcatggatgaggtggagatgaaggatgtcaatgcctgaaagcatgcaaagaaatattatacatgggctcatgcaggctgtgctcagtccgcacaatgtaaatgattntcaagttacctagcacaagcaataaaggtngaggggagcncaatggggnaanngncaaancattaacttgaagccctcttcta

SEQ ID NO: 6565 - DNA, 366 bp, Homo sapiens
ccctttcgagcggccgcccgggcaggtacatgggactacaggcacgccccaccatgcccagctcatttttgtatttttagtagagacagggtttcaccatgttggccaggatgatcttgatctcttgacctcatgatccgcccctcttggcctcccaaagtgctgggatcacaggcgtgagccaccacacctggccctctatttattctctttaaagagagagaaaactatgagaggccaaaattatttaattaaatctttaccttagcacaaggggaaaaaatgggaatttgccctaatattagggtgaatgaaagcattacaccaatggaaacaggaaaccaattcacatttttagttaaaaag

SEQ ID NO: 6566 - DNA, 426 bp, Homo sapiens
cccttagcgtggtcgcggccgaggtacttaaattgtagcaggacaagccgcagacaaaacccctcagccagcgagtttaagaaagaagggctttttcggccgggatcttcggcaagactcacatctccaacaaccaagctccccaacagcaatggactcttgtggctgacttcactcaccatgctcacactgcctccttgtcagcagtagctgtaaatagtcgttttgtggtcactgggagcaaagatgaaacaattcacatttatgacatgaaaaagaagattgagcatggggctctagtgcgtcacagtggtacgcggggatttcatcaagttcgacactggtaacctgtgtatggtgactggaggtgctaacctaggaagaattggtgtgatcaccaacagagagaggcaccctgggatcttt

SEQ ID NO: 6567 - DNA, 591 bp, Homo sapiens
  misc_feature 538, 578: n = A,T,C or G
cccttagcgtggtcgcggccgaggtaccggaggtataaacaacataaaactgacttggaaacgattcctcagcagcgccccattgatctgccctgccaagtgactggctgccagtgccgggcttacctttatgtccccttgaatggtagccagcccattcgctgcaggtgcaaacactttgctgatcagcacggtgctgcgcctggctttacatgcaatacatgttccaagtgttcaggattccatagctgcttcacttgtgcttgtggtcagcctgcatatgcccatgacacaagtagtggaaactaagcaagaaagattggctcaggaaaaaccagtgggacaggacattccttatgcagccatgggaggattaactggtttcagctcgctggcggaaggctacatgcggttaagatgacagtgggattggtaagtgatactatatgaaatgtgagcccattgtattgtttttatgtgtgctaacaatagtgaagccttatatttggtaaagcaatttatagtatttttctttcanaaaacattctctccgttggatttttattttttaaaaagangttttttaaaaat

SEQ ID NO: 6568 - DNA, 397 bp, Homo sapiens
gatatctgcagaattcgccctttcgagcggcccgcccgggcaggtactgctgcagagccctctccagaccagggatggacacagtcagaccatttaggatatagcctgcattaagggccttctgcttctgctccaggacatttaggtagaaggtggctcggtcccttacttccccgcgtactgactccctcctaccaaggtagatccagacgctgccacctctaaatgtcctactcatcagcatttgaacccaatgatcttccctggtagggctctatttctttaggtgaccaaccagaccctaagcgaggagttgactacattgcactccttccatcctggaagggccagaggttcatcttcacagggataggcacctattccataggtgggtttt

SEQ ID NO: 6569 - DNA, 333 bp, Homo sapiens
  misc_feature 257, 293, 296, 297: n = A,T,C or G
ccctttcgagcggccgcccgggcaggtacgaggtttaagggatatgctgaacagcagtgcaatggacataatgtattatactagtccactttatagagatgaactagttaaaggccttcagcaagagctgaatcgattgtattcccttttctgttctcggaatccagactttgaagaaaaagggggtaaagtctcaatagtatcacattccttgggatgtgtaattacttatgacataatgactggctggaatccangttcggctgtatgaacagtttgctgcaaaagggaanaannagtttgccctgatgaaaccgatgggattgaagctat

SEQ ID NO: 6570 - DNA, 498 bp, Homo sapiens
  misc_feature 153, 154, 456, 489, 491: n = A,T,C or G
tcgagcggccgcccgggcaggtactaagcaatgtgtcttgcatttgttttcaataggaaaacaaagttctagataggttaaaagaaaaacaccataaaagtggtagtatatttaagtggaaaattatgtattttaaagtgtgtaactattaannatatattgcctggaaaaggaatactactgttttgttttgttaagaccacaaactgtattgctaaggacattttaagagtctgcttagccataacactcatttaacagcatgggtagtaagcatggtttcttgcagaaaacacaaagttctcagctaacacattaaacttcccactttatatactttttttcagagaaatttatctttagtttttcttattctgtgaaaatatttgttcttatgtcaaagaattatttttcagatatattggtaaagatggactgatattaaaagtcatattnattctcttacccccttactgggttttgggattntnatttttg

SEQ ID NO: 6571 - DNA, 343 bp, Homo sapiens
  misc_feature 329: n = A,T,C or G
ccctttcgagcggccgcccgggcaggtacgcgggggaagtggtagcagttcctcctaactcctgccagaaacagctctcctcaacatgagagctgcacccctcctcctggccagggcagcaagccttagccttggcttcttgtttctgctttttttctggctagaccgaagtgtacgcggggctttcctttcagcggagcgcggcggcaagatggcagtgcaaatatccaagaagaaggaagtttgtcgctgatggcatcttcaaagctgaactgaatggagtttcttactcgggagctggcctgaagatggctactctgggagtttgnaggtgcgaagttac

SEQ ID NO: 6572 - DNA, 370 bp, Homo sapiens
  misc_feature 71, 223, 263: n = A,T,C or G
ccctttcgagcggccgcccgggcaggtacagaatttattatgaaatagcttaatggcaagtggtaatttanaagaattaagttatcagataggagatatattaaaatatttaaaaattggatatatttctttgaagcccttttacacaagtaatttctataatttgattgtaatgaaagtataatataccttgttactattatcagattaatttttgaaagtngaattccttactcaagccaaggttatgctgctttataagnaaattaatcaggtggtttaacacttagagctcattagctcaacctggtatgtaggcacaaaataatcatctctggataaataccctataaattatatttttattcca

SEQ ID NO: 6573 - DNA, 349 bp, Homo sapiens
  misc_feature 143, 251, 257, 297, 314, 323: n = A,T,C or G
cccttagcgtggtcgcggccgaggtactttttttttttttttttttttttaccagtgtgtttaatttacttctaaggttttaatttttttccttcaactaaacaaatgagtccagcttggttaaaaacattttttaaaaagtntttcacaactggcagcaaaagttacagaataatttttctttagatccttgctgagaacctcttacaaaaaactaaaatgttaatattaccctgatactctgggtgcanaatttntgtctggcaaattttatatactggcagaggaacggcacantcacaaaaatgtgaaantaacataanctaggaaaatgtgcttaacaaggaaa

SEQ ID NO: 6574 - DNA, 426 bp, Homo sapiens
  misc_feature 1, 2, 233, 274, 323, 347, 373, 407: n = A,T,C or G
nncccaatatctggcgcccaacgtggttttctttttcctaagtgcatgtgggaacccgattccctttggtaggtgcggagaaatgttcatcggtccagtccacagaaatgcttgtttggctccccaacgattggtgagttgtctgtgtattctccggggtaactatgggtcacgcagagtctaaacattatgcttatctctgctatattaaattcctgttaaaatgggggagntcgggttcccatggaaaatatggtcaccctattcagggcangtggaagaacactgtccttgatttcctgaaaagggaacgttagatgtgngaactatgggatcatgttggtgcnaaaattcctagaactggtcccaacanggaaattatgttcctgtcactggtttggggtganttgggcctttggtaccttg

SEQ ID NO: 6575 - DNA, 335 bp, Homo sapiens
  misc_feature 234: n = A,T,C or G
ccctttcgagcggccgcccgggcaggtacctgcattcataccaccagctttcagcttgtagaggtggccgccaagaggaactcgtagttggcagtgccaactacaactactacaccaaccagctggaaactatacaaagagtatgaacaaagttcacaggagaaacaaggctctgcaacatatgaaaatatattctacttcattcataatgagacgcatgaaaattgtaactantatcaataccatttctcacctagtagatgggcaaaaatccaaatgtttgagcacacattctgtgggtgaggctgtggaaacgtaggttcacatacattgct

SEQ ID NO: 6576 - DNA, 393 bp, Homo sapiens
ccctttcgagcggccgcccgggcaggtacgcgggaacactctgtgtgactctacacacacttcaggtggtttgtgcttcaaagtcattgatgcaacttgaaaggaaacagtttaatggtggaaatgaactaccatttataacttctgtttttttattgagaaaatgattcacgaattccaaatcagattgccaggaagaaataggacgtgacggtacaaccagaaccaacaattgtatttctctataggttattttaaaatagtaatcaatgctatgtatttgatgtatatgtttctaaattagaaatttcttttggctttgtggtttttttaatggtggcgttaaatatggtaaactgaacctgttcctaaaatgcattaaaccttgaatgc

SEQ ID NO: 6577 - DNA, 390 bp, Homo sapiens
ccctttcgagcggccgcccgggcaggtactatagattatttgtcttgaagaagagctttgatatgtttcaaaattcgacgttggctttggaaggaaactgtaaatttacagatctttgtccttccccacaaagagccttaacctcacaggttggattatgtggaactcactgctatttttcagttctcctttaagtgactaaggaacatccagatacttccaaaaaaaaaaaagtctaagtttttcactttgtccattgccatttaattatcttctgcatattttaaagcatttcctgtgaacataagtattgcccatccagaaaatttgcgtctacattgattttatgtttaatgaaacctgtttcttctcaagttctttatttaaatc

SEQ ID NO: 6578 - DNA, 349 bp, Homo sapiens
ccctttcgagcggccgcccgggcaggtactatacagagcgaacagcatgcagggaccatatgccacgcacggaggcggttacggtcctactcagagcactagccatgctccttaaagctccatcttcctagcttcacttgattttgagtctcagagatcttccagggccctcaattacaatgcaaatcccaaaagaaggcttaacctcagctaaagtccctcctcaactgacacctctaatacccaaataaggatgagcaggaaagacagaagggacaaaaagagtggcaggaagaggaggaataaggaaagtggaagagccaagaagccttcaggtattctaaaatta

SEQ ID NO: 6579 - DNA, 253 bp, Homo sapiens
  misc_feature 244: n = A,T,C or G
ccctttcgagcggccgcccgggcaggtaccttgatgttagggtgacttagaaacaattcattagtctttgaattctaaatagctgaagacatgcagctaaaacaataatttttattttaattttttttgtttttgagacggagtcttgctctgtcacccaaaaataaaaataaaaaaactgagatcaaaataaatttagagctaaatcatcagaattaagtagtgactaataaaggaatgggcntaaaaagaa

SEQ ID NO: 6580 - DNA, 321 bp, Homo sapiens
  misc_feature 23, 68, 70, 185, 248, 284, 296, 312: n = A,T,C or G
cccttagcgtggtcgcggccgangtacatgcaggtcacaggggatatgatggcttagctttggctcananacctgacaggggcaatctacctagctctgtttgtaaaatggggatcctaatataacctcttgggataggttgtaagcagtggtggtctggtaaatgttaacaatctagtgtgcantgtggggagaggaaagtccggattgtaatatttgctgatttctgtggtgtaaatactcccatnactggcaattttaaactccaatgtaacgtcactgancacagatttggnaaaaggtgcatggcantacctgccc

SEQ ID NO: 6581 - DNA, 356 bp, Homo sapiens
cccttagcgtggtcgcggccgaggtactaaggcgaagacagccatcttgggccttacccaggcagctgtgggcgcaccgcccacctacgccccatccgcaacagccacccccgcgtacaggtttttatgtgaacatacattttcattttctgggataaatgctcaaaagggcaactgttgggttgtatggtaaacacatatatttttgtaagaaactaccctactctttttccagagtggctctactttttacatacagccactcatacaattcagacagcaatgtatgaattgatccagtttcttcacatcctcaccagcatttgggtattactactattttttatcttaaccca

SEQ ID NO: 6582 - DNA, 293 bp, Homo sapiens
ccctttcgagcggccgcccgggcaggtacctttcattggattgtccatggtgcatcgctttagcaagcggcgtgactctccgctgcccgtcatcttggccaatatctatctgctggttcctcctgtgctcagcccaattgtctatggagtgaagacaaaggagattcgacagcgcatccttcgacttttccatgtggccacacacgcttcagagccctaggtgtcagtgatcaaacttcttttccattcagagtcctctgattcagattttaatgttaacattttggaagaca

SEQ ID NO: 6583 - DNA, 364 bp, Homo sapiens
  misc_feature 141, 292, 326, 329, 341: n = A,T,C or G
ccctttcgagcggccgcccgggcaggtacataatctccccttgatgctcttcaacagagacaaggttcttgtctgcagatcagatagatcacagtattaggaaaaaaacataacagcaaatttggaagtacgcggggcttncacaggaggcctacacgccgccgcttgtgctgcagccatgtctctagtgatccctgaaaagttccagcatattttgccgggtacgcggggactggcagattattgcaaaagggcacggggcaagagggactatgttgtgagcctgcgaaanaagttttgtgtggggactgtgggcagttgaatgncgnttgggaacaatntggaaaactgggagctgccttgg

SEQ ID NO: 6584 - DNA, 378 bp, Homo sapiens
  misc_feature 128, 291, 338, 345: n = A,T,C or G
ccctttcgagcggccgcccgggcaggtactgtttgccttatattctatttgtgcttttaaagtgtgtctgttgggaaaacaaaatgtgtaggtggtttgtaagtgaataatttttatttcttcttggnattaaaattttgtttttttctctactttgggagatgtttatttacattgtcagactattcacaaaacagattctaaaatttgtttgctcgtatgctgttcccttcaatgtgatatcagagattactatgaatgttaagtttcattccgtgaaacatcactttnccatataaagacagaatctcttaaataaagtgaatctagtgggaaanaacatangtatcattcttaattcccattgggtaaaatttt

SEQ ID NO: 6585 - DNA, 736 bp, Homo sapiens
  misc_feature 1, 2, 23, 29, 38, 41, 43, 61, 68, 92, 102, 105, 111, 128,140, 147, 154, 160, 170, 174, 180, 192, 199, 206, 249, 341,396, 410, 648, 673, 692, 694: n = A,T,C or G
nngggtttttttttttaacccgnaaaacnttccaaacnttnanttttaagggggggggggncccgggnaaaaaaaatttttggggggggggncccccccccnttncctttnaaaggtttaaattgggncccaaattgggnccctttncccgganaaaggncccggggggncccncccggnccccccaaaggntttgggntttgggnaaattgggggggaaaattaaatttccctttgggcccaaagggnaaaaaatttttttcccgggcccccccctttttttttccgggaaagtcccgggaaacctccgggccccccccgggggggcccaaagggggttnacccaaggtttcccggaaaggcccccttgggggggccgggggaaaaagaaagatnccccgggcctttgnatgggggtggaaaccaagggaagccccgcccccgggtgtcttgccacttgtgcttgaccgtttccttaaaaagcagccctgggctgtcagttttatgaaggatacggacagacagagtgcactgccgggtgctgcctaaccatgcctggagactggaccgcaggccatgttggggccccgatgccgtgcaatttgataaaacttgttgatgtggaagaaatgaattacatggctgccnagggccgagggccaggtgtgtgttnaaagggccaaatgtacttnanggctacttgaaggacccagcgaaaacagcagaagcttttgga

SEQ ID NO: 6586 - DNA, 503 bp, Homo sapiens
cccttagcgtggtcgcggcccgaggtacttggatcaaatggctacattaattggtcagggaagattatgaataataacattgtgtggaaatgacccagataaaatcactgttcctttcaacaagcaacaggttagacaagcctttatcaattctggtgcatggcagattggtcttgccgattttgtgggaattattgacaatcgttaccccaaaacaaaaatcttccagtttttaaaattgactacttggattttacctaaagttaccaaacataagcctttaaaaaatgctctggcagtgtttactgatggttccagcaatggaaaagtggcttacaccgggccaaaagaatgagtcatcaaaactcagtatcacttgactcaaagagcagagttggttgccgtcattacagtgttaacaagattttaatcagtctattaacattgtatcaaattctgcatatgtagtacctgcccgggcggcccgctcgaaagggcgaatt

SEQ ID NO: 6587 - DNA, 382 bp, Homo sapiens
ccctttcgagcggccgcccgggcaggtacgaaaaaatcaggctactaagcccactgttaatatagacgcagaccaattgttaggaacaggtccaaattggagcaccattaaccaacaatcagtgatgcagaatgaggctattgaacaagtaagggctatttgcctcagggcctggggaaaaattcaggacccaggaacagctttccctattaattcaattagacaaggctctaaagagccatatcctgactttgtggcaagattacaagatgctgctcaaaagtctattacagatgacaatgcccgaaaagttatttgtagaattaatggcctatgaaaatgcaaatccagaatgtcagtcggccataaagccattaaaagg

SEQ ID NO: 6588 - DNA, 282 bp, Homo sapiens
ccctttcgagcgccgcccgggcaggtacagattcctcttagtcaagtcctgattaaaactccagctaagacattagtaagccttggttagtgaagtggcatcaggaagtgcctacattttcatggcctggtagcgttcagtgaaaatgttcattaacagacacaggccattcagtcccgaatcccaagacactgaagaccctgtttgaatcagactcatgggttccttcctagccactctcagggacaggaatgcttctggtgaagaagttttcggtgggtg

SEQ ID NO: 6589 - DNA, 325 bp, Homo sapiens
ccctttgagcggccgcccgggcaggtacgcggggacatcaatgcagagtccctctgtgaatttacaacacccaacacccatgagttcagtccttaagaaggaaaattgagcaagtatttaattggttggacattgcataaaagaggtccatatccaggctaactctagaaattttattctcaaacttagttggcctctttttcttctgtcagaggaccattcttagtggcactgggggaaatcttggcacccagaggaattcaactgcgctcactgcaaaaatacaatgggcctacattggattttgtagaggagaaaggagccc

SEQ ID NO: 6590 - DNA, 311 bp, Homo sapiens
  misc_feature 151, 254, 259, 289, 296, 298: n = A,T,C or G
ccctttcgagcggccgcccgggcaggtactctggcaattcacctttcaattcaaatattctgtagagaacgcttcctctgagaagccactggatgtctgtatggtgcaggaggtttatgtgctgtctgtccaggtttttgttttgggtgtnttttttttttttaacatttttgcataaatgggtctttgatacaggtaaccagttttgtaacattattcagaacttcactgtatcttcaagtttttgatatcancatcnctgtggagaaagcaaatgtgctataatggnaaacatnanggattcttttttt

SEQ ID NO: 6591 - DNA, 393 bp, Homo sapiens
  misc_feature 246, 319, 381: n = A,T,C or G
cccttagcgtggtcgcggccgaggtacatgggactacaggcacgccccaccatgcccagctcatttttgtatttttagtagagacagggtttcaccatgttggccaggatgatcttgatctcttgacctcatgatccccccctcttggccttcccaaagtgctggggatcacagggcgttgagcccccccacctgggccctcttatttaattctctttaaagaagaagaagaaaaactatggaganggccaaaattattttaattaaaatctttacctttagcacaaggggaaaaaaatgggaatttggcctaatatanggtgatgaaagcatacaccaattgaaatagaaaaaccaattcacattttttaagttaaaaangggcaaaaaaat

SEQ ID NO: 6592 - DNA, 910 bp, Homo sapiens
  misc_feature 9, 27, 34, 37, 47, 54, 58, 63, 67, 73, 75, 79, 81, 87, 125,140, 150, 171, 175, 177, 185, 187, 197, 210, 224, 238, 241,243, 261, 263, 269, 271, 402, 418, 443, 449, 451, 459, 461,467, 494, 498, 543, 549, 557, 567, 624, 627, 628, 634: n = A,T,C or G
  misc_feature 635, 645, 647, 655, 665, 686, 705, 726, 730, 732, 742, 748,749, 754, 756, 760, 763, 785, 797, 810, 824, 827, 828, 842,853, 866, 872, 877, 883, 892: n = A,T,C or G
ttagggggnccggaaaatttggggggnccccctnctnagttaatggnccatggncctnccggnaggnccgggncnccgncnccaagntggttgggaaatgggggaattatttccttgggccaagnaaaaattttcggccnccctttttangccggttgggggtttctgtcngggncnccggaggngntaaccaaggntgggaaaatttanggaaccaatttttnggggcaatttaagntangnaaatccttttaaattaancntttggncncaaccaaaaaaggccttaacctgggaggaattaaatttaattggaattaaaattgggaattaaccaaagggaaatttaaatttggaaaaaatttaggaaccaaaaaatttaaaaaaaaccaaggaaaaaanttttcttcccccaggnaaaaaaaatggtgggttcaaaaaantaattngntgggttangncttaanttttaaaaaaaaaaaaccaaccggccntggnggaaggccaaatttttttttttaaaaaaaaatttttgggtaaaangggggnaaaaaaanttgggggttnggggggaatttttaattttttttggggggaaaaaaaaccaaagggggcccatttttnaanngggggnnaaaaaaaatnanaaattttnaccccccttngggggggaaaaaaaaaaattntaaaaaaaaaatttttttncaacctttttttaaccccctnttananttcccccacnaaaatnnaaaancnccanaanggggggtttcccccaaaatttnggaatttttttnaaaaaattttttnaaaaaaattggggnccnnaaaaagccctttcnccccccatttngggggccccacanaaaaanggggnaaaccnatttgtttnggaaaaggaaaattaaaa

SEQ ID NO: 6593 - DNA, 536 bp, Homo sapiens
ccctttcgagcggccgcccgggcaggtacagacccagtgccttccttcctcttctaacagcattggctgctcccctttccagttccatgaagccccatctacaactctgtcaacagctcaagctggaaaagaatcaccatccagctgcctgaccatgtctcctctaggtaggttgcaaattaaggtaaactttgtgaaattatctggcctctctacagagttcatgcagtgagctgaaaacaactgacagtgtgaggcagagctttacatgcagccctggtgccctctcccatcttccctccttttctccctcctctcaccaacccatgcccccaaatggcaactgcatgttccaggaggaaattggagtgtgtctgtaaatgattcagagatctcagatttcctttgacttaataccatagcatgtacgcgggatggcacatgcagcgcaagtaggtctacaaagacgctacttcccctatcatagaagagcttatcacctttcatgatcacgccctcataatcattttccttat

SEQ ID NO: 6594 - DNA, 505 bp, Homo sapiens
  misc_feature 49, 122, 124, 132, 178, 181, 187, 217, 243, 275, 277, 301,312, 361, 377, 393, 411, 416, 436, 437, 465, 468, 474, 484,493: n = A,T,C or G
cccttagcgtggtcgcggccgaggtacatattttggttgaagacaccanactgaagtaaacagctgcgcatccaatttattatagttttgtaagtaacaatatgtaatcaaaacttctaggngnacttggantagtggaaaccctcctaatattcaatttaatttaagccacccgttntgnggacangttaaacccattttccaggtggtatttggntttaatttaataacccacctttatanttcaaacctttatttttttttcaccccagggntntaaaaaattttttaaaattttccntaccaaaaaantaaaccaatttcttggaaattcaaaggccaccaacctgggtaatggttnttcaaggttaagggtnttggaaaaccttaatnggaaaccaacctggggtncattncaaaattggttttccaagtnntccaaaaaaaaggccccttggaaaaagnttnttaaangaattccttnaggaaaagncttggggttaaa

SEQ ID NO: 6595 - DNA, 494 bp, Homo sapiens
  misc_feature 24, 140, 166, 179, 182, 204, 209, 224, 240, 247, 268, 271,285, 288, 295, 298, 300, 312, 319, 339, 366, 368, 372, 382,386, 395, 420, 422, 426, 435, 436, 438, 442, 444, 448, 473,474: n = A,T,C or G
cccttagcgtggtcgcggcccgangtacctaacatttctcatccacttcaaaagctgttctgactgccagctggctgatctaagctcctgaggaatgtctcctctcaaaggaattttttccctccataaggcccccctgnaaggtccctagatttggcaatttggnccctggcacatgnctnatattgtttatgggccctcccntttgnggaatgggcttgtantaaatcattgaaaaantaccagnaattccctctcggcttaggcnctnctgttgggggttcnaangttttcntgngnaacaacccaaantttcttnttgggggaaacctaaggtgntttttggatatttttaaaaatggggcnantggnttggcccccntttntccttttgntgtttccaagtttgcaacctttaananaaanaaaagttannanaaangncccnatttttaaaaaaaaaaaaggttttnngccaaaaggaaatttttttt

SEQ ID NO: 6596 - DNA, 321 bp, Homo sapiens
ccctttcgagcggccgcccgggcaggtacacttcggtctagccagaaaaaaagcagaaacaagaagccaaggctaaggcttgctgccctggccaggaggaggggtgcagctctcatgttgaggagagctgtttctggcaggggttaggaggaactgctaccacttcccccgcgtaccaaagagggcataataatcagtctcacagtagggttcaccatcctccaagtgaaaaacattgttccgaatgggctttccacaggctacacacacaaaacgggaaacatgccaagtttgtttcaacgcattgatgacttctccaag

SEQ ID NO: 6597 - DNA, 466 bp, Homo sapiens
ccctttcgagcggccgcccgggcaggtacatctacctaaaggactattatgtggaataatacatactaatgaagtattacatgatttaaagactacaataaaaccaaacatgcttataacattaagaaaaacaataaagatacatgattgaaaccaagttgaaaaatagcatatgccttggaggaaatgtgctcaaattactaatgatttagtgttgtccctactttctctctcttttttctttctttttttttttattatggttagctgggactagaggaacgtgccaccatgactggctaattttctgtattttttagtagagacagagtttcaccatgttggccaggatggtctcgatctcctgaccttgtgatccacccgcctcagcctcccaaagtgttgggattacaggtgtgaaccactgtgcccggcctgtgtacctcggccgcgaccacgctaaggg

SEQ ID NO: 6598 - DNA, 312 bp, Homo sapiens
  misc_feature 159: n = A,T,C or G
ccctttcgagcggccgcccgggcaggtacgcaggggcttctttccctttcggtgtgccactgaagatcctggtgtcgccatgggccgccgccccgcccgttgttaccggtattgtaagaacaagccgtacttttttttttttttttttttttggtaganaatagtgaccttttgggtaatactttagctgtgaaaatttttcttctaaatttttctactctgaacaggaatgttttaaaacactgttaggcctattgagtgagctatttttctaaaacattttatcctttgaaatacgtatcttattaacaa

SEQ ID NO: 6599 - DNA, 939 bp, Homo sapiens
  misc_feature 20, 32, 41, 54, 77, 88, 93, 99, 104, 111, 119, 125, 131,142, 143, 155, 157, 168, 181, 191, 204, 205, 210, 215, 216,219, 227, 243, 253, 260, 271, 272, 279, 301, 333, 342, 359,372, 378, 387, 409, 423, 432, 436, 454, 457, 460, 471: n = A,T,C or G
  misc_feature 495, 511, 525, 527, 533, 560, 588, 610, 619, 630, 641, 643,646, 650, 663, 670, 679, 693, 696, 700, 707, 712, 719, 721,742, 744, 752, 776, 788, 813, 815, 821, 837, 850, 853, 860,861, 863, 865, 866, 868, 887, 890, 895, 903, 910, 915: n = A,T,C or G
  misc_feature 926, 938: n = A,T,C or G
ggggcggggggaaaccaatncctccggggggngggggaacncccccaccttggncccttaaaagggggaaattgggnccccgaaattnggggncccccntttgnccggganaaagggancccggngggganccctcccgggnnccgcccaaaggntngttgggggttnagggtaaaatttngggggggtgnaatttcaaatttnncattnggggnnccnaaaggggnaaaaaaatttcttttnccgggtcccnccccccntttattttttnnccgggcnaaagggacccgggggggccccncccgggacccccccccggggggtggggacccnaaggagggnttttaaacccaaacccncccttttttcttnggtaancctttaaancccaatggaccctttgggaccnaaagggcaaacaangggtttggntttnttgcccccattttttttnaanggnaaaccaataanaaggggttgttttggtttggcaanccccccccaaattatntttttaaccttccntngggggnaaaattaaaaaaggggggggccaaggnaaaaaaaccgggggggctttcaaaaacnaaattttcctcaaattttaaantttttgggntaaaaaaaggnatttaaccccntnggncttnggtttaaagaccntttcttncaaattttnaatgttttattttnggncttnaaccaanccttnccaattntnttatgaaatttttttaggttnantttttctnaaaaaaaaattgggttattttttnaaaggggggccnaataacctccttcaacaaggtaaanancccaanaaaatttgggattaanaataagaaggttnaanacaaggnnantnngnccacggtgggaaaaagaanaanaattnggaaaaantcttggnccttnttggggggttnaatttttccaant

SEQ ID NO: 6600 - DNA, 215 bp, Homo sapiens
  misc_feature 109: n = A,T,C or G
cccttagcgtggtcgcggccgaggtactactactccctaacccaaaccaggtagattctagtgaagactgtcaataaacggagcatgtgatcaagcagggcccatcagnaatccttccctaagatttttataaaaagctggacctattctttttccatttgagtggcaaatatttgaagatatgaggtctaaagctgggatggcttattctccat

SEQ ID NO: 6601 - DNA, 564 bp, Homo sapiens
ccctttcgagcggccgcccgggcaggtacttgagaaaaatggatatttttgtagtaactggttgcagaactctatgtatgcccattaggtttggcgtataatttttattgttttgttcagttctatatttctgctgattgtctctttgatcaataattgagatgttgaaatctctcaatttaccaaattttcttgtagttctagcactttttacttcatatatagtgactattttcttgttttaaatgtttatattttcttattgaacctttatcattatgtagtgatgcctccatttcaaatgcttcttctctttttgtatcatactaacagagccacaccaacttcctttttgttgacctaatatgctattttttacacttttactttcctactcttaacccctaggctagcctgcttctctacacttttactttcaaacatttcatgtcattctgctttgctgtagcttttggaggcaccatataacagattgtttaaaatccaatctgataatcttggtcttttaatgagaaaatttagttaatttacatttggtatttt

SEQ ID NO: 6602 - DNA, 338 bp, Homo sapiens
  misc_feature 214, 215, 231, 232, 256, 288, 293, 295, 316: n = A,T,C or G
ccctttcgagcggccgcccgggcaggtacaacattggattatttctttgggctgtttccaactcaagattctgttatttcattataagcattttgaggaaggcagttggtataaaggtgcccttagtaataaaagtcagtgtgaagtctaaagaaattccacaatgaatttaaagacaagaattttagggacaaggatacagaaatttgcctannaacttgcacacagcannatggtaaatattttatttgactcnaatggagtaatgtttaaaaaataaaggttttnccatngnacttgtgttgaaggggcccangacatactttaacaattccctt

SEQ ID NO: 6603 - DNA, 325 bp, Homo sapiens
ccctttcgagcggccgcccgggcaggtacggaagaagaaaatgataattctttagaaaaagatatagcaacgaagatgcgtcttcgggctttatcaaggtatggacttgatacagagcaggtgtggaggaaccacattttagctggaaatgaagatccacagctcaagtcactctggtatactctgcactttatgaagcaatacacagaagatatggatcagaaatctccaggcaacaaaggatcattggtttatgcaggaattaaatcaattgtaaagtcatcgttgggaatggtggaaagcagcagacataattggagtgggt

SEQ ID NO: 6604 - DNA, 289 bp, Homo sapiens
cccttagcgtggtcgcggccgaggtaccatcaaatgagttggtgttaaactgcattctttgaagtcttggggattctgaggagccctcttagggaacatcttggggaagggaaagaaaggggaacttgaggctgggcaggtctgttgtctgtcttcaatcagagcagctttgttttctgttatgtattggttgtccataaaaacaaaacaaaacacagttgcttgaagaaagcataccgctgctaaataaataaagcaatagcaaataacttttgaagatgggccagag

SEQ ID NO: 6605 - DNA, 455 bp, Homo sapiens
  misc_feature 98, 115, 118, 149, 157, 191, 194, 217, 238, 247, 259, 276,316, 387, 425, 440, 444, 452: n = A,T,C or G
ccctttcgagcggccgcccgggcaggtacgcggggggtgctcacagctgcccattgcctaaagaagaatagccaggtctggcctgggtcggcacaacnctggttttggaggcccntgnaaagaacaacaagggcccaggaaggggttcnccttgttncaggccccaccaggctttccccacaacccccgcntcntaccaaataatggaggttctttnctggaaaggccattcaaaagnccctttagnacccaggattgnaaaagaacttccaagcncattggacccttcatggctggctcccgcccttgttcaagnagccctgcccaaggatcaccaaggattgtttgttggaaagggttccctgggggccctggcccacccccagnggagcccaggccacctgggggggacccaccccttggcntaaccgcccttcaanggcntggggggncaa

SEQ ID NO: 6606 - DNA, 246 bp, Homo sapiens
  misc_feature 145, 227: n = A,T,C or G
ccctttcgagcggccgcccgggcaggtaccccgacgcggtgaagatctgcaatatctgtcacagcctcctcatccagggtcaaagctgcgaaacctgtgggatcgggatgcacttaccctgcgtggccaagtacaagaccacacncggatgtcatctttgtatttggattccagaactcatttttggtggtggcaagacaactggcttttggcatgatttatgattnccttggattatgcaaagaa

SEQ ID NO: 6607 - DNA, 343 bp, Homo sapiens
  misc_feature 283: n = A,T,C or G
ccctttcgagcggccgcccgggcaggtactgaaggctggtgtttcacatccaatattaatgacacctgtccccttttaatcggcgtttctcttggtgcctcttttttgttatgcctgtgtcccctgcagcactgtcagtatgttcccagatcacaacatctttttcaatgtcttgaaggttgaaattccctagtttgcttaatgagaatccttcaatccatgatcctagatatacaggcaaaaggggttctttcctctgctgaagaaagaaaatggccatcanggcaaacacataaggtggcagacctccttcttcagggcgatctatactgcaaagctttgc

SEQ ID NO: 6608 - DNA, 496 bp, Homo sapiens
ccctttcgagcggccgcccgggcaggtactacatatgcagaatctgatacaatgttaatagactgattaaaatcttgctaacactgtaatgacggcaaccaactctgctctttgagtcaagtgatactgagttttgatgactcattcttttggcccggtgtaagccacttttccattgctggaaccatcagtaaacactgccagagcattttttaaaggcttatgtttggtaactttaggtaaaatccaagtagtcaattttaaaaactggaagatttttgttttggggtaacgattgtcaataattcccacaaaatcggcaagaccaatctgccatgcaccagaattgataaaggcttgtctaacctgttgcttgttgaaaggaacagtgattttatctgggtcatttccacacaatgttattattcataatcttccctgaccaattaatgtagccatttgatccaaagtacctcggccgcgaccacgctaaggg

SEQ ID NO: 6609 - DNA, 385 bp, Homo sapiens
  misc_feature 196, 357, 358, 368: n = A,T,C or G
cccttagcgtggtcgcggccgaggtacgcctagccctggttcatgatatggcagaatgcatcgttggggacatagcaccagcagataacatccccaaagaagaaaaacataggcgagaagaggaagctatgaagcagataacccagctcctaccagaggacctcagaaaggagctctatgaactttgggaagagtncaaggctaagcattttaactttatactggaaaaaaaatcaaacaaaggggagggataaaggacttagtcatcttttgcactgggaaaacaaaatatgtaattaaatttcccatagctggcatgtaacattgaaattcttccaggttaaaaaaaaaaaaagnntaatcctgtngatattaatgggaatga

SEQ ID NO: 6610 - DNA, 350 bp, Homo sapiens
cccttagcgtggtcgcggccgaggtactattgttagtgacgggatctacacgtcaaatagcaaagcatttacccctgtaatgcttttagattcacagaagaatctagatagaaccaaatacatatactgccatggccatgtgattttcaagtattaaaagttcatttgcataaggaatcaacctgagattttcctaaaccacttctctggcactcagtattatagccttcattcaatacaataaaagccaacaacttgacaattattgaaaaaaaattatattttggaagaactcactacataaggtgacagaattccaaaatcaaattacatgaaaatatacatcgcaa

SEQ ID NO: 6611 - DNA, 387 bp, Homo sapiens
  misc_feature 180, 225, 273, 309, 315, 331, 336, 371: n = A,T,C or G
ccctttcgagcggccgcccgggcaggtacgcggggctgcagccgagtgacctccataaatactggactgaaaaaacattgtaatactacaagtataatgacatttagaagattactttgggctggtgggacatgctgtggaattttagattacaaaatgaatattataaaggggatgatntttaaccaaaggaatatatttttaacttgaatcttttcttgcatngtatttttctaaaagtttggccttcctttcttggtagtcaagaagtantgggtaataaagggagttatatgtctgctatcctgngttgcncatttaaaaaaaaagntatancatttggaataaagggctggtttattcacatggcnttaaaaattaaaatat

SEQ ID NO: 6612 - DNA, 344 bp, Homo sapiens
cccttagcgtggtcgcggccgaggtacatttttagtgatatctgattgggctaacagttccctgaatttagccctgagttattgcttagactacagttgaattgctaagaattctctggcaaagcattatcagggagaaaaaggtgatttaataatttaattatgaataaaatatagtcatcaaatatgacttttaacctaataggagtctttaaagaaggtaaaaaccaaaacatttatataaccaaaattatagccatctgaagataagggattgcatttgatactttttaaataattttatactgcctccaataatttatttcctaataaaaaaaaaagaa

SEQ ID NO: 6613 - DNA, 576 bp, Homo sapiens
  misc_feature 53, 93, 109, 126, 134, 150, 154, 156, 159, 164, 168, 194,195, 199, 214, 219, 220, 221, 227, 233, 239, 243, 293, 300,307, 308, 310, 332, 333, 356, 359, 368, 372, 385, 426, 428,434, 488, 511, 517, 553, 557, 558, 560, 563, 566: n = A,T,C or G
cccttagcgtggtcgcggccgaggtaccagtcaaacgtcactcagatgcagtnttcactgacaactatacccgccttagtaaaacaaatgggntggtaaaagaaaattntttttggaaactttcanattcttgnaattggggaaaaaagnaagngnagntgcangggnagaaaattccttccccggactttttnntcantaaaggaggttttangtaannnaattgnattggnaataanaagnaccccttttttgggtaagacataaaagcccttgcaattggaaccaaaccnttttccnccaaganngnaataatttttcttttggcaaanngggaaaaaaaaattggaatttanccnggccaaaancaanttataatttttanaaaatttttttttgggaaggttgttcttaaccaattaaaangnttaganttttctaatagggaaaaaaaaccaaaacctttttccaaatttaattcctcaaanaaccccaaaaaaatttaaaaaanaaaatnaattttgggtcggtttttggttggaaaaattggttnttgnntnggnaanttggttaatt

SEQ ID NO: 6614 - DNA, 305 bp, Homo sapiens
  misc_feature 197, 200, 202, 204, 259, 260, 273, 296, 298: n = A,T,C or G
cccttagcgtggtcgcggccgaggtaccattcctctaaatttactacctaattctttgcctttaattgtccccatgggggtcacctggccctttacctcaaggttcggtgggcctggtgttaggcagggcatccacctcatgatactaaaggtatcatagttcatactagtcttcattaattctgactccctctganganantnaaacttatgtaaacttatggtgtctgccaaagttcctgtttccattccggccagnngagtcaattgctnaatttactttttactaccctaancnttggttt

SEQ ID NO: 6615 - DNA, 461 bp, Homo sapiens
cccttagcgtggtcgcggcccgaggtactttgcagtgtatgatggacacggtggacctgcagcagctgatttctgtcatacccacatggagaaatgtattatggtttgcttcctaaggagaagaacttggaaactctgttgaccttggcttttctagaaatagataaagccttttcgagtcatgcccgcctgtctgctgatgcaactcttctgacctctgggactactgcaacagtagccctattgcgagatggtattgaactggttgtagccagtgttggggacagccgggctattttgtgtagaaaaggaaaacccatgaagctgaccattgaccatactccagaaagaaaagatgaaaaggaaaggatcaagaaatgtggtgggttttgtagcttggaatagtttggggcagcctcacgtaaatggcaggcttgcaatgacaagaagtattggagatt

SEQ ID NO: 6616 - DNA, 477 bp, Homo sapiens
ccctttcgagcggccgcccgggcaggtacatgctgcacgcacacaaaagacactgagaatatttttaagaagccacacatcacagaatttgatagtcaacttcatgcaatgagttccttttatatttcatcaaaaggtttacttgcccctttacttgttccaaatttccaagattaactcttaaatttgaaaaagtatctttttaataaaaatcaggtatctctttatatccatgatctatatggacagtgatttggattttttcaatcaaactctccctaagatacacccaggctgtgtttccattttagaaagtccatggcagatagctcaaattaaaaagaagcaatttgtccagaataattggttactgtcatgaatagtagacatttttcggggtgggggagtgagaggctctctaataaggggaatcatattagttaagattaccagtaagaaaaaaaatagctgtaaact

SEQ ID NO: 6617 - DNA, 336 bp, Homo sapiens
  misc_feature 267, 308, 317: n = A,T,C or G
ccctttcgagcggccgcccgggcaggtacctttcattggattgtccatggtgcatcgctttagcaagcggcgtgactctccgctgcccgtcatcttggccaatatctatctgctggttcctcctgtgctcaacccaattgtctatggagtgaagacaaaggagattcgacagcgcatccttcgacttttccatgtggccacacacgcttcagagccctaggtgtcagtgatcaaacttcttttccattcagagtcctctgattcagnattttaatggttaacatttttgggaagacaggtatttcagnaaaaaaaanattttcccttaataaaaaa

SEQ ID NO: 6618 - DNA, 377 bp, Homo sapiens
  misc_feature 34, 50, 51: n = A,T,C or G
ccctttcgagcggcccgcccgggcaggtactttntttttttttttttttnnttttgccatgaggcattttatttgtaaatatatgtattacatccctagaaaaagaatcccaggattttccctcctgtgtgttttcgtcttgcttcttcatggcccatgatgccagctgaggttgtcagtacgcgggaggcattgaggcagccagcgcaggggcttctgctgagggggcaggcggagcttgaggaaaccgcagataagtttttttctctttgaaagatagagattaatacaactacttaaaaaatatagtcaataggttactaagatattgcttagcgttgagtttttaacgtaattttaatagcttaagattttaa

SEQ ID NO: 6619 - DNA, 352 bp, Homo sapiens
  misc_feature 186, 285, 299, 350: n = A,T,C or G
ccctttcgagcggccgcccgggcaggtacgcggggtcttcccctttccctaagcagcctgaggtgatctgtgaaaatggttcgctattcacttgacccagagaaccccacgaaatcatgcaaaatcaagagggttccaaatctttcgtgttcactttaaagaaacactcgtgaaaactggcttcangccatcaaaaggggttattgccataattaccgaaaaaaggccaccgaaaagtattcttgaaaaagaatggtcactttttacaaggaaaaaccaaggttnttggtaccagccantcagcgttcggaaaaattttgcaagcttgcctttcttgggcattcattttnat

SEQ ID NO: 6620 - DNA, 391 bp, Homo sapiens
  misc_feature 334, 350, 363, 372, 374: n = A,T,C or G
ccctttcgagcggccgcccgggcaggtacgcgggggaaccaaactttagttttctacattaatgagaaacactggtaactttgcttcattgaaaaaataattgcttgttctctgtcagatgcacttcgtcttagtaacatggccatggggaagacaaccacaggccagatagtcaatctgctgtccaatgatgtgaacaagtttgatcaggtgacagtgttcttacacttcctgtgggcaggaccacctgcgggccgatcggcagtgactgcccctacttctgggatgggagaataagggaatattcgttgccctttggctggggatgggcaanttctaaatcaatttcntcctgccccttgncaaaagccntntttttgggggaaaaggt

SEQ ID NO: 6621 - DNA, 217 bp, Homo sapiens
  misc_feature 108, 147: n = A,T,C or G
cccttagcgtggtcgcggccgaggtacctaacaaacccacaggtcctaaactaccaaacctgcattaaaaatttcggttggggcgacctcggagcagaacccaacctncgagcagtacgcgggggaggaggagttgagagaacggancggacgccatggcgaccaacatcgagcagatttttaggtctttcgtggtcagtaaatttccgggaaattt

SEQ ID NO: 6622 - DNA, 441 bp, Homo sapiens
  misc_feature 166, 183, 186, 243, 287, 301, 322, 375, 398, 403, 432: n = A,T,C or G
ccctttcgagcggccgcccgggcaggtacacagcaggcttttcaggcagggcacatggctcagggccccatggtgtgataccttgaagcacaccattaccagacaaggtgggaccccccccaggaaattcacccccccaacaaagttgtcctttttacccaccctngtcccaggagccccagncancaccaaacaatggaaacttcctgttcaccctttcttcaagaggtaaaggcttctagncacaacattgttcatttgggaccagggaggattgggagggcttnacaccacttgaagnacttcctggggggcgccaagnaacttccttctgggtttcggatggcttgccccccagcccctggagggcgtagncagggggtgggtcccccagttgnctggnctcctggggtggggccaggggccccaggnaaccctttc

SEQ ID NO: 6623 - DNA, 694 bp, Homo sapiens
  misc_feature 2, 31, 37, 46, 67, 96, 112, 117, 132, 134, 171, 186, 202,217, 225, 232, 238, 251, 257, 264, 271, 283, 290, 294, 298,300, 310, 312, 320, 356, 367, 434, 438, 515: n = A,T,C or G
gnggggaagtttccgcaccgacctttcaacnttaatnaagtggggnccgggaaaaattctggggggncccccctttcctttaaggacaatgggccnattgggcccttcccgnaaggncccggggccccccgncncaaaggttgggttgggaaatggggggaaattaatttnctttgggcccaaggnaaaaattttccggccnccctttttttccggnaagggccnggggccncggccnccccggggggccnaagggnttaaccnttggggnaaagcccaaaanggccttntttnattntncggttttggncnaattcaanaaaccccttaaaaaccttttaaaaaagggaatttgnaccaaaaaggnccccacccccaaccttttttgggaaaaggggttggcccttcaaaaaaatttttctttgggtcttttnaagnctttttcaaagttggtttcaaaggggggattgggggtgggtccttgggttttttgggggacctttggattgccaagnggggtggggtttgccccatcaccgaagccttcatttcattgaaactctacaacatgtactttttttttttttttttttgacttttcattttttttaaatttattttgcttattacggaaaaacgcaccacataattcaactagcaaagaagactgcttcaggaccgtgtaaaatgaaag

SEQ ID NO: 6624 - DNA, 366 bp, Homo sapiens
ccctttcgagcggcccgcccgggcaggtacacgtctcccgttttcttttcacatcaatgcagagtccctctgtgaatttacaacacccaacacccatgagttcagtccttaagaaggaaaattgagcaagtatttaattggttggacattgcataaaagaggtccatatccaggctaactctagaaattttattctcaaacttagttggcctctttttcttctgtcagaggaccattcttagtggcactggggaaatcttggcacccagaagaattcaactgccccactgcaaaaatacaatggcctacattggatttgtagaggagaaaggagccctgtattgtgagctgtgctatgagaaattc

SEQ ID NO: 6625 - DNA, 504 bp, Homo sapiens
  misc_feature 414, 428, 489: n = A,T,C or G
ccctttcgagcggcccgcccgggcaggtacgcggggagaaaaacagaggggagatttgtgtggctgcagcccgagggagaccaggaagatctgcatggtgggaaggacctgatgatacagaggtctgtaggccatgggaatgggtttggaattttattcaaagagctatgggaagtgactagaaggtttaaagttggggaagaggttttgtgtttctgttatatttgtgttttatacaaattactctggttgctgtgttgataggacagcagaagggtaggagcagggacaccagttaagttattgcaatggttaaggtgagaggtggtggctgggcctaggcctttttggagtgaacaagctatttgcttggcttccatgatccttctccctccctggaatggaaggtacctnggcccgcgaccacncttagggcgaattccacacactggccggcccgttactagtggatcccgagctcggtccaancttggcgtaatcatg

SEQ ID NO: 6626 - DNA, 322 bp, Homo sapiens
  misc_feature 67, 69, 86, 91, 99, 105, 106, 107, 108, 110, 122, 127, 129,131, 145, 147, 153, 154, 156, 157, 163, 165, 167, 168, 169,177, 184: n = A,T,C or G
ccctttcgagcggccgcccggcaggtaccgaagctcagctcagccctcttccttattttgctcccanancctcccccagatttttnctgcnttcacccncctttnnnnangtttaactgccnttttntngnttatttcattctgngntttttnnannttttantntnnncatttagngtgaccntttacttgcaagtgatgttaggactgtgacaagatctgctgccagcccggttgtaatgtagtatgccagaaagagcttcagagtcttcttcagaggaaaaagatgattatgaaatttttgtaaaagttaaggacactc

SEQ ID NO: 6627 - DNA, 345 bp, Homo sapiens
cccttagcgtggtcgcggccgaggtacgcgggggaatttacaacacccaacacccatgagttcagtccttaagaaggaaaattgagcaagtatttaattggttggacattgcataaaagaggtccatatccaggctaactctagaaattttattctcaaacttagttggcctctttttcttctgtcagaggaccattcttagcggcactggggaaatcttggcacccagaagaattcaactgcgctcactgcaaaaatacaatggcctacattggattttgtagaggagaaaggagccctgtattgtgagctgtgctatgagaaattctttgcccctgaatgtgg

SEQ ID NO: 6628 - DNA, 341 bp, Homo sapiens
  misc_feature 198, 295, 330: n = A,T,C or G
cccttagcgtggtcgcggccgaggtacgcggggagacaaggcagttgaggaggagggagcgcttgagggggactggcctggcgtgcactccgcacctcggggacattattgcgcgtggaacggctgcttttttggaagactattgcccagaagaaaagatgtttggttttcacaagccaaagatgtacctgcccgggnggccgctcgaaagggcgaattccagcacactggcggctcgttactagtggatccgagcctcggtaccaagcttgggcgtaatcaatgggtcattagnctgtttcctgtggtgaaaaatttgtttattcccgncttcacaaatt

SEQ ID NO: 6629 - DNA, 269 bp, Homo sapiens
  misc_feature 3, 16, 20: n = A,T,C or G
ccntttcgagcggccntttngggcaggtacgcgggggtgacacacacacacacacacagcacctgcacgcagatgcacacatctctagtcaaatgaggctctcagcttttgataggggctttttgatacgtgtataaccaatactttattctcactgtagtcaaggactcattgcaattcagaaatgagaagctgatccggaactccactacagctcaaagaaattctcgaatgttctcacctattaacagttattaaaatggaagaaa

SEQ ID NO: 6630 - DNA, 412 bp, Homo sapiens
cccttagcgtggtcgcggcccgaggtaccatatactcttccccgccccatgcttcatgggatgttattacagtatggtgctttacagcgaaaatgagagcagtcacttaagcggcttactgagacccaggcaatgttctaagcagctacacacagtaactcctaacaaccttaggaggcaggaaccaaaagctgaagcatcgtacaacttgcctccaactaagaggggatctggggttcaaacccaggcagcctgacatgagcgtttccttttttttttttctcttttgctaagtaaaaagtaggtttaagggaagaatcatttatagtaacactgaattaagtaagggtttgtaggtcacagaatcagactatttagggccgatacttcaagcatatctcaattaacaaaa

SEQ ID NO: 6631 - DNA, 380 bp, Homo sapiens
  misc_feature 331, 364: n = A,T,C or G
cccttagcgtggtcgcggccgaggtactttccactgcacagaagcctggggattcttattgttttgatatttaaaaattgaatctggccgggcgtggtggctcatgcctgtaatcccaacactttgggaggctgaggagggtggatcacctgaggtcaggaccagcctggccaacatggtgaaccctgtctctactaaaaatacaaaaattagccaggagttgtgtgccgtaatcccagctacctgggaggcttgaggtagggagaattgcttgaacttggggagctggaggttccagtgagcccgagatcgcaccaacttgcacttccanccttaggcaaccagaagtggagacccccatctnaaaaaaaaaaaaaaaa

SEQ ID NO: 6632 - DNA, 419 bp, Homo sapiens
  misc_feature 125, 149, 166, 198, 217, 234, 265, 269, 314, 346: n = A,T,C or G
ccctttcgagcggccgcccgggcaggtactgaggctgtatacagccacagcctctccccatccctccagccttatctgtcatcaccatcaaccccctcccatgccaccctaaaaccaaaaaatcntaaccttggtaatttcccttttgnaaacaatgttcagggcnataccatttatttcctttcttggccctggagnaaggcttctttcctttgtnctccttaaaatcctagnaaatgaatgttaaaagtttttgaaataaagnttgnactaatctttaccttcatggcaaaaggaaaggggacaccatatgnagaattcaattcatcaccaatggaggaacagncaaaatactaaaaaagtggtaatttttggatttaataaaggaggttttaggaataaaatataatggaaaaatg

SEQ ID NO: 6633 - DNA, 354 bp, Homo sapiens
cccttagcgtggtcgcggccgaggtacatctacctaaaggactattatgtggaataatacatactaatgaagtattacatgatttaaagactacaataaaaccaaacatgcttataacattaagaaaaacaataaagatacatgattgaaaccaagttgaaaaatagcatatgccttggaggaaatgtgctcaaattactaatgatttagtgttgtccctactttctctctcttttttctttctttttttttattatggttagctgtcacatacaacttttttttttttgagatggggtctcgctctgtcaccaggctggagttgcagtggcgccgatctcggctcactgcaac

SEQ ID NO: 6634 - DNA, 336 bp, Homo sapiens
  misc_feature 208, 280, 285: n = A,T,C or G
ccctttcgagcggccgcccgggcaggtacgcagggaatgtaaataaggataactgatcagagttatccactgtatttataaggaagagtcggaaaaaacaatgaccttagttttttttaagcctgatgatactatggtttactctaataagatagctatattgataattatatttttgttactgtgcccttgcacattttggtctttntgttaatatttttattaataacacataattagtaaccactctactgtttcaagttaatctagtaatagagcnttacntatattttggtattaactgctatacccactggaactgaatttattttacaa

SEQ ID NO: 6635 - DNA, 576 bp, Homo sapiens
  misc_feature 9, 15, 95, 100, 110, 126, 135, 144, 151, 172, 208, 218, 260,281, 296, 298, 302, 314, 318, 322, 324, 329, 331, 357, 374,377, 379, 381, 382, 383, 410, 412, 413, 420, 430, 438, 443,450, 469, 486, 487, 488, 491, 500, 511, 519, 524: n = A,T,C or G
  misc_feature 526, 529, 534, 540, 550, 554, 576: n = A,T,C or G
cgcccttancgtggncgcggccgaggtacaaagagtagctgccccttctcagggcagatgatgctttgagaacatactttggccattacccccanctttnaggaaaatgnggctttggatgaattnattttatgnttttttagnggaaccncccaaacccttcagggccaanttcccctaccccttttttcacccctggaaccccctngcccccaccnaccttttggccccaattaaaaaaaacctttaagcccttaaangctccctttggttttttctgnttttttttttacaananctgntttcaaaattgnttanaaangnggggngncccatgtctaaggattggcccccatnaaaaaattatttaatanttncnannnaaagaaattaaaaacccggcctttttnanngggttcnaaaaataagnttattccnaattnaagcggnggtttttccccccaatttngaaaaacccttaatttnnnttngggaacccnttggggggccnccaccccnacccnanggnggganttcccntttttttttncggnttaaattttttttaaaaaaggn

SEQ ID NO: 6636 - DNA, 355 bp, Homo sapiens
ccctttcgagcggccgcccgggcaggtacgcgggggcaggcgcacttcctgaagctgaaggtcagcatagacaaagggcctcagaatcgcgcaggcgcaattgtgccctggttcgccaaagatgtcgttcccaaagtataagccgtcgagcctgcgcactctgcctgagaccctcgacccagccgaatacaacatatctccggaaacccggcgggcgcaagccgagcggttggccataagagcccagctgaaacgagagtacgagacccggggcctgttgagcctgctcactggagtgttacagcagtcgaatgaaagactttggcagaaaccagctgcttgggtctatttcctg

SEQ ID NO: 6637 - DNA, 394 bp, Homo sapiens
ccctttcgagcggccgcccgggcaggtacctttcattggattgtccatggtgcatcgctttagcaagcggcgtgactctccgctgcccgtcatcttggccaatatctatctgctggttcctcctgtgctcaacccaattgtctatggagtgaagacaaaggagattcgacagcgcatccttcgacttttccatgtggccacacacgcttcagagccctaggtgtcagtgatcaaacttcttttccattcagagtcctctgattcagattttaatgttaacattttggaagacagtattcagaaaaaaaatctccttaataaaaatacaactcaggatccttcaaatatgaagctggttggggaatctccattttttcaatattattttcttctt

SEQ ID NO: 6638 - DNA, 439 bp, Homo sapiens
  misc_feature 14, 19, 32, 50, 75, 100, 104, 147, 149, 155, 156, 158, 173,178, 181, 183, 187, 196, 208, 214, 215, 216, 217, 219, 236,237, 238, 251, 261, 262, 263, 267, 269, 274, 275, 276, 277,286, 287, 300, 301, 302, 303, 306, 308, 310, 317, 318: n = A,T,C or G
  misc_feature 319, 322, 335, 339, 343, 345, 355, 357, 364, 377, 385, 387,388, 389, 390, 392, 394, 395, 396, 412: n = A,T,C or G
tgtaataccgactncactnttaggggccgaanttgggggcccctcttagnaggcatgcttcgagccggcccgccnagtggtggatgggatattctggcangaanttccggcccccttttccgaagcgggcccggcccggggcaaggnancctttnntnttttttttttttttnttttnttntngggngaaaatttnccctttaaactnggaacnnnnanattttggggcatagaannnggccctttaaaanaaaaaaaaannngggntnttttnnnnaaataaaannttttggaaaatannnngcncnantcttttnnnaantttttttataaanaggngaanantttttagccntnttttttnccccccccctttnaaaaaaanannnngngnnntttgaaaaaaaaaaanatttttttttagaggaaaaaaaaaaaa

SEQ ID NO: 6639 - DNA, 964 bp, Homo sapiens
  misc_feature 3, 23, 32, 40, 42, 47, 53, 59, 64, 66, 70, 74, 77, 85, 89,91, 97, 101, 122, 126, 128, 134, 143, 149, 163, 167, 169,180, 192, 208, 210, 212, 214, 216, 218, 220, 222, 224, 226,228, 230, 232, 234, 236, 252, 254, 264, 286, 305, 330: n = A,T,C or G
  misc_feature 357, 359, 405, 430, 440, 444, 459, 461, 477, 507, 541, 548,557, 560, 568, 607, 610, 629, 633, 635, 644, 661, 692, 695,706, 713, 721, 735, 752, 755, 825, 826, 832, 835, 902, 944: n = A,T,C or G
cgnacttcactttataagggggnccgaaaatntggggggncnccctncttagnaatggnccatngncctncggnagnccggggcnccgncnccaagntggntgggaaatgggggaattattncttngnccaagnaaaaatttnccgccnccctttttttcggnaagncnggggccccggnccccccgggggnccagggggtaaccctntntntntntntntntntntntntntntntggaaaggttaagacntncttttttggntaaaaaattttccttttaattntgggccccagggggaaagntggaaaaaccccccttaaaaaaggntgggggccttccaaccaaaaggaaagntngccccccttaattttttccttttttccaaaattttaaaaccttaanccaaggggggggaaccaaaaaaccnacccaatttntttncaaaataaggttttngnaagggaaattaaaaanggttgggaaacccccacggtttaatttggnaattttttttgggcccccaaaaaaaaaatttttnctttaanaaaaaaggnccnggcccaancctttccaaccctccaaatttggtaaaaaaaaattgggnggnaaatttaaaaaaaaagggngggntntttaacccncccttttttttgggggnggggggaatttttttttgggcccaacccttnggncccaatttggnaaaaaanttttttcntttggggttggggnaaaaaaaaaaaggcccnttnttgggtttttgggggggaaatttaatttttttggggttggggaaatttaaaggggaaagggaaatttaannggaaanggnaaaaaaaaaatttggggaaaaaaggctttcaaatttaatttttttaattttaaatttaaaaaagggnaaatttaacccctttaaattttgggaaaaagggggggttttnccccccccctttgggccccc

SEQ ID NO: 6640 - DNA, 423 bp, Homo sapiens
cccttagcgtggtcgcggccgaggtactggagtaaattcagtatgaaggaagaaagcgctcctgcgtgttagaaccttgcccatgagctggaccgaggacaggagatggactccaggaaaattggatttcttcaagcagcctcccttggaaatggaatatctttaaaatcttctttgcagaaagacagttagaatgtattaatcagaatagttgaagacttattttcctttttattttttttcaaaatgagcattattatgaagccaagatcccgatctacaagttccctaaggactgcagaggcagtttgttttgatgtggacaatggcacatctgcgggacggagtcccttggatcccatgaccagcccaggatccgggctaattctccaagcaaattttgtccacaagtcaacgacggga

SEQ ID NO: 6641 - DNA, 339 bp, Homo sapiens
  misc_feature 318, 339: n = A,T,C or G
ccctttcgagcggccgcccgggcaggtacagccatattccatcgcctacaaatgccatatgttatccatttatcaagaaacttaagtagctgtcacctttttgtgtgtagggggttggggaatgctcttaaaaatatatgtgtgcaaatgtctattccaggtcctgctttggatacatagattcccagaagtaggattcctggattgtataatttctcttttcttttctctttctctttctcttctttctttttctttctttttttttttttgagattgggttttcacatttgtcaccccagggctagaagtgtaagntgggtgccaagtaaatgggcn

SEQ ID NO: 6642 - DNA, 496 bp, Homo sapiens
ccctttcgagcggccgcccgggcaggtacgcggggaaaagggtggggagtgccctttcttgaaggaatcccttaagtgcacgtctcccgttttcttttcacatcaatgcagagtccctctgtgaatttacaacacccaacacccatgagttcagtccttaagaaggaaaattgagcaagtatttaattggttggacattgcataaaagaggtccatatccaggctaactcgagaaattttattctcaaacttagttggcctctttttcttctgtcagaggaccattcttagtggcactggggaaatcttggcacccagaagaattcaactgcgctcactgcaaaaatacaatggcctacattggatttgtagaggagaaaggagccctgtattgtgagctgtgctatgagaaattctttgcccctgaatgtggccatgccaaaggaaagatccttggagaaatcattaatgcgttgaaacaaacttggcatgtttc

SEQ ID NO: 6643 - DNA, 337 bp, Homo sapiens
  misc_feature 239, 242, 243, 264, 276, 278, 283, 284, 292, 295, 296, 313: n = A,T,C or G
cccttagcgtggtcgcggccgaggtacgcgggggagtttcgatgccttcactgacctcggcccttagggttcccctaaccccctaactggcaggcccgccctactgtgcacctctaggcatctctgtttaatgggccctgctcctctggaattcctttgtggagactgagctgaaaaggagaaggaaatggacccttttcattatgattaccagaccctgaggattgggggactggtgntcnntgaggaactgttttaggctgncaatacttgatntnttctnncaaaaagnccnnaaatatcgttttaactntgtcacagatttatagcaccttgg

SEQ ID NO: 6644 - DNA, 410 bp, Homo sapiens
  misc_feature 334, 376, 400: n = A,T,C or G
ccctttcgagcggccgcccgggcaggtacgcggggacatcaatgcagagtccctctgtgaatttacaacacccaacacccatgagttcagtccttaagaaggaaaattgagcaagtatttaattggttggacattgcataaaagaggtccatatccaggctaactctagaaattttattctcaaacttagttggcctctttttcttctgtcagaggaccattcttagtgggcactggggaaatcttggcacccagaagaattcaactgcgctcactgcaaaaatacaatggcctacattggatttgtagaggagaaaagggagccctgtattgntgagctggtgctatgaagaaaaattctttgcccctgaatgtnggttcgaatggccaaaaggaaagnatcctttggg

SEQ ID NO: 6645 - DNA, 369 bp, Homo sapiens
ccctttcgagcggccgcccgggcaggtacatgtttaatatgtatatttaaaatgcatatatattttattatatctatattatcctatatagatatatgtaacttagctttattgttagctccataagctgccagtgttgcttttctgttggtagagctctcccatttggtgacatggaaaatacctttccattatcacaacaaagcagttgctcagtagaaagtctagatttctgtcttataggtgatttctgtcttataggtgattataatcaaagtgtaggcttcctgaattttgacatccttttagaacttgggtctgggaattccagaaatgttaattgctgcttgtatttgttcttgtttgttt

SEQ ID NO: 6646 - DNA, 788 bp, Homo sapiens
  misc_feature 572, 612, 614, 625, 653, 671, 686, 690, 712, 715, 738, 767: n = A,T,C or G
ccctttcgagcggccgcccgggcaggtacgcggggctactaaaatggttctaggtgctgtgtggacaggtgatacaaaagcctgactcacacggttgacattcattcattccattttcatttctctttgagtgatcctgacaagcagagggtctcaggtggatattactgtgtctttgagacctctctaatccttatctatctctcattttaatacagagagtttcatacgcagaccttaagtagacatagtatccagctaaaagggtctcactctgtcacccaggctggagtgcagtggcgcagtcatggctccctgtaacctcaacctctcagactccagcaatcctcctgcgacagggaggcaagtcaatggtgaatgctggcctcgctgattactcacctggagacctttctgaggatcagttttctcatctagaaaatgggacaactgccagaccacccgaagaaaatcagaaaacagccccacacatcaacatgtttggttgctgccagtctacttggatctgagtattttttctttgccatgaatggtgaccgtgaatatttttnttctacatcacactggaagtttatgaatgatgctttgaantngggaaaggccnaaaaaagttaatattttccggctttttnggcccacttggcttcggnggcactactgagctnttgncacttgaaccaaaaaacgggcncangccaaattggaaaataaaaggcnccggttttgttccaataaaactttttttnccaaaaaaaaaaaaaaaaaaa

SEQ ID NO: 6647 - DNA, 341 bp, Homo sapiens
  misc_feature 327: n = A,T,C or G
ccctttcgagcggccgcccgggcaggtacagagtctaatccccttctatgtagccaccagcatgacagcacccagcaactttctgcacaggtgctcgtggttggtgccttcgccaaaagtctatgcacatcacgctgtttctactcttgggatttccaaaaggaccacaggatattggtcccattctattcagtttctttttgcacagtatatgcctgaatggctctgggtgtggggagccaaatattctcaacccgttcactaccgttaagggaagccctttatcctgcaccagccctggagttctgggatgggcccacttggagnaaggtttttgccca

SEQ ID NO: 6648 - DNA, 297 bp, Homo sapiens
cccttagcgtggtcgcggccgaggtacttttttttttttttttttttgagtctgatttaagttgttgcttctcttatttaataaaatctaatatagaaccattttgcagattttaccatttttccacttactatactcatggatgctcagtgaccaccggaaatgtagtataataaaatattgttttatggctatgaactaggatataattaatacacaatatggtctggaaacaattctacttatataacttaaccagtatttttatatctgatatccatttttaatatgttgaaa

SEQ ID NO: 6649 - DNA, 778 bp, Homo sapiens
  misc_feature 2, 9, 25, 52, 72, 87, 91, 92, 102, 113, 130, 143, 166, 234,247, 250, 256, 257, 265, 271, 287, 290, 302, 304, 311, 317,319, 322, 325, 327, 340, 343, 359, 375, 392, 412, 444, 449,454, 464, 471, 473, 481, 483, 487, 494, 500, 503, 516: n = A,T,C or G
  misc_feature 519, 521, 539, 543, 553, 558, 565, 568, 579, 582, 596, 613: n = A,T,C or G
cnccttccnttaaaggcaaattggncccaatttgggcccttcccggaaaggncccgggggccccccggcccnccaaggtttgggttngggnnaattgggggnaaattaatttncctttgggcccaaagtnaaaaaattttttncgggcccccccctttttaaaggncccgggtttggggggtttcccggcccggggggcccccgggaaaggagggttaaaccctttaatttaanttgggccccccanttngggggnnaatttggntttggnaaaaattatttttccnccnccaaattaaagntnaaaaagncccttngnggnttngnaaaccaaattggnttntttcccctttggggtnaaaaagggccttttcnttgggggggccctttancccaaccccttggggcccanttgggaacccaaccttttggcctttttttggnttaanttggnccttccaaangttgggntnggttttgntngaanaaaaggntttttnggngaaaaagggggtncangnacactttttttttcctcnctanaggaaaatgnggacnaaaatgnccncctttggtggntanatgaaaaaacaatngcctcaatttcttgtgnaaatttttttgaaaaggtcagcagtttcaggagaagaagaaggaatttgaagagaaaaaggaaaattaaaattactaattaatttttagattcaatatttatatggagttttgaaaaataataagtggccctgaaggaataaattccagctttaaaaaccaagtc

SEQ ID NO: 6650 - DNA, 326 bp, Homo sapiens
  misc_feature 301, 323: n = A,T,C or G
cgccagtgtgatgggatatctgcagaattcgcccttagcgtggtcgcggccgaggtacaagaagagaggatggagacgagggtaggcttcttttcagattatacattctggatcagaaagtctatatcagtgggattttctgaatgacccaggttttttttgtttgtttttgtttgtttgtttgtttgttttagaatttctgtgctttggagctagaaggatatataaatgagaaaactgagaacaaaagaagagacaatatatttttggttgcaagggataagaaacctaactccaacangcaaagtaaagggggggttttntta

SEQ ID NO: 6651 - DNA, 481 bp, Homo sapiens
cgccagtgtgatgggatatctgcagaattcgcccttagcgtggtcgcggccgaggtacctctctttcttgttggaaatgttgaagtattgaaatacttcttttctgtagaaggtggttctcccttctacccaggaataattttgtggcaagtcattgagtcagcagttattttgaccctaactgaaagagataaagttcctaagaatttattatatatgtttcttgccactgagtgagcaagaaaaatacatacccatcagtgctgactggttggtaatttctgaaacacaatgccacagctcttcatgaataacacagtaacagaattacagagaatttggaagagatcaatctctagatggatgagttagtctataaacaaatagctactcaacttcttttaacttttaagaatgctgtatgtgttttctaatccagatccttgggtttcaagtgagtctctagaaatcaaagaaattt

SEQ ID NO: 6652 - DNA, 220 bp, Homo sapiens
  misc_feature 8, 10: n = A,T,C or G
ccctttcntncggccgcccgggcaggtacccgaatccgaaaagtgtggccatttggggactctgtgagaggagcatccctgtccaccccgggtcattgacactgggcacttcgtcttagtaacatggccatggggaagacaaccacaggccagatagtcaatctgctgtccaatgatgtgaacaagtttgatcaggtgacagtgttctttacactttcct

SEQ ID NO: 6653 - DNA, 410 bp, Homo sapiens
cccttagcgtggtcgcggccgaggtactatagattatttgtcttgaagaagagctttgatatgtttcaaaattcgacgttggctttggaaggaaactgtaaatttacagatctttgtccttccccacaaagagccttaatctcacaggttggattatgtggaactcactgctatttttcagttctcctttaagtgactaaggaacatccagatacttccaaaaaaaaaaaagtctaaagtttttcactttgtccattgccatttaattatcttctgcatatttttaaagcattttcctgtgaacataagttattgcccccatcccaggaaaaattttgcggtcttacatttgaatttttattggttttaaatggaaaaccctggtttctttcctccaaaggtttctttta

SEQ ID NO: 6654 - DNA, 345 bp, Homo sapiens
  misc_feature 82, 238, 267, 291, 292, 307, 316, 332: n = A,T,C or G
cccttagcgtggtcgcggccgaggtacgcggggacagaaaatgagagtttcagatactgagaatagaaccactaagaagcanaaaagagaagatattctcgtgggggagaacaacggctgggaggggaggaagcatggccaaggcaaagaggtgggcattaataagaactgcttcttgctgccgccatatgaagaaggaccgtgttcgcttccccttcctccatgatttgtaagtttnctgagacctcgccaagccatgcctgaaanttgaattacaaacatgtttttaannaccaccagaacattntgccatagngcttggtaaaattttncgtttggaaaatg

SEQ ID NO: 6655 - DNA, 612 bp, Homo sapiens
  misc_feature 556, 576: n = A,T,C or G
cccttagcgtggtcgcggccgaggtactattttaaggaaaaatttccaagaagttctggactatctttgttcctatggggagggcatataggaacacagtttattctctctgatagagctattaatgacttagtttctgtaaaagaaatggagagttgatatggttcagattaacttcactattaagtgttcaatatgaagaattcaagtattctgactgagtgattggttgacctaaaccactttgaatgtttctattttatgaaatgaagtttctcttcttaacacaactagatgtagtaatacactggttatgaaattgtatttttttaagtattaatgaaagaagagccataagcattccaggagaaaatctcaagggagctacatagagcaatttaaatgcaaatttttttcctaacaacttacaaggtgactagctttgaaacccctaatttgcctcaagttggattttctaagaatttcaggagtgatgtatgtcttaagaggggagaaaaaaatatttcttaatactttttctcttgtttctggtggnaacactgaagcaggggcctnttaaaatgaaagcatcttccaattgggtttctttct

SEQ ID NO: 6656 - DNA, 380 bp, Homo sapiens
  misc_feature 46, 89, 210, 216, 281, 287, 308, 349, 360: n = A,T,C or G
cccttagcgtggtcgcggccgaggtacatctacctaaaggactatnatgtggaataatacatactaatgaagtattacatgatttaaanactacaataaaaccaaacatgcttataacattaagaaaaacaataaatatacatgattgaaaccaagttgaaaaatagcatatgccttggaggaaatgtgctcaaattactaatgatttantgttgnccctactttctctctcttttttctttctttttttttattatggttaggctgtcaccatacaactnttttcntttttttgaagatgggggtcntcgcttctgtccacccaggcctgggaggtggcagttggccnccggatccttnggcttcacctggcaaacctt

SEQ ID NO: 6657 - DNA, 367 bp, Homo sapiens
  misc_feature 358: n = A,T,C or G
cccttagcgtggtcgcggccgaggtacaccaaatgtgaaggtgatgaggttgaagatctctatgagcttttgaaacttgttaaggaaaaagaagaagtagagggggatatcaggtaggtgctatactttcttgactatcagcgtattcgagtggaaaatgtgtgtaaaaggcttaatctccagcctttagcttatctttggcagagaaaccaggaagatttgctcagagagatgatatcatctaacattcaagcaatgatcatcaaagtagcagctttgggtttagatcctgataagcatcttgggaaaaccctggatcaaatggagccttatctcatagagctttctaagaagtatnggagtacct

SEQ ID NO: 6658 - DNA, 568 bp, Homo sapiens
cccttagcgtggtcgcggcccgaggtacattcattaaaacttgcccttgaaggcgtggaaaaggaaagggatttctactttgggaagttgagagagatcgagctactctgccaagaacacgggcaggaaaatgatgacctcgtgcagagactaatggacatcctgtatgcttcagaagaacacgagggccacacagaagagccggaagcagaggagcaagcccacgaacagcagcccccgcagcaggaagagtactaactactggatcttacccacggctgccaacctgcattagggacaaaattattcctccagacccaattatcaaaattgaaaaacaagccacactccatcagctgaatcagattcttagacatcggcttgtaaccacagatcttctcctcagttagcaaatcttacagttgcaaatggccgggtgaagtttcgtgttgaaggagaatttgaagccaccttgactgtgatgggagatgaccctgatgttccatggcgtcttctcaagctagaaattctagttgaggataaggaaacaggagatgggcgagctttg

SEQ ID NO: 6659 - DNA, 602 bp, Homo sapiens
  misc_feature 89, 117, 125, 126, 131, 152, 171, 177, 178, 181, 202, 206,217, 227, 232, 235, 236, 250, 255, 265, 268, 272, 277, 284,286, 288, 289, 303, 308, 331, 346, 353, 355, 358, 364, 371,385, 393, 412, 414, 417, 420, 422, 436, 447, 455, 460: n = A,T,C or G
  misc_feature 463, 492, 495, 502, 505, 508, 521, 540, 541, 551, 561, 570,574, 577, 588: n = A,T,C or G
ccctttcgagcggccgcccgggcaggtacttcaaggtctggaacatgttgagctgagtccagctatgacatacatgtagtccccagcantagcagcatggtcccagtgtgaaacatnataaattnngtgcnttagggaagcccaataaaggntggaaaaggttttgggaangaccannttngggccatccctaaatttcccngggnattccccaccnagtcaagccnggaanaannaaggcccaagtaanaaggnccaaacctgnggnccgnaagtnagggggnantnncaacggggggtccnaaggntggtaaaattgggtttaattttnggggaaacccaaccnccaaacngnggntatggngtggtgnggagggcctctttnccttttcntttcaaaggggggccattncnggnccngnggtaaaaacccaangttggtttggnccatttgntaaanatntttttatcccctttgggttattttttggnggnaaggctnggnaanaacaaaagggggntttctcctttggggggggnnaacccaaatngtaaacctangggtttccngtanggngggggaaaagncccctttttctttt

SEQ ID NO: 6660 - DNA, 342 bp, Homo sapiens
ccctttcgagcggcccccgggcaggtacagtttccactgaatacttacagcttttgcaccgatataaaggtaaaaaaaaaaaaatcctaagtctgagactgtctgtattagtctatgtaaagttcactttaaaggtaaatatttcttatgaagaataacaaaacattctatgtcatatatattttggggttttccaacattgttctggatggtatatgtcattgctcctttctcataaaattgatagtcaagatttgcttctacagaaaagggaatttaaactattttctttctttctttctttctttttttttttttgagacagtttccctgtgttggcca

SEQ ID NO: 6661 - DNA, 483 bp, Homo sapiens
  misc_feature 85, 101, 162, 175, 252, 273, 276, 284, 292, 334, 335, 391,430, 456, 467: n = A,T,C or G
cccttagcgtggtcgcggccgaggtacaaaaataacagcaagacaagaggaataaaacccacatgaatcactgtggcatccagtnttctattcacaaaagnaaaaaaggctcccaggtcccatccttttttaattttttttttggaaaaaaaatttccctgnacattttaccagnaacctaaaaacttgaaaaattggtatttaaattattttccaacttctttaccatttttcccattggacaaaaacagnaaaaaaatttcatggagccanaanaaaaaaanaacccaanatataaataaaaaaagaggtacttcaaaccacccaacattcnnatgggggccgggccgggaaaaaaataagcccttttggccattcaccttggccccanttaaagggggtggttggggggccccgaaaagaataatgncttcatggtggggtggtttgaagggnaaaaggccagnaccatttggacccttc

SEQ ID NO: 6662 - DNA, 383 bp, Homo sapiens
  misc_feature 277, 363: n = A,T,C or G
cccttagcgtggtcgcggccgaggtactccagcctgggcaacagagcgagactctgtctcaaaaataaataaaatagaataaaataaaataaaatgttaactaaaatcgatttctaatttgggaaacgtaataactaataccatttgattttaaaaagaattgtatcttaatcattaagctaaagacatagcaagaaaacaatgacatggtcacttgaagggtgcctcagccaacttttcatcatctaataagacacccttaaagtaattccagcanaaagtctcagaaattcattgatcaacctccaaagcaccatcagggaagggtgctaatacagtggattacatgaacaattaacagcngaacatgttatttaaatttt

SEQ ID NO: 6663 - DNA, 327 bp, Homo sapiens
cccttagcgtggtcgcggccgaggtacgcagggggttgaagttactgatataaagatcagcgcctgaaacagattctccgggatattaccggagacggagtgttttattattagcctttcttaggtggacatttccatttgaattaaaagtcctttaggctgggcgtggtgcatggctgtaatctcagcaccttgggaggctgaggcaggaagatcacttgaggccaggcgttggagagcagcctgggcaaggtggcaagaaccttgtctctacaaaaaaaaagcgtctgccatcatggatgttctcgcagaagcaaatggcacctt

SEQ ID NO: 6664 - DNA, 354 bp, Homo sapiens
  misc_feature 285: n = A,T,C or G
cccttagcgtggtcgcggccgaggtacaagcttcatttgccacaaaactcacaaaaaagtaattgattaaagaatatctcttttatgcaaaatatacattttaggatataatttaattgatattctactatatactgacattgctccttgatcattgaataaaaaaatactctcattgccagaattatgtttttgtaatatttataattgaggtaataatgataaaagacttaaactatgaataatgttggtgagttccattttaagctataacaatttcccagnaactaaacaaatatgtggactaaacataggtcattttttgataaatgaatacctaaccaatttcacaaa

SEQ ID NO: 6665 - DNA, 402 bp, Homo sapiens
  misc_feature 281, 341, 346, 350, 358: n = A,T,C or G
cccttagcgtggtcgcggccgaggtacaccaaaaagagaactttgtgatccgttggtaagatagtatccacaagtaagcacttgtgttcactgttttttgttccacactagaatacacccagttggataccagaagttatttacaggacatctgaggaagatcctagttttcaagtcttgtcaggaaaatattccatattgttttaagccagatcatacccatggaaaaatagagaatggttttctttctttttctttctaaccaattacattgctcaagnaaatcaaaattatctgaggatacaccaaaatttggaaccgccggttaaggggttgggggnagggnaagntaaggggnaggaataatagccccctatggccttgccttggaattttcccttc

SEQ ID NO: 6666 - DNA, 290 bp, Homo sapiens
  misc_feature 29, 67, 92, 125, 140, 147, 154, 155, 170, 175, 199, 216,237, 242, 248, 249, 251, 254, 272: n = A,T,C or G
cccttagcgtggtcgcggccgaggtacanaagaaacctatctccaaaaaaggtcctttcagtggtanactcggggagaacttggtggccccnttgagatgccaggtttcttttttttatcctatnaaaatgggcctgctnagttgtnaagccgnnataataattgttagnggcanctttgttaaaaattcattatttgnagttaaactggaaatgnacaattcgttggaatttttcncttgnaggaanncnggnaacccttttgggttttcncccttaaacccccttaaa

SEQ ID NO: 6667 - DNA, 333 bp, Homo sapiens
ccctttcgagcggccgcccgggcaggtacatctctgagcgtgtaaaatggacataatgatatccactgaaaggattactgttagtattaaacaaaataactcacatacaatgcttggcacagtgtcaacttgttgataacagatgctatcaatagatgctattaattttttaaagctaattatttttgaaatcacctttttgcaattattcattgcttaacttatttttataagacaaaaaatgtgaggtttcacaagcccattacctttattactgaaatcgtcaattaaacacaatttctgctaaatatttccttgggagtccttttaatt

SEQ ID NO: 6668 - DNA, 370 bp, Homo sapiens
  misc_feature 134, 300, 358: n = A,T,C or G
ccctttcgagcggccgcccgggcaggtaccaaaacatttatgaccttataattttatagtgcaagaaaaaggacaaagacaggaatacaaataaattatcccgcgtactcccaccaccaatggaaccccctganggcttgccttgtcttgaggacatcaacctgattcgagggactgggtctggggggcagcttcaggatctggactgcagcagctctgatgaccgaaggggctgctcaaaactctaccaaacctagtgccgaccaaggggaacacctggggtgggcatgttttgggtantgcctggaagggccctttgtggggtttcaaaaggagccttggaggttcggtggaaagnacattgggaaat

SEQ ID NO: 6669 - DNA, 384 bp, Homo sapiens
  misc_feature 292, 323, 330, 338, 351, 353, 365, 366, 367, 368, 383: n = A,T,C or G
ccctttcgagcggccgcccgggcaggtactgttcgtttatataataaacttgggagatataggagggagatataggattggctaacttttatgtttatattatgttaatcaattattttttcttacataatatattgcaactcagaagcaatgttttgcttctggggtaatgtttataaacttttgcatgtgaagatgggcaatttggaagacttttggtttctggaagaacagaaatattcctgtaaaaattgagaaaatcttcacataggtagtgggaaatagaattcanacagcccctaagtcctttcttcttatggttngtggttngttattgngctgcttacgttngntttgagcatgtnnnnaagacttgaattttnt

SEQ ID NO: 6670 - DNA, 361 bp, Homo sapiens
cccttagcgtggtcgcggccgaggtactaattaatgatgatctctcgagatttgtccagtttcctgtttttttactcaaggaacagtcacacatcctgttctgttggagatgggaccttggtggttttgtgggaaagtgaaacaaaactaataaaaccttctggctccctagcttgtcctacttatctgaagtcaaacataatccacttattgggccatctgcaggatttcctccttggctcatccaagtccattttccacataactctgccttaaaaggtctgacccgccctggggcctgcattggatgggtcttcccctatccctgcagggtgtttgttttgggggggtaagaaaaaat

SEQ ID NO: 6671 - DNA, 986 bp, Homo sapiens
  misc_feature 9, 50, 64, 82, 90, 100, 110, 135, 153, 165, 193, 194, 203,232, 239, 248, 258, 307, 313, 335, 351, 373, 387, 436, 512,521, 538, 550, 559, 562, 580, 622, 667, 669, 696, 727, 788,800, 806, 980: n = A,T,C or G
ccggaaacnttccaaactttaatttaaaggggggggcccggaaaaaattnttggggggggcccnccccttcctttaaagganaaattggnccaaattggncctttcccgnaaaggacccgggggccccccggccnccaaggtttgggtttggnaaattggggggnaaattaatttccctttgggcccaaaggnnaaaaaattnttccgggcccccccctttttttttccggnaaagggnccggggggncccccggccncccccgggggggggcccaaaggggggtttaaacccccctttaaaaaagnccaaanaaaaattaaaggggggaaaggnttttttgggggggggntttttttggggggttttttttntttttccctttccnccttaaaaaaaaaaatttaaaaaatttgggccctttcccaaaaattaancctttttaaacccccctttaaaaaatttccaaaaaaaaattggggggcccaatttccccccaaattttttttgggnaaaaaattnaaaaaaaaaaattgggnaaacccaaaaantttaaaaanccntttaaaaaaaaagggccntttaaggggttttttaaaaaatttgggtttcccaaagggttngggaaacccaaatttttaaaaaaaaaccctttaaaaaaccctttncnccaaaggggggaaattttttccaaaangggggaaagggtttttttttttaaaaaattngggtttttaaggggaaaaaatttttttttaaagggaaattttttttaaaaaacccaaaggnaaattaaagggnaaaggntttgggtttggggggccttttttccaaatttatttttgggtttccccccaatttgggggggtttaaaggggcccccccccaaatttccctttccctttccccctttaaaaaagggaaaacccccccttttttttttttcctttaaagggtttccctttggggttcccttttttncccctt

SEQ ID NO: 6672 - DNA, 364 bp, Homo sapiens
ccctttcgagcggccgcccgggcaggtactatagattatttgtcttgaagaagagctttgatatgtttcaaaattcgacgttggctttggaaggaaactgtaaatttacagatctttgtccttccccacaaagagccttaacctcacaggttggattatgtggaactcactgctatttttcagttctcctttaagtgactaaggaacatccagatacttccaaaaaaaaaaaagtctaagtttttcactttgtccattgccatttaattatcttctgcatattttaaagcatttcctgtggaacataagtattgcccatccagaaaatttgcgtctacattgatttttatgtttaatgaaacct

SEQ ID NO: 6673 - DNA, 167 bp, Homo sapiens
ccctttcgagcggccgcccgggcaggtaccacgaggatcggattagagcgaagttttattcagtgtatgggtctggtcaaagagcttttgatctattcaatccaaacttcaagtctacctgtcaacggtttgtggagaagtacctcggcccgcgaccacgctaaggg

SEQ ID NO: 6674 - DNA, 353 bp, Homo sapiens
  misc_feature 294, 304, 332: n = A,T,C or G
cccttagcgtggtcgcggccgaggtacgcggggagttcctgagagggacgcgtgccgcggagccaggcttactacgtgacccggacaccaggcatacgctaggggcagtcagctgtgccttctctttcggagttgttccgtgctcccacgtgcttccccttctccactggctgggatcccccgggctcggggcgcagtaataatttttcaccatgcatcggaaaaaggtggataaccgaatccggattctcattgagaatggagtagctgagcggcaaagatctctctttgttngtaagttggnggatcgaggaaaaagatcaggtgggtanatacttcatcacatggttatc

SEQ ID NO: 6675 - DNA, 360 bp, Homo sapiens
  misc_feature 118: n = A,T,C or G
cccttagcgtggtcgcggccgaggtaccctaaaaatgaaaaaaaaaaaagaagaatggaagaaacagagttgtagactcagacacagagaccatcttcggggcctttctctgtgtganggacatcacagcgaaatctaaagcaggtcattgtcagtccctggcagggaaccctccaccagcttcccgtgttccccaggacaaaagccccactcctcactgtggctccacagccctgtgtccagggcccctgccagtgtcactcaggaactaggccatttggcagaaaactgtagcaaaaaggcaatccttggcttgactctggcaaagtcttgaatgggcttaaaagccaaaagggaaaa

SEQ ID NO: 6676 - DNA, 373 bp, Homo sapiens
  misc_feature 109, 345, 361: n = A,T,C or G
ccctttcgagcggccgcccgggcaggtacgtccacggtcagccttgcggagaaaatcagcttcctgtttggatacccactagacatttaaagttctacaaatgaacctnacttgggagatgcaaagaaaaagtgtgggagatgggagacaccccaatcgactcgccagtctacaggtgtatccagcagctccaaagagacagcaaccagcaagaatgggccatagtgacgatggtggttttgtcaaaaagaaaagggggggatatgtaaggaaaagagagatcagactttcctgtgtctatgtagaaaaggaagacataagaaactccattttgatctgtacctnggccgcgaccacgctnagggcgaattcc

SEQ ID NO: 6677 - DNA, 605 bp, Homo sapiens
  misc_feature 543, 562, 571, 581: n = A,T,C or G
ccctttcgagcggcccgcccgggcaggtacgaaaaaatcaggctactaagcccactgttaatatagacgcagaccaattgttaggaacaggtccaaattggagcaccattaaccaacaatcagtgatgcagaatgaggctattgaacaagtaagggctatttgcctcagggcctggggaaaaattcaggacccaggaacagctttccctattaattcaattagacaaggctctaaagagccatatcctgactttgtggcaagattacaagatgctgctcaaaagtctattacagatgacaatgcccgaaaagttattgtagaattaatggcctatgaaaatgcaaatccagaatgtcagtcggccataaagccattaaaaggaaaagttccagcaggagttgatgtaattacagaatatgtgaaggcttgtgatgggattggaggagctatgcataaaggcaatgctaatggctcaagcaatgagggggctcactctaggaggacaagttagaacattttgggaaaaaaatgttataattggnggtcaaatcggtcatcttnaaaaggagntgcccaagcntaaattaaccaaaaaaaaaaaaaa

SEQ ID NO: 6678 - DNA, 357 bp, Homo sapiens
  misc_feature 343: n = A,T,C or G
ccctttcgagcggccgcccgggcaggtacgaaaaaatcaggctactaagcccactgttaatatagacgcagaccaattgttaggaacaggtccaaattggagcaccattaaccaacaatcagtgatgccaaaatgaggctattggacaagtaagggctatttgcctcagggcctggggaaaaattcaggacccaggaacagctttccctattaattcaattagacaaggctctaaagagccatatcctggacttttgtgggcaagattaccaaggatgcctgctcaaaaagttcttatttaccaggaatggacaattgccccgaaaaaaaggttatttggtangaatttaatgggcc

SEQ ID NO: 6679 - DNA, 960 bp, Homo sapiens
  misc_feature 2, 20, 30, 38, 40, 45, 53, 58, 60, 66, 68, 72, 76, 81, 87,89, 93, 95, 104, 106, 108, 110, 119, 127, 134, 141, 148,161, 171, 175, 182, 189, 200, 202, 209, 223, 226, 231, 233,240, 245, 247, 249, 252, 256, 258, 265, 270, 280, 282: n = A,T,C or G
  misc_feature 286, 290, 294, 298, 320, 334, 390, 421, 424, 437, 445, 503,506, 509, 512, 514, 517, 522, 523, 525, 527, 534, 537, 540,541, 546, 549, 552, 555, 559, 561, 563, 571, 574, 575, 594,597, 602, 604, 606, 613, 621, 623, 637, 644, 646, 661: n = A,T,C or G
  misc_feature 674, 679, 685, 698, 713, 722, 731, 738, 741, 751, 769, 775,780, 781, 782, 792, 804, 835, 836, 851, 866, 874, 879, 882,887, 890, 893, 894, 901, 905, 911, 924, 929: n = A,T,C or G
tncactttattaaagggggnccggaaaatntggggggncnccctnctttaagnaaatngnccaatngncctnccgnaaggnccgggncnccgncnccaaggttngntngnaatgggggnaattaatnccttggnccagggnaaaaatnttccggccccccnttttttccgnaagnccggggncccccgnctccccggggngnccaaggnggtttaacctttcnaanaaggntntaagggnttttngntnttntttngnccaacgnaaagnaaattggttntnggcncctnttcnaagnaaattggtttttaaaattcaangggggttcctttcnttccaaagggtttttttcaaattgggggggaaggttccttaattggccttgggaantcccctttttttaaaaatttttggaacccanaanaattaaaaaaaanaagggaantaattaatttaatttcccttgggttgggggttggggttggcccaaaacccaatttaanaanaanaananaanaatannananaacatanaanaannataanaanaanaanaaanananaaaatagnggnnttccccaaaatttttttcnttnggccncnangggggtncctttttncntattcctttttccnccttggncnaaagaaaaaattttnttacccctttttnaaagncccttntttttccgggttnccccctttccaaggnaaggggggnaaaaacccnggaaaanccnttcctttggntagggaaaaagattgggntttttngggtnnncaaattaaanggtttaattttnccaaatttccccaaaaagggggggccaaccnncccaaattaaatttnaccttttttgggccnttgggttnaaggnccnttggnaanttnnggaaagntccncccaanaatttttggtaanccaanggaaaagggggggggggggaaaaaaaaaatt

SEQ ID NO: 6680 - DNA, 336 bp, Homo sapiens
  misc_feature 27, 31, 34, 58, 62, 70, 78, 99, 114, 117, 140, 149, 157,164, 170, 177, 179, 183, 184, 185, 195, 196, 211, 213, 214,216, 223, 224, 225, 235, 236, 244, 246, 248, 266, 271, 275,277, 290, 295, 296, 297, 299, 306, 308, 316, 323: n = A,T,C or G
gggcggaaatttggggggcccccttcntaanaangccatgccttcgaagccgggcccngccnaatggtgnaatgggantatttttgcaaaaaatttccnccctcttttttcaanacngggccccccccggggccaaaggnaaccccttntttttttnttttttntttttnttttttntntttnnntaaaaaaatnnttttttttttttttntnntnttttttnnntttttttttnntttttttntntntttttttccttttttttnttttntttntnttttttttttttnttttnnnanagaggananaaaaaaanttttttntttttaaaaaaaa

SEQ ID NO: 6681 - DNA, 378 bp, Homo sapiens
  misc_feature 1, 3, 8, 15, 369: n = A,T,C or G
ngnccgcngtggtgnatgggatatctgcagaattcgccctttcgagcggccgcccgggtaggtactggcctggcttttaagagctgtgaagacttcagaaacttctttggcaaactattttatgttaaacaatagaaatactgtagaaagccatgataaagggaaaacctaaaattagttaatgtcctgagtttttaaaaaagcaaaataaaatagcatgtaataaggtgaagcctattaaacacacacaaaatcaaatcatcaaaatctcaaacttaactcattctttaggtaatataatatttgtattattaaaggtcctttgggctaggtcttggacatttggtaggaaaattaatttttatgttnaggaggtgg

SEQ ID NO: 6682 - DNA, 336 bp, Homo sapiens
  misc_feature 293, 310, 322, 323, 331: n = A,T,C or G
cccttagcgtggtcgcggccgaggtaccggccatggtgcaggtgggaataggagatgccagagctgctttagctgaggaaagcaaacagtcagcagtgctcaaaggagcaaaacttcgaatgtgcacattgacccctgacacctgcaagcataacacagatcctaagactagagtgaagtaggaagaagaattagaaaatccagtggatgtcctgagtatagggaaccagggccgttgaaaatcagtaaaggttgattacctggggcgagaccgggtgactgtggcagtgcangtgaaggtacctgcccnggcggccgcttnnaaagggcnaattc

SEQ ID NO: 6683 - DNA, 392 bp, Homo sapiens
cccttagcgtggtcgcggcccgaggtacttttttttttcttttctttttttttttgagttgaaattaggtaaaatctcaactcaaaaatcaaactcagggaagaggcccactgaggagaacaagtcttctgcattttcttcctgccctgctcccaccttctcgcctctggctgcttggatagcttggtgactccttcctcaccctcctgcttctctgtctctccaagaagccagagctgcctctttccttccctggaagagattttatgggatcgcttcctgatagaagatgggaaggagagggcagaactttgcctgctgtcatatctgaagaatcactggttctttctgcatcccaggggcgtaactgatctgactccttgggctttttc

SEQ ID NO: 6684 - DNA, 389 bp, Homo sapiens
  misc_feature 5, 387: n = A,T,C or G
cgccnagtgtgatgggatatctggcagaaattcgccctttcgagcggcccgcccgggcaggtacagctgtaactgttttgacatccagaaaggagtttcaaaatttgcagtgttctgtaatatagtggtctgcttaaagaagggttttttttaaaaaaaaacctattatgcacaagtcagattcttagtgaatgattgctttgggaatactaagtgattcatagatctgtcttagaaattaacttttaacatttcatatatgcagaacagattttattattactgccagtcatgatggacatgtcaagttctggaaaaaaatagaagaggggaattgaattttgttaaacatttttccgttagttcacctgggggagttattggagnag

SEQ ID NO: 6685 - DNA, 532 bp, Homo sapiens
  misc_feature 97, 144, 150, 164, 172, 175, 184, 187, 209, 216, 219, 240,264, 286, 288, 299, 301, 306, 330, 335, 337, 351, 355, 367,369, 375, 377, 379, 408, 409, 413, 415, 438, 444, 469, 471,475, 482, 492, 507: n = A,T,C or G
cccttagcgtggtcgcggccgaggtaccccttctaaaagaacaggatattccccttatgaaatattatatcataggccccctcctatattgcggggnactttcccagggccacttccccggaggaggttagtgttgaaaaattngaagtntacaagccgaatanggcttacnagngcttttcanggnaataatatttaccaccaatacngattctncangcccctgggggttaaaattgnagaagaatggccccctgttaaacnttaatttcctccccccaagttntncaacccccttntncttcnccccaagggtggaattcctaaggntggtngngaattacaaaaggnggancttggaaaaaancngttaangncncttggtttttggttggttccccaccgggnntggngnaaaaatggggaacccccctccanggaacnttggttccaattcccccttggaagncnaacntttctcncaacccccgnctttggttggaaaanggggtttatgtaaagggggggaaaa

SEQ ID NO: 6686 - DNA, 380 bp, Homo sapiens
  misc_feature 21, 39, 44, 46, 96, 97, 210, 273, 290, 307, 323, 324, 350,360, 365, 366, 368, 369: n = A,T,C or G
gccggggggggggggaatttnttttttaaaatttttttnaaaanangattttaagggttcttaccacaataaaattaaatttttgaaataaatcanntcatatttgagtgaaatgaaacctttccgagtagtttcagacaattgataatacctagtttacagttcctgtagtcattttggagggtgaggacttgatgtgtttagtaaagntgagaaataaatacatgaaagaatgtgtggggaagagaaagtgtggggaagagaaattggctnagaggaccattcttagnggcactggggaaatctnggcacccagaagaatnnaactgcgctcactggaaaaatacaanggcctacatnggatnngnngaggagaaagg

SEQ ID NO: 6687 - DNA, 345 bp, Homo sapiens
  misc_feature 222, 270, 280, 339: n = A,T,C or G
ccctttcgagcggccgcccgggcaggtacgaaaaaatcaggctactaagcccactgttaatatagacgcagaccaattgttaggaacaggtccaaattggagcaccattaaccaacaatcagtgatgcagaatgaggctattgaacaagtaagggctatttgcctcagggcctggggaaaaattcaggacccaggaacagctttccctattaattcaattangacaaggctctaaagagccatatcctgactttgtggcaagattacaangatgatgctnaaaagtctattacagatgacaatgcccgaaaagttattgtagaattaatggccctatgnaaaatg

SEQ ID NO: 6688 - DNA, 367 bp, Homo sapiens
ccctttcgagcggccgcccgggcaggtaccttttaatctagtatgcttaacttgatgttaatatttaacttaaatatttgacttacatgttgacgttgaaggctcaaagcttactaagaagctttctgaaagattgggctttaaaataaaataatattttaatattgaaccattttttaacttcttgtcactgttcaattcctaaggtctagttcttgccagttttttttttttttcctgattggcagggcttttaaagaagtaagaagaaaggttaagattattaggctaggttatagctgctcagtagtcattttgacaaagggtagccggatggttggtacctcggccgcgaccacgctaaggg

SEQ ID NO: 6689 - DNA, 351 bp, Homo sapiens
ccctttcgagcggccgcccgggcaggtacactgctcgtggtgtggagcatggcatctgtataacctaggctgactggcacaagagggagacatgaacagatgaatgattagggaaacagaggaacaatcctatccacagcccctgaattatgaaaatcttgcagaagcatttttttctccttagaataactaatatttaaaataaataccaatttcattaccatatcactaaatttagaatcaggagtggttgtgggaatctgatggacaagaactctggcttacagaaaagagaagttttgctagatttttctatcttctgtgtatgaatcccattttaatattttctgg

SEQ ID NO: 6690 - DNA, 411 bp, Homo sapiens
cccttagcgtggtcgcggcccgaggtacacattgttttgtttcttatatccagagtctagtcctcaactctaaccaaagtaaaggaaactggaaagacacacgctttttcagtcattaatagaaagttgtccaggtaagtttctgatggtatatcagttagaaataatatttagctatttgtaataaaaagctgaaaacagtagcttgaatcaatggaagactttatctttctcctaatacagctgacaataatgttgttgcctttatgatatcaaaaccccaggttccttttatctttctgcttaacctgccttggcaaatgcttgctgcttcatagtcacatgatggctgacttactgtaaccttcaggtagaaagaaaggaagaggtaaagagataaaggtacctgcc

SEQ ID NO: 6691 - DNA, 553 bp, Homo sapiens
  misc_feature 485, 496: n = A,T,C or G
cccttagcgtggtcgcggccgaggtactattttaaggaaaaatttccaagaagttctggactatctttgttcctatggggagggcatataggaacacagtttattctctctgatagagctattaatgacttagtttctgtaaaagaaatggagagttgatatggttcagattaacttcactattaagtgttcaatatgaagaattcaagtattctgactgagtgattggttgacctaaaccactttgaatgtttctattttatgaaatgaagtttctcttcttaacacaactagatgtagtaatacactggttatgaaattgtatttttttaagtattaatgaaaaaagagccataagcattccaggagaaaatctcaagggagctacatagagcaatttaaatgcaaattttttcctaacaacttacaaggtgactagctttgaaacccctaatttgcctcagttgattttctaagaatttcanggagtgatgtnatgttcttaagaggggagaaaaaaaatatttcttattacttttttctcttggttctg

SEQ ID NO: 6692 - DNA, 356 bp, Homo sapiens
  misc_feature 308: n = A,T,C or G
ccctttcgagcggccgcccgggcaggtactggtgatgaaacagaatatatgaaatgtgtagggaggcttttaattatggctcaaaacagaatttatcttgttaataattcctctagatagaataatgtagaaacattttatttgtggactacagcttattcagcctgggaaaaataatgttggagaaatactctatgaatagaatataccttggaagcccttaactaaacgcttacttctcttgacatcagataattcagtctagcaatatgataagataattcagtctgtcatactgaaaatgacancacttttaacaccttttctaaccttcttaacgtcagagaatttttgta

SEQ ID NO: 6693 - DNA, 335 bp, Homo sapiens
cccttagcgtggtcgcggccgaggtacttttttttttttttttttgcttccacaggttgcactattgaaaaatcgagattgtataaacctggtaaaaagctgcaagatgccaaaatcttgtagatgtcaaataaaaagttattatactaacaagaagtggactcttgtttaggccctcactggtgaccttcaaaagtagtctgtgacggggactcagcagaatttgtgtgttgtctcagcattccaggtagccttatagtttggcttaaaacttatccctaaaaatgtaaagaatgggcatttgaggggaaaaggggtataatggataggtaccg

SEQ ID NO: 6694 - DNA, 431 bp, Homo sapiens
  misc_feature 161, 163, 164, 165: n = A,T,C or G
gggggccctttcgagcggccgcccgggcaggtactttgcattctgattctttgatatttgaacttggccatctgtgggtgctactctcgtaagactaaaaggcacctactaaatacgaacaaggataaccagttctaccaaaaacattaccaaccaaaccngnnntgttcttttttcagactttccttttgctttcaacctcttaaactgtaaaggagagatttaatgtttccctattattctgctttgactcacatactaaaatgaccacatggcactccattgaatcttttcagttgttcacgaattaaaataatgcccatgttttacagttttttgagtagtctcagcaatgggatctgtagtttcaggacctgtttttaaaaagatcaaagatacttttatgtgtttcagaagtagctgttttttca

SEQ ID NO: 6695 - DNA, 358 bp, Homo sapiens
  misc_feature 110, 117, 129, 306, 314, 331, 347, 348: n = A,T,C or G
ccctttcgagcggccgcccgggcaggtacaggccggggaagagactcaagtaggagcgcctgcccgagttgagactagatgtgaacctttcaccatgaaaatgttaaaanatataanaggaagggagtnaaacaaatattggatccaactccccttatataagaacagtattagattccattgctcatggaaatagacttactccttatgactgggaaattttggccaaatcttccctttcatcctctcagtatctacagtttaaaacctgggttggattgattgggagtacccttcggcccgccnaccaccgncttaaaggggccgaaanttccagccacacctgnncgggcccgtt

SEQ ID NO: 6696 - DNA, 335 bp, Homo sapiens
cccttagcgtggtcgcggccgaggtacacattgttttgtttcttatatccagagtctagtcctcaactctaaccaaagtaaaggaaactggaaagacacacgctttttcagtcattaatagaaagttgtccaggtaagtttctgatggtatatcagttagaaataatatttagctatttgtaataaaaagctgaaaacagtagcttgaatcaatggaagactttatctttctcctcatacagctgacaataatgttgttgcctttatgatatcaaagccccaggttccttttatctttctgcttaacctgccttggcaaatgcttgctgcttcat

SEQ ID NO: 6697 - DNA, 156 bp, Homo sapiens
cccttagcgtggtcgcggccgaggtacaaatctctcttaatttagttttgacaataaaataaattccatagttttcctattttattagcttaatatttgtcatgttaatattgagtgtcaaactgattgaaggatacaaagtattgatcctgggtg

SEQ ID NO: 6698 - DNA, 226 bp, Homo sapiens
ccctttcgagcggccgcccgggcaggtactaggtcttccttaagcagcaagaaaatgtggggggttttacagaagaaaacaagcaatctgggctatagcagaagagcactaatcaacttaagtccaccttccatggtggttcagaaaccagactaccttaacgattttacccacgaaatcccaaatatccagactgactcctatgaaagtatggcaaaaaccacac

SEQ ID NO: 6699 - DNA, 225 bp, Homo sapiens
  misc_feature 150, 184: n = A,T,C or G
cccttagcgtggtcgcggtcgaggtacagaaattctcctgtgaaattaagtaaaccattttccagatcttgactgcattgctgagattttgcagttggaaaataatttcaaatttttcaggttttttgtatatttatttttttctaacanatatatttaactataaaattaaaattcagtagtnaaactcttcataatgcagaaatggatggcttagattgtata

SEQ ID NO: 6700 - DNA, 425 bp, Homo sapiens
  misc_feature 281, 284: n = A,T,C or G
cccttagcgtggtcgcggccgaggtaccagttgtaaaattaccaggaaccgccatgcctcaagatcgccctgttttctggcttcatcaatgactgcatgcagtgcaccaccctgtccactacgtgatgctgtaggattaagtctcacagtgggcggctgaggatacagcgccgcgtcctgtgttgctggtgaattagacgccatcgctgtgggttgctggtatggtgccgtgctatttggcacgggacacaccgcttgaggtctgtattgaacctctgaangangccgatactgaagctcggttggcagccggtattgataaactaccagcggttgggtcttattttctaccggctgatattgtggatactgtatctgagttggcattgccgggatagagactctgtccctttctacttgaattt

SEQ ID NO: 6701 - DNA, 357 bp, Homo sapiens
  misc_feature 311: n = A,T,C or G
cccttagcgtggtcgcggccgaggtacatgctgcacgcacacaaaagacactgagaatatttttaaggagccacacatcacagaatttgatagtcaacttcatgcaatgagttccttttatatttcatcaaaaggtttacttgcccctttacttgttccaaatttccaagattaactcttaaatttgaaaaagtatctttttaataaaaatcaggtatctctttatatccatgatctatatggacagtgatttggattttttcaatcaaactctccctaagatacactcaggctgtgtttccatttttagnaaagttccattggcagatagctcaaattaaaaaagaagcaattttg

SEQ ID NO: 6702 - DNA, 337 bp, Homo sapiens
  misc_feature 33, 55: n = A,T,C or G
cccttagcgtggtcgcggccgaggtactactcnattgtcaacagtcaaggagtcncaggtcgcctggttctaggaataatgggggaagtatgtaggagttgaaagattagtccgccgtagtcggtgtacaaaactgaaggtgccgtgtctgatttcacatcaacaagtcactggaaattatgtcacattagtttcataaatcatggtctttgattttttctaaacagagctattacaaattaatacaaacttgaaacataccctaatttaaactaataaggctttgggccctggcttttttaaatttttaaggcatgtgtgttttctctacccataa

SEQ ID NO: 6703 - DNA, 525 bp, Homo sapiens
  misc_feature 148, 488: n = A,T,C or G
gtggtcgcggccgaggtacaaaaattagctgggcatagtggtacatgcctgtagtcccagctactcgggaggctgatgaacaagaatcacttgaacctgggaggaggaggttgcagtgagctgagatcgtgccactgcactccagccngagcgacagagcaagactgtctcaaaaaaataaaaaagaaaaaaataataaaaaggaaaacaaagcctttagaaaaacaaagcctttgaaaaaggatgtaaaattgaatatatagatacaattatttttaaaaagttttatagaaaaatatcctggattgttgatgttgttttaatatattttaatcatttttgtataatgtcatgtataatatgttataatgaaagtaaaaaaaaaggtcttagcagagcaggcagaaaaatgccaaactcagtgccttttagttattttgatatgtgggaagatcatgcataaggctccttttagctccttgcttganctaggaaggttaatccccctgaaggtcaccttggaaa

SEQ ID NO: 6704 - DNA, 317 bp, Homo sapiens
  misc_feature 163, 233, 249: n = A,T,C or G
ccctttcgagcggccgcccgggcaggtacagatgtccagtagacctactggatatgcaggcctgcagctcaggggagagctgggttaagaaccgtcaaggcagtaatcatctgcattttagatgggcgaagtgaagccattgacaggggctgaaatggcccancaagaataaatcaaaccatgagaaacacatacatttaagaataaggagatgtggtcaggcgcggtggctnacacctgtaatcccancacttttgggaggccgaggcgggtggatcacttgaggtcagtagtttgaggaccagcctggggcaacc

SEQ ID NO: 6705 - DNA, 410 bp, Homo sapiens
cccttagcgtggtcgcggccgaggtaccagaagagcccagtgcccagaaaccaatatcagttctatacagatacaaggtgatgctgattatttcatcaaccatcttggagttcccatcgtgcagtttgcttacgaggacatcaaaacattagagggtccaagttttctctccgaggcccgtttttctacacgagcaacaaaaattgaagaaatggatcgctctttcaaccttcatgaaaccattactaagctctcaggagaagtgattttgcaaattgccaacgaacctgtctgccctttaatgcacttgatatagctttagaagttcaaaacaaccttaaaggtgatcaacccaacactcatcaactgttagccatggcgtcacgcctgcgggagagtgctgaactttt

SEQ ID NO: 6706 - DNA, 259 bp, Homo sapiens
ccctttcgagcggccgcccgggcaggtacaactgactagatttgtttgagacaagagtggtgggatcagagccatgtggagagctcatggcctgtctaaattgttgccatgtgggaaatggggcagagtgttgccaattttctgattttttgtgtggaaaaaaatctccaaattgtagtttttaaatttggggaatgcaaatatatatatatatacacacacacacacacacacacatacacatacaatccatatacac

SEQ ID NO: 6707 - DNA, 254 bp, Homo sapiens
  misc_feature 33, 117, 119: n = A,T,C or G
ccctttcgagcggccgccgggcaggtacatctntaaggtccagaaagaggacaacagcacctacatcatgagggtgttgaaaaagactgggaatgagcaagaatggaagatcaagcntnccaagttgctttgaccctgtactgtacttctcatgctggatttcaaaaaaaaaagtatcaaaaacaaaaaaaactaaagggtggtgttttattggattgtgacaggttgagtaataaggaattaagtcgtcgtca

SEQ ID NO: 6708 - DNA, 360 bp, Homo sapiens
  misc_feature 78, 88: n = A,T,C or G
ccctttcgagcggccgcccgggcaggtacagcaacaacatctccactttggatgtgcactgtctcccccagctcccanagaaagcttntccccctgcctcaccacccatcgccttccctcctgcttttgaagcagcccaagtcgaggccaagccagatgagctgaaggtgacagtcaagctgaagcctcggctaagagctgtccatggtgggtttgaagattgcaggccgctcaataaaaaatggagaggaatgaaatggaagaagtggagcattcatattgtaatccctaaggggacatttaaaccaccttgtgaggatgaaatagatgaatttctaaagaaattgggcacttccctta

SEQ ID NO: 6709 - DNA, 222 bp, Homo sapiens
  misc_feature 118: n = A,T,C or G
cccttagcgtggtcgcggccgaggtactagggccgaagtaaaaaaccatcacctcccattcccaggggcatcatcatgttcaacaaggcatggaggcagggccatctttgcggctcantctagaaggggctgcactctctccaggttgataaatccttaaggctttgatttgttttgtttttggttttgtttttcagtggagctggggaggtagttaatgtt

SEQ ID NO: 6710 - DNA, 543 bp, Homo sapiens
  misc_feature 70, 115, 133, 139, 145, 151, 159, 160, 175, 181, 204, 207,254, 280, 288, 296, 298, 309, 317, 326, 336, 337, 341, 354,355, 361, 370, 375, 382, 405, 407, 409, 412, 416, 428, 439,453, 470, 477, 480, 492, 519: n = A,T,C or G
ccctttcgagcggccgcccgggcaggtacgctcagagttgttaaccagaaagtcctggctgtggttgcanaaacactgttggaagaataagtagtatgacttaaagttcaaagtngtcttgctctttattcanaaaagnagtcanaataantgcccttnntggatttattgatgnttttgngggaagaaaaacaattattcttntgnggaccggccaccttgttttttttcccttatggaataaaaaaaaggtncaattcctttccttccttaccttggntggttggnaaatattngnaaaatttatcnttttgtgnaaaattttnccttaaaatnntggntctttttggttgnntggccnccaaggggnggggnccaaggnttaaaaattgggttccccccttngncnccnttcnttttttctttcngccccaaaatnaccaaaaagggggnttttgtaagtgggaagntttgggnggnggtccttggggngtggaaagtaaagggggtaaccttttnaaacctttgggaacctttttaaaa

SEQ ID NO: 6711 - DNA, 529 bp, Homo sapiens
  misc_feature 4, 49, 64, 68, 77, 85, 89, 93, 98, 104, 106, 110, 112, 118,122, 141, 150, 169, 190, 205, 219, 230, 241, 244, 249, 251,255, 257, 259, 261, 263, 265, 267, 269, 271, 273, 275, 277,279, 281, 308, 389: n = A,T,C or G
tttnttacccggaacttcactttatttttggggggcccggaaaaatttnggggggccccccttncttnagttattgnccaatggncctnccgnaaggnccgggncnccgncnccaagntggntgggaaatgggggaattanttccttggnccaaggaaaaattttcggnccccctttttttccggaaagnccggggcctccgccnccccggggggccanggggttaaccnttttccttttnctnctttntncttntntntntntntntntntntntntntncccggttccttcccccccaaaaaaagncttttttattcttgggtcctttgggaactttttttttaaaaaaaaaaaggtttttggggggggggccaagaaatttcttgnaaattgggctaaaaaagaacattgcatttttaaaactagcaactcttatttctttcctttaaaaatacatagcattaaatcccaaatcctatttaaagacctgacagcttgagaaggtcactactgcatttataggacct

SEQ ID NO: 6712 - DNA, 491 bp, Homo sapiens
ccctttcgagcggccgcccgggcaggtacttggatcaaatggctacattaattggtcagggaagattatgaataataacattgtgtggaaatgacccagataaatcactgttcctttcaacaagcaacaggttagacaagcctttatcaattctggtgcatggcagattggtcttgccgattttgtgggaattattgacaatcgttaccccaaaacaaaaatcttccagtttttaaaattgactacttggattttacctaaagttaccaaacataagcctttaaaaaatgctctggcagtgtttactgatggttccagcaatggaaaagtggcttacaccgggccaaaagaatgagtcatcaaaactcagtatcacttgactcaaagagcagagttggttgccgtcattacagtgttaacaagattttaatcagtctattaacattgtatcagattctgcatatgtagtacctcggccgcgacccgcttaa

SEQ ID NO: 6713 - DNA, 358 bp, Homo sapiens
ccctttcgagcggccgcccgggcaggtacacaaatgcatgagtatgtttatacagtgttagactgatgtgaatttgcatttgttacattacattgccagccgcatatcatttagcaagttggcattaacatttatgctttaattaaatgccagtatacctatgtgtgcagcagtaaaaaattagtgagaaaaagcaactttttgtcactcttaggaaatattttgtcttattagtgttcttggcacatgtatattactaaagtagatagttccaatgagaaatactacccagattattgtcataaaattaaattttacaatggtccctggatattggagcctaactctttaaaaaaac

SEQ ID NO: 6714 - DNA, 314 bp, Homo sapiens
ccctttcgagcggccgcccgggcaggtactaaaagtttgttttattttatcaaacattaagcttttttaagaaaataattgggcagcgaaataaatgtatcttcttgtcaaaaaaaaaaaaaaaaaaaaagtacctcagccagcagaacatcgctgggacgcgcctggcctaaggcatcctaccaacagcaccatcaaggcacgttggagctttcttgccagaactgatctcttttggtgtgggaggacatggggtacaaaatattttgtcataaaaatggtaaagatttaaaatgataataaatgcagcaaaa

SEQ ID NO: 6715 - DNA, 364 bp, Homo sapiens
  misc_feature 105, 113, 115, 290, 364: n = A,T,C or G
ccctttcgagcggccgcccgggcaggtacaccaaaaagagaactttgtgatccgttggtaagatagtatccacaagtaagcacttgtgttcactgttttttgttncacactanantacacccagttgggataccagagttatttacagacatctgaggaagatcctagttttcaagtctgtcaggaaaatattccatattgttttaagccagatcatacccatggaaaaatagagaatggttttctttctttttctttctgaccaatacatgctcaagaaatcaaatatntgagatacacaaattgaacgcggtagggtgggggaggaagtagggagataaagcctatgctgctgattcctcan

SEQ ID NO: 6716 - DNA, 360 bp, Homo sapiens
  misc_feature 312, 336: n = A,T,C or G
ccctttcgagcggccgcccgggcaggtactaacaagtttgttgtaagtagacagaattatcaaaaacctagatgcttattttaaaagtttgcattatttagaatttcttccttaggaaccaaaagcaggttgctttcctggaactgcatttttcagaactgctcaaagcacctcatctagatgagtgttttaaaaaatatatataaaaagtctataaagagacttcaaacatcacatacttcacctcttacaggcttttttaaaatcatgtatcccttcctttaaagtccttcagaaataaaaataaaaagntaaaactctcgcatttccatttangaaaaaaaaatgggaaaccattca

SEQ ID NO: 6717 - DNA, 679 bp, Homo sapiens
  misc_feature 73, 85, 90, 148, 167, 176, 180, 211, 219, 223, 228, 274,279, 282, 290, 309, 315, 323, 340, 364, 370, 373, 379, 394,428, 436, 449, 482, 507, 537, 563, 566, 569, 583, 624, 632,650, 655: n = A,T,C or G
ccctttcgagcggccgcccgggcaggtacccctccaagccggacaacccgggccgaggacgcacccagccggnagggacatgggnccagnatacctacctcaagcggcttgcggaccaactttaccaattcaaaacccctttcaattncaaccccaaggggccaagnaaggaattnattnggggaaaaaaaaaccggaaattcctttaagncccccccnaggnaaggnaacccaacctttgggaattttttttccaagggaaaccccctttccnttttnggnaatttggnaagggaaagggaaaaaaangggccnaacccaangggaaaaaaaaaaattngggttttttcccccccccaagggnaaaaanccntttccnggggggccttttttngggaaaaagggaaaaccccccccctttgggcccnaaaaattngggtttggggggntttgggaaaattggggggggggaaaaaaaaaanttggggaaagggaaaaccctttttnggggcccttttcccttttcctttggggggncccccctttttttttttttccccccnttnaantttttttttttccnaagggccccccccccaatttaaattttttttcccaaatttnccgggttngggtttaaaaaaaaaaanccggnaagggaaaaaattttcccaaaccc

SEQ ID NO: 6718 - DNA, 544 bp, Homo sapiens
ccctttcgagcggccgcccgggcaggtactacatatgcagaatctgatacaatgttaatagactgattaaaatcttgttaacactgtaatgacggcaaccaactctgctctttgagtcaagtgatactgagttttaatggctcattcttttggcccggtgtaagccacttttccattgctggaaccatcagtaaacactgccagagcattttttaaaggcttatgtttggtaactttaggtaaaatccaggtagtcaattttaaaaactggaagatttttgttttggggtaacgattgtcaataattcccacaaaatcggcaagaccaatctgccatgcaccagaattgataaaggcttgtctaacctgttgcttgttgaaaggaacagtgattttatctgggtcatttccacacaatgttattattcataatcttccctgaccaattaatggagcccatttgatcccccgccgtctactcgattggtcaacgtcaaagggagtccgcagggtcggcctggttctaaggaataaatggggggga

SEQ ID NO: 6719 - DNA, 181 bp, Homo sapiens
  misc_feature 161: n = A,T,C or G
cccttagcgtggtcgcggccgaggtactaccggcccattcttgtccattataactgtgtgcagttgtgatgatggctgccaactatgatataccggtctggagatgtcaagcccattacaaatccaacaacattagtaactgttttcaattttgtgactgnctgaacttgcatgctgaccg

SEQ ID NO: 6720 - DNA, 290 bp, Homo sapiens
cccttagcgtggtcgcggccgaggtactttctgatttttctacaaagattgtgtattacttgtataataaaaataagagctttaaattgtgaaattcttctggatttggttttctcattttattatggaatttttcatacctaaataagatgaatagttgggtaattttttttctgctttgtcagttattggtgtttgttaacttcttaaaaaaattaaaaagaacttgggaagctctgtttttctatgccctggaaacatttaaatatttagaattttttgctctttga

SEQ ID NO: 6721 - DNA, 362 bp, Homo sapiens
ccctttcgagcggccgcccgggcaggtacccccgaatctaaaataaaagcagaaattatatgaaaaaactggggtgggagttggaaggaactttagatatgtaataaacttgtttgaaaactgttaatttctcatgctttcattaaaaaataattttcctcaagaaaccccaaattctccacctcaggaatgaaaagtgcatttgaatttcaagaaggtatgggcatgagaaccttgcagttttctaatttgtggagacaaaataatttttataacaccaaccaggaggtttcctctacaaaccccttgtaattcctttctgagctctcttccttctagaatcttggggcatctgaaaaact

SEQ ID NO: 6722 - DNA, 348 bp, Homo sapiens
  misc_feature 79, 80, 81, 82, 83, 94, 96, 100, 145, 150: n = A,T,C or G
ccctttcgagcggccgcccgggcaggtacatggagaataggcatatagccactaggctacatgaacacgtcacgtttgnnnnntgagccggccnantagntgggattactggcgcgtgccactgcgtccggctaatttttgtatncatanacaaggcgcatcacacaaaaggcaccaagacgtgaaactttttaaaccaaaaggacgaagaaaaaacactttcaaaaaaaaaaaaaaagaaaaaaggaaaagtactttattttcaaaacactcatatgttgcaaaaaacacatagaaaaataaagtttggtgggggtgctgactaaacttcaagtcacagacttttat

SEQ ID NO: 6723 - DNA, 319 bp, Homo sapiens
ccctttcgagcggccgcccgggaaggtacctttcattggattgtccatggtgaatcgctttagcaagcggcgtgactctccgctgcccgtcatcttggccaatatctatctgctggttcctcctgtgctcaacccaattgtctatggagtgaagacaaaggagattcgacagcgcatccttcgacttttccatgtggccacacacgcttcagagccctaggtgtcagtgatcaaacttcttttccattcagagtcctctgattcagattttaatgttaacattttggaagacagtattcagaaaaaaaatttccttaat

SEQ ID NO: 6724 - DNA, 458 bp, Homo sapiens
  misc_feature 144, 173, 190, 202, 215, 249, 295, 301: n = A,T,C or G
ccctttcgagcggccgcccgggcaggtactgttcaaaaaggaatgccccacaagtgttaccatggcaaaaactggaagagtctacaatgttacccagcatggcttgtttgggcattgtttggtaaaccaaaaccaaagtttaangggcaaagaatttctttggcccaaggagnaaattaaatggtgccgntatttgaggcancattaaaggcacntcctaaaggagccccgaggattagcctttcctgnaaacggtggtggaaagggaaaaatggatcaggaaaaaaggaaaagnaaagcncaaaaggagaaaagggttaacctggtcaccatttccttcttttttcaggaattcttttctttttgggggattaatttttctcttctttctaggttttaggccaggattaaaccatggtgaagaaaggggacttgttctgcattttcctttatttgga

SEQ ID NO: 6725 - DNA, 345 bp, Homo sapiens
ccctttcgagcggccgcccgggcaggtacgcggggacatcaatgcagagtccctctgtgaatttacaacacccaacacccatgagttcagtccttaagaaggaaaattgagcaagtatttaattggttggacattgcataaaagaggtccatatccaggctaactctagaaattttattctcaaacttagttggcctctttttcttctgtcagaggaccattcttagtggcactggggaaatcttggcacccagaagaattcaactgcgctcactgcaaaaatacaatggcctacattggatttgtagaggagaaaggagccctgtattgtgagctgtgctatga

SEQ ID NO: 6726 - DNA, 547 bp, Homo sapiens
  misc_feature 490: n = A,T,C or G
ccctttcgagcggccgcccgggcaggtactgtgctcttccagggcaggggtcggcacaattttttcagacgtctgaaactccagctacaacacaggacgaagtatcctgtgaagagcatagtgatgccaccgaatccactcttccttatggtggtgttgcacctgatccagcctttttgtaccccttactccccatcaaaaaaaaaatggatacatggttaaaggatagaagggcagtattttatcatatgttctaaaagagaaggaagagaaaatactactttctcaaaatggaagcccttaaaggtgctttgatactgaaggacacaaatgtggccgtccatcctcctttagagttgcatgacttggacacggtaactgttgcagttttagactcagcattgtgacacttcccaagaaggccaaacctctaaccgacattcctgaaatacgtggcattattcttttttggatttctcatttatggaangctaaccctctgttgactgtaagcctttttggtttgggctgtattgaaatcctttct

SEQ ID NO: 6727 - DNA, 599 bp, Homo sapiens
  misc_feature 32, 34, 43, 328, 363, 398, 439, 491, 504, 515, 559, 563, 570: n = A,T,C or G
ctccgagccggcccgccaagtggtggaagggntntcctggcangaaattccgccccttagccgtgggtccgcgggcccgaggtcctggtaaaaagtaacagctaactcaggaataataaaaatttttgtaatcaaaattacaaggagacaggaataataactttaattaaccataacaaatggagtgggaagttcaataagtgcatatttatcaaaaccaaaaaatggtgggtttcattctgccttcttagtataccccccctcaaccaaacctgggtttatagtttagggattattattcaccaaggtttggtggggtttaataatngaaattcctggaaaatttaattaaattttttaaancaatttttaaaaaaatggtttttttttttttaggntaattaaccaatttccaccaaaattaattggttaaattggnaattccaattattttaaaaaaaaattattttaacccctttttaaaaaattancccaaccgttttnaaaaatttttnggggttttaaaattaaaaaattgggtccttaaattttttttccnaagnttgggtnggggttaaccccttgggccccccgggggg

SEQ ID NO: 6728 - DNA, 300 bp, Homo sapiens
ccctttcgagcggcccgcccgggcaggtacaagaagagaggatggagacgagggtaggcttcttttcagattatacattctggatcagaaagtctatatcaagtgggattttctgaatgacccaggttttttttgtttgtttttgtttgtttgtttgtttgttttagaatttctgtgctttggagctggaaggatatataaatgagaaaactgagaacaaaagaagggacgatatatttttggttgcaagggataagaacctaacttcaacaagcaaagcaaaggggggggttttattag

SEQ ID NO: 6729 - DNA, 323 bp, Homo sapiens
  misc_feature 61: n = A,T,C or G
ccctttcgagcggccgcccgggcaggtactaagcaatgtgtcttgcatttgttttcaatanggaaaacaaagttctagataggttaaaagaaaaacaccataaaagtggtagtatatttaagtggaaaattatgtattttaaagtgtgtaactattaaaaatatattgcctggaaaaggaatactactgttttgttttgttaagaccacaaactgtattgctaaggacattttaagagtctgcttagccataacactcatttaacagcatgggtagtaagcatggtttcttgcagaaaacacaaagttctcagctaacacatt

SEQ ID NO: 6730 - DNA, 239 bp, Homo sapiens
cccttagcgtggtcgcggccgaggtacgtcactttttaaaaatgacagcaacatgtctttatcatggattaagcaagtttaagaaatactatttttaatctcaaacaatgcactgaaagtgagtcttaatttcagagttttattgtattgcactaaaggaacagcaggatggttatacaattttctctcattcagttttgaaaatctgtagtacctgcccgggcggccgctcgaaaggg

SEQ ID NO: 6731 - DNA, 795 bp, Homo sapiens
  misc_feature 3, 23, 36, 68, 77, 121, 136, 137, 159, 163, 170, 177, 178,185, 202, 209, 213, 223, 230, 251, 257, 274, 284, 334, 346,354, 406, 419, 423, 454, 456, 477, 487: n = A,T,C or G
ttnaaaaaatttaaaacccgggnaaacccttttccnaaccttttaaattttaaaaggggggggggggnccccggggnaaaaaaaatttttttgggggggggggggcccccccccccctttncccttttaaaagggnnaaaattggggcccccaaatttngggnccctttncccgggnnaaagggnccccggggggggccccncccgggncccncccaaagggntttgggntttggggaaaattgggggggnaaattnaaattttccctttgggncccaaagggnaaaaaaattttttcccgggccccccccctttttttttcccgggaaagggncccggggggccnccgggccncccccggggggggcccaaaggggggtttacccaacgggaacccccaaagggnagggaaccaaaanaggncaaaagggaaaggaaaaaggaaaaagcccangnaaggaacctggttttggggcncccgggggcnccggaaggaaaaggaaaagggcttgcttgggcaaaaaagggggggaccgttcccaaaccgaagaagaccaccttgtccttcgagcaggagttaacaccgtcaccaccttggtggagaacaagaaagctcagctggtggtgattgcacaccgacgtggatcccatcgagctggttgtcttcttgcctgccctgtgtcgtaaaatgggggtcccttactgcattatcaagggaaaggcaagactggggacgtctagtccacaggaagacctgcatcactgtcgccttcacacaggtgaactcggaagaca

SEQ ID NO: 6732 - DNA, 376 bp, Homo sapiens
cccttagcgtggtcgcggccgaggtacacttcctactctcgcttcatggagaagaccgcctactgacaagagaatccatcccctttgcacacagtggtcacctgcagctcagaggtcaacttcttggttttgaggaaaaattcaaaaggctgcacgtttaaaggagttgttccatttcagtgccccattagcctgtctttcctcagaaatttaccaatctcttgatgtgataagcaccaaactatgaagcttttcccttcctctccccgctgctccgttctgtgaaccgactttttgtctacaatcacactgatttcttcactgtttgctctgaaacttcactttttctgagtgatgtgttctgcaaataggctaa

SEQ ID NO: 6733 - DNA, 330 bp, Homo sapiens
cccttagcgtggtcgcggccgaggtactggttctgtcacctgggctgctcacagtatttggggccagagcctacgtgaatatatgtgtgtggacaggtcagctgccatgttggttttggcagaaaaactactgaaaggtggttcagaatctggggagccttatattccaggtgtctttttcagacagtttctacctgtatcacccaaggtgcagtttgatgtagtagtgtcagctttttccttaagtgaactgcccagcaaggctgaccacactgaggtagttcaaaccttatggcgtaagacaggtcatttcctggtacgcgggggagc

SEQ ID NO: 6734 - DNA, 316 bp, Homo sapiens
cccttagcgtggtcgcggcccgaggtactcggccattctgccagcatttctgtttcagcaactgctgataagttccccaggtgagcttaacagaagaatgggtgtcatacttgctgaagataaagatgcgtcccaaagaatgatggggcatgggcggccatcttaccatcttggccgtttcatttgtcttccaccagttctggaaagagaaggcctagaagttcagaaaaaaaggtaagaaagagttaatataaatgaggagaaaaaatagaacagtgagataagagtacctgcccgggcggcccgctcgaaaggg

SEQ ID NO: 6735 - DNA, 342 bp, Homo sapiens
  misc_feature 322: n = A,T,C or G
ccctttcgagcggccgcccgggcaggtacttcctctaaggaaatgtgtcattttttctaacatagtttatattcataaggagacaacacacaaacacatacacaatcaatcaacaaaaatgtgatacagtagattattaagcaccttgctctgattaaaaaggaaaaaaagaaagaaaaaagaacagactttttcaaccagcaattccagaataaaataaatctaattacatagtcaaaatgacaaaatttaaaaatcacttaatgggcagccaacatgtctccagttctcattttcttttatcccctgcttaagatttgcnttcataattagaattggttg

SEQ ID NO: 6736 - DNA, 370 bp, Homo sapiens
cccttagcgtggtcgcggccgaggtacaatctggggctgaggccactccactgcctggcatcaaatcccactcttctgctttcagctcctgtggccaccacagtcctctgtgggatcgcaggagatgcttagtaatccaaggcaagattagttgtggtaaaaatggcccataaaataaaagcacatttttccacttacagaacctaaaactcattttagtaagagttcacagcaaaattttaatgtgagaagagtttgaaactgaatttatattattcttaaaaaatgtcacccagactcagtgacttttatttttcatttccctaaaagtttcccaaatattgaattaaaattgtcaagggataaggaa

SEQ ID NO: 6737 - DNA, 962 bp, Homo sapiens
  misc_feature 15, 28, 59, 70, 72, 80, 93, 101, 105, 107, 113, 115, 117,140, 146, 160, 164, 189, 195, 201, 205, 209, 222, 234, 237,243, 271, 300, 326, 335, 355, 404, 426, 429, 447, 459, 476,502, 516, 540, 553, 571, 579, 594, 616, 637, 644, 666: n = A,T,C or G
  misc_feature 667, 673, 705, 708, 731, 734, 737, 739, 788, 792, 803, 809,810, 811, 829, 850, 867, 891, 903, 908, 935, 937, 952: n = A,T,C or G
ccgggaactttcacnttattaagggggnggcccggaaaaatttgggggggcctcccttnctttagaaatngnccattggnccttgcggggagnccggggcnccgncnccaagntngntgggaaatgggggaattaattcnttggcnagggaaaattttcngccncccttttaaagaccggtgggggttnccgccnggggcnccgnaagnggttacccttaanaaaattaagggntgngggganaaaaaaaattccaaaaaaaccaattaanatttttttaaccttaaaattaaaaatggnaaaaaccaaaaaccttgggccaaccnaaccttttncaattaacccttaatttggnaacccccggtttttttggaaattggaaaccttggggggtttccaatttnggtttaaaaaaaaaacctttanttncaacccccaaaaaaattngggccctttggnaatttttttgggtgccntttcctttaatttaatttaatttaanaaaaatttaagggnttgataaaaaaaaaaaaatttaanaaaataacccaanaaaaaaaaaaggggggtncctttttnccttttttttccccntttaaggtttttaaaaaccccnttttcctttttgggaaaaaangggggtnttgggtttttttttaaaaaccnnccccanaattaatttaaaaaaaaaattttaaaaaaggnccnaaaaaaaaaattaaaaatttaanggnttnanttaaaaaatttttttaaaaaaaaaaaaaaaaaaaaaattttttaatttngttnggaaaaaaganaaaaannngggggccaagggccaaantttaacctttaaaaaccaaantttttttttcctttggnaaaaaccttaaatttggggggggntttttttttccnaaaanttaatttttttaaaaaaaaaggggggncnttcctttttgggggntttttaaaaa

SEQ ID NO: 6738 - DNA, 138 bp, Homo sapiens
  misc_feature 17, 45: n = A,T,C or G
ccctttcgagcggccgnccgggcaggtacgcggggacactatgcngggttgctggggcctgggggccggacggctgtttcctgtcctggtgcatggtggtcggacgaaggaattgttggaaaatttttctcggaggta

SEQ ID NO: 6739 - DNA, 465 bp, Homo sapiens
ccctttcgagcggccgcccgggcaggtacgcggggaggctttgtgacacacacacacacacacacacagcacctgcacgcagatgcacacatctctagtcaaatgaggctctcagctttttgataggggctttttgatacgtgtataaccaatactttattctcactgtagtcaaggactcattgcaattcagaaatgggaagctgatccggaactccactacagctcaaagaaattctcgaatgttctcacctattaacagttattaaaatggaagaagctggggatgaaattgtgagcaatgccatctcctacgctctatacaaagccttcagcaccagtgagcaagacaaggataactggaatgggcagctgaagcttctgctggagtggaaccagctggacttagccaatgatgagattttcaccaatgaccgccgatgggagtctgctgaccttcaaaga

SEQ ID NO: 6740 - DNA, 563 bp, Homo sapiens
  misc_feature 177, 206, 356, 541: n = A,T,C or G
cgaggtacatgaagactggtaaaactgcaaataagaattcaatttgaagtcacagaaaatattttaaatggctaattctgaagaggagccaagaatccattttggacatgttctcagttttgtaaatatgacttcactatcacattctctcatgtgtttccatacccaccttttctnggaaattatgggcagaaaatggatagaangaaggaaaaggaatcttgagaaatttgtttggaggctgcattttaataataaggatgacttcactttatctctttggtcatcaaaggaataggaagaataagagattctcattatagttatcccctcacctaacagtaatgatatcagantgaaggatttaaatgaaagtcaaactgacaggggaaaaaggcatctagcactctagtgtatttacctgtgaaaataaaaatccagtggaaaactgacatgtgtttagacattgaataaacaagttattttaaatattaaaagaattttcaatttcaaggcttagctggtttacatttcctcttgnggaaaaaagaaaattttactaa

SEQ ID NO: 6741 - DNA, 435 bp, Homo sapiens
  misc_feature 283, 292, 298, 337, 345, 363, 394, 395, 399, 405, 426: n = A,T,C or G
ccctttcgagcggccgcccgggcaggtacgcggggtgcaaagcaagcaaggaacatttggggtaagaaaacaaacatgaggcaaaagaaaaaatacatgtttttaagaaaacattgagcagagaactgcagccaggatgcgctcagcagacattcactctggctgctgggacatcagaaaacaaagtcttcatctctctctccagtttttcacccaccccacccttttgctttcattttcaggtgtgttgggttctatattgacaggggaagggaagaggtanaaggggagnaagcanggaagccaaatttgggccttgcccttggcaaaaaagccnaagccttnggaagggttggaaaattngccaagggaaaaaaggggaaaaaaggggttnnaacncccccnattttcttaaactttcccatngggaacccc

SEQ ID NO: 6742 - DNA, 183 bp, Homo sapiens
  misc_feature 91, 150, 152: n = A,T,C or G
cccttagcgtggttcgcggccgaggtactctatggtggaatttaacgggaagctgttagccagcatcaatagcacggtgcggctctatgangtgggacaacagagaaagggagcttgccgcactggagttgcaaccaacttacaaaccancntcaatggtcccttcttaccctggaaaggaac

SEQ ID NO: 6743 - DNA, 296 bp, Homo sapiens
cccttagcgtggtcgcggccgaggtacatctacctaaaagactattatgtggaataatacatactaatgaagtattacatgatttaaagactacaataaaaccaaacatgcttataacattaagaaaaacaataaagatacatgattgaaaccaagttgaaaaatagcatatgccttggaggaaatgtgctcaaattactaatgatttagtgttgtccctactttctctctcttttttctttctttttttttattatggttagctgtcacatacaacttttttttttgagatgggg

SEQ ID NO: 6744 - DNA, 356 bp, Homo sapiens
ccctttcgagcggccgcccgggcaggtacaccgactacggcggactaatcttcaactcctacatacttcccccattattcctagaaccaggcgacctgcgactccttgacgttgacaatcgagtagtacgcggggacacatcaatgcagagtccctctgtgaatttacaacacccaacacccatgagttcagtccttaagaaggaaaattgagcaagtatttaattggttggacattgcataaaagaggtccatatccaggctaactctagaaattttattctcaaacttagttggcctctttttcttctgtcagaggaccattcttagtggcgctggggaaatcttggcacccag

SEQ ID NO: 6745 - DNA, 353 bp, Homo sapiens
cccttagcgtggtcgcggccgaggtacgctgtctagatgacattgacagagggacatttgtttgcatttattcaggaagattactaagcagagctaacactgaaaaatcttatggtattgatgaaaaaccgggagagatgagaatactatgaaaaatatattttcaaaaaagaggaaattagaagttgcatgttcagattgtgaagttgaagttctcccattaggattggaaacacatcctagaactgctaaaactgagaaaatggtccacccaaagtttcagtaattaatcccaagggagcttactattgggaaaccgaaaatatggataatattttcaaagaatttcaagt

SEQ ID NO: 6746 - DNA, 437 bp, Homo sapiens
  misc_feature 396: n = A,T,C or G
cccttagcgtggtcgcggcccgaggtacaattttaagatgattttgagggttgtatttctttatcatttaaaaatatcctaaagtcagtaatttatatgaaggaaactcattcattattgaaggtattaaaaatagccatcatctgtattaggtagcagttttggaggatcatctttttcttttgctataaagccctattaatgaagaatacttccagtagagttaatagctgtagcttacctagtgtgttaatgaagtgtgtttatttatgtgacttgataccagtagtcataatagagactgaagaggtatgcgttaagcacgcctacttctatgcagtaaacaggctgcagctgcctagattagattcttagaaatgtcatattttgaattgntttatttcttgtaggggaagctttgtcccacttcattcatt

SEQ ID NO: 6747 - DNA, 451 bp, Homo sapiens
  misc_feature 158, 203, 349, 419, 430: n = A,T,C or G
ggagctccccgcggtggcggccgaggtacttcctgtaattgacatgccttgccttgttcctcatggcatcattcaaggtcatcttaaatgagagaggagggaaagaaagaaaaagaaatcatacgttatggttttcaaatgcatccagaggaaaggcngggttgtttttgaaaagtttacttctatctgaaagcttctagcanatgaaagcaaacagtgcaaagctgaactacaaataataaagcacaattatggcaggaatctgtccacattcacccaagctactgtgccattaaagaggaaaatagacagtgtgagctgcaggttagtcaccaactgggaacatggnagaacgtcaacaatacatacaggatgatccattggccaccttccttatttaaaagagcttaaggacgcancaagaaagctnaacgtgcactaaaaagtttgt

SEQ ID NO: 6748 - DNA, 304 bp, Homo sapiens
ccctttcggcggccgcccgggcaggtactattaactttaaggaaaaggacatgagattttaagtcagaaaggaaaaatgctgactaaggcccaaatgctcaactccaagctttcattcacctaaaaaaatgcaatcaaatctcctcacttgaaagagttctttttttttccctttttctccagttttggaggagaactggaagggagtaaaaagacctgtccacagcacaaacttccactctggctgtgaaggactagccaattgctaaatgtttcatcacggaggtgctcgatcatattatat

SEQ ID NO: 6749 - DNA, 399 bp, Homo sapiens
cccttagcgtggtcgcggccgaggtacctagaattcaaacaagaatcacacatcacatgctaaaaaaacttctagcatctaaaatacatacaagagctgtgcagggcatagacttcaaataaagcccgaaccactgggttaatccatcagtcctatggcaagttgatcataaagcattccttacgcggagatctgggcaaggtaaagagtataagttagagcagcagcagttctgatgggtatcagaaaggcaaaatacaagacgagtcatgaggagcaccatacacatgaggaaagagttatttggggggtctcagtttgccccaaaatggatcaccatttttctcattctttgatcttttttttttccagtatctctagctcaaactttctgttaac

SEQ ID NO: 6750 - DNA, 328 bp, Homo sapiens
  misc_feature 21, 180, 204, 207, 213, 274, 283: n = A,T,C or G
aattcgcccttagcgtggtcncggccgaggtaccagttgtaaaattaccaggaaccgccatgcctcaagatcgccctgttttctggcttcatcaatgactgcatgcagtgcaccaccctgtccactacgtgatgctgtaggataaagtctcacagtgggcggctgaggatacagcgccgngtcctgtgttgctggtgaattaanacnccatcnctgtgggttgctggtatggtgccgtgctatttggcacaggacacaccgcttgaggtctgtnttgaacctntgaaggaggccgatactgaagctcggttggcagccggtattgata

SEQ ID NO: 6751 - DNA, 350 bp, Homo sapiens
  misc_feature 306: n = A,T,C or G
ccctttcgagcggccgcccgggcaggacaacattggattatttctttgggctgtttccaactcaagattctgttatttcattataagcattttgaggaaggcagttggtataaaggtgaccttagtaataaaagtcagtgtgaagtctatacgaaattccacaatgaatttaaagacaaggaattttagggacaaggatacagaaatttgcctagtaacttgcacacagcagatggtaaatatttattgactcaatggagtaatgttaaaaataaggtttcccatggactgtgttgagggccaggncatacttaacatcctttttgttgagaagaggagggatgggaaac

SEQ ID NO: 6752 - DNA, 379 bp, Homo sapiens
ccctttcgagcggccgcccgggcaggtacgcggggatcaatgcagagtccctctgtgaatttacaacacccaacacccatgagttcagtccttaagaaggaaaattgagcaagtatttaattggttggacattgcataaaagaggtccatatccaggctaactctagaaattttattctcaaacttagttggcctctttttcttctgtcagaggaccattcttagtggcactggggaaatcttggcacccagaagaattcaactgcgctcactgcaaaaatacaatggcctacattggatttgtagaggagaaaggagccctgtattgtgagctgtgctatgagaaaactctttgcccctgaatgtggtccgatgccaa

SEQ ID NO: 6753 - DNA, 239 bp, Homo sapiens
ccctttcgagcggccgcccgggcaggtacagctctcccagcgatttgtgaacaggcaggaggcaagcaatatcctggatgatgactttcccagcagccttgatctgtcgattgccagagtctgatccctcacgcttacttttccatcgtcttgatttccgctccttgtagtagaaggagctgatggagacctgctctttctcgctgcgagtggggctcccactgtataaacgaaggttc

SEQ ID NO: 6754 - DNA, 333 bp, Homo sapiens
ccctttcgagcggccgcccgggcaggtaccaaagaagaaataagtccaaaccattagatcagaaggctaaattttcctatggttgaatgttaaatattgagttggaaatacccagaaatctttgttctagcttgtttgcagaaaggtaaagatttactagttggtttatttaacagtagaataaaatataataaacagtgtttaactttttttatgtattttttttctgtgaaactagaaagtttatgatgatgagaagcttgaggtttctgaattagcaactgtgaaacgtcctcaggagagaagctacatgctgcagaaggtggcaagaag

SEQ ID NO: 6755 - DNA, 600 bp, Homo sapiens
  misc_feature 28, 118, 153, 155, 172, 191, 259, 265, 287, 346, 350, 428,458, 463, 497, 514, 538, 544, 557, 564, 566: n = A,T,C or G
cccttagcgtggtcgcggccgaggtacnatcttggctcactgcaacctctccctcccgggttcaagtgattctcgtgcctcagcctcttgagtagctgggattacaggcgcgttgccnctgccgtccggctaatttttttgtattttttagtnanaggaatggggtgttttnacccaatggttgggcccanggccttgattcttcaaaacctccctggacccttcattggtggggttcccaacccccaaccctttgggntcttcncccaaaaagatggccttgggtnattctaccaaggggccggttggaaggccccaaccccaaccggctttcaagcctccttanccanaagtccaaaattttttttttttaaaaaaaaaaccttggaaccaaccccttaattttaaccttggaattaaaaaaaatntttcttccttggtgtgtaaaaaaaaattcnccttnatttttaaccttattttttttaaaaaagggaatnaaaggttaatttcaagntgttttttttttttaaaaaattancaaaanttaaaatttttcntggtttnanttttggatttaaaaaaaatttttaaaaggggcca

SEQ ID NO: 6756 - DNA, 592 bp, Homo sapiens
  misc_feature 504, 513, 515, 516, 531, 551, 565: n = A,T,C or G
ccctttcgagcggcccgcccgggcaggtactaaatgcatcctccatttcttattaacaatcttttctaaatatcaacgggatattaaataccagcttacttttagttctagaacttttgctttctttcaaaaacttttcagaaacatatatccattctataattgtgatagattggaagaaatattttccttagaaattttgtaaaggaatacttccactcttttgtatgtaagatttgataaacgataaaaacccaagtaaggccattattatcatcttgatcaaaaatatacacagatcgtgatgctactatattgtgtgatcctgagttctagtaaccactagatacatgcataccattcactgatttgtctattctaataaaaatttaatcctgtcttactacctttgaagacagaaatacttttaaaactttttgatagggcttcataacattacagattatctgccataaacagaacattaggaattgtatgagaaanggttgttangnncccaaaagactattnaaggaaaacttactattttnaaataatgacaatncaaaattggaaagaaagaaaaaatggc

SEQ ID NO: 6757 - DNA, 329 bp, Homo sapiens
  misc_feature 97, 109, 135, 142, 151, 169, 173, 194, 198, 208, 210, 224,231, 235, 272, 279, 306: n = A,T,C or G
cccttagcgtggtcgcggccgaggtacagatctgggaactaaatattaaaaatgagtgtggctggatatatggagaatgttgggcccagaaggaacncgtagagatcanatattacaacagctttgtttttgagnggtttangaaattatngaaaatggatttgtggtntatngaacgtcacaagctgttaggncagncagggaccangnaattccctgacccntcttgcncccngtgtgttattcctcctacccagactttggacttgccntcatgtncatcacaaggtatttctcatttttgtntttgttttggcaatggttctttg

SEQ ID NO: 6758 - DNA, 375 bp, Homo sapiens
  misc_feature 1: n = A,T,C or G
ngcccttagcgtgttcgcggccgaggtacaaagtccctgaggcaaaagcatgcttgctgtgttctaggaaaagcaaggaagacagcatgtctatagcagtgggaggtggaaggataatagacagtaggtgaggttagaggggaccaaatcatgtattttccatccagaggttcccaaccttggctgcacattagatttattctaaggagcttttaaaaaataccaatgactgggtcccagcctagagtgattaaatcagaatctctggaggtagacttgagaatctgatgtttgcaagtttcctaggcaagtcaaggctgaggaagactgctgcaggccattgtaagagccaggcgttgatctcattcaaccttt

SEQ ID NO: 6759 - DNA, 325 bp, Homo sapiens
  misc_feature 1, 23, 25, 40, 60, 83, 84, 89, 96, 105, 113, 117, 120, 135,137, 141, 152, 154, 157, 159, 163, 164, 169, 171, 173, 177,178, 181, 182, 184, 188, 191, 204, 205, 206, 227, 229, 231,235, 237, 259, 261, 271, 277, 281, 282, 285, 291, 301: n = A,T,C or G
  misc_feature 308, 309, 311, 313, 314, 315: n = A,T,C or G
ngcatgctcgagcggccgccagngngattccttagggggngaaaaaacccctagcgcggncgcggccgagggactctgccttnnagganatgaggnaagacaganacataganggcnaanactagccaaggcaangnaaanggactaagaancncangngacnngaggnancngatnnatnnantctnttnaaaaccaccgacnnncagagggcaagaaaaaccccncncnaaantnaaggagggagggaaaaacacangnaaccagaatncagagngggnnacncaaccnaagagaacanacggagnncncnnngggaaaacaa

SEQ ID NO: 6760 - DNA, 398 bp, Homo sapiens
ccctttcgagcggccgcccgggcaggtactacatatgcagaatctgatacaatgttaatagactgattaaaatcttgttaacactgtaatgacggcaaccaactctgctctttgagtcaagtgatactgggttttggatgactcattcttttggcccggtgtaagccacttttccattgctggaaccatcagtaaacactgccagagcattttttaaaggcttatgtttggtaactttaggtaaaatccaagtagtcaattttaaaaactggaagatttttgttttggggtaaccgattgtcaataattcccacaaaatcggcaaggaccaatctgccatgcaccaagaaattggataaagggcttgtctaaccctgttggcttgtttgaaagggaac

SEQ ID NO: 6761 - DNA, 501 bp, Homo sapiens
  misc_feature 340, 416, 452, 460, 474, 481: n = A,T,C or G
cccttagcgtggtcgcggccgaggtacacatttgagatgcagatcatcaaggccaaagataactttgcaggaaattacagatgcgaggtcacctataaggataagtttgacagctgttcatttgatcttgaagtgcacgaatctactgggactactccaaacattgacatcagatctgctttcaagagaagtggagaaggtcaagaggatgcaggagaacttgactttagtggtctcctgaaacgtaggtgagaacaaagtgatggagtgagacattgtggcctggaagtctttcagacacccactcagagaagtcaagtttaaagtggatgttcttcanagaatttttcatttctgaaaatgtgttttgcttatagaatataacagagttgactagaaagagagaaacacctgcntactaattcttttaaagcctttaacagttgcttttnaaactttntttttaaatgtttnatgactnttcacctatttttttttaaa

SEQ ID NO: 6762 - DNA, 383 bp, Homo sapiens
ccctttcgagcggccgcccgggcaggtacgaaaaaatcaggctactaagcccactgttaatatagacgcagaccaattgttaggaacaggtccaaattggagcaccattagccaacaatcagtgatgcagaatgaggctattgaacaagtaagggctatttgcctcagggcctggggaaaaattcaggacccaggaacagctttccctattaattcaattagacaaggctctaaagagccatatcctgactttgtggcaagattacaagatgctgctcaaaagtctattacagatgacaatgcccgaaaagttattgtagaattaatggcctatgaaaaatgcaaatccaggaatgtcaagttcgggccataaagccattaaa

SEQ ID NO: 6763 - DNA, 399 bp, Homo sapiens
ccctttcgagcggccgcccgggcaggtacactttcttaacaaggaatggctgttttcaggccttattaggaaaacaaacaaacaatggcagttactacctgttttttatcactgataagctaaaataaagctcaaatatggacagtttaactgtgtgatattaagtaaaaaatgaaaaccattatagttttaccaaaagaaacacaaaaaatatgggaaggagtgaaatgaacatggcataggtcccaaagattacactatgattctgaacagcattttcaaaacaaagggtatctacatacaatttctgtgaatatttcttatactagatagatcaaaagcaaatgtaggctcagccctaccttgtcaaagataaatattcagataaactagaagttc

SEQ ID NO: 6764 - DNA, 252 bp, Homo sapiens
  misc_feature 28, 115, 118, 124, 243: n = A,T,C or G
cccttagcgtggtcgcggccgaggtacncgggggagcggagacccgggagcaggagctgggcctaggtctgcgccctgaattagagcccattgggaacgatgccaccaccgtcanacntttgtncaaagtggccattgaagtggccaggtgctaacgcccagctccttgaaatcgaccagaaacggcccctggcatccattatcaaggaagtttgtgatgggtggtcgtatgccaaacccaanagtattata

SEQ ID NO: 6765 - DNA, 382 bp, Homo sapiens
cccttagcgtggtcgcggccgaggtactacatatgcagaatctgatacaatgttaatagactgattaaaatcttgttaacactgtaatgacggcaaccaactctgctctttgagtcaagtgatactgagttttgatgactcattcttttggcccggtgtaagccacttttccattgctggaaccatcagtaaacactgccagagcattttttaaaggcttatgtttggtaactttaggtaaaatccaagtagtcaattttaaaaactggaggatttttgttttggggtaacgattgtcaataattcccacaaaatcggcaagaccaatctgccatgcaccagaattgataaaggcttgtctaacccgttgcttgtttgaaag

SEQ ID NO: 6766 - DNA, 358 bp, Homo sapiens
  misc_feature 290, 329: n = A,T,C or G
ccctttcgagcggccgcccgggcaggtacacaggtatctaataatactagtgagaaatactacagctatattccaggaagaagtggtaatactggaaagtttctttcctttttgagttgtctatacaataagtccttcacagaaatatagtatcccaaaattcatagagaagtgcagaaatgaaacaaatgaaatgtcttctgacaagctcaaccaaactggtcccaaatcatgacagttattttgtctaagaccgtattaatactttgcactgcagcacctctacaagnaggacagcaaagaaacttcacatgtgttatcactggggntcctctgcaaaaggctgggaggtaaagga

SEQ ID NO: 6767 - DNA, 382 bp, Homo sapiens
  misc_feature 301: n = A,T,C or G
ccctttcgagcggccgcccgggcaggtaccagaagatagccgaggaaatcaccgtgggacagctcatctcacacctccaggtctccaaccaggagattcagacctacgccattgcactgattaatgcacttttttctgaagggctcctgaggacaaacgacagggatatggcaaatgcatttgcacagaagcatctccggtctataatcctgaatcatgtgatccgagggaaccgccccatcaaaactgagatggcccatcagctatatgtccttcaagtcctaacctttaaccttctggnaagaaagggattgatgaccaaggatggacccccaatggaccaggcctcaaaggggacatcatattttgaactgagggaagg

SEQ ID NO: 6768 - DNA, 519 bp, Homo sapiens
  misc_feature 339, 451: n = A,T,C or G
cccttagcgtggtcgcggccgaggtaccttgttaacaatatgtttgcaggcagtatgtttggtaaaagtcatcgccattctccattctcgattaaccaggggctcaatgcactgtggaaagccacaggaacctctgcccaagaaagcctggctgttgtgggaagtcagggaccccgaatggagggaccagctggtgctgcatcaggaaacataaattgtgaagatttcttggacatttatcagtttccaaaattaatacttttataatttcttacacctgtcttactttaatctcttaatcctgttatctttgtaagctgaggatatacgtcacctcangaccactattgtacaagaaaaccccaaagctaactagaactataggcaaaatcatagctgactttctaaactaatgcaccactatataatgctttcccggagaaagtagaanggtctcaagattttatgttgacccatgatttttcacgtgttctcaaatataaaaccagagttttcttt

SEQ ID NO: 6769 - DNA, 408 bp, Homo sapiens
ccctttcgagcggccgcccgggcaggtaccaaggtctggcaatagtcatgttcattctctctctctctgtccttcctttctttcttccttccagggatcactacttgtgtgatgtgacatgggcaacacaagaaagaatttctttgcagtggctcaggaggattcagaactattcggtcatggatatttgtgactatgatgaatccagtggaagatggaactgcttagtggcacggcaacacattgaaatgagtacctttctgtcacatgactggtggcagaccctactttaacccagcccaacaaggtcatgctacagagctgctcatggcattttcctggactctcctcccttggtcctgactggattcttctaccctgatccacttagtaagtccaagctccatc

SEQ ID NO: 6770 - DNA, 376 bp, Homo sapiens
  misc_feature 1: n = A,T,C or G
nttttcgcccttttttcggccgcccgggcaggtactcttaaaaatctgttaagagagtggatctcattttaagggttcttaccacaataaaattaaatttttgaaataaatcagtcatatttgagtgaaatgaaacctttccgagtagtttcagacaattgataatacctagtttacagttcctgtagtcattttggagggtgaggacttgatgtgtttagtaaagttgagaaataaatacatgaaagaatgtgtggggaagagaaagtgtggggaagagaaattgtctcagaggaccattcttagtggcactggggaaatcttggcacccagaagaattcaactgcgctcactgcaaaaatacaaatggcctaca

SEQ ID NO: 6771 - DNA, 450 bp, Homo sapiens
ccctttcgagcggccgcccgggcaggtacatttggtggaactgagaaatggcataacaccaaatttaatatatgtcagatgttactatgattatcattcaatctcatagttttgcatgcccaatttatcctcacttgtgcctcaacaaattgaactgttaacaaaggaatctctggtcctgggtaatggctgagcaccactgggcatttccattccagttggcttcttgggtttgctagctgcatcactagtcatcttaaataaatgaagttttaacatttctccagtgatttttttatctcacctttgaagatctatgttatgtgattaaataaagaacttgagaagaacaggtttcattaaacataaaatcaatgtagacgcaaattttctggatgggcaatacttatgttcacaggaaatgctttaaaatatgcagaagataattaa

SEQ ID NO: 6772 - DNA, 397 bp, Homo sapiens
ccctttcgagcggccgcccgggcaggtaccagtgtccttgtccacggagattcccctttttacctcctccataatatctgagcagcaaaaattcagatttgctattttcttcaccttactgacacacagcagaaaatttaacatttaattttttgaaggaaatttttatttaaaaacaaagatttgaaacttggtccatgtaggatgaatacatcctcaaaacagaagaaaagaagaatctgaggaataagaagcaagcttccttttcttctgaagcgctcaaattagaactgttggaagtttatgcaccctataaaagcaaaatgatgtaggtttatgttttaaaagacagatgtaataaaatgaacacattctttcaatagctatttgagaagta

SEQ ID NO: 6773 - DNA, 332 bp, Homo sapiens
ccctttcgagcggccgcccgggcaggtactttttgtttagaataagagaatttaaaaaatatccagtaatgagatacttagcaagaagtcaaatataaagccctttgctgtctttactgggacatactttttatgaaactatcctcatctattagggtagatgctgcagtgagctgcccagatccccttcagcaccaaggccctaactctcccagctgctgggagtcaataagtggtcctgaggtgacgtatatcctcagcttacaaagataacaggattaagagattaaagtaagacaggtgtaagaaattataaaagtattaattttgga

SEQ ID NO: 6774 - DNA, 482 bp, Homo sapiens
  misc_feature 471: n = A,T,C or G
cccttagcgtggtcgcggccgaggtacattctacatgcacggcataagaacagagagaaatacaataaatgtgacagtattttcaaatattttgtttctgagacattttgataagcaaatatcatactagaagggttcttctgagaattattacatcctatcctaacctgtgaatatggaacttgattattttcccatgatgacttgatggaaaccactcgccaaccaacaacaacaaaaaggagagctcatttacaacaatgcagtcatttatttattgagtatgtgcacattatggtattattactatactgattatatttatcatgtgacttctaattagaaaatgtatccaaaagcaaaacagcagatatacaaaattaaagagacagaagatagacattaacagataaggcaacttatacattgagaatccaaaatccaatacatttaaacatttggggaaatgangggggacaaat

SEQ ID NO: 6775 - DNA, 364 bp, Homo sapiens
cccttagcgtggtcgcggccgaggtactttgcaagttttcttcttttaaaacaataatttgagtttttttttcttccttgccactaaattcaaactcattcatgtaagtaataagaatttccaccaaatgaacatctgctaagtattgagggacacaaaaaagagaaatcttaaaaaaaaaaaaaaaaaagtacctttggagaagttcttatggtgcaggtcaagaaagatcttaagactggtcattcaaaggggtttggctttgttcgttttacggaatatgaaacacaagtgaaagtaatgtcacagcgacatatgatagatggacgatggtgtgactgcaaacttcctaattctaagcaaa

SEQ ID NO: 6776 - DNA, 379 bp, Homo sapiens
ccctttcgagcggccgcccgggcaggtacatctacctaaaggactattatgtggaataatacatactaatgaagtattacatgatttaaagactacaataaaaccaaacatgcttataacattaagaaaaacaataaagatacatgattggaaccaagttgaaaaatagcatatgccttggaggaaatgtgctcaaattactaatgatttagtgttgtccctactttctctctcttttttctttctttttttttttattatggttagctgtcacatacaactttttttttttgagatggggtctcgctctgtcaccaggctggagtgcagtggcgccgatctcggctcactgcaacctccacatcccatgttgaagtaa

SEQ ID NO: 6777 - DNA, 363 bp, Homo sapiens
cccttagcgtggtcgcggccgaggtacgcgggggaaggaatcccttaagtgcacgtctcccgttttcttttcacatcaatgcagagtccctctgtgaatttacaacacccaacacccatgagttcagtccttaagaaggaaaattgagcaagtatttaattggttggacattgcataaaagaggtccatatccaggctaactctagaaattttattctcaaacttagttggcctctttttcttctgtcagaggaccattcttagtggcactggggaaatcttggcacccagaagaattcaactgcgctcactgcaaaaatacaatggcctacattggatttgtagagggagaaaggagccctg

SEQ ID NO: 6778 - DNA, 385 bp, Homo sapiens
  misc_feature 373: n = A,T,C or G
ccctttcgagcggccgcccgggcaggtacgcggggacatcaatgcagagtccctctgtgaatttacaacacccaacacccatgagttcagtccttaagaaggaaaattgagcaagtatttaatttgggttggacattgcataaaagaggtccatatccaggctaactctagaaattttattctcaaacttagttggcctctttttcttctgtcagaggaccattcttagtggcactggggaaatcttggcacccagaagaattcaactgcgctcactgcaaaaatacaatggcctacattggatttgtagaggagaaaggagccctgtattgtgagctgtgctatgagaaattcttttgcccctgaatgtggncgatgccaaagg

SEQ ID NO: 6779 - DNA, 506 bp, Homo sapiens
  misc_feature 454, 490, 494: n = A,T,C or G
cccttagcgtggtcgcggccgaggtacgcgggacacacacacacagcacctgcacgcagatgcacacatctctagtcaaatgaggctttcagctttttgataggggctttttgatacgtgtataaccaatactttactctcactgtagtcaaggactcattgcaattcagaaatgagaagctgatccggaactccactacagctcaaagaaattctcgaatgttctcacctattaacagttattaaaatggaagaagctggggatgaaattgtgagcaatgccatctcctacgctctatacaaagccttcagcaccagtgagcaagacaaggataactggaatgggcagctgaagcttctgctggagtggaaccagctggacttagccaatgatgagattttcaccaatgaccgccgatgggagtctgctgaccttcaagaagtcatgtttacngctctcataaaggacagacccaagtttgtccgcctntttntggagaatggct

SEQ ID NO: 6780 - DNA, 483 bp, Homo sapiens
  misc_feature 445: n = A,T,C or G
cccttagcgtggtcgcggccgaggtacatctacctaaaggactattatgtggaataatacatactaatgaagtatcacatgatttaaagactacaataaaaccaaacatgcttataacattaagaaaaacaataaagatacatgattgaaaccaagttgaaaaatagcatatgccttggaggaaatgtgctcaaattactaatgatttagtgttgtccctactttctctctcttttttctttcttttttttttattatggttagctgtcacatacaactttttttttttgagatggggtctcgctctgtcaccaggctggagtgcagtggcgcgatctcggctcactgcaacctccacatcccatgttgaagtaattcttctgcctcagcctcccgagtagctgggactagaggaacgtgccaccatgactggctaattttctgnattttttagtagagacagagtttcaccatgttggccag

SEQ ID NO: 6781 - DNA, 509 bp, Homo sapiens
  misc_feature 29, 30, 53, 57, 59, 78, 87, 92, 101, 115, 134, 140, 161,177, 180, 181, 190, 194, 195, 200, 202, 252, 260, 276, 290,320, 326, 341, 353, 354, 362, 372, 393, 395, 410, 411, 412,415, 417, 435, 451, 487: n = A,T,C or G
ccctttaccgtgggtcccggcccgaggtnnagtggccttattgggcgggcccncgcntnattacgaatccgcctgctngcttttccngttcnaatcgtttntttggaaggcagtnggaatttttctcttgcgtntctggncctttttcaagttttccgacnttaattcgaaattttnttnnaattcttcnagcnnattantntgggggtttttgttcaaaaccattgggttttgccgggggggggaaaaaanggtcgganaatcccgaagggccgnccacggaaagttancttttttcaatcttattttggaccaccttnaataanaagggggggccaagnttggaaccccannggccaagncccttggaangaattggccccttattttagngnaaaaggggaaaggannntcntnggaaagaaaaaaggcttngttttttccttggttncccccccaccccccctttttaaccccccttaacaanggggggaaaaaggggaaaattc

SEQ ID NO: 6782 - DNA, 416 bp, Homo sapiens
  misc_feature 146, 299, 309, 323, 371, 400, 416: n = A,T,C or G
cccttagcgtggtcgcggccgaggtacctgggaccacaggcacatgctaacgcacccacttaatttttttattcgtagagccgaggtctcactatgttgcccagactggtctcaagctcttgggctcaagcaagtcctcctgcctnagcctcccaaagtgccagggattacaggtgtgagccaccacacccagtccaaaaagtggattttctaattccatagtttcttctacatttcttaactggaattttgtaaggaagagtttatccttattcatttatttacccatttacttgtanggagccattngtttcataaaattnttaaaatccttatgggggtggtagtttaggctacctggtaaaattttngatggcaccattatttttttttcccaagnattttcaaattaaagn

SEQ ID NO: 6783 - DNA, 448 bp, Homo sapiens
  misc_feature 22, 36, 59, 204, 416: n = A,T,C or G
cccttagcgtggtcgcggccgnggtactactctcantgttggagatcatcaaaatacanttggaccagaccctttggaaataattctgtgtctcaaatgccctgtggagcacacactatcagttgatggctatggaattttccaacatcagctaaagagaaggagtggtgacttccaagcttcatgcagaaccggacaacaganattgagagggaaatttctatgacagacgagagaaagaagaaaattgctggaataatgaccttgaatagaggaaatgggatatcatctggtaagcaaatagagaagctggctttagataagagcctggacaattcattcatagaatagcaaaaaaggcagaatttatgtccatagatgcaagtggtatagtagatatagtgatgggagtttgnaaaagttaccttctaattgctattttttttaa

SEQ ID NO: 6784 - DNA, 418 bp, Homo sapiens
ccctttcgagcggccgcccgggcaggtacgcggggacatcaatgcagagtccctctgtgaatttacaacacccaacacccatgagttcagtccttaagaaggaaaattgacaagtatttaattggttggacattgcataaaagaggtccatatccaggctaactctagaaattttattctcaaacttagttggcctctttttcttctgtcagaggaccattcttagtggcactggggaaatcttggcacccagaagaattcaactgcgctcactgcaaaaatacaatggcctacattggatttgtagaggagaaaggagccctgtattgtgagctgtgctatgagaaattctttgcccctgaatgtggtcgatgccaaaggaagatccttggagaagtcatcaatgcgttgaaacaaa

SEQ ID NO: 6785 - DNA, 487 bp, Homo sapiens
  misc_feature 479: n = A,T,C or G
cccttagcgtggtcgcggccgaggtacatagggatacttgagcttttagaattacttttttatatttcccatcccagagttttactttttggctgggctgagaagcacttcatttagtcagtcagtaatcatttactgaatgctataagcatcaatgggtatggggcacaggagagagatgaaatagagtctttacccttagggagctaacaacataagacaaattagtgtgtttggggaacattgagtaaagagcaatcatttgaagaggaatgtgcaaaataaatttattagaccaattgtaaatgatttgagattctttattaagaattattcatatcactgttcccattattaatctaatgtctgtagatagtatgaagtaacaggcttcctttgccccttctaaaccagtcttaatggagaaccactaatttaagccatggaagcttcagtggtttgatgctttttatttttanggttttgc

SEQ ID NO: 6786 - DNA, 402 bp, Homo sapiens
cccttagcgtggtcgcggccgaggtaccttaccacatttacagaataatacagataaccaaaagatcatttcaatagataagtctttcatcaaacttaaaacccacttatgattttaaaaactcttcttcaattagaaatgagaaaggatagttcttaacctgactaaaagcatctataaaataatccaaaagttaacattatcttaaatgagcaaacattggaagcattctctttgaaatcaggaatggcacaaggaaaaaacttattaccacttttgttcataattgtacaaaacactatttcaaatctaggccttctgacagaatccaatatctatttttatacttacttttctttctactaagttctttaataaaattatgaatcagaaagcaagtac

SEQ ID NO: 6787 - DNA, 297 bp, Homo sapiens
ccctttcgagcggccgcccgggcaggtacatctacctaaaggactattatgtggaataatacatactaatgaagtattacatgatttaaagactacaataaaaccaaacatgcttataacattaagaaaaacaataaagatacatgattgaaaccaagttgaaaaatagcatatgccttggaggaaatgtgctcaaattactaatgatttagtgttgtccctactttctctctcttttttctttctttttttttattatgggtagctgtcacatacaacttttttttttgagatggg

SEQ ID NO: 6788 - DNA, 372 bp, Homo sapiens
cccttagcgtggtcgcggccgaggtaccagttgtaaaattaccaggaaccgccatgcctcaagatcgccctgttttctggcttcatcaatgactgcatgcagtgcaccaccctgtccactacgtgatgctgtaggattaagtctcacagtgggcggctgaggatacagcgccgcgtcctgtgttgctggtgaattagacgccatcgctgtgggttgctggtatggtgccgtgctatttggcacaggacacaccgcttgaggtctgtattgaacctctgaaggaggccgatactgaagctcggttggcagccggtattgataaactaccaagcggttgggtcttattttctaccggctgatattgtggatact

SEQ ID NO: 6789 - DNA, 364 bp, Homo sapiens
cccttagcgtggtcgcggccgaggtacctgactgtggctcagatctgcgtcgcagcagcgagagaagaaatcactccatatccgatgagaggaagggtggcacagagatggtgtctacaattagagacatttctgactccaccttagcctaagcaaactttatatactgagtaacatttgaaggttgtcttttaatggtggggggtgttttttcctttttaaactacagtgcttgcacaagagagggagggactcagaaaaggttagggcaggtgagggagacagtatgatggcctgggatgacttgagtccatcatactattgcttggcaggtgtcctcccccatgtttgattcaaattccat

SEQ ID NO: 6790 - DNA, 301 bp, Homo sapiens
  misc_feature 134, 142, 276: n = A,T,C or G
cccttagcgtggtcgcggccgaggtacatctacctaaaggactattatgtggaataatacatactaatgaagtattacatgatttaaagactacaataaaaccaaacatgcttataacattaagaaaaaccaantaaagatnccatgattggaaccaagtttgaaaaatagcattatgccttgggaggaaatgtgctcaaattactaatgatttagtgttgtccctactttctctctcttttttctttctttttttttattatggttagctgtcancatacaactttttttttttttgaga

SEQ ID NO: 6791 - DNA, 482 bp, Homo sapiens
  misc_feature 157, 161, 164, 181, 193, 210, 215, 230, 249, 312, 324, 335,356, 382, 390, 401: n = A,T,C or G
cccttagcgtggtcgcggccgaggtaccacaggcttgaatctgtcctccccaggagctagtccattgccgcctcggttgggcatggggtcattgacatctctgtcttccctcatcctgctcagcggggctttgggtcgtccggcccgccggggtcangggnaangaccaggaggaaccacntagccccaaggnaagcattcccacccacncagcnaaaactgcagttaangatgaaatccaattcttcnagccctcatctatccttcccggccgggcgaagagaactcacaagccccgggcgcaagcccgcnccctcgcgtacnctgcacccggngcgggcccgctttcgaaaagngggcgaaatttcccagcacacttggncgggcccngtttaacctanggtgggaattcccggaagccttcggggtacccaaaggcctttgggccgttaaattccattggggttccattaaggcttggt

SEQ ID NO: 6792 - DNA, 369 bp, Homo sapiens
  misc_feature 214, 327, 344: n = A,T,C or G
cccttagcgtggtcgcggccgaggtacaacattggattatttctttgggctgtttccaactcaagattctgttatttcattataagcattttgaggaaggcagttggtataaaggtgaccttagtaataaaagtcagtgtgaagtctaaagaaattccacaatgaatttaaagacaagaattttagggacaaggatacagaaatttgcctagtnacttgcacacagcagatggtaaatatttattgactcaatggagtaatgttaaaaataaggtttcccatggactgtgtgagggccaggcatacttaacatcctttgtgagaganaggatggaaaacccgantctactgtgaaagccacaagttttg

SEQ ID NO: 6793 - DNA, 541 bp, Homo sapiens
  misc_feature 523: n = A,T,C or G
ccctttcgagcggccgcccgggcaggtacgcggggagaaaaaaagggtggggagtgccctttcttgaaggaatcccttaagtgcacgtctcccgttttcttttcacatcaatgcagagtccctctgtgaatttacaacacccaacacccatgagttcagtccttaagaaggaaaattgagcaagtatttaattggttggacattgcataaaagaggtccatatccaggctaactctagaaattttattctcaaacttagttggcctctttttcttctgtcagaggaccattcttagtggcactggggaaatcttggcacccagaagaattcaactgcgctcactgcaaaaatacaatggcctacattggatttgtagaggagaaaggagccctgtattgtgagctgtgctatgagaaattctttgcccctgaatgtggtcgatgccaaaggaagatccttggagaagtcatcaatgcgttgaaacaaacttggcatgtttcctgttttgtgtgtgtagcctgnggaaagcccattcggaac

SEQ ID NO: 6794 - DNA, 407 bp, Homo sapiens
  misc_feature 350, 354: n = A,T,C or G
cccttagcgtggtcgcggcccgaggtacatttataagttttgaccttgagtcgtgttcaaggagaaagtgacattggaacttggaaaatttaaaaatgattctacttgaaaaatttgaccattgcatagaaatattagctatccgtctaatcttttgtaatcttagaaacaatcgtgaattgtttggtgaaaaatgaaaaaataaccatttcttatgtctccgtgaccttttatagaccaatgtcaccaacttttcctaagggtaattgtttcctactgtcaaaatagctcctagtgatataaaatcttaaaccaatcaatggaaggggaaaactgggtggaaaacatanggangaaaaaaatactggggataattttttcatcaccaaaggtatttggcattaaca

SEQ ID NO: 6795 - DNA, 321 bp, Homo sapiens
cccttagcgtggtcgcggccgaggtacttctataattactgcttcataaaaaagtggatttttccagctctccagttcagatgctattaacaggtaatcagatagcactgactaagtagaaatagattaagagtaatacctaaatttaatgtattttagcatattgaaatgagtatcatcagtgtatatttcatttatcactttgtctacactttattaggtggccttaatgcttgtcattgacaaatgttaactttcctcacaaaacctacactattcacttttttccagtatttttgccttccttattaaaaatgtttc

SEQ ID NO: 6796 - DNA, 569 bp, Homo sapiens
  misc_feature 63, 90, 91, 92, 141, 144, 146, 150, 151, 160, 161, 167, 169,172, 174, 175, 178, 179, 181, 190, 193, 194, 197, 204, 205,210, 221, 244, 245, 250, 251, 253, 255, 256, 259, 274, 278,287, 289, 303, 305, 311, 317, 318, 320, 323, 324: n = A,T,C or G
  misc_feature 327, 328, 329, 330, 334, 336, 337, 338, 339, 361, 366, 376,381, 383, 394, 401, 402, 403, 406, 415, 416, 422, 429, 433,437, 438, 441, 443, 448, 455, 462, 468, 472, 473, 475, 476,477, 482, 489, 500, 503, 506, 510, 511, 512, 516, 522: n = A,T,C or G
  misc_feature 524, 527, 529, 532, 533, 539, 547, 549: n = A,T,C or G
cccttagcgtggtcgcggccgaggtacgcggggggtccatatccaggctaactctagaaattntattctcaaacttagttggcctctttnnnttctgtcagaggaccattcttagtggcactggggaaatcttgcgcccanaanantgcnntgatctcannggagancnacnannccnncnttgtatttnttnnggnataaagnnacccngaattgtgagnggccctaataaaaaatattttannccttnncntnnggnccaagggcaaaaagnaagnatctttggnanaattatattgagangnattcanaccaanntnggnnagnnnncccntnnnntttgtaggtaaaagcccttggngaaanacccattttncaaancntttgttttttnccctttnnnggngggggggtnnaccccnacttttngggnaaanngantnttaanatccccnttttggncccccnccgnncnnnaaaanacacatntggtggatgtnccnatntccnnnattnaggagngnctncnttnncgagtnaaaattantntaccaacgccaaagtttttt

SEQ ID NO: 6797 - DNA, 380 bp, Homo sapiens
ccctttcgagcggccgcccgggcaggtacgcggggatcaatgcagagtccctctgtgaatttacaacacccaacacccatgagttcagtccttaagaaggaaaattgagcaagtatttaattggttggacattgcataaaagaggtccatatccaggctaactctagaaattttattctcaaacttagttggcctctttttcttctgtcaggggaccattcttagtggcactgggaaatcttggcacccagaagaattcaactgcgctcactgcaaaaatacaatggcctacattggatttgtagaggagaaaggagccctgtattgtgagctgtgctatgagaaattctttgcccctgaatgtggtcgatgccaaagga

SEQ ID NO: 6798 - DNA, 392 bp, Homo sapiens
  misc_feature 139, 238, 304: n = A,T,C or G
cccttagcgtggtcgcggccgaggtacatgggactacaggcacgccccaccatgcccagctcatttttgtatttttagtagagacagggtttcaccatgttggccaggatgatcttgatctcttgacctcatgatccgnccctcttggcctcccaaagtgctgggatcacaggcgtgagccaccacacctggccctctatttattctctttaaagagagagaaaactatgagaggccnaaattatttaattaaatctttaccttagcacaagggaaaaaatgggaatttgcctaatattaggtngatggaagccatacaccaatggaaccagaaaacaatcaccattttagttaaaaaggcaaaaaatttggagactttataaggctattat

SEQ ID NO: 6799 - DNA, 280 bp, Homo sapiens
  misc_feature 118, 130, 136, 142, 147, 156, 160, 162, 163, 184, 195, 204,211, 224, 245: n = A,T,C or G
ccctttcgagcggccgcccgggcaggtacaggaaaagccaaacaacaggcttcccttctctaattacaattttttcagcaccaaattacttagatgtatacaataacaaagctccccnatagaattatgncgaacnatgttntgaanatcaggcanagantnngatggccttatatcatgttgntttcttaaatnaagggccgncgggccngagatggatgganggaccggggatttgggaactnggaaacgagctgagggaagggagcctgtggaaata

SEQ ID NO: 6800 - DNA, 428 bp, Homo sapiens
  misc_feature 121, 191, 201, 219, 225, 230, 259, 282, 302, 318, 392: n = A,T,C or G
cccttagcgtggtcgcggccgaggtacagaaaaggtgaatctgtgttctgtatattctgcctaaggcaaagaaatgtttagctctctttaaaatagttccataattttttctaaaaagccnttgctttgaaaaaacttgtaaagcttcccatatcttggaggcattttcactttaaaataatttggataanatatgttatncttcttacttgggacatnttcatngtgtnttagcgggattgttcttcttaaaattctntcctaatttcatattagcctgcntaaccaccttccccggcaanagcctataaccattancaggatattgtaaaataaaagaaccttatttggatttttgaactatacctttttaccttgtaaaaaacccttcntgaggtggtttataaaccctcattttaaattctttt

SEQ ID NO: 6801 - DNA, 384 bp, Homo sapiens
cccttagcgtggtcgcggccgaggtaccatcgatccagatatacatggcctggactttctcaccctgaggcagggacatgtacccactgggtatccgttagaggtaagggagaggagaggattgatagagtgttgcaaaagtatagattattcattgagataaaggatttggtttccctgccatgagtattaaaaaaatttaagttttcccaagcttgcatctcttgaccaaatttcacataaaacattggaaggaggctgggtgccggtgggctcatgctttgtaatcccagcactgggaagctaaggcgggttggatcacttgaggtcaggagttcgagaccagcctggcccaacatggtgaaaccccgtcttcaccgaaaa

SEQ ID NO: 6802 - DNA, 405 bp, Homo sapiens
  misc_feature 98, 261, 369, 370, 375, 385, 389: n = A,T,C or G
cccttagcgtggtcgcggccgaggtacagtctcggggaacaagttaccaagagtggccttttatttccactgttcctaccatggcaaaatcatgtcantcattgatgttgggttcccacttactttccaaccctccccaaacccaaaagcctgggacactgatactccaccagccagaggtcatgtcagttgatgacatgaatgacagtatagggcaggtgcagctcagagtgagacaaattcttgccaatcattctgacngggaaggatgactctggaactagcaagagaagcactgaaggatgcctttcctgaccctcacatccaacaagggcctccaaatcctcgccttcctgatccatttgttgnngttgntgctggtganatanagccttgcttggtcac

SEQ ID NO: 6803 - DNA, 415 bp, Homo sapiens
  misc_feature 114: n = A,T,C or G
cccttagcgtggtcgcggccgaggtacagcctattatattcccacatcctgagaaaggtcatttctcccacacaccgacaaagtcacagacatcctgcacctgccactaggcancctcatcctacttgacatggcccatttctccagttttcttaatctgagactcccttcccttgttttttaaagataccgtgcttctccacatcctcatccttcaaggagcatattttgctcttaggatggtctttgggattcaagaatagaataataaatccaaacttggtcattcccattttgaagagatgcaagagggcccagtgaggacatccgcctccctgaaagtggtgctagacagagctgaggtcattgtatctgtgtatccacataggatttctcttaattcagcttgaattga

SEQ ID NO: 6804 - DNA, 734 bp, Homo sapiens
  misc_feature 188, 218, 266, 277, 294, 319, 414, 434, 451, 474, 539, 569,574, 597, 601, 612, 619, 636, 703, 732: n = A,T,C or G
ggcgacattggggccctctagtatgcatggctcgagccgggccgccagtggtgggatgggggatatcttgcaggaaattccgccctttaagccgtgggtccccgggggccgaagggtaccaattttttggtcaacggggaagttcccacaagaagccttgaagccttttttggaagccaagaacttcnttgaagaaaggtaatcaattggctttggtngtttggaaaaaggaaataccaaaccaagggaatttttaaagtttttcntctttttaagnaaaaattttggccaccntggaaaagaaaaagggccccggggnccgccgggttggggccttccccccccttgtaaaattcccccaaggccggccttttttggggggaaggggccccgaagggcccggggggggggggnaatccacccggaaggggttncaaaagggaaggaaatncggaaggaaccccaattcccttngggcccaaaccaattggggtggaaaaaacccccccggtccttctttaaattaaaaaaaaaattgnccaaaaaaaattttaaggccccccgggggnccaantttggggttggaacccgtttggnccanccccttggttnagggttnccccccagggcctttancctttaaagaaatttaagggggcctttgggaagggggccaaagggggaaaggaaaaaattttggccnttttgggaaaatttcccccggggggaaangg

SEQ ID NO: 6805 - DNA, 424 bp, Homo sapiens
  misc_feature 258: n = A,T,C or G
cccttagcgtggtcgcggccgaggtactttttttttttttttttttttttgttttcagattttaaccaggtgggtgctactgtagcacacggaagagcaagctcttaagggtagcatctatcaggttttcagatactaaacagaaatgagcacagtctgtacccgctaaaactgcacagctcgaccttcatggcgacagctcccccgcgtactctcaaaccatctctctggattattcatcctctgattctcactaanaactgagctctgtctgggcactttcactaacacacctgtctgataggctctttctcctaattggaaactctggaggttaatgaggtcctcatgttgttgcaagttttctacacttgacacacttggatggagactctcctctctagaccctctaagatgtttgaca

SEQ ID NO: 6806 - DNA, 442 bp, Homo sapiens
  misc_feature 395: n = A,T,C or G
ccctttcgagcggccgcccgggcaggtactgtcccaatataaaacagtaattatttgacctttgcactgtttgtctggtccttttcagtttgattgcatataaatgtggaacttgataatctctatatttttaatgcacttgtgataaactggcagcagggttagacattactttcaaagcttgaggtagaccgagtcagcatgctagacaggcttctctctctaaccaaaactgtaatcttcaggaccagcaaactcagcccaaggcagctaatccccccaaccccatcctccgcgccccgtgcggctgatcggcagccctgattcgccaatttgcctctctcattcactgatccaccagcctgactgctaagagctataagctttttagttgnttggtctttttaagcaagatgaaaaccttctattagggattttgggg

SEQ ID NO: 6807 - DNA, 376 bp, Homo sapiens
  misc_feature 71, 134, 266, 375: n = A,T,C or G
cccttagcgtggtcgcggccgaggtacctgcaacagtggctcaacctgttaggtctacgtattacctgcancacttaagcagaagtgccggctccaaccatatttttgtctaaattagcaccctcggctttggnaccaggaatgtatagtttgggaaggctgcgtgtgagtttaatgtgcaaaatgtgaacttctaatcactggtcaaccaaaacaaatcctccttctaaaggaagaaaataaaacccccaaagtcagcaggactntttaaaccaaatttatgtagttaacgaggattaggaaacaaggaatcctcagaaatgcttttcagggtaattaagcaatgtgggtattggccaattcaactgaccttana

SEQ ID NO: 6808 - DNA, 600 bp, Homo sapiens
  misc_feature 87, 122, 129, 216, 305, 306, 357, 362, 364, 443, 480, 491,503, 542: n = A,T,C or G
cccttagcgtggtcgcggccgaggtaccgcgggggagaagaaatagcaagtgccgagaagctggcatcagaaaaacacgagggggangatttgtgtggctgcagccgaggggaaggaccagngaaaagnatcttgcaattgggttgggggaaagggacccttgattggattaccaaggaagggtggaagaaaaaattaaagaaaaaggggcttgcnttggacttttacccattcttggaagggcccaccaccatcttgcttgaaaaaatggggaaggattaaatttaaaacaaccccaccttaannaaaaaccaggccaaaggattggaccaaattaattaaattgttcttaaaagntaagntngaaccattgggttttttttgccaccatttttcccaaggccccctttttaaaaattattcccaccaccaccaccaagggnaaagggccaccaaaaaaagggggaaaggccaccaagnaagaattcccntgggggggaagnaaaaatggcccccgggcccggcccaattcttttgggggntccaattcggaattggaagcccctccgcccccttggtggcccctgggttcccccgcct

SEQ ID NO: 6809 - DNA, 412 bp, Homo sapiens
  misc_feature 158, 284, 285, 290, 374: n = A,T,C or G
cccttagcgtggtcgcggccgaggtacttttttttactttggcaacaaatatttatacatacaagatgctagttcatttgaatatttctcccaacttatccaaggatctccagctctaacaaaatggtttatttttatttaaatgtcaatagttgttntttaaaatccaaatcagaggtgcaggccaccagttaaatgccgtctatcaggttttgtgccttaagagactacagagtcaaagctcatttttaaaggagtaggacaaagttgtcacaggtttttgnntgttngtttttattgcccccaaaattacatgttaatttccgtttatatcagggattctatttacttgaagactgggaagttgccattcnggctcattgattactttgacataactaggatccattat

SEQ ID NO: 6810 - DNA, 393 bp, Homo sapiens
ccctttcgagcggccgcccgggcaggtacgaaaaaatcaggctactaagcccactgttaatatagacgcagaccaattgttaggaacaggtccaaattggagcaccattaaccaacaatcagtgatgcagaatgaggctattgaacaagtaagggctatttgcctcagggcctggggaaaaattcaggacccaggaacagctttccctattaattcaattagacaaggctctaaagagccatatcctgactttgtggcaagattacaagatgctgctcaaaagtctattacagatgacaatgcccgaaaagttattgtagaattaatggcctatgaaaatgcaaatccagaatgtcaagtcggccataaagccatttaaaaggaaaagttcca

SEQ ID NO: 6811 - DNA, 296 bp, Homo sapiens
cccttagcgtggtcgcggccgaggtactccagcctgggcaacagagcgagactctgtctcaaaaataaataaaatagaataaaataaaataaaatgttatctaaaatcgatttctaatttgggaaacataataactaataccatttgattttaaaaagaattgtatcttaatcattaagctaaagacatagcaagaaaacaatgacatggtcacttgaagggtgtctcagccaacttttcatcatctaataagacacccttaaagtaattccagcagaaagtctcagaaattcatt

SEQ ID NO: 6812 - DNA, 609 bp, Homo sapiens
  misc_feature 63, 66, 117, 123, 136, 137, 138, 139, 140, 143, 147, 148,149, 151, 161, 164, 177, 187, 197, 223, 229, 254, 264, 266,282, 302, 307, 309, 333, 342, 365, 380, 382, 385, 391, 399,404, 421, 422, 431, 437, 442, 448, 449, 458, 462, 465: n = A,T,C or G
  misc_feature 486, 490, 492, 503, 519, 528, 532, 545, 551, 573, 581, 584,587: n = A,T,C or G
ccctttcgagcggccgcccgggcaggtactcggctgttcttctcttcacagcttctcgacggnaanggcttgactctccttgaacaccttctaggaagtaaattcaaacattccatnctatantaaaaaatcaccnnnnnagntttnnnantaagttacgntcnttcctttcctatncctttatatnttaaaaaggncccaggcttttttaatttaaattttnccttanacctggctttattcttccacaaaanaattaaaatncnttcatttcttttggcnccaaaaggcctttttcgtgnccttntntaaaaaaactttgcctccaatggnaaaaaaggnaaggggccttacccgtaaccttnttttccccccggttntnctntttccntttccttngattntttttgccctacttggnnttccaaacntgggtntcaantaaaannccaataacnaagnccnccccccttaagtttggccttngganangtaaaatttcnccgtaaaaggaaaaanggaattttngaangaaccccaaatanagggtnttacttaaaattggggggaagnaaaatatnttntgnaatttggggaaaaagcccccaa

SEQ ID NO: 6813 - DNA, 361 bp, Homo sapiens
  misc_feature 8, 34, 192, 237, 293: n = A,T,C or G
cccttttnagcggccgcccgggcaggtaccttcnaggatactactcccttatctacaagcaatccaaatgactaagggataatttccaaacacttctgcttgttaacccctcctctccagtgctgaaaaactcaagacaagtaaaagacacatttttaattaacatttggaagatggcttttgttagttaanagcaattgttaactctcaaaataaacaggaaatagtgccacttancaagttgtatgttccaaacccaagagtaatgggccttaagaaatccaagtactcantgcagcaaagaaagactacagacatctcaatggcaggggtgagaaataagaaaggctgctgactttac

SEQ ID NO: 6814 - DNA, 401 bp, Homo sapiens
ccctttcgagcggccgcccgggcaggtacctttcattggattgtccatggtgcatcgctttagcaagcggcgtgactctccgctgcccgtcatcttggccaatatctatctgctggttcctcctgtgctcaacccaattgtctatggagtgaagacaaaggagattcgacagcgcatccttcgacttttccatgtggccacacacgcttcagagccctaggtgtcagtgatcaaacttcttttccattcagagtcctctgattcagattttaatgttaacattttggaagacagtattcagaaaaaaaatttccttaataaaaatacaactcaagatccttcaaatatgaaactggttggggaatctccattttttcaaaaatattttcttctttggtttc

SEQ ID NO: 6815 - DNA, 423 bp, Homo sapiens
  misc_feature 1: n = A,T,C or G
ngcagaattcgccctttcgagcggccgcccgggcaggtactacatatgcagaatctgatacaatgttaatagactgattaaaatcttgttaacactgtaatgacggcaaccaactctgctctttgagtcaagtgatactgagttttgatgactcattcttttggccccggtgtaagccacttttccattgctggaaccatcagtaaacactgccagagcattttttaaaggcttatgtttggtaactttaggtaaaatccaagtagtcaattttaaaaactggaagatttttgttttggggtaacgattgtcaataattcccacaaaatcggcaagaccaatctgccatgcaccagaattgataaaggcttgtctaacctgttgcttgttgaaaggaacagtgattttatctgggtcatttcc

SEQ ID NO: 6816 - DNA, 502 bp, Homo sapiens
  misc_feature 181, 321, 332, 336, 385, 407, 417, 449, 457, 465, 466: n = A,T,C or G
ggcgaattggagctccccgcggtggcggccgcccgggcaggtacacacacccaacctctaccctgtggatgtcctagataagggttttctcttcacaaaggtaaatcaactctttgcctccttagggagggaaggaataaaggcattatttttgagacttttctgcagtccattctgcaangtattcagtaagtgggtaatccctccaacgtccaggactccaaacgagcagctgctccctaaagctcacccaccaatcctggccctccacctgctactggggtagaggcctgggctacagacacagaggctgggcttttncccaagcttgnccantgggtgagacatggcctttcagggagcctcaggtgggctttttttaacntgcacccattgaaagaatttcncaaaactttnggtggggagtttcaagttgtccaacaacatanccccgtcnttcccttnnggcccgcttcttagaaacctaggtggggattccccc

SEQ ID NO: 6817 - DNA, 559 bp, Homo sapiens
  misc_feature 11, 18, 33, 36, 45, 56, 213, 274, 321, 328, 441, 475, 487,491, 515: n = A,T,C or G
cccttttcgancgggccncccggccgggtcctntanccaaaggantaaaacagctntgtaaatcataaagaagaactaaaaatgaaccaaagtgaaaggataactttccaggcagtatcttttctattgtaaccctgttatttaaaggaaatactagtggatttctttcttaaatagggatggtaaaaacctttcttttcaaaaattacctcntttccttcaagttccctggcccttgcccaaaagaaacctcaaaagttggtaaaccttggtngaattaaaaaaataaaaccctttttcccccaaggggtaattaatttngggccangggtaattggttggttggtaaaattcttccaaggaaattaaccaccaagggttgaaccaattaggaattatttggaattaattggaacaaaaccttggggttaaaatggggtngggaattttcaatttttaaccaattttggttttnaccaccttttcnttantggaccccagggccccttttaaangggggaaaaggggttcaaggtttttttttttaaaaaaaaaaccc

SEQ ID NO: 6818 - DNA, 647 bp, Homo sapiens
  misc_feature 31, 128, 129, 130, 135, 148, 154, 162, 163, 169, 170, 171,178, 182, 190, 205, 212, 232, 246, 250, 256, 260, 303, 307,311, 316, 318, 320, 322, 328, 339, 345, 350, 352, 354, 372,391, 398, 399, 411, 418, 421, 426, 440, 441, 449, 460: n = A,T,C or G
  misc_feature 487, 491, 497, 505, 513, 515, 524, 525, 535, 544, 549, 553,562, 569, 571, 585, 586, 596, 603, 610, 616, 634: n = A,T,C or G
ccctttcgagcggccgcccgggcaggtactnggatcaaatggctacattaattggtcagggaagattatgaataataacattgtgtggaaatgacccagataaaatcactgttcctttcaacacgccnnncaggntaagacaaggccnttttantcaaaatnnctgggnnngccattngggnaagatttngggttccttttgccncgaatcntttgttgggggaaactttanttttggaaccaaanttcnggtgtnaccncccccaaaaaaaaccaaaaaaaagatttcttttccccaaggtntttntttnaaaananantntggganccttaaacctnttgggngaatntntngtaaccactttaaaaaangggttgtaacccccaaaanatctatnnttatggggctcnttttttnaantaganaaaagtggtccttnntttggggnccaagaatggntgttataagccttgggaattgggggtnttcncccaangccaaaantcgggggnanaaaaaaggnnggggggcttnttaacccanccgcngggnggcctcaanaaaaaangnaaaattggaagggnncatttcccanaaaaaancctttcnaggttnattccaaccttttgggancttccaaaaaagg

SEQ ID NO: 6819 - DNA, 387 bp, Homo sapiens
ccctttcgagcggccgcccgggcaggtacaaaatcgcttcttgacctgcacaactttctgatttgatgagttcaacagaaaccaactcaagggagaagaataaagacattgttgaacttagactttgacaagataagcaaaaagaaaagcaagagatatggaactgaacttccctttggcaaaaaatttagaaaatgataatgaggaacatcgatttcagcataccttaagccttttgaacagacttgtcgatactctcttggaaaagtatttttaaaaatagaattgaatatttttaaactttcatcccaatagaaagctaaagttaatgaggaaacttggattcatttcacaaaacgttgcttgttgggagtgcaatggtgcgat

SEQ ID NO: 6820 - DNA, 607 bp, Homo sapiens
  misc_feature 19, 25, 33, 77, 80, 92, 118, 127, 131, 143, 149, 155, 156,163, 172, 174, 175, 176, 180, 192, 231, 238, 251, 254, 255,263, 267, 283, 303, 304, 310, 312, 314, 318, 319, 344, 351,352, 357, 364, 365, 368, 383, 386, 387, 394, 399, 407: n = A,T,C or G
  misc_feature 430, 433, 439, 442, 469, 475, 480, 488, 489, 502, 506, 507,510, 513, 514, 517, 518, 524, 526, 529, 544, 545, 558, 562,563, 565, 566, 567, 571, 592: n = A,T,C or G
cccttagcgtggtcgcggncgaggnacacacangagaactgaaatggcccaaacccagaaagaaagcccaactaganccncagaagaacgcntctagggacaaataacccgatcgagngaaaagaangggncctcccttggtngcccanccggcnngaatatnggaataggncnnncatnccaaatccggcnaaggcagaaaaaagccccggtttccttttcataaaaagnccaagcnaccaaagggcaancgnngggaccgnaatnggggccaaaaaaaatnaaaggaaccccaaaccaacnntccaantntntggnnaattacctcttttttggaaaaaccnaaaattnnggganccctatnntgnggaggaaatccccanttnnggggggnggacnaggaaccnattcctaggaaccattccttaantcngggggnagngggaaaaaaggaattaaaaattttttncatgcnggaanatccaaannttacccccgggtnaatnntanttnnaannatactncnaangggtccattggaacnngaaattaccaatnaccnngnnnggtntaccctttctgggtccccaanatgggaacctttttt

SEQ ID NO: 6821 - DNA, 361 bp, Homo sapiens
  misc_feature 6, 7: n = A,T,C or G
cccttnncgtggtcgcggccgaggtacaagcttcatttgccacaaaactcacaaaaaagtaattgattaaagaatatctcttttatgcaaaatatacattttaggatataatttaattgatattctactatatactgacattgctccttgatcattgaataaaaaaaatactctcattgccagaattatgtttttgtaatatttataattgaggtaataatgataaaagacttaaactatgaataatgttggtgagttccatttaagctataacaatttcccagaactaaacaaatatgtgactaaacataggtcatttttgataaatgaatactaacaatttcacaacataattgacaag

SEQ ID NO: 6822 - DNA, 404 bp, Homo sapiens
cccttagcgtggtcgcggccgaggtactacatatgcagaatctgatacaatgttaatagactgattaaaatcttgttaacactgtaatgacggcaaccaactctgctctttgagtcaagtgatactgagttttgatgactcattcttttggcccggtgtaagccacttttccattgctggaaccatcagtaaacactgccagagcattttttaaaggcttatgtttggtaactttaggtaaaatccaagtagtcaattttaaaaactggaagattttgttttggggtaacgattgtcaataattcccacaaaatcggcaagaccaatctgccatgcaccagaattgataaaggcttgtctaacctgttgcttgttgaaaggaacagttgattttatctgggtca

SEQ ID NO: 6823 - DNA, 624 bp, Homo sapiens
  misc_feature 148, 210, 229, 249, 275, 287, 298, 308, 315, 319, 325, 351,355, 418, 425, 429, 444, 459, 471, 476, 493, 516: n = A,T,C or G
ccctttcgagcggccgccgggcaggtaccaggaaatcgtcctggaagtgtaatccgtgtatatggtgatgaaaacagtgataaagtgactccagggacatttataccctattgttcaatggcacatgcacaagcttttggctttcccnttgggccaacccggggtatgccttggtggaaaaattccttttgtgggccaagttccccaggngttcaaagttcattcaagnccccaccaaaaggttatccnaggtaagtttgggcaaccgggattcntggaccgggggnttggaacaaanaagccaaggngtcccanttcnttgtcnaccaagggaaggccccttggggttangttncaaggaaccggccccccttttggaaaaggttccttaattggccttttggttccaattccaagnttggggnaagnggaagtaaggggggnccttaaccaattccntaaccttttacnccggnaaaattggggggtttgnaattggaaaaagggggttggggnaaggaaaaattccaaaggaaaaacctttttctttttggggaaaggaagggggaatttcctttttctccaaccttttgggaaaaccccttttttcttgggttccaaccc

SEQ ID NO: 6824 - DNA, 446 bp, Homo sapiens
  misc_feature 93, 145, 151, 163, 180, 188, 193, 202, 211, 245, 248, 280,281, 284, 301, 304, 307, 324, 330, 421: n = A,T,C or G
cccttagcgtggtcgcggccgaggtactttctaactgagccctctattttctttattttaataatatttctccccacttgagaatcacttgtntagttcttggtaggaattcagttgggcaatggataactttttatgggggcanaaaacnatgtcttattantagtggaacaaatgaanaataacanccgtnattttcagntattttctntattcctctaaaattccacttcttttaacactantgncttaacccaccttaaatgttgtattgaaaaannatntccctaaaaaaggttanaantgnactatttaaaaagtcantaatantttgtctgccaattggtaatattattttaaaggctaggcccggaataacctttttaaaaattaaaaaaaattaccccaaccttggttttanccaggaattaaaaattggggggggc

SEQ ID NO: 6825 - DNA, 519 bp, Homo sapiens
  misc_feature 110, 134, 147, 176, 182, 185, 249, 253, 261, 268, 277, 286,289, 345, 354, 408, 411, 415, 416, 417, 422, 425, 427, 439,440, 444, 459, 460, 481, 490, 505: n = A,T,C or G
ccctttcgagcggccgcccgggcaggtacgcggggagaagaaatagcaagtgccgagaagctggcatcagaaaaacagaggggagatttgtgtggctgcagccgaggganaccaaggaaagaatcctgcatggntgggggaaggganccttgattgaataccaagaagggtggagnaaaatnaangaaagggcttgcctgaacttttaccattcttgagggcccacaccattcttgcctggaaaatggnaagnattaaatntaaccantcacctagnaaaaaccangcnaaggaattggaacaaattaattaattggttcttaaaggtaagtttggaaccattgntattttttngctaccattttttcccaggcccccccttttttaaaaatttattctcaaccaccnacnaacnnnggggnaangnccaaccaaaaanngggnaaaaggccaaccaannaggaattcccccttggggggnaagaaaaanttggccccccgggcnccgccccaattctt

SEQ ID NO: 6826 - DNA, 399 bp, Homo sapiens
  misc_feature 369, 381: n = A,T,C or G
ccctttcgagcggccgcccgggcaggtacctattactacattctaaaggacgaaatttcagggattaaaaacaaaaacaaagaaataaaaacaatccaatcctagttccttaaggaacgttttgagtaaaggttggggcggacagacttagaccacacaaactcagttcagtgtgatgtcatgacaggttgtgatggggacatgaagaatctgcatgtgcccctgtactacaaaacctgaaccagtctcagcatagatagtagtaatagaaagaaatgccgctcctttctgtgctttaattagttgttttccaatttctagtgtcacgaaggctgtgccatttagaactatgtcagttatgggtttttnccaaggcattangagaaagtctttcagtag

SEQ ID NO: 6827 - DNA, 594 bp, Homo sapiens
  misc_feature 136, 144, 147, 176, 220, 245, 255, 278, 307, 359, 377, 382,391, 421, 423, 452, 461, 464, 468, 501, 507, 526, 550: n = A,T,C or G
ccctttcgagcggccgcccgggcaggtactgaggctgtatacagccacagcctctccccatccctccagccttatctgtcatcaccatcaacccctcccatgcacctaaacaaaatctaacttgtaatttcctttngaaccatngtnaaggccatacattaatttcctttctggcnctggagaaagcctcttttccttggtcttcttaaaattccttagnaaatggatggtaaaaggtcttctgnaaataaaagntgtggacctattctttacctttncattggccaaaaaggaaaggggggaccancattattggagaatttccaattcattcaaccattggaaggaccaagccaaanataacctaaaaaaagggnggttnaaatttttnggattttaattaaaaggaaggttttttaangnaataaaaaattaattaatttggaaaaaantggccaaanggnaagnccccaaccaaggtaagggggggaaaattgggtnttttanttggggggggccaaccggnttttttggtttataaggccccctngggggggaattgggttggaaaaggccaaaaaagggggcccaagg

SEQ ID NO: 6828 - DNA, 389 bp, Homo sapiens
ccctttcgagcggccgcccgggcaggtacatctacctaaaggactattatgtggaataatacatactaatgaagtattacatgatttaaagactacaataaaaccaaacatgcttataacattaaagaaaaacaataaagatacatgattgaaaccaagttgaaaaatagcatatgccttggaggaaatgtgctcaaattactaatgatttaagtgttgtccctactttctctctcttttttctttcttttttttttattatggttagctgtcacatacaactttttttttttgagatgggggtctcgctctgtcaccaggctggagtgcagtggcgcgatctcggctcacttgcaacctccacatcccatgttgaagtaatttctttc

SEQ ID NO: 6829 - DNA, 390 bp, Homo sapiens
ccctttcgagcggccgcccgggcaggtactcccagctactcgggaggctgaggcaagagaatggcatgaacccaggaggcggagcttgcagtgagctgagatcgcgccactgcactcctgcctgggtgacagagtgagactccatctcaaaaaaaaacaaaaacaacaacaacaacaacaaaaaacaaccagagaaatagcacttgttaactacaattgtgactctaggtaaacttgggccttaatatggttagacaagaagggttttaggtaacttgcctttttagatcctatttaggccttaattagtctatatttctacatttcttgccaccgatgggaaattacctagaagaaagtggggattaatttctttgtttgtggggggga

SEQ ID NO: 6830 - DNA, 310 bp, Homo sapiens
  misc_feature 108, 205, 274, 297, 303: n = A,T,C or G
cccttagcgtggtcgcggccgaggtactgtcattgaggattacagaaatactttgcatcaactacagatgtctcaaaatagaattctttctagctcattcagttttgntagaaacacttcatgttctccaaaaaagaaaagcacctaacgaaaagcatgtcctattcatgctagcaagaaatgaatcccaaagggcacgcaccangaaccaaagtaaaagaatgtcagcaaaacaggacccatcttttatcatcccaaactgctattttccatntcttgactttctgccaaattatnctttantctttcc

SEQ ID NO: 6831 - DNA, 299 bp, Homo sapiens
  misc_feature 133, 140, 142, 143, 145, 149, 151, 152, 159, 165, 192, 218,220, 229, 239, 253: n = A,T,C or G
cccttagcgtggtcgcggccgaggtaccctgatccagaactgtggggccagcaccatccgtctacttacctcccttcgggccaagcacacccaggagaactgtgagacctggggtgtaaatggtgagacgggntacttcnanntntttncnnatacctnttttcnaattatatccatagctcacctttattntgaattaaccatttatcaagagtgcncntgaaaagantagaaaaaantaaaggagcccatnaaaaaaaagttccctggcaagtgggagggaggacatgatgttggga

SEQ ID NO: 6832 - DNA, 240 bp, Homo sapiens
  misc_feature 12, 13, 71, 84, 88, 109, 144, 151, 184, 193, 211, 226: n = A,T,C or G
ccctttgagctnncgcccgggcaggtacttttttttttttttttttttttttttattctttcatggacatntgttgcccatggncaantaaatttttaatgacacatantcactacacacctgagcggctggagaagcctgttngagaaanacaaagagctgcattaatactacattgtcaaanacaaagacnaacatgagacatgcgatntgagttttaaaaggngagaagagcaaaaa

SEQ ID NO: 6833 - DNA, 286 bp, Homo sapiens
ccctttcgagcggccgcccgggcaggtacgtccacggtcagccttgcgacatttaaagttctacaatgaactcactggagatgcaaagaaaagtgtggagatggagacaccccaatcgactcgccagtctacaggtgtatccagcagctccaaagagacagcaaccagcaagaatgggccatagtgacgatggtggttttgtcaaaaagaaaagggggggatatgtaaggaaaagagagatcagactttcactgtgtctatgtagaaaaggaagacataagaaact

SEQ ID NO: 6834 - DNA, 388 bp, Homo sapiens
ccctttcgagcggccgcccgggcaggtactgggaatacaggcatgagccaccgcacccggccagaaattataaatctaaccaggattcccaaacctacaatacaatgaagtatcatttctctcttataggtttttggttttaaccaatctattttaaaaggggcaattcaaggattgtggtttatatggtggatttctgttgaatatgatcaaatgttcactggagaacaagcaataatttgcaaaaggcatatttatgccttacattaaatgtggatcctcttctaaaactagaataagcatcagttcagtcacccaacgtgggaagaaagaatagaggtggcaagaaatgaagctcaagtttgttttgaaacaaaagaagaaactt

SEQ ID NO: 6835 - DNA, 419 bp, Homo sapiens
  misc_feature 1, 9, 10, 68, 70, 72, 132, 152, 166, 170, 175, 203, 206,219, 226, 239, 241, 248, 251, 258, 278, 299, 302, 306, 311,312, 317, 319, 331, 338, 344, 351, 353, 358, 372, 386: n = A,T,C or G
ncctttccnncggaccggccgggcaggtactcaacaccaacatcgatgggcggctggataatacgccntngncatcactgccattaagggtgtgggccgaagatatgctcatgtggtgttgaggaaagccanacattgaacctcacccaaanaggggcgggtgagnaacntcacntgtagggattgtacggttggtaaccgtngtnatacacccatttnttgtcantaatccacgccangnaccttcnggncgcttancacgcctaagcggtcgaaanttccatccaccacctgtgtcnggntcgntttanntaagntntgattctcggantctacgngttacncaaaagncnttttnggcgggttaaattncattgggttccaantaaggccttgatttttcacttggtggtaggaaa

SEQ ID NO: 6836 - DNA, 290 bp, Homo sapiens
ccctttctagcggccgcccgggcaggtacatctacctaaaggactattatgtggaataatacatactaatgaagtattacatgatttaaagactacaataaaaccaaacatgcttataacattaagaaaaacaataaagatacatgattgaaaccaagttgaaaaatagcatatgccttggaggaaatgtgctcaaattactaatgatttagtgttgtccctactttctctctcttttttctttctttttttttattatggttagctgtcacatacaacttttttttttt

SEQ ID NO: 6837 - DNA, 356 bp, Homo sapiens
cccttagcgtggtcgcggcccgaggtaccagttgtaaaattaccaggaaccgccatgcctcaagatcgccctgttttctggcttcatcaatgactgcatgcagtgcaccaccctgtccactacgtgatgcttgtaggattaagtctcacagtgggccggctgaggatacagcgccgcgtcctgtgttgctggtgaattagacgccatccgctgtgggttgctggtatggtgccgtgctatttggcacaggacacaccgcttgaggtctgtattgaacctctgaaggaggtcgatactgaagctcggttggcagccggtattgataaactaccagcggtcgggtcttattttctacc

SEQ ID NO: 6838 - DNA, 302 bp, Homo sapiens
cccttagcgtggtcgcggccgaggtaccttgttaacaatatgtttgcaggcagtatgtttggtaaaagtcatcgccattctccattctcgattaaccaggggctcaatgcactgtggaaagccacaggaacctctgcccaagaaagcctggctgttgtgggaagtcagggaccccggatggagggaccagctggtgctgcatcaggaaacataaattgtgaaagatttcttggacatttatcaagtttccaaaattaatacttttataattttcttacacctgtcttactttaatctcttaa

SEQ ID NO: 6839 - DNA, 387 bp, Homo sapiens
  misc_feature 325: n = A,T,C or G
ccctttcgagcggccgcccgggcaggtactacatatgcagaatctgatacaatgttaatagactgattaaaatcttgttaacactgtaatgacggcaaccaactctgctctttgagtcaagtgatactgagttttgatgactcattcttttggcccggtgtaagccacttttccattgctggaaccatcaagtaaacactgccagagcattttttaaaggcttgtgtttggtaactttaggtaaaatccaagtagtcaattttaaaaactggaagatttttgttttggggtaacgattgtcaataattcccacaaaatcggcaanaccaatctgccatgcaccagaattgataaaggcttgtctaacctgttgcttgttgaaaggaa

SEQ ID NO: 6840 - DNA, 425 bp, Homo sapiens
  misc_feature 154, 167, 191, 213, 216, 222, 229, 235, 239, 252, 270, 287,291, 294, 303, 309, 311, 312, 328, 350, 378, 393, 417: n = A,T,C or G
ccctttcgagcggccgcccgggcaggtacgttcaattctgcttaatcatcagatgatgcatactggagagaaaccttataaatgtaatgaatgtggtaaagcttttatctgaaaggtcaaacttgggttttacccatcaagagtaaaccatacntggtagagtaatnccataacaaatgtatggtaattgntggctaaaggctgttttgggcnggncggatnctttgcnctcacntaanacaccaaaccganattacatttcttagctgnaaaaaaccctctaatanaatngtnaaatgtagntgttgngnnaatatacttttaccanataagtccgcttcaagggcccntccacttaaaacaatacaagaattttanaaccattgccttggntagtaggaaaccctttaccaaacntaaaaacc

SEQ ID NO: 6841 - DNA, 341 bp, Homo sapiens
ccctttcgagcggccgcccgggcaggtacatgcaggtcacaggggatatgatggcttagctttggctcagagacctgacaggggcaatctacctagctctgttgtaaaatggggatcctaatataacctcttgggataggttgtaagcagtggtggtctggtaaatgttaacaatctagtgtgcagtgtggggagaggaaagtccggatttgtaatatttgctgatttctgtggtgtaaatactcccatcactggcaattttaaactccaatgtaacgtcactgagcacagatttgggaaaaggtgcatggcaagtacctcggccgcgaccacgctaaggg

SEQ ID NO: 6842 - DNA, 397 bp, Homo sapiens
ccctttcgagcggccgcccgggcaggtactgattccttggacagccttagctcccgaactgaggctgtctccccaactgtgagtcaactgagtgcagtatttgagaacactgattctcccagtgccatcatttctgagaaggctgaaaacaatgaatactcagtgactgggcattatcccttgaatttaccatctgttactgttacaaatcttgacacatttggtcacctgaaggattctaattcctggcctccttcaaacaagcgaggtgttgatacagaggatgctcacaagagtaatgcaactccagtacacctcataaaagaagcatactgacacttttatgttcatcttaaaaaccagaaacttctaggaaatagcaacaatttgtttttta

SEQ ID NO: 6843 - DNA, 383 bp, Homo sapiens
ccctttcgagcggccgcccgggcaggtaccacaatttataaagaaaccaatgatctcaggagatatttttggtctgtcttccctgaaataagaattgtgttttggaaatctaaagggtgttctgttccaaaaatcttaagttattagttatttccacatcaaatagcaaacactacaatacagccagggaaagaggatcttccaaacaaacaaaaaaggtatgttttctagattgctccactactaaatgagaactttttttttttgaggcataattataaatcaagttcttgatcaattttacaaatctttcccagtgacaagctcatatttccaataaaaaagtgctcttttgctttcctaaggccacactaaatctccct

SEQ ID NO: 6844 - DNA, 387 bp, Homo sapiens
cccttagcgtggtcgcggccgaggtacaagcgcaagccactgtgcccagctgtcagacgctgagttttaattatgcaccaaactccagcccgcagatcctcttcaccaaagcccctggctggtctagcccatcatgacttctctaggaacagtccttctttaggactataaagtattaacaaaagtctgtagattaaggagcctgcataaagaattctggatacaggcccctgtctttccaaagttcctctccaatatcccttggggtcctcatgtttttgaagcagcttcactctgcacaggcagcaggaggttgggggagccatagctctgggccacggaggcagatttatttggatgataggactaatatttgtgtaacctgct

SEQ ID NO: 6845 - DNA, 318 bp, Homo sapiens
  misc_feature 8: n = A,T,C or G
ccctttcnagcggccgcccgggcaggtaccaatctctgggctgccctagtgacttttttgatacctcagagtcctattgaagaaccaggtggaatgattgtggtaagggctatagtgctggagccaaacaccccagcaagaaaactctaaaaggacaaaagataaggtagtgcctccaaggtggcacctgaaccctctcaggctactttttggtttctactaacaaacctgagggaaggaactgcctcccaaagtgcagaaccagattcttaactgccacagactcttgtattatgtaatttatatacagaacacaaa

SEQ ID NO: 6846 - DNA, 315 bp, Homo sapiens
  misc_feature 134, 209, 220, 311: n = A,T,C or G
cccttagcgtggtcgcggccgaggtactgttacaaacggagagaataaaagggcaaactgaaataatagatcctggaatagcacagacactgacctctgaccacagaccaaaagttagggcctagttgtatttnttagaaatacaaagaaaacaagtttagaatcatagaaaacactgttaacacattagcctgggaggtggtactatnggaatgagacncagcacgagccgtatcccctcatgctacctggctgcagccccagctgtcctctggagaggtttgctgagctggttggccctgtgatccctnaaga

SEQ ID NO: 6847 - DNA, 570 bp, Homo sapiens
  misc_feature 125, 139, 147, 150, 182, 243, 389, 400, 499, 519: n = A,T,C or G
ccctttcgagcggccgcccgggcaggtacataaatatcaggaaagtttaaatacttttattttactattttaatcttttccttaaagatgcagggtttcatactacatcaattaggccggacatnacaaaaaatggacnttaaatanggnaactgaatattaaaggaatacttcgataccantgacatcaatcatctgggaacaaacctgaaagttttctacccttttgctccaatttttctngaataaggtggatggtttttattcaattggttccttggcggaatggccccgaataaaaattaccaatttgggccttgaattttaccttggccattaaccaaaaattttttttcccaaaccttggaaaaattaattggttttggttnaagtttttttngaaccttttttttttttttaaaccaaaaccaagtttctttttcaaaaaaaggaatttttttttttaaattccgcccttccattggaatccccaaccaanccaaaaggttggaagggggnttggtaaagggccttggaagaaaaaagaaaatttggcccaaaaaggcccct

SEQ ID NO: 6848 - DNA, 387 bp, Homo sapiens
  misc_feature 176, 208, 212, 216, 217, 220, 231, 239, 240, 241, 244, 245,246, 255, 256, 266, 268, 270, 275, 276, 280, 281, 284, 285,286, 288, 294, 297, 298, 299, 300, 302, 303, 304, 309, 311,312, 318, 319, 321, 325, 336, 338, 346, 347, 352, 358: n = A,T,C or G
  misc_feature 359, 360, 363, 364, 365, 366, 370, 376, 378: n = A,T,C or G
cccttagcgtggtcgcggccgaggtactcttttttttttttttttttttttccgcctccccaaagctttatctgtcttgactttttaaaaaagtttgggggcagattctgaattggctaaaagacatgcatttttaaaactagcaactcttatttttttcctttaaaaaaaccatngcattaaaattcccaaattccttttttaaaanaccnttannctnttttaaaaaangggcactnnnttnnnttttttttnnggaacccccntngnggggnnggtnnccnnngntccctnccnnnnannnaaaangnnaaaaanncncttntaattaaaaanantttttttnnccctncacagnnnggnnnngganaaaaantnttttttttt

SEQ ID NO: 6849 - DNA, 389 bp, Homo sapiens
  misc_feature 46, 213: n = A,T,C or G
cccttagcgtggtcgcggccgaggtaccctggaagggacatctaangctgccataagaaaaatgactggcagctaaaaatgttgtagaagttggaatcctgatggaatcataatgagtcagctaaaggaataatgattcttgccgctgtaagaataccacaatgactagtcaggatttaaatgggtagcaagttgcagtagggagaagggcanaagagtggcttcacacaaaattacaaagtcctatggaatcccattgttgcctctcagctgttcagttaagtcaaaattacaaatatttacttatttatctgatcacctgaaaaatattgagtgttaaggcttgctgtgccagacacttggctaggtgtaggataaaaagaaatagg

SEQ ID NO: 6850 - DNA, 527 bp, Homo sapiens
ccctttcgagcggccgcccgggcaggtactacagggatggactcagttctctctcaggtgatactgttttggaagcttatttccactcttgcactggattcagtagctgcacctgggcccataccccaaaacaaactctcattaattaaacacaagacccatcaataagaaagttgtcccagggaaggtgcacagcagggacctctgcttttgggaacctgtggctatgcaggcagggtcaggagtgtgacccattttcttctcctccccctgcctgctgcacagacaactgaaaccaggagctttccattgctaagtatataaaatacgtgatagttccagggaaatgtaatacacatatgaaggaatgaggaacctacataaaattaaaataaaatgaatatattaaatatacaacactgtaagagataatcacggaaaagacaacaaatataaaaaacctgtgtgtatacgtgtgacataagtgttcttgtaaattaaatcgtaatttgcttatgaagtccttc

SEQ ID NO: 6851 - DNA, 636 bp, Homo sapiens
  misc_feature 1, 259, 273, 295, 299, 300, 307, 309, 312, 314, 319, 325,326, 333, 338, 342, 367, 378, 379, 396, 397, 409, 424, 426,431, 434, 440, 455, 464, 467, 473, 474, 476, 479, 482, 487,489, 501, 507, 510, 511, 512, 514, 520, 522, 526, 537: n = A,T,C or G
  misc_feature 538, 544, 545, 553, 554, 562, 563, 568, 571, 572, 574, 586,594, 597, 598, 602, 610, 615, 623, 626, 629: n = A,T,C or G
nggcgaattgggccctctagaatgcatgctccgagccgggcccgccagttgtgatgggatatctgcagaattctgccctttcgagcggcccgcccgggcaggtacttattaatacttccgattctgtaaagaagtttagggttttgattttataaaaatccaaaaaatgagccctttttatttgaaatcccagtttctctattggtgaacccagtttcctcttggttattgaaatggggaaagggggaaaaaaagaaantttaaaaaaaaatnctttgccaaaaagggggggccnctcnntttaaantnaanantattntcaaannaacaatntaaangttnccccccccggggggggtttttttcnttttaaaaaanngggggggggggaaaatnnttatttgtgggncccttctctttcttngnggggnttntccctngggggggggaaaaantaatttttnggncccccnntntgnccnccttntnggaaaaaacccnatattnttnnnancctttncnaaanttttttctttnnttttgnngggggggnnccccccanngatanttnntnaggggaattggngggggaanatnncttncccaggtngcgtnttaaaaanttntgnggggggg

SEQ ID NO: 6852 - DNA, 383 bp, Homo sapiens
  misc_feature 131, 139: n = A,T,C or G
cccttagcgtggtcgcggccgaggtacctttctccaaacgacaactgatgcctttctttatgtaagcttttcacgtgttttggcacatattccattgcatttcaataaaaatgttaatgcattatcagttnaaataaangaattctattataaaactattctcagtttcataattgcttcctatatatttccttggaaaatagtgaaattacatatgacaaggcaaccagccaaatttaaagagattttgtagataaaattcatttatgaccattaagttttggctggggggccaaaaacattcaaagtctcacttggtgattttttaaaaatgcactcttaattcattttggagttaattaaaattcccatttgcaaaacac

SEQ ID NO: 6853 - DNA, 358 bp, Homo sapiens
cccttagcgtggtcgcggccgaggtacctttatctctttacctcttcctttctttctacctggaggttacagtaagtcagccatcatgtgactatgaagcagcaagcatttgccaaggcaggttaagcagaaagataaaaggaacctggggctttgatatcataaaggcaacaacattattgtcagctgtatgaggagaaagataaagtcttccattgattcaagctactgttttcagctttttattacaaatagctaaatattatttctaactgatataccatcagaaacttacctggacaactttctattaatgactgaaaaagcgtgtgtctttccagtttcctttactttggtt

SEQ ID NO: 6854 - DNA, 399 bp, Homo sapiens
  misc_feature 374: n = A,T,C or G
ccctttcgagcggccgcccgggcaggtaccaaaggtgatggggaagataaccgtccaggaatgagaggaggccatcagatggttattgatgttcaaacagagactgtttatttgtttggtggctgggatggaacacaagatcttgctgacttctgggcgtaccgtattagagatagcagttttggaggccaaatgttactgaatcctcttcctgatcagtatattaatatgaaaatgaaactgctctgtaacacaataaagaataaaatctttcatgaggtatgtattatcagtatgtatttcatgtctcaaatatattttaaatataatttcaggtttaatttgtctttttaatttgtgtctcttcatataancacattgcttcatacaattaatttt

SEQ ID NO: 6855 - DNA, 387 bp, Homo sapiens
ccctttcgagcggccgcccgggcaggtaccctggaatatgacggtgatcacaagcctgcaacaggaactctgccccagtttcctcctcccctctgctccagctctggggcgctgctttccatggaccaacgttactccaccggcgctcccagggatcaccaatgacaccaccatacagcaggggatcagcggtcttattgacagcctcaatgcccgagacatcagtgttaagatctttgaagattttgcccagtcctggtattggattcttgtggctgtgggacagatgatgtctaccatgttctacccactggtcacctttgtcctcctcctcatctgcatttgcctactgggccatgactgctcttacctggctacatcggggca

SEQ ID NO: 6856 - DNA, 396 bp, Homo sapiens
ccctttcgagcggccgcccgggcaggtacctttcattggattgtccatggtgcatcgctttagcaagcggcgtgactctccgctgcccgtcatcttggccaatatctatctgctggttcctcctgtgctcaacccaattgtctatggagtgaagacaaaggagattcgacagcgcatccttcgacttttccatgtggccacacacgcttcagagccctaggtgtcagtgatcaaacttcttttccattcagagtcctctgattcagattttaatgttaacattttggaagacagtattcagaaaaaaaatttccttaataaaaatacaactcagatccttcaaatatgaaactggttggggaatctccattttttcaatattattttcttctttgg

SEQ ID NO: 6857 - DNA, 390 bp, Homo sapiens
  misc_feature 30, 50, 52, 55, 58, 63, 69, 71, 72, 83, 294: n = A,T,C or G
cccttagcgtggtcgcggccgaggtacgcngggattgcaattcaaaaatnanaanctnatccngaactncnntacagggtggnccttttaaaaaaatcttctcacaaaaaagaaaagaaagtttatgctcctcatgcctaaaaatctgttggctgacactttgttctttaatttcgccagctcaaaagaaatttctcgaatgttctcaccctattaacagttattaaaatggaagaaagctgggggatgaaattgtgagcaatgccatctcctaccgctctatacaaagccttnagcaccagtgagcaagacaagggataacttggaatgggcagcttgaagcttctgctggagtggaaccagctggacttagccaatgatgagattttc

SEQ ID NO: 6858 - DNA, 336 bp, Homo sapiens
  misc_feature 212, 287: n = A,T,C or G
ggcgaattggagctccccgcggtggcggccgaggtacacacaaagacaaacctgaacttaatttcaaggaaaacttaaacccatgcacaaataattggtgagccttcatttccctgacttcaagtttccatgtgaggactcatgctctctccactttcttcttgggaggagggaagatttacctaatgggtaaatttgggcaaagcacattngagtgtgcttgtttggctctgagtctctttgcaaacatgttgtcttgcccacagtgacatgagtttgcgttgacngtcatgttctgcaggaagctgcctgctcctgtggccattgtcaagcaat

SEQ ID NO: 6859 - DNA, 482 bp, Homo sapiens
  misc_feature 52, 58, 60, 65, 70, 72, 73, 75, 177, 214, 407, 469: n = A,T,C or G
cccttcgagcggccgccccggcaggtcaaaaaatagctgggtggtgggtggncggtgncntgtcnttccnanntnctaaggaggctgaggcaggagaaactgcttgaacctgggaggccggaggttgcagtggagctgagaattgcgccacttgcacttccagcctggggcgacaangagccaagactccatcttcaaaaaaaaaaaaccaaangaaccaaaaaaaccaaaaaaccaaaaaaaaaccctggtttcttggacccttggaaaacaccacaaaaccacaccacttctcttctcttcattaccaccaccacaggaggacccccactggaaaatttccctccctttttgatttaccagttattgtttggagaaacaagttattggtttcttgctttatttcnaaattttaatgaacgcccccctttctggttttttggtttttcccaggtttaagaaccgttgngggaaaaaaaccc

SEQ ID NO: 6860 - DNA, 560 bp, Homo sapiens
  misc_feature 160, 180, 219, 271, 277, 278, 285, 288, 299, 303, 323, 331,341, 345, 349, 350, 392, 394, 406, 409, 421, 426, 427, 440,444, 448, 452, 471, 472, 473, 486, 498, 499, 513, 514, 516,520, 526, 530, 537, 543: n = A,T,C or G
ccgggcaggtacagtggtccttttcagagttggacttctagactcacctgttctcactccctgttttaattcaacccagccatgcaatgccaaataatagaattgctccctaccagctgaacagggaggagtctgtgcagtttctgacactttgttgttnaacatggcctaaaatacaantgggtatccgcttgagacctaaagtttgtttgcaatttntaacaatatggtgcctgcttggttagaaaatggggtaccactcatctgactncatttnntttaatntcntattttttagnttgngtatatgttattctttgccntaaagtgntgccgttatnttcncaanncttccttgggttattttacccccgtccccttaaaattatggntncaattaacctangtnaggtacaataanctttnncctttggtttgtntaanatgnttantttctttctttaaaaaaannnccttttttaaaanaatggttacttnnccaattggccaagnncnccangccccnattncaaaaanattaantttggaaaattgggggg

SEQ ID NO: 6861 - DNA, 347 bp, Homo sapiens
  misc_feature 11, 295: n = A,T,C or G
ccctttcgagntgccgcccgggcaggtactctcatatggagggtgtggcctcagtgtccacagcctcagtggctacgagctcatttccagagccaacaacagatgatgtgtctccatctctgcatgctgagtttggctccccacattccacagaagtagatgactccctttcagtgtctgttgtgcaaacacctaccacattccaggaaacagaaatgtctccacctaaagaagaatgcccaagaccgatgtcaatttctccaccagatttctcccctaaaactgcaaagtccangacacccgttcaagatcacagatctgaacagtcctcaatgtctattgaattt

SEQ ID NO: 6862 - DNA, 456 bp, Homo sapiens
  misc_feature 59, 66, 188, 197, 200, 395, 404: n = A,T,C or G
cccttagcgtggtcgcggccgaggtctcacctttatgggctgcagagcacctctgccgnagcccanatatcttttcagagcagcggcagagcaaacataggcgctttcagaataccctagtagtcctacataaatctggtttgctggagatcactttgaaaaccaaggagttgattcgtcagaatcangcaactcangtngaactagaccagctaaaggagcaaacccagctgtttatagaagccaccaagagcagggcccctcaggcttgggccaagctgcaggcatctttaacacctgggtccaagtaatacaggcagtgacctagaagcattctctgatcacccagccatatagcacagaggcatattttcctgttacttgagtggttcttntagctcatntgctgttacctactcctgtttcccaaaagcttatgtaagagctttttccttc

SEQ ID NO: 6863 - DNA, 793 bp, Homo sapiens
  misc_feature 39, 41, 94, 157, 158, 160, 161, 169, 172, 173, 174, 175,176, 178, 179, 180, 181, 182, 183, 184, 185, 189, 193, 231,241, 242, 285, 303, 307, 338, 341, 376, 387, 393, 402, 408,420, 436, 454, 457, 472, 482, 483, 486, 504, 515, 535: n = A,T,C or G
  misc_feature 537, 545, 582, 583, 584, 595, 602, 603, 620, 630, 637, 642,644, 672, 674, 685, 701, 741, 746, 761, 769, 787: n = A,T,C or G
gttgaatacgactactataggggcgaaattgggggcccntntagaatgccatggcctccgagccggcccgccaagttggtggaatggggaatantcttggcaagaaatttcgccccttttcgaagccgggcccgccccggggccaaggggtaccttnnanntttttttnttnnnnntnnnnnnnntttngaanaaccgggaagttcttcggctttttggtcaacccccaangccttggaanntggccaattgggccggtggaattcttttgggcttcaacttggnaaaccctttttgcccttncctngggggttcaacaacccaaattttctttcttnggnctttaaagcccttttccccaaaagttaaggccttnggggaaacctnaacaanggggcaacnccccgnaaaaacccaaanaaaccccggggggttnaaaatttttttttttttnggnaatttttttttaaanaaaaaaaaannaanttggggggggttttttcnaaccccaattnttttaaagccccaagggggnantttggggnttttccaaaatttttttccttggaaacccttttcggnnnggaaattcccnacccccnnccccttttggggggccntttcccccanaaaaaanaaaancntttgggggaaatttaaaaccttgggggngngggtgggaaangcccccaaccccggtngtggccccccgggggcccttgggggaaaaaaaatttttgnggggnttttttttttaaaanccttaatnaaatattggggaaaaaangggggg

SEQ ID NO: 6864 - DNA, 352 bp, Homo sapiens
  misc_feature 215, 216: n = A,T,C or G
cccttagcgtggtcgcggccgaggtaccagttgtaaaattaccaggaaccgccatgcctcaagatcgccctgttttctggcttcatcaatgactgcatgcagtgcaccaccctgtccactacgtgatgctgtaggattaagtcccacagtgggcggctgaggatacagcgccgcgtcctgtgttgctggtgaattagacgcaatcgctgtgggtnngctggtatggtgccgtgctatttggcacaggacacaccgcttgaggtctgtattgaacctctgaaggaggccgatactgaagctcggttggcagccggtattgataaactaccagcggttgggtcttattttctac

SEQ ID NO: 6865 - DNA, 548 bp, Homo sapiens
  misc_feature 105, 122, 141, 159, 163, 167, 184, 199, 206, 218, 238, 239,268, 270, 276, 284, 286, 287, 295, 297, 299, 300, 304, 305,314, 325, 329, 340, 355, 365, 366, 369, 370, 375, 376, 383,390, 392, 408, 414, 424, 439, 440, 453, 455, 456, 461: n = A,T,C or G
  misc_feature 462, 479, 495, 502, 527, 533, 537: n = A,T,C or G
ccctttcgagcggccgcccgggcaggtactgaggttgattgttacagactattaaatggttacatcttaattgtttatacagaacatttggtccaattaatcatntaaaatatgagaaccangcacccttgggaaaatttnaatcttcaaattccaaantggnttcnggaagaaattaaaaaanggaagttttataaancattccncttttttcccantttaatttattttcctagcnnagattccaagataccctttttgtttccancnaaattncaaaaaantnnttgtattngngnncacnncttaactanttttcttgganccantttttttttanctcccaaggctttancataggttanntgnnaaaannaaggagnaaatggncntggtataagggggccncaattnttatcctttnatttaaccgaaggannaacttaacccttngnncaaannccaatttaaaagggggnaacctttcctttttcnccgtttncccaaccccaaaattttttctttgngggccnaacnaaccttttttc

SEQ ID NO: 6866 - DNA, 334 bp, Homo sapiens
  misc_feature 152: n = A,T,C or G
ccctttcgagcggccgcccgggcaggtactccggcagggtgggcctcggagcgtaaaggcggcaaagtgctggggttacaggcgtgagcaccatgcccagcctagacttttttttttttgactaaccattatgcaaacaaggaagtatggantttaatgataaaaacaatttagtatcacttgataaatagtttaattgaagctattacacctcatgtatttcttttcaaatgtagacattgacatagaactcttactgaaatgcttttaatgtgtttacatttgtttttcacttagctgaatgcaatatccatacatctccttctccggggaa

SEQ ID NO: 6867 - DNA, 396 bp, Homo sapiens
cccttcgagcggccgcccgggcaggtacaaggtaagtatagagaaaaaagtaatcgcttttttgagggggctagaactagctgggtattgtaatgttattgcgattaaaatagatggtgaatgctaattcttaagccaaaataattatttcggtgcccatttattccccccttttcttgctctgtagcggttcctctttgagagcagtgtgaccactatccccagttgtcttgcatgattaattacagcatctgtcctgtcagaagctataatgaagaggtcttgataaaaattgcaaattgccactggcaacagtcttaaactgcttatgataaaatgaaaattaaaaacagcaagtgtcaaccctgaccagaatcctaatctggaaagaatgag

SEQ ID NO: 6868 - DNA, 399 bp, Homo sapiens
ccctttcgagcggccgcccgggcaggtaccaatttgggttctatattttgtcaaacagttgggtttttaaaaaaattcaaaactcatgcatgttacctacttgtcatgtgtgaattatttctcacaattttaattaatctgtgtgtatattagttatataaagcaatggatttccacattcttaaagcaggaacctatattcaccagaaaaggatcctcctgtttctcatcaaattttttttcagctcgaacaatccaagattgggaatagtaagagtggcaaacaaatgttttcttagggacctactgagaaaagaaaaaacttactgggagaacagagacttagtaaaatttctattgctacagacaaatgctaaaaaccagctttataataacagc

SEQ ID NO: 6869 - DNA, 292 bp, Homo sapiens
  misc_feature 126, 138, 142, 147, 161, 217, 270, 276: n = A,T,C or G
ccctttcgagcggccgcccgggcaggtacatctacctaaaggactattatgtggaataatacatactaatgaagtattacatgatttaaagactacaataaaaccaaacatgcttataacatttanaaaaaaccaatnaaanatgcntggatttgaaaccnggttgaaaaatagcatatgccttggaggaaatgtgctcaaattactaatgattaantgttgtccctactttctctctcttttttctctcttttttttttattatggtcnagctgncacatacaactttttt

SEQ ID NO: 6870 - DNA, 744 bp, Homo sapiens
  misc_feature 53, 55, 90, 275, 351, 352, 386, 472, 578, 605, 619, 631,655, 701, 722: n = A,T,C or G
cgcccaggtgttggatggggaatattcttgccaggaaatttcgcccttttccnangccgggcccggccccgggggccagggtaccccatnatgggaaaggttaaattttttacctggtggtcaaacttcaattttaagttcaatcttggccattaaatttaccttggttaaaaaccaccaccaccaaaaaaccccaaattgggccttttttttaaaaaccccattggccaagaaagaaggttttaaaaggggcaaaaacctttaacctggtttcnccttaaaggggggaataatttttttttaaaataaaaaaaggggccattggaataaaaaattggttcaaaaaaggtnngaaggggccaattggtttgaaaggaatccaattngaaattttttttcttttaaaaaacccccttaaccttggggcccaaacccaaagggcctttaaaattaaaaaaattttttaaccaanggttttttttaaaaaggaacccttttaaaatttttggaattttccaaaacccctttaaaaaaaaaaccaacccaaggttaattttttaaccaaaaaattggcccanccaattttttttttaaccttccaaccnaaagggccaattancccaaaaaattncttaaaaaattaatttaccaaaangggaaattaaaaaaaacctttttcccggttgggttggcccaaggtnggcccaaagggtttttaattncccccaccaaggggtttttttt

SEQ ID NO: 6871 - DNA, 417 bp, Homo sapiens
  misc_feature 397: n = A,T,C or G
ccctttcgagcggccgcccgggcaggtacgcgggacgtcgatgcagagtccctctgtgaatttacaacacccaacacccatgagttcagtccttaagaaggaaaatcgagcaagtatttaattggttggacattgcataaaaagaaggtccatatccaggctaactctagaaattttattctcaaacttagttggcctctttttcttctgtcagaggaccattcttagtggcactggggaaatcttggcacccagaagaattcaactgcgctcactgcaaaaatacaatggcctacattggatttgtagaggagaaaggagccctgtattgtgagctgtgctatgagaaattctttgcccctgaacgtggtcgatgccaaagggaagatccttgganaagtcatcaatgcgttgaag

SEQ ID NO: 6872 - DNA, 402 bp, Homo sapiens
ccctttcgagcggccgcccgggcaggtacgcggggacatcaatgcagagtccctctgtgaatttacaacacccaacacccatgagttcagtccttaagaaggaaaattgagcaagtatttaattggttggacattgcataaaagaggtccatatccaggctaaccctagaaattttattctcaaacttagttggcctctttttcttctgtcagaggaccattcttagtggcactggggaaatcttggcacccagaagaattcaactgcgctcactgcaaaaatacaatggcctacattggatctgtagaggagaaaggagccctgtattgtgagctgtgctatgagaaattctttgcccctgaatgtggtcgatgccaaaggaagatccttggaggaagtca

SEQ ID NO: 6873 - DNA, 322 bp, Homo sapiens
  misc_feature 26, 86, 164, 181: n = A,T,C or G
tggatatctgcagaattcgccctttngagcggccgcccgggcaggtacctactactttgcctttttattaacaaaataatatattntaatttatgattctcctactaacttccacttgatttcactggcagaatggtcactttttcaaatgacttagcaataanaaaaactatcctttcangcttcaaaatagtgtgtcacactaatttctgtaagcctccactgtagaagcaatgttaattaccttacaaacaaaaagcacatttgaagtttaggtaacatttctttctcaaaagatgaatgattcagaaggaatatatgt

SEQ ID NO: 6874 - DNA, 437 bp, Homo sapiens
  misc_feature 288, 381: n = A,T,C or G
ggggccattgagactgccatggaagacttgaaaggtcacgtagctgagacttctggagagaccattcaaggcttctggctcttgacaaagatagaccactggaacaatgagaaggagagaattctactggtcacagacaagactctcttgatctgcaaataccgacttcatcatgctgagttgtgtgcagctgcagcggattcctctgagcgctgtctatcgcatctgcctgggcaagttcaccttccctgggatgtccctggacaagagacaaggagaaggccttangatctactgggggagtccggaggagcagttctcttctgtcccgctggaacccatggtccactgaagttccttatgctactttcactgagcatnctatgaaatacaccatgtgagaaatttcttgtaatttgcaagttgtctgggttcat

SEQ ID NO: 6875 - DNA, 361 bp, Homo sapiens
  misc_feature 152, 183, 195, 304, 333: n = A,T,C or G
cccttagcgtggtcgcggccgaggtacctctcagctcctgatacatttattatacagaaattatagaccggctgacttaactattgctaagaaacatgcttcttgattttccttacgtggttaaaaaaaaaaatcttgggagaaaacatgtnttctgaagacattgaagtcagaattatttanacaattctatgnctgtctcttacattatgcagttaaggtctacccattttcaagaaactcagaagaaagaggaagatgtcacatgacaccatggaagccaatcagcaaaatccaaaatgtnagacattctacaggacaaaagactgaaanaagtggcaaaagataaaaaaggggggga

SEQ ID NO: 6876 - DNA, 445 bp, Homo sapiens
  misc_feature 385: n = A,T,C or G
cccttagcgtggtcgcggcccgaggtacaagctgagattgacagagtgattggccaggggcagcagccgagcacagccgcccgggagtccatgccctacaccaatgctgtcatccatgaggtgcagagaatgggcaacatcatccccctgaacgttcccagggaagtgacagttgataccactttggctgggtacacagccctcacttgaaagatgctctctacgatgtcatcgctgtgggagccccagctgcccattttcagggatttaagaatggtggtctttcggaagctactccatagatttgaaacagaaagaagaaataccggataccaagtttatttactattcacctgaaaacacagccaaagcaaaggaagttctnaagcaacatcaatcaactacaacctcttatagcaacccatgcagacctactgcttaattc

SEQ ID NO: 6877 - DNA, 481 bp, Homo sapiens
  misc_feature 160, 248, 294, 296, 297, 300, 303, 316, 319, 325, 327, 328,351, 354, 379, 464, 465, 479: n = A,T,C or G
ccctttcgagcggccgcccgggcaggtacctgcgctgtggagtgaagtgaaccggtatggccagaacggcgacttcacgcgcgctctcaagaccgtcaataagatactacagatcaacaaagatgaccgtaactgccctgcattgtaaagtggttatgcncttatccaggaatgggaagtttcaaggggaagctttgaaatgcccatcaaataccttacaaccaaaagtggttagcccaattaacctnctctctccctttggaaaaagggccattatttggcggaggtaccttntnnttnttntttattcttactnttnttattntnntgggggtaattaccttatatttnttnctaatttggtaattttaaaaaccgnaaaaggcccaggggaaaaattacccaaggtttattttaaaagggcaaaattctttttacctccctttaaaaggaaaaaaatttcnnaacctggggggtantt

SEQ ID NO: 6878 - DNA, 369 bp, Homo sapiens
  misc_feature 320, 330, 332, 337, 341, 364: n = A,T,C or G
ccctttcgagcggccgcccgggcaggtactgcttgactctggtcttgatgcccacaaatggctagcgtgcttgtcttcccatgcagtggaaggaagacagttaaatgaaatagtagtattagatatatatgaaaaagaaaacagcaaaataaatttgaagttaatgctttcgtctcttgtaaggtaaggcatatactgcttgcttacacaagaactattggcattttctttttttcgtttgaaacaaatatgaaaaatagtatttttggttttaagaaatttttattttagcatacaacatataactgacatttgttttnttcttttttngncttgnaaancttaaattcttaaaaactttaangaaaa

SEQ ID NO: 6879 - DNA, 386 bp, Homo sapiens
ccctttcgagcggcccgcccgggcaggtacttggcccctgaggtaattgcacagggaattttcaaaaccactgatcacatgccaagtaaaaaaccattgccttctggccccaaatcagatgtatggtctctttggaatcattttatttgagctctgtgtggggaagaaaattatttcagagcttggatatttctgaaagactaaaatttttgcttactttggattgtgtagatgacactttaatagttctggctgaagagcatgggttgtttgggacattataaaggagcttcctgaaactgtgattaggatctttttgaataagtgcccttaccttccatccttcttaaggaggcccaaccccagatgaattaatgaaggacaaa

SEQ ID NO: 6880 - DNA, 371 bp, Homo sapiens
  misc_feature 136, 355: n = A,T,C or G
cccttagcgtggtcgcggccgaggtacgcggggaagtgcacgtctcccgttttcttttcacatcaatgcagagtccctctgtgaatttacaacacccaacacccatgagttcagtccttaagaaggaaaatttgancaagtattttaaattggttggacattgcataaaagaggtccatatccaggctaactctagaaattttattctcaagcttagttggcctctttttcttctgtcagagggccattcttagtggcactggggaaatcttggcacccagaagaattcaactgcgctcactgcaaaaatacaatggcctacattgggatttgtagaggagaaaggagccctgtnttgtgagctgtgctat

SEQ ID NO: 6881 - DNA, 402 bp, Homo sapiens
  misc_feature 243: n = A,T,C or G
cccttagcgtggtcgcggccgaggtactttttttttttttttttggtggggggcacaccaaccatccaaaaaagttgcttctgtttttactgtagttcaattacaggagttgggttttccactttttaaagggcatggcttttatttctaacttctgatttttttctaatttacctaaatctttattttacttaaataatgttaaaagtgtcatgcttcatcagccagtgtgtcatgctgcanatgttcttttggttcattagaagaaaatcttaagaagagcttcagaaagttgattttttaaaaaagaaagaaaactggctcgccgtttgtgttcataaaatggacccaaatttttattaaattcctactgaaagtatttgtggtggcccggtaaacttt

SEQ ID NO: 6882 - DNA, 401 bp, Homo sapiens
ccctttagcggccgccgggcaggtaccttcagctcaggctttcatcgggtcataatgggctactagttctccgatgggggttttgaacatatcacctgctttttgaaattaaacattatctctaacattttttccttctttccttcactcattcacttattcactcatgaaatatttattaaacatatgtcatgtgccaggtaaaagaagtgtggttccttcccttgaggatctcagagttcagcaaaggtataaccctgatgtttacagcaaagacatagctgttataacaaggaatgtattccggatgtcctggtgtggggaaaagcaagagagatcagattgttactgtgtctgtgtggaaagaggtagacataggagactccattttgctctgtacc

SEQ ID NO: 6883 - DNA, 473 bp, Homo sapiens
ggcgaattggagctccccgcggtggcggccgcccgggcaggtacattgtaggatgcttaccagatcctgcccactagaggccaatagcacctcatcatcatagcaccccttccctcagtgataataaaaaatgtctccagacattgtttaagttaataaatgtgcccagagcccaggcacagtggctcaggcctgtgattttagctctttgggagaccgaggtgggtggatcacttgaggccaggagttcctagaacgttcctctgtcaaaagacaaaattacaacaatttaaaatctaattggctgttattggccattctagaattggttgacatctcattctatgaaatacaatgagtgctcttcaataagctgagcagaggggggttagctttattggcagaaaagggctaaagaaaacagaaaaagaacaaaaagtgattgggttgttttcagagttactttccttaaa

SEQ ID NO: 6884 - DNA, 361 bp, Homo sapiens
ccctttcgagcggccgcccgggcaggtacgtgcctcacttgccttgccctgggcctagcccagctccagcacttctttgcccagtggcccactgtttaatccactggcagaagtaagcagcacaatctatgaccacagaacagatggagtcagcctagcacgcccatgatatcacacatatggtcatgaccttgctagcgcagagcactctttcaatctcagctaactgaatagttaccagatagaagaaaaggaaactacctacaaaaataaaaataaaatgtcataaaattcttgtacgccgggggcggtcgggcggaccactgcagactgagcggtggaccgaaatgggaccgctggc

SEQ ID NO: 6885 - DNA, 395 bp, Homo sapiens
cccttagcgtggtcgcggccgaggtacttccaaaccctcctgttctttcctttttgttttccccaattttaacataaggcaaaagcagtaattgagcaattctatcacctggattggcactccggggaacaagtggagctgatcactaactgaattccccctttataatctgaataaattaccccagtatgaatttggactcccttcaaatttagacttgatctccctcaaaggcctaccctcccttctggcagccggccatgtacccctctaggaatcttttgtgggggctttccagggagtaaaaagaccatttgggtggaacataaatctactgcggtgctgcctgctgtggcgcgggacaagctgttggattgttgtaattggcttgactc

SEQ ID NO: 6886 - DNA, 364 bp, Homo sapiens
  misc_feature 79, 93, 124, 125, 126, 140, 144, 149, 158, 187, 200, 245,262, 283, 289, 291, 300, 306, 309, 310, 322, 337, 339, 347: n = A,T,C or G
cccttagcgtggtcgcggccgaggtacatgggcaatgctggacgtaaagaaagaagtgatgcactcaattctgcaatanataaaaatgaccantaagaccaggggacttgcgtagacagctccnnnaaaagcttgtcatngganccacngttttccanaattccttttccttgggaaaacccaaaangtttcccactttnttgggtaaatttggaattttgaaatgccttgccaaaaagaaaatnggcaataatttggaagnaaaaagtaaaggtttacaagnggaggntnattggcccnccaaangtnntttttctctgtnggaaaaccaatttgncnccaaaacnaaaaaattttggaattt

SEQ ID NO: 6887 - DNA, 717 bp, Homo sapiens
  misc_feature 18, 36, 39, 40, 50, 52, 434, 472, 481, 655, 689, 690, 704: n = A,T,C or G
gatatctgcagaattttnccttagcgtggtcgcggnttnngtaccagatntnaatgaaaccctaaagaagactgctgggccatgagttgcttcctcctcctccaccttaaccctctgattccagaattgcagtcatttcttctgccaaggaaatccattaaaaactgcagccacactgcaatttcctaatgtagaacaagatataaagcaggctttgagacaacaacctacctttgtttactctttccaagctggaagagtccttctcctctagttgctcctaggtcactggctaatttattttaaaatttggatggaactcatgtatagttaagtgcacaaatcttagccgtgcagatgggtaattttcacatagctatttgcccacatccgtgcctctaagatagagacatacactgttttcagcaccccanaaagtcccacatgcccatggtgccattttgcgaaaggnatttataangcccttcaaatttgtggcttcctttctcatacttctcaggtataatgaaagggggagaaaaaccccaccatcaacacaaaacaaggctataaaagactgtgcccttttaacaagtcaatttgtagtcagtccctggggcctggcttttttttttttttttttttctaattttgnaactcctggagggttaaaattccttcaaccctanntggttttattctgnttttaattaaaca

SEQ ID NO: 6888 - DNA, 396 bp, Homo sapiens
cccttagcgtggtcgcggccgaggtacttcagaatgaaactggatacagtatattcagttcataagtgtaattgaccatacttgaatatgtttaagtttataagtaacatcaggtgttatgaaattaatataaataagatgtttttgtaagtttttattttgaaataagtttagattcacaaaatcttaccaaaatattccagagttcttgcccttaacccagcttcttccaaagataacaacttacataagcatagttcattaccaaatacaggaaagtgaaattgttacaatactgttaactacagaatttatttggaaatcaccagttttaacatgcatgcatttttgtttgttttttatatgtagctttaagaaatcttaacacatatattg

SEQ ID NO: 6889 - DNA, 408 bp, Homo sapiens
  misc_feature 118, 255: n = A,T,C or G
gccctttcgagcggccgcccgggcaggtacgcggggacatcaatgcagagtccctctgtgaatttacaacacccaacacccatgagttcagtccttaagaaggaaaattgagcaagtntttaattggttggacattgcataaaagaggtccatatccaggctgactctagaaattttattctcaaacttagttggcctctttttcttctgtcagaggaccattcttagtggcactggggaaatcttggcacccanaagaattcaactgcgctcactgcaaaaatacaatggcctacattggatttgtagaggagaaaggagccctgtattgtgagctgtgctatgagaaattctttgcccctgaatgtggtcgatgccaaaggaagatccttggagaagtcatcaatg

SEQ ID NO: 6890 - DNA, 415 bp, Homo sapiens
  misc_feature 293, 375: n = A,T,C or G
cccttagcgtggtcgcggccgaggtacatgtgcaaatagcatacacactgttgcaaaataaataaggagccaagttctttctctccccatgacttttcagttatgccatcattttattcaaaaatttttagtttgctctgatctaaactcttccctgggaaacttggggttatatttccatagaattctgtcttgctcttaataaattcaaaattctttggaaaagatgcatttcagaggattattcttatgaccagttatgctttaaaaaaattaaagtcttaattaaaatncacttatatttaatgcattagtgggtagatttttgttttgagtaaaatctttattagaatctatttgtaactggatattttngtaatttgggctcaaacatatttactcttgggtacctgcc

SEQ ID NO: 6891 - DNA, 799 bp, Homo sapiens
  misc_feature 229, 236, 262, 299, 324, 332, 356, 358, 373, 400, 425, 471,478, 503, 506, 531, 537, 543, 544, 557, 561, 579, 584, 588,593, 602, 618, 625, 634, 639, 662, 668, 671, 680, 697, 702,705, 722, 750, 752, 787: n = A,T,C or G
gccgaaattgggggcccctctagaatgccatggcctccgaagccgggcccgcccagtggtggatggggattattcttgccaagaaattccgccctttaagccgtgggtccgccgggcccggaagggtaccttttaaattttaattttcccccttttcttaggtggtatttaaaagaaaaatggaaccaattgccaccttttaaatttttggcccaaaaaaaggtaaatngcctttngttattttcttggggcaaggccaaanccaattggctttacctttccttaattccaacaattanagttaaaaaaggttgggaaatttanccccaagnaaaccttaaccaaaaaaggggccnanggggaaggggtggtnaaaaggttggaaaaattttttttttantttttggggggaagggggggggaangggttttggggccaaaacttttaaaaaaacaaaggcccaaggccanaaaattnaaaaagggaaggttgggaaaattanaangggggaaaaaactttcccccctttngttttngccccnnccaaggaattttncccncccaaagggaaccccttncccgntaantttgntgggaattnacccaaaggggaaggncccccanttttttttnaaaanttttttggttgggaacccccccntttatnaanccagggaanggaattggggcccaaangggtnggncttttttttttccccantttttccaaaaatttcccttaaaaattnancttttttcccccgggggaaatttttcccctttaanctttaaaaaaaa

SEQ ID NO: 6892 - DNA, 397 bp, Homo sapiens
ccctttcgagcggccgcccgggcaggtaccacaaaacccaacagaccatttgaaataggttacctcaaccagtaaagcccttaacatctacggaaaacgggttaactttaagatatatcagagcctgtattataataaatccatggggatgggcttcaaaatttttataagatacatatgaccataaactatatataataaacttgtgtgaacatgtagaaatgagaaaatactactaccattaaacaaggtagcactaaaagttgatttaagttcaaaaatcaaagtagtttgagatattggactggctatatttttttaaaaggggacatttagaagaaactagaatatctcttctaataatgctttaaaagacatggtatttaaatatacaaat

SEQ ID NO: 6893 - DNA, 353 bp, Homo sapiens
ccctttcgagcggccgcccgggcaggtaccaccatgcgagataaagtgtttggaaattacattcctgtgtctgctgctgactgtatggctgtttcaactttctggattgctcatcccaacaataatctgattaataatggcagctgcaggctcacaggatgctggaatatggtatttattccacaaggaaccaactggggaatccagtggattgcagctcttggcaaaaccagaactcactccattgggtatattttataacaacagggtccattcaaattttaaggttggcttatttattgacaaaggtgtcaaaacaaccaactctagtgctgctgacccaagggaatccc

SEQ ID NO: 6894 - DNA, 360 bp, Homo sapiens
  misc_feature 2, 14, 17, 43, 264: n = A,T,C or G
gngatggatatctnttnaattcgccctttttagcggccgcccntcaggtactgatgtccagtagacctactggatatgcttgcctgcagctcaggggagagctgggttaagaaccgtcaaggcagtaatcatctgcatttagatggccgagtggaaaccatgacaggggctgaaatggcccagcaagaataaatcaaaccatgagaaacacatacatttaagaataaggagatgtggtcaggcgcggtggctcacacctgtaantcccagcactttgggaggccgaggcgggtggatcacttgaggtcagtagtttgagaccagcctgggcaaccctagtgaaatcccgtcttctgctaa

SEQ ID NO: 6895 - DNA, 471 bp, Homo sapiens
atagggcgaattggagctccccgcggtggcggccgaggtaccttttagcttcgtcctcacatggtggaaaggagcaggcagctctctgggacccttttataaggatagtaatcccatttttgagggctctgtgcttgtgacctaatcacctggtaatatcacatatgtatggtgggggctacacaaacattgagaccatagcagtggcattttaatggatgtcagcctcttgagagtttgaatagtgtcagtgttaggttgagtttctaaccctgcaaaggccagggctacctcttggagcctaaggaccctacagaggtttttctacttcctaaagacctttgacagcaagtgatgttttgcttgcttctgctagatcctgtggcattctaacttatctttcttagcaaacaaaaactacattctacagttctatatgtataattctctataaatggcaaccacaactag

SEQ ID NO: 6896 - DNA, 400 bp, Homo sapiens
cccttagcgtggtcgcggccgaggtacaaaaattagctgggcatagtggcacatgcctgtagtcccagctactcgggaggctgatgaacaagaatcacttgaacctgggaggaggaggttgcagtgagctgagatcgtgccactgcactccagcctgagcgacagagcaagactgtctcaaaaaaataaaaaagaaaaaaataataaaaaggaaaacaaagcctttagaaaaacaaagcctttgaaaaaggatgtaaaattgaatatatagatacaattatttttaaaaagttttatagaaaaatatcctggattgtttgatgttgttttaatatattttaatcatttttgtataatgtcatgtataatatgttataatgaaagtaaaaaaaaaaaaaag

SEQ ID NO: 6897 - DNA, 352 bp, Homo sapiens
ccctttcgagcggccgcccgggcaggtacgaaaaaatcaggctactaagcccactgttaatatagacgcagaccaattgttaggaacaggtccaaattggagcaccattaaccaacaatcagtgatgcagaatgaggctattgaacaagtaagggctatttgcctcagggcctggggaaaaattcaggacccaggaacagctttccctattaattcaattagacaaggctctaaagagccatatcctgactttgtggcaagattacaagatgctgctcaaaagtctattacagatgacaatgcccgaaaagttattgtagaattaatggcctatgaaaatgcaaatccagaa

SEQ ID NO: 6898 - DNA, 510 bp, Homo sapiens
  misc_feature 67, 82, 98, 122, 136, 180, 196, 202, 226, 232, 235, 241,247, 276, 278, 306, 322, 330, 334, 343, 345, 348, 352, 363,365, 369, 374, 386, 402, 411, 418, 420, 434, 441, 460, 464,480, 483, 485, 495: n = A,T,C or G
ccctttcgagcggccgcccgggcaggtacttgctaccacgtggcttttttcccagggaaagtattantttttgtttgacaanaacacctttgataggntcatggttcttgcaaaggcagaanaatgttgaaacaanagaaagcttaacctgttgccaaaataaattaaaaaaaaggttgngagttttccctttttngaagcntaaaaaggcttaaaaaggttgggncaaaanaanggaagnggaaangaaggggtttcaattccccccttaccccncnttttcttgtccaacccccccaattttanttttttttggaaaagnaaaaaaanaagnaaggttggngnccnttgnaaccccccttnancaanaaatnccttttttcttntttttccttggggaangggaaccanctttggngncccgaaaaaaaagnttatagntttttgccaccccccaagnttgnaaccttggtgttcccnaangncaaaggtttngaattggggcctttt

SEQ ID NO: 6899 - DNA, 353 bp, Homo sapiens
  misc_feature 1, 13: n = A,T,C or G
ngcccttagcgtnttcgcggccgaggtaccagttgtaaaattaccaggaaccgccatgcctcaagatcgccctgttttctggcttcatcaatgactgcatgcagtgcaccaccctgtccactacgtgatgctgtaggattaagtctcacagtgggcggctgaggatacagcgccgcgtcctgtgttgctggtgaattagacgccatcgctgtgggttgctggtatggtgccgtgctatttggcacaggacacaccgcttgaggtctgtattgaacctctgaaggaggccgatactgaagctcggttggcagccggtattgataaactaccagcggtcgggtcttattttctac

SEQ ID NO: 6900 - DNA, 383 bp, Homo sapiens
ccctttgagcggccgcccgggcaggtacaccaatcaaacatagtgtgtccagaattggtgggttcttggtctcactgacttcaagaacgaagctgcggaccctcacggtgattctaagcacattaaaatctggatgacacttatctgaatcatttcgcaacttggagagagatggagaagacacgcatggtgtaactgggcatcaccagaatgtgcactgccatctgtggctgtcttcctgctggcaatccttttcattccaagcaaataagattccctaaattagacaaaaaggaagaaacacaacagagtccataattctgagaggaagagaagaagtgatcatcagcagccaaaagggcaattgcagagaagcacccacc

SEQ ID NO: 6901 - DNA, 250 bp, Homo sapiens
  misc_feature 237, 242, 243: n = A,T,C or G
cgaattcgcccttagcgtggtcgcggccgaggtaccagttgtaaaattaccaggaaccgccatgcctcaagatcgccctgttttctggcttcatcaatgactgcatgcagtgcaccaccctgtccactacgtgatgctgtaggattaagtctcacagtgggcggcttgaggatacagcgccgcgtcctgtgttgctggtgaatttagaccgccatcgctgtgggttgctggtatggngcccnngctattt

SEQ ID NO: 6902 - DNA, 462 bp, Homo sapiens
  misc_feature 126, 173, 178, 182, 193, 205, 224, 239, 245, 287, 299, 300,303, 304, 305, 317, 321, 327, 330, 337, 345, 354, 377, 395,405, 410, 418, 421: n = A,T,C or G
cccttcgagcggccgcccgggcaggtactttatttttttttttttggtatttctttttattgcattcgttgtctaacaacaataatactcattggcaagaaattttattttacactaacaaattanaattttaaatcaccaggttattggttaagaatttgggtccagaaaanaccanaaangacccacttgnggatattttttngcctttggaaatgcccctnctggaaaaaacccanaaggangttacagggaaattggtcaatttttggaaaaacttttttttngaaaccaaattnntannnaggaaaatgttnccanaccccngtntttgggngggccaanccttggaanttttgttggccccccttgttggntaaaccaaccttccccgnggtttaaaantaagnccggaagnccnttcccttggttggggccaaggaaccttcaaccgggttccct

SEQ ID NO: 6903 - DNA, 510 bp, Homo sapiens
  misc_feature 199, 292, 307, 314, 319, 324, 347, 360, 361, 367, 407, 422,426, 454, 470, 472, 490, 509: n = A,T,C or G
tccagaaaatcctggcgtcttttctgagtagtatcttgttttagcttatccttaagagactccttccggtcctggattactttctctgtgaactgatgaagttcttggttaaatttagaaaagatttggccttgagagctgaatttgaaaaccaggtcgttgtgatgtacaaaaattgttcaatgccgcctggtttggnagatttttgctaaagggatttgaaacacttgcttttcagggtatggagtccagtggttactctcggcacgcttctagtaacttagttgggatncccccgtggcctgcnagggaantttcngattntacagagtctttatctgattacncgttcgaaacctnngagggngggggggccacggttacccccagtcttttttggttttccncttttaagttgtagngggnttaaatttggcgccgcctttggggctgnttaaatttcaatgggntncattaaggctggtttatncccttggtgggtggaaaana

SEQ ID NO: 6904 - DNA, 599 bp, Homo sapiens
  misc_feature 453, 474, 556, 565, 579: n = A,T,C or G
cccttagcgtggtcgcggccgaggtacgaaaaaatcaggctactaagcccactgttaatatagacgcagaccaattgttaggaacaggtccaaattggagcaccattaaccaacaatcagtgatgcagaatgaggctattgaacaagtaagggctatttgcctcagggcctggggaaaaattcaggacccaggaacaactttccctattaattcaattagacaaggctctaaagagccatatcctgactttgtggcaagattacaagatgctgctcaaaagtctatacagatgacaatgcccgaaaagttattgtagaattaatggcctatgaaaatgcaaatccagaatgtcagtcggccataaagccattaaaaggaaaagttccagcaggagttgatgtaattacagaatatgtgaaggcttgtgatgggattgggaggagccatgcatnaggcaatgcttatggctcaancaatgagggggctcactcttagggaggacaaggttagaacatttgggaaaaaatgttataatttgtggtcaaattcggtccntctgaaaanggagtttgccccangctttaattaaaccggaatt

SEQ ID NO: 6905 - DNA, 729 bp, Homo sapiens
ccctttcgagcggcccgcccgggcaggttctgctgacttaaatagaggtttttttaaggtattgggtcagctaacagagactggagttgtcagccctgaacaatttatgaaatcttttgagcatatgaagaaatctggggattattatgttacagttgtagaagatgtgactctaggacagattgttgctacggcaactctgattatagaacataaattcatccattcctgtgctaagagaggaagagtagaagatgttgttgttagtgatgaatgcagaggaaagcagcttggcaaattgttattatcaacccttactttgctaagcaagaaactgaactgttacaagattacccttgaatgtctaccacaaaatgttggtttctataaaaagtttggatatactgtatctgaagaaaactacatgtgtcggaggtttctaaagtaaaaatcttgtaagaaaattgtcaaaggggctaatgctacaaggctacactcttcctagagttgaaatattttgttgctgcagcccgagtgacctccataaatactggactgaaaaaacattgtaatactacaagtataatgacatttagaagattactttgggctggtgggacatgctgtgaatttagattaccaatgaatattataaaggggatgatttttaaccaaaaggaatatatttttaacttggatcttttcttgcatggatttttctaaaagttt

SEQ ID NO: 6906 - DNA, 380 bp, Homo sapiens
ccctttcgagcggcccgcccgggcaggtacatataattatctgctatatattatgcatatgtaatacatatgcacctgtgtaagttggaattcttatctattctatagaaagaaaagttctacattgaaatatagccaacatccagttaactctgaaaaaaaatcacatcattgcttggctttttctgttgttacttcctgttggcctagtggcaatgattcattataatgcaatgtaattcaatatcacatggtgaatttaaatggctgtataggaaatctgtaacactgttcttgcttaaaaatgtaaaacttcaatagaaggcggttcatcagagaatttggtaacacccaaatagtaaacgctttgattttcagta

SEQ ID NO: 6907 - DNA, 406 bp, Homo sapiens
  misc_feature 154, 288: n = A,T,C or G
cccttagcgtggtcgcggccgaggtaccttggtggaagctctattccatgtgggattggaacaaatatttcatggagagcatgtgaccatctgcgttgtatagcctgtgatttcttggtagtcagctatgatgactatatgtgggacaaatcgngtgattatctgtttttcaggaacaacatgccagaatttcacaaattaaaagcaaagttgataaagaagaaaggaacacgggcatatgcctgccagtgtagctggagaactgttgaagaagtgactgaccttcanacagatcatcagcttcgctgggtttgtggtaaacattaagaatgcagactgcacattcggacagatgcatccatgagagtggtctccatgaatcatcatcatgtttagacaatagtcc

SEQ ID NO: 6908 - DNA, 450 bp, Homo sapiens
  misc_feature 389: n = A,T,C or G
ccctttcgagcggccgcccgggcaggtactttccactgcacagaagcctggggattcttattgttttgatatttaaaaattgaatctggccgggcgtggtggctcatgcctgaatcccaacactttgggaggctgaggagggtggatcacctgaggtcaggaccagcctggccaacatggtgaaccctgctctactaaaaatacaaaaattagccaggagttgtgtgccgtaatcccagctcctgggaggctgaggtaggagaattgcttgaacctgggagctggaggttccagtgagcccgagatcgcaccactgcactccagcctaggcaacagagtgagaccccatctcaaaaaaaaaaaattgaatctatctcaatagagaacangtgaactagcccttctaacccggaccatgcacaaagacaaagaaattctagcctttttttc

SEQ ID NO: 6909 - DNA, 372 bp, Homo sapiens
ccctttcgagcggccgcccgggcaggtacgcggggacatcaatgcagagtccctctgtgaatttacaacacccaacacccatgagttcagtccttaagaaggaaaattgagcaagtatttaattggttggacattgcataaaagaggtccatatccgggctaactctagaaattttattctcaaacttagttggcctctttttcttctgtcagaggaccattcttagtggcactggggaaatcttggcacccagaagaattcaactgcgctcactgcaaaaatacaatggcctacattggatttgtagaggagaaaggagccctgtattgtgagctgtgctatgagaaattctttgcccctgaatgtggtcg

SEQ ID NO: 6910 - DNA, 408 bp, Homo sapiens
  misc_feature 132, 145, 154, 158, 201, 216, 218, 221, 224, 230, 236, 261,269, 271, 273, 280, 287, 326, 338, 340, 365, 374, 378, 388,395, 397, 408: n = A,T,C or G
ccctttcgagcggccgcccgggcaggtcactctataaataaacacatcaattttgctctataactactcttccaaaaacgtctcatataattggaattaacctagcattttactttatcaatttaaaatagnattttttttgttnaggaaaagngatnataccagctataatggaaaaatttgcaagggctttttttttantggaaggtttaaaangnacnaantaaatntttaangaaatcttcctccataaattaccanagttgttnancnaaaattngataaanaacgttttccaccaagtttttaattttaaccaattttantggccttaaggnanaattaccaatttgcaacccataacntaatttttncaancaaaatccanccaaaantnaattttttgtn

SEQ ID NO: 6911 - DNA, 344 bp, Homo sapiens
ccctttcaagcggccgtccgggcaggacatctacctaaaggactattatgtggaataatacatactaatgaagtattacatgatttaaagactacaataaaaccaaacatgcttataacattaagaaaaacaataaagatacatgattgaaaccaagttgaaaaatagcatatgccttggaggaaatgtgctcaaattactaatgatttagtgttgtccctactttctctctcttttttctttctttttttttattatggttagctggggactagagggaacgtgccaccattgactggcttaattttctgtatttttttagtagagaccaggaagtttcaccc

SEQ ID NO: 6912 - DNA, 383 bp, Homo sapiens
cccttagcgtggtcgcggccgaggtaccctttccaaggtgaccttcagggggattaaccttcctagctcaagcaaggagctaaaaggagccttatgcatgatcttcccacatatcaaaataactaaaagggcactgagtttggcatttttctgcctgctctgctaagacctttttttttttttttactttcattataacatattatacatgacattatacaaaaatgattaaaatatattaaaacaacatcaacaatccaggatatttttctataaaactttttaaaaataattgtatctatatattcaattttacatcctttttcaaaggctttgtttttctaaaggctttgttttcctttttattatattttttctttttt

SEQ ID NO: 6913 - DNA, 411 bp, Homo sapiens
  misc_feature 358, 402: n = A,T,C or G
ccctttcgagcggccgcccgggcaggtatgaaaaaatcaggctactaagcccactgttaatatagacgcagaccaattgttaggaacaggtccaaattggagcaccattaaccaacaatcagtgatgcagaatgaggctattgaacaagtaagggctatttgcctcagggcctggggaaaaattcaggacccaggaacagctttccctattaattcaattagacaaggctctaaagagccatatcctgactttgtggcaagattacaagatgctgctcaaaaagtctattacagatgacaatgcccgaaaagttattgtagaatttaaatgggccctattggaaaaaatgccaaattncagaaaatgtcaagtccgggcccattaaaaacccatttaaaaangggaaaaaa

SEQ ID NO: 6914 - DNA, 313 bp, Homo sapiens
ccctttcgagcggccgcccgggcaggtacgcggggacatcaatgcagagtccctctgtgaatttacaacacccaacacccatgagttcagtccttaagaaggaaaattgagcaagtatttaattggttggacattgcataaaagaggcccatatccaggctaactctagaaattttattctcaaacttagttggcctctttttcttctgtcggaggaccattcttagtggcactggggaaatcttggcacccagaagaattcaactgcgctcactgcaaaaatacaatggcctacattggatttgtagaggag

SEQ ID NO: 6915 - DNA, 333 bp, Homo sapiens
  misc_feature 61, 75, 158, 178, 198, 277: n = A,T,C or G
cccttagcgtggtcgcggcccgaggtaccagttgtaaaattaccaggaaccgccatgcctnaagatcgccctgtnttctggcttcatcaatgactgcatgcagtgcaccaccctgtccactacgtgatgctgtaggattaagtctcacagtgggcggntgaggatacagtgccgcgtnctgtgttgctggtgaattanacgccatcgctgtgggttgctggaatggtgccgtgctatttggcacaggacacaccgcttgaggtctgtattgaacctntgaaggaggccgatactgaagctcggttggcatccggtattgataaactaccagcg

SEQ ID NO: 6916 - DNA, 352 bp, Homo sapiens
  misc_feature 223, 262: n = A,T,C or G
ccctttcgagcggccgcccgggcaggtactctggcaattcacctttcaattcaaatattctgtagagaacgcttcctctgagaagccactggatgtctgtatggtgcaggaggtttatgtgctggtctgtccagggttttttgttttgggtgtttttttttttttaacatttttgcataaatgggtctttgatacaggtaaccagttttgtaacattattcanaacttcactgtatcttcaagtttttgatatcagcatctntgtggagaaagcagtgtgctataatgtcaacatcaggatttcttttttttttaaataacgcaaaatgacttatggagacaaccactgatg

SEQ ID NO: 6917 - DNA, 580 bp, Homo sapiens
cccttagcgtggtcgcggcccgaggtacatgaagactggtaaaactgcaaataagaattacaatttgaagtcacagaaaatattttaaatggctaattctgaagaggagacaagaatccattttggacatgttctcagttttgtaaatatgacttcactatcacattctctcatgtgtttccatacccaccttttcttggaaattatgggcagaaaatggatagaaggaaggaaaaggaatcttgagaaatttgtctggaggctgcattttaataataaggacgacttcactttatctctttggtcatcaaaggaataggaagaataagagattctcattatagttatccacctcacctaacagtaatgatatcagaatgaaggatttaaatgaaagtcaaactgacaggggaaaaaggcatctagcactctagtgtatttacctgtgaaaataaaaatccagtggaaaactgacatgtgtttagacattgaataaacaagttattttaaatattaaaagaattttcaatttcaagtcttaactgttttacatttcctcttgtggaaaaaagaaaatttt

SEQ ID NO: 6918 - DNA, 413 bp, Homo sapiens
  misc_feature 119, 130, 137, 144, 151, 154, 171, 178, 186, 188, 191, 192,193, 196, 201, 206, 209, 220, 242, 256, 257, 260, 262, 270,277, 279, 282, 285, 291, 299, 304, 322, 325, 340, 352, 366,404: n = A,T,C or G
ccctttgagcggccgcccgggcaggtacttatctacaaaacttccattactagacccttttgacctacgagaatagcagtttctatggttcaacctaatacactgtatgggctcaaatntataacaattngaatttngagaggnaattcanaantccaataattacccccncttcttnaaaaagtnanagnnnttngaatnagggngangcccattccanacacccctttccacacaggcangaccatgtaagganngancnaaacgctntcttcangngtnctncttgangagggatnccaanaggcttactggagcgggngcncgggaggggcaccangcaccctggggnattttgggatgagnaagcttgcaagggaaggggaacttttgccaccccaagnggccattgg

SEQ ID NO: 6919 - DNA, 385 bp, Homo sapiens
ccctttcgagcggccgcccgggcaggtactttttttaatgatatacatacccatgaaaccttttcttgaatggcacaacccagagcttctgtgcttaaaatgttataatccaaattcctctcttttaagaaaaaaaaatcagccatgacaatacttagcaattaccatctgagctatgtaaagtctaaaacaactataagggccatacattagtggccatttttaagcttgctaaacgatgatgggcttaaagaggtgggagccgggctatttaagatacagatctatttatatttagagggatgtgctaaatactttgagtggccatcctcttacacataattatactaaactcagattgaaacctgcctacaaatttcattct

SEQ ID NO: 6920 - DNA, 416 bp, Homo sapiens
ccctttcgagcggccgcccgggcaggtacgcgggggccggagtgcggcgctgggcggaagctaccatggcggccgagagaaagacaaagttgtccaagaatctgctgcgcatgaagtttatgcaaaggggactggactcagaaaccaagaaacaactagaagaagaagaaaagaaaatcattagtgaagagcactggtacgcggggggagaaggcgcggcgcccgtgggagtgcaaaaatggactaatacagatgacatggagaagatctggcaccacaccttctgcagtgagctgcacgtggccccagaggagcacctagtgctgctgaccaaggcccccctgaaccccaaggtcaacagagagaagataactcagatcatgtttgagacctttaacacctgggccatgtacctc

SEQ ID NO: 6921 - DNA, 572 bp, Homo sapiens
  misc_feature 205, 210, 230, 233, 242, 337, 391, 418, 423, 461, 468, 488,510, 537, 555: n = A,T,C or G
ccctttcgagcggccgcccgggcaggtactatgaattactaaattgctatacaccatgtaatagtgagtatagctaatatttagtatgccttttaaaaattttggactgcttttcggtttttaaacaaaattctccaccattgtgaaacttactcaaggaaaatttttccctttttaattttgcccttcttattaagcacttcantaaanaagcctagcggccatttagngantaatacctnggaaaatattttttattgtttttaattgaaaataacatttgtgataaaaaaccttttaaaaaaaggttggtttttttggaattttttccccccancaaaatttttttccccccaaaaaaggggaaaaatgggtcttttaattttttaanttttaaaaagtaaggtttttggccggnttttnggaatttaaaatttttattaaaacccttgggttttaanccaaaantttttttccaaggtccaagntttttgggaaaaatttttccanaggttggaaaaaaccaacctttggggnttttgaaagggggaaggnttggcccccttaatttt

SEQ ID NO: 6922 - DNA, 382 bp, Homo sapiens
  misc_feature 3, 16, 17, 261, 369, 376: n = A,T,C or G
tgnattcgcccttagnntggtcgcggccgaggtacgcgggggagcgagttgacgctgaaaggctgctcacctttccctctcctggtagcgataccttttgtgcgtgggagtggacatcgcccaagttctgcgttagcctgggctcttgactcatggtttccgtgaatcctctaaagtatatgcaaaatttcgcgtgaaacattggcaaatttggagcgacagatctatgcttttgagggaagctacctggaagacactcanatgtatggcaatattattcgtggctgggatcggtatctgaccaaccaaaaaaaactccaatagcaaaaatgatcgaaggaaccggaagtttaaggaagctgagccggntcttcantaaatc

SEQ ID NO: 6923 - DNA, 412 bp, Homo sapiens
ccctttcgagcggccgcccgggcaggtacagaagcgagaccctgctgggcagagaaagggtgacctggaaggtgtgtgagggctccgcccatgggcccctgtgatggtcatggcctcaagaatcacagtccagtttccatcattatcttctatggagttcttcattcccacatctgtggaccttaaaatcctaccgttgagtgcctgccttggatcagcagtcagttcgttaccttggttctcagacgatgcttgcaacaacaccatgcgattcgcccactcttggagaaaataagagaagtatccctgaaggatgaaatatcctcgaatatgaaaaggtctgctctctgaagaccaactgtctcagtctgctttttgctgctgtaacagaataccacagactttgtaggca

SEQ ID NO: 6924 - DNA, 398 bp, Homo sapiens
ccctttcgagcggccgcccgggcaggtacgcgggggccctttcttgaaggaatcccctaagtgcacgtctcccgttttcttttcacatcaatgcagagtccctctgtgaatttacaacacccaacacccatgagttcagtccttaagaaggaaaattgagcaagtatttaattggttggacattgcataaaagaggtccatatccaggctaactctagaaattctattctcaaacttagttggcctctttttcttctgtcagaggaccattcttagtggcactggggaaatcttggcacccagaagaattcaactgcgctcactgcaaaaatacaatggcctacattggatttgtagaggagaaaggagccctgtattgtgggctgtgctatgagaaa

SEQ ID NO: 6925 - DNA, 367 bp, Homo sapiens
  misc_feature 140: n = A,T,C or G
ccctttagagcggccgcccgggcaggtactcagagaggaaggcagccttaagaaatgatgcaggaatagccaagcaagatttttccaagcactggttaaatcaccagcaaaacaaagcatttatgtgaagtactggcgtnggattctgcataatggtgatcacacgttccacctcatcctcagtgagttctcccgccctcttggtgaggtcaatgtctgctttccccaacaccacatgagcatatcttcggccacacccttaatgggcagttgatggcaaaggctattttccgccgcccatcgatgttggtgttggagtaccttcggccgcgaccacgctaagggccgaaattccagcacactggcg

SEQ ID NO: 6926 - DNA, 359 bp, Homo sapiens
cccttagcgtggtcgcggccgaggtacgcggggattgcaattcagaaatgagaagctgatccggaactccactacaggtggtctttttaaaaagatctctcacaaaaagaaagaagtttatgctcctcatgcctaaaatctgttggctgacactttgttctttaatttcgccagctcaaagaaattctcgaatgttctcacctattaacagttattaaaatggaagaagctggggatgaaattggttgagcaatgccatctcctacgctctatacaaagccttcagcaccagtgagcaagacaaaggataactgggaatgggcagctgaagcttctgctggagttggaaccaagcttgg

SEQ ID NO: 6927 - DNA, 143 bp, Homo sapiens
ccgggcaggtactcacagttgagataggattaaaccccaatttcaaagccccttacagagttccacttaccaggttatttcagccggcaaccaggaactagactgaatgcaatcctcccacatccaaggtcccccgcgtacct

SEQ ID NO: 6928 - DNA, 279 bp, Homo sapiens
  misc_feature 118: n = A,T,C or G
ccctttcgagcggccgcccgggcaggtacaggccggggaagagactcaagtaggagcgcctgcccgagctgagactagatgtgaacctctcaccatgaaaatgttaaaagatataaangaaaggaagttaaaacaatattggatccaactccccttatataagaacattattagattccattgctcatggaaataagacttactccttatgactgggaaattttggccaaatcttccctttcatcctctcagtatctacagtttaaaacctggtggatt

SEQ ID NO: 6929 - DNA, 285 bp, Homo sapiens
cccttagcgtggtcgcggccgaggtaccattatgtgcccgaattccgaaaagtgtccatagcagctaccatcatctatgcctatgcctggctggttcctcttgcactctggggtttcctcatgtggagaaacagcaaagttatgaacatcgtctcctattcatttctggagattgtgtgtgtctatggatattccctcttcatttatatccccaccgcaatactgtggattatcccccagaaagctgttcgttggattctagtcatgattgccctgggcatctca

SEQ ID NO: 6930 - DNA, 739 bp, Homo sapiens
  misc_feature 450, 613, 667, 693, 706, 720: n = A,T,C or G
cccttagcgtggtcgcggcccgaggtactgttaaatgaatattgccttttactgctctttatggcttattggaataggagctcatttaagattgatcttggagagtttcttcttgtgattttagttcataagtatgtcacctttcattttatagtgttcatcattgagtaatggattaagtgaaaatccaggagtatccatctgcagttatgtgctgaggtgataattcatccaacatatttgttagcataaatattatgcttcagtttctgttgcaaattggtgattgtgaaattacagaaagtgattttctaagtctgctttttttgtttaattcttgtaatgtaagcaataaatatggagtgtcagtagtctccttccaccccagaaatgtgttggtgtaacattctcgtttcttttaacaacctggaagtacccagcccggctcancccacagcactgtcctatgaaccttcctgcacgccattctccacctcagtatctgctttcggggaacccaacctgcgacagtgcttctgtgtgttttcagtcctgcaggtttgaactctgactttggagacttttccagttatctcatggaatgacagaatgngcctgttgatatcaggcacaattaatgcaaattaggcagacctatttattctanatgtgaatttgctatttattttaaanggtggatttatgnggtatgggaccctnacttattggccaaaaaaaa

SEQ ID NO: 6931 - DNA, 381 bp, Homo sapiens
  misc_feature 183, 195, 199, 203, 226, 228, 229, 231, 236, 239, 241, 242,247, 274, 276, 281, 282, 283, 284, 290, 295, 299, 316, 317,318, 330, 332, 338, 343, 344, 345, 348, 349, 350, 351, 352,358, 360, 370: n = A,T,C or G
ccttttcgagcggccgcccgggcaggtactcatacaagcatctaggtaggatattaataaataatacaggataatagcatcaccagtgtccaataacgggccatcaggaacaagattcacgtttggtggatatgagagaaaataaacacttcgggaaacttgctcaccacagctggagatcangaatagaacctntccnaaanatcaaaaaattttctttataggnanncnctgtntangnngggcnaaaatttttttggggctttccccaggntnaaaannnncaatanttttnaaanggggtggaaaaaaaaannntttttttttttntncagggnccccnnnggnnnnngggggngnaaaaaaattnttttttttttt

SEQ ID NO: 6932 - DNA, 518 bp, Homo sapiens
  misc_feature 46, 81, 230, 259, 285, 289, 311, 348, 435, 456, 498: n = A,T,C or G
cggcccgccagtggtggaatgggaatattctggcagaaattcgccnttagcgtggtcgcgggccgaggtacttaaatattnatggttggtggttttctggtttcttttttactcacttgcagtatggagggaacaaatcacaaacacttacttttggagaaacagaagaaccgtagtgtagattttacaaaatcactttttttaaaaatctctgtattgtgcttccttcnaaataccttaagaagcccagttcttttgncattaaaaaaatattcacagcctttnatcntataaaccccttaaaaaaattnttgccagccaggcccttaaaaggatattgggattaangaataattacccacccacctttggcttatttcttggaaaattaattattctatttaacccattattccccaaaccttaatggaatangtattccttaaaaaaaaattncttttcttttccattaaggggaaggttcttcttggaccaaangcctggtttatttccaattt

SEQ ID NO: 6933 - DNA, 415 bp, Homo sapiens
ccctttcgagcggccgcccgggcaggtacatgagcaaaaacagcaagtggtgaaatttttaatcaagaaaaaagcaaatttaaatgcactggatagatatggaaggtatagttctttcttttaatctgtgtgttctagatggatagcagtcactcaagtcataaatattaaattaataagattaatgtatacttattgggatatagggatcagtatgaacacaaatcagttaggtagaaaaacaattatttggactgggcaacataaaagttttagtaggattcatcttttattatattgactgatgttatttgctatgtaatgtttttggttacatgatcttatgttagctaaagggatttcatattttatgaagtttgaactttaattttagtttactttatgactcagtatt

SEQ ID NO: 6934 - DNA, 394 bp, Homo sapiens
  misc_feature 16, 17, 103, 110, 121, 130, 140, 176, 178, 179, 197, 199,202, 203, 209, 221, 229, 245, 259, 260, 268, 296, 307, 309,314, 321, 322, 326, 328, 332, 340, 344, 367, 368, 379: n = A,T,C or G
ccctttcgagcggccnnccgggcaggtctgattccaattgatgggatacatgcccttaatacagaaagtttccattatttaattcaaatatcaaaaatttaangaattanttggagaaagnttttatttngctttttaangggcctgggggccaaaggattgccttaacttaagcnannatttttttaagggggtgnanaanntaaacntattttacctanttaatttnaaaaaaaaaaaccttnattggaagggggtnnaattttcnttggtttctttaaaaaaaaccttttttnaaaaggtaatnanaattnttccaanngtgntnaaanaaaccaanggantttatttaattccttaattttcnnaaaaattattnaataaccaattttaa

SEQ ID NO: 6935 - DNA, 370 bp, Homo sapiens
cccttagcgtggtcgcggccgaggtacgcgggggagggtggaagaaagtcagagctcagcccaggctgccttttccctgcagcgagcctcagccctctccccagcacgcccagctcttttcatcatggattattcttcagctcattgtcttaagtcgtcctgtgacacctcccagtgaccgcacgctgttcttccttttcagtggtcagcaagtccatctgggcagcgcagagggaccaaaggtgtccatcgttggcctggacgattctggcttcctccaggttcaccaggagggcggcgaggttgtgactgtgcacccggacggcaacttccttcgacatgccgagaaacctcatccttcccaaacgac

SEQ ID NO: 6936 - DNA, 378 bp, Homo sapiens
  misc_feature 9, 335: n = A,T,C or G
ccctttctngcggccgcccgggcaggtacctgcattttacagatgaggaaactgaggttgagagaagctgtttgttcagggtcactgagttagtaagtggatgtgtatttgattccaaagatcatgctctgcacaactgctttattctgtcttttcatttcatgagacatgcacttagcaggcattgaaaggcaaagaaacatcttttctcatccttccctgagctgttcttgtatcatttcccattgtagttcaaatagatattttccccttctttcactagaaaaattcttattaagagacttttcctttgccaaaacaaaacaatttttaanctaaaaactgcacttcaaaaaaaggcagttccataaaactaaa

SEQ ID NO: 6937 - DNA, 363 bp, Homo sapiens
  misc_feature 150, 325: n = A,T,C or G
ccctttcgagcggccgcccgggcaggtacttggcccctgaggtaattgcacagggaattttcaaaaccactgatcacatgccaagtaaaaaaccattgccttctggccccaaatcagatgtatggtctctttgggaatcatttttatttngagctctgtgtggggaagaaaattatttcagagcttggatatttctgaaagactaaaatttttgcttactttggattgtgtagatgacactttaatagttctggctgaagagcatggttgttttggacattataaagggagcttcctgaaactgtgatagatcttttgaataagntgccttaccttccatccttctaagaggccaaccccaga

SEQ ID NO: 6938 - DNA, 398 bp, Homo sapiens
cccttagcgtggtcgcggccgaggtacctcaatgaagcagcaggtgtcgcagcagaagaagccaggaactacaaggaaaagaaaaagttaaagggccaggaaaattctctgtgttggactgctttagacaaaaatgaaggcgaaatgataacttctaaggataatttagaagatgagactgaagatgatgacctatttgaaactgagtttagacaatataaaagaacatattacatgacgaagatgggggttgacgtagtatctgatgactttctggctgatcaagctgcatgttatgttcaggcaatacagtggattttgcactattactatcatggagttcagttcctggagctggtattatccttatcattatgcacctttcctgtctgatatac

SEQ ID NO: 6939 - DNA, 646 bp, Homo sapiens
  misc_feature 9, 20, 171, 256, 259, 277, 282, 312, 320, 440, 471, 473,528, 534, 535, 537, 540, 544, 545, 553, 557, 563, 565, 568,569, 570, 572, 605, 614, 639: n = A,T,C or G
cgccaagtngtgaatggggnatattcttgccaagaaatttccgccccctttaagccggtgggtccgcgggcccggagggtaccttcttggaccaagcttggtggcaccggaatggcccattccctttggaagggaactttgggttctttccccaaaggccgaaaaattgtnggggccaaggaagaaaatccccgcggtcaaaaacttaaggattgggccaggccccggcctcaattaaaaggggtttcaatttttnggnaccaaaaggccaccaagncaagnaaaccaatttggttggggaaaaccacaaangggttttngaaaaacctttttttttcttggggtggttccttaataaaagaaaaggccttcaacggggggccaaaggggaattgttttaaaattttttggaaaattttcccccaaggaaggtttttttnaaaaattttgttaaaaaaccaaaaaaaaaantngaacctttaaaaattaaaaaaaaagggtttatttattaattttccaaccagggcnaaaaannanaanatannaaactttntttnaaaatntngtnnnanggttacccccttggttttaaggccaaagtttcntttttttcnaagttttttgggggggggggaaggnaaaattt

SEQ ID NO: 6940 - DNA, 415 bp, Homo sapiens
cccttagcgtggtcgcggccgaggtaccagttgtaaaattaccaggaaccgccatgcctcaagatcgccctgttttctggcttcatcaatgactgcatgcagtgcaccaccctgtccactacgtgatgctgtaggattaagtctcacagtgggcggctgaggatacagcgccgcgtcctgtgttgctggtgaattagacgccatcgctgtgggttgctggtatggtgccgtgctatttggcacaggacacaccgcttgaggtctgtattgaacctctgaaggaggccgatactgaagctcggttggcagccggtattgataaactaccagcggttgggtcttattttctaccggctgatattgtggatactgtatctgagttggcattgccgggatagagactctgtccctttct

SEQ ID NO: 6941 - DNA, 245 bp, Homo sapiens
  misc_feature 123, 124, 234: n = A,T,C or G
cccttagcgtggtcgcggccgaggtactactggcccattcttgtccattataactgtgtgcagtgtgatgatggctgccaactatgatataccggtctggggatgtcaagcccattacaaatnncaacagcattagtaactgttttcaatttttgtgactgtctgaacttgcatgctgacgactcttatttcattatttggaagctctagagagctacacgcttcatttttggntctagcttttg

SEQ ID NO: 6942 - DNA, 393 bp, Homo sapiens
  misc_feature 196, 259, 306: n = A,T,C or G
cccttagcgtggtcgcggccgaggtacgcgggacatcaatgcagagtccctctgtgaatttacaacacccaacacccatgagttcagtccttaagaaggaaaattgagcaagtatttaattggtttggacattgcataaaagaggtccatatccaggctaactctagaaattttattctcaaacttagttggcctntttttcttctgtcagaggaccattcttagtggcactggggaaatcttggcacccagaagaatntcaactgcgctcactgcaaaaatacaatggcctacattggatttgtngaggagaaaaggagccctgtattgtgagctgtgctatgagaaaattcttttgccccctgaaatgttggttccgaatgccaaaaaggg

SEQ ID NO: 6943 - DNA, 438 bp, Homo sapiens
  misc_feature 133, 177, 218, 349, 367: n = A,T,C or G
cccttagcgtggtcgcggccgaggtacaagaagagaggatggagacgagggtaggcttcttttcagattatacattctggatcagaaagtctatatcagtgggattttctgaatgacccaggttttttttgtntgtttttgtttgtttgtttgtttgttttagaatttctgtgcttnggagctagaaggatatataaatgagaaaactgagaacaaangaagagacaatatatttttggttgcaagggataaagacctaactccaacaagcaaagcaaaggggggttttattagaaaagatacattgagctttctatcagaatcaaaggaagaggtgatcaagcccaancctccaaaccagaatcanggtctagaaaaaccagagaccacactctttcttaccatatgtctcttgcttccctctgcctaatggccttg

SEQ ID NO: 6944 - DNA, 687 bp, Homo sapiens
  misc_feature 578, 629: n = A,T,C or G
cccttagcgtgatcgcggccgaggtaccaaagagggcataataatcagtctcacagtagggttcaccatcctccaagtgaaaaacattgttccgaatgggctttccacaggctacacacacaaaacaggaaacatgccaagtttgtttcaacgcattgatgacttctccaaggatcttcctttggcatcgaccacattcaggggcaaagaatttctcatagcacagctcacaatacagggctcctttctcctctacaaatccaatgtaggccattgtatttttgcagtgagcgcagttgaattcttctgggtgccaagatttccccagtgccactaagaatggtcctctgacagaagaaaaagaggccaactaagtttgagaataaaatttctagagttagcctggatatggacctcttttatgcaatgtccaaccaattaaatacttgctcaattttccttcttaaggactgaactcatgggtgttgggtgttgtaaattcacagagggactctgcattccccgcgtactgaatgataaaaatgtaacatgttatacatttaactttattctagtanccacattttaaaagttaaaaagtataatattttacttaaccccaatatatncaaaacatgtaatcccacatataatataaaaatatttaacattttaaaaataccaatt

SEQ ID NO: 6945 - DNA, 630 bp, Homo sapiens
  misc_feature 124, 132, 138, 142, 152, 154, 155, 159, 175, 184, 186, 189,196, 199, 205, 216, 229, 235, 238, 241, 249, 258, 262, 264,272, 282, 283, 292, 306, 312, 318, 325, 343, 344, 362, 364,376, 403, 425, 448, 452, 468, 472, 477, 519, 545, 557: n = A,T,C or G
  misc_feature 576, 583, 590: n = A,T,C or G
ccctttcgagcggcccgcccgggcaggtacttatactaaattatggtagttattctgccttccagtttgcttgatatatttgttgatattaagattcttgacttatattttgaatgggttctanatgaaaanaagggnattngttatttacnanngtgnaaatgaccctattttntttatcaanantantgggttntgngggaantgccttgtacncaaactaactagnaatgtnganaantttttttngtaggaggnattngnggcctccnctaaaaaaanntcgttgganttggggatagaacncaaccntggtcnccccaantaaggttgggaacccaannttaaaaaaaaatttcaancnaaattgggggtntcccccaatttttaatttttccggttnggaaaggccaacccaatttggngggggaaaggaaccaatttcccnttcnttaattaaaaaaaccntttntttcncctttcccaatttggaaaaaaatttttcaaaaaggggggaanttcccccaacctttgggaaaaaaggnaaatgggggttnggaaagggggccaaaaaanggaattnccaaaanaaaaggccggaaaccttaattgggccacccaaaaaccttt

SEQ ID NO: 6946 - DNA, 350 bp, Homo sapiens
ccctttcgagcggccgcccgggcaggtacgcgggggatataaagatcagcgcctgaaacagattctccgggatattaccggagacggagtgttttattattagcctttcttaggtggacatttccatttgaattacaaagtcctttaggctgggcgtggtgcatggctgtaatctcagcaccttgggaggctgaggcaggaagatcacttgaggccaggcgttggagagcagcctgggcaaggtggcaagaaccttgtctctacaaaaaaagcgtctgccatcatggggatgttctcgcagaagcaaatggcacctttgccttaaaccttttgaaaacgctgggtaaaga

SEQ ID NO: 6947 - DNA, 425 bp, Homo sapiens
  misc_feature 144: n = A,T,C or G
ccctttcgagcggccgcccgggcaggtactttatgtgatttccctaaaaagaatgaactaccactacactatggtgttaaaccaaaatatagggaaaataaacactaactgctgcttatggataatgttgcaactactttggtntgccatataaatattttacttttttcacatgtataagattgcatttcttaggtgttttaattttttaaatatatttatgttttaaaaatttagttttgttttctgttttataactatagtgagaatgatgttttgaagcaaaatttttggttataaaatagttttcaggattatatatatatatactggatcctatcgccttttagtagaatatgaaatattcttttagaaatccaatataaaataggttataatagccatattctttattactttattga

SEQ ID NO: 6948 - DNA, 386 bp, Homo sapiens
ccctttcgagcggccgcccgggcaggtacatttttagggacaaagctacatgatagaaatataacttgccggcaggaaaaaatgaaagaaattaattctgaagaagtgaaaattaatgatattacagtagaaattaataaaaccacagaaagggctcccgaaaattgtcatttggccaatgggataaaaccttctgacccaccattggataatcagatgaaacattcttttgattcagcatcaaataagaatttcagccaatgtttggaatccaagctagaaaacagtccagtggaaaatgttactgctgcttcgactctgctcagtcaagcaaaaattgatacaggagagaataaatttccaggttcagctccccaacagcatag

SEQ ID NO: 6949 - DNA, 184 bp, Homo sapiens
  misc_feature 121, 128, 133, 173: n = A,T,C or G
ccctttcgagcggccgcccgggcaggtacaattacattcattactttttggagcccattcatgttaggcttgattaaaaaggtagactcagtagtcagtctcagaatccaatgatcagcantcaagcntatanctaactctagtgtattccaaacctacacttcatgaaaaantatacaactgg

SEQ ID NO: 6950 - DNA, 376 bp, Homo sapiens
  misc_feature 348: n = A,T,C or G
cccttagcgtggtcgcggccgaggtacgaaaaaatcaggctactaagcccactgttaatatagacgcagaccaattgttaggaacaggtccaaattggagcaccattaaccaacaatcagtgatgcagaatgaggctattgaacaagtaagggctatttgcctcagggcctggggaaaaattcaggacccaggaacagctttccctattaattcaattagacaaggctctaaagagccatatcctgactttgtggcaagattacaagatgctgctcaaaagtctattacagatgacaatgcccgaaaagttattgtagaattaatggcctatgaaaatgcaaatccanaatgtcagtcggccataaagccattaaa

SEQ ID NO: 6951 - DNA, 365 bp, Homo sapiens
  misc_feature 134, 139, 151, 152, 181, 235, 271, 280, 322, 328, 340, 344,347: n = A,T,C or G
cccttagcgtggtcgcggccgaggtacttttgattgagatatttatatttttacaaagaaataaaaataaatgaggtgttagtttctttgccatatttaggaaagttagttttcttcctctatttgttattttnaattngtgggaggtttnnaatggataagattaaagccatccatgaantcaataattgaagattcatcccagctttcctaggattaaaacctccaatattcnaggtttcctttaaactgcctttctttgggatttctnctgggtaanaaagaaaaacaaagcttgaaaatattcttctctcctttttcngatttnctcctttttctncctnctnttataacaccaaccacca

SEQ ID NO: 6952 - DNA, 380 bp, Homo sapiens
  misc_feature 52, 61, 111, 117, 130, 162, 215, 245, 262, 268, 291, 349,356, 372: n = A,T,C or G
cccttagcgtggtcgcggccgaggtacttttttttttttttttttttttcgngaggccagnggaaaaacactggtttattttcctttatgaaatttttgtgggtatggtgnagggtntggataacattgnttaatggcttttttgatgttgttttttttganatggagcctcactttgtttgcctaaggctggagtgcaaagcaagacacttgtntttaaaaaaaaagggggggggaggggcatnttctacttttaattgancagcangggaaatccacaaggtgaagaanatgcataggaatattggtgtgatcttcatgatcaaattacaaagccccttattgaaanaaaggancctagatttattattnccaattaa

SEQ ID NO: 6953 - DNA, 328 bp, Homo sapiens
ccctttcgagcggccgcccgggcaggtacatctacctaaaggactattatgtggaataatacatactaatgaagtattacatgatttaaagactacaataaaaccaaacatgcttataacattaagaaaaacaataaagatacatgattgaaaccaagttgaaaaatagcatatgccttggaggaaatgtgctcaaattactaatgatttagtgttgtccctactttctctctcttttttctttctttttttttattatggttagctgtcacatacaactttttttttttttttgagatggggtctcgctctgtcaccaggcttggag

SEQ ID NO: 6954 - DNA, 397 bp, Homo sapiens
cccttagcgtggtcgcggccgaggtacctccactggctgaagtctctacatagctctcaggaaccttcggaaaggcatccaactcttttaccaaacctaaagtttttttccgattcagtcgcctcatcttcaggaaaaccttcctcttccttcatatagtcatgcttgtgttatggtcccagcctaccgccatgtttcacagaagcccgggtcgccggggctcccgcgtacaaccctgaaaaagaggaggctggtcacttgtatagacttatgcaaagcttctgctttgagaaaatatgtggaatttggcaaccccaagtagagtcaccacatgaatgtttatcttaaaaactgtttacaagcacactggtggtaactgtggcttcccaattcgtaa

SEQ ID NO: 6955 - DNA, 322 bp, Homo sapiens
cccttagcgtggtcgcggccgaggtacctgttgtgggaagttttgtctgcagagaagcttgaatagaccccccgactcttcccggagcagaatttgtatggactctctgggtgtggagcccaggcagggctcacttctcaggctgaagtcgctgagatgaatgggcagcccaggctcagccccaggccctgctgcaggcttgtgggaattggtgtctcaccagggtgtgcgcggctcaaggttctcacatcccccaaaaagatctggtgacttctaggcttcctgcctagaaactgaactgagggcacccagttttagaaag

SEQ ID NO: 6956 - DNA, 384 bp, Homo sapiens
  misc_feature 153, 324: n = A,T,C or G
cccttagcgtggtcgcggccgaggtacttttttttttttttttttttttttgggagaaggagccaatgcaatggctagtctttactggaaagaagaaactttacagcacattttgagtaatttagtgcaggtgctcagtgtaccaaagacgtntcatataactacacaattaaccagtaaattaaaatatgtaatttatgagtctcttgctgacattcatagtagctacttgaagattaaaggctttaataagctcttcattaacgtaactagttcactatttttaagttgtaaaaaatgttgttttactaggatgtgcatagncaaatgagcacccacgtttataaaaccgatatgtgctaaagtaataacaatggtgggagc

SEQ ID NO: 6957 - DNA, 543 bp, Homo sapiens
cccttagcgtggtcgcggccgaggtacatgaaggaggaagtttaataaatttcagctaaattaattaacatgccccatgttgtatgaaaagataatcatcccactcattgtatttctcactcaaattctaacagtagtgaccaaaatagatgtatagacctcaacggtctgatatggtagccactagagacttaatggccatttaagttaaaattcattaaaattaaataaaatttaaaactcatctctttatttgcacttactacattcaggggctcaaaaaccacatgtggctagtggctgccgtattagacagagggataaaggacattccacagaaagctctagttagtcaggaagttcttctgctgacagcactggttaacaaggttagcaaaagggttccaatgttaatggggggaaagctcagaaaaatttcccaaattagcattcctttgatcaatatcttcaaatgcatctatatgttttacacacatacacacacaccacacagctgatcttggttatcatgaataatcatat

SEQ ID NO: 6958 - DNA, 643 bp, Homo sapiens
  misc_feature 31, 51, 88, 90, 93, 100, 109, 116, 120, 121, 127, 129, 130,131, 143, 144, 204, 213, 215, 228, 245, 259, 318, 333, 346,388, 413, 415, 477, 495, 503, 521, 579, 609, 610, 626: n = A,T,C or G
cccttagcgtggtcgcggccgaggtactttntttttttctttttttctttngttttttgaagtgccggggtttggttatcgtttattngngtnttgttgngtgacctantgtaaangcannggcttnannntaacccccaccnntttcaaaccccccttgggggaagtttataaaattttccccttcccattattccccaattnaacttggtntnggtaaaaaaaagncccctttcccattaagnccccaaccctttcnccaacccaaaaaattcctctttcttgggccttggccttaaccccggtgggggccccaanccccttccccggccnccaacattggccnggggcctttggcctttggcctttttggcccggccgggggccnttggcctttggcccttgggaaaaangncctttggggtaaaaacccttggccttgggggtccaacccccgggcctttaaccctttttttnggttaccggggggttaanggtttccntttcctttgggggccaanccccaaaaaaaaccccccctttcccccaacctttaaaaaaatttccttggcctttaancctttccttttaaaggaaaaaaccgggttnnccaaacccggaaaccnttgggccttaacccccc

SEQ ID NO: 6959 - DNA, 403 bp, Homo sapiens
  misc_feature 164, 199, 205, 207, 208, 244, 251, 260, 263, 264, 286, 307,316, 359, 390: n = A,T,C or G
gatatctgcagaattcgcccttagcgtggtcgcggccgaggtacttctacagagatcctgaagagattgaaaaagaagagcaggctgctgctgagaaggcagtgaccaaggaggaatttcagggtgaatggactgctcccgctcctgagttcactgctactcancctgaggttgcagactggtctgaaggtgtactttntttttntnntttttttttttttttttaaagcttattttatgggcntaaaatncaggaaaangtnntaataaatgccaaacccgtctntttactttatgaagccaaatntttcctcanacttggtttttaaagccggaatttattccttcaggggccactnttatttttcaaaacctccattataaatattngaatctaaaaaat

SEQ ID NO: 6960 - DNA, 363 bp, Homo sapiens
  misc_feature 342, 348: n = A,T,C or G
ccctttcgacggccgcccgggcaggtacagatgtccagtagacctactggatatgcaggcctgcagctcaggggagagctgggttaagaaccgtcaaggcagtaatcatctgcatttagatggcgagtgaagccatgacgggggctgaaatggcccagcaagaataaatcaaaccatgagaaacacatacatttaagaataaggagatgtggtcaggcgcggtggctcacacctgtaatcccagtactttgggaggccgaggcgggtggatcacttgaggtcagtagtttgagaccagcctgggcaacctagttgaaatcccgtctctgctaaaaatacagnacttanctgggtgtgggtggt

SEQ ID NO: 6961 - DNA, 394 bp, Homo sapiens
  misc_feature 380, 382: n = A,T,C or G
ccctttcgagcggccgcccgggcaggtaccaggagggtattgatgtttgaggtccaaactgaaaacccatcacctccttcccactgctatagcagcgttagccctggggttcattatctagccagttcacaccttctaaagtggggctctgaaaatgtcttacttccctcacagacaaagcaattctcaagcctcctgagatcacccaccaaccagagcaactgctgtcacttggaggtgcagctgaattcttctaattgtgacacaaactcttgaaactgtaaatgctgaaagattaaatgaggttataacactcagaaggttttacaagtaaaagtaagtcaaatcaataggtctttatttcatatctgtaatggttnanctctgcggggaa

SEQ ID NO: 6962 - DNA, 419 bp, Homo sapiens
  misc_feature 28, 30, 41, 44, 71, 164, 342: n = A,T,C or G
catgctcgagcgttcgccagtgtgatgntntatctgcaganttngcccttagcgtggtcgcggccgaggtncaggcttgtcagggagaggcactgggctgtaatgtggccacaatgaggtctcaccgaccccacaaggggctctggaagctgggatggccccanagggtttcccaagttggggtgaggaggccagacctttgtacgcgggagcctaaggcgtgcaaacagagcgccactgggaggctgaaacctttaggccgatgcctgcttgcaaggtcaggcaagctggattctggtccccacctttgcagagagaacagcgatgttgtgcgcccatttntcaagatcaagggaccggcccatcttactacctccaagagtgcttttctctctaataagaaaacatttactttgaaa

SEQ ID NO: 6963 - DNA, 383 bp, Homo sapiens
  misc_feature 144, 310: n = A,T,C or G
ccctttcgagcggccgcccgggcaggtacctttcattggattgtccatggtgcatcgctttagcaagcggcgtgactctccactgcccgtcatcttggccaatatctatctgctggttcctcctgtgctcaaccccaatttgtntattgggagtgaagacaaaagggagattccgacagcgcatccttcgacttttccatgtggccacacacgcttcagagccctaggtgtcagtgatcaaacttcttttccattcagagtcctctgattcagattttaatgttaacattttggaaggacagtattcagnaaaaaaaatttccttaataaaaataccaactcagatccttcaaatatggaaacctgggtttgggggaatcttc

SEQ ID NO: 6964 - DNA, 495 bp, Homo sapiens
cccttagcgtggtcgcggcccgaggtactacaaggactggttagagggttgaatgaatctgtatactcagcacttaacacagcactctgggtaaaagaaaaaagatcctcaaagatattagttggttacatcaagaaaggacaaacttaggttaatctataacttcacctcagaggaacaggaactttggagataaacagggctctgccacttgcaagttgcaccatccctggtttctccatctgtaaattgattaaaacactgcctatctaataagattaaataagttagaagcattcagttaaatgtcaactgaaactattgttcatgtaaattgtgcttgatgctttttctttctagattcaatgattattgtcattttacctccataggccctcaatagaaatcagttgcagagggcagaagcctagatattttcaccttaaaattggagggcgaaagacattgaggtgaggtagagatagagggtcctgc

SEQ ID NO: 6965 - DNA, 411 bp, Homo sapiens
  misc_feature 131, 138, 152, 159, 172, 209, 219, 221, 225, 237, 245, 247,276, 292, 302, 326, 329, 334, 340, 341, 353, 378, 383, 385,396: n = A,T,C or G
cccttagcgtggtcgcggcccgaggtacacttaaaattggtgccgagcagggatataacctgcagttaagttgaaaagaaaatccagcctccccctccaaaaaaagaaaaaaaaatttaattttttaaaanaattagntgggttattggcanattaagnaccaccttttcanaaagggcttattcttttaacccatcctggaaattacncccattcatntngtangatttttaaaangaaccagnangtaccaattctcccattcttgggaaatanatggtttaaacctttngttgttttgncccatttcttctgttttggctccnggnagttnaaaganntggcacaattanatgtaccatgcaagtttttaaaggnaaagntnaaaataaatcnttaaggaaaaaaaaa

SEQ ID NO: 6966 - DNA, 439 bp, Homo sapiens
  misc_feature 332: n = A,T,C or G
cccttagcgtggtcgcggcccgacgtacttggaacctagattataatctagctcctaatcaaactagattctgctccagttcagtttactaaggcattccctctaagctgcctcagtgaaaccagtgagagccactggattacaattctaagtgcagctgtgcctaagaaggagagtcccacaggagaggagaccggagggcataaggcaggggatgatacaaaatcctggacagtcatcacatcagtaacacagcttcataaagtggtgggcttggaggaggggagagaaagaaacaaaatgtcccaataatttaatggcagagctagaanagagcatttacagctattttgggactctccaacagaacacttttcctggatgcacagacattcataatactggtaactctcatcaacagctctggcatgtacctgcc

SEQ ID NO: 6967 - DNA, 453 bp, Homo sapiens
  misc_feature 408: n = A,T,C or G
cccttagcgtggtcgcggccgaggtactacatatgcagaatctgatacaatgttaatagactgattaaaatcttgttaacactgtaatgacggcaaccaactctgctctttgagtcaagtgatactgagttttgatgactcattcttttggcccggtgtaagccacttttccattgctggaaccatcagtaaacactgccagagcattttttaaaggcttatgtttggtaactttaggtaaaatccaagtagtcaattttaaaaactggaagatttttgttttggggtgacgattgtcaataattcccacaaaatcggcaagaccaatctgccatgcaccagaattgataaaggcttgtctaacctgttgcttgttgaaaggaacagtgattttatctgggtcatttncacacaatgttattattcataatcttccctgaccaattaatgtac

SEQ ID NO: 6968 - DNA, 391 bp, Homo sapiens
  misc_feature 382: n = A,T,C or G
cccttagcgtggtcgcggccgaggtacattctctaaagtcacctgtcaataacacactaggcctgcctcctgcctgctataaatatcctcaacaggttataaacagcagcaggctacccgtgttcattgcaagtaaatttactcatcatttgtaggttaaaagcataaggcccgacttcttaaataaacatagggaatttgctgcagcagcaggccagaaaccactgtttcaaatctgcaagattttcctatcaggtgggaagacagagataagaaatatggtaaggcctgaaaaattgcaaaagtagaagcaagtcaggtttgctggatctaagagctaagtttggatcccaaattgcactgaaagaaagtttagaggagncttaaaaga

SEQ ID NO: 6969 - DNA, 516 bp, Homo sapiens
  misc_feature 76, 121, 165, 176, 187, 215, 222, 227, 232, 241, 266, 267,276, 285, 286, 294, 300, 312, 318, 329, 336, 378, 388, 402,424, 443, 447, 461, 481, 482, 483, 500, 511: n = A,T,C or G
ccctttcgagcggccgcccgggcaggtacttctccatggagcagcctgaggcgatccctttattctgggcttctcncataaatggattcccacacagtattcaaagcaatatttccccagnaggaaaatcctattaggaaagaaacttttaaaaaaaactcaagnaattctttttntcttttggttncccaagaagaagttatgtaggaaaatgncttttanaggcnttaanattggaatnaccaattggttatttttttaaaaannaataaaaanatttcatgnnattttaanttaaanatttatttaaangttttnttttatggggnttggaanttttcaattttaaaaaaattttcctttttttaaccttaattntaaattaggnttttaaattttttnttcctttaagaccttggttttncaatttcattttttttaangccnttaaaaaaattttntgggtttttccccaaaaaannnaaaaaggcctaaagaanaagggtttttntgggg

SEQ ID NO: 6970 - DNA, 680 bp, Homo sapiens
  misc_feature 2, 27, 66, 97, 120, 131, 147, 189, 193, 195, 200, 205, 216,217, 219, 220, 223, 231, 253, 267, 283, 291, 298, 309, 321,329, 332, 334, 337, 357, 368, 379, 386, 395, 402, 406, 488,489, 494, 504, 514, 559, 573, 582, 609, 632, 636, 640: n = A,T,C or G
  misc_feature 647, 650, 659: n = A,T,C or G
gngaatgggatatctggcagaaattcngcccttttcgagcgggcccgccccggggcagggtacctnatttctatcatttatttggtataaacggttnttcaaaaacccagttggggcacnacaaggagaanccttcaactcttggtnaattaaaccaaatggaagggaaaataagccccaccgggcggnatcncntctanagccnaccccaaattnntnnttnccaaatgnttttttccccaccaaggacttncccttcccaaggcnccaaacccccaaaaantaaggccngcccctngccttaattangttgggttaagnaaccattnccntnggnccggggctttttcttaaggnccctttggttncccccttcctnctttaangttggtttnctttttnaaantccaaggaataaaacctttggcccctaggggaaaaggccccctttttccaatttttttaaccaccggccccccttggaaaannccaanttccttttcntttttgggcntaaggttttggaaaattttaatttggttaggggttgggttggttntttttttccccggngaaaattanaagcccaaaaaaattaaaaaatttttnaaaaaaaaaaatttggaaaaaanaggntttnggaaccnttnttttgggtncccaattgggggaaatttttt

SEQ ID NO: 6971 - DNA, 427 bp, Homo sapiens
  misc_feature 1, 2, 3, 15, 16: n = A,T,C or G
nnncctttcgagcgnncgcccgggcaggtacccaaaaagcagccaggaatatgtcataccagggctttaccaaagacaatggcgtggtgcctgttgttaaggaattaatgggggaggaaattcttggtgcatcactttctgcacctttaacatcatacaaggtgatctatgttctcccaatgctaactattaaggaggataaaggcactggtgtggttacaagtgttccttccgactcccctgatgatattgctgccctcagagacttgaagaaaaagcaagccttacgagcaaaatatggaattagagatgacatggtcttgccatttgagccggtgccagtcattgaaatcccaggttttggaaatctttctgctgtaaccatttgtgatgagttgaaaattcaaaccagaatgaccgggaaaaa

SEQ ID NO: 6972 - DNA, 371 bp, Homo sapiens
cccttagcgtggtcgcggccgaggtactttggtgttgcttcatactcttcaagtagatgaaagctcctggtaggaactgagcgcagcattagtgcctaataaacatgtattgtttatttatttttaatcagctgtagaacaagactgcttatgacccagttattagctgcacggattaccgacatctttcaaattataatttaataaatcttaggaactcacatttattttgcaagaatacttgtatgcttattttgccaccatgcataactgcaagaaccccacccctcaatctattttctgcctcagttcaataagagattcccctgaaaatctttccatccctgccacttgttgcccctaacaaagca

SEQ ID NO: 6973 - DNA, 411 bp, Homo sapiens
ccctttcgagcggccgcccgggcaggtacgatggtccagatgaccagtcaacagagggacaagcaggccacaacttttcaaagctagaaaaagagattcggcaatgtatatttttagtgcttgagtcttttatcattctatccccagaattagctttttcttggctagagtccagaaatatcaacctaccatctgggcagagaggaattcttattattaccacagattggaagaatgtatctcaggaatttattgtttccgtatcacaagatagaatttccttgcctggaagccatctctgaatacaaagcgtccattcagttagtcagtgtgagattcccccaccagagggataaatgctgtctagattccatgggaaggagtgggctgctgctttcctgattgcaagtt

SEQ ID NO: 6974 - DNA, 551 bp, Homo sapiens
  misc_feature 39, 172, 181, 249, 257, 276, 279, 285, 295, 302, 305, 333,339, 382, 397, 404, 411, 434, 450, 458, 466, 478, 485, 497,514, 515: n = A,T,C or G
cgccagtgtcgatggatatctgcagaattcgccctttcnagcggccgcccgggcaggtaccttatggatgacttcacaagagatccactgtatatcctggacaacaaccacacacatttgctgctcgtggacaatggctgtcatgggacatccccactgtcgaaagcaaaancttcccggnaatcagcctatgagaaagtatattctctggagccgccacctatttccaagtattcccaacctattggntggccaangatccccccatatgttgtngtntttgcnccaaaggganggttggnaanaagaagacttttggaaaagcccattcanattacncttcccattcaaaaaaattaaaaaatttccctttgttgtgggntgggatgggaaaggnctccggngcccaanaattcgccttgatggttgatcgnctaagctctgggttgnggagggtnggaagggnattgccccctgnacaattntttcttgccccnttcaaaagggtagcaanncttgggttgccggctttttttaccccccggcaccgg

SEQ ID NO: 6975 - DNA, 450 bp, Homo sapiens
ctatagggcgaattggagctccccgcggtggcggccgaggtacttgttagccacttgtgtatcttctttggagaaatgtctatgcgaatcctttgcccatttttaaattgggttatttggctttttattgttgagttgtctggataaaaatcccttgtcaggtgtatgatttacaaaacatttttttctcattctatgggctgtcttttcacttacctgatgtcctctgaggcccaaaaatgtttaatgctgatgaaatccaatttatgtatttctggtatttgtgcttttggtgtcatatctaatgaaacattgcataaaggtcttcagttttgaatggaagatattttttaaaaattctgttatttaaattttatatacaaatgatatccatataaataaacaaacatacccacatctcgcaaaacaattaagaattcagattctggt

SEQ ID NO: 6976 - DNA, 426 bp, Homo sapiens
ccgcggtggcggcccgaggtacatgctatggtattaagtcaaaggaaatctgagatctctgaatcatttacagacacactccaatttcctcctggaacatgcagttgccatttgggggcatgggttggtgagaggagggagaaaaggagggaagatgggaagagggcaccaggggctgcatgtaaaggctctgcctcacactgtcagttgttttcagctcactgcatgaactctgtagagagaccagataatttcacaaagcttaccttaatttgcaacctacctagaggagacatggtcaggcagctggatggtgattcttttccagcttgagctgttgacagagttgtagatggtggcttcatggaactggaaaggggagcagccaatgctgttagaagaggaaggaaggcactgggtctgtac

SEQ ID NO: 6977 - DNA, 492 bp, Homo sapiens
  misc_feature 130, 162, 187, 235, 251, 263, 265, 273, 274, 280, 281, 289,303, 312, 317, 337, 347, 363, 374, 381, 394, 422, 428, 433,435, 438, 460, 468, 473, 481: n = A,T,C or G
ggccactgtaaccaagaaagtggctaagagcccaaagaaggccaaggttgcgaagcccaagaaagctgccaaaagtgctgctaaggctgtgaagcccaaggccgctaagcccaaggttgtcaagcctaanaagggcgggcgcccaaaaaagaaaataggcgnaacgccttaccttctaaaacccaanaagggctcttttcaagaggcacactcacttgatcctcaattaaaaagnagccttgggattaatnttccttttacananaaataaannaatatnntattaaanaacataagaggtanccctgcggncccgntttcttaggaaacctaagtntggtaattcnccccccgggggccttngccagggaaantttccgnattatttcaaagnccttttattcggaattacccggtaccgnaaaccntttcngnagngggggggggggccccccggggnttaacccncaagncctttttntgggttttccc

SEQ ID NO: 6978 - DNA, 419 bp, Homo sapiens
  misc_feature 405: n = A,T,C or G
ctatagggcgaattggagctccccgcggtggcggccgcccgggcaggtacattccttatgagggctttcttcctcagtgttctctttagagggtcgagcggccgcccgggcaggtacgcggggacatcaatgcagagtccctctgtgaatttacaacacccaacacccatgagttcagtccttaagaaggaaaattgagcaagtatttaattggttggacattgcataaaagaggtccatatccaggctaactctagaaattttattctcaaacttagttggccttctttttcttctgtcagaggaccattcttagttggcactggggaaaattcttggcacccagaaggaattcaactgctgcttcactgcaaaaaatacaatggcctacattggatattgtangaggagaaaaggga

SEQ ID NO: 6979 - DNA, 399 bp, Homo sapiens
  misc_feature 21, 35, 148, 359, 365: n = A,T,C or G
cggcggccgaggtacaacctnttgctagatttaancaaaaatgcgttttagtctaacaatcctctcctccctggtcacattatcttttccactatatttggaggtccacagagtgtaaactagcagatctgagaactatggatagctntacaaagaggtgtttgccaattggcaaggtttggaaaagacgtaaggttacagttttactgaaagaagaatgagattttattaaatgacagaattaacatatgaaaatgaacactatcttaggaaaagaatacatacctacacacacacacacacacattttcatggttgtttccttgaatatgggtaggattttaagggaagatacttgnagtagnaattttagtgttatggggaaaaaattacaggcac

SEQ ID NO: 6980 - DNA, 331 bp, Homo sapiens
aggtacacagtccaggctctccaaacggaactctacagacagccgccccgtaagtgtcacgtatcggtttggttccgtgggccaggacacacagctctgtttatgggaccttacagaagatatccttttccctcaccaacccctctcaagagcaaggacacacacaaatgtcatgaatgccacgagtcctcctgctggaagcaatgggaacagtgttacaacacccgggaactctgtgccgcctcctctgccacggtccaacagccttccacattcagcagtctcaaatgctggcagcaaaagcagtgtcatggacggggccattgcttct

SEQ ID NO: 6981 - DNA, 365 bp, Homo sapiens
  misc_feature 157, 269, 334: n = A,T,C or G
ccgcggtggcggccgctgagtgaggcgtcggctgtgtttctcaccgcggtcttttcctcccactcttggctggttggaccccgctatggaaaagttggcccctgagccagagctccagcagccttgttagggcgtggcctgaggctttgaataagtngggatgtaaaacgaagatcaggagcagatttgaagaattacaaagtgaattggtgccagtcagcatgtcagagacagaccacatagcctctacttcctctgataaaaatgtngggaaaacacctgaattaaaggaagactcatgccaactttgttttctggccaatggaaaagccancaaattaccaaaatggagtccaaacttattg

SEQ ID NO: 6982 - DNA, 405 bp, Homo sapiens
  misc_feature 269: n = A,T,C or G
ccgcggtggcggccgaggtacaaagagtagctgccccttctcagggcagatgatgctttgagaacatactttggccattacccccagctttgaggaaaatgggctttggatgattattttatgttttagggacccccaacctcaggcaattcctacctcttcacctgaccctgcccccacttgccattcgagcggccgcccgggcacgtacgcgggcacccactccactttcctccacagatgcctcttcttgtggcctttaaggcagnagtcagggagacccccaaggcattggtgaagcatctggcccagcaaaccctgtgggaggacaaaccccacaccttgtgttctggggggggtggaaaagggacaccagggaagtcactttcttattaccttccctta

SEQ ID NO: 6983 - DNA, 872 bp, Homo sapiens
  misc_feature 12, 17, 19, 20, 22, 30, 38, 49, 63, 65, 73, 76, 87, 94, 101,103, 105, 107, 115, 119, 121, 125, 129, 136, 137, 138, 158,160, 161, 163, 166, 194, 197, 199, 210, 213, 217, 219, 228,233, 237, 242, 248, 252, 261, 266, 277, 281, 282: n = A,T,C or G
  misc_feature 286, 301, 306, 310, 316, 321, 323, 324, 342, 343, 353, 358,365, 368, 375, 378, 384, 386, 394, 396, 402, 408, 419, 420,426, 436, 449, 452, 461, 471, 477, 479, 485, 486, 495, 497,498, 503, 505, 506, 508, 510, 516, 522, 528, 553, 560: n = A,T,C or G
  misc_feature 579, 588, 602, 605, 610, 613, 616, 625, 633, 651, 664, 679,702, 716, 722, 723, 730, 732, 745, 757, 789, 801, 805, 814,822, 849, 853, 859, 862, 863: n = A,T,C or G
cctccggccggnggttngnngncccggggnccaccggncccccccgggngggcccaagggggntnaacccttnttntatattttttntctattntattctntntntntccttatntctntntctntctntatcggnnntattttatgggaaaaaaggngnncnccnaccttttttaattttggtaattgggggnaananaataaaataanacncttngnaaaattggnggaangatnatacncccccncaancaatgaccncctcntttcccccccntttnnaacntttccaaattggttnttaangggngggggnctttntnntaacccttggggggggcnnactttctttngaaantaaaccncantgccagnttnggggcntnctttggtntncatccnccccancccaatttatnngaaccnttaagggggnccgttgggtcttnttnagggccccncaacctcacnaagggncnccttannttccaaccnannccttngnncncncccganctttcntcaacnagattttggggggggccaacgctcnccacccnaatttataaaaaaaagaanccaacctgnctttttaaccaagnttnttttnaanagntaaaagganaattcccncggttggggggaattggnccaaacctccttncttttggaaaaattnccccccccccccccccaaaaatnggggatttttttcncttggnnggggccnanttttctttttttnttttaaaaaatnaaattttggggggagcccccttttcgggggcnccggttttttcnttangaaaaaacntttatggntggggggaatttcccccccccccgggngggntctttnggnnaagggggaa

SEQ ID NO: 6984 - DNA, 322 bp, Homo sapiens
ctactatagggcgaattggagctcaccgcggtggcggccgaggtactaactcatccagtatctgattctgtcttttcctctatccatctgtcttccatctttgcatccatcattcaacgaaatttacagcctatgcagatgttctgtggtcttaaacatgttgtattcctctttgccttggccatgcttcctcccctcccagccgttgttctcccccacgagaatatcttctcttttctgcttcttagtggttctattctcagtatctgaaactctcattttctgtgaagttttcccaggtggttccccgcgtacctgcccg

SEQ ID NO: 6985 - DNA, 246 bp, Homo sapiens
ataatttaataacatcgtccttccatttggccgcgactgctctggaaaattggttcagtagtaaacagaattctagcaggtggaacaagaacaggcgaggcatcctgggcctggtctctcctggaggtctgggtgttgcagcctttcaggactgcggctgctgtggcctacacacctgggcctgtgtgcctgtcccgggctttaggctgctttccctacccggctcaaccagtctcccgcgtacct

SEQ ID NO: 6986 - DNA, 171 bp, Homo sapiens
ccgcggtggcggccgaggtaccttccgtgttcacttcgcgctcctggggatactagaagctccacttcagatccttcttgtgacaccatctgagcttcctccaatagataagaaaaaaggcagaggatacactacagttatcagttcccgtcttccccgcgtacctgcccg

SEQ ID NO: 6987 - DNA, 860 bp, Homo sapiens
  misc_feature 167, 176, 225, 245, 261, 326, 349, 367, 425, 442, 479, 537,539, 540, 541, 544, 546, 549, 551, 556, 560, 563, 565, 568,570, 573, 576, 579, 581, 584, 587, 588, 615, 627, 630, 635,639, 703, 722, 723, 724, 726, 727, 735, 744, 745, 746: n = A,T,C or G
  misc_feature 764, 793, 830: n = A,T,C or G
ggcgaaattggggagcctccacccgcgggtggggccgggcccgaagggttaccaaaggaatggtggtttaacttattccggctttttgggaacaggggtttttaccaccaaggaaagccccaaagccggttccctccaagggcctttttggaacccggtggttcccngaaaaaatngcttggaagaattggggggaaaattaaaaaggaactttttggaaggccnttggaatggttcccttgggnaaggggaaagggccantaatttacccaaccaaggaaaaccattttggggccttgggttccaagggaattaattaaccaaanggggttaaaaaggggaacccctnggggaattaaaattcggnagggggcttttggtccaaaagggggaacaattaaaaaattgggttccaacccggttcnccaaggccttctttggnaattaatttggcctttttccggccaaccttgggaagnccaaccaattccaaccaatttttaaagggggaaacccggtttttggaaaaaggaaatntnnnttntnttntnttttntttnttntnttntnttnttnttntnttnttnntaaaaaattaaatttgggcccaaaggnttttttttgggnttnaaaangggnaaaaaaccccaaaaaaaaaaaaccctttgggggggaatttgggggggcccaattttcccaaggnaaaaaaattttttggctgnnngnngggggggnaaaaaaggnnnttttttttttgggggttnccctttttggggggggggcccccaaaggnttttaaatttggggggggggcccctttgggggggggncccccccaaaaaaaatttggggaaaaaaaa

SEQ ID NO: 6988 - DNA, 606 bp, Homo sapiens
  misc_feature 182, 183, 208, 265, 272, 287, 288, 290, 302, 305, 315, 321,325, 379, 382, 390, 401, 405, 407, 415, 422, 429, 434, 441,453, 509, 517, 536, 545, 561, 577, 578, 579, 589, 600: n = A,T,C or G
ctatagggcgaattggaagctccccgcggtgggcggccgcccgggcaggtacttgatagactttcattgatttcacttccaaatctcggtggtcaaggaagctttattcttttttgcaggaaggtttgctcttcagtcatctagccactaaatgttaattatcttgataccttttgaaacannatattgataaaaaaagtgggcctcncatataaaataagtacactacttgactttcaagggtttggaatttttgtttgtattntggattnttgaccctgattttnntntgtagtttcctntgnttttgtctanaaaagnttgnaatattcaatctggattgtttttttaaaccaaccattaagggggggttgtaaanagnaattaacnccaatttccanaaanantggggaanattccangtcttgnaaggnttccttncaaaaccttaanattgggttggggtttccaatttttggaagaaattcctttttttaaaaaaggttttnttaaccgnttggtttggttgggttttnatttccaanggggaaattaaaaaanttggaattttttttannntttttttaanaaaattaaagnaaccct

SEQ ID NO: 6989 - DNA, 424 bp, Homo sapiens
ctatagggcgaattggagctccccgcggtggcggccgaggtacatttggtggaactgagaaatggcataacaccaaatttaatatatgtcagatgttactatgattatcattcaatctcatagttttgtcatggcccaatttatcctcacttgtgcctcaacaaattgaactgttaacaaaggaatctctggtcctgggtaatggctgagcaccactgagcatttccattccagttggcttcttgggtttgctagctgcatcactagtcatcttaaataaatgaagttttaacatttctccagtgatttttttatctcacctttgaagatactatgttatgtgattaaataaagaacttgagaagaacaggtttcattaaacataaaatcaatgtagacgcaaattttctgggatggggcaata

SEQ ID NO: 6990 - DNA, 145 bp, Homo sapiens
ccgcggtggcggccgaggtacgtgttaatagaggctagtttgggtcttgcagaaatgatttcatttgggatgctttggttgtcattggggggcttggttgttggagacgtgagtcttgccgaagatcccggccgctctagaacta

SEQ ID NO: 6991 - DNA, 529 bp, Homo sapiens
  misc_feature 76, 154, 199, 229, 245, 256, 269, 272, 278, 289, 312, 318,379, 389, 390, 392, 455, 457, 475, 481, 498, 500, 521: n = A,T,C or G
gcgtgcgagccctctgccagatcactgatagcaccatgctgcaggctattgagcgctacatgaaacaagccattgnggacaaggtgcccagtgtctccagctctgccctcgtgtcttccttgcacctgctgaagtgcagctttgaccgttgggncaaagccgccttggggttgaaattgaaggctcaaggaaggccagncatcccagtggataacaatccatgggttcncagttaccctcgggcncgcttcttagnaacctaggtgggnatncccccncggggcctgcnagggaaatttccgaataattcanagcctntatccgaattacccgtttcggaccctccggaagggggggggggccccccggtttacccccnagcctttttnngnatccccctttttaagttggagggggtttaaaatttgtcggccgccctttgggccggttaaatncnattggggtccattaaagncctggnttttccccttggtggtngnaaaaaattagtttaattcccngctttcac

SEQ ID NO: 6992 - DNA, 223 bp, Homo sapiens
ccgggcaggtaccgtcttatattttcctgcctggcaagagggtttttatgggaggcgaatatgaggaagaaaaggtggtttggatcaagagatgatgatgattgcaggcatctgggcgccagctagggtccaaggaagttgggatcttctttgtccttggtcaggtcacagtgatcctgtaagtctttaacaaaacgtagccaattgtttatcccgcgtacct

SEQ ID NO: 6993 - DNA, 361 bp, Homo sapiens
  misc_feature 115, 273, 296: n = A,T,C or G
ggctgggttgaagatgttgttgttgtagctggggtctaggaactaagaatggcagaggaacagttaaatcaactttgtcagggtgtttctggaatatagggtcacctagatcaanttaaaggcccgattggctttgggggggggctccatgagaccaagattttcttttggatggtgaacatagtcccaacatcaaatcctgggatataaagtcttaatccccatgacatgccataataccattgagctgaattagcgtcatggacagttatngtaagaggattacaatttttttntagtacctgcccgggccggccgcttctagaactagagggatcccccgggctgccaggaatttcga

SEQ ID NO: 6994 - DNA, 117 bp, Homo sapiens
ccgcggtggcggccgaggtacaatgcacagtgttaaaaaaattactgtaacagcctcatgttcgagaagtctaaaattttaaggctactacatgtgttaattttcagtacctgcccg

SEQ ID NO: 6995 - DNA, 212 bp, Homo sapiens
ataatttaataacatcgtccttccatttggccgcgactgctctggaaaattggttcagtagtaaacagaattctagcaggtggaacaagaacaggcgaggcatcctgggcctggtctctcctggaggtctgggtgttgcagcctttcaggactgcggctgctgtggcctacacacctgggcctgtgtgcctgtccccccgcgtacctgcccg

SEQ ID NO: 6996 - DNA, 404 bp, Homo sapiens
  misc_feature 77, 341: n = A,T,C or G
cactacttagggcgaattggagctccccgcggtggcggccgaggtactttttttttttttttttttttttgggttgngtcaagcactgctttaagtgctctttgtgcatttattcaatacttgccacacactgtcattgttgtcaacacccccattttacagatgagcaggattgagcttttccccaagggcacatggctggtgaatagagacgcctttcaatccaggaactctggctccaaatgcatgcctgggaccactgtgctacagtgcacctttgtgacttcatttttcaaattctgttaattccccgttcaaataaaatatccacaacagggatnctgttttccctgccccattccctttaagggaacaccatcaattcatttttcttaatggtccct

SEQ ID NO: 6997 - DNA, 364 bp, Homo sapiens
aggtaccttccattccagtggagggagaaggatcatggaagccaagcaaatagcttgttcactccaaaaaggcctaggcccagccaccacctctcaccttaaccattgcaataacttaactggtgtccctgctcctacccttctgctgtcctatcaacacagcaaccagagtaatttgtataaaacacaaatataacagaaacacaaaacctcttccccaactttaaaccttctagtcacttcccatagctctttgaataaaattccaaacccattcccatggcctacagacctctgtatcatcaggtccttcccaccatgcaagatcttcctggtctccctcggctgcagccacacaaatctc

SEQ ID NO: 6998 - DNA, 208 bp, Homo sapiens
ccgcggtggcaagaaggaaaaaccttgtttttggagtatcaggctgttccagtaatattaagtcatctaagaatatccagtaaaggactcctgtctaatgttattgatagtttgctccagatgacggtggaatctaaatccttgcagcctttcctggaagcctgtagcactctttattttttcgtacctcggcccgctctagaactag

SEQ ID NO: 6999 - DNA, 348 bp, Homo sapiens
  misc_feature 119, 189, 288, 315, 319: n = A,T,C or G
ccgggcaggtacgcggggagggtagagtgagaagcaccagcaggcagtaacagccaacccttagccattgctaagggcagagaactggtggagcctttctcttactcccaggacttcancacctaagacagctccaaaacaaaccagaacagtcagctccgggggagcacgactgggcgagaggcacanaaatggacaccagaaataaggcccagctccttgtgctcctgactcttctcagtgtgcctcttctcacaagaccttcgggcatggccctctttacagggncaccctttcttgcttcttcaggtttgnggtngaccagaaataccccttttgaggggagcc

SEQ ID NO: 7000 - DNA, 362 bp, Homo sapiens
ataatttaataacatcgtccttccatttggccgcgactgctctggaaaattggttcagtagtaaacagaattctagcaggtggaacaagaacaggcgaggcatcctgggcctggtctctcctggaggtctgggtgttgcagcctttcaggactgcggctgctgtggcctacacacctgggcctgtgtgcctgtcccgggctttaggctgctttccctacccggctcaaccaagtctccccgcgtacctcggccgctctagaactagttggatcccccgggcctgcagggaaatttcgatatcaaagcttaatcgataccgtcgaacccttcgaagggggggggccccgggtacccacctttt

SEQ ID NO: 7001 - DNA, 827 bp, Homo sapiens
  misc_feature 20, 62, 100, 111, 130, 140, 166, 176, 187, 203, 210, 223,234, 238, 266, 278, 328, 347, 358, 366, 383, 388, 394, 396,399, 408, 412, 437, 481, 491, 492, 497, 499, 509, 582, 585,616, 621, 622, 655, 684, 723, 756, 780, 785, 790, 814: n = A,T,C or G
tacggggccgaaattgtttngcctcccacacgcgggcggggccgggcccgccccggggccangggttaccccgggggggaagaaagaaaaataaggccanggtggccttanaaagcctggggcattcaangaaaaaaaancaggaagggggggaagaattttggtngtggggcctngcaagccccgnagggggaagaacccangggaaangaatctggcaatngggtggggggnaaanggggacccctggaatggaattacccacnaagggtgggaanaaaaataaaggaaaaaaggggcctggctttggacctttttaacccaattncttgaaaggggccccaccnaccaattcctngccttggnaaaaaattggggaaagnaattnaaattntnaanacccaattnccancctttaaggaaaaaaaccaaggccnaaagggaaattggaacccaaaatttaatttaaaattgggttccntaaaaaggtnnaaggntnggaaaccaanttgggttttttttttttggcccaacccaatttttttcccccaagggccccccccctttttttaaaaaaaattnaantttcccccaaccaaacccaacccaacccaanggggnnaaaaagggcccaacccaaaaaaaaaaggggggnaaaagggcccacccaaaggaaaagggaanttcccccccctttgggggggggaaagggaaaaaaaaatngggccccccccgggggccccccggccccccaanttctttttttggggggggtttccnatttnccggnaatttgggaagggccccccttccnggccccccccttg

SEQ ID NO: 7002 - DNA, 184 bp, Homo sapiens
  misc_feature 18, 27, 38, 81, 94, 127, 162, 172, 173: n = A,T,C or G
cgactccctatagggcgntttggagcnccacccgcggnggcggccgaggtactgacgtatgaggaatttcatcctttcttnttttctcaacatncacaactgtccatatatagaatttgaatcattngacaaggcggtggatgaattttattccaaggatangaaggcacannaaaatttgact

SEQ ID NO: 7003 - DNA, 383 bp, Homo sapiens
  misc_feature 318: n = A,T,C or G
ccgcggtggcggccgaggtacaacaccatctgacttctctattttgaaactccacaccaggttaatcttgtccatggctgtggcttaaatctaaagtcaggttctggtgttttctggaatccatgcctagctctttgattctgaaaccaaatctggattctggactcttctgcattgattgctaaagcaagtttttgtttggtagcaaaacctgggtaaggtttttgagtgaaggtattgatgaaggattttcaattgatcttctgtgaatttggtgcaattgcacctatgatttgttgctaccatcttgtgtgaagnaggggtcttcaactatgcagaaaggagagttctggaggctgagctactgtctggggagactgctt

SEQ ID NO: 7004 - DNA, 420 bp, Homo sapiens
  misc_feature 55, 404: n = A,T,C or G
ctccccgcggtggcggccgaggtactatttattctgtttaccagacatatagcanccggtcagggagtcttcatagcctgttgcgtcatgtgattccattccagatttttccttttattcctgtctccaaggccccattgtgcaggtgctactaattttcatgaaatgatactaggaggtaaagaaagttcgctggctctcagatatccatcgtgagccacgcgtgtgctgtggttacatccgtggaacagacagacagcagtgcctgatcttgtaattcttccatcctttcattcctttctctcagtctcgtagctgatccacagattgcaacgtacgcgggaactactaaggcctgagcccccttgaccccttgattgccctcactggccttacagcattantgggggaaaaaaaaat

SEQ ID NO: 7005 - DNA, 566 bp, Homo sapiens
  misc_feature 192, 195, 278, 279, 289, 295, 324, 328, 337, 344, 352, 364,367, 374, 380, 408, 419, 420, 427, 444, 466, 535, 544, 548,552: n = A,T,C or G
gatcatatagggcgaattggactccaccgcggtggcggccgaggtacaggggctggagacggggtgggaagtggggcaaacactttagatgagcacagtagctcctgctagctggggcatcagggcactcaccatgtccctgcacaagatgctcacccactccaccttcccatcctggagctgcacaaattngtncccttttcttggagttgatgccaatggtgtcctctgtgtttaggatattgagactcccaactgggccccaaggacttgggggnngatgggaggncttgcnaggcctctttgcccaaaaggctcagggtnttanaaatgcccntggtttnctattttntaccaagccagnggnaaagganaaatgnaggaggtccgtagttttggaagtaaaantggcctccaanntttaaangaccagattcaggttcnaccggggtaccaaggcttggtnattctctcaagggaccccaggcccctggttcaattcggaataaaaggatacccaaaaggccccccttgngccttaccntggncttngccttggggaagga

SEQ ID NO: 7006 - DNA, 180 bp, Homo sapiens
ccgcggtggcggccgaggtactactgaatccaactgccaacaataaaaagacttttatttagtagaggctacctttcccaccagtgactctttttctacaactgccttgtcagtttggtaattcacttatgattttctaatgttctctttgggtgaattttattatcttgtacctgcccg

SEQ ID NO: 7007 - DNA, 417 bp, Homo sapiens
  misc_feature 358: n = A,T,C or G
ctatcactacttagggcgaattggagctccccgcggtggcggccgggtatggtgactcatgcctgtaatcctagcactttgggaggccgaggtgggtggaccacctgaggttaggacttcaagaccagcctggccaacatggtgaaaccccatctgtacgcggggactggttgagccgggtagggaaagcagcctaaagcccgggacaggcacacaggcccaggtgtgtaggccacagcagccgcagtcctgaaaggctgcaacacccagacctccaggagagaccaggcccaggatgcctcgcctgttcttgttccacctgctagaattctgtttactactgaaccaattttccagnagcagtcgcggccaaatggaaggaccgatgttattaaattatgcggccgctctagaact

SEQ ID NO: 7008 - DNA, 365 bp, Homo sapiens
ccgcggtggcggccgaggtactagaaaaaattgtaatcctcttactataactgtccatgaccctaatgcagctcaatggtattatggcatgtcatggggattaagactttatatcccaggatttgatgttgggactatgttcaccatccaaaagaaaatcttggtctcacggagctcccccaagccaatcgggcctttaactgatctaggtgaccctatattccagaaacaccctgacaaagttgatttaactgttcctctgccattcttagttcctagaccccagctacaacaacaacatcttcaacccagcctaatgtctatactaggtgggagtacctgcccgggcggccgctctagaacta

SEQ ID NO: 7009 - DNA, 269 bp, Homo sapiens
cactacttagggcgaattggagctccccgcggtggcggccgcccgggcaggtacagaaatgacacagataaaaatactcatgagcgcaatgtctggagataagcatttcaaagtctgtgccctttttttgtctaccccagtctgcctcttgtgaaccccttcacaggactgaaagcaaaaagcaccccgagacaaaacaagtcagcatgggatttccaggtgaagtacctcggccgctctaagaactagtgggatcccccgggctgcag

SEQ ID NO: 7010 - DNA, 437 bp, Homo sapiens
  misc_feature 5, 17, 80, 345: n = A,T,C or G
cactnctatagggcganttggagctccccgcggtggcggccgaggtacaccaaatgagatactatttggaaaggcaatanagggagtgtaaaagcctaggtagcttaaatacaggctctggaatttccttcgcaggaaggtgaagcaccaatgatggcaaaaattaaataaatacatcatcttaaaaaggcagagggtaggctgcgtgcagtggtttacgcctataatcccagcactttgggaagccaaggcgggcacattgcttgagctcaggagtttgagaccagcctggacaaccccatctctacaaaaaaataaaaatcggcccgctctagaactagttgngatcccccgggctgcaggaatttcgatatcaaagccttattcgataccgttccgacctcgaggggggggcccccggtacccagctttttgtt

SEQ ID NO: 7011 - DNA, 386 bp, Homo sapiens
  misc_feature 268, 269, 327: n = A,T,C or G
ccgcggtggcggccgaggtactttaattagaacaaaagaccgacattaacttcaatgcaacataataattcataataatgattgtatattaatctcttgagcttgcaggaatatagcacatgacatatgacatgatacaggcacctgtgtgatcctttggggacttaggtggtgcatattaattagcccctggaaaataaaatctgtttccttctgagaaaagctacctcagtgcttattggccttaagcccatcaaaaggaaattannatgaaaattacctgttaggcctggggtcctgcacctcattaaaagcctttggtctagnatggtaaaggcacctggaattcaacctggccttctggaggttaaagttcttggactgga

SEQ ID NO: 7012 - DNA, 401 bp, Homo sapiens
ctatagggcgaattggagctccccgcggtggcggccgaggtaccagcatcacctccatcttgactagtgccagcttcagccaataaatttgcattcacattcctatcaccatctggccccgagagtagagcaccatctaaatctggttcttccttgatgagtagtgtattttcttctggataggcaacaggtggctgcattactgagcaatcttctaaattcgtttcattattaggtggaatattataaataaatctttttgtagtttggtttttcctccttgttttgccagtctcttgaattccctgggagcccatattattccaaataaacacttttgtttgaccttcagattcattttcagccatttcagggagatccatcctggacccaactactgt

SEQ ID NO: 7013 - DNA, 834 bp, Homo sapiens
  misc_feature 7, 21, 50, 59, 68, 105, 123, 167, 209, 216, 234, 308, 318,351, 368, 387, 391, 433, 481, 544, 551, 565, 574, 580, 585,591, 625, 639, 643, 652, 655, 675, 684, 695, 713, 717, 734,741, 768, 773: n = A,T,C or G
taatacnactcactatagagngcgaaattgggaagctccacccgcgggtngggcgggcncgcccgggngccaggggttaccggtggtggaagccttcaagcttcntaagaagttggtttttcnacaaggaacacttggtggttttcctggaatccctcaacggaatnaccccccaatggaagaagcctggccccttaaaaaaagccaangaagaangggcaagccggtggaatngggaagaaagggtttcaaagccaaccatggccttcttctggaattccccaagggaaaattcccttgggggttanttgggttggnttttccggttaattccttggttggttgaacccntccaagggttggaaagntttcccaaggggaaaaccntccntaattggttggccccaatttaaaaattccttcccctttcaantggtttaaaaaaaaaattgggggaaaaaagtttttaattaaaaaattngggccccccccccccgggttttttttccctttggggggaaagggttttttaaatttgggtttnggggggnaattttttaaaggnaaattgggnaagggnttttnaaaaanttggggaaacccaaaccccccttgggggggcccnaaccaaatttgggncccnaaaaagggnttnccccctttcccccaaacccnaaaagtttnggggtttcccngggggggccaaccccggncccnaacccttggggtttttnggggggntttaaagggcccctttcctttaaaccntttcntttaagggaaagggaaacccaaaggggttttaaaatttaaaaaaaacccccaaaaaaaaaa

SEQ ID NO: 7014 - DNA, 412 bp, Homo sapiens
  misc_feature 139, 220, 249, 268, 366: n = A,T,C or G
ccgcggtggcggccgcccgggcaggtactgcagccacaggctggctcttcccaaggggcctcttctgggctctctgtagttaaagttctgagtgccagtgaagtggcagctttgtcatcaccagcaagctctgctcctnattcggggggaaagacaggaatggaggaaaaccgcagattggaacaccagaagaagcaagagaaagcaaatcggattgtancagaggccattgcgagagcccgtgcccgnggtgagcagaacatacctngagtcttaaatgaggacgagttgcccagcgttcggccagaggaggaaggcgagaagaaacgcaggaagaagagtgctggggagaggctgaaagagganaagccaaagaagagtaaaacatcttggtgcctccaaaacaaagggc

SEQ ID NO: 7015 - DNA, 386 bp, Homo sapiens
  misc_feature 238, 256, 287, 310, 358: n = A,T,C or G
cactacttagggcgaattggagctccccgcggtggtcgagcggccgcccgggcaggtacgtctccactctgacagatcaggtgaccctcctcatcatcctctacactcctggttcttttccttcggtgactcttcccatgtgaacgacgatgtgaagtactttttttttttttttttttttttcggggtttaattttcctttcctctacctgcattcccaagtaacggaaaggagtanaggtttgaatcttatcanatgttattgtcagtcccgcgttggcaacctntgtctgcaaaaatgtgtaacggncaattaatttgtctctcgtttctgcagcacacaaaatatcaacatagngaaccgatgtaaccagtctgaaaacttg

SEQ ID NO: 7016 - DNA, 263 bp, Homo sapiens
gctccaccgcggtggcggccgcataatttaataacatcgtccttccatttggccgcgactgctctggaaaattggttcagtagtaaacagaattctagcaggtggaacaagaacaggcgaggcatcctgggcctggcctctcctggaggtctgggtgttgcagcctttcaggactgcggctgctgtggcctacacacctgggcctgtgtgcctgtcccgggctttaggctgctttccctacccggctcaacccctgcgtacct

SEQ ID NO: 7017 - DNA, 473 bp, Homo sapiens
ctaacactacttagggcgaattggagctccccgcggtggcggccgaggtacatctctagatgatcacgaatgtcaaatatcacactacactgtgatatggggattccccttgggggttttcatgtgtatagggtgcctgcagctacactaaacatcttaaagctaccacaatgttcacttcatatttttgctttttataggctttctttggtctcctcctatgttcccatcattttcttgctttgaatctgtaagaatcgagttgaatcttctccattttaaattttccataggctgagaaactgtttagccaagtttggataaaattgtatccaaagtaagagtatacaagctatgggcaagtccaaaatcaagctgttcacaggaccatgttctctctaaaggttctaggagagaatccctcatttccttccagcttctgggtggctgctggcattcctgggccggtggct

SEQ ID NO: 7018 - DNA, 616 bp, Homo sapiens
  misc_feature 76, 199, 210, 212, 231, 236, 248, 252, 257, 271, 295, 311,330, 332, 375, 389, 451, 476, 483, 498, 536, 539, 540, 571,586, 604: n = A,T,C or G
cgcccgggcaggtacttcccgtgtctttgaagctgtctcagcttggactttctttgtctcctcctgtaatgtctgnatttctttctcctgcttttcctttaatatagcaatgtccctcattgcctgcaacttcccgctttcaaaacctgggaattgggatattttcccttttttgcaaagaagcgcctgttttttaagncacctgaaaantnttggttctggcaataatcnttggnagggcctgaatntctntggtnctttccttttccgntttcaaattccttccttcccaacnttttttttttggttanaaattaaggccttggtttncncaattaaccccttttccttccaaggggtttggccctccctggntggttaaccccttncggggccccggccttccttaaggaaacctaaggttgggggaattcccccccccggggggccnttggcccaaggggaaaatttttccntaattantttcaaaaaggcctnttaatttctggaatttacccccggtttccggaaccccnttnngaaaggggggggggggggggcccccccgggntataaccccccaaancccttatttttggttttnccccctttttta

SEQ ID NO: 7019 - DNA, 494 bp, Homo sapiens
  misc_feature 29, 123, 140, 142, 154, 156, 159, 176, 178, 196, 220, 234,236, 248, 253, 260, 290, 294, 308, 310, 312, 317, 336, 340,349, 352, 360, 368, 371, 377, 385, 402, 403, 404, 410, 414,416, 470, 494: n = A,T,C or G
ggcatttctcccagggatctctgtgcttncttttgtgcttcctgtgtgtgtggatatttaaaggggctggaaatgtgcaaaaacatgtcactacttagacattatattgtcatcttgcatgtntctagtgaagttaattnanctcccattttcnancangatggtggtgggccctnanaatgggtaaaaagttcanggcaagccctttttctttattttnctcaccccccttgncncattttggaagnatggntccttgntaaagatccttttttcctttttggccttgncaanccttggaagaattnancncttcnggggctccgggctttcctnagtnaaaccctanggntggggaantcccccanccngggggnccttggcnaaggggaaaaatttccnnnaataanttcnanagggccctttaaattcaggaattaacccccggttcatgaacccctttcggaaangggggggggggggcccccccgggn

SEQ ID NO: 7020 - DNA, 484 bp, Homo sapiens
  misc_feature 133, 171, 176, 226, 230, 231, 258, 261, 276, 306, 320, 324,349, 357, 369, 418, 428, 435, 447, 453, 468: n = A,T,C or G
caccgcggtggccggccgcccgggcaggtacaacatcttacgggaagagcatagtatttcctagaggaatatgaacataacaggaaggtatcattggctctgaattaaattttgaacttgtccccttgaatanttacaggtttttggaagcctgaaatcaaattgttatcnagaantgaagtttaggaaattcccaaaacccaagaagccttccctgggtaaccgntccnncccattttcaaaagccttgttgccttnctncacccttcttaatgncccttccttggggcccgccaaccgaaccanggggccaattccgnttcnccttggggaattttcaaggggttgnaattgggnccgatttcaacncccccaccaaaaattggattcccccccaattcttaatttgtaaaagggnccttaattgnccccccntggtcccccccnaatggnccccaattccaaatngtccggccccttgggg

SEQ ID NO: 7021 - DNA, 484 bp, Homo sapiens
  misc_feature 7, 315, 316, 319, 348, 355, 362, 377, 384, 396, 403, 405,407, 415, 416, 426, 430, 436, 446, 447, 451, 454, 458, 459: n = A,T,C or G
acgactnctatagggcgaattggagctccccgcggtggcggccgaggtacaaaaatatggccatttcctctaaattttctttcccctgtttttttttaaggtctgaatttcctgctgctgttcacaaagatgctttttatctttaactttttgttttccccacttccgaccccggcgttgatctgcatcctgacatttggagctgccatcttcttgtggctgatcaccagacctcaacctgtcttacctcttcttgacctgaacaatcagtctgtgggaattgagggaaggagcaccggaaggggggtttcccannaanaacaatgaccctaaacaaggttggctggnttttttnaaaatgnccaaaaaactttttntttgggngggttttttccnaaaaaanangnaactcccnnttttgttttnatanaaaaanggggcccccnntttntgngggnntttttaaaaaaaacccccccccccc

SEQ ID NO: 7022 - DNA, 475 bp, Homo sapiens
  misc_feature 116, 119, 127, 141, 151, 188, 195, 197, 210, 213, 229, 236,242, 252, 268, 295, 304, 320, 322, 323, 326, 352, 353, 360,378, 379, 400, 405, 417, 434, 443, 457, 470: n = A,T,C or G
aggtacctgggaaaaggctgtttgtgtcaccaggtggggagaaattcaccttatggtagaattgctctctttggttcattatttctgtgaactcctcaggagacacacactttcgnggnaggctagngccgttttgggcanggtcttgatngtgccttggaccaccaactttgtccagtggggagagncctggangncagcaatccttgnggnatacctcgtaacatgnaaaaagnaaaacnttggcttgcnttaaaacccaagtagnccccaattataggaagaaagggccacncttaattcncttgggattccccagncnncangtttttcttttgggggcccccccgcnngttaacncttgccccccgggggtcnnggctccgacttccgtaaggtnggggncccaaaccaacnccttaagaaaagtaacnaaccattgnggttggggttttgnttggccaacccanttaaa

SEQ ID NO: 7023 - DNA, 498 bp, Homo sapiens
  misc_feature 184, 199, 219, 228, 239, 275, 302, 311, 315, 326, 328, 332,349, 374, 386, 397, 468, 481, 484: n = A,T,C or G
aggtaccagaaaaggaatctaaatgtttactttctaaaaataaacacaaacagatttctgaaaaatagggaaaagtttacttgagggttaaaagtaggtaatctagaaactatggcttaaaaacaataaatctacaaaaacacaacaaggacttgacaattattatctctaaaataattatagnaggattttttgaatncacttgaaaaaacatggacntcccaacanaactaaaagcntcttcataatacctggccccattttttaaagaatcntggaccttggggttagtaaaacatcantaataaaantaanataactggcananaatntaaacctggttttaagncaatttaagtttttcaatttccatnttaaaataaatngttaggaccantaaaacccatttttttcattttggtcccccttggcttaggaataattaaaaaatttaatttattaaaccancacctggccaaanacncaattccccttttt

SEQ ID NO: 7024 - DNA, 430 bp, Homo sapiens
ccgcggtggcggccgaggtacatctctagatgatcacgaatgtcaaatatcacactacactgtgatatggggattccccttgggggttttcatgtgtatagggtgcctgcagctacactaaacatcttaaagctaccacaatgttcacttcatatttttgctttttataggctttcttggtctcctcctatgttcccatcattttcttgctttgaatctgtaagaatcgagttgaatcttctccattttaaattttccataggctgagaaactgtttagccaagtttggataaaattgtatccaaagtaagagtatacaagctatgggcaagtccaaaatcaagctgttcacaggaccatgttctctctaaaggttctaggagagaatccctcatttccttccagcttctgggtggctgctggcattcct

SEQ ID NO: 7025 - DNA, 303 bp, Homo sapiens
tatagggcgaattggagctccccgcggtggcggccgaggtacattaagcaaacttaagtagaaaagaaactgaatatgttaaatatattaacaacatatttggacttgcttaactaagattatagagatgatcagtttataaaaccaccttcaacttaaataaatttgaactcgaaattgcaaaagcagtctagaggctttgctagtatccttcaaccaatttctagtaaaaatatcctatataaccataattatcaaaaccagaaaaacaacattggtaggatactataaagtacctgcccg

SEQ ID NO: 7026 - DNA, 433 bp, Homo sapiens
  misc_feature 148, 155, 172, 195, 206, 212, 227, 230, 233, 240, 264, 276,286, 290, 292, 294, 297, 298, 303, 307, 309, 315, 321, 324,329, 332, 333, 334, 335, 340, 342, 353, 386, 391, 392, 423: n = A,T,C or G
cgcggtggcggccgggcatttctcccagggatctctgtgcttccttttgtgcttcctgtgtgtgtggatatttaaaggggctggaaatgtgcaaaaacatgtcactacttagacattatattgtcatcttgctgtttcctagttgaantgtttanaattattcttcccaatnttcagccaagtaatggttgttgngcccttctaanaattgngttaaaaagtttcancgncangaccctnttttacttttaattttttccttcnaacccctacatnggtaaattcnaagngngnggnnggttncccntnttcccnccaacnccnattgnccnnnngaatncntttttctcctnggtgttaccttcccctccttccgtgggccttgntctanngactccaacccaacccaataaaaattccttncccccccttt

SEQ ID NO: 7027 - DNA, 387 bp, Homo sapiens
  misc_feature 303, 354: n = A,T,C or G
ctcctatagggcgaattggagctccccgcggtggcaattaaacctgtgtggcctatataaatgaagttaataacttcatagtaagaataaataggtttaactaatgtgatagttttctaaaaggagattgtttgaagacaactattatgtaactgagggaaaagcaacttaactgtatgtgattgtgaatgagaaagttttgtgctatgtgggtcatttatctagacattgctgtggtgaataccagttatgtttgattttattctcaaatcattagttgccttttttttttttttttttttngctttctaggaagaaaacaatcttttttatctagaaggaaagatactttgngttttcatttttagcccatttgaagtttttaaa

SEQ ID NO: 7028 - DNA, 484 bp, Homo sapiens
ccgggcaggtacatcagaatttgttttacccactgatgaacaattgaaggtagggtgtctcatttcacaatataaatcttaacactgtgaggtgtgttatactatgtatgtatcttgttttaagtcatggatttacaaaataatttcaacacattttaggctgtttacttatttcaaaacagggatttcatagactgacacaggaataattagttcagtgttcacagtattcctaaataaatatttacttattacatttatgatactttatttaaaataccacattagaaactttaaatatttcataaataaatctctttttttgggggaaactgtcgcgggaaggaaaggttaaaaaaagtaaaaggaactcggcaaatcttaccccgcctgtttaccaaaaacatcacctctagcatcaccagtattagaggcccgcctgcccagtgacacatggttaacggccgctctagactaagtggat

SEQ ID NO: 7029 - DNA, 397 bp, Homo sapiens
  misc_feature 20, 81: n = A,T,C or G
tacgactactatagggcganttggagctccccgcggtggcggccgaggtaccaaattactgccatgggagtgcacatattnacaaaatgctctacctgctgccaaatggcttactattctgtggaagaaacaaagtatataatcctccccaataacagttatgtattgtttgttcacttaatgtggaaggcaagactgatgcagacacacaaggaaggctcaaaaatataaatctagcagcaatgtcatcttttttgattttaaataccatatgtgcttactgctaatcaggaaatgaacaacctcagtaaaattcatcagtgctggtaaatagtttgctgtagtggaaagctcataacctttggattcaaatgatcctagtttctgtacctgcccg

SEQ ID NO: 7030 - DNA, 171 bp, Homo sapiens
actacttagggcgaattggagctccccgcggtggcggccgaagtggctggctcatttaagatgaggcttctgctgcttctcctagtggcggcgtctgcgatggtccggagcgaggcctcggccaatctgggcggcgtgcccagcaagagattaaagatgcagtacctcggc

SEQ ID NO: 7031 - DNA, 481 bp, Homo sapiens
  misc_feature 161, 204, 219, 232, 247, 261, 291, 303, 309, 327, 329, 337,346, 413, 478: n = A,T,C or G
aggtactcagtgcagcaaagaaagactacagacatctcaatggcaggggtgagaaataagaaaggctactgactttaccatctgaggccacacatctgctgaaatggagataattaacatcactagaaacagcaagatgacaatataattgtcctaagtangtgacatgttttttgcacattttccagcccccttttaaatatnccacacacactaggnaagtcaccataanagggaagccaccagnagcatcccttgggnaggaatatggccccgggctcggcttctagnaacctaagttgngattcnccccgggggcttgccagngnaatttcgnataattcanaggctttattcggattacccggtcggaccctttcgtagggggggggggcccccgggttacccccagnctttttttggttccccctttttagcttggagggggtttaaatttggccgccgcctttggggccgntaa

SEQ ID NO: 7032 - DNA, 325 bp, Homo sapiens
ccgcggtggcggccgaggtactgcaactgtaggtaaactgaaaaaaaataagaaagaaagagttggatgaaaatgtgaaagcccaagtttagatgtgcattaagtattaaatagcacagtatcttcttcatggagccttttttcctcccccatcccctgcaagctgcctttttttttggggggcagggtgggggttgatgttgaactttaagagtttaaaagtttagcttattgagtagttgtcatttaaaatataattgcgaatatcagaaaactcatactggaaaactaaatttttttttttctcttgagacggagtctcgct

SEQ ID NO: 7033 - DNA, 270 bp, Homo sapiens
  misc_feature 2, 17, 30, 40, 45, 49, 50, 54: n = A,T,C or G
gnggtacattaagcttncttaagtacgaantttaaaccgnatatntttnntatnttaacaacatatttggacttgcttaactaagattatagagatgatcagtttataaaaccaccttcaacttaaataaatttgaactcgaaattgcaaaagcagtctagaggctttgctagtatccttcaaccaatttctagtaaaaatatcctatataaccataattatcaaaaccagaaaaacaacattggtaggatactataaagtacctgcccg

SEQ ID NO: 7034 - DNA, 371 bp, Homo sapiens
  misc_feature 150, 290, 339, 344: n = A,T,C or G
ccgggcaggtacgcgggggttggagaaaactaaacaatttgttataaaacatccttaaaagcatcagaaagttaatacagcaatgaagaattacaggaccaaattaagaatgcaaccaggttgccaagaactgagtgatgtgtccacatnccgggagagagaagccaccaaaagctggaagagctaaatcagactgctccctagagcttcagaaggagccagaactgatgactccaagatcttagcccagtgaaactgatctggacttctgaactatgagagatttccanttcctgttgtttgaagctaccacattattgagaacttgtttacagtatncccgnggacactaaacaccaaatgggggcttc

SEQ ID NO: 7035 - DNA, 354 bp, Homo sapiens
agtttgatttcttgcagtcctgagcgatggagcccgggggtgcctggttattgtccgctttctctctcagatgcttggcttgtttttcaagagaacctttttcgatattcattgctccatcgattggatccagtccttgttcagaaaattgtttcaaggcacttaaggctgcctgatcatggctggcttcaatggagcttccaatagcatggaaagtcatctgcacaggggctaatgtcagacaggtcacacactctttgccactttgtctatcacagtagtgaacctgaaagccttgaatccttgctaaatattccagttgttttgaaggttgtacctcggcccgctctagaa

SEQ ID NO: 7036 - DNA, 446 bp, Homo sapiens
  misc_feature 223, 240, 253, 271, 293, 295, 310, 316, 317, 324, 338, 348,360, 368, 370, 371: n = A,T,C or G
catcttgggtcatcgatgagcctcgccctgtgcctggtcccgcttgtgagggaaggacattagaaaatgaattgatgtgttccttaaaggatgggcaggaaaacagatcctgttgtggatatttatttgaacgggattaccagattttgaaatgaagtcacaaaagtgaggcattacccaatgtagaggaaaaaacagaccgaagaaaaaatcttggatggcnttcacaaaggacattgncaaccaaaacaanaatggggaaatacctgtngattgaacaatggagggccagncncaaagtcttgggggnagggannattaacncacggggggcaagnagggggtcangggattctgggnccctggcntnnccctaaaacctggtggccggtttccattaacccaaaaatcattttttccattatttttcttaaacccccttcaaa

SEQ ID NO: 7037 - DNA, 400 bp, Homo sapiens
  misc_feature 6: n = A,T,C or G
aggtancatccacattggattatacatggaattttgtaaaacctacatgagcagatgaaatagaagcattaaatatttttatctatatccaaaaaggagcacatttttatatttacaaaaccgtttaagctggcttgaataatttaaaaaagtttcagcacacctatacccccgatctcagagggggccaccaatatctagctatggatcgtgtgttttgtttagaaatcagtagcttggttttcttacttgtcgagcggccgcccgggcaggtaccactgcactccagcctgggtgacagagtgagacttccgtcttccaaaaaaaaactttgcttgtatattatttttgccttacagtgggatcattctagtaggaaaggacaataaagattttttat

SEQ ID NO: 7038 - DNA, 245 bp, Homo sapiens
ccgcggtggcggccgcccgggcaggtactattttcactgaactgatttgaaaaagccatatattaaaatggcattaccagtgttaactgaaaacaggcaacgtgttttactagaaaattaacctaataaccaaaaaactccacttcttcccagagtgttatattgtgctgacatcccatagataatattataaaaagattttatttttgcaataggctgggttcacagtgagtatgttagtacct

SEQ ID NO: 7039 - DNA, 403 bp, Homo sapiens
ccgcggtggcggccgcccgggcaggtacccatttaatataactatgatgcacttaaattgaagctatgccacaggatagaaaatgaattacaacttaaatacatgttggaagtgtaacactgtttttcaaggtttaaaaaaattcctaatgccttttagccttctttaatatttttaggtaaggaaagtatgtttggattttttcctctttgtaggtatatgagattgaaatgtgaagtatttggacaacaaacgtcaagcaatgggaagccattttgatttcttgagtaatcttgtaagcattaagtgaatgacaaagtagtagtgtaacttatttcttatgttataacttcagtcaattaatataaggatagtttttgttcgagcggccgcccgggcaggt

SEQ ID NO: 7040 - DNA, 528 bp, Homo sapiens
  misc_feature 10, 135, 147, 151, 201, 202, 213, 218, 224, 244, 259, 295,305, 313, 318, 324, 326, 331, 332, 346, 352, 356, 383, 387,389, 399, 405, 413, 419, 421, 439, 445, 453, 455, 471, 521: n = A,T,C or G
ccgggcaggnactcttactacctcttttctaaatgttcaggaaaagcattgccagttcagtcttttcaaaatgagggagaaacatttgcctgccttgtaataacaagactcagtgcttattttttaaactgcatntttaaaaaattnggantagtataaataacaaattataggtagtaaagcccaccttttttatcgggnnacccctgtagnttttntatagnttccttaaatcctaaaacanttttttattaatttnccttcttttctgggaaaaaaaaaactctaacaattncctaacaaangtctcaantccantaattngncaacnnagtaccttaattanccaagnttgnaaggttttggaagttttggggccttcntttncnccaacaaagnttcctnttttggangggctngnaaaattttaacccataanaaaagnttccccangnccgcaatttttaattncaatttcccttcccctgggagggtttaattttttggaaaaaaattggaanttttttt

SEQ ID NO: 7041 - DNA, 340 bp, Homo sapiens
  misc_feature 285: n = A,T,C or G
ccgggcaggtaccagttgtaaaattaccaggaaccgccatgcctcaagatcgccctgttttctggcttcatcaatgactgcatgcagtgcaccaccctgtccactacgtgatgctgtaggattaagtcttacagtgggcggctgaggatacagcgccgcgtcctgtgttgctggtgaattagacgccatcgctgtgggttgctggtatggtgccgtgctatttggcacaggacacaccgcttgaggtctgtattgaacctctgaaggaggccgattactgaagcntcggtttggcaagcccgggtattttgataaaacctacccagcgggttgggggtct

SEQ ID NO: 7042 - DNA, 247 bp, Homo sapiens
ataatttaataacatcgtccttccatttggccgcgactgctctggaaaattggttcagtagtaaacagaattctagcaggtggaacaagaacaggcgaggcatcctgggcctggtctctcctggaggtctgggtgttgcagcctttaaggactgcggctgctgtggcctacacacctgggcctgtgtgcctgtcccgggctttaggctgctttccctacccggctcaaccagtctccccgcgtacct

SEQ ID NO: 7043 - DNA, 403 bp, Homo sapiens
  misc_feature 196, 200, 206, 228, 338: n = A,T,C or G
tacttagggcgaattggagctccccgcggtggcggccgaggtacgcggggagaaaaacagaggggagatttgtgtggctgcagccgagggagaccaggaagatctgcatggtgggaaggacctgatgatacagaggtctgtaggccatgggaatgggtttggaattttattcaaagagctatgggaagtgacctanaaangttttnaaagtttggggaaagaggtttntgtgtttctgttatatttgtggttttatacaaattactctggttgctgtgttgataggacagcagaagggtaggagcagggacaccagttaagttattgcaatggttaangtgagggcttcgggtggtgctataatgtggcactgggatcttgagtaataaatttgcttgtggtt

SEQ ID NO: 7044 - DNA, 438 bp, Homo sapiens
  misc_feature 412: n = A,T,C or G
agctccccgcggtggcggccgcccgggcaggtacgcggggaaaaaagggtggggagtgccctttcttgaaggaatcccttaagtgcacgtctcccgttttcttttcacatcaatgcagagtccctctgtgaatttacaacacccaacacccatgagttcagtccttaagaaggaaaattgagcaagtatttaattggttggacattgcataaaagaggtccatatccaggctaactctagaaattttattctcaaacttagttggcctctttttcttctgtcagaggaccattcttagtggcactggggaaatcttggcacccagaagaattcaactgcgctcactgcaaaaatacaatggcctacatttggattttgtagaggagaaaaggagccctgtattgtgagctgngctatgagaaattctttgcccctgaa

SEQ ID NO: 7045 - DNA, 537 bp, Homo sapiens
  misc_feature 156, 165, 191, 202, 205, 217, 221, 223, 226, 236, 241, 245,261, 283, 311, 313, 320, 326, 331, 343, 391, 416, 418, 434,435, 439, 441, 452, 463, 469, 492, 502, 536: n = A,T,C or G
ggcatttctcccagggatctctgtgcttccttttgtgcttcctgtgtgtgtggatatttaaaggggctggaaatgtgcaaaaacatgtcactacttagacattatattgtcatcttgctgtttctagtgatgttaaatttattctcccattttcanccagaatgntgtgggccctccaggattgggtaaanaggtcaagccnagnccctttttcctntatntntcntacaacaccncttgncccnatttggcaggaatggntccttggtaaagatcctttttncctttttggcctggccaaccttggaagntnacccctnccgggncccgnccttccttaagnaaaaccttaggttgggggattccccccccccgggggccttggccaagnggaaaattttccgggaattaattcnanaaggccttttattccnnaatnanccccgttccgnaccccttccgnaagagnggggggggggccccccggggttnaaccccccanggccttttttttgggttttccccccttttttaang

SEQ ID NO: 7046 - DNA, 441 bp, Homo sapiens
  misc_feature 206, 216, 220, 224, 234, 256, 269, 287, 302, 311, 340, 348,352, 381: n = A,T,C or G
ccgggcaggtacctcctcctgctcctcaagagtgtggtctattttgccatcatcacctgctgtctgcttagaagaacggctttctgctgcaatggagagaaatcataacagacggtggcacaaggaggccatcttttcctcatcggttattgtccctagcaagccgtcttctgaggaatctaagtatgggcatttctttctgggtnttgggcccantttncagnttctcatgtngtggtacccttcggcccgcctnctaggaaactagntgggatcccccccggggnctgccagggtaattncggataatncaaaggctttattccgattacccgttcgnacccttcntagngggggggggcccccgggttaccccaagcnttttttggtttcccttttagctggagggggtttaaatttgccgccgcctttgggccgtta

SEQ ID NO: 7047 - DNA, 394 bp, Homo sapiens
ccgcggtggcggccgaggtactcagaaagtgccgtcgatggtgatccagccctgtgtcactgaggagactcacagcggactagctcttcacttattgatcttggtgttcattgaaacactaagtatatgtgttgtaattcctattcttatctttcttcatagcattcaaaacaattgactacttccttctccttgatgtctatttcatcttggcttctatggcatcgttttcttccaaatgcccccccacctggctgggaagcctctgttttctgtttccttttgctgggcctcctcctctttgtggtttaaactttctaacatggtttgggaatttccccagccttgggttcccagctcattggactttttctctaactggcattggtccccc

SEQ ID NO: 7048 - DNA, 376 bp, Homo sapiens
ccgcggtggcggccgaggtacatattgaacagaaactccttctccagctccagtgtctggtgcttcgtgtaggggcagcgcttcttccgaccactctttgccgtgagccagttggctgcgttttcacctttggaattgcttggaagatgggccaggcagcttggctgtctcaccccagggccctgattgcccaagactcgataaggggagaaagaagggcatcattggtccaatggggaaggcaggaaaaaccgattcgggggtcaagggccctccctcaagtttctccaggagccagggatagatagctgggcgattcccgaggtccaggggaagggaaatggcccttctctggctctcagctcagggccccccc

SEQ ID NO: 7049 - DNA, 387 bp, Homo sapiens
  misc_feature 145, 290, 301, 348: n = A,T,C or G
tcctatagggcgaattggagctccccgcggtggcggccgaggtacgcggggagaaaaacagaggggagatttgtgtggctgcagccgagggagaccaggaagatctgcatggtgggaaggacctgatgatacacgaggtctgtangccatgggaatgggtttggaattttattcaaagagctatgggaagtgactataaagggtttaaaagttggggaagaggttttgtgtttctgttatatttgtgttttatacaaattactctggttgctgtgttgataggacagcanaagggtaggancacgggacaccagttaagttattgcaatggttaaggtgagggcttcnggtggtgctataatgtggcactggatcttgagtaataaa

SEQ ID NO: 7050 - DNA, 423 bp, Homo sapiens
  misc_feature 138, 173, 183, 187, 192, 199, 201, 213, 214, 221, 223, 224,228, 230, 232, 236, 244, 251, 256, 257, 265, 277, 286, 295,306, 312, 318, 320, 350, 353, 367, 369, 371, 379, 394, 396,398, 403, 411: n = A,T,C or G
ggcatttctcccagggatctctgtgcttccttttgtgcttcctgtgtgtgtggatatttaaaggggctggaaatgtgcaaaaacatgtcactacttagacattatattgtcatcttgctgtttctagtgatgttaatnatctccatttcagcagaatgtgtggcctcagaatnggtaaaaagntcangcaanccccttncnttaaattacccnnaaccctncnngggnantnaaanaaaggggnccccttntcccnnccccattngcccaaaaaatnttttctccnggggttttncccccctctgnggggtngggggngnccccccccacaaaaaaaattcccccccccnttntttttttttttttngnanaaaaaccnaaccttttttttttncngngcccntttttttntttttttttttt

SEQ ID NO: 7051 - DNA, 826 bp, Homo sapiens
  misc_feature 6, 10, 17, 21, 25, 27, 31, 37, 41, 43, 47, 49, 55, 59, 82,86, 90, 96, 98, 100, 106, 108, 118, 120, 128, 142, 150,154, 156, 158, 162, 166, 168, 170, 172, 173, 178, 186, 194,198, 205, 207, 219, 234, 239, 279, 305, 310, 315, 328, 335: n = A,T,C or G
  misc_feature 337, 345, 373, 381, 389, 394, 402, 409, 410, 419, 422, 435,436, 443, 451, 466, 476, 488, 489, 502, 506, 511, 518, 526,527, 533, 544, 573, 576, 600, 615, 623, 638, 648, 652, 667,687, 689, 691, 709, 745, 749, 754, 756, 798, 801, 805: n = A,T,C or G
  misc_feature 810, 814, 817: n = A,T,C or G
aaaatnttgnggaaagncctnccancnccgnccgagntagngncagngnctccgnctcnccgagtgaccaagagtttaccgnaatntttncaatanangnttaagntnggcgatagtnantaccggcnccacttggaatagnttgacctngggngngnccanttgnanangnnaccgntgaattcnccttggtnggtnattaagntnggccccaattcnccctccaccatattnggggnataaaaccccaaggttattgggggaaaatttttggaaaanccaactccggttctcccggcctttcnccccnaaggnggggcctttctcnagggccnanttgggttnatgtaaaggccgggcctccggttggtancccccatnggcccaangaggntttatccnccttcgnnggctcccgnccntttcctttaaagnnaaaaacnttaaaggntttgggtgtaaattnccccctcccntccggggggggnnccctttggtcccnaaanggggnaaaaaanttttttcnngggaanttaaattttcnaaaaaaaagggcccttttttaaattttcnggnaaaaaatttaaaacccccccgggnttcccggggaaaccnccctttcntggtaaaggaagggngggggggggngggnggtccctcccccggnggggtttaaacccccccccnananggcccttttttttttttnggggttttttcccccccctttttttttaaagggttngggnaaaangngggggggtttttaaaaaaatttttggggcccgggccccgggnccntttnttggngggnccngggttaaaa

SEQ ID NO: 7052 - DNA, 436 bp, Homo sapiens
  misc_feature 13, 372: n = A,T,C or G
ctccttagggcgnttggagctccccgcggtggcggccgaggtacaagtggcagcgctggtgctcccaggattaccgcctaattcatcataaatatgtttccactgacggcgggctgttattgtttcatatcctcccagtttttgagcagcttgaaacatagtccaaaggttaatctgtttaaaacctaaataggggtattccgtttcgagcggccgcccgggcaggtacaaaggaaattattgggataaatagcaaaatctgaataaggtctatagattaaatagttcacttaagtgttaatttccttagtttgccaatggtaatattgttatgcaaaagaaacatcgtgattttaggaaatacaccaatgnaaatatttaaaacatcattgtcttcaactggacaccacataatattgaaaaaacatcatgtgga

SEQ ID NO: 7053 - DNA, 390 bp, Homo sapiens
  misc_feature 5, 85, 88, 143, 205, 214, 268, 290, 303, 342, 366: n = A,T,C or G
cactnctatagggcgaattggagctccccgcggtggcggccgcccgggcaggtactttttttttttttttttttttttttttttnganaaaatgtcttttgcccattttctaatttgattttttttttctgttaaggtttganaattccttatatcagaggatatataataatatttgcaaaccatttatacaacaaagtacagngggcgtagngctgttattggaacctattttggaacctattccacctttggatgatgttgccanaccagtcaaacccacaggtttntggttagctgacnaagtagcaggtttcccagaattgttttgggttgttgaantcaattttgctgttgaaggaccanccagagggaagttttggctgcaaa

SEQ ID NO: 7054 - DNA, 216 bp, Homo sapiens
  misc_feature 5: n = A,T,C or G
cactnctatagggcgaattggagctccccgcggtggcggccgaggtactctttctttagcatgcaaaatcgcccagctaataagccaaaaaatttttcgtatgtcctctgttgggcacagcaatcaagtatcatgttgcagagttcttttgtttggctttcaggaaactccattttcagcaatttgtgagcacattcttccccgcgtacctgcccg

SEQ ID NO: 7055 - DNA, 376 bp, Homo sapiens
ccgggcaggtacagagccatggtataaattaacaggttaatgtcagtcatcagatcttccttctcttcctaaggatgcttgtgttgcctcaatctatcaatctatctttcttgttttgggttgttttctctctctctctctctctctctctctctcttcttagagacatggtctaaccatgttgtctaggatatagggcagtggctattcacagatgtgatgatagcacactggagcctcaaactcttaggctcaggcgatccttcaagcctcccggggagctgggaccacaggcacgtgccaccacacccagctctctttcttggtttttcatcatttcatgtatctatcaaagcccagttcacctcctccccca

SEQ ID NO: 7056 - DNA, 473 bp, Homo sapiens
  misc_feature 151, 155, 161, 181, 183, 196, 211, 232, 234, 260, 266, 282,293, 298, 319, 332, 341, 363, 370, 382, 387, 411, 446, 472: n = A,T,C or G
ccgggcaggtacacacatgagaactgaaatggcccaaacccagaaagaaagcccaactagatcctcagaagacgcttctagggacaataaccgatgaggaaaagatggcctccttgtgccaccgtctgttatgatttctctccattgcagncagnaaagcncgttcttctaagcagcacangncaggttgaatgantgggcaaataattangaccaccaccttctttgtagngnagtcattgcaggtagggtactccttnggggcncggcttcttaagtaanctaaggtgggnattcncctcccgggggccttgccagnggaaaatttccgnaattattcnaaaggccttttattccgaatancccggtnccgtacccttcngtagngggggggggggcccccggggttancccccaagccttttttcgttttcccctttttcagnttggaagggggtttaaaattttgccnc

SEQ ID NO: 7057 - DNA, 368 bp, Homo sapiens
ccgggcaggtacatattatatgcaaggttacaaaaaaaaatcaatggttaatgattttttagctcaaccaagctaaaagatgtgaacaagaaattgaactcaaaacaacttaagatacaaagctcttgttactgataatgtctaataatattcatcaatttaccatatcttgttcttatattaaaatgttctatcattttcctaattattttaaagtcgattacaaaaatatatatatattcttgtagtgccagaaaattgaatacattaataaatggggtagaatagatgaatctcccatgaagaagaattccaaataatttatgaactctgccctcaagggatatggagcagaacttcctacttct

SEQ ID NO: 7058 - DNA, 405 bp, Homo sapiens
  misc_feature 368: n = A,T,C or G
ccgcggtggcggccgcccgggcaggtacctaagaaatgttcactattataaactggacttgatataaaattattgtaaaaacctttatgtttaccttgttcaagacacatttgagttaaagcagcatttctcgaaatgtggtttgcaaactcttggggatgtcctgagaccttttcagaggatatgcatggtcagaactattttcataacaatattctaatattatgcacctttttcattctcattctctcacagattgcagcagagttctccagagactacatgacatgtgatgatgtaatcattctaatggaatttatatttgtgtagaattttctaaattagttaggtttaaaagtattaaagtngtaccctcgggccgcttctaagaactaggtggggatt

SEQ ID NO: 7059 - DNA, 380 bp, Homo sapiens
  misc_feature 175, 204, 221, 232, 237, 241, 246, 262, 264, 269, 271, 275,276, 282, 286, 288, 297, 303, 319, 342, 343, 350, 354, 355,357, 358, 359, 360, 361, 362, 363, 364, 366, 377: n = A,T,C or G
ccgcggtggcggccgaggtacgcggggaatcccttaattaaataagcttcccctctacaggcttttgaagtggtagcagttcctcctaactcctgccagaaacagctctcctcaacatgagagctgcacccctcctcctggccagggcaagcaagccttaaccttggcttcttgnttctgcttttttttttggctagaccgaantgtaccttgcccggggnggggggttttntaaanatantgggntcccccccgcccgcgngnggggngngganntttttnaaancnttttttttnttcccnccccccccccccccgnggggggggggggggggggccccnnaaacccnaaanntnnnnnnnntnccctttttttnggg

SEQ ID NO: 7060 - DNA, 944 bp, Homo sapiens
  misc_feature 2, 10, 22, 24, 31, 35, 41, 43, 47, 49, 55, 57, 65, 71, 80,86, 103, 105, 149, 157, 175, 177, 179, 187, 193, 205, 207,221, 225, 227, 229, 244, 262, 273, 302, 315, 327, 338, 362,371, 373, 378, 380, 408, 424, 457, 459, 478, 493, 498: n = A,T,C or G
  misc_feature 515, 529, 543, 565, 580, 583, 584, 586, 592, 604, 612, 617,628, 633, 637, 638, 639, 655, 670, 674, 699, 704, 720, 734,755, 759, 764, 776, 777, 781, 782, 783, 812, 816, 826, 845,851, 885, 895, 896, 924, 928, 944: n = A,T,C or G
cngaaaaatntggggtaagtcntncccaccncggncggagntngtgncncttagncnccccggcntttttncccaagttncggggnggaaaaaaccccttggntnccggtggccccaagccttggccaattttaaaaatgggaaaattncgggggcnccaaacccgcccgcccgngngnggaaaggnaagggnccgggttttttngnctgttaaatttggngagncngnccttcctttctccgncgttttccctttccggcnttcaaaccttnggaacctttcgggcattggccggccttcngggggtttccggnttttcccggggnccttggccagnggcccggaaaggcccgggggttantttccaaangnccttncnaacctttccaaaaaaaagggggcccggnggggttaaaaattaanccggggggttgttaaatttcccccaacccaaangnaaaaataatttcccaacgnggggggggggtaaanttaanaacccgggccccaaagncggggaaaaataanggggaaaaaaaccnaattttgggtttggggaaaagntccccaaaaaataanaanngngggggncccccaaaggtnctaaatantaaanaaagggggggnccccncatnnncggggaaaaaatcccncccggttttaaaaanaaanaaaaaggggggggccccccggggcncgggntttttttggccctttnggggggcccggggnttttttttttttacctccaantttnaaggngggccctttccnnccgnnncccccccccccccctttgggaaacccggnaaangggccccaantttccaaacccaaaaaaanaaaaanaaaattttccggggaaaacccgggcccttttccnaaaaaaaggnnttcccaaaggggaaaaggggggtttggngggncccgggaaaaaaaaan

SEQ ID NO: 7061 - DNA, 452 bp, Homo sapiens
ccgcggtggcggccgcccgggcaggtaccctgctgcattggagatgatctcaataagccctcgcaccttggtcttggcgttgaggtgagattttaaaagtcaccagattagtttcaaatgaacagccttgagaatcttagaatatcttgagggtaagttaacgggtgtcattgtaggaggtgatagagaagtaggccaaacccaccaccatgctctgggcctaatacagtcttttcctattgaaaagtgacggttggggaagaaaaaaaatctcggcctgtttctgttactgtagtagctagcacttatgaattggcaaagtttcagagaccctccctcccctatgtcagatactacaataccatacaggattaaaggtgtaatatgcagatcaagacctagagattaaatacagacttcaggtaggctgctgcttggaatacttattattt

SEQ ID NO: 7062 - DNA, 411 bp, Homo sapiens
  misc_feature 350: n = A,T,C or G
ccgcggtggcggccgaggtactttaccaagtacggcacttgggaaatgctgtgtccacatacttaggaaatggcttcagttaacactgggcttgggaagggctctcttatccaaggagcagtcttctctggagccatgaaaccagcctgggcagcactggtaataaactagtctgtgaaatctggcaaagcctctgtcctgtttggatataccgcaaaactgccttttaccatttccattgctttttattacttaatctcccaactttgtgcctggtgtcttttttttttttttaaaatagaaaatttttgaggtaattatgtattcatataaaagtctttggtggatangctttttcccacaagcactttggttagaaatgggcccccatttacctcaattttgttttat

SEQ ID NO: 7063 - DNA, 497 bp, Homo sapiens
  misc_feature 136, 142, 162, 188, 192, 200, 226, 234, 238, 261, 277, 295,303, 314, 330, 335, 371, 389, 391, 405, 410, 425, 448, 485: n = A,T,C or G
aggtactcagtgcagcaaagaaagactacagacatctcaatggcaggggtgagaaataagtaaaggctgctgactttaccatctgaggccacacatctgctgaaatggagataattaacatcactagaaacagcanagattnacaattataatgttctaagntaagttgacatgttttttgcaacatnttcncaggcccnctttaaatatcgcacaacacaccagngtaagcancacnataggtaagtcaccagtaggatncccctggggcagtaanattggctcccggtccgcnttctaagnaaacctatgtnggggattcccctccgngggcnttggcaagggaaatttcggattattcaaaggccttnattccgtattacccgttncngaaccacttctgtnagtgngggggggggcccccngggttaaccccccaaggcctttnttttggtttccccccttttttaaggttggaagggggnttttaaaatttt

SEQ ID NO: 7064 - DNA, 432 bp, Homo sapiens
  misc_feature 393: n = A,T,C or G
tacgactcctatagggcgaattggagctccccgcggtggcggccgaggtactttttgaattgttgcagtgttggagatgccattttcacctttttaaaaagatgcattttatttgcaggtttgtgaagttcttgcaaactcttactacagaaatgttttaaatacattctcaggcatgtttgcaaaaatatggcacatgtatacattttaggaaatgttacttttgttaatctttaaaaaatacacctaatgaaagacattccactattatgcgtaatggctcagcctttttgtaaaggaaatattttaaatttgtattttttgtgttttataacagggtattttcaccaccaaataattttggttctttaaatggcagcccacctattaacnttggataaggtcattggcacctattttaaaaaagttttt

SEQ ID NO: 7065 - DNA, 396 bp, Homo sapiens
ctacttagggcgaattggagctccccgcggtggcggccgcccgggcacggtaccatgctgacttcttggtatcttttaaggcctaattttcccttccttgagattactgtagtgtgttccagctaatttctatttggaaacgagttggaacagctgaaaactaggtattattgaaggcaaagcagcctcacgtcagttttttatcagctcatttgggaagtttttttttttttttttttttttttaattaattagaaagtaggctgggcacggtggctcatgcctataatcccagcacttggggaggccgaggatctcctctctggtggatcacttgagggcaggagttaagagaccatcctggccaacatgatgaaaccctgtctctactaaaaa

SEQ ID NO: 7066 - DNA, 439 bp, Homo sapiens
  misc_feature 4: n = A,T,C or G
actnctatagggcgaattggagctccccgcggtggcggccgaggtacacagatgaagtagcaccggggcagcaccaccatcttaagatgataaaccaaactgcacatacattaaatgaaaatacatatatgtttaatttggcccaccctgtagccaagaggtgtaaggaaagtacagataccttgtgtgattgtggaacgcagtcaaggtggatgtcagggtcggattgtccacctgagcaattcctttacccagactgtcaattgcaggaagccatttttttcctcctggtagtaaatgtcagagtaagagaaacaaactgtttagaattatcatgtttttaaaacatcatagtaatataaatctgctgttaggagctccagttgctaaaacctcaatttaagtctttaaaagggttgtattttggaatgtaaccaaa

SEQ ID NO: 7067 - DNA, 401 bp, Homo sapiens
cctacttagggcgaattggagctccccgcggtggcggccgccgggcaggtacgcgggacatcaatgcagagtccctctgtgaatttacaacacccaacacccatgagttcagtccttaagaaggaaaattgagcaagtatttaattggttggacattgcataaaagaggtccatatccaggctaactctagaaattttattctcaaacttagttggcctctttttcttctgtcagaggaccattcttagtggcactggggaaatcttggcacccagaagaattcaactgcgctcactgcaaaaatacaatggcctacattggatttgtagaggagaaaggagccctgtattgtgagctgtgctatgagaaattctttgcccctgaatgtggtcgatgccaa

SEQ ID NO: 7068 - DNA, 298 bp, Homo sapiens
tacttagggcgaattggagctccccgcggtggcggccgaggtacactggaggctggagcctgcagatggcatggctctgcggctcaccttgctgcagttggtggtggtgacagagactgcagcttgactgtagtggtaagaggatgcctgtggcagccagatgataggggccttatagggtgggccagtgcattgagggtgacagcagaggtggttgtattggcatcagtgctagtggtggcagcagcagcaagtctgggaaaaaaaaaaaataacaaaaaaaaattgttcctgcccg

SEQ ID NO: 7069 - DNA, 354 bp, Homo sapiens
  misc_feature 33, 110, 115, 122, 126, 138, 173, 176, 178, 182, 184, 204,215, 233, 277, 286, 291, 295, 298, 307, 318, 320, 327, 344: n = A,T,C or G
aggtactttttttttttttttttttttttttgntttaatattttttattaagggctataaaaatacccagaaagataaataaatgtgatgcaatgatatctgtcctaatntgaanaactttntttnactgcattgttnatccttcacaatggccttttaaaaatcacaagganggncntgtntnttttcccattgccattctcnctactttcttnttaatgtacaccggctancaagggatattccttgaattcacgtattccccccggcaccctanaggactctnctctntctnatnaaaatgcanacaggtgccantnttttccnaaattccccaaccccgntttttaaaaa

SEQ ID NO: 7070 - DNA, 378 bp, Homo sapiens
  misc_feature 222, 223, 224, 276, 334: n = A,T,C or G
ctacttagggcgaattggagctccccgcggtggcggccgcccgggcaggtaccatgctgacttcttggtatcttttaaggcctaattttcccttccttgagattactgtagtgtgttccagctaatttctatttggaaacgagttggaacagctgaaaactaggtattattgaaaggcaaagcaagcctcacgtcagttttttatcagctcatttgggaagnnnattttttttttttttttttttttaattaattagaaagtaggctgggcacggnggctcatgcctataatcccagcacttggggaggccgaggatctcctctctgggtggancacttgagggcagggagttaaggagaccatcctggccaaacatg

SEQ ID NO: 7071 - DNA, 512 bp, Homo sapiens
  misc_feature 162, 180, 185, 202, 218, 239, 249, 261, 280, 306, 307, 315,321, 327, 339, 348, 360, 374, 380, 381, 383, 397, 401, 411,414, 426, 429, 439, 440, 457, 479, 500, 503: n = A,T,C or G
ccgggcaggtacccttggttccccttggaatcattttcatttttcttcggcgatattttttggaaacgtcaagagatgtgaagcgcctggaatctacagctcggagtccagtgttttcccacttgtcatcttctctccaggggctcctggaccattcccggngccattaccaaaaggcanaaagnataagggtggttcaagngaaacctgttttatgnattggccaccaaccccagggnaatttttaancaattttccagnaaggggccttttggggttnttcctttggattttttttatggaacnnaaatcctngttccncccggncattgggggttnttccgggcncccggttccccngtttactttggggnaattgnncnccaatttccttggntggncccccaaatnggntttttttgggtnccnatttccaatnncccggttttgggccccntttttttgggggggtttccccnccttggaatttttcccttggnggnccaaaaaaa

SEQ ID NO: 7072 - DNA, 475 bp, Homo sapiens
  misc_feature 178, 182, 211, 222, 230, 252, 254, 270, 308, 315, 325, 332,342, 344, 347, 349, 351, 363, 393, 417, 441, 454, 460: n = A,T,C or G
aggtactgatggggaagtgccggcgcttcttggatgaactagatgcggttcagatggactgagcttggatgcttctgaggcaagctgaagctttgggttctgactgacccaccctacaggactgctgaacagagagcccagtgtggactaagggatcctgagtttttctggggacaanttcncagcttttaatcaaataccattttttgtntagaatggtgnccattaanaattgcaggactttttttaccncncttttaataaagggcnctttaggatgttaaaataaaacctgcacccccaagcanatataanaagatatatnatacaanaaaaacatananaanananaaaagagaggtnacccttgtcccccgggggccgggccccgtnttcggaaaattttacctaccaatnattaccttattaaaaaccattatntccaaattaccantggccntaccccaaaaaaaaa

SEQ ID NO: 7073 - DNA, 420 bp, Homo sapiens
taatacgactcctatagggcgaattggagctccccgcggtggcggccgaggtacgcgggatgtgaaggcttgtgatgggattggaggagctatgcataaggcaatgctaatggctcaagcaatgagggggctcactctaggaggacaagttagaacatttgggaaaaaatgttataattgtggtcaaatcggtcatctgaaaaggagttgcccaggcttaaataaacagaatataataaatcaagctattaacagcaaaaaataaaaagccatctggcctgtgtccaaaatgtggaaaagcaaaacattgggccaatcaatgtcattctaaatttgataaagatgggcaaccattgtctggaaacaggaagaggggccagcctcaggccccccaacaaactggggcattcccagttaaac

SEQ ID NO: 7074 - DNA, 440 bp, Homo sapiens
actacttagggcgaattggagctccccgcggtggcccgcccgggcaggtactacatatgcagaatctgatacaatgttaatagactgattaaaatcttgttaacactgtaatgacggcaaccaactctgctctttgagtcaagtgatactgagttttgatgactcattcttttggcccggtgtaagccacttttccattgctggaaccatcagtaaacactgccagagcattttttaaaggcttatgtttggtaactttaggtaaaatccaagtagtcaattttaaaaactggaagatttttgttttggggtaaccgattgtcaataattcccacaaaatcggcaagaccaatctgccatgcaccagaattgataaaggcttgtctaacctgttgcttgttgaaaggaacagtgaattttatcttggggtcatttccaca

SEQ ID NO: 7075 - DNA, 157 bp, Homo sapiens
aggtaccttccgtgttcacttcgcgctcctggggatactagaagctccacttcagatccttcttgtgacaccatctgagcttcctccaatagataagaaaaaaggcagaggatacactacagttatcagttcccgtcttcccccgcgtacctgcccg

SEQ ID NO: 7076 - DNA, 404 bp, Homo sapiens
  misc_feature 1, 61, 74: n = A,T,C or G
ncggcgaattgtttctccccgcggcggcggccgcccgggcaggtactcggggctcttccanaggaggcctacantccgccgcttgtgctgcagccatgtctctagtgatccctgaaaagttccagcatattttgcgagtaccttaatgaatgcattttatttatctcaatttttatttgcttcaaaatagaattggataagtttaaaatgttcctcttacatttgtgaatgtgtctatgagagaggggccatttctcacatattttaattaacaactaaataaacagacgttgttttaaaggaattaacacttaaatcccaaccatcctcatatagaataaaatatcaacctaaatctttactatagatagtataattctattatgtacctcggccgctctaga

SEQ ID NO: 7077 - DNA, 376 bp, Homo sapiens
  misc_feature 10, 17, 19, 22, 23, 85, 86: n = A,T,C or G
agggcgaatnggagctnancgnngtggcggccgccgggcaggtacgcggggacatcaatgcagagtccctctgtgaatttacaanncccaacacccatgagttcagtccttaagaaggaaaattgagcaagtatttaattggttggacattgcataaaagaggtccatatccaggctaactctagaaattttattctcaaacttagttggcctctttttcttctgtcagaggaccattcttagtggcactggggaaatcttggcacccagaagaattcaactgcgctcactgcaaaaatacaatggcctacattggatttgtagaggagaaaggagccctgtattgtgagttgtgctatgaaaaattctttgcccc

SEQ ID NO: 7078 - DNA, 540 bp, Homo sapiens
  misc_feature 143, 207, 221, 229, 233, 249, 260, 298, 300, 302, 306, 326,327, 348, 354, 368, 377, 393, 406, 414, 417, 419, 430, 447,464, 469, 471, 488, 496, 498, 504, 512, 514, 521, 527: n = A,T,C or G
ccgggcaggtacagctgaggaaataaatggcagatgttacacaggaagcaatataacatggtcattaagtaactgtattcaaccatcaaatttaattttaaatcttggcacagtgcccacaagccgtgtgactttagtccccnttggataaatataaaacgttcattttctctcactttataaataaaaaggaagaacaacctaaanttgggtaaccctcntggcccgncctncttagaaaacctaagnttggggattcnccccccccgggggccttgggccaaggagaaaattttcngnantaantacaaaaaggcttttaattnncggatttaaccccggttttcnataacnccttttcgaaaggngggtggtgnggggccccccggggtntacccccccaggncttttttnttngnttttccccccnttttttaaggttggaangggggggtttttaaaanttttngncctggcccggccttttnggggtccngntaaaantttccaantnggggttncaattnaggcccttgggtt

SEQ ID NO: 7079 - DNA, 265 bp, Homo sapiens
aggtacaataagcacattttttcaaatagccgtagtctaacagttacatctattgagaacaaatgacagaatgattaaacattcttcacttgtccaaaaaacgtgttatatacttaaataaatgtgttatagaaatgaatccatgtttttcagtgttttcatttcagcttgatctcaaacacaaaagatttatacaaaactcacctatctgcttaccacatcaaccaaattaccaaattctctttaaggacatagtacctgcccg

SEQ ID NO: 7080 - DNA, 398 bp, Homo sapiens
  misc_feature 325, 365: n = A,T,C or G
ccgcggtggcggccgcccgggcaggtacttgttctgggcacttaattcaacaaatggtcctgggacaactaaatatccacatgtaaaagaatcaagttagactccctcctcgcacataaaaattaactcaaaatggatcagagacctaaaggtaggtggtaaaattataaatcacttagaaatagtaaatctttgtaatgtgggataagcaaagttttcacaaatatgactgaaagcacaagccaacaaaagaaaaaataaattggtatttccatcaaaggttaaaaaaccattttggggctgaaaaagttcttatcattcaagnaatgtgaaaaaggacaggtaccctcgggccgcttcttagnaactaggtgggatcccccggggcttgcagggga

SEQ ID NO: 7081 - DNA, 392 bp, Homo sapiens
ccgcggtggcggccgaggtacatgaactaacacgcacaggagaggtcctggttcagttccattaatgcagcgagtgagacctgaggtgcagaccaaccaggtattgttgggtgcttggtaagagactgaggtcgagcggccgcccgggcaggtacttagggtaagcattaacaatattattcaaaatgttatatagagttcaactgtatacaatagagcatttattaaagtgtgtccaaagcgcttataaataaagcatcttcgaggcaggcggctcacttgaggttaggaggaaagcagactgaccaacatggtgaaaccccgtctctgtggtcccagctacttaggaggctaaggtgggaggatcacttgaggacaaagaagttgaggct

SEQ ID NO: 7082 - DNA, 388 bp, Homo sapiens
ccgcggtggcggccgaggtacaaagagtagctgccccttctcagggcagatgatgctttgagaacatactttggccattacccccagctttgaggaaaatgggctttggatgattattttatgttttagggacccccaacctcaggcaattcctacctcttcacctgaccctgcccccacttgccattcgagcggccgcccgggcacgtacgcgggcacccactccactttcctccacagatgcctcttctgtgccttaagcagagtcaggagaccccaaggcatgtgagcatctgcccagcaacctgtggagacaacccacactgtgtctgggggtgaaaggacaccaggagtcacttctataccttccctaacctcacccctggaa

SEQ ID NO: 7083 - DNA, 240 bp, Homo sapiens
cactacttagggcgaattggagctccccgcggtggcggccggaaagactctataacccagttctgggaagaactccaagctgggagtcagccacactgactctaccacttactagctgtgtaaccacaggcaagttactcaccccgtccaaacctcagttttctcttctataaacaaggttcttagaataaaatgagaattcaaggaagcacttaacatagcacctggtttgtggtacct

SEQ ID NO: 7084 - DNA, 454 bp, Homo sapiens
  misc_feature 11, 16, 19, 89, 398: n = A,T,C or G
tccggcgaatnggagnttnccgcggtggcggccgcccgggcaggtacgcggggacatcaatgcagagtccctctgtgaatttacaattnccaacacccatgagttcagtccttaagaaggaaaattgagcaagtatttaattggttggacattgcataaaagaggtccatatccaggctaactctagaaattttattctcaaacttagttggcctctttttcttctgtcagaggaccattcttagtggcactggggaaatcttggcacccagaagaattcaactgcgctcactgcaaaaatacaatggcctacattggatttgtagaggagaaaggaccctgtattgtgagttgtgctatgagaaattctttgcccctgaatgtggtcgatgccaaangaagatccttggagaaagtcatcaatgcgttgaaacaaacttggcatggttcctgg

SEQ ID NO: 7085 - DNA, 438 bp, Homo sapiens
  misc_feature 3, 77, 363, 364, 384: n = A,T,C or G
ctnctatagggcgatttggagctccccgcggtggcggccgcccgggcaggtacgcggggtgtaaccacctgggaaancttcacagaaaatgagagtttcagatactgagaatagaaccactaagaagcagaaaagagaagatattctcgtgggggagaacaacggctgggaggggaggaagcatggccaaggcaaagagaactgcttcttgctgccgccatatgaagaaggacgtgttcgcttccccttcctccatgattgaatacaacatgtttaagaccacagaacatctgcataggctgtaaatttcgttgaatgatggatgcaaagatggaagacagtatgggatagaggaaaagacannaatcagatactggattgagnttaggtaccctcggcccgctctagaactagtgggatcccccgggctgcagggaa

SEQ ID NO: 7086 - DNA, 467 bp, Homo sapiens
  misc_feature 156, 164, 170, 209, 230, 233, 247, 250, 258, 274, 277, 304,306, 326, 333, 336, 337, 340, 368, 379, 395, 403, 404, 406,413, 457, 460: n = A,T,C or G
cgaggtacttcttgcccttgtagaatttcctgaggttttctttctgagtctggttaataactgtgagaacacgggcaatggatttccggacgactcggaccttagagagcttggaggccgcaccgcctgtcactttggcagacgccgcagctgggnacagcctncacctntacaggtcgtcacagcctgtttttcagcaagcgtccttnccctttcttcttaccccgcgnaantatcatccgtagcnctntgaatctntgggctcatttgactngcnacaaaggcccgctcaaaacgtcccgtncnccccacggtactcttggccncggggcnggnncgncttcttaaggaacctaaggttggcattnccccccggggncttggcaagggaaatntccgaatnntncaaaagncctttattcggaataccccgattcggaaccctttcgaagggggnggngggcccc

SEQ ID NO: 7087 - DNA, 309 bp, Homo sapiens
ctatagggcgaattggagctccccgcggtggcggccgcccgggcaggtacttggcccggatggcctggccgttctgcagcggcatttcctcatagtcactcccataaatcacatcatcatccgagtcattcagcatggagaaggcaggattgtccttcagctgggactcatagagggcattcttcgatggagaatatacaaaggccaaggtgtagagatagaagttcaacaggccatagaaagataagaactcggctgaattctggtagtgagttgacagctctgctacaaaattgtcttatagtacct

SEQ ID NO: 7088 - DNA, 605 bp, Homo sapiens
  misc_feature 6, 145, 180, 198, 203, 221, 241, 266, 286, 293, 297, 312,346, 374, 378, 379, 392, 406, 412, 437, 439, 451, 470, 482,505, 531, 532, 551: n = A,T,C or G
ggcctngtccactttgcctaacggcggcctcgatcctacgtaaaggcatgacttcctggcaccacagggaaaatcgggtgcaagcccagaaactatttccccaccaccacttgtttgaaaaactgattttgaaaggcattctttnggggggttgaaaccaaaaccgggaaaaggtggccncagggaatttatggaatngccgntcttcttgggtttttcgnccttccttggggaagaaccncaatttcccccttggccttaaaagnttaattccaaaaggaaccgnaagaaanaaanaaaacctttgggganaaaaccttaaaattcctcggcaaaaccccaattnattttttaaattttttaaggaaaggttnccanngaaaaattggggnaagcccgggaattntttggnttatggtttaaaacccaaggccaancnccaacctccttnggccttaccggaaaaaaanccccggtttttncttaaaaagggaaccttgggccnttttttgggtaaattggttgggggcnnttcctcccccctttggggnaattcccggaagggttccaaccttggggaagggtttttttgggggaaagggggt

SEQ ID NO: 7089 - DNA, 682 bp, Homo sapiens
  misc_feature 60, 96, 478, 608, 654, 655, 659, 662, 664, 666, 668, 681: n = A,T,C or G
ggccggcccgcccgggcaggtactcatttaattagggttgcagaggatatggaaaaacantttgtttgattatgaaggcaacacttctgtcagtanaattgctttggattgtaaatatgtttacttcagaggaaatcagtcagagtggatggctcagcaaaacccatcacaactgcggaaaaaggaagtgactggctagaggtaaggaaatagattttctctaagttaactggcctacgtgtgaatcgaactctgcaccctggcctcattagcaccaacactgtgaagaacagctgtggcagagaaagtgccacggccccaccccatcaccagattcaagtagaaaggcccttggaatttcctacaagggtcaagttctgaacagctccacttcaaatcagtatagaatcctcacagtgactctgtgagggaggtaaaatgtcactgctcccgtttggtgggggaaacagaagccaanagtgggtaaaagattttgccctgaagttaaaacaaaaaatgaaaaggtcacttggactgcagggaagaatacctacaatacagggcattaaaaaaaaaaaaaagaaaaaaaagtaccttggcccgtctanaactaggggatccccgggctggaggaattcaaatcaagcttttgannccgncancncnangggggggcccggnc

SEQ ID NO: 7090 - DNA, 452 bp, Homo sapiens
  misc_feature 1, 8, 190, 260, 305, 308, 311, 320, 323, 326, 348, 380, 430,441: n = A,T,C or G
ncaccgcngtggcggccgtgtgacaatcgaatattattcacagctgaagactgtgtgtgtggagatgggtgatgtggaatctactttttgaaaacctgcagtgaaacctattgacatggccacgctgtggaatgatgtgaattggccctgtttacagaggcagtaccctcggcccgctctagaaactagntggatccccccgggcctgccaggaaatttcgataatcaaagccttatcgaatacccgtccgacccttcgnagggggggggcccccgggtaccccagcctttttgtttcccctttnagntgnaggggttanatntgncgccgccttgggccgttaaatncactggctcataggcctgcttttccctgttgntggaaaaatttggttatgccgctcaccaattttccacaacaacataccgnaggcccggggnagccattaaaa

SEQ ID NO: 7091 - DNA, 396 bp, Homo sapiens
ccgcggtggcggcccgaggtacgcgggaggacagaggaagatgggtgcaggacactcatactggagacaggggtcagaaaaaccgtctcttaaggatgtgacgtgtgatgagaaaacaccagccattctaagatccagggaaagtgcattccaaccgtgggagacagcaagagaaaagcgtcccccagcaagaatgatactgggggattcatggaacaaaaggaaggtcaaggtggccagagcatcaagagcacaacagagtttgagaagatgaggcgggaggaaggcaaggacctcgtcagccatgtaagacgcctgctcccactttgccttccaccatgagtcaaagtttcctaagtcttccccagaagccgccatgcttcctgtacctgcccg

SEQ ID NO: 7092 - DNA, 400 bp, Homo sapiens
aggtacctttcattggattgtccatggtgcatcgctttagcaagcggcgtgactctccgctgcccgtcatcttggccaatatctatctgctggttcctcctgtgctcaacccaattgtctatggagtgaagacaaaggagattcgacagcgcatccttcgacttttccatgtggccacacacgcttcagagccctaggtgtcagtgatcaaacttcttttccattcagagtcctctgattcagattttaatgttaacattttggaagacagtattcagaaaaaaaatttccttaataaaaatacaactcagatccttcaaatatgaaactggttggggaatctccattttttcaatattattttcttctttgttttcttgctacatataattattaatac

SEQ ID NO: 7093 - DNA, 480 bp, Homo sapiens
  misc_feature 149, 200, 209, 215, 250, 292, 331, 361, 394, 406, 479: n = A,T,C or G
ggaggctccatgcgcggcgcggaagacgctgttatttctccggaggaaagcagagaaaccgagagccagccgagcagggaagtcccttctgggtccagatatgggacgcaacccccgcgtacctcggccgctctagaaactagtggatncccccggggcttgcagggaatttccgatattcaaagccttattcgattacncgttcgacncttcgnaggggggggggcccccgggtacccccaggcttttntggttcccccttttaagttgagggggtttaaaatttggccgncgcctttgggcggttaaattcaatgggttcaattaggcntggttttcccttggtggtggaaaaatttgntttattccccgccttcaccaaatttccaacacnaaccattaccgnaagccccgggggaggccattaaaaagttggtaaaaggcccctgggggggtggcccttaaatggaggtggaagnc

SEQ ID NO: 7094 - DNA, 401 bp, Homo sapiens
  misc_feature 368, 401: n = A,T,C or G
ccgcggtggcggccgaggtactttaattagaacaaaagaccgacattaacttcaatgcaacataataattcataataatgattgtatattaatctcttgagcttgcaggaatatagcacatgacatatgacatgatacaggcacctgtgtgatcctttggggacttaggtggtgcatattaattagcccctggaaaataaaatctgtttccttctgagaaaagctacctcagtgcttattggcttaagccatcaaagaaattagatgaaatactgttaggctgggtctgcactcattaaagctttgtctagatgtaagcactgaatcaactgcctctgagttaagtcttgactgaatggtgcataaanaaatcagagtaatcatgcatttctttggccttn

SEQ ID NO: 7095 - DNA, 445 bp, Homo sapiens
  misc_feature 180, 399, 400: n = A,T,C or G
ctcctatagggcgaattggagctccccgcggtggcggccgaggtaccaccagaactcattgatcaatattaaaatcactgaaagtggaacaatcagacatcatgttcctcctgaaatgatgtaagagaaagtgtatagcatcacctatggagtattcttgggggaaaataaatgaaccangatcaaatccagcttctaggtctaactggacactctggggatactctcagtcaaatcctgagtggaggaaattccacaggacaaataaaagccgaaaagaactaaaacgcaggggtaaattttacagagtaaaggagacacatcaaccaaatgcaatgttggatctagatttcaacaaccaagaaaactgtatttttgaggataggaaaccaataccannactattattatggaataatttaaagggaaaattctttggtcaaat

SEQ ID NO: 7096 - DNA, 524 bp, Homo sapiens
  misc_feature 65, 145: n = A,T,C or G
ccgaggtcatacgttacctttacatatgctcttgctcaaaattgtgaacctagttacatttcttnttgctcccttcctttttatgctcaaacagcgaaacccaaaacttaaaagatctgaactttcagcatgcattctgattgtnaagatttcctgatttagtgcattctcaaaaggactttcccataatctaaagggaaatgtaagcacctatactcttgtgcctgtgggcacttcaataataaaaaccaactttttaaactaatcatcttttatcaatgataaagttgttttcagtcccacactaggagagttcctttaagtcaagctgatcaagcataagatcttccgtaaagaaataaactaagaaaattttttatggcttgagaaaattccttgaggccaaattaatatatttttctttggtattttatttgagtcattttaaattggtaatacaaaaatttaagataatttacagaggcaatttatcccagcttccttctaccttaataccaatggtt

SEQ ID NO: 7097 - DNA, 391 bp, Homo sapiens
cttagggcaattggagctccccgcggtggcggccgaggtaccagttgtaaaattaccaggaaccgccatgcctcaagatcgccctgttttctggcttcatcaatgactgcatgcagtgcaccaccctgtccactacgtgatgctgtaggattaagtctcacagtgggcggctgaggatacagcgcccgcgtcctgtgttgctggtgaattagacgccatcgctgtgggttgctggtatggtgccgtgctatttggcacaggacacaccgcttgaggtctgtattgaacctctgaaggaggccgatactgaagctcggttggcagccggtattgataaactaccagcggttgggtcttattttctacccggctgatattgtgggatactgta

SEQ ID NO: 7098 - DNA, 454 bp, Homo sapiens
  misc_feature 21, 49, 274, 277, 313, 321, 322, 330, 331, 337, 338, 339,342, 344, 358, 371, 372, 373, 384, 385, 388, 391, 392, 403,409, 421, 422, 423, 424, 432, 433, 437, 438: n = A,T,C or G
cgtggcggccgaggtacagtngtgatgctagtagaagtttaagcctttnaaataccactttcatattttcagatgtcatggatttaatgagtaatttatgtttttaaaattcagaatagttaatctctgatctaaaaccatcaatctatgttttttacggtaatcatgtaaatatttcagtaatataaactgtttgaaaaggctgctgcaggtaaactctatactaggatcttggccaaataatttacaattcacagaatattttatttaaggnggngctttttttttgtcccttaaaaccttggatttttcntaaccttnntcatgatnncccaannnaantngggggaaaaaaacnccaaaacccccgnnnggttttttttnnggnaannaaaactccccngggggncccatttgtggnnnnaatttaanngggnnaaaaaaaaaaaatttt

SEQ ID NO: 7099 - DNA, 383 bp, Homo sapiens
  misc_feature 235: n = A,T,C or G
aggtacatatatgtatattataccaatagctagtaatttcaaaaaaaacattgacttgagtgttagataaccattctctaaattcagtttttgatgtttcaagaaacccaaaagcctgtcttttcacctacagaccctttgtgcacgtggcaaatcacctctgaaaggcaaaaactaactggattctcttcatttgttcaaaaaagagaagaaagctttaaagatatgcctatanataaaagaaaattaggttgctatattatgattgtgcaataagtattaatttcattgaagtttgaccctgttccatgtattagatgactaagacatttaactcttagggatgttgaaagcgcaccacaaaacataagtaatcaataaag

SEQ ID NO: 7100 - DNA, 297 bp, Homo sapiens
ctacttagggcgaattggagctccccgcggtggcggccgcccgggcaggtacatgaaatggttttgaaacaataggaacagataagtcccagataggaggctcactgatacttaattggccatgtcaccaatgtttgtttttaagggagtttggtggttgccatgttatcattttttttattctttctttctttttctttctttctttctttctttctttcttttctttcttcctcttcttcttcttttttgcaaataatttacaggcatatgtaaaatacagtaagaatactgggt

SEQ ID NO: 7101 - DNA, 427 bp, Homo sapiens
  misc_feature 152, 159, 177, 184, 190, 205, 226, 230, 253, 255, 258, 261,291, 306, 309, 341, 347, 351, 383, 396, 410: n = A,T,C or G
gcccggtggcttggcaggcagtgctgtgcgctgctcatggagaagacctgggcttagcaatctccttagttcttgctacacaggatggtgactggaactaaggctacacagagggtcgcacttggactctgagggttgggttgttggtaagnggggaanaagggagcatgggagacnctgctcnccagcntcttccttgtcagcncggttttacattggggaacangggnttaaacaatccttgttgtttagngnggnagngtcacccctttaccccttttttcattagangtgaaaggagttgtncancaccttccctggcctattcttcaggggggggnaattgngggnaaaaaaggaaattctttttcaaaggggccaanagtaacctctgtnggggtaggggaatngttcttgttttgttatt

SEQ ID NO: 7102 - DNA, 344 bp, Homo sapiens
tatcactacttagggcgaattggagctccccgcggtggcggccgaggtactttaaagaaaggtctgttaggaccagaagcagagacaccacttttcaaaggacttcttggtttcagcataacctaagacagggaattgggagccatcatatgtcacagtgttcagaattcaagcatatttaagggcattttctttgattctcaaagtcgagcggccgcccgggcaggtacgcgggggccggacgtcgccattcctggcccatgggaagattgcgtttcacctgctcctgaaggccgaaggtggctctagcgcatcctttgtcgcgccgtgacctgcaggtacct

SEQ ID NO: 7103 - DNA, 328 bp, Homo sapiens
  misc_feature 235: n = A,T,C or G
ctatagggcgaattggagctccccgcggtggcggccgcccgggcaggacgcgggggtgacacacacacacacacacagcacctgcacgcagatgcacacatctctagtcaaatgaggctctcagctttttgataggggctttttgatacgtgtataaccaatactttattctcactgtagtcaaggactcattgcaattcagaaatgagaagctgatccggaactccactacagntcaaagaaattctcgaatgttctcacctattaacagttattaaaatggaagaagctggggatgaaattgtgagcaatgccatcttctacgctc

SEQ ID NO: 7104 - DNA, 245 bp, Homo sapiens
gcgaattggagctccccgcggtggcggccgaggtacgcggggagaagtggtgaaggtaaggcttggattcaattacagtaatctcagaagttcttggtagaagaggggcacagaatcccagcctccattttgcagatcacagaactgtgtggtgcaaagcgggttggttattttggtccaacacagttttacattgccctgaaattaattgctgcagcacaatctggcctcccggtacctgcccg

SEQ ID NO: 7105 - DNA, 409 bp, Homo sapiens
actacttagggcgaattggagctccccgcggtggcggccgcccgggcaggacgcggggagtttacggaagtgtaacgttgaggcccttcttgtgtatctggagaaaatagaggttctgactcctcaggagcaaaaaacataacctgaagagggaggaagtggatttggggttcaccatttcttggggcacacttgattgaaaactgagacttctgaaagagaagggccagaaagaataccaaagacaggaccatcccagttgaatgctgtcttccaagaacagaagaaaatgatccaggcccaggaatccataacactggaggatgtggctgtggacttcacttgggaggagtggcaactcctgggcgctgctcagaaggacctgtacctcggccgctctagaactagt

SEQ ID NO: 7106 - DNA, 817 bp, Homo sapiens
  misc_feature 9, 21, 24, 33, 40, 46, 51, 58, 63, 65, 73, 85, 100, 109,113, 173, 352, 449, 463, 500, 504, 520, 534, 543, 565, 590,614, 618, 626, 673, 676, 691, 693, 697, 740, 744, 753, 774,787, 808: n = A,T,C or G
ataagaggnccgaaattgggnagnctccaccgncggtggncaggcnccgcncccgggnccagngntaccaggnaaaaccttcctnggttgggtggattgnggaccaagnaagnaaggccctcagggaaatggaaattggaccttcaatttgggaaggtttggccttgccaagntggttaaattggaaggaaaatttttggccccaattccttttccaccccttggggaattaattaaaaccttccttgggttggaattggaaaaccaaccaattggggaaggcctttgggaattggaaccccttttccctttggaaaccttttccaaggggccaaggttttccaaaaaaggnttggaattccccttaaccccccaaaattccttggggccaattggttaaccccttccggggggccccggcccttccttaagggaaaaacctttaaggnttggggggaaattnccccccccccccggggggggccctttgggcccaaagngggnaaaaattttttccggnaaatttaatttccnaaaaaaggncccttttttaaatttcccgggnaaatttaaacccccccggggttttncccgggaaaaccccccctttttcncggnaaaagggngggggggggggggggggggggggccccccccccccggggggggtttnaanccccccccccaaaangncccntttttttttttttggggtttttttccccccccttttttttttnaaanatttggggnaaaaggggggggggttttttnaaaaaaatttttngggcccggggccccgggcccnttttttggg

SEQ ID NO: 7107 - DNA, 177 bp, Homo sapiens
  misc_feature 93, 154, 156: n = A,T,C or G
ccgcggtggcggccgaggtcggccgaggtactttttttttttttttttttttttttttttttgggggcaaataaaggattttattttttaaanaagtggcagtgtgagaatttaaaatcaatcacataaaacaatcaggaaaggggtggggaananaagttttccaatacctgcccg

SEQ ID NO: 7108 - DNA, 494 bp, Homo sapiens
  misc_feature 39, 125, 191, 216, 232, 235, 259, 274, 281, 306, 333, 335,370, 372, 374, 376, 383, 425, 429, 454, 467, 473: n = A,T,C or G
aaggagaaatagaacagcgcaggcaaaagaagaaaggtngcgggctgggtgggaagaggattcggactcgtcacactgcagagcagcagagcgagaaaggatgagaaaaggcagagaaggcgacnggcagaagaaaaaaaggaaaaactgcggccgctctagtaactagtggatccccccgggctgcaggnaattcggataatcaaagcctttatncgatacccgtccgacnctncgtagggggggggcccccggtacnccagacttttgtggnttccctnttaagttgaaggggttaaatttgcngccgcttgggccgttaaatccattggntncaataaggctggtattccctggtggtggaaaaaanangntnaattgcncggccttcaaccaaaatttccaccaaccaaaccattaaccgnaagncccggggggaggccattaaaaaagntggttaaaaaagncccctngggggggggtggcccctaaaa

SEQ ID NO: 7109 - DNA, 277 bp, Homo sapiens
  misc_feature 90, 257: n = A,T,C or G
ccgggcaggtacacttcagctaaaatcagaattttattctgtctagacaaggttaagaagatgtatatataaccttttgcttgttgctgngctaactgacatagctgattgtttgaataatttaagccgatcatacagtctgtttatgactgtagcatgtatctgtgaagagctgaccccgtgtgcagtgtattgttcatgctagacctttttgctacttgatgagatatcacagcgcaaccgtcagctgccgtcanatggtaaaaagatggtgcat

SEQ ID NO: 7110 - DNA, 155 bp, Homo sapiens
cgactacttagggcgaattggagctccccgcggtggcggccgggatcttcggcaagactcacgtctccaacaaccaagccccccaatgacaaccaaagcatcccaaatgaaatcatttctgcaagacccaaactagcctctattaacacgtacct

SEQ ID NO: 7111 - DNA, 129 bp, Homo sapiens
ccgcggtggcggccgggatcttcggcaaagactcacgtctccaacaaccaagccccccaatgacaaccaaagcatcccaaatgaaatcatttctgcaagacccaaactagcctctattaacacgtacct

SEQ ID NO: 7112 - DNA, 401 bp, Homo sapiens
ctatagggcgaattggagctccccgcggtggcggccgaggtacataatagaattatactatctatagtaaagatttaggttgatattttattctatatgaggatggttgggatttaagtgttaattcctttaaaacaacgtctgtttatttagttgttaattaaaatatgtgagaaatggcccctctctcatagacacattcacaaatgtaagaggaacattttaaacttatccaattctattttgaagcaaataaaaattgagataaataaaatgcattcattaaggtaccaaggaaactctgaaaccaaaaatacatggatctggtcatgttgaagaaccagcatcaccactagcagcatatcagaaatctctagaagaaaccagcaagcttataatag

SEQ ID NO: 7113 - DNA, 326 bp, Homo sapiens
  misc_feature 226: n = A,T,C or G
ctatagggcgaattggagctccccgcggtggcggccgcccgggcaggtaccttgttaacaatatgtttgcaggcagtatgtttggtaaaagtcatcgccattctccattctcgattaaccaggggctcaatgcactgtggaaagccacaggaacctctgcccaagaaagcctggctgttgtgggaagtcagggaccccgaatggagggaccagctggtgctgcatnaggaaacataaattgtgaagatttcttggacatttatcagtttccaaaattaatacttttataatttcttacaccttgtcttactttaatctcttaatcc

SEQ ID NO: 7114 - DNA, 271 bp, Homo sapiens
ccgggcaggtacttggcccggatggcctggccgttctgcagcggcatttcctcatagtcactcccataaatcacatcatcatccgagtcattcagcatggagaaggcaggattgtccttcagctgggactcatagagggcattcttcgatggagaatatacaaaggccaaggtgtagagatagaagttcaacaggccatagaaagataagaactcggctgaattctggtagtgagttgacagctctgctacaaaattgtcttatagtacct

SEQ ID NO: 7115 - DNA, 157 bp, Homo sapiens
atcgactacttagggcgaattggagctccccgcggtggcggccgggatcttcggcaagactcacgtctccaacaaccaagctccccaatgacaaccaaagcatcccaaatgaaatcatttctgcaagacccaaactagcctctattaacacgtacct

SEQ ID NO: 7116 - DNA, 387 bp, Homo sapiens
  misc_feature 176, 194: n = A,T,C or G
ccgcggtggcggccgaggtaccacatgccacacaagaaaaatgaaccacaaaatgcccatatatatttcctcggatctctgttgcctgagtcctatctcctgcctctcagattgtttcagcatcatatttaagatagtcctatttcttgaaatcaaaatgtttaaaatcccatttnctgcttgctctatttctngatttttatattttaaaacattttgagggtaacacttaggttcaaaatatttaaaagcatatgaattatcacaaaagcttggtaatttataatttaattatatgtttccacatttcatccttactttatcagtaaaggctacaccttagtcacttttgcaggcaacgtgggatttactgtaatctgtctacca

SEQ ID NO: 7117 - DNA, 378 bp, Homo sapiens
actcctatagggcgaattggagctccccgcggtggcggccgcccgggcaggtactatacctcagtcctatttgaaagacctaattgaaagaaaaatcatagaaataagtaaaatgatttgttttataatttatccaccatgtccagtttggttagcttgttatgcaatataagtgaaatatcaggtttttacccgtgtcccttttatcatgaaaattaacacaaaatgtgcattctcttttgtttcatacttagcgggatattgattgttttgaaattatgatcaatacttaatttatttttttctgtccttgaagtcactacaccttgatacagtctttctaggtagtcacccatgattcaacagtctcaaaaatct

SEQ ID NO: 7118 - DNA, 127 bp, Homo sapiens
  misc_feature 23, 25, 39, 45: n = A,T,C or G
cgccgtggcggccgggatcttcntnaagactcacgtttncaacanccaatttccccaatgacaaccaaagcatcccaaatgaaatcatttctgcaagacccaaactagcctctattaacacgtacct

SEQ ID NO: 7119 - DNA, 250 bp, Homo sapiens
aggtacctctcagctcctgatacatttattatacagaaattatagaccggctgacttaactattgctaagaaacatgcttcttgatacgttgatctggcagcggcatgggagatggatccaaagagattaaaactggagtgaaggagtccagtaatgatgtgaagagatgagggtctgaactaggacagaagtcagtcacagggatggatttgagacgttttggagggttacacatgcagtacctgcccg

SEQ ID NO: 7120 - DNA, 433 bp, Homo sapiens
  misc_feature 15, 391: n = A,T,C or G
actcctatagggcgnttggagctccccgcggtggcggccgaggtacatctacctaaaggactattatgtggaataatacatactaatgaagtattacatgatttaaagactacaataaaaccaaacatgcttataacattaagaaaaacaataaagatacatgattgaaaccaagttgaaaaatagcatatgccttggaggaaatgtgctcaaattactaatgatttagtgttgtccctactttctctctcttttttctttctttttttttattatggttagctgtcacatacaacttttttttttttgagatggggtctcgctctgtcaccaggctggagttgcagtggccgccgatctcggctcactgcaacctccacatcccatgttngaagtaattcttctgcctcaagcctcccgagtagctggggac

SEQ ID NO: 7121 - DNA, 415 bp, Homo sapiens
actacttagggcgaattggagctccccgcggtggcagcggccgcccgggcaggtacactggaggctggagcctgcagatggcatggctctgcggctcaccttgctgcagttggtggtggtgacagagactgcagcttgactgtagtggtggttaccaggagctctgccactgcatgtccactagtgacgggttcgctccaccaccccagctgggtagccgctgctctcacataaggggtccaattaaaattgccaggaataaattcccccggactttgacttctcaagagctaagaaggtttgctgagtattctggcatgatgtttggtgatcaaacaactgctggccaaaaatgatgagtatttccccctcttgctgaagatgtgctccatacaatagtccatcacattcatca

SEQ ID NO: 7122 - DNA, 370 bp, Homo sapiens
  misc_feature 313, 321: n = A,T,C or G
ccgcggtggcggccgggtacagatgtccagtagacctactggatatgcaggcctgcagctcaggggagagctgggttaagaaccgtcaaggcagtaatcatctgcatttagatggcgagtgaagccatgacaggggctgaaatggcccagcaagaataaatcaaaccatgagaaacacatacatttaagaataaggagatgtggtcaggcgcggtggctcacacctgtaatcccagcactttgggaggccgaggcgggtcgagcggccgcccgggcaggtactcattagccagctcctcggactccccagcancattgatntccgttctttacttttggccagaagtctttcaaaaagcttgcttggctt

SEQ ID NO: 7123 - DNA, 180 bp, Homo sapiens
ccgcggtggcggccgcccgggcaggtactactgaatccaactgccaacaataaaaagacttttatttagtagaggctacctttcccaccagtgactctttttctacaactgccttgtcagtttggtaattcacttatgattttctaatgttctcttggtgaattttattatcttgtacct

SEQ ID NO: 7124 - DNA, 355 bp, Homo sapiens
atcgactacttagggcgaattggagctccccgcggtggcggccgcccgggcaggtactgcggcgggtaggcctaggattgtgggggcaatgaatgaagcgaacagattttcgttcattttggttctcagggtttgttataattttttatttttatcccgcgtacaataaagcctgaaatagccaactaattgaatgttattcttaatcctttacactggcactaaaaatagttcatctgtaataagcatgaatacgaccatgtaataattaatggcactaattgaaaaggaataaaaaaatctaaccaccatagcaaaataaggggtttaagtattattaatagccctggtacct

SEQ ID NO: 7125 - DNA, 454 bp, Homo sapiens
tcactacttagggcgaattggagctccccgcggtggcggccgaggtacgcggggacgcatcaatgcagagtccctctgtgaatttacaacacccaacacccatgagttcagtccttaagaaggaaaattgagcaagtatttaattggttggacattgcataaaagaggtccatatccaggctaactctagaaattttattctcaaacttaagttgggcctctttttcttctgtcagaggaccattcttagtggcactggggaaatcttggcacccagaagaattcaactgcgctcactgcaaaaatacaatggcctacattggatttgtagaggagaaaggagccctgtattgtgagctgtgctatgagaaattctttgcccctgaatgtggtccgatgccaaaggaagatccttggagaaagtcatcaatgcgttgaaacaaacttggcatgt

SEQ ID NO: 7126 - DNA, 387 bp, Homo sapiens
  misc_feature 385: n = A,T,C or G
ccgcggtggcggccgaggtacttagatactggagttcagaagatgtgatttttgttgcttttcagaaaaaggaacgtggtagggagtgttttttcccacgcttttccagtaactttgcaaaagcattaattgttcactggcaattactaaatgtattttgttgctctgagaaactcagcagtgtacgcggggcttctctcgccaggcgtcctcgtggaagtgacatcgtctttaaaccctgcgtggcaatccctgacgcaccgccgtgatgcccagggaagacagggcgacctgggaagtccaactacttccttaagatcatccaactattgggatgattatccgaaatgtttcattgtggggagcagacaatgtgggctccaanca

SEQ ID NO: 7127 - DNA, 145 bp, Homo sapiens
  misc_feature 98, 116, 128: n = A,T,C or G
catcttgggtcatcgatgagcctcgccctgtgcctggtcccgcttgtgagggaaggacattagcaaaatgaattaatggtgttcccttaaagggatgnggccatggtaaaaacagnatcctggttgtnggaatatttttattttg

SEQ ID NO: 7128 - DNA, 273 bp, Homo sapiens
  misc_feature 1, 16, 22, 166, 213, 224, 273: n = A,T,C or G
nggagctccccgcggnggcggncgcataatttaataacatcgtccttccatttggccgcgactgctctggaaaattggttcagtagtaaacagaattctagcaggtggaacaagaacaggcgaggcatcctgggcctggtctctcctggaggtctgggtgttgcancctttcaagactgcggctgctgttggcctacacacctgggcctgtgngcctgtcccgnggctttaggctgctttccctacccggctcaaccaccccgccgtacctcn

SEQ ID NO: 7129 - DNA, 429 bp, Homo sapiens
  misc_feature 1: n = A,T,C or G
nctatagggcgaattggagctccccgcggtggcggccgcccgggcaggtacatattatatgcaaggttacaaaaaaaaatcaatggttaatgattttttagctcaaccaagctaaaagatgtgaacaagaaattgaactcaaaacaacttaagatacaaagctcttgttactgataatgtctaataatattcatcaatttaccatatcttgttcttatattaaaatgttctatcattttcctaattattttaaagtcgattacaaaaatatatatatattcttgtagtgccagaaaattgaatacattaataaatggggtagaatagatgaatctcccatgaagaagaattccaaataatttatgaactctgccctcaaggatatgggagcagcaacttcctacttctctagtgtgagctgaatagtgg

SEQ ID NO: 7130 - DNA, 363 bp, Homo sapiens
  misc_feature 319: n = A,T,C or G
ctatagggcgaattggagctccccgcggtggcggccgaggtacatggatgggcggggaggtaactaaaagatcctttacacaataaagtagatgatcatgataaatgaggtaaggtcctattatcacacacttcaaacacggtagatcagaaacccgctatgatactcgcttcctgtctgtttgctaaggaatataaaatggctagaaagtttaatttgaaacctttgcctccatttggaatagtagacaccagttaagagggtgtcagatgcctttttttttttttttttttttggctggtccctgttgattggtcanaagatagctcagctaaaaggggaagttgtctggggtggttgctt

SEQ ID NO: 7131 - DNA, 456 bp, Homo sapiens
  misc_feature 268, 357: n = A,T,C or G
atcactacttagggcgaattggagctccccgcggtggcggccgcccgggcaggtacagaaagatttatcacccacaagcattgtgaatgcacctgggattcaaaactaattttgacgaaagccccatggcctgttagatctgcttcatatacaagacatagaaggcagcgtgatgcatacagtgcatttatggatcgtgtggaaagaaaaaggtttacaaagatatgcaagagcagatagctgagggaccaaaacagcatagggcttnctgaactctggcctgaatgttcatctcccgtgcatttcccagtgagaacattgatgaattctggcaccttcctggattctacagaaatntgcactctcccagaggcatgagaaagtgctaaaacaacaaatgaaagttgcataatttgaaattcccttgttaccacaggggatcagaaatccaatcat

SEQ ID NO: 7132 - DNA, 393 bp, Homo sapiens
  misc_feature 1, 371: n = A,T,C or G
ncttagggcgaattggagctccccgcggtggcggccgcccgggcaggtacgcggggacatcaatgcagagtccctctgtgaatttacaacacccaacacccatgagttcagtccttaagaaggaaaattgagcaagtatttaattggttggacattgcataaaagaggtccatatccaggctaactctagaaattttattctcaaacttagttggcctctttttcttctgtcagaggaccattcttagtggcactggggaaatcttggcacccagaagaattcaactgcgctcactgcaaaaatacaatggcctacattggatttgtagaggagaaaaggagccctgtattgtggaggctgtgctatgagnaaattctttgcccctggaatgt

SEQ ID NO: 7133 - DNA, 428 bp, Homo sapiens
  misc_feature 7, 22, 166, 178, 182, 184, 185, 193, 196, 198, 210, 211,214, 216, 223, 224, 225, 234, 243, 245, 249, 250, 259, 261,268, 273, 274, 277, 278, 280, 281, 284, 286, 289, 301, 303,304, 308, 309, 310, 323, 343, 361, 363, 366, 369, 373: n = A,T,C or G
  misc_feature 380, 381, 387, 388, 391, 392, 393, 394, 395, 396, 397, 398,399, 400, 401, 402, 403, 404, 405, 406, 407, 408, 413, 414,415, 416, 417, 419: n = A,T,C or G
ccgggcnggtacttcccgtgtntttgaagctgtttcagcttggactttctttgtctcctcctgtaatgtctgtatttctttctcctgcttttcctttaatatagcaatgtccctcattgcctgcaacttccgcttcaaactggattggatattttccttttgcaanaagcgctgtttnaagnanngaaatttnggncnggaaaattgggnnggntngaatttnnngtttttttngaaaaaaancncccnnttttttttnanaaaaaanaaggnnccnncnnccncncgngggggggggggntnntttnnnccccccccccccnaaaaaaaaaaaaaaaaaacncccccccccccccccccnanacnaanaaanaaaaaannttttannatnnnnnnnnnnnnnnnnnnccccnnnnngnggggggggg

SEQ ID NO: 7134 - DNA, 448 bp, Homo sapiens
  misc_feature 341: n = A,T,C or G
ctacttagggcgaattggagctccccgcggtggcggccgaggtaccaaggcccaatcaccccaaacagtgacaggaacataatttcctgttgggaccagttctcggaattttgcaccaacatgatcccatagttccacatctaacgttcccttttcaggaaaccaaggacagtgttcttccactgccctgaaataggggtgaccatattttccatgggaacccgaactcccccattttaacaggaatttaatatagcagagataagcataatgtttagactctgcgtgacccatagttaccccggacaatacacagacaactcaccaatcgtcggggagcncgaacaagcatttctgtggactggacccgatgaacatttctccgcacctaccaaagggaatcgggttcccacatgccactttaggaaaaagaaaaccacgttgggcg

SEQ ID NO: 7135 - DNA, 485 bp, Homo sapiens
  misc_feature 169, 191, 192, 201, 215, 223, 224, 257, 264, 270, 277, 284,288, 291, 353, 365, 379, 411, 443, 464: n = A,T,C or G
catcttgggtcatcgatgagcctcgccctgtgcctggtcccgcttgtgagggaaggacattagaaaatgaattgatgtgttccttaaaggatgggcaggaaaacagatcctgttgtggatatttatttgaacgggattacaagatttgaaattgaagttcaccaaagtngaggcattactcaatgaagagnnaaaaccagnacttagtaaaaatnctttgatnngccttcacaaagaacataccaatcaatacaaanaatgggnaattanctgttgnatgaacnatgnagngccagtcacaaagtctgggtggaaggcagtattaacccaccgggggtcaagtaggggttcangggattcttggnccccttggcttgcnctaaaactggtggcgtttcattaaacccaaanatcatttttcatattttttctaaaccccttcnaaaacaaaaggcttgtttggnaaatatcctggaatcctctta

SEQ ID NO: 7136 - DNA, 432 bp, Homo sapiens
  misc_feature 138, 174, 195, 313, 420, 426: n = A,T,C or G
ctatagggcgaattggagctccccgcggtggcggccgaggtacttccttacatataaaaggtgctgaaaacagttgcttccaatgaaaataagatgatttaacaaagcaacacaaaatcatattaaaacacattattntctgggaaagatacgcacatacacaaaaatacattncttagcattatcataatggcncagaagaaatttttaattattccccaaaatttgaaagataaaggcatagaaatcattataaacatgttaataaatatacatataaaaatataattagcaacatcaagaacaaatctgngaacatatgtaatgagaaaaaatttttgcatgcaacaaaagttcatttttaactagactgaaatacattgtatctcttaaaggttttatgtaatcccccacgtaccnccccgnggggac

SEQ ID NO: 7137 - DNA, 531 bp, Homo sapiens
  misc_feature 4, 31, 45, 52, 237, 248, 257, 258, 260, 268, 276, 278, 305,319, 334, 345, 346, 353, 354, 359, 364, 374, 384, 385, 396,399, 401, 407, 408, 409, 411, 412, 413, 414, 418, 419, 420,421, 437, 440, 448, 462, 463, 464, 465, 470, 477, 478: n = A,T,C or G
  misc_feature 492, 493, 494, 495, 496, 497, 498, 502, 503, 505, 507: n = A,T,C or G
cggnggcggccgaggtacatcatgttctatntagtggaatttttntggacanggaggcatagagttcagttctggcaatgacacccacttcctctgtgacctggacaaagtcatttggattcactaaattgattcacttgtaatttctggttgtattcggtcctgtcagattggctcctcctcaaggtgccagagtaagtccccagaaacactgctcttcaaccacagtggtcagtntttcctttttnttcaagcanntnaaaggtcnaaaaaccncnaaaaaagggccaaaaattttttttttntttggggaacccanttttttttttttttnccaaaaggggnnttttttnnggggnccccnttttttttgngaaaaaaaannatcttttttgnagngntttttnnnannnnaaannnngtttttttttataaanggncccccccngggggggggggggnnnntttcncctatannttgggggggggggnnnnnnntttnncncnttaaaaaaaaaaaaaaaaaaaaaa

SEQ ID NO: 7138 - DNA, 449 bp, Homo sapiens
atagggcgaattggagctccccgcggtggcggccgcccgggcaggtactgtcgggacacctttgaccacccgactctcatagaaaacgagagtatatgcgatgagtttgcgccaaatcttaaaggcagaccacgcaaaaagaaaccatgcccacaaagaagagattcattcagtggtgttaaggattccaacaacaattccgatggcaaagcccgttgccaaggtgaaatgtgaggccaggtcagtcttgaccaagccgaagaataaccataactgtaaaaaagtctcaaatgaagaaaaaccaaaggttgccattggtgaagagtgcagggcagatgaacaagccttcttggcggcactttataaatacatgaaagaaaggaaaacgccgatagaacgaataccctatttaggttttaaacagattaacctttggactatgtttcaag

SEQ ID NO: 7139 - DNA, 419 bp, Homo sapiens
cactccttagggcgaattggagctccccgcggtggcggccgcccgggcaggtacagctcctgattcccaggatagaagatggaaacaactttggggtgtccattcaggaggaaacagttgcagagctaagaactgttgagagtgaagctgcatcttatctggaccagatttctagatattatattacaagagccaaattggtttctaaaatagctgagcggagaccaaagtcagccgggagacagtgggtctgtgagagaccgaatagaggggctggggccacgagcgccattgacaagcaatgggggaagaaacagaaaaacaagagcgaagacagcaccaaggatgacatttgatctttgatgccttggcttgcaagaaatagaagggagcctggtgcttgccaaagaaacagggag

SEQ ID NO: 7140 - DNA, 660 bp, Homo sapiens
  misc_feature 8, 15, 17, 28, 38, 143, 151, 171, 191, 198, 204, 218, 231,236, 237, 249, 257, 267, 269, 271, 275, 281, 294, 298, 306,321, 338, 359, 380, 385, 398, 403, 412, 420, 435, 440, 445,463, 464, 475, 522, 529, 531, 536, 549, 552, 556, 568: n = A,T,C or G
  misc_feature 572, 584, 587, 636, 640, 644, 657: n = A,T,C or G
cactatanggcgaantnggagctccacncgcggtggcngggcccgtcgccatggtgaagctgagcaaagaggccaagcagagactacagcagctcttcaaggggagccagtttgccattcgctggggctttatccctcttgtngatttacnctggccctacttttgggggnaataaaaagggaattaattnttgggtnttttcntgggattcatgggnaaggccaaattcnagccnnggaaccaagccnaattgggnaaaaggaatngntngttngccttncttgggcctttcngggnaattaaantaaggaattgggggnaaccaatttcaattttncaaggtttccaaccttaaagnttttgggggaattggggccanccaanagggggctttccntttcnaccaaagtnacccgccnaattccttggttagnccaangaagnttggggttaaaccctttnngtttaaccccnttccggggacctccggctttccttaagggaaaacccttaaggttggngtaattncnccccnccccggggggccnttnggcnaagggggaaaantttncctgcaattaanttncaaaaggccttttaattcccggaattaaaccccggtttccgtaacctcntttngtanagggggggggggnggg

SEQ ID NO: 7141 - DNA, 376 bp, Homo sapiens
  misc_feature 376: n = A,T,C or G
acttagggcgaattggagctccccgcggtggcggccgagtttgatttcttgcagtcctgagcgatggagcccgggggtgcctggttattgtccgccttctctctcagatgcttggcttgtttttcaagagaacctttttcgatattcattgctccatcgattggatccagtccttgttcagaaaattgtttcaaggcacttaaggctgcctgatcatggctggcttcaatggagcttccaatagcatggaaagtcatctgcacaggggctaatgtcagacaggtcacacactctttgccactttgtctatcacagtagtgaacctgaaagccttgaatccttgctaaatattccagttgttttgaaggttgtaccn

SEQ ID NO: 7142 - DNA, 157 bp, Homo sapiens
  misc_feature 11, 43, 58: n = A,T,C or G
cgactactttngggcgaattggagctccccgcggtggcggccnaggtacgtgttaatntgaggctagtttgggtcttgcagaaatgatttcatttgggatgctttggttgtcattggggggcttggttgttggagacgtgagtcttgccgaagatcc

SEQ ID NO: 7143 - DNA, 163 bp, Homo sapiens
aggtacaagataataaaattcaccaagagagcattagaaaatcataagtgaattaccaaactgacaaggcagttgtagaaaaagagtcactggtgggaaaggtagcctctactaaataaaagtctttttattgttggcagttggattcagtagtacctgcccg

SEQ ID NO: 7144 - DNA, 429 bp, Homo sapiens
aggtacaagaccagcaaagcccagcttctcggctgtgagctctgagaacctggggacgatccgccctcccgttgcgatggcaatcagctcaatttcaggtcctcctacccagcgaaccgcaggcaagttgttctgaagaagtaagtgatttgcttcatcatcaaagcctcgagcggccgcccgggcaggtacgcggggacatcaatgcagagtccctctgtgaatttacaacacccaacacccacgagttcagtccttaagaaggaaaattgagcaagtatttaattggttggacattgcataaaagaggttcatatccaggctaactctagaaattttattctcaaacttagttggcctctttttcttctgtcagaggaccattcttagtggcactggggaaatcttggcacccagaagaattcaact

SEQ ID NO: 7145 - DNA, 389 bp, Homo sapiens
  misc_feature 39, 54, 65, 68, 177: n = A,T,C or G
aatttttgctccccgcggcggcggccgaggtaccagggnagaacaaggaggacntcatttggggnttnctcagagctcgtcattagagaagaacatctggcatttagaggaagagaaaaaattaaatggcccagagacttggagaaggaatagttgcctccgccgcacagcacccancaccctgaggcgctcagagttcgtgcaaaacagcaagaaaacccaagaaatgacgctcctctcctcccagtcttcatcactggtggccccttctgggtctgtgtctgccgaaaatccagagcagaggatgctggagaagagagccaaggtcatagaagaacttcttcagacagaaagagactacattcgggatctggaaatgtgtattgagc

SEQ ID NO: 7146 - DNA, 294 bp, Homo sapiens
  misc_feature 118, 179, 193, 209, 214, 217, 262, 267, 274, 278: n = A,T,C or G
ctacttagggcgaattggagctccccgcggtggcggccgcccgggcaggtactttttttttttttttttttttttttttcctctttggactaacagttaaatttacaaggggatttanagggttctgtggctcattcctggaaaataccattctacaaaaccatccacctacctgtctnaccccaacctcagnggctcattcctggaanatacnatnttcctacaccatccacctttcctgtttacttaaccccacacattntgaanaccattnttanaaaatcccgcgtacct

SEQ ID NO: 7147 - DNA, 180 bp, Homo sapiens
ataatttaataacatcgtccttccatttggccgcgactgctctggaaaattggttcagtagtaaacagaattctagcaggtggaacaagaacaggcgaggcatcctgggcctggtctctcctggaggtctgggtgttgcagcctttcaggactgcggctgctgtggcctacacaccccgc

SEQ ID NO: 7148 - DNA, 384 bp, Homo sapiens
  misc_feature 172, 190, 194, 199, 202, 204, 205, 210, 214, 230, 237, 240,270, 271, 274, 280, 305, 310, 312, 336, 342, 349, 350, 365,369, 372, 378: n = A,T,C or G
ggcatttctcccagggatctctgtgcttccttttgtgcttcctgtgtgtgtggatatttaaaggggcatggaaatgtgcaaaaacatgtcactacttagacattatatttgtcatctttgctgtttctaggtgaatgtttaataattctccattttcaggcaggatgttgtnggccctcaagcatggtanaagnttcangcnannccctnttcntttatttatcctacancccgttnagntcctttccccttcattttgtaaccccttcnnggncccgantttcttagaaaaccttagcttgtgnaattncnccccctctggagtccttgttcaanaggtanattttcnngaaattattttcaanaagnccnttttanttccgg

SEQ ID NO: 7149 - DNA, 412 bp, Homo sapiens
ctatagggcgaattggagctccccgcggtggcggccgcccgggcaggtacactgttcattgtgggcaaaggcagttttaggagcttttggagtagaagttcatgtatcttccttttaatatgataccattattaacatgaaccagatactctctgaatgttggcttccttcttcatcctttaatcattttttgatgggtaatggtccggttgcttcattcttggcttcctagttcaaattcttatgcttgaataaccaccagtcttgtttggacagtgttttactccaggctaagtcagaggccattagcaagacaataggctgcccatgactctggggcctgccccagttcaagtcagctgggcccagagcattgaaggtcatgcggtgtataacatgggcttgcttttca

SEQ ID NO: 7150 - DNA, 426 bp, Homo sapiens
gcgaattggagctccccgcggtggcggccgaggtacacactactgccctagccaactttccagtgtctcaaatcaaccccatcattccaaaaatgagaaatgtttctacttgcttctgatctcttttcctggtgctaataggcctttttgtcgggaaaatcaattaccatctttcagagctagtatcatccaatctgaagccagaaaagtttatagcaacatgcctacccagagtgttgagtagaactgtattacttgggacccttgtctaccacacggcctaacaagccttaaaatctctagtagcccttttcttcatctgtaaaactaggttaatatttatgttacaagttacacataaattccaaacttttacatctccccgcgtacctgcccggggcggccgctctagaactagggggatcc

SEQ ID NO: 7151 - DNA, 408 bp, Homo sapiens
  misc_feature 20, 28, 29, 31, 52, 209, 233, 244, 251, 256, 271, 274, 293,296, 315, 316, 320, 334, 354, 362, 370, 378, 381: n = A,T,C or G
cgcggtggcggcccgagggnccaaaaanntnggccatttcctttaaattttntttcccctgttttttttttaaggtctgaatttcctgctgctgttcacaaagatgctttttatctttaactttttgttttccccacttccgaccccggcgttgatctgcatcctgacatttggagctgccatcttctttgtggctgatcacacagacnctccaacccgtcttaccctctttncttgaacctgnaacaatncatgnactgttggggaaatntgnagggggagggagccaccgnganaagggggggtttttcccannaagnaaacaaaatggacncttaacaaaggtttgcctgncttttctncggagacngggcccgnccncggggccagggttaccaggtaaaaaaa

SEQ ID NO: 7152 - DNA, 340 bp, Homo sapiens
  misc_feature 115, 150, 186, 291, 335: n = A,T,C or G
ccgcggtggcggccgaggtacagagaagcaggttgagtggatggcaaagtgaccggttgagggaccaaaatgataggagggtgaggggctgtggtggatgggggagggcctgcanaattacaggtaaattgtagtttggattgcttccgnaagcaaaagaactgcaaagggtttggagaagggaanagttagcatatatatggtcctgggctgtctgagttggggccgcaggagctacaagtgtcggctcttcgtgaaaagaaataagatcatcagggggttgatgttaanccaaagtcactgggagttagatattgaaatcctcagtattcgtncaggt

SEQ ID NO: 7153 - DNA, 389 bp, Homo sapiens
  misc_feature 336: n = A,T,C or G
ccgcggtggcggccgcccgggcaggtaccttgttaacaatatgtttgcaggcagtatgtttggtaaaagtcatcgccattctccattctcgattaaccaggggctcaatgcactgtggaaagccacaggaacctctgcccaagaaagcctggctgttgtgggaagtcagggaccccgaatggagggaccagctggtgctgcatcaggaaacataaattgtgaagatttcttggacatttatcagtttccaaaattaataccttttattaattttctttaacaccctggtcttacctttaatctcttaatccctgttattcttttggtaaaggctgnagggataataccgttcaccctcagggacccacttattggtaccctcgggccgc

SEQ ID NO: 7154 - DNA, 778 bp, Homo sapiens
  misc_feature 7, 21, 33, 46, 50, 56, 58, 63, 89, 99, 141, 150, 165, 169,177, 200, 213, 225, 227, 244, 253, 260, 292, 310, 316, 346,348, 363, 374, 383, 404, 421, 438, 452, 464, 469, 535, 540,558, 567, 580, 593: n = A,T,C or G
tttattnaaagggggggtccnggaaaaattctngggggtaaggtcntttncacaancnccggnccggggggtttggggggccggggggnccccgggtcncccccggggggggcccaaggggggtttaacccggtttttttnccaaagganaaggggggttttttncaanttaaaaangggaaaccaaccaagggttttcntttcaaaaacccnaggggggaaggntnttttttttttttttaanatttaaaanaattggnccttccttaaattccttcctttaaggattttnccccaaggaaaaaaaacntggaanaattttccccaaaagggaaaaggccttaancnaaccttggaaggggnaattaaaattntccaagccnttcttgggaattaatttggtnggaatttaaccttggtngaattgggtttcttttntccaatttcaattnaccaaggtaaanggtantccttggccccaaaattaaccggtaaaaccttaacccggaagaattctaatttgggcttttccttnaccantaaatttaagggaacaanaggccttcncttcaactacaantaattgggggccncaattgccccgtggccacaattaagcaagggcacctcaacaaaggtggtttgcttaactacaggaaagaataatataattgccttccttcttaactgttttacctttttctatacttgatatatttgaaaaacaacatgcttgcaaaactaaaatctaacatgcattactaactttatcaaaaga

SEQ ID NO: 7155 - DNA, 440 bp, Homo sapiens
  misc_feature 15, 47, 48, 74: n = A,T,C or G
accactactatattncgaattggagctccccgcggtggcggccgccnnggcaggtaccgttttttcaggcacanttaaggtttcaccccgttgccgaaagactaagcgtcccgttggccagtgcaacgaagaacggaggaagcgacaagatttcagtttgtaagtagtgagagcaatgatcttggctttgcatggtgctcaggaagccttccccgctcccaaaccagaaaggaatccatccagattttcctccactgtctggatggccgctctgtggatgcttccatctgtatccattgccggcacctggtgagattccgtctctagagcctttgaggtcactcctgacgctgacatggctgtgaagagctgggtgccaggcattactgcctccaaggttgctttgcgaggaataggtggggcatcaggaagaagccagt

SEQ ID NO: 7156 - DNA, 418 bp, Homo sapiens
  misc_feature 375, 402: n = A,T,C or G
ccgcggtggcggccgaggtaccagttgtaaaattaccaggaaccgccatgcctcaagatcgccctgttttctggcttcatcaatgactgcatgcagtgcaccaccctgtccactacgtgatgctgtaggattaagtctcacagtgggcggctgaagatacagcgcccgcgtcctgtgttgctggtgaattagacgccatcgctgtgggttgctggtatggtgccgtgctatttggcacaggacacaccgcttgaggtctgtattgaacctctgaaggaggccgatactgaagctcggttggcagccggtattgataaactaccagcggttgggtcttattttctaccggctgatattgtggatactgtatctganttggcattgtcgggatagagactctgnccctttctacttgatt

SEQ ID NO: 7157 - DNA, 635 bp, Homo sapiens
  misc_feature 158, 159, 180, 190, 203, 212, 230, 254, 264, 268, 271, 291,300, 305, 322, 364, 375, 380, 386, 389, 391, 393, 433, 444,445, 468, 469, 487, 496, 502, 508, 510, 523, 525, 530, 531,540, 545, 554, 560, 561, 564, 567, 573, 574, 594, 597: n = A,T,C or G
  misc_feature 601, 614, 615, 625, 627: n = A,T,C or G
ctccccgcggtggcggccgaggtactggaggagtggacactgctgccacaggcggtgtctttgatatttctaatttggaccgactaggcaaatcagaggtggagctggtgcaactggtcatcgatggagtaaactatttgattgattgtgaaccggcnnttctggtagagtagggccagngatatcccgnaatcccccacacnctgttcatnccacacccaaggccattnaacttcccccattgcggcccaagnctggatggancttncanaggaatttccccaagggaangtttcctgnccttncattttcttaaaattgnaattggggccccccaattttcttaacctttgggcttctttgnggaaccccttngtccncccctncgncnantttcccccccttggtccacctttccaatttccctttaagnttaaaaaaggnnaacctttccccttttgggccttnntttgggccatatttatanattaaaatntaatantataanantatattatatatntnttatnngggtttttnccccntttgggccncccccnnggnggntcccgnngttccccggtcttttctttnaangaanaaccctttaaggnntgggggggtnanttcccccc

SEQ ID NO: 7158 - DNA, 390 bp, Homo sapiens
  misc_feature 330, 363: n = A,T,C or G
ccgcggtggcggccgcccgggcaggtacttcccaactaggggtgagtttgccacccttacccccatcccagtgaatatttgcaattcctaaagacgtgttttgattgtcacacctgggtggggaacatgctactggcatctaatgcatagagggcaagtaatgcttgcttaaacatctttcaacgcacaggacagagccccacaaaagagaattatctagccccaaatgtccatatcactgctgttgagaaaacctaccgcagggatcttactggcttcataggtaagcttgcctttgttctggcttctggtagatatataaaataaagnacactgcccagttccctccctcaacgtccccgnaggccagggctcaagggcaatttccaa

SEQ ID NO: 7159 - DNA, 243 bp, Homo sapiens
ataatttaataacatcgtccttccatttggccgcgactgctctggaaaattggttcagtagtaaacagaattctagcaggtggaacaagaacaggcgaggcatcctgggcctggtctctcctggaggtctgggtgttgcagcctttcaggactgcggctgctgtggcctacacacctgggcctgtgtgcctgtcccgggctttaggctgctttccctacccggctcagccaccccgcgtacct

SEQ ID NO: 7160 - DNA, 837 bp, Homo sapiens
  misc_feature 166, 387, 475, 504, 644, 673, 689, 758, 775, 791, 799, 806,811, 812, 813, 818, 819, 820, 824, 825: n = A,T,C or G
ccgcggtggcggccgcccgggcaggtaccaacatgaaatgacacgaatttaagtgaagctcaacaacgaaaagcaaaaagaaccaaagaggaagcaactgaaacaacatctggatgtatttaaaaatatacgatgcctccaaaatcaggtgtcattatgaaaattntgaagaaatgccaccggacatagccaacgcacctacgctgttgttattcatttcctgcttttcacagaaaacaattttgttgcatggaagatcgtgaacttcaaagggcagaggggaaactgtcccttggcctctacccctccaaggccccactttttcgtcaacactccttggacgcagcagaagtatgaacataatatggtcctgaatgaggctgagtntttgggcgcagaagacccgggttaataaaaataggaaggtggtgtgaagaccagaaaggaggctgttgcactagttcaggaagagaanaggaggtgggcgacagaagtagaggcagngctctgagggaccttgggcaggtggaagcccaaaactggatggccatgagggcaaggaggcacctgttgaattcaggcatcggcatgtggcttgattttggtcaatgaaatgtgagagaagtgacatccactttgaggcngcactttccgagttgccccgacggccctntccatactggtgccanaaaaaaccttgaaatatcctttttttaattaaaaagcaaaactttttaaaaaaaaaaaaaaaagtcctnggccgtttaaaactagnggatcccccggctggnggaattcnatttaanttatnnntccgnnncctnnaggggggcccgg

SEQ ID NO: 7161 - DNA, 380 bp, Homo sapiens
ctatagggcgaattggagctccccgcggtggcggccgaggtactggatatagtcattttttaaaatgctacaaactgttcaaaagagcatgaacaacatgataactccttataattttgttgtaagacaaatggctaaaagtatgtgggatgtttaatttggataagtggaaattctatcacttgataagctctcttgaagaataattatttgaaagattggacttaattctgtattgcctgaagtgtaaatcagaagtcaacaattagattgcaaattatgaaaagcataacttttctaattgtttaagtctttttagagaaacaagcccaggaaaaaagtaagattctcattcattggagataagatttctatttatc

SEQ ID NO: 7162 - DNA, 493 bp, Homo sapiens
  misc_feature 26, 165, 207, 233, 257, 259, 262, 280, 281, 286, 288, 293,297, 300, 306, 307, 309, 312, 316, 336, 350, 367, 404, 412,415, 417, 441, 446, 452, 453, 458, 467, 474, 481, 484, 491: n = A,T,C or G
actactatagggcgaattggagctcnccgcggtggcggccgccacgctggttttgcatcttcaggagacgctcgtagccctcgcgcttctcctcggccaattcgcggaagaagtggctcacgccttccagagccacatcatcgcggtcgaaatagaagcccaganagaggtatggtgtaggaggcctgcagggtaccttcggcccgnttctagaacttagttgggatcccccncgggggctgcaagggaaatttcgnantantcaaaagtcttttattcnnattancncggtncggnacncttctnnanggngggngggggtctccccggggattntcccctccaagtcnttttttttgtttttccnccccttttttaaggttggaaaggggggtttattaaantttttggnccntnccggcctttttggggtccgggttnaaaanttccannttggnggtttccantttaaanggccttnggnttttttncc

SEQ ID NO: 7163 - DNA, 244 bp, Homo sapiens
  misc_feature 117, 145: n = A,T,C or G
cgaggtacgcggggtggttgagccgggtagggaaagcagcctaaagcccgggacaggcacacaggcccaggtgtgtaggccacagcagccgcagtcctgaaaggctgcaacacccanacctccaggagagaccaggcccaggatnctcgcctgttcttgttccacctgctagaattctgtttactactgaaccaattttccagagcagtcgcggccaaatggaaggacgatgttattaaattat

SEQ ID NO: 7164 - DNA, 441 bp, Homo sapiens
tcctatagggcgaattggagctccccgcggtggcggcccgaggtacagtattgttaataaagcagcccagtatagttgtaaacatcttaaatgtagtaaacaagacttggcatgtcttttctccccaaaacatgccattacaatgctctttccatgaataattattcttcctagaaaagttttcaggtatattttaaatctataaaaaaaatacactgaaatatgtgaaaagatttagtcatggcaatttcactgcagcttttattgcctctgttggtaatatgacagggactgtaagaaacacaattgaacttacagagatatgcagatgatattcactaaagataatcttcatctcaagtattttttatatgtgggcacttctaattttatacatttttctatttaaaaagcattacattttaaatttgtacctgcccg

SEQ ID NO: 7165 - DNA, 559 bp, Homo sapiens
  misc_feature 213, 260, 262, 269, 311, 317, 327, 332, 337, 338, 370, 371,376, 384, 397, 399, 420, 455, 462, 464, 473, 475, 486, 510,529: n = A,T,C or G
ccgcggtggcggccgccatcttgggtcatcgatgagcctcgccctgtgcctggtcccgcttgtgagggaaggacattagaaaatgaattgatgtgttccttaaaggatgggcaggaaaacagatcctgttgtggatatttatttgaaccggggattacagaatttgaaatggaaagtcacaaaaggtgaagccattaccccaatggagaaggnaaaaacaagaaccgaagaaaaaattctttgatgggcctttcacaaangnaccatgnccataccaaaaacaaaaaaaatggggaaaattacctggttgnattggnaccatttggnagggnccaanncccaaaagtccttgggggggtaagggggaagnnattanatccccanccgggggggggcnanattaagggggggtttcaaagnggaatttttcttgggggcccccccttggccttggnccccttnanaaaaccctngnttgggcccggntttttccaattaaaaacccccaanaaaatttcaaattttttgncaattaaatttttttcctttaaaaaccccc

SEQ ID NO: 7166 - DNA, 381 bp, Homo sapiens
  misc_feature 14, 185, 291, 292, 295, 324, 355, 362, 366: n = A,T,C or G
ttagggcgaattgnagctccccgcggtggcggccgcataatttaataacatcgtccttccatttggccgcgactgctctggaaaattggttcagtagtaaacagaattctagcaggtggaacaagaacaggcgaggcatcctgggcctggtctctcctggaggtctgggtgttgcagcctttcangactgcggctgctgtggcctacacacctgggcctgtgtgcctgtcccgggctttaggctccccgcgtacctgcccgggcggcgcgtggtctacgccgagtgacagnnacnctcaggctgtgttctcaggatgaccgagntgggagacagcagcaccagcggtggcaaganaccccanaacntcaagctctttggga

SEQ ID NO: 7167 - DNA, 354 bp, Homo sapiens
  misc_feature 4, 244, 252, 261, 262, 266, 267, 274, 289, 314, 330: n = A,T,C or G
actnctatagggcgaattggagctccccgcggtggcggccgggcagtagaggaaattgcggtagtgaccctcgggcctcgccatgaagagccgctttagcaccattgacctccgcgccgtacgaaaggacaagagaaataaggcctacttcacaaagcgccttcccccgtaaatgatatcatctcaacttagtattatacccacacccacccaagaacagggtttgttaaaaaaaaaaaaaagnaaaaaacncaaaaaggnncttnnttttttnttttttttttttttngagtttttaaacttttatttgcatnttaaaaaaattgggcnttccaataattaaaatcatttgaa

SEQ ID NO: 7168 - DNA, 658 bp, Homo sapiens
  misc_feature 216, 265, 297, 332, 371, 383, 397, 404, 409, 433, 474, 475,478, 483, 494, 510, 511, 512, 544, 561, 572, 629: n = A,T,C or G
ggcatttctcccagggatctctgtgcttccttttgtgcttcctgtgtgtgtggatatttaaaggggctggaaatgtgcaaaaacacgtcactacttagacattatattgtcatcttgctgtttctagtgatgttaattatctccatttcaacagatgtgtggcctcagatggtaaagtcagcaacctttcttatttctcacctggaaatacatacnaccatttgaggagacaaatggcaaggtgtcaacataccctgaacttganttgaaagctacacacaatattattggtttccnagcatcacaaacaccctctctgtttcttcactggncacaaaattttaatacttatttcaatgggctgttggcangaacaaatgaancaatctacataaantcactantgcantgcctgacacacaccattctcttnaagtcccctctaaaaatcccacaagtcatataacttcttgnngancaatngctcacacctntaatcccaacactttnnnaagctaaagcaagtggatcacctaaagtcaanaattcaaaaccaacctnacccaatatantaaaaaccccatctctactaaaaatcaaaaattaaaaaaaaaaaaaaaatacctcancccctctaaaactaaaaaatcccccaacc

SEQ ID NO: 7169 - DNA, 459 bp, Homo sapiens
  misc_feature 445: n = A,T,C or G
ccgcggtggcggcccgcccgggcaggtacagactctcattttatgacgtatcctactgcatcaggacatttgtgtcaatgtcaggtgacgaggggaaatgaaagtgatgagacgatgagaggagtgaaataccaaggacgccatactaggaaacccaggtctatttgttatcagagtaaggatcaagccagatagcctgttatgtagtttctccgataaaagattttgaaagcaggtgctgtgggcatctgtatggggaatcgcactcatagaattattttcatttgtaaatatttggtatcaggccaagcaagggaaagaagctttactgtattaccatctttcctggaaaagattgatttttctctctcccttaggggatatgaggtatgatacctgcaaccaaaataagctggctgttaagtgctctctccttactattgtncaagcaatgtacct

SEQ ID NO: 7170 - DNA, 239 bp, Homo sapiens
agctccccgcggtggcggccgataattaaataacatcgtccttccatttggccgcgactgctctggaaaattggttcagtagtaaacagaattctagcaggtggaacaagaacaggcgaggcatcctgggcctggtctctcctggaggtctgggtgttgcagccttcaggactgcggctgctgtggcctacacacctgggcctgtgtgcctgtcccgggctttaggctcccgcgtacct

SEQ ID NO: 7171 - DNA, 620 bp, Homo sapiens
  misc_feature 383, 387, 464: n = A,T,C or G
tagggcgaattggagctccccgcggtggcggccgaggtcttttttttttttttttttttttggagagacagggtctcactttgttgcccaggctattttctggatgtctattaaaaaaaaaattagtcctgcacagtgttctagaaagggtttttcttttcagaatatccatattctcagtagcaagttagaatataaggaatatttgccattaaacctttctgttagaaatgtaaacatgaaattacctaatatagacctatctcagatgctaaatagaattgtttataacacctttggaatataattatgtgagctacacttaaccatctggcattttgcttcctgcggacaatttgcaatagcatagaaaaatattttgnttgngtatttcttatcaaacagatatgctaaagttctgtttagagagtaatagcattttattctaacttttaaaataaggnagtccatttgcagcagcttgatatataagtaaacaaaaatttttaatattaataaaacactagcacatacactgaaagcatctaagaaattcaaaatataaaacacttaccaagtaatgaccatatgagtggtaacatattgaataaaggcccttt

SEQ ID NO: 7172 - DNA, 254 bp, Homo sapiens
cgcataatttaataacatcgtccttccatttggccgcgactgctctggaaaattggttcagtagtaaacagaattctagcaggtggaacaagaacaggcgaggcatcctgggcctggtctctcctggaggtctgggtgtcgagcctttcaggactgcggctgctgtggcctacacacctgggcctgtgtgcctgtcccgggctttaggctgctttccctacccggctcaaccagtctccccgcgtacctgcccg

SEQ ID NO: 7173 - DNA, 558 bp, Homo sapiens
  misc_feature 544: n = A,T,C or G
ccgggcaggtacagtggcacgaacttggctcactgcaacctccgcctcccaggttcaaacagttctcctgccttagtttccaaagtagctgggattacaggcacccaccaccatgcccggctaatttttgtatttttcatagagatggggtttcaccatgtttgaccaggctggtctcgaactcctgacctcaggtgatctgcccaccttggcctcccaaagtgctgggattacaagtgtgagccacggtgcccggcctgattttcttcttatatttaaggatggattcttggcttaaaaagaggaaactagaacactttttcaatccacggctgcactatctaggactgccattgtgagcttatagctatccaatacttaaaacttcctgatgagatcaagtggtgatagtcatgaaggctaacttttgacactgtataatgaagtgtgtcaccatttggaaaatgtataaatttcaatggaccaatattttccaaatggactggtgatcctacatataagctgatgaacaaaaatcatggtntgaagttaaaggat

SEQ ID NO: 7174 - DNA, 377 bp, Homo sapiens
  misc_feature 23: n = A,T,C or G
actatagggcgaattggagctcnccgcggtggcggccgaggtacgcggggcgtccgcctcagttcccgccgaaggacgtattcgctgaactgggacgagtctactcctcccccacaggagcccacgatttcaaatcctctttgctgcaacctctcgaggacctgcgagggaacaagacaagcatccagttcgagcggccgcccgggcaggtacccactctggacgtatgtgttggtgttctcttcccgtttctgttggtccagtctgtgttcttctgtaggatgtctgtgcaggccagaccaaagtctcctatttttacttgctgatcagggtcatgaagaaaaatatttcttggcttcagatctcggtgcacaatt

SEQ ID NO: 7175 - DNA, 543 bp, Homo sapiens
  misc_feature 22, 256, 270, 286, 304, 308, 310, 314, 331, 337, 369, 394,398, 410, 425, 448, 467, 488, 503: n = A,T,C or G
tacttagggcaattggagctcnccgcggtggcggccgtgcgagccctctgccagatcactgatagcaccatgctgcaggctattgagcgctacatgaaacaagccattgtggacaaggtgcccagtgtctccagctctgccctcgtgtcttccttgcacctgctgaagtgcagctttgaccgtggtcaaagccgctgggggtgaatgaggcttcagggaggcagcatcccaattggataaaccattcaatgggtcncaagttacccttgnccccgggggcggggcncggcttcctaaggaaacntagntngggnattcccccccccggggnccttgncaaggggaaattttccgattaattccaaaagncctttattcgggatttaccccgttntccntacctctttggnaaggggggggggggnccccccgggggttaccccccaangcctttttttttggttttncccccttttttaaagtttggnaagggggggtttttnaaatttttggccggcccggccctttttgggggccggttaa

SEQ ID NO: 7176 - DNA, 408 bp, Homo sapiens
  misc_feature 370: n = A,T,C or G
ctacttagggcaattggagctccccgcggtggcggccgaggtacctttcattggattgtccatggtgcatcgctttagcaagcggcgtgactctccgctgcccgtcatcttggccaatatctatctgctggttcctcctgtgctcaacccaattgtctatggagtgaagacaaaggagattcgacagcgcatccttcgacttttccatgtggccacacacgcttcagagccctaggtgtcagtgatcaaacttcttttccattcagagtcctctgattcagattttaatgttaacattttggaagacagtattcagaaaaaaaatttccttaataaaaaatacaactcagatccttcaaaatatgaaacntggttgggggaatctccatttttttcaatattattttc

SEQ ID NO: 7177 - DNA, 411 bp, Homo sapiens
  misc_feature 13, 380: n = A,T,C or G
agctccccgcggnggcggccgaggtacaattacattcattactttttggagcccattcatgttaggcttgattaaaaaggtagactcagtagtcagtctcagaatccagtgatcagcattcaagcatatagctaactctagtgtattccaaacctacacttcatgaaaaaaatatacaactggcatttacatgccattcaagctacaggataaatgtcaactctgaaagacatcatttatttacaactatattgggggaaaaaagaggagaccaaaccaaaatattaacaaggattatacctgggcaatagaaatatgggttactttttttttctttgacttctctgtagtttcccaattttctttaaagagtttgtagntgcttttacatattatgaagccgattgccca

SEQ ID NO: 7178 - DNA, 293 bp, Homo sapiens
atacgactactataggggcgaattggagctccacccgcggtggcggcccgcataatttaataacatcgtccttccatttgtcccgcgactgctctggaaaattggttcagtagtaaacagaattctagcaggtggaacaagaacaggcgaggcatcctgggcctggtctctcctggaggtctgggtgttgcagcctttcaggactgcggctgctgtggcctacacacctgggcctgtgtgcctgtcccgggctttaggctgctttccctacccggctcaacccccgcgtacct

SEQ ID NO: 7179 - DNA, 509 bp, Homo sapiens
gactcactataggggcgaattggagctccccgcggtggcggccgcccgggcaggtacaaattgttggcagttcttaaagggacagaagattactgtttacattttgcagtctcttgcttttttaagacaatttcatgaatgataaaagtgatgtcgggaagacataaacctgaaactccaacccccatcctcgctcttttattttgttttaaatcatcatatagtaatttgagtttaagactaacttcagccattcagaataatattgaaagtatttcctaaatcatttaataacagtgaccacaataaataaagatttggttctaagattacaaataatgaaaaatgttaactttgagattcaaaaccctgtagcatctggaaaagggtgtttataaagtataatcataacaataacattaagacttatgtgtgaaataaaacatttctgaaacacttaggaatacatgcttatcccacttttgggataactactagtacctcggccg

SEQ ID NO: 7180 - DNA, 437 bp, Homo sapiens
  misc_feature 2, 35: n = A,T,C or G
ancactacttagggcgaattggagctccccgcggnggcggccgaggtactactcgattgtcaacgtcaaggagtcgcaggtcgcctggttctaggaataatgggggaagtatgtaggagttgaagattagtccgccgtagtcggtgtactgtgacaagtgcgggacgtcctattaggattaccgtcccccaggcattacttcttattgcagtaagacctctaaaaggtggagctgtacagtagtgcactcttggctcactgtagcctcgacctccggggctcaagtgatcctcctgccttagccccacaagtagtgggactataggcacacagcaccatgcccatctaagtttttgtattttatgtagaagacaaaggtttcaccatgtttgcccaggctggatcttgagctcctgagctcaagtgatctgcccacc

SEQ ID NO: 7181 - DNA, 552 bp, Homo sapiens
  misc_feature 349, 424, 425, 459, 486, 498, 515, 529, 546: n = A,T,C or G
ccgggcaggtaccagttgtaaaattaccaggaaccgccatgcctcaagatcgccctgttttctggcttcatcaatgactgcatgcagtgcaccaccctgtccactacgtgatgctgtaggattaagtctcacagtgggcggctgaggatacagcgccgcgtcctgtgttgctggtgaattagacgccatcgctgtgggttgctggtatggtgccgtgctatttggcacaggacacaccgcttgaggtctgtattgaacctctgaaggaggccgatactgaagctcggttggcagccggtattgataaactaccagcggttgggtcttattttctaccggctgatattgnggatactgtatctgagttggcattgccgggatagagactctgtccctttctacttgattttctcttggggtttgnngctttgtctaacctgcgtttgagggttgtaatgntacaggcatctgaaccacgggaaggangagttgatggcnatcgtggtttaaggctntgatggccccaatnaattttggacctccttnccccaa

SEQ ID NO: 7182 - DNA, 149 bp, Homo sapiens
acttagggcgaattggagctccccgcggtggcggccgaggtacgcggggagattctggaggcgaagaacgcaaagctgagaacatggacgttaatatcgccccactccgcgcctgggacgatttcttcccgggttccgatcgctttgcc

SEQ ID NO: 7183 - DNA, 399 bp, Homo sapiens
  misc_feature 368, 375: n = A,T,C or G
aggctgtcctctttgggttggtcactctgagatcatcctccactacctggattcctgcactggccgtgaacttctgccaagctccccagtcatcctggtcaaagggatcttcagtagacaccactgggtagtttttgatgaaggacttgtaccatgttgacaaaaatgccagatcaaatggatttgagaaataagcccaattcaaggctggctcagccctccacggggcctcccagggaaaggaattcctttatgttcttggaagcccttttctagaaaagccattccattcatacctttgtagagcagtgggctgggtgtggagggcagcgcggagggtatctgcaagagcctgtattttcccgctnccttgcnccccacttccttttatccttttaa

SEQ ID NO: 7184 - DNA, 365 bp, Homo sapiens
  misc_feature 14, 69, 170, 186, 237, 273, 279, 337, 354: n = A,T,C or G
ctatagggcgaatnggagctccccgcggtggcggccgttaaacatgtgtcactgggcaggcggtgcctntaatactggtgatgctagaggtgatgtttttggtaaacaggcggggtaagatttgccgagttccttttactttttttaacctttccttatgagcccgcgtncaatttttgcaaggtnttcttcttcctgcaaaatttccttagctttcgtcctcagaggaacgaactntgtgaagtgtttgtcatagtattcatccaaggcacncatatncttgctgtagctgatgagccaattgacagaggggaaatgcttacgttgagctagtttnttatctaagccccaaancacctgaacga

SEQ ID NO: 7185 - DNA, 699 bp, Homo sapiens
  misc_feature 382, 384, 397, 407, 423, 486, 502, 512, 536, 558, 559, 560,572, 575, 600, 612: n = A,T,C or G
ccgggcaggtacaacagtggtagcagtggaaagggaaagcctggcagagtattgtcagctgagaaacagaaaagtagcaacagccatcttatttttgctccactgagcacatttcaccactcagaccatggtgatgagagtcacatttctgatgggaggaggaggaagaaccaatagctggctccctggctctgaccccttgagttgagacacatccttatttactccaggctattcatgcttcagattcaaacaattccttcccaaaagcttttccaagtgtggcctgtggcccatgggtgaaaagagaaagtcctgatctagaaaaatcatgtcattcatgggtggcattcccaaactaaagggtgtcttacagtacttntnaggggtgttattnaaaagttccnaagcctgggcacaagnggctcatgcctgtaaattctaaccacttttgggaagcccaaggcgggttggaattggccccancttaaggagtttcggngaaacccccntttttacttaaaataccaaaaaanttgccccgggggtgggctggannnccacctgttcanganaaaagggggaattcctttgaacccnagaaggcaaaantttgcattgggccccaaaacccaccaattggacttcaaccctggtttgaaacaaaaactttttttttcaaaaaaaaaaaaaaaaaaa

SEQ ID NO: 7186 - DNA, 522 bp, Homo sapiens
cgaggtacccttcattggattgtccatggtgcatcgctttagcaagcggcgtgactctccgctgcccgtcatcttggccaatatctatctgctggttcctcctgtgctcaacccaattgtctatggagtgaagacaaaggagattcgacagcgcatccttcgacttttccatgtggccacacacgcttcagagccctaggtgtcaagtgatcaaacttcttttccattcagagtcctctgattcagattttaatgttaacattttggaagacagtattcagaaaaaaaatttccttaataaaaatacaactcagatccttcaaatatgaaactggttggggaatctccattttttcaatattattttcttcttggttttcttgctacatataattattaataccctgactaggttgtggttggagggttattacttttcattttaccatgcagtccaaatctaaactgcttctactgatggtttacagcattctgagataagaaatgggtacctgcccgggc

SEQ ID NO: 7187 - DNA, 338 bp, Homo sapiens
  misc_feature 140: n = A,T,C or G
aggactaactcatccagtatctgattctgtcttttcctctatccatctgtcttccatctttgcatccatcattcaacgaaatttacagcctatgcagatgttctgtggtcttaaacatgttgtattcctctttgccttgncatgcttcctcccctcccagccgttgttctcccccacgagaatatcttctcttttctgcttcttagtggttctattctcagtatctgaaactctcattttctgtccccgcgtacagtcagaagtgatctctactttttcttaaagctgactggcgcccgcaggggccgccgacctcttcacagacccacggaaactgc

SEQ ID NO: 7188 - DNA, 558 bp, Homo sapiens
  misc_feature 30, 199, 242, 268, 278, 292, 299, 310, 320, 330, 340, 344,358, 359, 375, 376, 377, 389, 394, 400, 416, 419, 437, 440,445, 452, 453, 473, 477, 496, 503, 517, 523, 524, 539, 540,545: n = A,T,C or G
ccctatacactactatagggcgaattgganctcaccgcggtggcggccgcccgggcaggtacgcgggggcggcgcgggtcctccatatgctgagcgccggtcccctgggcccacttttctttctctatactttgtctctgttgtctttcttttctcaagtctctcgttccacctgaggagaaatgcccacagcttgtgngaagggcgcaaggccactccaatctgggttgcccaaccgttgngatgccttttttcttcttaaggggtngaaaaggggnacttcttccgaagntgtgggnttcaattttgnaggggaccanaaggttcctnaaccttaagnaagnaattttccccccgnnagttaacccctttggnnnccccggttttcnttaangaaaancctttaaggttggggnaanttcccccccccccggggngtnccttnggccaanngggaaaaattttcccgtaantaanttcaaaaaaggcctttttnatttccngaaattaacccccnttttcnnttaaaccccttttcnnaaaanggggggggggggg

SEQ ID NO: 7189 - DNA, 317 bp, Homo sapiens
tagggcgaattggagctccccgcggtggcggccgcccgggcaggtactacagagataccttgattccaagtatcccacttactttccacaaccaaaagttttgttccagttttcataaagctctaaatcttttggagaaacactaggtcgcacagttctaaaagcattttcaaaatcaatgtaagctatgggtcgaacttgatccggtgttatggtagcaatgtcagcagtttgtaaactgcgaataggaccaagagaagcctccctgcaaagctgtgtcatgtctgctcctgaaaacgcatcagactgctgtacct

SEQ ID NO: 7190 - DNA, 437 bp, Homo sapiens
  misc_feature 198, 389, 392: n = A,T,C or G
actccttagggcgaattggagctccccgcggtggcggccgaggtacaacatgctgaatatttattctattaatgacatttacaatacctttatcacctctttctctcatttttgctctaaataattaagttggacattttatcaagttgataagttgacataacttagtctccattaatagtaatttgtattagcccngggttctctagaggaacagaactaatggaatgcagatatatatatatatatatatatatgaatgaatgtattaagtattaactcataggatcacaaggtcccacaataggccgtctgcaggctgaggagcaaggagagccagtctgagttccaaaattgaaggaacttgggagtctgatgttccagggcanggnaagcatccaggcacagggaagaaaggatgtccggcctgggggaag

SEQ ID NO: 7191 - DNA, 679 bp, Homo sapiens
  misc_feature 375, 465, 467, 483, 499, 562, 590, 603, 613, 626, 640, 656,670: n = A,T,C or G
cgaggtacttaaaaaatggaaaaagaggatcatcgataaatgagagaagagtctatattcgttgatgggtgagtgttttgttttgttttgtttttttgaggcagagtctcgctctgtcgcccaggctggagtgcagtggtgcgatctcggctcaccacaacctccgcctcccaggttcaagtgattcttctgcctcaacttcccgagtagctgggacttcaggcacgcaccaccatgcccagctaatttttgtattttttgtaaagacagggtttcaccatattggccaggctggtctcaaactcctgacatcatgatctgcctgcctcaacctcccaaagtgctgggattacaggtgtgagccactgtgcccancccgagtgttttaaaatcaactatccctacatccactgctgattcatttaatatcaaatcaataaccttatccttggggcccaactgaanancctcctacagctccantgcataagtccttgcntagggaggctgatacaaataaactgaccttgtaagaacaatgggattaactaccatgattctncacactgataacacccataaaactgtanggaattaaaaaangccccttaantttggaactttanaatacaatcttatnacctaggttgaaagtnaaacaaaaacccanaaaaaacct

SEQ ID NO: 7192 - DNA, 331 bp, Homo sapiens
  misc_feature 7: n = A,T,C or G
gcgaatnggagctccccgcggtggcggccgccgggcaggtacgcgggaatctgtatgtttttcagcccgtctctagcagtatttaaaggacaaggaaccaaagaatatgaaattcatcatggaaagaagattctatatgatatacttgcctttgccaaagaaagtgtgaattctcatgttaccacgcttggacctcaaaattttcctgccaatgacaaagaaccatggcttgttgatttctttgccccctggtgtccaccatgtcgagctttactaccagagttacgaagagcatcaaatcttctttatggtcagcttaagtttggtacct

SEQ ID NO: 7193 - DNA, 400 bp, Homo sapiens
acgactcactataggggcgaattgggagctccacccgcggtggcggcccgcccgggcaggtacgggcaggtactcttcatacctcgttggatgtggaaatgcctactgtcccaatcaaaaagttctaaaatactactatgtttgccaatattgtcctgctggtaattgggctaatagactatatgtcccttatgaacaaggagcaccttgtgccagttgcccagataactgtgacgatggactatgcaccaatggttgcaagtactactcgattgtcaacgtcaaggagtcgcaggtcgcctggttctaggaataatgggggaagtatgtaggagttgaagattagtccgccgtagtcggtgcactcgtaggttcagtacctcggcccgctctagaacta

SEQ ID NO: 7194 - DNA, 625 bp, Homo sapiens
  misc_feature 230, 262, 264, 293, 301, 307, 318, 326, 343, 356, 362, 365,372, 373, 375, 392, 411, 415, 418, 419, 424, 425, 446, 459,470, 480, 499, 500, 510, 514, 519, 520, 556, 558, 569, 572,597, 601, 603: n = A,T,C or G
cttagggcgaattggagctccccgcggtggcggccgaggtactgtcgttccattcctttttttgaggtgttatgagtggggctataacatcgccatcctattaggaagagagagaaaaacaggcaatagagaaaagtcagtttccatcatcttatttctgagtgaaagtctcaagtgccgcacatcctcatcttggcatatagattgcttcttagcctgtccctcaaatnccagggggaaaacttcccaaaatttaccatantngccccttgggtggcctttgggggggcaanaaatttanggaaanaccatccttanccaagttncctttaactgtccaagngtaaaaggaaggncccttnttncattggnnanaaaaccaagggccccanccttgggggcccttttttngccnagnnaagtnnttgggaccttgggggggaagncccaaagtcctanttaacccccantttttggtcncccccaacccctttttttnntttggggggncccntttcnncttttttcaaaccaaaccaaaccccttttttccaancngggggaaagtnccnaaccaaaaaaccttttcttgggttncccntngggttttttttttcccccccaa

SEQ ID NO: 7195 - DNA, 397 bp, Homo sapiens
  misc_feature 142, 374, 375: n = A,T,C or G
aattggagctccccgcggtggcggccgcccgggcaggtacaaagagctacctacggtggtctggagccggaggaccacagcatcaaaggatataagatgcatagccaactgaggaacctgagcaattaaagagatccacagntaagccacacttaactggcacttgtggaagccccgcaaggcctgaaggagagctgacataggcaccccagagagtcagaatctggatccgatcttaataaggccatgaacaccagtggagaagaggcagaaacaccaatggataaggaacattcacatctttcttcccacgtgcctctaagtgccagtgcaggccccacaggccaagctacagggagaaaggagatgatgcnnagggaacctaactggactttaa

SEQ ID NO: 7196 - DNA, 244 bp, Homo sapiens
ccgcggtggcggccgcccgggcaggtacgcgggagagtgattgcagctttatgttcatttgtttgtttgtttgtctgtttgtttcaagaacctggaaaaattccagaagaagagaagctgctgaccaattgtgctgccatttgatttttctaaccttgaatgctgccagtgtggagtgggtaatccaggcacagctgagttatgatgtaatctctctgcagctgccgggcctgatttggtacct

SEQ ID NO: 7197 - DNA, 407 bp, Homo sapiens
  misc_feature 1, 359, 381: n = A,T,C or G
nctatagggcgaattggagctccccgcggtggcggccgcccgggcaggtacaagcagactctgaagatgatcagacaaggcaaagcgaaattggtcattctcgctaacaactgcccagctttgaggaaatctgaaatagagtacttaatatggtgtcttgttcactatacttaaaaatgcaccactcataaatatttaattcagcaagccacaaccaagacttgattttatcaacaaaaacccctaaatataaacggcaaaaaagatagatataattattccagtttttttaaaacttaaaagatattccattgcccgaattaagaagaagataaagtgttatatgggaaaggaagggncattcaagccaccacctaaagnaaaccttgaggtaaagccataatctg

SEQ ID NO: 7198 - DNA, 283 bp, Homo sapiens
tatagggcgaattggagctccccgcggtggcggccgaggtacatatatacttggtaattatgagcttgattttgtttttggaaatatgtgttcataatttaggtaatttgctacttaaagcactaagtctctgatacctgaaaagtacacttaaacatggcccaatgacacagcctttaaacttgtcaatattttcctcttggtggtattgaaaaccagtgagcagagagcataagaacagaacttcaagaccgtggcaggagcttgtatttgtacctgcccg

SEQ ID NO: 7199 - DNA, 296 bp, Homo sapiens
  misc_feature 246, 251, 256: n = A,T,C or G
cgcccgggcaggtacaagtggtgtttatacatggccatagtttatgaatgagtttactctttcaacaaataaacaacatttgggaagaagtttttctggttgctattatcctccttcatttgctttgcccacccttacttttttgttccctctctttgtgccctggggctcactgttccccttccagatggagggcatactcctttttttttttaagatgagatcttgctatgatgcccagactanaatgnaatgnctattcgcaggcataatcatattgcacaacagccctgaac

SEQ ID NO: 7200 - DNA, 609 bp, Homo sapiens
ccgcggtggcggcccgaggtacagttcagcccttctcgactggaggcggttctgcctattccgctccccacctggacacttagcaatgcctggagacatttttgattgttgtaaatggcatctagcaaggatgctgctaaatatcctataatgcacaggacagctgggaccctccccccgccaacaaggaataatccacccaaggtctccatagcactgaggcgccgacagcttgcagtggctcacgcaggaggaaggagcctggcgctttctagacgcctcctctgagaatattacgaatgcactacatgctaggcagaaagattgtgcaagatcattatgctaatcgttgtaaccctgtgcactgtaagatcctggaatatgaattatcgcagtaaaaattccgtccagcgtggttgggatgtgttgcgtcaacagtatggtcgctacaacccagcactctctggagaagaaaaacagtgatgaggtgactgctgaaccagcttcacagggaagaagggaaggtcaacagaaatctctcaacatggggcagcatgggcggcggcagctgtccgcttacccgtcaatgtgcacacgatgggggaaaaa

SEQ ID NO: 7201 - DNA, 240 bp, Homo sapiens
  misc_feature 138, 234: n = A,T,C or G
ctacttagggcgaattggagctccccgcggtggcggccgcccgggcaggtacagttttatgtggggaacaattcatgcaggctactggaaaattaaatcttattaccagaaaaaaaaaaaaaaaaaaaaaaaaaagtnccctgaacagtggcccaaaggccactgatcaaaaataaaatagtggctgtatatcaatgaaatgaaatccaagaagctttaaccctttggcatcanaaatcc

SEQ ID NO: 7202 - DNA, 462 bp, Homo sapiens
attggagctccccgcggtggcggccgaggtacctttcattggattgtccatggtgcatcgctttagcaagcggcgtgactctccactgcccgtcatcttggccaatatctatctgctggttcctcctgtgctcaacccaattgtctatggagtgaagacaaaggagattcgacagcgcatccttcgacttttccatgtggccacacacgcttcagagccctaggtgtcagtgatcaaacttcttttccattcagagtcctctgattcagattttaatgttaacattttggaagacagtattcagaaaaaaaatttccttaataaaaatacaactcagatccttcaaatatgaaactggttggggaatctccattttttcaatattattttcttctttgttttcttgctcatataattattaataccctgactaggtttgtggtgggaggggttatttacctt

SEQ ID NO: 7203 - DNA, 254 bp, Homo sapiens
tggggcgaattggagctccccgcggtggcggccgaggtacgcggggagcctaaagcccgggacaggcacacaggcccaggtgtgtaggccacagcagccgcagtcctgaaaggctgcaacgcccagacctccaggagagaccaggcccaggatgcctcgcctgttcttgttccacctgctagaattctgtttactactgaaccaattttccagagcagtcgcggccaaatggaaggacgatgttattaaattat

SEQ ID NO: 7204 - DNA, 249 bp, Homo sapiens
actacttagggcgaattggagctccccgcggtggcggccgtccgagccctggagctcattaggttggaaggttcacctattccatatcataaatgttttctgaataactgatatatgccaagctattatgttctatgtgctggagatgtagcaataaacaaaacagagtccctgccctcatggaatttatatttcagtgggggagacagataataaacaaatgaagatacattataacgtcaagtacct

SEQ ID NO: 7205 - DNA, 246 bp, Homo sapiens
aggacgcggggagactggttgagccgggtagggaaagcagcctaaagcccgggacaggcacacaggcccaggtgtgtaggccacagcagccgcagtcctgaaaggctgcaacacccagacctccaggagagaccaggcccaggatgcctcgcctgttcttgttccacctgctagaattctgtttactactgaaccaattttccagagcagtcgcggccaaatggaaggacgatgttattaaattat

SEQ ID NO: 7206 - DNA, 488 bp, Homo sapiens
  misc_feature 359: n = A,T,C or G
cgcccgggcaggtccgggcaggtacaccaaaaagagaactttgtgatccgttggtaagatagtatccacaagtaagcacttgtgttcactgttttttgttccacactagaatacacccagttggataccagagttatttacagacatctgaggaagatcctagttttcaagtctgtcaggaaaatattccatattgttttaagccagatcatacccatggaaaaatagagaatggttttctttctttttctttctgaccaatacatgctcaagaaatcaaatatctgagatacacaaattgaacgcggtagggtgggggaggaagtagggagataaagcctatgctgctgattcctcanttataggagcagtctctaaaagccctcgtcaatctagtgatgtgtttctctctggaattgggggactgggtggtgggctgcattttgtgggtgaatgggggtacctcggcccgtctagaactagtggat

SEQ ID NO: 7207 - DNA, 259 bp, Homo sapiens
cgcggtggcggccgcataatttaataacatcgtccttccatttggcccgcgactgctctggaaaattggttcagtagtaaacagaattctagcaggtggaacaagaacaggcgaggcatcctgggcctggtctctcctggaggtctgggtgttgagcctttcaggactgcggctgctgtggcctacacacctgggcctgtgtgcctgtcccgggctttaggctgctttccctacccggctcaaccagccccgcgtacct

SEQ ID NO: 7208 - DNA, 618 bp, Homo sapiens
  misc_feature 21, 171, 248, 269, 278, 279, 287, 288, 301, 323, 336, 371,375, 394, 395, 412, 420, 422, 449, 484, 494, 500, 502, 503,519, 522, 526, 538, 541, 544, 571, 579: n = A,T,C or G
acttagggcaattggagctcnccgcggtggcggccgtccctcttaatcatggcctcagttccgaaaaccaacaaaatagaaccgcggtcctattccattattcctagctgcggtatccaggcggctcgggcctgctttgaacactctaattttttcaaagtaaaccgcttngggcccccccgcgttacctgggcccgctctagaactaggtgggatccccccggggcctgcaagggaaattcgaatantcaaaggcttttattcggatnacccggtcnnacccttcnnagggggggggggncccccgggttaccccaagcttnttgtggtttcccnctttttaaagttggaaggggggttttaaattttgnccgnccgcctttggggccggttnnaattccaattggggttncatttaangnccttggtttttttccccttgggtgggntgggaaaaaaatttgggtttttaattcccccggcntttccaaccnaaaatntnnccccaacccaacccanaantccnatttaatcccgnaanggnccccccggggggggaagggcccaattnaaaaaaangggtggggttaaaaaaaagggcccccttggggggggggg

SEQ ID NO: 7209 - DNA, 449 bp, Homo sapiens
  misc_feature 6, 322, 332, 375, 415, 428: n = A,T,C or G
cgactnctatagggcgaattggagctccccgcggtggcggccgaggtactgtggatatttaaaatatcacagtaacaagatcatgcttgttcctacagtattgcgggccagacacttaagtgaaagcagaagtgtttgggtgactttcctacttaaaattttggtcatatcatttcaaaacatttgcatcttggttggctgcatatgctttcctacccgcgtacttttttttttttttttttgctttatgactgagcatgtggttgatcttggagtatgttctgtgtgcagatgatcgagcggccgcccgggcaggtacggnggtgtttttnttaaaggatgaattatcaaatgcttgctccccatggaagcctnttaaggaaaagttaaaactttgaatatgtcttatgggaanagactgaccgtancacaaatcattaaaaaacctt

SEQ ID NO: 7210 - DNA, 448 bp, Homo sapiens
ccgcggtggcggcccgcccgggcaggtactcaaattcctctggccattaatggtattgatgtcaagctgaaccatcgtaggaagttgaaagccttagaaagaggacttggtaaagtttttggattatcttgaaactctggcaagatggccaagtatggaaacatgaagccagtcctgacaatgggcagaacgaattcagtgatatcattaagtccagatctgagtgggaaaccacccatcaatgatatgttcacagacctcaaagatggaaggaagctattggatcttctagaaggcctcacaggaacatcactgccaaaggaacgtggttccacaagggtacttttttttcccttctttttttttttttctttggtcaagtagggattaatgccataggtttagagagaaggattgttttcagtttttaagagaattttttaaaaat

SEQ ID NO: 7211 - DNA, 142 bp, Homo sapiens
cgaattggagctccccgcggtggcggccgaggtacgtgttaatagaggctagtttgggtcttgcagaaatgatttcatttgggatgctttggttgtcattggggagcttggttgttggagacgtgagccttgccgaagatcc

SEQ ID NO: 7212 - DNA, 252 bp, Homo sapiens
  misc_feature 1: n = A,T,C or G
ncactacttagggcaattgagctccccgcggtggcggccgggcaaagcgatcggaacccgggaagaaatcgtcccaggcgcggagtggggcgatattaacgtccatgttcccccgcgtacccaggcccctacaaaggcttcagagtagatatctctgccaacatgaggacagaaggactggtgcgaccccccacccccgcccctgggctaccatctgcatggggctggggtcctcctgtgctatttgtacct

SEQ ID NO: 7213 - DNA, 626 bp, Homo sapiens
  misc_feature 187, 489, 527, 530, 533, 554, 561, 608: n = A,T,C or G
cgttaaacatgtgtcactgggcaggcggtgcctctaatactggtgatgctagaggtgatgtttttggtaaacaggcggggtaagatttgccgagttccttttactttttttaacctttccttatgagctcgagcggccgcccgggcaggtacttttttttttttttttttttttgttgggatttcanatagagtttggtttataaaaagtaaacagggccaacgtccacaccaaattcttgatcaggaccaccaatgtcatagggtgcaatatctacaataggtagtctcacagccttgcgtgttcgatattcaaagactgttttgctccattccccagtgtgtttcgtgtaaccatcctccaaaactgtgtaggtgaatttgctatttccttcagccttgaattcaccttcatttgaccccatcagcttcagggccttctttacatttccactggcctgatccatgtatgcaatgctatttttgcagngatatgtgatgttctgggaagctcggctggagaagaantcnaangaatgccagctgcacattaanggacatnttcaggaagttcaaggattgccgtagcttaaactggaaaaccccatncatggacttttcaaaacc

SEQ ID NO: 7214 - DNA, 528 bp, Homo sapiens
  misc_feature 1, 221, 356, 370, 515: n = A,T,C or G
ncgcccgggcaggtaccctgggtaaatccctactgaaacttctggggcaaaccctctgctactcaggctcacaaattccagatgcttctacaacttggaacaaccatctcttcctccaccgctcagtgaaactgttttgcttgggcagaaaatgtcctcaggcataaagccaggcacttcgtcttagtaacatggccatggggaagacaaccacaggccanatagtcaatctgctgtccaatgatgtgaacaagtttgatcaggtgacagtgttcttacacttcctgtgggcaggaccactgcaggcgatcgcagtgactgccctactctggatggagataggaatatcgtgcctngctgggatggcagnctaatcattcttctgcccttgcaaagctgttttgggaaagttggtctcatcactgaggagtaaaactgcaactttcacggatgccaggatcaggaccatgaatgaagttataactggtataaggataataaaaatgtacctcggncgctctagaacta

SEQ ID NO: 7215 - DNA, 286 bp, Homo sapiens
ccgcggtggcggcccgaggtacttttttttttttttttttttgtaaatatttttgatccctggttggttgatctgaggatgcagaactagggagggaacatggctacatgttgttggggataaaaaggtaaacgtgactctacttttctcttgacttgaaatcagcctgtgaatatctgagttggtagagctggacgaggttacagctgagcataatttttgtttctaaaggagagataaaaccaagtatctcaggaatcaaaaacagctattaggtacctgcccg

SEQ ID NO: 7216 - DNA, 433 bp, Homo sapiens
  misc_feature 253, 409: n = A,T,C or G
ccgcggtggcggccgaggtacttttcgaagtaactggacatgttgcaggtcaggggaatggaagtattgctatggactgaactgtgcccccaaaattcatatgttgaagccctgagctctgacatgattgtatctgaagtcctaaagccaggaatgaggaaggctgtgaatgtccattgttccatacaagaatgactcttctcttggctatttagagatcatgagggatactgccccagtttccacaggccanatggtctccaacaaaagccacgggggagtcgcccctgcctggcagatctatcgggtcaggaccaccgcccagggggtcctggagaggacagtataggaccaaagaggattattcatgagcctaagatctcatgaaacgtgccttgctaagttttanacttgcataggaccatcatccccc

SEQ ID NO: 7217 - DNA, 394 bp, Homo sapiens
  misc_feature 323: n = A,T,C or G
ggcgaattggagctccccgcggtggcggcctcccgggcaggtacaaagagctacctacggtggtctggagccggaggaccacagcatcaaaggatataagatgcatagccaactgaggaacctgagcaattaaagagatccacagttaagccacacttaactggcacttgtggaagccccgcaaggcctgaaggagagctgacataggcaccccagagagtcagaatctggatccgatcttaataaggccatgaacaccagtggagaagaggcagaaacaccaatggataaggaacattcacatctttcttcccacgtgcctntaagtgccagtgcaggccccacaggccaagctacagggagaaaggagatgatgcaaaggaacctaactgga

SEQ ID NO: 7218 - DNA, 837 bp, Homo sapiens
  misc_feature 7, 472, 539, 604, 628, 633, 659, 670, 674, 683, 702, 712,765, 780, 783, 784, 786, 794, 804, 818, 823: n = A,T,C or G
ctccacncgcggtggcggccgaggtactaaagggagtctactgcttaaagccaattcacatccttaaaaggtcaaatggagagaaattaaacttgggagaagcattttaagactgtgctgttataaaacctcggggcacttaactgattaatcatggcaatgaggcagggaccagaaaagagtctttagaacctgtcatccccacacagaagagcaactttcagggaaacacccttatctttccattttcagaccccgggaggtgtgagggtggaaaggctaggtagagaagagagcagaaaggagatgagatgacacaaccaggattctccgaagctgggcttgaagtcctcaagaaaaactcccatgaacaaggaaggaagagtgaagaaaaaaacagggatacctggaactggacaaaagtaaaaagatagaaggatactttttttcccccagaagaagtctgtcacanaaagcaaacctgcaaatatccgatcagtataacacccaagaaaatgacacatgcggccaggcatggnggctcatgcctggaatcccagcactttgagaagcccgggcagggtggattcacctgagatcaggngttcgagggccaccctgacccaanatggngaaaccccttctctactaaaaatccnaaaattagctngacnttggtggcnggcccttgtagtccagctncttggaaggntggagacatgagaatagcttgaaccccggaagggggaggttgcattgagcccnaatagcccattggcnctnnancctggganaaaaaaagcnatgcctccctcttnaaaanaaaaacccgaaaaa

SEQ ID NO: 7219 - DNA, 395 bp, Homo sapiens
  misc_feature 26, 198: n = A,T,C or G
gactacttagggcgaattggagctcnccgcggtggcggccgcccgggcaggtacgcgggggcggcgcgggtcctccatatgctgagcgccggtcccctgggcccacttttctttctctatactttgtctctgttgtctttcttttctcaagtctctcgttccacctgaggagaaatgcccacagctgtggaggcgcangccactccatctggtgcccgacgtggatgcttttctctagggtgaagggactctcgagtgtggtcattgaggacaagtcaacgagagattcccgagtacctcggccgctctagaactagttgggatcccccgggcttgcagggaattcgatatcaaaggcttatcgatacccgtcgacctcgagggggggggcccgg

SEQ ID NO: 7220 - DNA, 403 bp, Homo sapiens
ccgggcaggtactgctcggaggttgggttctgctccgaggtcgccccaaccgaaatttttaatgcaggtttggtagtttaggacctgtgggtttgttaggtactattcataatagctcagaattgaaaaattctcaaaagactattaatgggagaatgaataacttttggatgtaatgaaaaatggataaacaaacggaagactatacagcaatgagaatgaatgaactacaaatacatgcaacaataagaatggatctcactttggcaggttgaataacggcctccaaagatagccagcgtatgaatccctggaacctgtgaatgtcacttatatggcaaaagagattctgcagatgtgattaaattaaggatcttgagataggggggattatccctgcttt

SEQ ID NO: 7221 - DNA, 304 bp, Homo sapiens
  misc_feature 3: n = A,T,C or G
ctnctatagggcgaattggagctccccgcggtggcggccgaggtacactggaggctggagcctgcagatggcatagctctgcggctcaccttgctgcagttggtggtggtgacagagactgcagcttgactgtagtggtaagaggatgcctgtggcagccagatgataggggccttatagggtgggccagtgcattgagggtgacagcagaggtggttgtattggcatcagtgctagtggtggcagcagcagcaagtctgggaaaaaaaaaaaaaaaaaaaaaaaaaaaaaaagtacctgcccg

SEQ ID NO: 7222 - DNA, 494 bp, Homo sapiens
ctatagggcgaattggagctccccgcggtggcggccgaggtactttttttttttttttttttttgggtagaatttcaacatcaaataatcaataaagatagactatattttcctatttcatttccaccatcctttaaaatgggtcaaaatcatcctgccttccactaacgactaaaagggtgatcattttcttatgtgattcccactgttttacctttaaaggagactcgctcaatgaactgaattgttttcaaccttagcttttctcctcccagttttcatcattgggtatcattccacttcagcaacagttcccccataccataggttttcctggtgttaaaaaatatcagacattgcccacttgcacctttaggaactttgcaagccaaggctcccagcacagatcaatattccacattagagaaatgcaggaacaagccaatagaattagcagactaatttactgtgcctcggccgctctagaactagtg

SEQ ID NO: 7223 - DNA, 128 bp, Homo sapiens
ccgcggtggcggccgggatcttcggcaagactcacgtctccaacaaccaagctccccaatgacaaccaaagtatcccaaatgaaatcatttctgcaagacccaaactagcctctattaacacgtacct

SEQ ID NO: 7224 - DNA, 387 bp, Homo sapiens
  misc_feature 302: n = A,T,C or G
actactatagggcgaattgggagctcccccgcggtggcggcccgaggtacatttacattacctggggactggacatcaggtcacgttggggtgcccctggcttgcaattacgtgaagctggaagatgtggctgacatgaactactttacagtgaataatgaaggagaggtctgcatcaagggtacaagttgctgttggtgcaggtggtctattaagaatacctggcgctgaaacagcctgtgcttgagtcattggaggaattccaggacgtggaacaggtgggggcatacctggtggcattncaaggcatcagaggtggtattcctggtccaggtggcatcattccacccattggcatcattccaggtggcatgcctggcataactg

SEQ ID NO: 7225 - DNA, 585 bp, Homo sapiens
  misc_feature 572: n = A,T,C or G
cttagggcgaattggagctccccgcggtggcggccgaggtcgcggggacatcaatgcagagtccctctgtgaatttacaacacccaacacccatgagttcagtccttaagaaggaaaattgagcaagtatttaattggttggacattgcataaaagaggtccatatccaggctaactctagaaattttattctcaaactttagttggcctctttttcttctggtcagaaggaccattcttaagtggccgctgggggaaaatctttggcacccagaaagaattcaactgcgctcactgcaaaaaatacaatggcctacattggatttgtaagaaggagaaaggagccctgtattgtgagctgtgctatgagaaatctttgccctgaatgtggtcgatgccaaaggaagatccttggagaagtcatcaatgcgttgaaacaaacttggcatgtttcctgttttgtgtgtgtagcctgtggaaagcccattcggaacaatgtttttcacttggaggatggtgaaccctactgtgagactgattattatgccctctttggtacctgcccgggcggncgctctagaacta

SEQ ID NO: 7226 - DNA, 600 bp, Homo sapiens
  misc_feature 212, 234, 238, 239, 243, 258, 261, 267, 272, 279, 288, 312,318, 330, 333, 340, 342, 343, 358, 365, 374, 384, 388, 416,419, 420, 427, 429, 431, 446, 451, 452, 454, 465, 486, 487,488, 490, 500, 514, 519, 537, 550, 562, 571, 587: n = A,T,C or G
acttagggcgaattggagctccccgcggtggcggccgccatcttgggtcatcgatgagcctcgccctgtgcctggtcccgcttgtgagggaaggacattagaaaatgaattgatgtgttccttaaaggatgggcaggaaaacagatcctgttgtggatatttatttgaaccgggattacagaattttgaaatggaaagtcacaaaaagtgangcaattacccaatgaagtaggnaaanncagnaccgagtaaaaattnctntgaatngggcntttcacnaaggatcantggcaaaccatataccaaaaaaantggggnaaataaccttgntgnattgggncnnttgtaaggggccaantcccaanagtctttgngtggggtaangggnaaggtaatttaatatccccaaccggggnggnntcccaantnanggggggttttccaanggggnnantttttctttgnggtcccccctttggtcctttnnncncctttaaaanaacctttgtttggncctgnttttttccaatttaaaancccccaaaaaatnttccaaattttntatccaaanaaaattttttttcctnaaaaacccccccc

SEQ ID NO: 7227 - DNA, 436 bp, Homo sapiens
  misc_feature 7: n = A,T,C or G
aattgtngctccccgcggtggcggccgaggtacactgtttccatgttatgtttctacacattgctacctcagtgctcctggaaacttagcttttgatgtctccaagtagtccaccttcatttaaccctttgaaactgcatcatctttgccaagtaagagtggtggcctatttcagctgctttgacaaaatgactggctcctgacttaacgttctataaatgaatgtgctgaagcaaagtgcccatggtggcggcgaagaagagaaagatgtgttttgttttggactctctgtggtcccttccaatgctgtgggtttccaaccaggggaagggtcccttttgcattgccaagtgccataaccatgagcactactctaccatggttctgcctcctggccaagcaggctggtttgcaaagaatgaaatggatgatttct

SEQ ID NO: 7228 - DNA, 339 bp, Homo sapiens
ccgcggtggcggccgaggtacttatttttttgaggttaaaatattcagaaactacttttatgcattgtagcagtaatcatttatggaatgcttttgacatgttttaacagggtaaccaaaacttttaggcctgttttttttggttgtccttgttgttatatttttaatggaaatctgttactcaggctggtagcattaaattagctttttaccctcaactcaagtagcaaatatcatggagaacttcagtgtttagcaggctgttaatttcccatctatgaatagcactttatgatgtaggctaaactaagcaaataatgcagcgttatgtggatcatt

SEQ ID NO: 7229 - DNA, 394 bp, Homo sapiens
tacttagggcgaattggagctccccgcggtggcggccgcccggggcaggtaccagatgaaaatgaaaccctaaagaagactgctgggccatgagttgcttcctcctcctccaccttaaccctctgattccagaattgcagtcattttcttctgccaaggaaatccattaaaaactgcagccacactgcaatttcctaatgtagaacaagatataaagcaggctttgagacaacaacctacctttgtttactctttccaagctggaagagtccttctcctctagttgcccctaggtcactggctaatttattttaaaatttagatggaactcatgtatagttaagtgcacaaatcttagccgtgcagatgggtaattttcacatagctatttgcc

SEQ ID NO: 7230 - DNA, 501 bp, Homo sapiens
ggcgaattggagctccccgcggtggcggcccgcggccccctgttgtgttgctgcggagaggcgcagtcatgcaggaaaacctcagatttgcttcatcaggagatgatattaaaatatgggatgcttcatctatgacattggtggataaattcaacccacacacatcaccacatggaatcagctcaatatgttggagcagcaataataactttttagtaacagcatcttccagtggcgacaaaatagttgtctcaagttgcaaatgtaaacctgttccacttttagagcttgctgaagggcaaaagcagacatgtgtcaatttaaattctacatctatgtatttggtaagcggaggcctaaataacactgttaatatttgggatttaaaatcaaaaagagttcatcgatctcttaaggatcataaagatcaagtaacttgtgtaacatacaattggaatgattgctacattgcttctggatctcttagtggtgaaattattt

SEQ ID NO: 7231 - DNA, 400 bp, Homo sapiens
  misc_feature 64, 68, 73, 75, 76, 79, 83, 86, 87, 91, 92, 96, 110, 115,116, 120, 135, 146, 171, 173, 174, 181, 182, 183, 185, 186,191, 194, 195, 201, 206, 216, 217, 218, 222, 225, 226, 372,383, 384, 387, 399: n = A,T,C or G
tcactacttagggcgaattggagctccccgcggtggcggccgaggtacatcttgtttggatcancacngagtntnngtntagnacnncagnntaangctggacaatctgntgtanntctnattctgcatgggtanagtaagggctnctgcctggcctctaagatcgttgangnntgctttnnncnnggccnaannaccttngttcngatcagggannnaggntannactttggttttcttaaaagcttacagtgtttggctaattctcctcccctttttacaagacgggggccggagggtggacactggtggcaggttaagggatactgtcactttaagaagcctgcaggatttgcaagtgttaaacatggnagaaattaggnngcntgattttttaana

SEQ ID NO: 7232 - DNA, 590 bp, Homo sapiens
  misc_feature 578: n = A,T,C or G
gcccgaggtacatacgcttggcttttctgtagctatgtttatggctttacagcagattttatggagctgcaattactttgatcatgagggactgatgctagtggatttacttcaccaaatggaactcactttgtggcttctgaagaagggacctttgtggactgtcatggagtagttaagagtgcaggctctgatttagtgatcagagtctgcattgtcaggaatgggacaaagtgaagttatgtggcacttgataggatgccctgagaagattgcaacatcacccctgtgatattcctgctgaagatccataacctggatgtaatcatgaggatatatcagacaaacccacgtaaagagacatgctgtatacaaaactgtaatcttagaaagtgccaaggtcatgaaaatcaaagatagaccctggaactgttccaaactggaggggaccaaagaggcatgacaactaaacacaacacgtgattctgaactggatctttttgcttgaaaggaagttacagggacagttggaaaagtttaaatggggcctacaatgcccgtggtaatgatgtgtcccngttaatttcctg

SEQ ID NO: 7233 - DNA, 298 bp, Homo sapiens
  misc_feature 5: n = A,T,C or G
gactnctatagggcgaattggagctccccgcggtggcggccgcccgggcaggtacgcggggagcctcaaaaactcacaccagctcctgcaaggaatgtgaatcttggagctcccagctattctgttcctgtttctgtcagctccttccctgaaaactcagaggtgctcagcatgccatgctaaaaggcaaaataaaaagatcttggagacatctcagctttaatgaggactttccaacattccagactgccgtcctgcaatgaagctctgagtcacggtctgtgaggctaaggtacct

SEQ ID NO: 7234 - DNA, 341 bp, Homo sapiens
tatagggcgaattggagctccccgcggtggcggcccgaggtacgcggggggcacttcctgcgaggcccctgcagcagcagcggcgtggtcagagcgagcttcggagaagcagtggtgggttccatgtgatggtggagtaggaggcaggtctccgcggttcatctgtgttgctctaaatgacactgcttcattattttgatggctggagaatatttcctagtgtatgtatatgagaagtttcttgatctctttatctgtggatgaacaggctagtcaccctgctgtggaatagaaggccagaattgatcagtctcatctgagagtaactttgtacctgcccg

SEQ ID NO: 7235 - DNA, 681 bp, Homo sapiens
  misc_feature 526, 534, 569, 609, 633, 658, 660, 668, 669: n = A,T,C or G
ccgcggtggcggcccgaggtacatctacctaaaggactattatgtggaataatacatactaatgaagtattacatgatttaaagactacaataaaaccaaacatgcttataacattaagaaaaacaataaagatacatgattgaaaccaagttgaaaaatagcatatgccttggaggaaatgtgctcaaattactaatgatttagtgttgtccctactttctctctcttttttctttcttttttttttattatggttagctgtcacatacaactttttttttttgagatggggtctcgctctgtcaccaggctggagtgcagtggcgcgatctcggctcactgcaacctccacatcccatgttgaagtaattcttctgcctcagcctcccgagtagctgggactagaggaacgtgccaccatgactggctaattttctgtattttttagtagagacagagtttcaccatgttggccaaggatggtctcgatctcctgaccttgtggatccacccgcctcagccttnccaaagtngttgggattacaggtgtgaaccactgtgccccggnctgggtccctgcccggggcggccgcttctaaaaactaggnggatcccccgggcctggagggaantcgatatcaagccttattggatccngncgaccttnnaggggggggccc

SEQ ID NO: 7236 - DNA, 618 bp, Homo sapiens
  misc_feature 14, 250, 260, 267, 275, 279, 306, 313, 317, 329, 342, 355,362, 381, 394, 415, 477, 490, 491, 496, 542, 545, 564, 576: n = A,T,C or G
cactacttagggcnattggagctccccgcggtggcggccgaggtacattgagaagtatagcaatctatgtaaatgtaatcctcagtgaggttcctcagtgctaggtcccataggattgtcgttgcccttgttaatgaggtttctctgttcagcggcttcaatttttttctctttgtacctgcccgggccggcccgctctaagaactaagtgggatccccccggggctgcagggaatttccgattattcanaggcttaatncggattncccgttcngacncttcggagggggggggggcccccgggntgacccncagncctgtgttgggnttccccctttttnagttggaaggggnttttaanattttggccggccggcctntggggccggttanattccaatgggggttcaattnaaggccttggttttttcccctggttgggtggaaaaaatttttgggttttaattcccccggcnttccaaccaaaannttttncccccaaccaacccaaaaaccaatttaaaccggaaagggcccccgnggngggaaggccaaattaaaanaaaggttggggnttaaaaaaaaagggcccccttggggggggggggttgggggcc

SEQ ID NO: 7237 - DNA, 495 bp, Homo sapiens
ccgcggtggcggccggaaccgcaatcttccagtaattcgccaaaatgacgaacacaaagggaaagaggagaggcacccgatatatgttctctaggccttttagaaaacatggagttgttcctttggccacatatatgcgaatctataagaaaggtgtattgtagacatcaagggaatgggtacgcggggagcacactgaggaggacacaaaagaagtagacagaatctctgcctctgcttaggagtatgcaatttagttggggcgacaaaacttaaatgctagaaccaataaaagaagattacaaagcaactcgcaaattctggacaatcaggaagtccaagccacaatgatcctgccaagaatcctccaggttaccttgaggatagttttgtaaaatctggagtcttcaatgtatcagaacttgtaagagtatccagaacgcccataacccagggaactggagtcaacttcccaattggagaaatcccaagcca

SEQ ID NO: 7238 - DNA, 267 bp, Homo sapiens
ccgcggtggcggccgaggtaccttaaggactggcaaagcctttccaataaggaagcatcctggttctagcttattttaaaacaaagtgacaggacaccaactgaagtcaacgtggctcgatttagaggcggtaggcatttgaaacattttgaggctgcatggggtgccaaattggttgagttctttttccgagactctcaggcaaaatacatcgtgtgctgggtatcatggtggatttgcacagccttagccaaggcctgaggatcc

SEQ ID NO: 7239 - DNA, 439 bp, Homo sapiens
  misc_feature 386, 389, 426: n = A,T,C or G
ccgcggtggcggccgaggtaccgctgcgagtgcaagcctggctacgctggcaatggcatcatctgcggggaggacacagacctggatggctggcccaatgagaacctggtgtgcgtggccaatgcgacttaccactgcaaaaaggtagagccaggtccttttgtgtgcctccagaaagagggcccatcaccttatcaaaacacaggctaaggaattttaaatacttaaagtttggacatgaaactgaaagattaaatctcccaaagggagaggggcactaattcctattaaaattaaatcacttggtgccaaaaacatgaacagggctagctctttttgggcaacctgtgttccatagtcaacttcttctgtccaaaaaaaagttnagntaccttgccccgggcggcccgctcttagaaactaagntgggatccccccc

SEQ ID NO: 7240 - DNA, 739 bp, Homo sapiens
  misc_feature 457, 573, 599, 651, 664, 676, 698, 711, 723: n = A,T,C or G
ccgcggtggcggcccgaggtaccaggagggtattgatgtttgaggtccaaactgaaaacccatcacctccttcccactgctatagcagcgttagccctggggttcattatctagccagttcacaccttctaaagtggggctctgaaaatgtcttacttccctcacagacaaagcaattctcaagcctcctgagatcacccaccaaccagagcaactgctgtcacttggaggtgcagctgaattcttctaattgtgacacaaactcttgaaactgtaaatgctgaaagattaaatgaggttataacactcagaaggttttacaagtaaaagtaagtcaaatcaataggtctttatttcatatctgtaatggtttagctctgcgggaagtgttagcagctatatgaattaggaagaatttagaagacaatccctaaacacatgaaaatgtccaagtaanaaagatacatatttatccaaatatttaaagtgaaatgctccagattatgggaagcttacagttttcaagccaaagcttttttagaaaaaaattatggaactatttttaaagaaganctaaacattttctttgccttaggcangaatttaccggaacaccaggattcaccctttttctttacccttcgggccgcncttagaacctaantggatccccccnggcttgcagggaatttcgatantcaaagctttatngaataccggccnaccctcgaaggggggg

SEQ ID NO: 7241 - DNA, 509 bp, Homo sapiens
  misc_feature 15, 19, 197, 221, 225, 303, 305, 311, 321, 327, 328, 366,400, 414, 423, 436, 438, 441, 463, 472, 474, 506: n = A,T,C or G
tcgcggtgggcggcncgangtacagatctgggaaactaaatattaaaaatgagtgtggctggatatatggagaatgttgggcccagaaggaactcgtagagatcagatattacaacagctttgttttgagggttagaaatattgaaatgatttttggttatgaaacgccacagtttttaggccagccagggcccagnaatccctgaccccttctgccccgngggnttatcctccctcccccaaggcttgggcttgcccctcattggtcaattcacaagttatttcccaatttttttggttttngntatggncattgttccntttggnngaaaaggccccattccaaaagaattttttttcttccgnttcttgggttttttttccccttccttccaatttnggggttaaaaattngcccttccnacccttttttggntnggnaaccttttcccaattttttccnaaaaaattncnttggttaaaatttccccccgggttttccaaanaaa

SEQ ID NO: 7242 - DNA, 356 bp, Homo sapiens
  misc_feature 206: n = A,T,C or G
cgaggtactttttttttttttttttctattattttaaaatttctctggagaaagcaaactgattaaaaattaattcacgctgaaggatggtggaaaacctggagtcacttaagggaatctctgctggaggtgttgctttagcagaaagccgaaagaagggggcccacaaggcctggctttccttgattcaggccaatgccactcanaagaagggcagtgaggagaaaaatgaaattttgtagctcccagacctgatcaggtgtcaagtttgtggggcttaggtttaaggacaatcaatctccccagggtgctttcagtaagatcctcccctcagctccccccgcgtacctgcccgg

SEQ ID NO: 7243 - DNA, 430 bp, Homo sapiens
  misc_feature 3: n = A,T,C or G
ctnctatagggcgaattggagctccccgcggtggcggccgaggtactctctatagtgcttgcacaatgacaaaatcccccaacaacacatttctcagaaggtatccccattgttaagtgactcatgactgtaactgaataaacaaaatttgataaggcacaagatacttacgtcatctccaagcacctccccacattatacttagaaattacaaagaagaagaaagtaacttttcctggcttcctccactttaatcaagtgatcaaagttaacatcactgcaacggtaatgggatgatgaagccaagctgggagcaggggtgcactgagaacagacgccgcttctgcggtatccctgccagaaagcctcaacctgaacctaatcatgaggaaacatcaggccaacccaaactaagggacaacctacacat

SEQ ID NO: 7244 - DNA, 311 bp, Homo sapiens
  misc_feature 144: n = A,T,C or G
aggtacatcaggcagtagtccttaaacttttgcccatacgttgtggagcatttacaaaagcaattctctggacagtgagccctcaatgcctttttatatgtggcttcttgaatagatcacattagaaattgagcagtccccttnctcagctaccagtgtcaatgctggtatgaggaggagcagtgggggcactgacagacactggtgattcgtttcttttatcatagtggaactgagatttcattccttttcagtagaaaatattaatccaagggaagaattaaaaaaaaaatggaaacaatgactggtgc

SEQ ID NO: 7245 - DNA, 625 bp, Homo sapiens
  misc_feature 158, 168, 215, 250, 259, 272, 282, 292, 295, 296, 313, 318,329, 369, 403, 450, 496, 511, 515, 528, 546, 553, 574, 578,583, 595, 600, 614, 620: n = A,T,C or G
cttagggcgaattggagctcaccgcggtggcggccgccacgctggttttgcatcttcaggagacgctcgtagccctcgcgcttctcctcggccaattcgcggaagaagtggctcacgccttccagagccacatcatcgcggtcgaaatagaagcccanagagaggtanggttgtaggaaggcctgcaggtacctcggcccgctctaagaaactangtgggaatcccccccgggcctgcagggaaattcgnatattcaangcctttattccgnatacccggtncggacccttncgnnaggggggggggggctcncgggntaacccccaancctttttttggtttcccccttttttaagttggaagggggntttttaaattttggtccgtccggccttttggggncccggtttaaaatttccaaattgggggtttccattaagggccttggnttttttcccccttggttgggttgggaaaaaaattttgggtttttanttcccccggcctttncaanccaaaatttttcnccaaccaacccaaaaacnaatttancccggaaagggcccccggggngggnaaggnccaatttaaaanaaagntttgggtttaaaanaaaggnccccc

SEQ ID NO: 7246 - DNA, 312 bp, Homo sapiens
  misc_feature 169, 207, 234, 250: n = A,T,C or G
cactacttagggcaattggagctccccgcggtggcggccgaggtacttgaagaaattatttcattgagaaaatatgaaacttgggagaaactttaagataatgcataaaaacaaattgatgcttcagtgaggttgcatgagtcatagaacttctttcagtgaatatctnactttgggctttatcttcttatcactttataatagtanctctcacccaaagattattttgtcctncacccaaaggggcatntggcaatgtctggagatatttttggttgtgacaagtgggaaagtgaaaatggtacctgcccg

SEQ ID NO: 7247 - DNA, 400 bp, Homo sapiens
  misc_feature 285, 399: n = A,T,C or G
ccgcggtggcggccgcccgggcaggtaccacaagaccacccaagtgtaaggagcaatgcagtcgaccaccaacttgtcatcatacaagtcaagaaaaacatcgctgtcactttggttcttgtccaccatgtcatcaaccttgccaaaaagttttggagaaatgtggtcacttgtgtcctgctccgtgtcatgatcaagcgttaataaagcagactggcaggcaccagcctacaggcccttgggaacagccttctgagccagcatttattcagactgcattaccgngtcctccatgtcaagttcctattcctatggaatgtcttgggaaacatgaggtgagtccactaccatggccatgctggtaggaccctactcttgtaaaagaagttttgtgggaana

SEQ ID NO: 7248 - DNA, 413 bp, Homo sapiens
ctatagggcgaattggagctccccgcggtggcggccgaggtacgcggggacatcaatgcagagtccctctgtgaatttacaacacccaacacccatgagttcagtccttaagaaggaaaattgagcaagtatttaattggttggacattgcataaaagaggtccatatccaggctaactctagaaattttattctcaaacttagttggcctctttttcttctgtcagaggaccattcttagtggcactggggaaatcttggcacccagaagaattcaactgcgctcactgcaaaaatacaatggcctacattggatttgtagaggagaaaggagccctgtattgtgagctgtgctatgagaaattctttgcccctgaatgtggtcgatgccaaaggaagatccttggagaagt

SEQ ID NO: 7249 - DNA, 464 bp, Homo sapiens
ccctttcgagcggccgcccgggcaggtactacatatgcagaatctgatacaatgttaatagactgattaaaatcttgttaacactgtaatgacggcaaccaactctgctctttgagtcaagtgatactgagttttgatgactcattcttttggcccggtgtaagccacttttccattgctggaaccatcagtaaacactgccagagcattttttaaaggcttatgtttggtaactttaggtaaaatccaagtagtcaattttaaaaactggaagatttttgttttggagtaacgattgtcaataattcccacaaaatcggcaaagaccaatctgccatgcaccagaattgataaaggcctgtctaacctgttgcttgttgaaaggaacagtgattttatctgggtcatttccacacaatgttattattcataatcttcctgaccaattaatgtaaccatttgat

SEQ ID NO: 7250 - DNA, 573 bp, Homo sapiens
ccgcggtggcggcccgaggtctcttgaaggctatgcaacatgagtctttgaacaagaattccttgctactttgattcattcatcaaatactgagtgcctgtgtgccaggcacaggtgaactctggggattcaggggtaactaaaacagattggaacctgcccttgtgaagctttcagtctagaagggagacgtgaaacaaattttagcttcaaaagcaacatctatttttgcctgttagcatgcatttattttaaaagtcatattagagttacctggttccgcttcagagcagactgggaaaatcaggcttacaatggaatcagatgctgtgggcctaaaacagctctttaaaaatctatttttttaggccaggtgcgttggctcacacctgtaatcccagcactttgggaggccaaggtgggtggatatgaggtcaggaggccgagaccagcctggccaatatgatgaaaccttacctctactaaaaataaaaaattaaccgggcatggtggcacatgcctgtagtcccagctactcgggaaactaaggcagaagaatcgcttgaccccgga

SEQ ID NO: 7251 - DNA, 407 bp, Homo sapiens
  misc_feature 152, 163, 178, 181, 193, 210, 241, 357, 376: n = A,T,C or G
aggtacctgacgcggggcaagattctgctgtgcacaggtgccatcatggaagaacaggcagcagaactccttggagtgaagatgtgcacgtttgttccaagacacacccggaacttggcaaatgagtttccgctgtttatgtgaaattatgnattcttgggcntgggactggtggggnatncttgatttacangaccggtgaacattaancaccagggggaggggaaaccccctggtcacnatttccctcctttttttgttaatttttttccgttaagttaagaattttaaaaaaaggtttaattaaattcttcctttttcccccctttccccccccccaaaaaccttgggggaagncttggttccccccttgggncccttgggggtttttttccaaaaaaaattaa

SEQ ID NO: 7252 - DNA, 252 bp, Homo sapiens
ccgcggtggcggcccgcccgggcaggtactcccacagccaggaatctgccatagaacaactctaccatggggttctttggcttctcttcatccgtctcctcttcagctttcatttggaaggcatcttctaaccaatctaataatttgtgtgtaaactcactcacatcttgctgctgtgagtcatttgatttgaaagcatccttaagaatttcaactgctcttgatggatcaacatacttccttttggtacct

SEQ ID NO: 7253 - DNA, 425 bp, Homo sapiens
  misc_feature 42, 49, 61, 66, 94, 212, 219, 223, 316, 348, 352, 362, 365,371, 374, 376, 380, 381, 406: n = A,T,C or G
gctcctatagggcgaattggagctccccgcggtggcggccgncgggccngtactagctganaaaanggcatgttttaagaaattgcctcgcatnttgagtttcaatactatgagatacacatttaatatggtcacgatgatgaaagagaaagtgaatacacacttttccttcccattacgtttggacatgacgccctatacagaagattttnttatggnaaanactgagaggaaagaaggtgtttaaagaagtcagtgatcattcaaaagactcactagagctatagaatatgacttgataggatttgacatgtancacacaggaaacggcagatggtggacactatnatanactttatcanacntataantangncccnntgcttattaaaaacacataaatggnaatcttattaatgatgcct

SEQ ID NO: 7254 - DNA, 380 bp, Homo sapiens
  misc_feature 304: n = A,T,C or G
ccccgcggtggcggccgcccggggcaggtacggtattctgtgagctggggaagacagatacccttttattgggggcagggggaggatgtagcaaaggaccaattttcctggagatcctattacgtgaagggacttatactggacacatcatggagaaaatcagaaagaaggctgcttaataagacccactcctggatgcggccactctcaattctcagtgtctttgggaagcaaggtttgccatccacttgtctaaacagatgatgatagcagaggtgctgcacaccttctccctgtgacttgngaatgcctttcgtgctcccaaataaggaactcctctcactgctgtctgctctgagctgtattttcattttgatagc

SEQ ID NO: 7255 - DNA, 551 bp, Homo sapiens
  misc_feature 392, 396, 412, 449, 452, 465, 475, 480, 525, 537: n = A,T,C or G
ccgcggtggcggcccgaggtactagataaattagtggttacactgtgtaaaataatttcaccactaagagatccagaagcaatgtagcaatcattccaattgtatgttacacaagttacttgatctttatgatccttaagagatcgatgaactctttttgattttaaatcccaaatattaacagtgttatttaggcctccgcttaccaaatacatagatgtagaatttaaattgacacatgtctgcttttgcccttcagcaagctctaaaagtggaacaggtttacatttgcaacttgagacaactattttgtcgccctggaagatgctgttactaaaaagttattattgctgctccaacatattgagctgattccatgtggtgatgtgtgngggntgaaattatccccaangggatagatgaagcatcccatattttaatatcatctnctngatgaagcaaatntgagggtttnctgcntgactgcgcctttccggaacaacacaacagggggcccggggccgntctaaaactagngggatcccccgggc

SEQ ID NO: 7256 - DNA, 400 bp, Homo sapiens
ccgcggtggcggccgaggtactccggatatgcagtagaggaatcctctaagaaccatagagacttcttttctgtgatttttgttccccacccttgaacaccatctctaggatggagttggcctaagagtgaatgctgcaagatctgtgtttatgcctcttttcctcattcttcctcagtttgttcgtctgcttgaaagttggccaaaaaatcctgctgctcaccgacttcccgtggtcagctgctgtcaagcgttcactttctcttctgtcattcctcatggaatgagggtggttttgtcttcccgcttcccttgacctcaaaatcaggattaaaacctggggtagcctctgtgctcctttcttcaaaaaaaaaaaaaaaaaaaaagtacctgcccgggc

SEQ ID NO: 7257 - DNA, 340 bp, Homo sapiens
acttagggcgaattggagctccccgcggtggcggccgcccgggcaggtactcctgagataagagaacattatcttgactctaaaaaagacgtagaccgtcatctgaaatcggcctgtgagcagtttattcagcagcagaccaagctgtttgtagaacagctggaggagttcatgacaaaggtttagcgttaaaaacaatggccagtcagggaggccccaagtatactctctcacagcagccttgggcacaaccagcaaaggtcagtgaccttgcggcaactgcatataagacaataaaaacaaagctgcctgtgacattgagaagtatgtccttgtacct

SEQ ID NO: 7258 - DNA, 378 bp, Homo sapiens
  misc_feature 78, 189: n = A,T,C or G
ccgcggtggcggccgcccggcaggtactcttgaaggctatgcaacatgagtctttgaacaagaattccttgctacttngattcattcatcaaatactgagtgcctgtgtgccaggcacaggtgaactctggggattcaggggtaactaaaacagattggaaccctgcccttgtgaagctttcagtctanaagggagacgtgaaacaaattttagcttcaaaagcaacatctatttttgcctgttagcatgcatttattttaaaagccatattagagttacctggttccgcttcagagcagactgggaaaatcaggcttacaatggaatcagatgctgtgggcctaaaacagctctttaaaaatctatttttttaggcc

SEQ ID NO: 7259 - DNA, 211 bp, Homo sapiens
ttagggcgaattggagctccccgcggtggcggccgaggtacttcttttcctcgtagcttgagtctgtgtattccaggagcaggcggatggaatgggccagcccgcggatgttccagtactccattccccacttaagtttcaccatcactggctttcctgttagtccattgaggaaaggttttgggattgaggggtaaactcatcgtaacca

SEQ ID NO: 7260 - DNA, 519 bp, Homo sapiens
  misc_feature 499: n = A,T,C or G
cccttagcgtggtcgcggccgaggtacgaaaaaatcaggctactaagcccactgttaatatagacgcagaccaattgttaggaacaggtccaaattggagcaccattaaccaacaatcagtgatgcagaatgaggctattgaacaagtaagggctatttgcctcagggcctggggaaaaattcaggacccaggaacagctttccctattaattcaattagacaaggctctaaagagccatatcctgactttgtggcaagattacaagatgctgctcaaaagtctattacagatgacaatgcccgaaaagttattgtagaattaatgggcctatgaaaatgcaaatccagaatgtcagtcggccataaagccattaaaaggaaaagttccagcaggagttgatgtaattacagaatatgtgaaggcttgtgatgggattggaggagctatgcataaggcaatgctaatggctcaagcaatgagggggctcactctaggangacaagttagaacatttggg

SEQ ID NO: 7261 - DNA, 127 bp, Homo sapiens
ccgcggtggcggccgaggtacgcctaaccgctaacattactgcaggccacctactcatgcacctaattggaagcgccaccctagcaatatcaaccattaaccttccctctacacttatcatcttcac

SEQ ID NO: 7262 - DNA, 353 bp, Homo sapiens
cggtggcggcccgaggtactaactcatccagtatctgattctgtcttttcctctatccatctgtcttccatctttgcatccatcattcaacgaaatttacagcctatgcagatgttctgtggtcttaaacatgttgtattcctctttgcttggccatgcttcctcccctcccagcccgttgttctcccccacgagaatatcttctcttttctgcttcttagtggttctattctcagtatctgaaactctcattttctgtccccgcgtacagtcagaagtgatccctactttttcttaaagctgactggcgcccgcaggggccgccgacctcttcacagacccacggaaactgc

SEQ ID NO: 7263 - DNA, 443 bp, Homo sapiens
ggcgaattggagctccccgcggtggcggccgaggtacctactccataaagttacgaagaacacataaaacctgtgaagcacttataatagtgccagaacattgtgagcacacatgagatgttcattggcgttattattaagggcttatataaattcccaggtaatgcataataacagtagagactgtgacaagccctggcttccataaattgtcagcttcattttccctgtttcatttgatatgttattccattttatgctttgagacagctaaccataataaaaaaaaaagaaagaaaaaagagagagaaagtagggacaacactaaatcattagtaatttgagcacatttcctccaaggcatatgctatttttcaacttggtttcaatcatgtatctttattgttttttcttaatgttataagcatgtttggttttattgt

SEQ ID NO: 7264 - DNA, 229 bp, Homo sapiens
  misc_feature 156: n = A,T,C or G
ccgcggtggcggcccgcccggggcaggtacagtttaaagccattaatatgttttatccatttgataattttacagtaagtaggtctcattcattttgacagttatcaaagatgtacgcgggggccgccgccagattctggaggcgaagaacgcaantgagaacatggacgttaatatcgccccactccgcgcctgggacgatttcttcccgggttccgatcgctttgcc

SEQ ID NO: 7265 - DNA, 298 bp, Homo sapiens
ccgcggtggcggccgaggtacaccctgtcctcaagataaatcggaaacaatcaacccaaaaacatgttctcccaaagaatatttggaaactttcatctttcctgttctgcttcccggaatggctagcctgcttcaccaagcgaagaaagaaaaatgttttgagaggaaaagaaccaaattcattgcctgtgattttctgactgagtggttatacaaccaaaatccaaagagggcaggggagccattcacagaatttttctccattccatttgtggaggagcggctaaagcaacaccca

SEQ ID NO: 7266 - DNA, 446 bp, Homo sapiens
cgcccgggcaggtacaaaacggtcttcaactgtcacgtcagttgttcctggagtgttttatggggaaaagcaaacttcaccaaacatagagtacgcggggacatcaatgcagagtccctctgtgaatttcaacacccaacaccctgagttcagtccttaagaaggaaaattgagcaagtatttaattggttggacattgcataaaagaggtccatatccaggctaactctagaaattttattctcaaacttagttggcctctttttcttctgtcagaggaccattcttagtggcactggggaaatcttggcacccagaagaattcaactgcgctcactgcaaaaatacaatgggcctacattggatttgtagaggagaaaggagccctgtattgtgagctgtgctatgagaaattctttgcccctgaatgtggtcgatgccaaagg

SEQ ID NO: 7267 - DNA, 296 bp, Homo sapiens
tcatacttagggcgaattggagctcgagcggccgcccgggcaggtacgcggggagagaaacaagcggagttaaccgaagagggggtcgaggagagccagagtcggggacccaggagtttcctgtgtccagcgctgccggagccgcctgaggtgccatgtttcagaacagagtaagacccctggtaaagaagaactgaagatattatacagataccagatatagcctaattacaaagaaagcattaacctgcctttgaggtgactaaaggggaataatggtgattttgcgccgggct

SEQ ID NO: 7268 - DNA, 355 bp, Homo sapiens
  misc_feature 133, 159, 259, 326: n = A,T,C or G
aggtacaaggacacgttttgcttccactcagcttcttcaacctgttatcggcaaatatattatattttatacgttataggccaaacgatgcaactatatacatattgttttatacaactgtgttttacattanttaagagaaaaaagaaaaatgcatanattgtttctgataattacataattatttttgcctgtgctctttttctgcatgtgtgtagattcagattactgtctgtggtcacttgctttcaggctgaanaacttccttttgtatttccagcaagtcaggtctgccagcaacaaattctcttggtttttgataatgngagatgttttatttcaccgttcatttttg

SEQ ID NO: 7269 - DNA, 483 bp, Homo sapiens
  misc_feature 468: n = A,T,C or G
ccctttcgagcggccgcccgggcaggtacgcggggacatcaatgcagagtccctctgtgaatttacaacacccaacacccatgagttcagtccttaagaaggaaaattgagcaagtatttaattggttggacattgcataaaagaggtccatatccaggctaactctagaaattttattctcaaacttagttggcctctttttcttctgtcagaggaccattcttagtggcactggggaaatcttggcacccagaagaattcaactgcgctcactgcaaaaatacaatggcctacattggatttgtagaggagaaaggagccctgtattgtgagctgtgctatgagaaattctttgcccctgaatgtggtcgatgccaaaggaagatccttggagaagtcatcaatgcgttgaaacaaacttggcatgtttcctgttttgtgtgtgtagcctgtggaaagcccattcngaacaatgtttttca

SEQ ID NO: 7270 - DNA, 568 bp, Homo sapiens
  misc_feature 567: n = A,T,C or G
tcctatagggcgaattggagctccccgcggtggcggcccgaggtactttaatcttcttagcaccctatgagataaacggtgttaacaccaattttatagatgacatatctggagctcagagaaaccacatctcttgcctaaggtcaatacaccatatatgagagtaggggctgccgtatcaacatgctttcttgagaaactacaagtgggccaaagacatacttaatactatggaaaggaagagctgtggggaaattaacaccacttacaggtgagatacagttcacatttataacaacatagataatttggatacatatatcacagataaactagacagttatatcatctgacatatacttatttggaagagtctgatttattggataggatcgattttaaccacctataaatgttttcttttttctggtataaagtaacataattattgcaatacatttttcctgtagtaaatttaagttaatactttttttccagtgctcaaaagatttataaatatgtagggtttttactaagaagataataccagaaatcgtaacttactgnc

SEQ ID NO: 7271 - DNA, 375 bp, Homo sapiens
  misc_feature 7, 126, 137, 172, 300, 325, 337, 355: n = A,T,C or G
gcgaatnggagctccccgcggtggcggccgcccgggcaggtaccccgacgcggtgaagatctgcaatatctgtcacagcctcctcatccagggtcaaagctgcgaaacctgtgggatcaggatgcncttaccctgcntggccaagtactggagagctgttcacacagatgtntagacctttctctctctctcttttcttctttctcaacaactctttcacagaggcagtcattttgaaaggttgaaatatttggcctttaccaaagagcttttttttttccttaagcaaaatcctttcanaaagaaacaaatggggaaagggcanattaagaatgcntatgtcccaatccacttntatagggagttttaatcatt

SEQ ID NO: 7272 - DNA, 389 bp, Homo sapiens
  misc_feature 23, 30, 31, 35, 54, 63, 70, 74, 75, 77, 83, 85, 88, 93, 94,96, 101, 106, 114, 122, 139, 140, 158, 166, 303, 364, 376: n = A,T,C or G
ccgcggtggcggccgaggtacantagtggnnctgnggtgacctatattctcacncttacaaanataacangatnnanagattnangtnagacnngngtaanaaatnataaaagnattaattntggaaactgataaatgnncaagaaatcttcacaatntatgtttncctgatgcactcaccaagctggtccctccattcggggtccctgacttcccacaacagccaggctttcttgggcagaggttcctgtggctttccacagtgcattgagcccctggcgagtcgattggggtgtctccatntccacacttttctttgcatctccagtgagttcattgtagaaactttaaaatgtcgcaaggnctgacccgtggnacgtaccctgccc

SEQ ID NO: 7273 - DNA, 571 bp, Homo sapiens
gggcgaattggagctccccgcggtggcggccgcccgggcaggtacctgtcagtgttcaatatttaacaaactccagttaaacaggtaagaggtcagcagtagcttataggccttggttctattatccatgtgcccaactgcagccatcgtgggctggtgttaaaattttcctttcattgtcatttttctaataattgcaatcagtgagaggagaagaaaaagttcaagggaatgacctgacctttcaccatcctacacaggagatgactgatgacatggattcatacactaatgtatatcgtatattctccaaagaccctcaaaaatcacaagaagttttgaaaaattctgagatcataaactggaaacagaaactccaaatccaaggtaacaagtctgaagaaatgggcaagcagctgtgcttctcaaattgtgtcttcaactaacagcattagcatcacctgagagctcattagaaatgtaaattcatagaaactctctgagctgggagaggtggagcaatctgtggtgtgccaaggactatagctgattgtggtgtaaactcaacttt

SEQ ID NO: 7274 - DNA, 440 bp, Homo sapiens
  misc_feature 4: n = A,T,C or G
actnctatagggcgaattggagctccccgcggtggcggccgaggtacgatacacacccaaagtcttagaagaaatggagtcgcgctttgaaaaaatgagatcagcaaaacgcaggcaacagacctaatacatttcaaaacttgatatttcattttgcgttttagctagagaagttttccttgtgacttactaatggctgcaatgccaatgattgtaagaaaacaaacaaatttatcatgaaattctccttgtcattttataaatgcctattttaacatcatttatggttccagagatgcatacacttttttctgacaagaaaaagtaaaaggtgatgagggcaattctgtcctactgtttttacaggcctttttcaaatggcagattttgtcataaaggttgttatagattttttaaaatgctttttttaatattaaaaa

SEQ ID NO: 7275 - DNA, 249 bp, Homo sapiens
  misc_feature 112, 136, 146, 164, 179, 191, 192, 199, 207, 208, 223, 231,236: n = A,T,C or G
aggtacctgtgatggcagtggcttgctcttgtctttttcttttctttttaactaagaatggggctgttgacacctagaaaacagaaacttgagtagacatggtaatgaccanaaaaggctatctatatacatttantttgctaccnctttcaaaatttcaatgntccacccttaaaaantttgtcgaaaannttgccancaaaaaannaaaaatatcttaccntttaaacnttganaaaaaatttaatt

SEQ ID NO: 7276 - DNA, 284 bp, Homo sapiens
  misc_feature 256, 268, 273: n = A,T,C or G
ccctttcgagcggcccgcccgggcaggtacccgtctagcagctgatgtgggtaaagctggagctgaaagggaattccgaggcctcggtgactgcctggttaagatctacaaatctgatgggattaagggcctgtacgcggggctttctttccgcgccgatagcgctcacgcaagcatggttaacgtccctaaaacccgccggactttctgtaagaagtgtggcaagcaccaaccccataaagtgacacagtcctcngccgcgaccacnctaanggcgaattcca

SEQ ID NO: 7277 - DNA, 512 bp, Homo sapiens
  misc_feature 454: n = A,T,C or G
attcttatctcagaatgctgtaaaccatcagtagaagcagtttagatttggactgcatggtaaaatgaaaagtaataaccctccaaccacaacctagtcagggtattaataattatatgtagcaagaaaacaaagaagaaataatattgaaaaaatggagattccccaaccagtttcatatttgaaggatctgagttgtatttttattaaggaaattttttttctgaatactgtcttccaaaatgttaacattaaaatctgaatcagaggactctgaatggaaaagaagtttgatcactgacacctagggctctgaagcgtgcgtggccacatggaaaagtcgaaggatgcgctgtcgaatctcctttgtcttcactccatagacaattgggttgagcacaggaggaaccagcagatagatattggccaagatgaccggcagcggagagtcacncccgcttgctaaagcgatgcaccatggacaatccaatgaaaaggtccctgcccgggcg

SEQ ID NO: 7278 - DNA, 240 bp, Homo sapiens; identical to SEQ ID NO: 3579

SEQ ID NO: 7279 - DNA, 82 bp, Homo sapiens
  misc_feature 25, 28, 30, 44, 47, 51, 52, 58, 59, 60, 82: n = A,T,C or G
gggcatttctcccagggttctctgngcngnctttagcgcccccngtntganncgacannnaaaggggctggaaaggtacctn

SEQ ID NO: 7280 - DNA, 379 bp, Homo sapiens
atgtacacatatcttcctctaacccagatagtcaaaaagtttctcctttaaaaattaaaatttgtcaacacttcccctccattcaaggtttcctctatcttcaaatgtgtatttttctatgtaactgtgtattttcctatgtgtaactgctaaatgctaaataatcactaaagtggtatttcccaaaagatattttcaagatgaaacatacaaaagtatgagattagtttggaaggaagcttgtaaattattgaaaattaccagctaacctcaaaatactttgaggtctcaaacaaaatctattttattcacctaagagctagaccaggagatttattttgaaactctctttaaatctacttaaatagattatgtgcta

SEQ ID NO: 7281 - DNA, 379 bp, Homo sapiens
tacttagggcgaattggagctccccgcggtggcggccgccacgctggttttgcatcttcaggagacgctcgtagccctcgcgcttctcctcggccagttcgcggaagaagtggctcacgccttccagagccacatcatcgcggtcgaaatagaagcccagagagaggtaggtgtaggaggcctgcaggtacataagctcacgcgtgctcctcacattctgctcctttcacagaatggtcagtccccggtcatgccctcgagcccctccagggagacagtgtggttctgctctaaaaacgtgaggtggaaactgaaatatgtcaaaacaacaactgaggaactgcggctgtgctgcctggtgcatgagcaagacgtacct

SEQ ID NO: 7282 - DNA, 339 bp, Homo sapiens
ccgcggtggcggccgaggtacctggtgtcttttattaagaatttactccccccatttctcacagagaataacagtcgggagtcattgtcacaatataatagaaatgttagcaaccagattcatgtaaggactaagtggtcctcatgaattgcattaagactctgtacacttcggtctagccagaaaaaaagcagaaacaagaagccaaggctaaggcttgccgccctggccaggaggaggggtgcagctctcatgttgaggagagctgtttctggcaggagttaggaggaactgctaccacttcaaaagcctgtagaggggaagctatttaattaaggg

SEQ ID NO: 7283 - DNA, 443 bp, Homo sapiens
  misc_feature 396: n = A,T,C or G
cttagggcgaattggagctccccgcggtggcggccgaggtaccattcttatctcagaatgctgtaaaccatcagtagaagcagtttagatttggactgcatggtaaaatgaaaagtaataaccctccaaccacaacctagtcagggtattaataattatatgtagcaagaaaacaaagaagaaaataatattgaaaaaatggagattccccaaccagtttcatatttgaaggatctgagttgtatttttattaagcgagcggccgcccgggcaggtacgcgggtgctggaaacagttcctcggagtggagaggtttacacctgccaagtggagcacccaagcgtgacaagccctctcacagtgggaatggagagcaccggtctgaatctgcacagnagcaagatgcctgagtgggagtccggggggcctttgtgcttggggcc

SEQ ID NO: 7284 - DNA, 340 bp, Homo sapiens
ccgggcaggtacaatctgcattcttcttattaatttaatccatattttgaagtcagaaaagaattcatctcatttgagttagtttagatcaacatactgatattgctgaatagcttcacttccctgaaactaaacatatctattcctttcgtcttagacaaattatgaggggaaacctgtctgaaatttggctaacacatggtgtgcatttgatgccactggaggatttgctttgtcaatttaagattgagtgatggctatagaggaaagtgacggaaaaaaaaaccttcttaatgtgaaatagaaagtataaaggacaataaaatgctaaaaagtacct

SEQ ID NO: 7285 - DNA, 418 bp, Homo sapiens
  misc_feature 1: n = A,T,C or G
ncttagggcgaattggagctccccgcggtggcggccgaggtacctgtgatggcagtggcttgctcttgtctttttcttttctttttaactaagaatggggctgttgtacctagaaaacagaaacttgagtagacatggtaatgaccagaaaaggctatctttatacatttcttttgctacgcttcaaattcatgtcacctaaaagttgtgaagtgcacaaaacaaatctacttaactgaaaattattttcaatgaatgggatgtttagaactctgtgagggtttttaaggtcttttcgaatagcaaattctaatgaggcttttttaagttggcaatttaaactcatacaagaaataaaaactcaccagtgtggctgggcagaatatatatattttctcaaatattggttggttggttt

SEQ ID NO: 7286 - DNA, 426 bp, Homo sapiens
  misc_feature 75, 78, 90, 93, 362, 379, 380, 383: n = A,T,C or G
ctacttagggcgaattggagctccccgcggtggcggccgcccgggcaggtcaatttaatttttttggcttggccnaanaaacaaagcttntgnggaaccatggaagaagatgaaaatgagactggcaaagaacaaatgctgaatctgaagaagaggacaactttgggcaaataatctgcatacttttaattgggaataagatgcccgcgtacgcgggatactaataaagtaggtgtttaaaaatcattatacctatattctatatgttcaaagaagtgagaagaaggattaaccatgtaatgtagaaacatagaggatatttttaaaaacccaaatcaaacttttaaagatgaaaactaccnaaaaaaaaaaaaaaaannaangtcctcggccgctctagaactaggtgggatcccccgggctgca

SEQ ID NO: 7287 - DNA, 777 bp, Homo sapiens
  misc_feature 498, 580, 637, 644, 682, 686, 701, 706, 713, 717, 720, 723,726, 743, 755: n = A,T,C or G
ccgcggtggcggccgcccgggcaggtacgccgggggcccatccctctttgtgtgctttggaaagccgcggagctggtggtggctacagttggtgttgggggcttaggcgagggacgttaccgggaagttgcaggcgggaggacccttcccatccagtcacctgacaggtcacaaacatgtcagacaaaagtgaattaaaggctgagttggaacgtaagaagcagcgactggcccaaatcagagaggaaaagaagagaaaagaagaagaaaggaaaaaaaagaaacagaccagaagaaggaagctgttgctcctgtgcaagaagaatcagatcttgaaaaaaaaaaggagagaagctgaagcattgcttcaaagcatggggctaactccagaatcccccattgtccctcctcctatgtctccatcctccaaatcttgtgagcactccaagtgaaacttggaagccaagactcttggagatggcgcccgtggggatctangacgcctgcattggggaatacagatccattcagttttttcaagcttcacttcaaaatttccgattttgggacgaaggacctnttaaacttgggaatggcttaaaatcacccaaagtcgacttttcttccttcgagaaanttgtcanctttacaaaaggaaaacttcaaacttcaagtttttggntttnacccccaaagaaagnttaanaaggaanattnttnttnttnttggcttcttaaacccnccttttggaacntgaaaaaaaaaaaaaaaaaaaa

SEQ ID NO: 7288 - DNA, 620 bp, Homo sapiens
  misc_feature 240, 251, 263, 281, 290, 293, 294, 298, 305, 308, 317, 320,358, 363, 364, 368, 369, 371, 379, 392, 393, 394, 409, 410,412, 413, 414, 424, 425, 429, 432, 443, 444, 445, 446, 447,448, 449, 458, 460, 461, 462, 463, 465, 466, 468, 470: n = A,T,C or G
  misc_feature 471, 472, 474, 475, 478, 479, 480, 481, 482, 483, 484, 486,488, 490, 493, 496, 498, 499, 500, 502, 503, 504, 508, 510,511, 513, 514, 515, 516, 517, 518, 519, 520, 521, 522, 523,526, 527, 528, 531, 532, 535, 536, 537, 538, 539, 542: n = A,T,C or G
  misc_feature 543, 544, 545, 546, 547, 549, 550, 555, 556, 557, 563, 573,574, 575, 576, 578, 580, 583, 584, 585, 586, 587, 589, 593,599, 601: n = A,T,C or G
aggtactccaggaggcccgtgtatttaatgaaactcccatcaaccctcggaaatgtgcccacatcctcaccaagattctttatctcataaaccagggggagcacctggggaccacggaagcgaccgaggccttctttgccatgaccaagctctttcagtccaatgatcccacactccgtcggatgtgctacttgaccatcaaggagatgtcttgcattgcagaggatgtcatcattggtnccaacccaagnccaggccccttnaacccaaaaaaaaggaanccctttggnaannttgnggggggnaanaaagggaanggncccccttttttttttcccccggggggggggcccccccngggtnncccnntntttttttnttaaaaaaaaaannnaaagggggggggggnnannncccccccccnnaggngtntttttttttannnnnnnaaaaaaatntnnnntnntntnnntnntcnnnnnnncntntnttnttntnnntnnnaatnanntnnnnnnnnnnnttnnnaanntannnnncannnnnntnnttatnnngggggngggggggggnnnncncncannnnntntttnaaatananttttttttttttttttttt

SEQ ID NO: 7289 - DNA, 441 bp, Homo sapiens
  misc_feature 261, 295, 327, 356, 358, 365, 399, 414, 418: n = A,T,C or G
cctatagggcgaattggagctccccgcggtggcggcccgcccgggcaggcacagctttctaaaagtaataaaggtttagcataaatacagccttccagtagtcaataggatttttctgtttttagaacagagctcttattggtaatcattttaattttacataaagcatgtttgtttgttagaggaatgaaaccaaaccttccctattagaaaaaagatgattgtcttgaagggcagttcatctgtgcccaggcagaggcngtgtgctttccctaacagacatgaacagcattcnttcttgggaaaaaatggctttgcagccttccncagagcagcactgcagatttgtgcagccntntgttaanggctgctcccatgatgggggacagcttgagtctnttttgtagcactagngggnaaacatgaatgctatttttggtt

SEQ ID NO: 7290 - DNA, 522 bp, Homo sapiens
  misc_feature 140, 174, 181, 212, 219, 225, 229, 257, 260, 265, 275, 276,278, 295, 312, 314, 320, 326, 358, 360, 371, 396, 411, 418,447, 456, 475, 476, 492, 503: n = A,T,C or G
aggtacaaggctaagcattttaactttatactggaaaaaaaatcaaacaaaggggagggataaaggacttagtcatctttgcactggaaaacaaaatatgtaattaaattcccatagctgcatgtaacattgaattcttnccaggtttaaaaaaaagttaatcctgttgatatntaatggnaatgacattttgagggttcttgcagaatggngcaccanaatagntggngtaatatgtaattctcaagatattggtncanatagnaccacctganngnatgcattgttttgattntacgcattaatttcacntnccggtnaaatgnattcattgccttgttgttggctaagttaaagntnataaaaccccntggggaaaacggaatcctttggagngattggcctttaccncaaggcncttggtcttcaccaaggaattcccccccntggggggcnccaagaaaaccaaccttcnncttttaagtggaaaanaaaaaccaagnttccaagccctaaccaatt

SEQ ID NO: 7291 - DNA, 333 bp, Homo sapiens
  misc_feature 137: n = A,T,C or G
ccctttcgagcggccgcccgggcaggtacgcggggacatcaatgcagagttcctctgtgaatttacaacacccaacacccatgagttcagtccttaagaaggaaaattgagcaagtatttaattggttggacattgnttaaaagaggtccatatccaggctaactctagaaattttattctcaaacttagttggcctctttttcttctgtcagaggaccattcttagtggcactggggaaatcttggcacccagaagaattcaactgcgctcactgcaaaaatacaatggcctacattggatttgtagaggagaaaggagccctgtattgtga

SEQ ID NO: 7292 - DNA, 435 bp, Homo sapiens
ctcctatagggcgaattggagctccccgcggtggcggccgaggtactttgagatgtgtgacagcattatagcaaccccaaattatctgtcttatggtgaagatggagagagtaaaaatcgtatgctgtgaatgataccaaaaacaaaaaaaaaaatctgtcccaaacccaaagttccctccccaggccttccaacaggccatgtggaatgactgcacacttctttcctcctcgtggaaggttgagaaaggaggaaacttaccacccagggggcaggtaacgggaagacccaagaacagggccaagtcctttcaaatgaatatacaggtgacattaggataaaacaatcctggggagggttggacaccaagtgggattcaataagccgacagccttaattttgggggattgggtgttcaatgctgggttttttaaa

SEQ ID NO: 7293 - DNA, 406 bp, Homo sapiens
  misc_feature 7, 360: n = A,T,C or G
ccgcggnggcggccgtgtgacaatcgaatattattcacagctgaagactgtgtgtgtggagatgggtgatgtggaatctgctttttgaaaacctgcagtgaaacctattgacatggccacgctgtggaatgatgtgaattggccctgtttacaagaaggcaggtacagatctcatcaggtatgagggcagtctctgacgcgaacgtctcttcctcgtggtttttattgtcagtattcacaccgaagtttaagtctcctagtgggcacccagacgggattgacgatctcctggtaaaacacaagcataccctcttccccacgttataaattgttccaggtttcccaggtattggtttgggnagtttttccatgacactggcttgccttcgtttagggagaatttttt

SEQ ID NO: 7294 - DNA, 321 bp, Homo sapiens
  misc_feature 192: n = A,T,C or G
aggtacactttcttaacaaggaatggctgttttcaggccttattaggaaaacaaacaaacaatggcagttactacctgttttttatcactgataagctaaaataaagctcaaatatggacagtttaactgtgtgatattaagtaaaaaatgaaaaccattatagttttaccaaaagaaacacaaaaaatatngggaaggagtgaaatgaacatggcataggtcccaaagattacactatgattctgaacagcattttcaaaacaaagggtatccacatacaatttctgtgaatatttcttatactagatagatcaaaagca

SEQ ID NO: 7295 - DNA, 350 bp, Homo sapiens
ccgggcaggtaccccaattctaaaataaaggttaaaaaagaaaaagatatttcagcatcacttgtttcatcttacaagggcattgtaaaataataaagataaaagttaagagataggaaaagaaaaaagggaaaaagaaaaaaaccctcattggagtcctgttctgcccacccctggagttactaagtaagcccaacttaaggggtcccttgagctccagactgtaaagcccccaaggcagcatcatccacaccaccttatcagatcctcaaagcaattcttctaagttggtagaccggggtagttatttccattctgcaaatggggaaactgagactcagaaagtacct

SEQ ID NO: 7296 - DNA, 324 bp, Homo sapiens
  misc_feature 17, 178, 219: n = A,T,C or G
aggtacgcggggacatncacagcacctgcacgcagatgcacacatctctagtcaaatgaggctctcagctttttgataggggctttttgatacgtgtataaccaatactttattctcactgtagtcaaggactcattgcaattcagaaatgagaagctgatccggaactccactacanctcaaagaaattctcgaatgttctcacctattaacagttanttaaaatggaagaagctggggatgaaattgtgagcaatgccatctcctacgctctatacaaagccttcagcaccagtgagcaagacaagggataactggaatggg

SEQ ID NO: 7297 - DNA, 247 bp, Homo sapiens
aggtacatatatacttggtaattatgagcttgattttgtttttggaaatatgtgttcataatttaggtaatttgctacttaaagcactaagtctctgatacctgaaaagtacacttaaacatggcccaatgacacagcctttaaacttgtcaatattttcctcttggtggtattgaaaaccagtgagcagagagcataagaacagaacttcaagaccgtggcaggagcttgtatttgtacctgcccg

SEQ ID NO: 7298 - DNA, 431 bp, Homo sapiens
cttagggcgaattggagctccccgcggtggcggccgaggtacatctacctaaaggactattatgtggaataatacatactaatgaagtattacatgatttaaagactacaataaaaccaaacatgcttataacattaagaaaaacaataaagatacatgattgaaaccaagttgaaaaatagcatatgccttggaggaaatgtgctcaaattactaatgatttagtgttgtccctgctttctctctcttttttctttcttttttttttattgtggttagctgtcacatacaactttttttttttgagatggggtctcgctctgtcaccaggctggagtgcagtggccgccgatctcggctcactgcaacctccacatcccatgttggaaagtaattcttctgcctcagcctcccgagtagctgggactaga

SEQ ID NO: 7299 - DNA, 403 bp, Homo sapiens
aggtacaactttaaactgtattgtattcatgttgctaaacaatattggccttctcgatgattttattcatgttgctccaaagttaaaaccctgtagaactaagtaggtgaagagatattttgtataagtgccacagaagagaaaatataataaattaaatagtgaattgagcatcactagaataaaataaaatgagtaggcattcctaagatgtgaaatgatcacctaagatatacatgctccaaccatattgattttagaacaaaacacagcagcccataacagtttgtggcctctactaactgtcctctgctgtcccatctagaggttatgtttctctatttttaaaataaaatgtagttaaattagcctgacggatgtttcctctctatcccttatctca

SEQ ID NO: 7300 - DNA, 378 bp, Homo sapiens
  misc_feature 219: n = A,T,C or G
ccgcccgggcaggtacacaatgaaatcacctaacgatgcattcatcagaacctatccctgtgattaaatgacacatgactgtatttactaaaaacccatcagaggccaggtgcagtggttcacacctatagtcctagcactttgggaggccggggtgagaagaccgcttgagcccaggagtttgagacacgcctgtgcaacatagtgagttctcatctnaaaaaacaaaaacaaaaaccaaacccattagaacccatcagggtctcaaacaaggtgaaggtttaacaaatattatttcttttccccctcattttcttccctgtgaaaatgtttccatttcaggccaggacacaaagttcaactcctaatgaaaaaaag

SEQ ID NO: 7301 - DNA, 352 bp, Homo sapiens
  misc_feature 334, 347: n = A,T,C or G
ctcacttagggcgaattggagctccccgcggtggcggccgcccgggcaggtacacataaatcacctggaaccttgttaaaatgcagatcctgactcaggaggtctgagttagagcccaggatttcatatttctagccagctccatgatgagctgctggtccgcagatcatgcttgcaggttttgaccagagtcagtgttggttagagtaagaggatgaggcagacatctgggaaaagtccagctggggcaagcatttgaagtctgccttcctaccaggtcaaaatcaaggcaacgaccttccatagataactatcaaagcttgagggggtgccnttgaacccaactnctaaa

SEQ ID NO: 7302 - DNA, 292 bp, Homo sapiens
  misc_feature 46, 84, 102, 111, 142, 146, 158, 167, 171, 182, 202, 205,206, 215, 218, 224, 243, 250, 251, 263, 270: n = A,T,C or G
gcggtggcggccgcccgggcaggtacttttgaagagagataacaanccccctagccgggggcaacacatgcagaataatcctgntttacagctgcctttcgngatcttatngcttgcttttttccagattcagggagaatgntggnggctatttggcncttacatcncccngatcatgtcancatttttttaatgggctcgngtnnctccgccgntcnagaacnaggggatccaaaaaggccnccggaanncggggggaagcntatcganaccggcgaccccggaggggggg

SEQ ID NO: 7303 - DNA, 510 bp, Homo sapiens
  misc_feature 37, 144, 173, 176, 183, 186, 190, 201, 205, 206, 229, 235,238, 259, 262, 276, 280, 282, 286, 290, 295, 299, 302, 318,329, 335, 352, 362, 369, 370, 385, 390, 399, 403, 405, 409,419, 421, 454, 457, 464, 474, 480, 489: n = A,T,C or G
ggcatttctcccagggatctctgtgcttccttttgtngcttcctgtgtgtgtggatatttaaaggggctggaaatgtgcaaaaacatgtcactacttagacattatatttgtcatctatgctgtttctagtggatgtttaaatnatctccatttttcatccagcatggtgttnggnccttcangantggntaaaaggtcangcanncccctttcttattttcctacacncgttangtnctatctctcatttgtaacccntcngggcctcggtctanttangnaacntagntgggnatcnccnccagggcctttgccanaggaaatttcngattantcaaaagcctttattcnggaattaccncggttcnngaaccccttcgtaanggggngggggggcncccngngttnaccaccccangncttttttttggttattccccccttttttaaggntgnaaggggnggtttaaaantttggnctgtccggncctttggggccggttaaaatt

SEQ ID NO: 7304 - DNA, 701 bp, Homo sapiens
  misc_feature 182, 191, 194, 227, 232, 239, 242, 266, 271, 277, 286, 308,309, 316, 320, 322, 353, 358, 372, 377, 379, 384, 388, 390,399, 415, 428, 435, 441, 456, 457, 459, 467, 468, 476, 483,486, 487, 492, 516, 521, 529, 537, 538, 539, 547, 562: n = A,T,C or G
  misc_feature 567, 576, 589, 592, 602, 605, 610, 617, 627, 633: n = A,T,C or G
cgcggtggcggccgcccgggcaggtaccagctttccaagagggtaagtgagtcttcaccctgatatttttgccccgggttttacgaggcttctcttctttatgcaccttcatgtgctgcctcagatgagagctctgactgaaacatttgccacatttcactgcaactgggtaggggtttttntcccccaantgntggggttttcttctagattggttggaaataaangggtngccgaangcntcttgggtcctggaaaaaacaacncgggnctcaanccaaccttnccaattgcaaaccaaaccttgnnaattaantggngnttttttttttttttctttccccaaggatttnaattnggaaaaattttttnctttncnttggngggntngggcctttngtaaaaaattgggaangtaaatttttttngtaaagncccttnctttgggtatttttnngnaaaaaagnncctttttnttccttntcnnccaanccaaccctttttaattttacaaanctaantttttttnggtttaannnggggggtnctttttttttttccnccccncccccggtnataatttgggggnaantaccccccgntanccagnaaattgngccctttggnaaaaantggtaaagggaaatttttaagtaaaaacctttctttgggaaaaataagggaaaaaaaacccttttttt

SEQ ID NO: 7305 - DNA, 574 bp, Homo sapiens
  misc_feature 545, 546: n = A,T,C or G
cgaggtactcattagccagctcctcggactccccagcagcattgatgtcgttcttcactttggccagagtcttcagaagcttgctggctcccagggctgccagagtgcagcccctggtccgctcccaaatgactttggagagttcttcttattctgaagaatggcccagatgaagagagcttgcagggggtgctcgagcggccgcccgggcaggtacgcggggacatcaatgcagagtccctctgtgaatttacaacacccaacacccatgagttcagtccttaagaaggaaaattgagcaagtatttaattggttggacattgcataaaagaggtccatatccaggctaactctagaaattttattctcaaacttagttggcctctttttcttctgtcagaggaccattcttagtggcactggggaaatcttggcacccagaagaattcaactgcgctcactgcaaaaatacaatggcctacattggatttgtagaggagaaaggagccctgtattgtgaagctgtgctatgagaaattctttnnccctggaatgtggtcgatgccaaaggga

SEQ ID NO: 7306 - DNA, 332 bp, Homo sapiens
aggtacctttcattggattgtccatggtgcatcgctttagcaagcggcgtgactctccgctgcccgtcatcttggccaatatctatctgctggttcctcctgtgctcaacccaattgtctatggagtgaagacaaaggagattcgacagcgcatccttcgacttttccatgtggccacacacgccttcagagccctaggtgtcagtgatcaaacttcttttccattcagagtcctctgattcagattttaatgttaacattttggaagacagtattcagaaaaaaaatttccttaataaaaatacaactcagatccttcaaatatgaaactg

SEQ ID NO: 7307 - DNA, 408 bp, Homo sapiens
  misc_feature 299: n = A,T,C or G
ccgcggtggcggccgcccgggcaggtactcgcaaaatatgctggaacttttcagggatcactagagacatggctgcagcacaagcggcggcgtgtaggcctcctgtggaagagcccgcgtacgcggggcccaggcttaaataaacagaatataataaatcaagctattaacagcaaaaaataaaaagccatctggcctgtgtccaaaatgtggaaaagcaaaacattgggccaatcaatgtcattctaaatttgataaagatgggcaaccattgtctggaaacaggaagaggggccagnctcaggccccccaacaaactggggcattcccagttaaaactgttttgtttcctcaggggttttcaagggacaaccaacccctacagaaaaatacccaccactttcaggg

SEQ ID NO: 7308 - DNA, 252 bp, Homo sapiens
ccgcggtggcggccgaggtacaatacccagtgcttctgccacagaagaaggaatccacgatgttttatcaaccagggaatttagattttgtatggatctcaaactagaacactgtttacatccatagtgatgtattgttccttgtataagaaatggtgctgaaaggtccaaaagttccaggtcttcgtggccagatctcacaggaattacactattaaacttgttcgagagtttgcaaatttcactgagtgt

SEQ ID NO: 7309 - DNA, 246 bp, Homo sapiens
  misc_feature 233: n = A,T,C or G
ccgcggtggcggccgccgggcaggtacataggtaacctctgctgaactaatacagcactcaccaccttacttaagaggccaccccatctataaacaaggccgttagaaggttctgccttactagatcaaaaatatttatgttggtgcaaaggtaattgcggtcttgccattactttcagtggcaaaaacaacaattacagggggagggggaagggatagcattaggagatatncctaatgtaaatg

SEQ ID NO: 7310 - DNA, 309 bp, Homo sapiens
ccgggcaggtaccttatctggaatctaatcttgggagaagaggaaaaaggagctaatatttgtcatttatactcactctgtgccagatactgtgctaggcattttataattgttttgtgtcatcctcatgataatcctgtgaagtagatctattacccccgtgttctaaataatagatcttaagtgtggaatgcatctatccaacataaatgcccatgttgaaaaaaaaaaaaaaaaaaaaaaaagtccctcggccgcattgtgaactttgggggatgctcgctccaaccgactgctgtcaccttcacc

SEQ ID NO: 7311 - DNA, 322 bp, Homo sapiens
aggtacctgcaatgcctcctacacctacctctctctgggcttctatttcgaccgcgatgatgtggctctggaaggcgtgagccacttcttccgcgaactggccgaggagaagcgcgagggctacgagcgtctcctgaagatgcaaaaccagccgtggcggccgaggtacagattagtgtgcacagagatctctgtagaaggagtagctgccccttctcagggcagatgatgctttgagaacatactttggccattacccccagctttgaggaaaatgggctttggatgattattttatgtattagggacccccaacctcagg

SEQ ID NO: 7312 - DNA, 621 bp, Homo sapiens
  misc_feature 26, 200, 206, 246, 255, 262, 268, 270, 288, 293, 305, 314,349, 356, 361, 366, 382, 390, 392, 399, 415, 463, 474, 479,501, 508, 524, 526, 537, 549, 550, 552, 555, 559, 560, 570,583, 595, 608, 613: n = A,T,C or G
cactacttagggcgaattggagctcnccgcggtggcggccgaggtgtccgtgcgggcagaacccagggcatgaagatccaaaagggcctggttcagctttttctccagggccatggcagctttcatggcgtctggggttttaccccactcatcttcagctggcttcttgatgtcctggaaagaagaagccgccggcccgntctaanaactaagtgggatcccccccggggctgcagggaaatttcngaatatcanagctttnattcgnantacccgtgcgtacccttngtagngggggggggtcncccgggttncccccaagtcctttgttggtttccccctttttaanttggaanggggnttttnaaattttggcggccgnccttttgngnccggttnaaaattccaatggggnttgcaattaaggccttggtttttttccccttggtgggttggaaaaaanttttgggtttnaattnccccggccttccaaccaaaaantttttcnccaacccaaccaaaancnaatttaacccntaaggcccccgnngnggnaagnncccaatttanaaaaagggtgggnttaaaaaaaggncccccttgggggnggggnttgggccc

SEQ ID NO: 7313 - DNA, 221 bp, Homo sapiens
aggtacatgaatctggagcgcctggatgaagtctgtgaaagaggaggcagatggcgtccacaacactctggctattgtggaaaacatggctgagttccggcctgagatgtgtactactcgattgtcaacgtcaaggagtcgcaggtcgcctggttctaggaataatgggggaagtatgtaggagttgaagattagtccgccgtagtcggtgtacctgcccg

SEQ ID NO: 7314 - DNA, 344 bp, Homo sapiens
  misc_feature 219: n = A,T,C or G
aggtacgcggggaaaaaaagggtggggagtgccctttcttgaaggaatcccttaagtgcacgtctcccgttttcttttcacatcaatgcagagtccctctgtgaatttacaacacccaacacccatgagttcagtccttaagaaggaaaattgagcaagtatttaattggttggacattgcataaaagaggtccatatccaggctaactctagaaattntattctcaaacttagttggcctctttttcttctgtcagaggaccattcttagtggcactggggaaatcttggcacccagaagaattcaactgcgctcactgcaaaaatacaatggcctacattgg

SEQ ID NO: 7315 - DNA, 463 bp, Homo sapiens
  misc_feature 191, 221, 257, 267, 288, 314, 320, 327, 420, 424, 432, 435,447: n = A,T,C or G
gcgaattggagctccccgcggtggcggccgccgggcaggtacccagtgcatatactctggagaggttctcaaagctggacagtaagtcctctggctcaggaactctgccccctaaagctgggaggaaagctggttgctcctaaacatggcttcctttctagaggctccgggccataaaaaatctttatgtnttttgggggaaaaatattcccaccaagttntaagcctggtggggtcccaccaaaaggttggacctntttggttttnctttttggaatccctaaggtngttttaccaaattttaaggaaattgnaagggngttttcnttgggtaaggccaaagggaattaattaatttaaaccaaccccaaggaaaaaaagggccaattttttttttccccttggggccttttaaggaangaanaaaccccnaanggtgaaaggggntttttttttttttttt

SEQ ID NO: 7316 - DNA, 273 bp, Homo sapiens
aggtacagtgtgcacgacgctgagccggatctcccctatcaccccatcaacatcaggtgggttcttcacctggcaggtgtatgtcccattgtcgtcgaactgcagtttccagagaaggatggaggcatcgtactgcagacatcatgaaatcacctatgtggcccttgtctcggataaagaaggaagccatgtcaaggttaagtctttcgagaaggaaaggcagacagagaagcgtgtgctggagactgaacttgtggaccatgtacctgcccg

SEQ ID NO: 7317 - DNA, 320 bp, Homo sapiens
ccgggcaggtactaggaataaaaagaaattaaagaccctcgaggggctcaaagcctggacagggagataggctgttaagcccatttaaaacctgggtgtgttgagtgctaggctggagacatgcatacaagaaggctggtctgtgggggtagataatgcctctgttgactcttaggatgaattagaggcacaagggtgagagcctggtgtgttcggcaaacaataatcagtgaggggttgacagcgagggagtgattggtaagaggtgaatgtggagggtggaccagagtcagatgctaaaaggccttttccactgtgcc

SEQ ID NO: 7318 - DNA, 280 bp, Homo sapiens
  misc_feature 150, 160, 166, 255, 259, 279: n = A,T,C or G
ccgcggtggcggccgcccgggcaggtacagattctgagcctggcttataagccaggatgccaggatctggaggtcttaatttcccctcttctacctttttatcttcaagttctgatttgtcccggaaatgttcattttccttttgttganacattttttncttacntttgaaatatgaattaatatgatttgataaaaagtagaatgagtctccaaattttgtggttatagaacttgtgtaatgaaaaagactgngttnacctatatcttcttctttgnc

SEQ ID NO: 7319 - DNA, 576 bp, Homo sapiens
  misc_feature 186, 214, 226, 253, 255, 263, 282, 286, 293, 312, 325, 335,339, 350, 352, 365, 372, 374, 375, 380, 401, 407, 412, 422,436, 440, 450, 458, 486, 500, 504, 527: n = A,T,C or G
ccgcggtggcggccgcccgggcaggtacatacattacacccctatttctacaaagcttggctattagagcattatgaacattaatgacctcaaactcacgttgtccaaagctgggcaagagcacctactaccgtttctggaatgagcttgaagaaagcccaacagggtaggaacttttatggccanaagcctccagggccatggaactttttgnagggaggcttgnaacctttcttttttgccaaaaaagggncncaatttgnaaagggttttttaaaaccncagntcttttntttcaacccaaaaaaaagnaaatggtttgggnaattggccanccgnaaaaattgggnanaccccttggttgnccccttncnntaagnaaggggtttaatttaaggggncaaggnttggncctttaccanaagggggggaattncaanaagggaaatnccaagggnctttccccaagggggccccttggggggnaaaaaaggggtggnaaanagggggaaccttttttttttccnccaaggaattttttttcttttccaaaggaaaaatttaaaaaggtttaag

SEQ ID NO: 7320 - DNA, 501 bp, Homo sapiens
  misc_feature 501: n = A,T,C or G
ccgcggtggcggcccgcccgggcaggtacttccactcttgtttccaattcaccccaggtcattcaactctatagccactcctaatgcctctcctgaggtaggacaaaagtgggcttcccaaaccaaaaagattcacagatccatgaagaaactgaacatccacttcaaatttcctcctctgatcttggcaactgcaggaaatgaaagcatttgtccagatctctggcaaagatggcactgtggtgttttctctggggccagttgtgcaaaaccttatagaagagaaggctgatctcattgcttcagacttggcccagattccacagaaggaagacctactacgttatctgagacaatggggaaagctgacgtatggcttattcgaaactcctggaattttcagtttcctcatccactcttaccaaatgttgattttgttggaggactccactgcaaacctgccaaacccctgcctaaggaaatggaagactttgtacctcn

SEQ ID NO: 7321 - DNA, 455 bp, Homo sapiens
  misc_feature 152, 253, 269, 282, 284, 299, 301, 309, 312, 316, 319, 335,350, 358, 362, 384, 390, 401, 412, 415, 419, 422, 440, 441,446: n = A,T,C or G
gcgaattggagctcaccgcggtggcggccgccacgctggttttgcatcttcaggagacgctcgtagccctcgcgcttctcctcggccagttcgcggaagaagtggctcacgccttccagagccacatcatcgcggtcgaaatagaagcccanagagaggtagtgtgtaggaggcctgcaggtaccttcggccgcttctaagaaacctaagtgggatcccccccgggcctgcaagggaaatttcgattatcaanagccttatccggattncccgttccgtacncnttcgtaggggggggngnggtccccnggnttanccncaagccttttttttgntttcccccttttttnaagttggnaagnggggtttttaaaattttggccngcccgncctttttgggnccggtttaaanttnccanttnggggtttccaatttaagnnctttngggtttttt

SEQ ID NO: 7322 - DNA, 356 bp, Homo sapiens
aggtacttgaaacatggtcatttttagcccttttccttaggaaccatgtctttattttctcaataaagaaattactttcaactttctaggctcacagtcattcagatcatctaccatctgccaatgagatcaacttggttgagaattttgggattttaaattagctgtcctacctttttaaatctcttttaaatccttcccatattaggatccaacaaaactttatcttaggaaatatgataagtagcttccaattgttgtagtgtggtcgacaaatgtgatttgattcatcttcccccactctaattttctccccttttctcctcccttacatggagtctaagtaagtatttgaa

SEQ ID NO: 7323 - DNA, 183 bp, Homo sapiens
aggtaccttccgtgttcacttcgcgctcctggggatactagaagctccacttcagatccttcttgtgacaccatctgagcttcctccaatagataagaaaaaaggcagaggatacactacagttatcaagttcccgtcttaagcaggctgaattaaaagaagatctccccgcgtacctgcccg

SEQ ID NO: 7324 - DNA, 405 bp, Homo sapiens
  misc_feature 315, 367, 404: n = A,T,C or G
ccgcggtggcggccgcccgggcaggtaccccaattctaaaataaaggttaaaaaagaaaaagatatttcagcatcacttgtttcatcttacaagggcattgtaaaataataaagataaaagttaagagataggaaaagaaaaaagggaaaaagaaaaaaaccctcattggagtcctgttctgcccacccctggagttactaagtaagcccaacttaaggggtcccttgagctccagactgtaaagcccccaaggcagcatcatccacaccaccttatcagatcctcaaagcaattcttctaagttggtagaccgnggtagttatttccattctgcaaatggggaaactgagactcagaaagtacctnggccgctctagaactagttggatcccccgggctgcang

SEQ ID NO: 7325 - DNA, 100 bp, Homo sapiens
  misc_feature 1, 15: n = A,T,C or G
ncactacttagggcnattggagctcaccgcggtggcggccgaggtacgcggggggattcccgacgctgtggttgctgtaaggggtcctccctgcgccaca

SEQ ID NO: 7326 - DNA, 510 bp, Homo sapiens
  misc_feature 141, 166, 219, 239, 245, 247, 254, 258, 286, 290, 303, 318,346, 364, 366, 372, 419, 427, 431, 439, 465, 471, 474, 500,509: n = A,T,C or G
ccgcggtggcggccggttctggagtctttgtgagacttctttgaaggaggctttgcgtgaaggctgctcggctcacttttcctaagtgtggttcctgaaggctgtctttgtaactttttgtagttctttgtgtaaaaagcngtattctgaatttatacacatgggncatgttcttcaattaatatctttccagggatacattcttatttttttactatnatttaaaaatttttggaaantgttgntntattcanaaanatggcttttggttttaacctttaaaggnggcnaaccccttttttntaaaaaaaaggccanggaaattttttaaatttttgggattttntcaaaaatttttgttttncnccaagnaatttttttttaattaaaggcctttttggtcccctttggtttaattngggggaanttgnccctttcncccttccaaaaatttttttaattggnaaattnggnggggggggtttttaaacccaattgcnccccaaaant

SEQ ID NO: 7327 - DNA, 431 bp, Homo sapiens
acgactcactataggggcgaattggagctccccgcggtggcggccgaggtacagccacttactcttaaagagactgctgaaagttttggaagcccaccaaaagaagaaatgggaaatgaacacatcagtgtccaccctgaaaactcagactgtatccaagcagatgttaactctgatgattcaagggtgataaagtataccatccagaaacaggaaggaaaaacgagaaagagaaagttggaaggaagggcaagcatctgttgactgttgatcagaaacgtggagagcatgttgtctgtggcagcacacgtaataatgagtcagagagcactttggatttagaaggcttccaaaatcccacagctaaagagtgtgagggacttgccactttagataacaaggctgatcttgatggagaaagtacctgcccg

SEQ ID NO: 7328 - DNA, 220 bp, Homo sapiens
  misc_feature 166, 182, 200: n = A,T,C or G
cccttagcgtggtcgcggccgaggtactttttttttttttttttttaccagtgtgtttaatttacttctaaggttttaatttttttcctgcaactaaacaaatgagtccagcttggttaaaaacattttttaaaaagtctttcacaactggcaacaaaagttacanaataatttttctttanatccttgctgagaacctnttacaaaaaactaaaatgtt

SEQ ID NO: 7329 - DNA, 437 bp, Homo sapiens
  misc_feature 258, 331, 414: n = A,T,C or G
ccctttcgagcggccgcccgggcaggtacttgggactacaggcacgccccaccatgcccagctcatttttgtatttttagtagagacagggtttcaccatgttggccaggatgatcttgatctcttgacctcatgatccgcccctcttggcctcccaaagtgctgggatcacaggcgtgagccaccacacctggccctctatttattctctttaaagagagagaaaactatgagaggccaaaattatttaattaaatnttttaccttagcacaaggggaaaaaatgggaattttgcctaatataaggttgatgaaagccatacaccaattngaataggaaaaccaaattcacattttttaagttaaaaaagggcaaaaaaattttttggaggaactttaataaaggcttattanttgggttaggcttttaatttttt

SEQ ID NO: 7330 - DNA, 339 bp, Homo sapiens
cccttagcgtggtcgcggccgaggtacaaacaccttttatgactcgccaggaacattctattcgtagaaatttcttaaaaacaggtgctaaatttagcaactttattcatgaggaacaccagtccaatggtggtgctcttgtccttcatgcttacatggatgaactctcatttttgtctccaatggagatggagagattttctgaggagtttcttgctttgacattcagtgaaaatgagaaaaatgctgcttactatgctttagcaatagtgcatgggagccggctgcttatctcccagacttcttggactactttgcttttaatttccccaacactcc

SEQ ID NO: 7331 - DNA, 191 bp, Homo sapiens
  misc_feature 102, 109, 114, 127, 144, 151, 156, 159, 172, 175, 184: n = A,T,C or G
cccttagcgtggtcgcggccgaggtacttttttttttttttttttttttttttgtttttttttttttttttttttttttttttttttttttttttttggganttgaaancaaangggtttaattccnccaaaatggggtttaantccaaancccanganttttccatgccancanaatgcaggntttcctg

SEQ ID NO: 7332 - DNA, 369 bp, Homo sapiens
ccctttcgagcggccgcccgggcaggtactaaggaaggcttttaactatttaagataaaccaacctaattttgattttttacttgcttcaacgtgtttcagttcattaatgtttcaataataaggaatgaattctcttgtcttgacaaaccaagcatggaaatttccccataagagaaaagaagaaattaaaatgatttccatattcaagtcacagcacgctgaaaagagaactttgagttcttaggaaaggcatctgttacctccaaaggagggccactcattacagttttgtgtaatattacagtaaggtctgccaagaaggaattcaagggaaattgggaatgacgacactgtgatcccaggccca

SEQ ID NO: 7333 - DNA, 328 bp, Homo sapiens
  misc_feature 47, 132, 168, 172, 221, 231, 243, 252, 256, 311, 315, 326: n = A,T,C or G
cccttagcggtggtcgcgggccgaggtaccatgtgcacaacgtgcangttttgttacatatgtatacatgtgccatgttggttgtgctcgcaccattaactcgtcatttacattagggggaggggggagggntagcattaggagatatacctagtgataaacctctantttnaaaaataatctgcaaggcttcaacacacacttcacaaaaaatacatatnaacagtcaanggaaggcatttnttaagttanattnaaagttgcaatgaaatatcatttccatacaaaactaacagagcatatttaaaaanactnaaaagtacctngc

SEQ ID NO: 7334 - DNA, 536 bp, Homo sapiens
  misc_feature 27, 78, 84, 105, 111, 113, 115, 117, 128, 130, 134, 139,144, 145, 160, 168, 175, 178, 180, 186, 199, 205, 211, 217,225, 227, 232, 242, 252, 260, 276, 278, 290, 292, 305, 324,325, 329, 331, 339, 343, 344, 351, 362, 367, 380, 381: n = A,T,C or G
  misc_feature 394, 396, 401, 407, 416, 422, 433, 443, 450, 465, 478, 498,505, 517: n = A,T,C or G
ccctttcgagcggccgcccgggcaggnacatgggactacaggcacgccccaccatgcccagctcatttttgtatattnagtacnaggacaaggggttctcaccanttgttntngntncagggattgancnttgnaatcnttctnngaacctccattgtanttcccgcnccctttnttngntcactnctcatacagttgnccttgnggaaantacacnaagtgtcngntgtangtccccaacntcaaccatcncttggtgncacccctaccttaatntntaaattttcgtncnttttttacaaaangtaggataagtaagaaaannatancntaattcgnaatnnaaggggnccccaataaanagatnttaatttttttannattattaaaaaantnctttntttaanccccttatnaagggncaatccaaaanggggggtaanaaaaaanaaaatatgggggaanaattatattcggncccccttaaaaattaaattnaagtggnttggaaattggnaaaaaggtccaatttaacc

SEQ ID NO: 7335 - DNA, 203 bp, Homo sapiens
  misc_feature 73, 107, 127, 145: n = A,T,C or G
ccctttcgagcggccgcccgggcaggtactttattttcaaaacactcatatcgttgcaaaaaacacatagaanaataaagtttggtgggggtgctcgactaaacctnaagtcacagacttttatgtnacagattggagcagggtncagttatgcatgtagagaacccaaactaatttattaaacaggatagaaacaggctgtc

SEQ ID NO: 7336 - DNA, 161 bp, Homo sapiens
ccctttcgagcggccgcccgggcaggtacttcgaggctctacagacaatctgatggatgacatagaaagggcagtagacgatggtattaatactttcaaagttcttacaagggataaacgtcttgtacctcggccgacctcggccgcgaccacgctaaggg

SEQ ID NO: 7337 - DNA, 311 bp, Homo sapiens
cccttagcgtggtcgcggccgaggtaccatttgtgtctctttattataagtgagagaaatgaagtttatattatcaaggggactaaagtcacacggcttgtgggcactgtgccaagatttaaaattaaatttgatggttgaatacagttacttaatgaccatgttatattgcttcctgtgtaacatctgccattcatttcctcagctgtacctggaggctcaacggcagaagcttcaccacaaaagcgaaatgggcacaccacagggagaaaactggttgtcctggatgtttgaaaagttggtcgttgtca

SEQ ID NO: 7338 - DNA, 328 bp, Homo sapiens
  misc_feature 203, 259, 297, 313, 314: n = A,T,C or G
cccttagcgtggtcgcggccgaggtacaaggataggaagaaatccttaaagttacctactgtagtttatgatataataaatacatatctatatagcattgtatatacatatataggattgtgtgtgtttatattgtaatttatttgcccaattatcctgttagttttgtggatctgcaacctttcaggaaatgaaaaaaactnctttttcactgcaagtttctcttcccccaaactttaaaaaatatttcatacctaanaaaagggttttcaataaccccttccccttaaccccaanagtactcaacttttanngttatttttttgcc

SEQ ID NO: 7339 - DNA, 370 bp, Homo sapiens
  misc_feature 140, 294, 310, 357: n = A,T,C or G
ccctttcgagcggccgcccgggcaggtccgggcaggtacattaagaagagatccaaattacaagagaggcagataaaatttgaattctttaagcattcattaaacgaagttttggagtaaccattccacgttatcttccntttcactaatcacggttccctgttaagcacatcataacaacagcacagtgaagtgaatgatgaaataagagcattttgatacactagaaaacagtgctcagtgagacatttacattcctatttatatgattaaaccattttggatcattacagntaccaaggggctaagncatttttaaaccttttatacttgggaaaaaaaaaatcaaaacaaagnggggaggggatta

SEQ ID NO: 7340 - DNA, 112 bp, Homo sapiens
ccctttcgagcggcccgcccggcaggtacgcggggtatctttctaaaggactgacgttcaatcaaatatctgaaaatactaaaggtcaaaaccttgtcagatgttaacttct

SEQ ID NO: 7341 - DNA, 336 bp, Homo sapiens
cccttagcgtggtcgcggccgaggtactatgaaaagttgattgtagcacaactgttcaatcagtaaaaggtcttcggcaaattccctttagagtatactttctataaactacatgttccacaaaaaggtcaattatatatacaattgacttgttttacttaatcttatttgctcagatcttgcaaatgcaatgagaatattaagcctgaggctagttctcagtgtataggtttaacaaattaaggctcattttcccaaatcaaaatagtttttagttttccttttaaattatgaattacattcatagttacctgcccgggcggcccgctcgaaagg

SEQ ID NO: 7342 - DNA, 281 bp, Homo sapiens
  misc_feature 28, 32, 57, 75, 85, 89, 102, 125, 141, 150, 156, 165, 169,187, 201, 206: n = A,T,C or G
cccttagcgtggtcgcggccgaggtacncgancgccttcccctcacctcaaccaganaagagcatccggttgctntttaaagctnttancctgccctagcanggacaaagcatgttagattaganatgcttctgctgatcncaggggttnttgttngaaaacatntatnatgggggtggggtcgggnggaatactggcaanaaatnttaatctataaagcacattttttataattgttatcagaaaacctataaacaagctccattctgcctcacttttcc

SEQ ID NO: 7343 - DNA, 295 bp, Homo sapiens
  misc_feature 248, 250: n = A,T,C or G
ccctttcgagcggccgcccgggcaggtactcaaagtctttgggtaggcaattctgatgaagatgaggagcaagatgacaaaaatgaagagtggtatcgattgcaagaaaaaaaaatggaaaaagacccaagcagattgcttctttgggctgctgaaaaaaatcggcttaccacagtgcggagactcctttctgaaaaggccactcaccgtgaacactagggatgaagatgagtatacccctcttaatncnagcagcctacagtggacacttagatattgttcaggagctcatttg

SEQ ID NO: 7344 - DNA, 396 bp, Homo sapiens
  misc_feature 312, 389: n = A,T,C or G
ccctttcgagcggccgcccgggcaggtacagttgatcccactttggaataaatgcccagaaggtaataagcattatcagtgagtgagagctctaggcacaaaataagttctcattcagaaaatgggacagagatattgaagcagtgaaacatatagctttaaaaactggaaatcattcatgacatttgttttcaaagtaaacattatctgcatttcaagaactgtaattttcaaaagtagaatcaggcctgattaaagtaatattttatggaccttaccaggataaaaatttacaaaaaattaaaaaaatgnaaaacctctttctgccccttggaaaaggaggaataggaaaaaaccttattattttttttttccctggtaatggtcancaagaag

SEQ ID NO: 7345 - DNA, 466 bp, Homo sapiens
ccctttcgagcggccgcccgggcaggtaccagagtgcccactggttccaacagttcttctcagaccacagagtgtcttacacctgaatcctgttcgcagactacaagcaatgtggcttcccaatcgatgcctcctgtgtatccttcagttgacattgatgcacatactgagagcaatcatgacacagcattaacactagcttgtgcaggtggtcatgaagaacttgtatctgtgctcattgcacgggatgccaaaattgaacacagagacaaaaaaggtttcacaccactaatcctggcagcaacagcagggcatgttggagttgttgaaatccttttggataaaggtggagatatagaagcacagtctgaacgaactaagggatactccgctttcattggcatgttctggtggaccgtcaggaggtggtagacttgctgctggctcgaggtgcaaataaaagaac

SEQ ID NO: 7346 - DNA, 290 bp, Homo sapiens
  misc_feature 51, 136, 256: n = A,T,C or G
ccctttcgagcggccgcccgggcaggtactatactcctccctggtagtgtnaaaccagcagaatatgaccaagaggggtcatacccttatttcataggggtctctcttggcagcattatagtgatttgtatttttntgtaattttcattaagcatttaattcacaagtcaaatacccttgccttacaagatatgcatggctgaaatagcctcaacccattattaacaagcctaatgttacttttgaagtggaattngcatatttgaaagtgggagaattccataaattat

SEQ ID NO: 7347 - DNA, 385 bp, Homo sapiens
ccctttcgagcggcccgcccgggcaggtacttgaagcccagaagtcaagtcttgcttgctggaatggaagtcttagggaaacttgcaggtagtagaagatcaaatgtgtgcccttatagtaacacctttcgttttcctagttaataaaaacaattttagggggagtagaggacatcaggaaatagcctaaaaatatattttacttattttcaaatttaaagtctaattagaagatgggattttgagaaacttaacagttttcatctaggatatggatattgaattattgaaaattggactagaactaaaaggtttagatttggcctatgaaataaaaatgatctctattttctttgatgtacctcggccgcgaccacgctaaggg

SEQ ID NO: 7348 - DNA, 170 bp, Homo sapiens
  misc_feature 84, 88, 93, 94, 105, 109, 112, 118, 122, 127, 129, 131, 139,141, 146, 150, 156, 160: n = A,T,C or G
cccttagcgtggtcgcggccgaggtactttttttttttttttttgttttgttttgttgttgttgttgttgttgttgttgatttngaanacagnnttgctcttgtnaccnaangctgtngaantgcanangncattgatntntgaancctntacctnccangttcaagcaa

SEQ ID NO: 7349 - DNA, 180 bp, Homo sapiens
  misc_feature 34, 80, 122, 140: n = A,T,C or G
cccttagcgtggtcgcggccgaggtacttctatnatatagttgtcaaaatcaactggaggataataaaatattgtgggtnctcagcattcttagaatccaaattacaaccatatcaagaaangggtttggtccacatganccaactgaagtcattttcctcaaggttggaatttgtgcca

SEQ ID NO: 7350 - DNA, 309 bp, Homo sapiens
  misc_feature 40, 57, 63, 127, 138, 141, 146, 148, 196, 231, 248, 279: n = A,T,C or G
gccctttcgagcggccgcccgggcaggtaccaaatgaaangggcaccatttcaagancactangactacattaaacttaaatatattcccatatttcttaaaaatgtaactcaaaaccaaaatctantcttaaaaaanctncagtnanctaaaactacattaacaggcaccatgaacagtgtaaacactgttaatngggcaccaagttttaacagggcagacaatatttgnttctgcattcacacttntttcaattacatttttttaaaaaaatgatgntgcttaaactattaatgttttaccaaaaaa

SEQ ID NO: 7351 - DNA, 395 bp, Homo sapiens
  misc_feature 265, 281, 288, 299, 345, 348, 365, 387: n = A,T,C or G
cccttagcgtggtcgcggccgaggtacctttaccacacagacaaagtggactccaacgacagcctctacgggggagactccaagttcctggcagaaaacaacaagctgtgtgagacggtgatggctcagatcctagagcatctgaaaaccctggccaaggacgaggccctgaagcgccagagctcgttgggcctttccttctttaacagcatcttggcccatggggacctacgcaacaacaagctcaaccagctctccgtcaacnctgtggccaccctggncaccagnagggcaccggnctgttgcaggacacccagggacccaatgggtggaaaaacgcttagnaantaccattcaaggaaagncaaaaggcaaaaccaacccagnacattgaa

SEQ ID NO: 7352 - DNA, 976 bp, Homo sapiens
  misc_feature 5, 37, 41, 57, 64, 72, 80, 90, 95, 99, 104, 112, 114, 118,120, 126, 134, 136, 148, 159, 175, 191, 198, 205, 209, 215,226, 230, 242, 245, 269, 272, 285, 340, 342, 344, 349, 355,360, 362, 364, 368, 372, 375, 389, 419, 443, 460, 476: n = A,T,C or G
  misc_feature 493, 517, 529, 556, 558, 607, 610, 728, 779, 782, 796, 810,846, 864, 887, 898: n = A,T,C or G
ctttncaactttaatttaaagggggggggccggaaanaatntgggggggggaccccnctttccnttaaaggnaaatgggnccaaattggnccttnccgnaaggncccggggncnccgncnccaagnttgggttngnaaattggggggnaaattaaattnctttgggcccaagggnaaaaatttttcccggnccccccnttttttnccgnaagggnccgggggcccnccgncccccccggggnggnccaagggggggttaaaccaaattnttnttaaaaaattttnccttgggttgggccaaattggtttaaaaaaaaccttccaacctttgggaattttntntnttccntgggtnttttntntncctnggtnggnggccttaaaaaggnccaaaaaaaggaaaaaaaaattaaaaaggngggaaaaaaaagggttccaaaggnaaaggaaaaaaatttcntttggcctttgggaancccctttaattgggggnaaccttgggccaaaaaaaattttnccaaaaaaattnttcctttgggcccccaaaaattttttncnaagggaaaaacccaaaccaaaaaaaaattttaatttgggggggaaaggnttncctttttggggaatttaaaaaattttaaacctttcccttgggttaaaaaacccctttttttaaagggttttttttaaatttaaaaaggggtttaaaaaaaaaaatttaatttaaaaanaaggggaaaggtaaaaaacccgggggggggaaccctttaaccccaaagggnttnaaaaaaaaaagggntttaatttaaaggncccaacccgggttgggaaaatttttttccaaaaaanttccctttcctttttccntttgggaaaaaattccccccccntttttaaaagncccaaccctttttttttggggcctttaaaaaattttttttgggcccttaaagggttttttaaaaaaaaaaaaggggtt

SEQ ID NO: 7353 - DNA, 301 bp, Homo sapiens
  misc_feature 118, 121, 123, 126, 137, 151, 157, 161, 165, 166, 181, 187,190, 197, 209, 225, 241: n = A,T,C or G
ccctttcgagcggccgcccgggaaggtactcccgattgaagcccccattcgtataataattacatcacaagacgtcttgcactcatgagctgtccccacattgggcttaaaaacagangcnanttncagggacggtntaaaccaaacccanttttcnccgntacnnccattcggggggtanactacnggncaatgcntctgaaatctgnggagcaaaccacaagntttcatgcccattcgnccctagaattaatttcccctaaaaatctttggaaatagggccccgtattttaccctatag

SEQ ID NO: 7354 - DNA, 458 bp, Homo sapiens
ccctttcgagcggccgcccgggcaggtactcatctgttttaaacaaaaatcaaaccgaaactattcttatctgtcaggtttacagttatgtagaaactcaatatagatgacaaaagatgcatctaaccatgtaactgtaatttatctttgatttatccaagcagaaacatcattgtctaacaataaaccattattctactgaaatcagagacaatgataaagcttgtctcttaaaaaacatcaacttttcaactttgatcagatggagcaccaaagggattatatctgtcaaagcatctttgcaattttttccacacaactagcataatttagttacctgatataaaataggaaaatatactcaatttttatttaaaagaaagctgaaaatatgacatccctcaatcttatataatatacaatatgctaataaaatgccatacatgttaacaataccg

SEQ ID NO: 7355 - DNA, 453 bp, Homo sapiens
ccctttcgagcggccgcccgggcaggtacagtttgttcggatgatgaaacgtttcattcccctggctgagctcaaatcctatcatcaagctcacaaagctactggtggccccttaaaaaatatggttctcttcactcgccagagattatcaatccagcccctgacccaggaagagtttgattttgttttgagcctggaggaaaaggaaccaagttaactgagatactgctgctggaatgggcgagacattgctgcaaagaagtcaagcttttttcagacaaaaggtgtgagggggcttgcttggtatgcttacctgggcttgtgtacaaacagagggtcaaccacgatccccacattgaagccctcacgcaccaaccgggtcttcatcagtttgaacgtgctggtgacctccatggcgtcctggatgcggatgaaatggggggtagcgtaggc

SEQ ID NO: 7356 - DNA, 304 bp, Homo sapiens
cccttagcgtggtcgcggccgaggtactttttgagctgtgataatagcaaaattgtttttcggtaataatatcacactaatgcttcttttaaacattaaacctattttccttttttacagaataagggaaaatgtgataagaagtttgtatacatttctggattatagattattatttatcttttgaaccagagctaaatggtaaaagaaaaaaaatcagtgatgattgttatgttgatctcccacaattaatttatcttttgacaaaggggataaagagtttcagtttagctccttttgattg

SEQ ID NO: 7357 - DNA, 298 bp, Homo sapiens
  misc_feature 136, 167, 221, 245, 279, 284: n = A,T,C or G
ccctttcgagcggccgcccgggcaggtacgcgggggcatctgcctggggccagtgaggagaatgcatctagacagagcttttcgtgctgctgagatctgttacctaaagcaataaaaaatggccagaggatcagtngtcccgatgaggaaatgatggagcttcaganaagccttttgccaaagttgatactgatggcaatggatacatcagcttcaatgangttgaatgacttgttcaaggctgnttgcttacctttgcctgggtatagagtacctcgngccgncgaccacgcttaag

SEQ ID NO: 7358 - DNA, 423 bp, Homo sapiens
  misc_feature 119, 121, 126, 231, 250, 257, 294, 322, 333, 342, 359, 383: n = A,T,C or G
cccttagcgtggtcgcggccgaggtacagtatattctaataagatgctgtcagtgtttctgtgaatccaaaacttaaaccatttaattggcaaatattaacttagagctggtttgcctntngcctnagttttccctttgggggtgggcggaaaaattggtttccctgggtgaaagcttcacctttaaagccaaaaaagggaagaaaggggccaaggggagggaagttaaanagggactattgaaatttcngaccttngtttttccccttataatggtcatctgcactattgcancaaaggtccacctggtcctgtcccagcntgtgttgttgnagtcaaaanggtcttaaggggaaacncattgacccaaaaaggccttaagnaatttaaaaatttaaattcttgggggattaaacccttctt

SEQ ID NO: 7359 - DNA, 177 bp, Homo sapiens
  misc_feature 47, 67, 77, 82, 87, 147, 148, 156, 159: n = A,T,C or G
cccttagcgtggtcgcggcccgagggtaccgtcccacgggtccaagnccccttttgggccgggggtnaaagccttgntgtgntttanaggaacccaagggtaaccaatgggggcaaactggaaagtaaaaattgccccttttttttnnaacttttnttnaaaaatttttttttaaaa

SEQ ID NO: 7360 - DNA, 589 bp, Homo sapiens
  misc_feature 466: n = A,T,C or G
ccctttcgagcggcccgcccgggcaggtactttttcttttttttttttgaggtggagtctccctctgttgcccaggctggagtgcagtggcatgatctcggctcactgaaccctccacctcctgaattaaagtgattctcctgcctcagcctcccgggtagctgggattacaggcacgcaccactacacccagataatttttgtatttttagtagagacgtgatttcaccatgttggccaggctggtctcgaactcctgacctcagctgatctgcccgccttggcctcccaaagtgctgggattacaggcgtgatccactgcacctggcctcaggtatgtttttctatctacacacaaaaagtttattttccttcctcttatttgatatcagaagaatgacaggaatcaagtttttaacagagatagtttttcccgtttctccattgtgttaatcagagccgcaanacttacattctcagtcatttatcttttctggtggagaataaaaagtcacttatagttaaagatcagaaaattatcacaccaaatccattacatatgttagaatcaataatttactcaaaaatc

SEQ ID NO: 7361 - DNA, 257 bp, Homo sapiens
  misc_feature 4, 81, 182, 212, 232: n = A,T,C or G
tagntatttgttttagattaaacaatagtgtaatgcatcaattccttgggtaatttaccgattggaattcctagtgtcatncttgagacacacgcaaaaaaactcaacattattatccacgtgaaatgggacctctaaactgtcctgttttgttacagcctctaatgagccaaaatagtatnagaatcttgaagattaagaatttctgtagngctctacttgcctgaaattnggggtgctaagcattaaaaaaatgc

SEQ ID NO: 7362 - DNA, 395 bp, Homo sapiens
  misc_feature 265, 345, 368: n = A,T,C or G
cccttagggtggtcgcggccgaggtacgaaagaaaactctgcagttagcactggatcttgtctcttctagaaatgttgaagagctggttattgtcctgaagaaggaagtgataaaaacaaataatgtgtctgagcatgaggatactgacaaatacagacaactcctagtgcgaacattgcattcctgttctgtccgatttccagatattggctgcaaatgttattcctgtgttaatggaatttcctcagttgacaaccaaccganagccggcagctgcttgatgtctttgggaagttttgttccgttgaaagcccatttcaagccggcttttggataaaccctgnaagaaattggcttaattggttgnaagaaaggatgctttggaaaggtcttt

SEQ ID NO: 7363 - DNA, 718 bp, Homo sapiens
  misc_feature 545, 575, 618, 626, 644: n = A,T,C or G
ccctttcgagcggccgcccgggcaggtacctctccaattcgtcatctgggtggcctgtctcagcccagcttccaagcttgcttttattggtggcatagagcttcaggatatcttccgtaacaaagaggagtgctctcgaatgctctaccttcactgaatttgaaaatgcagctgctcttatcccctcacctaaaccttcttgaaaacctgagagaaagccaagaaagcaatattgtcagacatgcagttctctacttacactgctcacacctgattaatgcctcagtgcttagtagttctcaaagttgagtttacaccacaatcagctatagtccttggcacaccacagattgctccacctctcccagctctgagaatttcaaggaatttacatttctaatgagctctcaggtgatgctaatgctgttagttgaagacacaatttgagaagcacagctgcttgcccatttcttcaaacttgttaccttggatttggagtttctgtttccagtttatgaatctcagaatttttcaaaacttcttgngatttttggagggtctttgggagaataccncgatatacattaagtgtatgaatccatgtcatcaagtcatctnctgtgtanggatggtgaaaaggcaanatcatttcccttgaactttttctttttcctctcactggttgcaattatttagaaaaaatgaaaatttcaaaaaa

SEQ ID NO: 7364 - DNA, 385 bp, Homo sapiens
  misc_feature 9, 17, 314: n = A,T,C or G
cgggccgcnggtggtgnatgggatatctgcaggaattcgccctttcgagcggccgcccgggcaggtacaagaggaccatcctaccagtggggccacgtctcaacggtttatccttcacccatttttctgcacgtcatcctgaggtaaaccaattttaaatgtgtttggttttcagtaaaccagctatgacaatttatactaaacaaattgaactagaacccatttgaataggttttgaatttgttttttcatttttcatttttaatacaaaggcccgactgtgctcaatcgtcaagcctgcatgcattgaaagnaactggcccaggcccaaaaccaggtggtatttaaatcatttaggcaaaatgggaaacttttaaggggaggt

SEQ ID NO: 7365 - DNA, 308 bp, Homo sapiens
  misc_feature 51, 73, 216, 283: n = A,T,C or G
cccttagcgtggtcgcggccgaggtacctctgctgttgttggggggtttgnggagcgctgtgggagcatccancctgggtgtcagttacttgcggctccgcggtgaagctactcaatacatcgccacaacgtccgactgcactcacactacgtgctctatgggtcaggtaatgggcaatcagtcagttgacaggtgtaacctctgtggatgacagncatcagttacctggaggatacacggggaagagtgctcacaactgtgtgaagaggggaacccccatanaaagtgtgagccagcccccgtccgg

SEQ ID NO: 7366 - DNA, 434 bp, Homo sapiens
  misc_feature 15, 16, 106, 214, 418: n = A,T,C or G
atttttttttcaagnncttcagatgttaatcaggtctctcaagtttcatggagtctatgctgatcctttaattgacaaataaaagatatatatctgtggtgcgcancataaaaaaaaaaaaaaaaaaaaaaaaaaggtccaatttctgccaggtcttcttcttcctgcagaatttccttagctttcgtcctcagaggaacgaactctgtgaagngtttgtcatagtattcatccaaggcacgcatatacttgctgtagctgatgagccaattgacagaggggaaatgcttacgttgagctagtttcttatctaagccccagaacacctgaacgataacaagagtggcagatgtaactggatcagaaaaatcaccaccaggtggagaaactgctcctacaatgctgacactcccttctntttcaggatttccaag

SEQ ID NO: 7367 - DNA, 582 bp, Homo sapiens
ccctttcgagcggccgcccgggcaggtacgcgggggccagcgaagagagacactcagaatggacgatctaaagttccttccagcttcaaattctgggctggttttcagagatccagggctcgggatgcgaatgtccctgtctacgatggggctgccgttacagccttcctcccggggctctggagacgcgccagctctttgacacctctcctgcgctaaggaagagttggtttacagaaaatgcgccaattccagctggacatcactgtgaaaatgggacgggataaagtccgagaaatgtttatgaagaatgcccatgtcacagaccccagggtggttgatcttctggtcattaagggaaagatcgaactggaagaaacaattaaagtatggaagcagcggacacatgttatgcggttcttccatgaaacagaacgccaaggccaaaaggatttcctattccaagttctatgtttggccacgatccatgaagtcattcagtggaaaagatgccccgttgatactattttagagcacaaaataaactcactttacaatggccaaaaaaaaaaaaaaaaaaaa

SEQ ID NO: 7368 - DNA, 217 bp, Homo sapiens
  misc_feature 80, 107, 118, 156, 173, 183, 205: n = A,T,C or G
cccttagcgtggtcgcggccgaggtactttttttttttttttttttttttatgaattaaattcttgatgtcatctccaanaactctgcctaattgtaggtcacgaanattttacctantatttttatttttaaaaggtttaaaagttttttatttntttacaatcttaagggncctattgaanttcttttttggaatataatttnttttctggtatt

SEQ ID NO: 7369 - DNA, 391 bp, Homo sapiens
  misc_feature 8, 10, 16, 22, 26: n = A,T,C or G
cggccgcnantggtgnatgggntatntgcaaaattcgccctttcgagcggccgcccgggcaggtacttgatcatattgatctggaagatggaatttccctgggaagagtccaaaaccactacatccacaccagcctgggcgagcaagtccagcctatacttgtcatcctcatgagtgccaatggctgccccacacagcagctgtttcttggcatctttggaggctagtgggtagtcccgattcttcttcaggtctgtccgggcaatgatggccacaagctcatcatcttcatttacaatgggcaactttcccttcttgctgcgctgcaagaattttcattttgcctccttcaagtggtggatgcctgcaggggggctaccacccaaagtct

SEQ ID NO: 7370 - DNA, 380 bp, Homo sapiens
ccctttcgagcggccgcccgggcaggtactggcgtgtatccattggttgcaaatatgctcttgacccaaacgtagacacacattctccagcttggctgactgaatttaattctgttacattgtgctttattttatcaaaaatgtgcatattaatagattgtagtttagcctttgtcaaaagacatgcaagtatttagtatttacattaaaaggattgcctcagaagaaacattgaattcataagccctcttaaaaagtcaaaaatatgcataaagaagactagtattgatattttctgatattttagatatgattaatattttggacctccattggtttccacactatcatgcaaatttccaacttgcttcaacacaaca

SEQ ID NO: 7371 - DNA, 243 bp, Homo sapiens
  misc_feature 148, 225: n = A,T,C or G
cccttagcgtggtcgcggccgaggtaccaagaaagtcgggatcgtcggtaaatacgggacccgctatggggcctccctccggaaaatggtgaagaaaattgaaatcagccagcacgccaagtacttgttggcgaagggtaggacctangtcacgggcaatgaagtctcgctgatgttcaggggtgaagcccaggcactggaaggggtatccactcaacagcccancagaaggctcattttcaa

SEQ ID NO: 7372 - DNA, 367 bp, Homo sapiens
  misc_feature 52, 128, 131, 136, 152, 153, 188, 244, 263, 265, 317, 340: n = A,T,C or G
cccttagcgtggtcgcggccgaggtactttttttttttttttttttttgaanaggatggggcctgtttggcccatgaattcaattgactcattggccccatcacaagagatcagtgactcaattcttnagnaaccnaatttggcaatgttgnncaggaccccctgcacttcccaaagcaagtgagccncacacccaatgggtaagcccatgaacccagtttatgacactgcgttgggcaaaacntcctgtttcccagcactgnancatggccttaagcccccataacaagctggcaaagaggaccccaacttgcccntgacctggccctcttagctcccnagcatttggcttacttgttgccaggcc

SEQ ID NO: 7373 - DNA, 767 bp, Homo sapiens
  misc_feature 603, 609, 619, 679, 697, 753, 765: n = A,T,C or G
cgccagtgtgatgggatatctgcagaattcgcccttagcgtggtcgcggccgaggtacagtagtgcactcttggctcactgtagcctcgacctccggggctcaagtgatcctcctgccttagccccacaagtagtgggactataggcacacaccaccatgcccatctaagtttttgtattttatgtagagacaaggtttcaccatgttgcccaggctgatcttgacctcctgagctcaagtgatctgcccacctcggactcccaaaatgctgggattataggcgtaaaccaccatgcctggccttaaatcaactttagaagtcaacatctcttatcactggagcttctggagaaactccatcacgtggtgctctctttcctgatgtgttgtgcccaaatagcttgttctcatcagatgacttatttgctatgatatatatacttcaagagctgctatatgtattacatacatcaaatctttctgtaaagtttgatttttgtttctttaaaaggaacataaatgttccaggaccaagggacacaaagaggttttaatttttaagttctgtaccctcatatattttaacagaaatattaaaaacngatgtngccagttttncagtggagaaaactttccagatggctccactggatctcctttcttgcctttccttgaaanaaggttggaactgagggnaaaatgggttttggcccataagcctattcaaaatttttcttcctggtcccccctanaattgggggggntt

SEQ ID NO: 7374 - DNA, 395 bp, Homo sapiens
  misc_feature 205, 216, 227, 283, 305: n = A,T,C or G
ccctttcagcggccgcccgggcaggtacaactaaagggaatgagaaggagggcgctgcaggaacaagtgggcttggggaattgaatagcagagagcaaaccaatcagtccctcaggaaagggaagaaaaagaagaggtggcaccatgaagaggagaagatgggggtcttggaggaaggaggaaaaggcaaggaggccgcaggcantgtcaggacanaggagggtaanaaagcccgggcatatgcttgacccatgcagcccgaagaaagaagaggctgcaacangaggaggaggacttgaacctanaagatagaggtgaggaaactgttttaggtggtggaaccagggaagcagagagcagagcatgcagtgatggaagaagcaggaaaagcaaga

SEQ ID NO: 7375 - DNA, 370 bp, Homo sapiens
  misc_feature 56, 346: n = A,T,C or G
cccttagcgtggtcgcggccgaggtacttttttttttttttttttttttttttttnggagaattaatttttaatattctaaaggtgcttactcttacaaattaataaaaattagatagaaggcacaatagaagaacgtactttatgtgtcatttccatgactactaaccacatatatagagactaggggatacttagtgaagacggctttccaggaagtttacaaaattgaagaaaaaaaaagtatgtccaaatatggcataagtagcaatggggccctgaatttactttggaaagattgcctaaggcaccacttataatgaacaggttgtaaaatctctgatcanacttcaaaattttttctgggtctt

SEQ ID NO: 7376 - DNA, 300 bp, Homo sapiens
  misc_feature 60, 73, 99, 102, 104, 112, 135, 137, 151, 161, 166, 171,182, 185, 187, 219, 222, 233, 243, 275, 277, 283, 284: n = A,T,C or G
cccttagcgtggtccgcggccgaggtacttttttttttttttttttttttttttttggantttttagtaaaanaagggtttcaccatgtttggccaagnatnanctttgaancttttggaccctcaatggatccncnccgccttggccctnccaaaaatgnttggnatcanaaggcgtgagnccncnacaaccttggcctttttttttttctttttttnaanaaaaaagaaancttttaaaanggcccaaaatttttttaaattaaaatcttttncntaaccnnaaagggggaaaaaaat

SEQ ID NO: 7377 - DNA, 340 bp, Homo sapiens
  misc_feature 73, 324: n = A,T,C or G
ccctttcgagcggccgcccgggcaggtacacggtgagaaactctcgaagaggacactgtttggctgggccaanacccagagcatgctcaatctcctgaataaatcttagtaatgggtggaatatgacggtaatgtttctggctccaggtttgcagacaaattttgttcctccaccttcaattaagttgtcatcaggacccccttgcagttctccactccgactatagagctcccttctctgttctcgcagataggcgctcatactgatggcatgggaggacgattcgaacttgaaaagagaattttttggcctttgaggttttnttcttggccaaaaaag

SEQ ID NO: 7378 - DNA, 304 bp, Homo sapiens
cccttagcgtggtcgcggccgaggtacagaaacacacacacacacacaaatctgtcaatgcctctgctgagaagatgtgcagaaatacaagagaccaatggagaactgccttctaacatttattctttttctgtattattttgcctgttttggccctttactcttctttaggaatatatagatcaatttttatagttgtttgaagtagcactatgttgctaaatataaatttataatttaaattcacatatgtaagttatttaagtgtgttctttacaaccacatgtaaatagtatcttataat

SEQ ID NO: 7379 - DNA, 532 bp, Homo sapiens
  misc_feature 431, 455: n = A,T,C or G
ccctttcgagcggcccgcccgggcaggtacatatagatatatgatggtggctttgcctgtagtaaattcacgccaaaacataggctttcagtgcctattacatatggctttcagctctctctactgagggatgtaggagtttatttctgaggtctgagcctcttttcctttacttcctttactctttcctaagccttctttataaaaactatgcatgttctattgttttcctttttgattccctttcttttattatccccagtaggagtgacttgtaattctcatatgttagaaaggcagatctcctggttgaagaaaagatccacccaagcaagtcagcatgtttaataatttttgagggggatctcaaatgtgggaaggattgttatataagacaaccaaatgatgacatgagacaataaatgctatangaattatggaggaataattagctntttattttcttgggtagggaaagagatattatttagttgtagaagtaattactaacttctacattctttattggggg

SEQ ID NO: 7380 - DNA, 370 bp, Homo sapiens
  misc_feature 296: n = A,T,C or G
ccctttcgagcggccgcccgggcaggtacaacaaagatgtgccttatcctcccccgctatcccctgctatagaggcaatccagaaagaaagaaacatcacaagggaaagatttctggtattaaaattattaaagacaaatttgagcctggcattctacagctgagtcagtggtttaaagaaggaaagctaaagattaaagagacggtaataaatgggttggaaaacatgggagctgcattccagtccatgatgacaggaggtaacattggaaagcagatagtttgcatttcagaanaaatctctttgtaattgctgtaaatgtcatcaaggcaatcaataagatttcttttccattttgcattatttttt

SEQ ID NO: 7381 - DNA, 348 bp, Homo sapiens
  misc_feature 282, 317: n = A,T,C or G
cccttagcgtggtcgcggccgaggtacatgccacactactacccttcctgctcttgtgcgcacacctaccctgatgatgcagccttcactggatatcaagccatttatgtctttccggtggacagtagttctgctgttgggctctttccaaattttaacacaatgggatcctgtgcaaaaagcggttattaaccatacatttggagtatccattcccccaaagaagaaacaagttatttcttgtatgctgcaagcttcctttaacttaaatagccaggcccnggcccactacaaaggaaagtaaacatgccaagaanggtcaaaagcactagacgcaacgaaaaataa

SEQ ID NO: 7382 - DNA, 317 bp, Homo sapiens
cccttagcgtggtcgcggccgaggtactaactcatccagtatctgattctgtcttttcctctatccatctgtcttccatctttgcatccatcattcaacgaaatttacagcctatgcagatgttctgtggtcttaaacatgttgtattccttattaatgcccacctctttgccttggccatgcttcctcccctcccagccgttgttctcccccacgagaatatcttctcttttctgcttcttagtggttctattctcaagtatctgaaactctcattttctgtccccgcgtcctgcccgggcggccgctcgaaaggg

SEQ ID NO: 7383 - DNA, 265 bp, Homo sapiens
  misc_feature 12, 14, 125, 151, 154, 159, 166, 169, 171, 183, 185, 190,191, 196, 198, 202, 203, 215, 221, 233: n = A,T,C or G
cccttagcgtgntngcggccgaggtacaatccaggtgcagtgccagcaagtatttcaaataaatttcaacgacttgatattcaagtccaaactaaatatttaatgttatctttattgcaaatatnattgtcttttgaacctggaggtatanagnttgtncttctantantnttttgcataatngncatannggacntnaagnnaccagttacacnaacagnatgagcatccangaaatttgaacgcatgaccttccatgatcctt

SEQ ID NO: 7384 - DNA, 311 bp, Homo sapiens
  misc_feature 164, 208, 228, 268, 274, 278, 284, 293, 294, 297, 303, 304: n = A,T,C or G
tcttgatagtggccacctgtgaagagtggagaagggaaaataatgagtgtgggaggtgggatgggtattggttaaaggggacttcagctttttatataaacatccacttctctttcaaaagacttcaagtaaatataagaagatactgattgattctggattgnggtatagggatatcttgtcttatcttttgtacacaccacgcgtnacccaacgacccatgaccgntctctgaggcaaaggagggcagcctgacagcaaacacagncactgntggntccttntgatcccannctnatcagnntttggac

SEQ ID NO: 7385 - DNA, 324 bp, Homo sapiens
ccctttcgagcggccgcccgggcaggtacgcgggtagcaagatcctgtctctacaagaaattttttaaaaatgagccaagtgtggtggtgcatgcctgtagttccagctactcaggacactgacgtaggagggttgcttgagactgagagttgggggctgcgatgagccatgaatgccccactgcaccccagcctgggcgacagaacgagaccccatctcaaaaaaaataagttctggttagtcattgaattgggataaacagagagctttgatgcttttctgccttctgtctcaggtgatgcattgcacatttgggatatttt

SEQ ID NO: 7386 - DNA, 323 bp, Homo sapiens
ccctttcgagcggccgcccgggcaggtactactcgattgtcaacgtcaaggagtcgcaggtcgcctggttctaggaataatgggggaagtatgtaggagttgaagattaagtcccgcccgtagtcggtgtacgagtaagcaatgactctcaagcaatttttggttctgaagatgtaggctctagctcctacgttgctgtggacatattgattgctgtaggtgccatcatcatgattctgggcttcctgggatgctgcggtgctataaaaagaaagcccgctgcatgcattctgttgtttttcatagggcttgcttctgatcct

SEQ ID NO: 7387 - DNA, 308 bp, Homo sapiens
  misc_feature 257: n = A,T,C or G
ccctttcgagcggccgcccgggcaggtacccaaaaagaagaagatgcctgaaaacttcatgcctcctgttcccatcacatcaccaatcatgaacccgttgggtgacccccagtcacaaatgctgcagcaacaagccttcagctccagtacgcggggagccccaagcttaccacctgcacccggagagctgtgtcaccatgtgggtcccggttgtcttcctcaccctgtccgtgacgtggattggcgctgcgcccctnattcctgtcttcggattgtgggaaggctgggagtgcgagaaagcattccca

SEQ ID NO: 7388 - DNA, 381 bp, Homo sapiens
  misc_feature 86, 87, 89: n = A,T,C or G
cggcccgccagtgtgatgggatatctgcagaattcgcccttagcgtggtcgcggcccgaggtactttttttttttttttttttttnngncgagattatggtatcactatgttgctctggctgatctcaaatgtttgacctcaagggatctttctgccacagcctcctaaagtgctaggattatatgcatgatacaccatgcctattgtagagtattacattattttcaaagtcttattgtaagagccatttattgcctttggcctaaataactcaatataatatctctgaaactttttttgacaaattttggggcatgatgatgagagaagggggtttgaaactttctaataagagttaacttagagccatttaagaaagg

SEQ ID NO: 7389 - DNA, 249 bp, Homo sapiens
ccctttcgagcggccgcccgggcaggtacataaacacagtaggtaggtggatggatgaatttgctgtccggtcaagacttcagctagcacattcctaattgacctgcctttacatatatggtttctaaaacactttcacactgggatgatgacagagttctggagatggatggtggtgatggttgcacacactattgggaatatacttaatgacgttgaattgtacctcggccgcgaccacgctaaggg

SEQ ID NO: 7390 - DNA, 393 bp, Homo sapiens
  misc_feature 322, 368: n = A,T,C or G
ccctttcgagcggccgcccgggcaggtacagatgaaggagaagatggagatgaaccagatgacgggagcaatgatgtcgttgatcttttgccgaggacggagatcagtgataaaatcacttcagagtttggtatctaagattggtgataagaattggaagattaggaaagaaggcctagatgaagtggcaggtattattaatgacgcaaaatttatccaaccgaatataggtgaacttccaactgccttgaagggtccgactcaatgaattcaaattaaaaatcttggttacaaggctttcaaaatggttagcttctcttgnaattatttcactggggatccattaaagggaggtgggtttttggggnaaaccccttttggaaaaggatttcc

SEQ ID NO: 7391 - DNA, 129 bp, Homo sapiens
  misc_feature 67: n = A,T,C or G
cgccagtgtgatgggatatctgcagaaattcgccctttcgagcggccgcccgggcaggtactcattntttaccttgtagggagggtgggcaatggggtaacctgaccttatttgagggtatgggctttc

SEQ ID NO: 7392 - DNA, 268 bp, Homo sapiens
ccctttcgagcggccgcccgggcaggtacaaaaagtttattaagatggattaagattccacattgatattaacctttaggaaactaatactcattaagtttcaatgtagctccaaagaaaaatacttgtcattatatgaataaaatattggagcagatttttcttcatacttttacaataaaacaacgtattacaaaagataatgcaggaacaggtatgaaaatccaattgtcctgtattcaggctttatttatttatttatttagag

SEQ ID NO: 7393 - DNA, 314 bp, Homo sapiens
cccttagcgtggtcgcggccgaggtggcggacactcagctgatgcttggagtcgggctgatcgtgaccatctttccaccgtagaaaaggacacaaatggagaaagttctgtggggtgtggtgttatccttccacgacagccacattaaggaacctgctgctgagaaaatgctgccttacagatgaaaacaaacttctccatccctttgtctttggtcagtacgaaagaaaactctgcagttagcactggatcttgtctcttctagaaatgttgaagagctggttattgtcctgaagaagggaagtgataaaaac

SEQ ID NO: 7394 - DNA, 994 bp, Homo sapiens
  misc_feature 7, 44, 45, 47, 50, 57, 64, 69, 75, 83, 102, 110, 114, 118,121, 127, 129, 141, 145, 149, 171, 175, 177, 184, 186, 208,217, 221, 223, 227, 229, 233, 237, 249, 255, 261, 263, 265,267, 285, 297, 299, 303, 305, 309, 311, 325, 336, 395: n = A,T,C or G
  misc_feature 405, 445, 466, 481, 512, 549, 551, 558, 562, 605, 643, 646,667, 670, 708, 758, 781, 805, 811, 896, 913, 919, 929, 947,956: n = A,T,C or G
cccccgngcttttttgggaaagaccccgttttttaccgggaaannancancctcatnagggggnccgtntttttnggggggcncacatactttagccatggnccaatggncctnccgnagnccgggncnccgtctctaagntggntggnaatggggggattatttcttggnccangnaaaaatntncggtctctctttttaagaccgntggggggtncggncngggncncggnaagnggtaaccaaaantaaggntggggntncncntggaaggaggtggaaccngttaattaattncncctncnaggncntttaaccaaaaaanggaattaaaanccagggggaattttaaaaaggggggaaatttaaaaaaggttaaagggaaccaagggggnggttaaaggnaaaaaaattttaattaaaaaaaaagggtaattttaaaaanttttttttgggggaaaaaaancctgggaataaaaanaattgggttcccccaaaaaggaaaaaaattncctttttccaaccaaaatattttaaattgggtttttntnccccctngggnaattgggcccaaaggccaaacccccaaaggccattggggggtnccccccctttcccccaatttttcccgggggggaggatnccncccctttgggaaacctttttnccnccccaaaccaaaaaaccaaaggggcccccaaagggggncctttttttttcctttttgggggggggcccaaaggaaaaggggggttttnccccccttggggttggggggccnttttttttcccccaaccaaaaggnttgggnccaaatttttggggaaaggccccccccccccttgggggggtttttaaaaaattcccgggaaagggaaaaaattgggggggaaaanaaaaaaattgggggggncccggnaaatttgggnaaaccctttttttttttnaaccccccnaaaaaaaaacccaaatttaaaccctttggggcccccct

SEQ ID NO: 7395 - DNA, 621 bp, Homo sapiens
  misc_feature 199, 282, 284, 287, 296, 303, 305, 307, 309, 311, 313, 318,328, 371, 458, 491, 503, 504, 514, 535, 539, 554, 568, 581,604: n = A,T,C or G
ccctttcgagcggccgcccgggcaggtacacatataccaccacagttgggaggcatgactaggctgacccagtcttatctgttcctcctttgaagagggtttgacaaatgggaaaaaggaaggagcctcatcaggcagaggtttcaagccatggaatggaggaaaggcggcagagaggagcagcaccagaggccagganagagtgggaagggccacagcttgtttttaaaaaattctataatttggaagagggtggcagattaattttcaaaatacactttnanagncccactttnccatagntncntntntnacagncctttgggtntttttagacaaaattttaagagcttctcataatgccagaagtnttgattaactccttaagtgcatccaaaaaaaagtgttcacatcaatcccttacaaaagactatgtgctgtaagactttgctttgttnctatacatttgtcttacggctcaagtgggtaanggtagctgtaanngacacattancgggggtaaaatggaaaaggnaaantaaggggaagcccanggcacatggttgcnggggaggggtgangaattccacttccctttctttgncttttctttaaaaaaaa

SEQ ID NO: 7396 - DNA, 126 bp, Homo sapiens
  misc_feature 107, 114, 115: n = A,T,C or G
cccttagcgtggtcgcggccgaggtactccggtcatcttcgttcgtttggtcgtgcaaggtgttaactattttcacttcccatatcacaaagttagtccacaggaangaagctnngtggatcttgc

SEQ ID NO: 7397 - DNA, 365 bp, Homo sapiens
  misc_feature 178, 225, 277, 334: n = A,T,C or G
ccctttcgagcggccgcccgggcaggtacgatcttggctcactgcaacctctccctcccgggttcaagtgattctcgtgcctcagcctcttgagtagctgggattacaggcgcgtgccactgcgtccggctaatttttgtatttttagtagagatggggtttcaccatgtttggccangcttgatctcaaaactcctgacctcaatgttgggtccacccaccttnggcctcccaaagttgcttgggaattacaaggccgtgagccaccacgctcaancctacaaagcaatttttttaaaaaacttgacacctattactgattaaaaattctctngtttaaaaatcctatttaactatttttaaaa

SEQ ID NO: 7398 - DNA, 477 bp, Homo sapiens
cgccagtgtgatgggatatctgcagaattcgccctttcgagcggcccgcccgggcaggtactatatgggatactgcatgctatttggaagaattttgtttatttaaacatttcagcaaattcctcagttttgatatggggtgcagtatttttaactcattgagaaatttctactaacttttttgaatgtgctcttttcccactagttgcactaaggaaagaggttagtcatgtggtaaaattaatagtgacaaagctgtaaatagctctgcaggccaaggtagccatagtaagaagtcctggagatttatggaagaaatttttgttcatggaagcctgtcagacatgaagatgtgggtcttgtgaattggagattcagtgcgtgaggaaaacagcctaactatccataattaaggtaactactgtcagatatttgtaacatagtgaacatcctattatgctagatagaagcattctc

SEQ ID NO: 7399 - DNA, 549 bp, Homo sapiens
  misc_feature 524, 545: n = A,T,C or G
ccctttcgagcggccgcacgggcaggtacccatatactaaccagtttggggcacataaatgttacaagggagaaaaaaagatttagactagcatgtgaatttcatcaagcagagacaccttggttaaaaagcaaaacttgtggggtggagaggaaggaaaaaaggaaaacgtaagaaaaaggaccggagtgctcactgcttatcattatcagcccttttttttgagacggagtcttgctctgtcacccaggctggagtgcagaggcaccatctcggctcactgcaagctccgcctcctgggttcacaccattctcctgcctcagcctcccgagtagctgggactacaggcgcccaccaccacgcccagctaattttttgtatttttagtagagacagggtttcaccgtgtcaggatggtctcgatctcctgacctcgtgatctgcccgcctcggcctcccaaagtgctgggattacaggcgtgagccaccgcgccccagcccattattagccttttaacagaanacttcagtgagggtgtttccngggg

SEQ ID NO: 7400 - DNA, 354 bp, Homo sapiens
cccttagcgtggtcgcggccgaggtacctaaaacagataagaaaacctgacagaggcaaacaatgcctgatcattgctagttaccaagagctagctttcctattaagttcagctttcattaaaactgaaattaaaagatttaaatattcatacacatccctaaaactcacccgatatgctggagtgtaaaaataaacatttttatcatttgttttggttgtcttgatgttggagaaatagccgtattactgaatgtttaccacctgtttttcatgcataatttttaaaaggttgagtcatttttgacattacatattttaaaggggaaggaaatatgaacaaaagggttttttt

SEQ ID NO: 7401 - DNA, 544 bp, Homo sapiens
  misc_feature 116, 154, 188, 191, 246, 253, 255, 263, 317, 318, 325, 329,364, 373, 378, 384, 407, 411, 418, 432, 443, 446, 451, 462,507, 513, 517, 526, 537: n = A,T,C or G
cccttagcgtggtcgcggccgaggtactttttttttttttttttttttttttggatagaacttttatgatgtgttttatggtttacaaaccactttaaaggctcacccatttttcntttttggaattttctttaccaaaagaaaacctttttcntttttaatggggaaaggggaaaaaccattttatnccntcttttttttcaatttctccccttagaaattaaaaaaaaaggggtaaaaaatttnatttttnangccaattnttaaaaatggaatttttttcccccaaagggccttaaattttcggggaccggaannaccaagntatnaaagccttgggggcattttttggggaatccttaanatttttttncttcnttgganggttccaaaaaatattccccttncttnggaaatnccttttttcttttnggaaaaaaggnttncaacntttttttcaanttttttttggggtccccccaaaaccaaccaaattttttgttaagnccaagntacnaacccccanggtttgggggntttttta

SEQ ID NO: 7402 - DNA, 322 bp, Homo sapiens
  misc_feature 136, 151, 285: n = A,T,C or G
cccttagcgtggtcgcggccgaggtactctggtaagcttgttgttgtccaagtgaagctccctcagatgaggcgtgttggccagagagccattgtcaacagcagagatgctgttgaaactcaattcccaacttaanccaaaattatttcanttcctttcaaggcttagcttgcatcaactctgcttgattttgttgccatcaagatgtaattccgtaagggaaggagggaagaccttgaggaatgctggtgatattggtatcagccaatgccggatgtagggagnagccttcttcattccctggaaaagccccattttcaat

SEQ ID NO: 7403 - DNA, 318 bp, Homo sapiens
  misc_feature 8, 75, 92, 142, 144, 155, 156, 161, 166, 170, 192, 201, 230,310: n = A,T,C or G
ccctttcnagcggccgcccgggcaggtcaatgtgggaattttgttacctttttaatcaagggcaacttccttttncagcactaccattgtanggttttttttaaaggaggggaagggctaaccaccttgcttttctcttttntntttttcttttnnttatncttgnttanattaatttggggaaaggggtgntagcattantgccatgatatctactggattttaagtanggagacttttattgataaaggtaggttgaaatttgggagatttctcggcaggaagggctgaaatccagagcccctgtctnaacttgga

SEQ ID NO: 7404 - DNA, 336 bp, Homo sapiens
cccttagcgtggtcgcggccgaggtacggttcagcctgtgatcacttcattccaatcaatttatggggccgagacttgtcacaacaatggcatgcagagattactatcccagcctccatatacagccccaggaataaaaaaatcatgactaaaatgggatagctccctaaaaagggactaggaaagaagtcccaattgaggctgaaaaaaaatcaaaaaaaaaaaaaaaaaaaagtacaggaagttgagcctctggaaggcctcgcggtccttcaccggccccgccatcaccgccgcgctcccccgcgtacctgcccgggcggccgctcgaaaggg

SEQ ID NO: 7405 - DNA, 941 bp, Homo sapiens
  misc_feature 18, 33, 35, 62, 64, 78, 86, 95, 100, 110, 114, 127, 141,157, 163, 176, 178, 194, 204, 214, 216, 220, 224, 247, 403,420, 422, 441, 494, 501, 527, 589, 593, 624, 653, 695, 697,722, 794, 879, 914, 927: n = A,T,C or G
taaccggaactttcaacnttatttaaggggggngncccggaaaaatttgggggggcctctcntnctttaagcaatggnccattggnccttcccgnaaggncccggggccnccgnccccaaggttggntgggaaatgggggnaattaatttccttggnccaggnaaaaatttccggncnccctttttaagccggnttgggggttncggccggggncncggnaagnggttaaccaaccccaaaaagggntgggggttggccaatttttaacccccggggaaaaggttgggggaattccaaaagggggaacaaccccaattcggttgggggccaaaaaccccccttggaagccaaccccccttattcaaaaccttccccttaatttggtaaggttaaaaaactttngggaaaaccccttttgngnaaaaaatggacccaagggnccaaaaggaactttccaaaggcccttccccccaggttttcctaacctgggacnctttttnggtccccttttaaggggttggttggnaggggtccccaaggggggttttggcttaagggggaaaaaaaaaaggaaaaaaattccaaggnccangtaaccaaccaaggggggttgggtttaaggnaaccccaaggaaaggttgggttttttccnttttaaggaattggggggttgggttaaaaattttttttgggntnccccttcctttccttggttgggttnccccttggggggggggggaaaaaatttaacccttgggggcccccaatttgggcccctttggggggaaagggnaaaccaatttaattttccaaaccttttccaaaaaaatttttttttccctttcctttggggaaggggggaacccaaccccaaaggnaatttaaggggggaatttgggggggggggggtttnggggttccctttngggttgggttttta

SEQ ID NO: 7406 - DNA, 257 bp, Homo sapiens
ccctttcgagcggccgcccgggcaggtactttcagtagagatggggtttcactatgttggtcactatggtcttgatctcttgatctcgtgatctacccaccttgggttcccaaaatgttgggattacaggtgtgagccactgcaccaggcaaactgcgatcttttagtggtgcctcttctctcttttgacttaaggatgttgtcccttaaggaaacctgggaggctactactgtgacacacttacttgagagatgga

SEQ ID NO: 7407 - DNA, 395 bp, Homo sapiens
  misc_feature 2, 4, 12, 27, 188, 257, 266: n = A,T,C or G
cncnagtggtgnatggatatctgcagnaattcgccctttcgagcggccgcccgggcaggtacttttttttttttatttgttttttcctttgttgttttaaaggggacaaaaaaaaaaaaaaggacttgactccatgacgtcgaccgtggccgctggctggctggacaggcgggtgtgaggagttgcanacccaaacccacgtgcattttgggacatttgctttttaaaacgtttttatgccaaaaatccttcattgngattttcanaaccacgtcagatataccaagtgactggtgtgttgggggtttgacaacctgtggaaagggcgagccagaaaaactcccgggcggtcttgaggccatgggaggggtgggttgctgcatttgagaggggga

SEQ ID NO: 7408 - DNA, 106 bp, Homo sapiens
  misc_feature 90: n = A,T,C or G
ccctttcgaacggccgcccgggcaggtactcattgtctatgcacaccaggaacccaagtctttcaacggatccttgaagaatgtggctgnagatgaaactgagcag

SEQ ID NO: 7409 - DNA, 306 bp, Homo sapiens
  misc_feature 23, 145, 148, 181, 194, 205, 221, 225, 235, 236, 237, 251,252, 254, 266, 294: n = A,T,C or G
cccttagcgtggtcgcggccgangtacatattcagacatcaaaatttaatgacattctattttgagaagggaagacaatgctgaagaaagtaaaactgttgattgaaatgctgacagggtggaaaaacgaaattttgaaagacangtnggaataaacttattgaaacctatgctaatgggnaattaggattttntgtttggttantatagtggtaaattgngtantatcttgctnnnaatctaattttatnntntaaaaatcaatncaaatgtgttatttgtgaaaacaccctntataaaatcatt

SEQ ID NO: 7410 - DNA, 382 bp, Homo sapiens
  misc_feature 129, 141, 143, 158, 169, 213, 264, 308, 321, 324, 330, 347,366: n = A,T,C or G
ccctttcgagcggccgcccgggcaggtactttttttttttttttttttttttttcgcttttttttaaattttactttacgttctgggatacatgtgcggaatgtgtaggtttgttacacaggtataccntgttgccatagngntttgctgcacctatnaacccatcatntaggttttaagtcccacatgcattaggtatttgtcctaatgctntccctcccctgttctcccaccccccgaatcacttattttaaaagtcagcantaaaaataaattgaaactaaaattcaaataaattgatcctattnggagtaacaaaantantaacanccgttaattatagtagntaaaaagaaaaataaatanttaataaaaggaggaa

SEQ ID NO: 7411 - DNA, 366 bp, Homo sapiens
tgaattcgccctttcgagcggccgcccgggcaggtacatcatgagcctcagctcagtgacaaggttcacaatgatgctcagagttttgattatgaccatgatgccttcttgggtgctgaagaagcaaagacctttgatcagctgacaccagaagagagcaaggaaaggcttggaatgattgtagataaaatagacgtggataaagatgggtttgtgacggagggggagctgaaatcctggattaagcacgcccagaagaaatacatatatgacaatgttgaaaaccaatggcaggagtttgatatgaatcaagacggcttaatctcctgggatgagtacccggggaggcattgaggcagccagcgc

SEQ ID NO: 7412 - DNA, 352 bp, Homo sapiens
ccctttcgagcggccgcccgggcaggtactagatctgtatctcttgtctgaattaaacatttttagttgctgtgtaaatgttaggaagcaaagtagctttgaattttctctgtaagagaataaaagataaaataatgtattttctttatttcacattttatttggagatatttaaatgaaatagaaagccatataacatagctataattactacctgtttgctattttttgtttaacttattttgtagcttcctcactggttttgtgttgctaagcaaaacgtatacaaaacaggaaaaagagccttcctaaattggcacattttttgcacctcttggtggcattctgcaag

SEQ ID NO: 7413 - DNA, 745 bp, Homo sapiens
  misc_feature 82, 118, 177, 210, 251, 275, 294, 295, 319, 330, 349, 350,367, 370, 373, 400, 413, 449, 459, 465, 487, 501, 561, 585,594, 611, 649, 661, 679, 683, 684, 697, 698, 704, 713, 714: n = A,T,C or G
ccctttcgagcggccgcccgggcaggtaccacctttcagtgctttctctcctcaagggaatgccagaggggcgaatcctagntggtatggtttaaacttattgccaccggaaaccttnaaaagaacctttttcttttttaaaaaattttggggaaaaaccgggggggaacccaattnggaaaaaaaaaatttccaaaaatttttgggccntttccttgggggggggaaaaaaaaaaatttttgggtttaanaaatttttggggccccccaagggnaaatttaatttgggggggnnaaaaaaaaggggtttttttttttnccaaaggtaanggggggaaaaaaaatttannaaggggggttttttaanaanaanaataaatttgggcccccccccaaaggnccctttggggggncccaaaggggggggggggccccccaaaaaaaaaggnggggaaaggntttccnaattttttcctttccttttaancctttcccccgggnaacccccccctttgggcctttggaaacccttaaaccttttttttgggccctttccccttngggggggggtttgggaaaaaaggnttccccccnttaatttcccccaaggnaaattggggggtttttggggggaaaaaattcctttttnccccttgggggnaaagggggttgggggggnttgnnttttcccccaagnncccggnttggggggnnaaaaaaatttaatttccccccttttaaaaaa

SEQ ID NO: 7414 - DNA, 365 bp, Homo sapiens
  misc_feature 269, 310: n = A,T,C or G
ccctttcgagcggccgcccgggcaggtactccttgaagttctatattggttgttttgggtttcttcttaggtggctgggacccatctgctgaggactgcctcttcttctctgaactaagcccctttatccatcaaaggaggttttggaactgcatccggtggggggcccgtaaggattttcttctgggtcttctacctcaggggcagtgggtaaatacaatagagcctttgaatcttccagctcttcatcactgctacaggaaggcagncaaatagggtccacgccttgggtgacatccacacttccttnaatctttcttgcagccatcaagccccctgttctgctcagggctcacttctttatc

SEQ ID NO: 7415 - DNA, 338 bp, Homo sapiens
cccttagcgtggtcgcggccgaggtacaatttgtctgtctgccagaaagttgtgtctctggttgaaatattcctggatcaatgattaataagttaaggccaactgccaacgaagtcagattattccccaactgccaggtaacattttgatcttctctattaaaatgtcttactggatggaaccagatctcatacttttcatgtatcctctatagcacctactaaagtgttaggcagagatatatgctcaaggaaataatcagtgacgggggcgagaaatgaatcaagggtgaatgaatcaaggttatggtaaagccataccttacttcacccataact

SEQ ID NO: 7416 - DNA, 337 bp, Homo sapiens
ccctttcgagcggccgcccgggcaggtacaaaagagggctcgttcgcgctccttcagtgggcttattaagcggaaggtcctgggaaatcagatgatgtcagaaaagaaaaagaagaaccctactccagaatctgtggccattgggtgaattgaagggaaccagcaaagaaaataggaacttattattttctggctctccagctgtcacgatgacaccaacaagattgaagttggtctgaagggaagaaagaggggaaaaaaggatttctctgaaggatccagaagttgtctcctatggtccattgcagaaatttttctgtttttagtgggccaggtg

SEQ ID NO: 7417 - DNA, 595 bp, Homo sapiens
  misc_feature 28, 44, 120, 128, 137, 153, 158, 161, 171, 200, 310, 324,399, 428, 429, 512, 513, 529, 537, 557, 559, 578: n = A,T,C or G
ccctttcgagcggcccgcccgggcaggnactttctttttttttntttttttttttttccatatgaaagttcaaaaaaatatttatttataaaaaatacaatgggataagtttatgctganaaatgcancaataaatncagttgaagaaaacanagcanctntacattgatncattggcacaaacaggaagagcaaatgcntcacccaggcctaaatgtccacaggccacttttgtacttaactacagtgctggatgtaaggtttatgcagtaaaagcttattgaatgaatgaatcataggataaataatncaactagtaatttnttaagatcataaattccattacagtaaccctggtaggcaactctataaagttctgggctccaagaagaggtcagngcatgccataaatgggtttggtctgctgnnaagtatattcaagtcttcaaaatgtaatgcttacatgagataaaatgggttgggttccacccccaaaattagcatatggcagnntggccaaagggaaatngcaaaaanttttactggttcaatctgantnaccaaaaaattccttttanggaatcttaaaaaaaaa

SEQ ID NO: 7418 - DNA, 339 bp, Homo sapiens
cccttagcgtggtcgcggccgaggtacagtgatggagttcattagtaggcaatgacccattactacaaacataacggcttctgtgaaacttaagtgctttctcttcttttagtattaacttacgataccatgaggtgacaccagataataggcagtgagatgatatgtgggaagggaagggaagcattaaacaaattcgtatgcctcatctataatttcacatatggataaaggtaggtttttggcctttgttttttgttgtttatttttgttacaaggcacttcatggttaggacaaaagatggaaaatgtgcaaaactttttaaaaattttaaaata

SEQ ID NO: 7419 - DNA, 404 bp, Homo sapiens
cgccagtgtgatgggatatctgcagaattcgccctttcgagcggcccgcccgggcaggtacctatttcaaggcattgctaggccctcgagatactagagtaaaaggatggtttcttctggacaattatatacccacatttatctgctctgtcatatatttactaattgtatggctgggaccaaaatacatgaggaataaacagccattctcttgccgggggattttagtggtgtataaccttggactcacactgctgtctctgtatatgttctgtgagttagtaacaggagtatgggaaggcaaatacaacttcttctgtcagggcacacgcaccgcaggagaatcagatatgaagattatccgtgtcctctggtggtacctcggccgcgaccacgctaagggc

SEQ ID NO: 7420 - DNA, 348 bp, Homo sapiens
  misc_feature 271, 296: n = A,T,C or G
ccctttcgagcggccgcccgggcaggtaccaaggaggaaagaacccaattacaaaagcaaaaaactgatgaatacttcagaatgaaactgcagtggaaatccatcagccaggaacaagagaaaagaaattcgaggttaagagattatagaagtcttatcgaaaaagatgttaacagaacagatcgaacaaacaagttttatgaaggccaaggtaatccagggttgattttacttcatgacattttgatgacctactggtattgtattgatntttgattttagggatatggttcagngggaatggaggtgatttaccttttccccctctttttattatggtggatggga

SEQ ID NO: 7421 - DNA, 155 bp, Homo sapiens
  misc_feature 127, 135, 141, 147: n = A,T,C or G
cccttagcgtggtcgcggccgaggtactaaacatatccattcacccttagtttatgtgccaaccttattttatattacattcccaaattatatatagctctgtttctaagctctattctgctctatnggactatngtctgntcttangctaatcc

SEQ ID NO: 7422 - DNA, 974 bp, Homo sapiens
  misc_feature 35, 51, 65, 89, 129, 132, 153, 158, 207, 217, 221, 226, 227,232, 257, 262, 265, 267, 277, 284, 285, 287, 290, 294, 305,320, 322, 327, 330, 333, 340, 358, 368, 418, 445, 451, 466,471, 476, 494, 495, 504, 506, 553, 560, 562, 565: n = A,T,C or G
  misc_feature 568, 585, 618, 623, 626, 633, 640, 642, 645, 648, 654, 665,683, 685, 686, 692, 704, 707, 709, 712, 717, 734, 744, 749,752, 771, 799, 813, 815, 831, 837, 853, 858, 868, 871, 873,885, 897, 900, 919, 921, 924, 938: n = A,T,C or G
atggggggggcccggaaaaattttgggggggcccnccctttcctttaaggnaaatgggcccaatnggccctttcccggaaaggcccggnggcctccggccccccaaggtttgggtttgggaaattgggnggnaatttaatttcctttgggccnagggnaaaaatttttccgggccccccctttttttaccgtagggcccggtggtcnccggcctccnccgnggggnnccaangggggtttaacccaataaaattaanccaanggngnaaaaaaaaanggggttnngnaanatgnaaaccaaaaanaatttttaatttttntnggaanaanaanaaccaanaaatttttaacccccttnttttgggttntttaattttaagggaaaaaagtccaaaaaaaaggttggtaacccctttgngaaaaaaaaaaaatttggccccaaccncccatnataaggtaaaaaaanaaccnaaaantaaaaaaacccctcctannaaaaccccncnaaaaaccaaaaaaaattaaccaaggttttttgggtttaaaaaaaccnacccaananggnccnaatttaaaacaattaangggaacccaagggaaattttcctttgggttaanttttnggngaaaaanggaaatnanggnttnctttcntttgggcccangggggggttttggggggngnnaaaaanaagggggggaantancnccnggaancttttcccccccaaccnttggttttcnaaccnccngtaaaaaaaattggggttnttattttaaacccaaaaataaaaaaaanccaaatttaatttngntcccggtccaaagcantttaangggaaaaatttttttnggggntttaaaaaanccnantttgggaaaggnaaaaatttaggnccnttttttttcccaatttaangnttntttttccctttttnctttaaaggggggcctttttttaaaccccctttttt

SEQ ID NO: 7423 - DNA, 149 bp, Homo sapiens
  misc_feature 79, 103: n = A,T,C or G
cccttagcgtggtcgcggccgaggtacttttttttttttttttttttttttgctatatgacacctcaatgctgaatcanagactgattcaaatttcgattctnaaagactaccagagatacctgaatgtgtactactgacccaacaact

SEQ ID NO: 7424 - DNA, 994 bp, Homo sapiens
  misc_feature 1, 20, 22, 47, 50, 52, 64, 69, 84, 96, 100, 102, 108, 111,115, 121, 129, 141, 148, 155, 161, 171, 175, 182, 194, 201,208, 226, 235, 245, 255, 256, 266, 276, 279, 289, 292, 301,308, 318, 321, 328, 347, 376, 383, 398, 419, 427, 434: n = A,T,C or G
  misc_feature 437, 457, 464, 473, 502, 503, 505, 521, 566, 622, 647, 673,722, 751, 765, 768, 771, 774, 777, 780, 783, 794, 797, 803,806, 812, 815, 823, 891, 894, 918, 938, 992: n = A,T,C or G
naaaattaaaccgggaaacntntcaaaccttaaaacatggggaagcnttnanttaaaagggggnggggnccgggaaaaaaattnttgggggggggncccncntccttnccntttnaagganaaattggncccaaattgggnccctttncccgggnaaaggncccggggggncccncccgggnccccccaaaggntttgggntttgggnaaatttggggggggaaanttaaatttnccctttgggncccaaagggnnaaaaaatttntttcccgggnccncccccctttnttntttccgggnaaagggncccggggggnccncccgggnccgccccccgggggggggncccaaagggggggcccaaacccaaaaaanaaaaaanaattttttaaagggnccctttgggggggggcccaanttaaaggntttgggnggnccaaacccaaattgggaccnccttggntttaagggnttccccccccaaagtcctttaacctttcnngngggggaaagggggccnttgggaattggaaaaaccaaaaggaaaaattccaacctttttggnaaaacccccttgggggggaaaggggaaagggggaagggggttttggccaaaggttnggaaaggcccttggaaaggaaattnccggttgggcccccaaccttgggccnaacctttcccccaaaggccccctttgggaaggtcccggaaaccaaaggnaaagggcccaaaaagggaaaccctttggnttccctttcccaanaanaanaanaanaanaantttataataanaanaaaaanggnaaaaanaanaaaaaaanaaaaaatttaaaaactttaaaaaaaaaaaaaaaaggggggaaaaaaaaaaaacccaaaaaaaaaaggnccncccttttttttaaatgtaaaaaanaaaaaaaaaccccaaaaaanaagggccccccttttttttttggtaaaaaaaaaaaaaaaggggggaaattgggntt

SEQ ID NO: 7425 - DNA, 353 bp, Homo sapiens
  misc_feature 261: n = A,T,C or G
cccttagcgtggtcgcggccgaggtacccgccaccatgccaagctaatttttgtatttttagtagagacggggtttcaccatgttggtcaggctggtctcaaactcctgacctcaggtgactgcccaccttggcctcccaaagtgctgggattaaataggtgtgagccaccacacccgaccaagcatgacctttaaacacaattggacttaagacaaatttagtaaatgcagatttctgggggggaagggggggaatcttnttttaaaatgcccatatttagttgtaggtgaaaatatactgcttataaacctatttgatattagcctttgaaagaagccattatttgggttc

SEQ ID NO: 7426 - DNA, 181 bp, Homo sapiens
  misc_feature 57, 59, 78, 89, 121, 125, 127, 143, 159, 179, 181: n = A,T,C or G
ccctttcgagcggccgcccgggcaggtacttttttttttttttttttttttttcccngnctcccccaaaagccttttnaattcttgggntcttagactttttaaaaaaagttggggggcanattntnaatttggctaaaaaanatgcattttttaaaantaccacttttattttttttncn

SEQ ID NO: 7427 - DNA, 159 bp, Homo sapiens
  misc_feature 117, 141: n = A,T,C or G
ccctttcgagcggccgcccgggcaggtacgcgggcaatttctggcaatatattatagtaaatgcaaatgttcttgtttaaattttcataaaagtcaacaatgaaaagtttgctagtntctaaaaagctaagaaaggacagntacaaataataatgcagg

SEQ ID NO: 7428 - DNA, 344 bp, Homo sapiens
  misc_feature 324, 332, 336: n = A,T,C or G
cccttagcggtggtcgcggccgaggtacatgggactacaggcacgccccaccatgcccagctcatttttgtatttttagtagagacagggtttcaccatgttggccaggatgatcttgatctcttgacctcatgatccgcccctcttggcctcccaaagtgctgggatcacaggcgtgagccaccacacctggccctctatttattctctttaaagagagagaaaactatgagaggccaaaattatttaattaaatctttaccttagcacaaggggaaaaaatgggaatttgcctaatatagggtggatgaaaagcattacacnaatggagncagnaaacaatc

SEQ ID NO: 7429 - DNA, 362 bp, Homo sapiens
cccttagcgtggtcgcggccgaggtactaaacaggctcttcgagaaaagttttttcttgggctgcctttgtgcagcctaggggcagctcacctgaaccagaagtcccagccagcctcttccggggtctcgacatggtcacgctgcaggggactttagtgcggacgattctggaatcaacggagatacaggaaagaatgctaatgtcctccaaaacccgcgcagagcgagatggaggcaacgagaggcagcctagaacgtctccaacttttgcgaaacacagacgcctaccgtttgagccctcaaatccttccctccgttatctgcgccatttccatctcgcataacctgcccctaaactctt

SEQ ID NO: 7430 - DNA, 468 bp, Homo sapiens
  misc_feature 81, 89, 104, 132, 135, 138, 145, 147, 154, 159, 162, 167,177, 178, 179, 187, 188, 199, 208, 209, 214, 225, 228, 231,233, 253, 262, 271, 272, 273, 284, 286, 289, 292, 307, 317,319, 320, 329, 335, 351, 352, 357, 362, 373, 374, 376: n = A,T,C or G
  misc_feature 381, 382, 385, 388, 393, 396, 406, 407, 418, 424, 428, 432,435, 449, 450, 455, 456, 458: n = A,T,C or G
cccttagcgtggtcgcggccgaggtacttttttttttttttttttttttttttttttttattttttttttttttttttttntttttttngaatttggaaaaaanttttattttggtgggtaacttttaattnttnatnttaaaananaattttntgggnttntcatnattataaggnnncctttttnntaaaatttaancaaatttgnnaattngcttttttcanttntananttttaaacccaattttttanaaatttttnaaaattatnnnttttttaaacnanttntcnaattttgggttaaanaaacaaaatngnntcaaaaacntttatnttaaatataaaaaacnntttanttgantttttttaaanngnaaaanntcngtntcatnatnattcttttannattattttaanattaanaaantttnttntttaaacaaaatannttttnnanaatttttttt

SEQ ID NO: 7431 - DNA, 318 bp, Homo sapiens
  misc_feature 80, 105, 173, 178, 264, 304: n = A,T,C or G
cccttagcgtggtcgcggccgaggtacttttttttttttttttttttttttaagaaaagtatggaaaacttttcatttanaaaagtatttgttcctgtattttanaattcagttttgcatctttgctgtagaattcctgttttgtgttaatgttttttactatgtcttattgngttgngtgcaatgcattgcactggggggatgcacttgagtgccatttctgatactgtcattgtatgactgctgatgctcgtttatggttgntctttgggaagcctattagtgagcctggatggtttttcanaattttaaaaaaaa

SEQ ID NO: 7432 - DNA, 756 bp, Homo sapiens
  misc_feature 464, 495, 552, 581, 584, 585, 598, 638, 649, 650, 658, 659,671, 672, 674, 691, 700, 701, 711, 717, 720, 728, 740: n = A,T,C or G
cccttagcgtggtcgcggccgaggtaccttgatggctgtttgtggtcatacactccgtggaccagtcttgagggatcacagggccaaccagctcagcaaacctctccagaggacagctggggctgcagccaggtagcatgaggggatacggctcgtgctgcgtctcattccgatagtacccaaagttttataaatcaaaagccctaatgataaccatttttagaattcaatcatcactgtagaatcagagtctgtaattcttttcttgattagagtggtaggacactgtaatactgttcctccatgtttccatgcatacaatgttatgtgttactctacactgtaaatgcagtattcaaattcacttgagcccgtgggcctggaagttagagactagcttttaccttattactttcaatgattttatctgagttaagctgataaaatctcttcgcggctgaatncaaaattcttcaaggtatcttctcaagtggnggtctcctatgaaaggatcccttttgaaagaaagggatggctggggtgtttaacaanaaaaggtgcaaggccgggggcttaccgtnctnnttcctaacttggngaaaaaccaagtcccgttccttggtggggaacaatgaagnacaaccttctnnaaaggtannaaaccggggtcnnanaagcctttttggccgtnaaaaaattnnaaccactttngccttngtnttttttgnaaaaacatttgncaaactttttttttat

SEQ ID NO: 7433 - DNA, 995 bp, Homo sapiens
  misc_feature 4, 28, 44, 61, 96, 115, 135, 147, 176, 221, 230, 233, 250,251, 256, 260, 269, 274, 291, 304, 308, 349, 355, 362, 385,442, 444, 468, 471, 481, 497, 509, 548, 561, 563, 585, 588,601, 606, 622, 636, 654, 699, 705, 744, 747, 753, 786: n = A,T,C or G
  misc_feature 797, 835, 877, 879, 910, 914, 924: n = A,T,C or G
ttanttaaaggggggggcccggaaaaanttttggggggggcccnccctttcctttaaaggnaaattgggcccaattgggccctttcccggaaaggncccgggggccccccggccncccaaggtttgggtttgggnaaattggggggnaaattaaatttccctttgggcccaaaggnaaaaaatttttcccgggcccccccctttttttttcccgcaaggtnccggggggnccncccgggccccccccggnnggggncccnaaggggggnttaancccgggcccgggggggngggaaagggtttncaangggggggggtaaagggtttaatggtttaaaaaaaaatttcnttgggnaattggngggaaaggaaaaaattttttccnaacccttttttttggtgggggggcaaggggggggggaaaaataaaaaaaaggcaaananttaaggtttaatttgggccaaaanggngaaccccccntttaaattttgggggncctttttttttnaaaatttttaaatttaaccccctttgggaaaaaaaaccnccaaaaaaaaaantnggggggaatttaaatttttctnttnttaaaagggtttnccttnctttccctttgggccnaatttgggtttggnaaagggaaattttttttnggggggttggggtttaaaaacccaaaaatggggaaattaaagggnaaaaancctttaaatttaaaaaatttaaattaaattaaacccaanggntttaantttaatttgggggggaaaaaagggggggaattnatgggaaattnaattttaaagggtttgggcccttttttttggggttttnccaattttttttttaaaaaatttttggcccaaaaaaaaggancntttggcccccaaaaaaaaaaaattaaaaggntttntgggaaaaangggcccttttaaaaatttttaaccctttttgggaacctttttgggcccctttttgggaattttttttaatt

SEQ ID NO: 7434 - DNA, 202 bp, Homo sapiens
  misc_feature 109, 123, 128, 131, 134, 149, 152, 165, 189: n = A,T,C or G
ccctttcgagcggccgcccgggcaggtacttggaccaagaaaaagaagatggaaaatatcacaagcaaattaaaatagaagaggatgcaacaggttccagttaataagncaactttttacgcngaaanacnttnaattgaagacaagtntancattcaagttttntgggaaatacgcaaatgaattccntataataatttaa

SEQ ID NO: 7435 - DNA, 948 bp, Homo sapiens
  misc_feature 2, 17, 60, 62, 83, 85, 98, 107, 111, 113, 126, 144, 151,178, 188, 195, 201, 205, 207, 230, 243, 255, 308, 388, 397,400, 416, 424, 602, 617, 630, 750, 753, 871, 933: n = A,T,C or G
tnacccggaacttcacnttattaaggggggggcccggaaaattttgggggggcccccccntnctttaagaaatgggcccaatngnccttcgggaaggnccggggccnccgncnccaaggttgggtnggaaatgggggaattaanttccttnggccaaggaaaaattttccgccccccnttttttccgnaaggccnggggcnccgncnccccggggggccagggggtttanccccaaccccatnggccccccaagnccttaaaatttttttggttaaatttttttttaaaggttgggaaaaggggccanggggggaaattttccttcccaattggtttgggaattccaaggggccttggggttccttccggaaaaacctttcccttggnaaccctttnccnaaaattggaaatttcntggccccnttggggttttttggaaccccctttccccccaaaaaaaaggttgggccttgggaaggaaatttaaaccaaagggggcccaattgggaaaggccccccaatttccaaccgggccccccccaaggcccccaagggtttttccttttttccaaaaatttttcccttttaaaccaaagggttnccccccctttttttnccccaaattgggnttcccaaatttttaaaaaaaagggaaaaaacccttccaaacccaaaccttttggggggaaagggaaaagggaaaaaaaaattccctttttaaattccaaaaaaaattggggttttttaanggnaaaaaattttggggttgggggggtttaaaaaaaaaggccctttcctttccctttggggtttttggggttttttcccccccaaattttttttttaacccaattttgggaaaaaaaaagngaaatttgggtttgggaaaaaaaccaaagggtttccaacccaaattttttggggttaaaagnaaaaaaaaaaaaaaa

SEQ ID NO: 7436 - DNA, 367 bp, Homo sapiens
ccctttcgagcggccgcccgggcaggtacggtcacgtgagatggtaaagaaggaagggcaagttgcagggcagatctaaaggtgtctgctttccatatgttaagttggagatgactcctgctcatccaagcaaagatgccaagtgggctgtggaatatgcaagtctggagctcagggagagtttaggcttacacatgagaacttgggatgcagctgtgcttggtggctcatgcctggaatcccaacactttgggaggccaagttgggaggatcacttgagcccaggagtttgagaccggcttgggcaacatagggatatcccatctctatataaagtgtacctcggccgcgaccacgctaagggcga

SEQ ID NO: 7437 - DNA, 173 bp, Homo sapiens
ccctttcgagcggccgcccgggcaggtacctaaaagtcagaaaccacattttctcctcagaagtagggaccagctttcttacctgtttaaataaaccaaagtataccgtgtgaaccaaacaatctcttttcaaaacagggtgctcctcctggcttctggcttccataagaaga

SEQ ID NO: 7438 - DNA, 310 bp, Homo sapiens
  misc_feature 294: n = A,T,C or G
ccctttcgagcggccgcccgggcaggtacccagtttggctctttcccatccctgatctgaaaaaggaactccactgactgataaaattcttcatcgctattagggcaaaatctactccccaaggcactgtgtgcatggtcccaagatggaaattctccacgtgttacttcctaggcagtagcaccactcaaaagaatccaggcctgcgcctcctcggtaagatgcaccacgctgaccgtgatgggtggcggcaggtcaggacccggctcactgaaatgcaaacatacatgagcnctcctgctcattttta

SEQ ID NO: 7439 - DNA, 245 bp, Homo sapiens
  misc_feature 15, 22, 123, 124, 140, 147, 156, 167, 174, 178, 180, 182,185, 193, 199, 201, 211, 213, 229: n = A,T,C or G
ctcgagccggccgcnagtgtgnatggatatctgcagaattcgccctttcgagcggccgcccgggcaggtacttttttttttttttttttttttttttttttttcttttttttttttttttttnnaaaggggaaaaacttnttttatntaaaaattntcccaactccnacccctngggntntnagngttgcatntcccananaggtaaagtngngccattttcccacggntttaaacaaagcaaaa

SEQ ID NO: 7440 - DNA, 156 bp, Homo sapiens
ccctttcgagcggccgcccgggcaggtacttttttttttttttttttggtataagaactaacatcaaaaggcctgtttaaagggaaaggttaatgggctacttaatattatgaacaaaacaaaaaaacaaggctgccacagtggaatattatctta

SEQ ID NO: 7441 - DNA, 480 bp, Homo sapiens
  misc_feature 127, 197, 211, 212, 240, 241, 248, 252, 258, 273, 277, 278,290, 295, 298, 310, 312, 315, 321, 325, 342, 344, 353, 355,358, 373, 379, 394, 397, 417, 421, 427, 433, 447, 451, 460,463: n = A,T,C or G
ccctttcgagcggccgcccgggcaggtacattgatgggctggagagcagggtggcagcctgttctgcacagaaccaagaattacagaaaaaagtccaggagctggagaggcacaacatctccttggnagctcagctcccgccagctgcagacgcctaattgccttcaaaacttccaacaaaagctgccccagaccangcaacattgtgttnntgaatatctttctttattttccccttgnnctcctcnatanatcccntgccccaagcctttnagtnnccattttccagnagttncgnacccagcaaagncntgngggttnttgnagggatttaacccaggncncttcaccgngnagntggaacttttcccanaaaaanttaatttctcttggnacncccaccaaagggggaaccgntaanaaccanggaaanaaattcctttgggnaggnaccccccanagnttggggttaagggaagg

SEQ ID NO: 7442 - DNA, 400 bp, Homo sapiens
  misc_feature 17, 20, 26, 27, 29, 42, 52, 59, 152, 351: n = A,T,C or G
gccggagatgggatggntgnagagcnnancccttagcgtggncgcggccggngtacganctcaggctcactgcaacctctccctcccgggttcaagtgattctcgtgcctcagcctcttgagtagctgggattacaggcgcgtgccactgcngtccggctaattttttgtatttttagtagagatggggtttcaccattgttgggccaggctgatctcaaactcctgacctcatgtggtccacccaccttggcctcccaaagtgctgggattacaggcgttgagccaccacgctcagcctacaagcaattttttaaaaactgacacctattactgataaaattctctgttntaaaatcctattttactattttaaagataaagtattagtttttttttaa

SEQ ID NO: 7443 - DNA, 307 bp, Homo sapiens
cccttagcgtggtcgcggccgaggtacacaaggtgaaactgctccagtttttctcgtagcagggtcagcaggaaagcaagtggtgcccctggtcccatctcacacaggtgagactgcaccgagaggtaacgtggccctcacagcccaccacgcctggccttcgcccaattctgaaacttcgtaggatagagctggaaagtgccacatggtgaagcgagatccagctgtctgggtggatgtcggagtccataggctgagcagagatggttcttagtgaggttctcgctgccagttgacggtgaaatca

SEQ ID NO: 7444 - DNA, 352 bp, Homo sapiens
cccttagcgtggtcgcggccgaggtacctatggaactatataatggaattactcctgtgccacttagtgggttgatacatattattggccatccatatggagaaaaaaagcagattgatgcttgtgctgtgatccctcagggtcagcgagcaaagaaatgtcaggaacgtgttcagtctaaaaaagcagaaagtccagagtatgtccatatgtatactcaaagaagtttccagaaaatagttcacaaccctgatgtgattacctatgacactgaatttttctttggggcttccggctcccctgtgttttgattcaaaaagggttcatttgggtgggccatggcatgcctgct

SEQ ID NO: 7445 - DNA, 832 bp, Homo sapiens
  misc_feature 62, 84, 506, 523, 532, 534, 562, 565, 569, 589, 591, 597,608, 611, 657, 676, 677, 720, 738, 756, 779, 784, 811: n = A,T,C or G
cgccagtgtgatgggatatctgcagaattcgcccttagcgtggtcgcggccgagatactttntttttttttttttttttttttnggggggcaaagcctttaattagaatgtttgtattttttacatcatgcataacttcacatttgtgattaattagtaattatttcaatacttgtaagctcatctgcctcagatttaatcataatacatgaattaaattaatcaaattaaggaacagcaatttagaaagaaacacactttaaaaaatcaaaattctcaattcaggcagtctgtttctatcatttggtattctactcctttaaaaatttcatattgcccaacaaaaagtggttatttttactgtttttggagatgactgaacagatgaaggcatcagatgccttcatcggctggtattttgcctaagatctatttaagataaccttttcttatattttttacttaaaattgggcataatcgtatcattcaagaataaagtctgggntatttcttttgataaanaactgaatntngcccggccccaatggctcacgccctgtnatnccanccacttttgggagacccgangnggggtngatcacaaggncanggagaaccgaaaccatcctggctaacacggggaaacccctgctttncttaaaattccaaaaattnncccggccttggtggcggcccccctaattccacttccttgggangcttaagcaaggaaaaangcgtgaaccccgggaggngggggtgcatgaacccaaaatgnccctngcctccaacttggggaaaaaacaagantttttaaaaaaaaaaaaaagg

SEQ ID NO: 7446 - DNA, 503 bp, Homo sapiens
cccttagcgtggtcgcggccgaggtaccgcccctgacagccacaggtggacactagtgcgagcccgtcgttctgccattggggctaactcaagctcaaatggcaattccaatcaagcggcaattgttgctccaagtgctatgttgagaggttctgaggctgtgtctaggctcagtaggaaagatacgatgctcaatatataatgttggtcttggtcttggaggtggtagatggtggtaagtggtagtataatatttcggcttctggctcaatgggaaaacaaaacatagcacactctactgcagagcagggcaggaattctatggattataaatattatgttctggagaattcagttccaggaagttcaagtgggactgttttaagaaaaggaaaaaaaattgagacgtgaggacattgaagaaaaaaagagtaaatcatttgatcaaaaaggatgcatttattcttaaaggatgccaatgttccacaagtgggagaagggca

SEQ ID NO: 7447 - DNA, 348 bp, Homo sapiens
  misc_feature 306, 342: n = A,T,C or G
ccctttcgagcggccgcccgggcaggtactcagctcagggagaatgctgttgaaagacttgattcattaatacaagcgactcacgttgcaatgagaggcaactccgattacgctgatcttagtgatggctggctcgaaataatacgtgtagatgcccctgatccaggtgcagacccgctggctagcagtgtgaacggcatgtgcctggatattcctgctcacctgagcatccgcatcctcatctcgggatgctggccgccggtggaaggggattacttcagccagggaggatactccgggtgtagnagacaaaggttctccctcagtggaacttgggccagntaccct

SEQ ID NO: 7448 - DNA, 279 bp, Homo sapiens
  misc_feature 104, 125, 128, 133, 138, 153, 157, 164, 178, 179, 182, 197,264: n = A,T,C or G
cagcgtggtcgcggccgaggtactttttttttttttttttttttttttgcttcatcagttttattggtcatatatccagaattcatcatatataaaattttttnaaaaataattgagctttttancangaaanatgtnttacaaaggtcaagntttngacatgnaccaaaatactttnnacncaaggaaatactcantttttttacaaaatacattatagttttcttatagatacctgggaataacagaaaaataaagtctgtntacatcctacgaaca

SEQ ID NO: 7449 - DNA, 979 bp, Homo sapiens
  misc_feature 81, 85, 112, 171, 194, 217, 393, 424, 466, 469, 500, 688,766, 863: n = A,T,C or G
ttggttaattaacccgaactttcactttatttaaggggggggcccggaaaattttgggggggcccccctttcctttaaagnaatnggcccaatgggcccttccgggaaaggncccggggccccccggccccaaggttgggttgggaaatgggggaatttaaattccttggnccaaggaaaaattttccgggccnccctttttttcccggaagggccnggggcccccggcccccccggggggcccagggggtttaacccggcccgggggggggggaacccaattccaaaaattgggcccaaggaaaggtttccccccctttcttgggttgggaaaaattttttaaaccaaaaaccaaccccccccaaaaaccaacccccccaatttggaaaggntttttccaaaggtttcccctttttaaaaggnaaaaaggggggaaaaaaaaaattttggggaaggccccaaaanggnttaatttttttaaaaattttggggggttttngggggaacccaatttttgggccaatttaaaaaaaaaagggaaaggggggttcccccaatttaaatttcccccaagggggccctttaaaaaccctttcctttaaagggaaaaaaaaaatttttttttttaaattttttcctttccaaaaaaaaaccctttttaaaaggtttttttggggggcccccttnccctttttttttttttttcccttttttcctttggggtttcccaaggggaaagggggggaaacccccaaattttttccntttttaaaggggttgggggggcccaaacccttggggggggggggggaaaaaaaaaaatttcctttttttgggggggcccaaccccccccccaaaggnaaaaaaagggaaaaaatttttttcccaaaaacccttttggggcccggcccctttccaaaaccttttgggccaaaaaaaaaaaaaatttaaccccaaaaatttggggggggccccct

SEQ ID NO: 7450 - DNA, 266 bp, Homo sapiens
  misc_feature 64, 192, 233, 237, 263: n = A,T,C or G
ccctttcgagcggccgcccgggcaggtacgcgggggtcgctccggaagcccgcgagttcccggnaagccttggtaatccagattcggctaggaaaagacaagctttccagagaatgtttcagagaaagttacgtggagcgtgggcgtttcgcagactcctaagtggtctggaacctaaccttgcagtgtctntgagctttttggcaagtatgaaggcaagggattttaacaanaaanaaactttgggaaaccaaaaaaatttnccc

SEQ ID NO: 7451 - DNA, 595 bp, Homo sapiens
  misc_feature 43, 58, 76, 101, 106, 110, 114, 117, 120, 130, 140, 151,158, 160, 163, 169, 182, 194, 195, 200, 203, 214, 218, 224,236, 249, 251, 256, 262, 271, 273, 279, 287, 289, 296, 308,313, 315, 319, 335, 342, 346, 348, 355, 357, 374, 375: n = A,T,C or G
  misc_feature 385, 390, 404, 405, 406, 410, 425, 428, 441, 445, 461, 462,463, 479, 481, 484, 490, 502, 505, 514, 521, 537, 548, 557: n = A,T,C or G
ccctttcgagcggccgcccgggcaggtactttgagggattggnggtcttgggcccctnctggcccaggagatgtangaatacgggttggccaagcactggngaacnttcncaanttnccntttgaatganacttcgacancaagtatgttngaacagncnccntgttcntccatttgctttntacttggaaggnnacatnatntccaaaattgnaatnggcctngtattggagtgnccaagtattctcnancaganttatgnccagtcagncntttaanttaccctncnaatatangccctcaactcncattntnttantctctgaccatgtccnaattggngttngnaataacnangcgtaacagggtttttnnatttaaaagnggtanccgaggtcctgttnnntctnttggccgcaaggggntanttaatttttttcnttgnaaccaaccatgtgggnnnaacctttgggaattgngngcnctttgngtaactaaaacnccnaaccacaancaccttnttggataatattccantttccccgganggaatcttntccttggaacccacttggaaaatgggggaagggggaag

SEQ ID NO: 7452 - DNA, 136 bp, Homo sapiens
  misc_feature 51, 89, 108, 112: n = A,T,C or G
cccttagcgtggtcgcggccgaggtactttttttttttttttttttttttnggggacagttgttttatttttttaagttacaataaaangctctcaagtcctctgaantgtnctaacaaattcaaaactttaattt

SEQ ID NO: 7453 - DNA, 194 bp, Homo sapiens
ccctttcgagcggccgcccgggcaggtacgcgggggctctttctacctaataaatacgaagggctgtagaagctcagggcccttgctcactagaaggagccccctgaccccttcttccaaaaatactttttgtctttgtcttcgtttctgcatccatcccccttcgttcactcccataacaaccaacaagcgac

SEQ ID NO: 7454 - DNA, 492 bp, Homo sapiens
cccttagcgtggtcgcggccgaggtacagggaaggcctttcgggcagggcacatggttcactgccccatgacgtgataccttgaagcacaccattacagacaagtgggcccccagaatcacccgagcaggtgcttttgccccctgtccagcgtccagcacacagcatgaacttggtcaccttctgagggtgaacttgcgcacacacgtcattggaagtaacatggaggtccacacactgaagtttctttggggtcaagacatctggcccaggcgcactgctgctgctgctgctgctttggtcttcttagttttgttctttttgtctctcttcttcaacccatccatgttagctctaaggaggtttgaataagccatctgaaacttattcacttcttggagctcaccacaagtgctgatcttcttcttcccatcggtagctcttaacagacacttgttgtttgcgggctcaaagcccttcacaagtacctgcc

SEQ ID NO: 7455 - DNA, 274 bp, Homo sapiens
  misc_feature 53, 116, 119, 120, 124, 125, 137, 142, 145, 148, 189, 199,201, 202: n = A,T,C or G
cccttagcgtggtcgcggccgaggtacatgccacactactacccttcctgctnttgagcgcacacctaccctgatgatgcagccttcactggatatcaaaccatttatgtcttttncanntggnncaggaatttttngcctnttnggncttttttccaaaatttttaaacacaaattgggatcactgtnccaaaaaaangnnggtttatttaaccataacatttacgggtagttatctcattaccccccaaagtaagaaaacaaagttatttct

SEQ ID NO: 7456 - DNA, 318 bp, Homo sapiens
  misc_feature 23, 150, 266, 287, 288, 297, 305, 307: n = A,T,C or G
cccttagcgtggtcgcggccgangtacgcgggggcttacacagtatggccggcgacattagctagcagctcgctctactctctctaacgggaaagcagcggaatacaagagactgaactgtatctgcctctattttccaaaaagactcangttcaactttcgctcacacaaagcccgggaaaattttatcagtcctttttttaaaaaaagttaatataaaattattagcaataaaaaaaaaggaaccctgaactttagtaacacantcttgggaacaattccgcagnnggcggcggnagtcggcngngagaaagaagg

SEQ ID NO: 7457 - DNA, 395 bp, Homo sapiens
  misc_feature 373, 374: n = A,T,C or G
cccttagcgtggtcgcggcccgaggtactgtttccaactgtctacgttccagtgcagaatctttgctaaaaaaaatttggcaatagtgtgcacaggaaaactgaatcaaacctggaacatcactgctttcttgaaatggaactgacaagcaattaactggagaataagtgaggggaatggagcagtagtattctttaacttaatttgccatttaagagagcacttggaatctgaagaaagtctatccctaccaaggaaacggagtcaaattgcaattaagattaactttggttatatggaagcaagaatcatgcttctcatcatcaattgcgtctctttggtagccaataattccatctgtaatcatggcaannacttaagtatttgccaatgtt

SEQ ID NO: 7458 - DNA, 290 bp, Homo sapiens
ccctttcgagcggccgcccgggcaggtaccgggtcggagattatgtctactttgagaattcctccagcaacccatacctaataagaaggatagaagaactcaacaagactgcaagtggcaacgcggaagcaaaagtagtatgcttttatagacgacgtgatatttccaacacacttataatgctcgcagataagcatgctaaagaaattgaggaagaatctgaaacaacagttgaggctgacttgaccgataagcagaaacatcagttgaaacatagggaactcttttcg

SEQ ID NO: 7459 - DNA, 126 bp, Homo sapiens
  misc_feature 42, 45, 49, 88, 91, 96: n = A,T,C or G
tagggcgaattgggccctctagtatgcatgctcgagccggcncgncagntgtgatggatatctgcagtaattcgccctttcgagcggncgnccggncaggtactaaattaataaattaattccact

SEQ ID NO: 7460 - DNA, 353 bp, Homo sapiens
ccctttcgagcggccgcccgggcaggtaccatggaaggcacagaaatcgagcaaggaagaaaatattagttattttgatctacatctttttctaaagaaaagtggagcttgcctccagttcaattcacaagagcattttccctcccatgcccaccttttcttgtggctgtcgctaggaaggatgcagaggctgtgtggtttaccaaatgccttaacttagcagtgaatgacaactgtcaaacacatgttgagggaaaatttttactgattcacaaaaaggaagacagtttgcccactcttagtggcacaaatcaaagctgcatgcactacattatccaaattagtcgtaacca

SEQ ID NO: 7461 - DNA, 398 bp, Homo sapiens
  misc_feature 1, 11, 22, 23, 28, 40, 55, 72, 82, 120, 137, 145, 147, 201,221, 242, 259, 262, 267, 268, 280, 288, 289, 290, 297, 299,303, 317, 320, 322, 360, 363, 366, 372, 376: n = A,T,C or G
nccatagctcngagcggccgcnnttggngccctatatctngccattatctcccanctcggccagcgactcgnccatggcatngtccttcaggaattgccccctttgggtagccggccccntccccggttcaggaggnctgacatnanaggcattgatcctagatgacaaatggtctcaataagaacttgaattaaaaaatntttgatttaaacaacttggnaaatgaaccgggcaaaccaancttttggtttttttctngtnaaagnngaatacctgaanttttttgnnngaacctnantttntttttgggggcccnggngntaaagccaatttttttcccattttggttgggaaacccnttnagnaggaanaaantggcccaaaaaaattttttttt

SEQ ID NO: 7462 - DNA, 381 bp, Homo sapiens
  misc_feature 79, 100, 105, 111, 121, 127, 142, 167, 170, 184, 196, 212,223, 229, 231, 240, 264, 268, 274, 280, 281, 292, 294, 311,320, 324, 326, 365, 374: n = A,T,C or G
cccttagcgtggtcgcggccgaggtacgaggggcaactgatatatctttagggtgagttacatgaggcctgtttcagcntgaggcagcatcacccgcctnaacancgggtnttttggaaangaatanctgggtttttcctcnatttaacattgaagtaggccgtggntcngggatccaatttangttcccttcttntaaaagctagggaaangggccacgggnccaagncnttacctttntactccatggttgcaaccatctgngtgnaataantttttnnttccttttttncncccaaaaaaattaaaancaaaaattnattngntgaatttcttacctggcacaagcccaaggtggaatatcnttattccanaaaattt

SEQ ID NO: 7463 - DNA, 347 bp, Homo sapiens
ccctttcgagcggccgcccgggcaggactttataatgagtccacctctgaaatttttctttctgaattctatctcactttattatttcagtgataccaaaagacatcaatgtcacagtagtgatatacttatgtattagttatggaaattccacaggagttcaaggtcattatcactataattattttcctgactaaagccataaaggtgatttaggcaattattgtcatcttagctagtcctgttttatagcttatattcagcagacagctgtatgggaaggtaaatatgttgacaatgtccacaaagcctttatttatttatttatttgatctctgcatgtcctc

SEQ ID NO: 7464 - DNA, 250 bp, Homo sapiens
  misc_feature 86, 87, 106, 236: n = A,T,C or G
ccctttcgagcggccgcccgggcaggtacgcagggagacagtggcctcgagaccctgcctgcctgaggaggcctcggttggatgcnnaaggagctgcagcatccangggacaagatgccaactggcaagcagctagctgacattggctataagaccttctctacctccatgatgcttctcactgtgtatggggggtacaaggctaagcattttaactttatactggaaaaaaaatnaaacaaaggggagg

SEQ ID NO: 7465 - DNA, 268 bp, Homo sapiens
ccctttcgagcggccgcccgggcaggtacaagccctgagccaggttataatcgttggtaaacatggcaaggtgtcctgccaaaagattgtagtcctctattccctttatttgttccaaggacatcactatgccaacatttccaattctccgataaacacggattgcaaactccacttccatgtgatgtagacaagctctggtcaactcattccaggcagcctcatcattcagaatcctgcacatttcccaagcatcagaaaacctctt

SEQ ID NO: 7466 - DNA, 382 bp, Homo sapiens
  misc_feature 300: n = A,T,C or G
ccctttcgagcggccgcccgggcaggtacaccccatggaaacatgcaataagatcacatcgatccagaggctggctcaagtttgactgaggggaaacggagggaaggctgttcctagcacacaatctcagcagaggttgaggtggtgggggatttctttcttctcatatgacgctaccgtcggtgacttcttactaggagaccactgagcactgaatcaaggtttctaatatgtttcaaatcaagattttagagtgtattttcttgtgggcaatagaagttataaaatggtaaccctatngattttcctcatataatggagatcttcattaaaggtcccttggagcttttttaagacttttaaacaaaatttcaagcttacc

SEQ ID NO: 7467 - DNA, 524 bp, Homo sapiens
  misc_feature 54, 67, 96, 106, 112, 117, 118, 124, 128, 141, 143, 150,156, 172, 174, 177, 179, 184, 190, 192, 195, 202, 205, 212,222, 229, 237, 244, 256, 272, 282, 290, 298, 306, 312, 313,321, 332, 336, 341, 348, 355, 368, 372, 373, 377, 379: n = A,T,C or G
  misc_feature 382, 385, 386, 389, 395, 400, 401, 411, 417, 422, 424, 426,432, 437, 459, 464, 467, 474, 482, 488, 489, 503: n = A,T,C or G
cccttagcgtggtcgcggcccgaggtactttttttttttttttttttttttttnctttttttttttnctttttttttttttttttttttttttttntttttttggnaaaagngtttnngttttntttncacaaaaaatggncnttttttntgaggntttttcccaaaaaaananggncntcccncatgtntnttnttggggngtngataaanaaaagttttnatcaaanaaactgcnaattacnctgtcttttttntaaaaaaaacacaaanactccttaanggtccttnttaaaaanatttttgnaggcannttttttgntaaaaaaaatncccnttttncattttngaaaaancagggggttcaantatnntttngnaanccnnaanaaaccnttttnncaaaaaaaancctttnttttntngngaaatnatggnccccccaattgggggggccacnttttngtntttttangaaaaaanaaattnngaaaaatttttttnaaaatttttaaaatttccaaa

SEQ ID NO: 7468 - DNA, 581 bp, Homo sapiens
cccttagcgtggtcgcggccgaggtacaaatgtgcattaacaattcagtgacgtagctgtggatctctggatggctatgtaagctgtgagaaagtccccactggctttgcacttgctgcgcaccagaggtgaccatccaggcggtatcaacctgaagagggggtgaatcccagcagctgctcgatgggcttaaaccgccactcgtcagcctccagctcttctaccaaaccagctagtttttccatccgagcaacttgctgatcatgtttcacctgtttaagcgtggatgccacttgatagctaaaaacagattcgcagaggaatctctcagagccatctcagcggctttagcactttcccctacagccccacccccaggaccagcctgagtggctgcgctcaccacgacgaggaccgcggcgtgttccccgcgtactgtgatggggtcatcaaattattaatctgaaaatagcaacccagaatgtaaaaaagaaaaaactggggggaaaaagaccaggtctacaagtgatagagcaaagcatcaaagaatctttaaggaaggtttaaaaaaaaaaaaaaaa

SEQ ID NO: 7469 - DNA, 475 bp, Homo sapiens
  misc_feature 307, 457: n = A,T,C or G
atggatatctgcagaattcgccctttcgagcggccgcccgggcaggtacgcggggaggataccatgatgggtgctggggtggcagctgtgtggtgcagccctgttggcagtgggcatctgggtgtcaatcgatggggcatcctttctgaagatcttcgggccactgtcgtccagtgccatgcagtttgtcaacgtgggctacttcctcatcgcagccggcgttgtggtctttgctcttggtttcctggactgctatggtgctaagactgagagcaagtgtgccctcgtgacggtgtgtgaaacccanctccacaggctgatgaccaagagtcccctcgcctttgacaccaggccctggggattcccaaaccctgctttggacccccctaggctcaagcttctgtctcacttttccgggggggggattagggcaaggagggcatgaagggactgtctnttcctaaaacccaaaccc

SEQ ID NO: 7470 - DNA, 198 bp, Homo sapiens
  misc_feature 87, 88, 90, 93, 103, 111, 135, 156, 165, 168, 171, 173, 181,182, 191: n = A,T,C or G
ccctttcgagcggccgcccgggcaggtacttttttttttttttttttttttttctttttttttttttttttttttttttttttggannanatnaaacactttntttattanagcaattgttttaacgtcccttanaaccaaaattatccatatttnttgcaaaancancantntcaaaaanngctttaaangcaatta

SEQ ID NO: 7471 - DNA, 558 bp, Homo sapiens
  misc_feature 496: n = A,T,C or G
cccttagcgtggtcgcggccgaggtacccatggtgcatctttcctggaatatggcacgaaatatcaaagtctcagatccaaagctttttgaaatgattaagtattgtcttttgaagattctgaagcaatatcagacattgagagaagctcttgttgcagcaggaaaagaggttatatggcatgggcggacaaatgatgaaccagctcattactgtagcatttgtgaggtggaggtttttaatctgctttttgtcactaatgaaagctatactcaaaaaacctacatagtaccagtcaaacgtcactcagatgcagtcttcactgacaactatacccgccttagaaaacaaatggctgtaaagaaatatttgaactcaattctgaatggaaagaggagcagtgagggagaatctcccgactttccaaaagagttagaaaaatgatgaaaaagacctttggagcaaagctgaatgacaaacttcccagtgaattcttnaagggaaaatgatacgccaccataaattaaattttgagttctaccattaagtaatttcaaga

SEQ ID NO: 7472 - DNA, 340 bp, Homo sapiens
  misc_feature 227, 309, 310, 334: n = A,T,C or G
ccctttcgacggccgcccgggcaggtacaactacaatctcacagaagtccactaaagttcaccaaaaagctgacttacttcagctctcatgaggccaataattttgataaaggtatctggcaggaaaatgattccacaataacaaatttaaagatacctagaacattgaaaaaaatagcaaattaaaataactggcttaatttccaagaacttatttcattttttgntactcatctagaaggtcaggagtgtggctaaaggcagtttctgatggggttatgagcttacaaagtgtttctaaatccttanngcagacaccctcccttttggggcnaagtac

SEQ ID NO: 7473 - DNA, 346 bp, Homo sapiens
  misc_feature 17: n = A,T,C or G
ccctttcgagcggccgnccgggcaggtacattatagcacagtgatcatcattccattcatacactcaaataactgctgcttctgatcactgaaaactagattcaaagtcattgctcaacaagctgatactacaaatcccttatattaacaggtagtttaaatgtggaaataaggcaaagcatacttgctagtcaccccgcgagctttataaatcaaaaattgattcacatgaccatattaccataatcaccaattttaacagtctcctacatattttctatatcacttttccttgattacaaaatgtcagtaataagaacacgctcttaatataacagaatattta

SEQ ID NO: 7474 - DNA, 296 bp, Homo sapiens
ccctttcgagcggccgcccgggcaggtacgcgggggcaggcgcacttcctgaagctgaaggtcagcatagacaaagggcctcagaatcgcgcaggcgcaattgtgccctggttcgccaagatgtcgttcccaaagtataagccgtcgagcctgcgcactctgcctgagaccctcgacccagccgaatacaacatatctccggaaacccggcgggcgcaagccgagcggttggccataagagcccagctgaaacgagagtacgagacccgggctgttgagctgttcactgagtgtta

SEQ ID NO: 7475 - DNA, 340 bp, Homo sapiens
cccttagcgtggtcgcggccgaggtaccaagtgctggtgccagcctgttacctgttctcactgaaaagtctggctaatgctcttgtgtagtcacttctgattctgacaatcaatcaatcaatggcctagagcactgactgttaacacaaacgtcactagcaaggtagcaacagctttaagtctaaatacaaagctgttctgtgtgagaattttttaaaaggctacttgtataataacccttgtcatttttaatgtaccccacaaataacacagacaccccatcctatctgtgtcctcaggagaaattgagtgatatgtctccaggcatggccagtattcc

SEQ ID NO: 7476 - DNA, 530 bp, Homo sapiens
  misc_feature 98, 140, 144, 151, 177, 181, 221, 292, 366, 368, 370, 375,423, 454, 465, 468, 479, 481, 485, 499, 517, 518: n = A,T,C or G
ccctttcgagcggccgcccgggcaggtaccgaatgtgagaagagtttcagcaggagctcagctcttattaaacataagagagttcatacggactaaanctataatttatgaatgggcatgagaaaattgaattgcatttngaangatacanatttctatttgataatcaaatggaancgcncctcaagaactgagtctggctttttatcattacctcctcnctaagtttgtggggccccaccgaatttttaaaaactcattccagtagtattggacaaatgccccatttttngaaaaaatttccttggaacccccttcaagtcttttttggggggaaattggttgtaattcttcccttcccaaaanantnggggntgggaattttttttttaattttccacctttcaaaattggggggttttnacctttttccaattttaaaaaaaagccatgncccccccaacnaanggtttaaaccntngggnaaaaaatcctttgnaaaaggaaccccaagggnngggggaaccaaa

SEQ ID NO: 7477 - DNA, 176 bp, Homo sapiens
ccctttcgagcggcccgcccgggcaggtacgcgggggctgcccggacgcggagcgagaggctgagagagtcggagacactatccgcttccatccgtcgcgcagaccctgccggagccgctgccgctatggatgatcgagaggatctggtgtacctcggccgcgaccacgctaaggg

SEQ ID NO: 7478 - DNA, 131 bp, Homo sapiens
  misc_feature 87, 91, 96, 97, 107, 116, 120, 124, 131: n = A,T,C or G
cccttagcgtggtcgcggccgaggtacctatccaggcaaatgcattagatgtttctgaacttcctacacaacccgtgtattcatccnccanacgtnnaaattgtgcnggaaatatnctantatnagctttn

SEQ ID NO: 7479 - DNA, 293 bp, Homo sapiens
ccctttcgagcggccgcccgggcaggtacattatttgattctacttaggatagctttttagcaggatctccttcagaatttttgtcttgactttgaatctttgcctgtttgtctaaacatttgactaacattctgtttgaatttggaagtattctaatacaagatttgaataaagtttatccttaaataaagtttatccttaatatgatggtctcattttattaaaaaggaaatagaactcttaaatatacttggttccatctctcctctgtaatggaggattggggaaagca

SEQ ID NO: 7480 - DNA, 381 bp, Homo sapiens
  misc_feature 69, 275, 282, 312, 314, 319, 336, 350: n = A,T,C or G
ccctttcgagcggccgcccgggcaggtaccggaaggtcagggcttgagtcgtagccagggatagattanggtgagaatagacaggatggaggacacgaggccacaaagccccacaatcccagggccacagcgccagaaggcctagtttgtccagaggaatgaagagatcacaggcatttctgaccacgtctagcataagtgggggatgacctctaaggactcgagccaggagcaggacttgcagcccgaaagtttcagagcccagtttggggcanaccttcnctcctgggagtcccttggttccccccaagntnccccnagttttcaactttcctnctggggacttcctncttccaagaaacccttttttcagttcgcccc

SEQ ID NO: 7481 - DNA, 700 bp, Homo sapiens
  misc_feature 431, 466, 517, 527, 539, 544, 579, 608, 619, 622, 633, 644,658, 669, 680, 686: n = A,T,C or G
ccctttcgagcggcccgcccgggcaggtacttttttttttttttttttttacttaattagaaagtaggctgggcacggtggctcatgcctataatcccagcacttggggaggccgaggatctcctctctggtggatcacttgagggcaggagttaagagaccatcctggccaacatgatgaaaccctgtctctactaaaaatacaaaaagtagctgggcgtggtggcatactcttacaatcccagctacttgggaggctgaggcaggagaatcacttgaacctaggaagcagaggttgcagtgggccaagatcacaccactatactctagcctgggcgacagaggtggggaaaaaagtaggacccctgtcctatattcaggtttttctcacattatatgaaccccatctaaaatctacgttggtaaaaggnagcttaaggtaaattaggtctataacttatttaanaccaatattgggggggaagaagggattttttttttaaaaaatcctacaagnaagggctttntacctttccttntaaangaggaaaaaagggggccaaaaaatttcaaggtgtnaatgtcccctttcttgggaaaaggtttanaaaaaaaaacnagnttaacttttgnaattttacaanttctttttggaagntaaccaaaccntttaaaattcngatgtnaaaaaagaaaaaaa

SEQ ID NO: 7482 - DNA, 123 bp, Homo sapiens
  misc_feature 45, 66: n = A,T,C or G
cccttagcgtggtcgcggccgaggtactactaccttgaccctgcntattaggaaaaataaatttcncttggcattagtgagaaagagcagaggttttctgctgttgttgctgctgtggtggtg

SEQ ID NO: 7483 - DNA, 269 bp, Homo sapiens
  misc_feature 128, 130, 132, 134, 141, 142, 148, 156, 170, 182, 183, 186,188, 193, 194, 197, 198, 199, 202, 213, 221, 224, 225, 246,250, 254, 255, 256, 257, 261, 266: n = A,T,C or G
ccctttcgagcggccgcccgggcaggtacttttttttttttttttttttttttttttttttttttttttttttttttttttttttttttttttttttttttttttttttttttttttttaaaaaaacncnangnggtttanntttccncaaaaaanttaaaaaggggaantttgaaaaatgnnccngnttttnnttnnnggnaaactttttangggggggnaannccctttaaaaaaaaaaacccntttnccgnnnngggnaaaanccc

SEQ ID NO: 7484 - DNA, 729 bp, Homo sapiens
  misc_feature 26, 642: n = A,T,C or G
cccttagcgtggtcgcggcccgaggnactttttttttttttttttttttttgtagagttggggatcttgccttgctaaccaggctggtctcaaacttgtggcttcacgcaatccccacacctcagccttccaaagtgctgggattacaggtgtaagccaccatgcctgatctggaatgctttctaaaaatatgggcattataaacataatactaaagagaaaaaaaggttaaatttcacttcaaggaaattatcaagtctaaatagcatcaagtaaaaatgggccgcttttaggtcatgggcataaaatataccaataagggctatttttcaaattattggttttcaaggttgggaaaaatgcattatgaaaacactcaaaaaggatgctactgggggtttactcatcaagtggcttttggacaccattataaaaatggaccaggaagtaaaccacccaccaggttatgtggattgggggacctcaaagggaaatcccttaaaaatgttagggactgggaaaaacagggtattattgacttatttggtcccaggaatttataatttttctggggatcccaaataaaaaataaattaaagcccatgtggtatttggggtaaaaaattacaggtctttcaagtnctgtccctatggggccttgctcttcctgggctaggaatatttaagcctaaaaaaattaagccaaaaaccagcccatttccccctatt

SEQ ID NO: 7485 - DNA, 773 bp, Homo sapiens
  misc_feature 24, 571, 719, 734, 765: n = A,T,C or G
ccctttcgagcggccgcccgggcnggtacgcgggatgaaaaaaggagagaacactggcatctgttgaaatttggaagttctgaaattatagtatttttaaaaattgactgaagtgtatacacataaagcaggtcttttatccagtgaacaggatgttttgctttagcagcagtgacataaaattccatgttagataagcatatgttacttaccttgttattaaatatttcttgaaaagcaaattttaatggtttaattttatgtggacgtatgttaaattatccaactaccctattgttaagcatttggttttaaaatttttatgctaatataaatgctcaagtaatttaaaatattgaaagcatccctgttggtataaatttctgagtaaatgcattggatcagttggactttgaacgcctttgaaatggctttgctaaaatgctcccgccacaaagttgtaggaaatgggaagaggagtcaactagaggcaagggaattgagagagctgcaactgtaaagggcaagaacaggcagaggtaaaaagatgatggaaggtgtggtgactaanggccaccggtttttgggtgaaatttgagattgtaggccaactgtatttcaagcttctgaacttaggcaaaatattcattgcaaagtcttttgccgtcatattttctcacccaaattacgtttccaccgagaatatttatatattggtnggctatctctgcagnccttgaaggggaagttgggggttactaggcnggggtttg

SEQ ID NO: 7486 - DNA, 203 bp, Homo sapiens
  misc_feature 63: n = A,T,C or G
gatatctgcagaattcgccctttcgagcggccgcccgggcaggtactgctttcaacttaaatnactgaggcatttttactactattctgttaaaatcaggattttagtgcttgcaccaccagatgagaagttaagcagcctttctgtggagagtgagaataattgtgtacctcggccgcgaccacgctaagggcgaattccag

SEQ ID NO: 7487 - DNA, 307 bp, Homo sapiens
ccctttcgagcggccgcccgggcaggtacgcgggggggcagtccagcagctaggcagctgagcagagcgcatctgcctggggccagtgaggagaatgcatctagacagagcttttcgtgctgctgagatctgttacctaaagcaataaaaaatggccagaggatcagtgtccgatgaggaaatgatggagctcagagaagcttttgccaaagttgatactgatggcaatggatacatcagcttcaatgagttgaatgacttgttcaaggctgcttgcttgcctttgcctgggtatagaagtacctcg

SEQ ID NO: 7488 - DNA, 391 bp, Homo sapiens
  misc_feature 327, 355, 362, 365: n = A,T,C or G
cccttagcgtggtcgcggccgaggtaccttgggactgggcctgaggaggaggagttattcatcccgcaagctttcaggccccgaggagaatcttccattcctgtctatttggttatagaaaaggggaaagggacgactttctcaataactacttcaggcgtgacataggggtggcgtgggcaccttggaaaaagaaaaacttaatttttggggtattcttgagagacgggttggtatccatcgtgcccgctgtaagcaggagcatcatctggattgtcaagggagggttaactggtagtttttcaacaaagtagtttttaatggggnattacccaccagggggtaagaaaaccangggaggnacnccccagtggattgaaaaaatggactg

SEQ ID NO: 7489 - DNA, 149 bp, Homo sapiens
  misc_feature 84: n = A,T,C or G
ccctttcgagcggccgcccgggcaggtacttcctggaaatcaattaactgagtcttttgaaacccctagagaagatagggaagnaaaaaaattttggggttcagaacgagcatttaaattagtcagcaaagtcagaatttaaaattggg

SEQ ID NO: 7490 - DNA, 993 bp, Homo sapiens
  misc_feature 1, 21, 25, 82, 91, 99, 110, 121, 136, 146, 165, 177, 190,204, 213, 220, 255, 261, 269, 343, 377, 386, 392, 410, 472,494, 508, 590, 603, 622, 625, 635, 637, 652, 662, 670, 688,703, 705, 715, 722, 738, 763, 784, 793, 870, 896, 945: n = A,T,C or G
  misc_feature 956, 962, 964, 979: n = A,T,C or G
nattaacccgtaacctttccnaacnttaatttaaagggggtgggcccggaaacaattttgggggggggaccccccctttccnttaaagganaaattggncccaaattggnccctttgccgnaaaggacccgggggncccccggccnccaaggtttgggtttgggnaaattggggggnaaattaaattccnttgggcccaagggnaaaaaattnttcccgncccccccctttttaaaggcccgggtttgggggttncccggnccgggggnccccccgggaaaggggggtttaaacccgggggggtggggaaattaaattttttggggggcccggggggaaaccntttttaaaaaagggggggaaccaaatttcccggnaaaaaattnttgggntttttttaaattccaaanggggggaaaaattaaaaaaaagggttaaatttttaaatttgggttgggtttgggtttttttnttccattgggcccggggggccnccccctttgggggnaatttaaaaaattgggcctttgggttaaaggcccaaatttttccaaagggggggggtttcccggaaatttttggggaaaggnttaaaaaaaaaanaaaaaaaaaaattgggttnaangaaagggaantnggggggttttccccnccttggggtnttttgggntatttttttttggggccntttttcctttaaagngntttttttttncaaattntttccaaatttttttngggcccttaaattttttttaaattnttcccttccttttttccattngggggcccnttttttttggacctttttgggtttgggttaaatttgggcccaatttaaattttaaatttaaatttaaaaaaaaaaanccccaaattttaaattttttaaattnttaaattttttaaatttttaaattttaaattttttttttttttaaaggnttttttttccnttaaangnttggggggaaaaaangggggccttttttt

SEQ ID NO: 7491 - DNA, 371 bp, Homo sapiens
  misc_feature 283, 335, 336, 340, 353: n = A,T,C or G
cccttagcgtggtcgcggccgaggtacacataggtataaacaacataaaactgacttggaaacgattcctcagcagcgccccattgatctgccctgccaagtgactggctgccagtgcagggcttacctttatgtcccctttgaatgggtagccagcccattcgctgcaggtgcaaacactttgcttgatcagcacagtgctgcgcctggctttacatgcaatacatgttccaagtgttcaggattccatagctgcttcacttgtgctttgttgggtcaagcnctgcatatgccccattgacacaagtagttgggaaaacctaagacaaggaaannattnggcctcagggaanaaacccagttgggggaca

SEQ ID NO: 7492 - DNA, 445 bp, Homo sapiens
ccctttcgagcggccgcccgggcaggtaccggcttcctctctggggtaggggtagcctcgcccggaagcaaggcctctggaaaaccgcggccctgagttgcaaacaaatgtcagatcccaggtaaggcctgggaagactggaagcggcttacctctgccgcgcgaggatgtggagccagcgcggacaccttcccccagcgactcgcgtgccttcaggcagggactctaggatcttagatattaaggctaagacatactgcatttgtaataccaaagaaaaacgtccctacctcaaaacgtgaaacttacacagaggattttattaaaaagcagattgaagagttcaacataggaaagagacatttagccaacatgatgggagaagatccagaaactttcactcaagaaagatattgacagagctattgcttaccttttcccaagt

SEQ ID NO: 7493 - DNA, 292 bp, Homo sapiens
ccctttcgagcggccgcccgggcaggtactttcttctctcattccgccaaaacagggctcagttattcatttgccaagcttcgtggaggaatgtaggtgacatcaatgtgataaagtctgtgttctgagttgtcagatctcttgaagacaatatttttcatcacttattgtttactaaagctacagccaaaaatattttttttcttattctaaactgagccctatagcaagtgaagggaccagatttcctaattaagggaagttaggtacctcggccgcgaccacgtaaggg

SEQ ID NO: 7494 - DNA, 293 bp, Homo sapiens
ccctttcgagcggccgcccgggcaggtacaagaagagaggatggagacgagggtaggcttcttttcagattatacattctggatcagaaagtctatatcagtgggattttctgaatgacccaggttttttttgtttgtttttgtttgtttgtttgtttgttttagaatttctgtgctttggagctagaaggatatataaatgagaaaactgagaacaaaagaagagacaatatatttttggttgcaagggataagaacctaactccaacaagcaaagcaaaggggggttttat

SEQ ID NO: 7495 - DNA, 355 bp, Homo sapiens
ccctttcgagcggcccgcccgggcaggtactagctaactccaagagatcgttagcagcatcagtccacaaacacttagtggcccacaatatatagagagatagaaaaggtagttataacttgaagcatgtatttaatgcaaataggcacgaaggcacaggtctaaaatactacattgccactgtaagctatacttttaaaatatttattttttttaaagtattttctagtcttttctctctctgtggaatggtgaaagagagatgcccgtgttttgaaagtaagatggatgaaatggaattttttaatttcaaggaaacattcataaaacatagggaatttaaaaactttaagaa

SEQ ID NO: 7496 - DNA, 371 bp, Homo sapiens
  misc_feature 121, 122, 296: n = A,T,C or G
ccctttcgagcggccgcccgggcaggtacgaagatctctatagtaactgtaaaagtttgaagctcacattaacctgtaaacatcagttggtcagggacagttgcaaggcctcctgcaattnntcaaaacagcatttattaaataccgcattacacaccgagtagggctatgtagagaggagtcagattatctacttagatttggcatctacttagatttaacatatactagctgagaaattgtaggcatgttttgatgcaccatttggatttcaaatgttttttccttctgggatnctgctttttttatttttaacaaaaaaaatattttttttcataccaaaatgggtttaaaaaaaggaaaaccaaaaa

SEQ ID NO: 7497 - DNA, 136 bp, Homo sapiens
cgccagtgtgatgggatatctgcagaattcgccctttcgagcggccgcccgggcaggtacaaggacactaagacagtgtagcctgctgacttgagaatgttctgtaaggactggaaacactagaatcttgaagaaa

SEQ ID NO: 7498 - DNA, 222 bp, Homo sapiens
  misc_feature 2, 7, 14, 17, 32, 36, 37, 59, 82, 87, 89, 91, 92, 104, 109,115, 131, 132, 139, 140, 141, 144, 150, 152, 153, 154, 159,160, 166, 169, 170, 171, 200, 202, 214, 219: n = A,T,C or G
gnacacnagagcangcncgagcggccgccagngttnntgaggggggcaaaaaccccccnccccagcggccgcccgggcaggnacagnananntttttaagaagnggggnggggancccccaaaaaaaaacnnaaaccannnaangggcanannngaacnnagagcnggnnngcctttttttaaaaaaaaatttttttttnangggggggggggnccccncaa

SEQ ID NO: 7499 - DNA, 275 bp, Homo sapiens
  misc_feature 126, 192, 261, 267: n = A,T,C or G
aattcgcccttagcgtggtcgcggccgaggtacccactcagagaagaccaacaggaccctgagctatcggactggcttgaagatcaccagccttaccgaggttgtgtgtgggttaagacttgggcnaaccggggcaactcttggccgggctgtcacctatttcccgaaagcccgttacctcgaatgcatttnctgtggctcatcagacatgagctgtgagaggggccggcaccagagcctgcagtgccgtcagtcctgaanaacagngcctggat

SEQ ID NO: 7500 - DNA, 161 bp, Homo sapiens
  misc_feature 37, 39, 40, 57, 62, 78, 94, 104, 105, 111: n = A,T,C or G
ccctttcgagcggccgcccgggcaggtactcaactgngnntcaaaaataccggtttngcctntttggttacatgtggncgagcatggatgtcangattattttnnaactanattattcaatgcagtgatatatttcttatacttaatactttatgactaca

SEQ ID NO: 7501 - DNA, 370 bp, Homo sapiens
cccttagcgtggtcgcggccgaggtacctacagaactgctctgtgtcagacagggtcagccatttactcattactttggaaagggataagaggaagaagtcacggaagccacctgcttctcagtgtgacactactgtgtccctccaaatcctccataaagtcttccagcaattcaaaatgctcagcatgaatccacttcttttagaagtgagtgaaggtgctgaggtatacatcacggttccacgggggaatgagtacattcttctagaaccaggttcatttttccagttttgtagaaaaataagatgttccagccaccttttacttaactgtctagtcttttaagaccaatcagtattgttccctggga

SEQ ID NO: 7502 - DNA, 341 bp, Homo sapiens
ccctttcgagcggccgcccgggcaggtactggagatgcaggttgacacgggcttgagttccaaggtgaaaaaactggggaggctgtgaaggaagagctgcattaaggagggtgaggagcgtgtggttctgtatcatggcagccccaatggatccaggggatgcctccaaaaaatacatgcttcccttcccttaatctgtacgcgggaggcattgaggcagccagcgcaggggcttctgctgagggggcaggccggagcttgaggaaacccgcagataagtttttttctctttgaaagatagagattaaatacaactacttaaaaatatagtcaataggttt

SEQ ID NO: 7503 - DNA, 645 bp, Homo sapiens
  misc_feature 458, 476, 537, 564, 591, 592, 615, 620, 632: n = A,T,C or G
ccctttcgagcggcccgcccgggcaggtacttggtctgtgaaggaagtggcatcatatcagccattacagcgaaaactcttcactgcagcggttcagctgtgaagccagagggtgtgctggtttatagcacgtgcgctataacactggccgaaaatgaagaacaggttgcctgggccctgacaaaatttccttgccttcagcttcagccccaggaaccgcagattggaggagaaggaatgaggggagctgggctctcatgtgaacagttgaaacagctgcagccgatttgatccatcggctgtgccattaccggacactgacatggactctcttagagaggccagaagagaagacatgttgcgtctggctaataaggactctataggtttttttattgcaaaatttgtaaaatgcaaaagcacataggagagggatggatgctcagaaatgaaaattncaaacatttgctgtctgnggttttttttttttttttttaaccaaagtgtttgtcaggcccactgaatggatgatgtggntgctatggaaacagaaaaagctgccanctgttttacccagggatccagaaaccnnaaaggaagtaggggggtggtatnaaaanatatttttccgnttttaaaagattt

SEQ ID NO: 7504 - DNA, 345 bp, Homo sapiens
ccctttcgagcggccgcccgggcaggtacttatgtggaagctagtctcccaaaacacaatctttagagagaaaagacatgaacgaactccaaaatatccatttaatcaatcatgtttttggctttgggataaagaactttgaaccagtttttttctcaggagctgtcaaatggacacttaattatgacatgagaatgaagaaattattttggaaaaaaaaatgacctaatttacctatcagtgaaaagctttatttttctggtgcccttttggaaagtatattgggaggtcataatcattcctttctggtttaaaaatggttaggtttttgggttttggactttt

SEQ ID NO: 7505 - DNA, 313 bp, Homo sapiens
  misc_feature 1: n = A,T,C or G
nccttagcgtggtcgcggccgaggtacactatatagattacatagctttcctaccaacctaaagcttatcaactttattattgtctactgattttcaaactaggcattaaatttagggtgagaaagaagtgatacactctgtttcaactagggtggttgcatattatcctctctttaaaccgggcttatatgtaatttttttttttgagacaaaaacaaagtatgagctatcttccattaaaaaactgattctgggagcaagggagcccaggtagcccgtggctcacaccctgtaatcccagcacttttgaag

SEQ ID NO: 7506 - DNA, 472 bp, Homo sapiens
  misc_feature 421, 439, 452: n = A,T,C or G
agccctcaggcagctctgtgtcagagaaattaaagaaactggactcctctagggagacatcccatggttctcccacagtgactaagctcagcaaggaaccttccgacacttctgctgcatttgaatctacagccaaagaaaactttctaggggaagatgatgattttgttgacttggaagaactttcttctcaaactggtggtggaatgcacaaaaaagacaccttgaaggagtgcctttctcttgacccagaggaacgaaagaaagctgagtcacaaataaacaattctgccgtggaaatgcaggtgcagtcagccctagcctttttgggaacagagaatgatgttgaactgaagggggcgctagatttagaaacctgtgagaagcaagatataatgccgaagtggacaagcagtctggntcgccagaaagccgagtngaaaccacactgnacatacatgaagatttagat

SEQ ID NO: 7507 - DNA, 374 bp, Homo sapiens
  misc_feature 305: n = A,T,C or G
cccttagcgtggtcgcggcccgaggtacacgtgtctagaaacaagacaaatctccaaggtctctggggtgcttgctggggcggagataagggaaagacctctccctgagtcttaaagcatcagtctgcacttctactcaacaagtcggcagccaaaagtgacgacgagagagcgactccacgtagcggcgccaggcgcgagcccaagacaaccagaggcggtcacaaggtatacgcccttctcctctttccacgcttcttcgagaggctcccgcggccagaaccggaaaacaaggggtaacagtngcgtttcaaatctcgcagacctgctggcccgatttcgaagtcttctgaaagaggaaggcgagcaaaagc

SEQ ID NO: 7508 - DNA, 361 bp, Homo sapiens
  misc_feature 221, 336: n = A,T,C or G
ccctttcgagcggccgcccgggcaggtactcaaatgttcttaaaaatgagaaccagtggggaaattgtttataatcattggaaatgaagaaattccaattggctatatctttacttcagctttttcttgaacaatttacagcattgattttcaaactgtgtctacaggcacccttcccctttgtatcagagcagttctgcttttaactgttttatatgttnggggttctctatgagatttcattggaacaaagagtttcactgatatttcgagttttgaaaacccattgatttaaggtgaaaaaaaacattcttaagaaaggatagggaaaatatntttttaaaaaaaatggaaatggtat

SEQ ID NO: 7509 - DNA, 329 bp, Homo sapiens
ccctttcgagcggccgcccgggcaggtacgcgggattttgataaactttattgcactagagtgcttcagtgttgacacgagtttcaaaatctccagagacaccaaagaaatgtgactcaattggaaaaaatggagtttttgacacaatgttagagaaagtagggtatgtagttctcaaaggaaatctgaccaaaccttcctgttttttacaaatgtgatctgcttcctatgtccagggtggacaacactatgatccttagctagagctttcttctcttattctttcaacatgtattcacggggtacctcggccgcgaccacgctaaggg

SEQ ID NO: 7510 - DNA, 367 bp, Homo sapiens
  misc_feature 269, 329: n = A,T,C or G
ccctttcgagcggccgcccgggcaggtacattgatgggctggagagcagggtggcagcctgttctgcacagaaccaagaattacagaaaaaagtccaggagctggagaggcacaacatctccttggtagcccagctccgccagctgcagacgctaattgctcaaacttccaacaaagctgcccagaccagcacttgtgttttgattcttcttttttccctggctctcatcatcctgcccagcttcagtccattccagagttcgaccagnaagctgggtctgaggattacccagcctcacgggagatgacttccaggaaatattccttgnacccacaagggacgttaacaagaaaaatcttgggagac

SEQ ID NO: 7511 - DNA, 336 bp, Homo sapiens
  misc_feature 288, 307, 316, 326: n = A,T,C or G
cccttagcgtggtcgcggccgaggtacctgtaatctcagctactcgggaggctgaggcaggagaaccacttgaactggggaggcagaggttgcagtgagccaaggtcatgccattgcattccaaccctggggcaaccaagagcgaactccatcatacatcttaccaccacatcactaaaggcctgttgtactttgaccagcagggtatgttggttgctcatactccccaccctacatgttcccaggttctgtcccatggcacaggtggatgggtctccctctcagctnctggggtccatcttccctnggccctagnttcctccagncattcttgct

SEQ ID NO: 7512 - DNA, 386 bp, Homo sapiens
  misc_feature 380: n = A,T,C or G
cccttagcgtggtcgcggccgaggtaccacaacctctgcctcctgggttcaagtgatcctcctacctcagcctcctgagtagctgggattacaggcacctgccaccacacctggttaattttttgtattgttagtagagatggggtttcactatgttggtcagggtggtctcgaactcctgattacaagtgattcacctgccttggcctcccgagccttagcccttttgattccctgacatcaaatgctacttctcttggatagttatgctgtgagaagttggtgacgggcaaaacgggagcccaggccagtgtcagaaactcacccagagtcgcagggacaaagctgttgtgtgggttcttccctgtgagaatcttaangatgga

SEQ ID NO: 7513 - DNA, 375 bp, Homo sapiens
ccctttcgagcggccgcccgggcaggtacgcgggggctcactgagaattatcctgagctgtgttaacaaactgacagaacacagaatttttactcaaaatggattggttaaacgtctttaaagattttttcagcattggaaaagtgaaaagaaaacccagtgtgccagattctgcatctcctgctgatgatagttttgttgacccaggggaacgtctctatgacctcaacatgcccgcttatgtgaaatttaactacatggctgagagagaggatgaattatcattgataaagggacaaaggtgatcgtcatggagaaatgcagtgatgggtggtggccgtgggtagctacaatgggacaaagttgggatggttc

SEQ ID NO: 7514 - DNA, 369 bp, Homo sapiens
  misc_feature 254, 351: n = A,T,C or G
cccttagcgtggtcgcggccgaggtacttcttgaccatctccgagaaactagggctgacaagaagagactgcggaaagccttaagagaatttgaagaacagttttttaaacaaacaggaagaagtccacaaaaggaagataggataccaatggcagatgagcattatgaatataagcacataaaagccaaactgagactattagaggtcctcatcagcaagcaagatgtggccaaaactatttgaggttcaggnaaaatgttattgaattcactttcacccatgatattaaaagttaaaagttttatttttcctcttgccatccttgcttaaggtaggttttttggacacnaattggaaaaattgggaa

SEQ ID NO: 7515 - DNA, 184 bp, Homo sapiens
ccctttcgagcgccgcccgggcaggtacagtgtgcacgacgctgagccggatctcccctatcaccccatcaacatcaggtgggttcttcacctggcaggtgtatgtcccattgtcgtcgaactgcagtttccagagaaggatggaggcatcgtacctcggccgcgaccacgctaagggcgaatt

SEQ ID NO: 7516 - DNA, 314 bp, Homo sapiens
  misc_feature 58, 84, 117, 165, 189, 231, 232, 234, 258, 303: n = A,T,C or G
ccctttcgagcggccgcccgggcaggtacttttttttttttttttttttttttttttnaatgaaagagacacaaaaatagtcantagaagacagacaaatattcaagtatttgtttntttctttccccgcttcaaatccttggttccaagtcaggcagggagaanagtatgcaaattcatgggtagcanaagttttaaattacctatcaagccttccatgactataaaagnnanaccaacctttccccaagtttcatntggatattttatcaggaatgacagagtggggaggttaaaaaacantattgttttct

SEQ ID NO: 7517 - DNA, 774 bp, Homo sapiens
  misc_feature 2, 20, 41, 66, 80, 90, 98, 118, 126, 131, 170, 195, 211,217, 239, 241, 264, 282, 296, 304, 310, 312, 316, 329, 344,377, 393, 396, 443, 481, 493, 507, 510, 552, 553, 560, 561,592, 602, 612, 618, 620, 622, 625, 642, 648, 662, 664: n = A,T,C or G
  misc_feature 670, 674, 678, 699, 708, 719, 740, 753: n = A,T,C or G
gnccccccgggggaccaagnggtgaaccaaaaggaaaaatntgttttttatcggggccacggccanttttaatcttttanttaaaattanggcaccanctccagacactccacggaanaaaatacnaaccnccttaaatgggttggtgttccccaatttccaaaaattangggttaatttttccaatttggcccnaacccaaaaaaaaaanttaccnttatttaattaaagacccaacncncggaaaaaaatttttgggaattnccccaaaacctttaattnacccccccaaattnaatttggntttaangnccangagcccaattggncggcaatttaaaaanaattaaaaacggggggtccttttctcttttttnttgggttcaacccttnttnttccccctttaaaaaattttttgggggggggaaaaaaaaaagggttnaaagggtttgggccctttttaaaaaaaggatttttttngggcccaaaaanaatttttaaaaaangtntttttggggggggggggaaaggggggggggcccaaaaagttnnaaaactnnaaaaaaaaaaaattgggaaaggggggggggncccccccccnggttccaaancccaangntnaanaacccccccaagggttnggggtnggggttggggttcnanttttanaacncccngcaaaaaaaaaaatcccccanaatttgggntttaattttanaaaaaaaaaattggggggggnccccccctttaanttcccaacccccccctttttg

SEQ ID NO: 7518 - DNA, 396 bp, Homo sapiens
  misc_feature 148, 256, 282, 295, 300, 351, 379: n = A,T,C or G
cgccagtgtgatgggatatctgcagaattcgccctttcgagcggccgcccgggcaggtacccctagagaaaattccattaacttgttaaattaatggaattaacaacaaataaagcatgtttgagacctgcaaaaattcctctggtangtatttataaatagagctgcatgcctctagtatgaaaaccgtatcagttgcaagtgccacttctacaagttactcagtttactctttgtatcaagtaactttaaaggntggatgatccttgctggttaaagctnaacctcaacctancactnaatgaaaatatttagaatcatcagaatctgaacagactaaaattatcagcnataagcagaatcaagcagggtataagtnttatctcaattatttga

SEQ ID NO: 7519 - DNA, 672 bp, Homo sapiens
  misc_feature 496, 545, 601, 623, 624, 625, 628, 629, 630, 631, 632, 633,634, 636, 638, 639, 640, 642, 643, 644, 645, 646, 647, 648,649, 650, 652: n = A,T,C or G
cccttagcgtggtcgcggcccgatgtacacacatgagaactgaaatggcccaaacccagaaagaaagcccaactagatcctcagaagacgcttctagggacaataaccgatgaggaaaagatggcctccttgtgccaccgtctgttatgatttctctccattgcagcagaaagccgttcttctaagcagacagcaggtgatgatggcaaaatagaccacactcttgaggagcaggaggaggtacattccacaagcattgccttcttattttacttcttttagctgtttaactttgtaagatgcaaagaggttggatcaagtttaaatgactgtgctgcccctttcacatcaaagaactactgacaacgaaggccgcgcctgcctttcccatctgtctatctatctggctggcagggaaggaaagaacttgcattgttggtgaaggaagaaatggggtggaagaagtggggtggggacgacagtgaaatctagagtnaaaccaagctggcccaaggtgtctgcaggctgtaatgcaatttaattanagtgccatttttttttgttcaaaagattttaattattggaatgcccaatttttttnatatgccaaataaaaagtttannnccnnnnnnnanannnannnnnnnnnangtccctgcccgggcggcccg

SEQ ID NO: 7520 - DNA, 162 bp, Homo sapiens
  misc_feature 160: n = A,T,C or G
ccctttcgagcggccgcccgggcaggtacagttgccagtgagctatcaggaatcacaagtggatttgaggaaagcttcaatagaaggaatagaggtagtggaaactgattcatgaacccttctgagttataacaaatactttaaaaaaccatatcatgantt

SEQ ID NO: 7521 - DNA, 432 bp, Homo sapiens
ccctttcgagcggcccgcccgggcaggtacagacggagaatacctgcatctgccatggcttccacaaagttggcatcttctacagtgtcaccagcatcagccagagccaaacgcattccatctgctgaaaatttgtcaatagcttgggtcaaagtgaggaagttgcctgtggattttgacatcttctcagagttcaggaggagatgtccatttgctctcacagctgtaggccatttatcactttgttccggccacatagccgcatgattataaaggtaatatgaaagatgatttggaacaagatccttgccagagacgcgaagatcaacaggataccagaattcaaactcctgctttaactgatctaatttttctttgcaatctgagtcttaggaaatggagccttctttgaagaaaacataatcccaaact

SEQ ID NO: 7522 - DNA, 445 bp, Homo sapiens
  misc_feature 367, 372, 388, 392, 412, 415, 423, 431, 443: n = A,T,C or G
cttagcgtggtcgcggccgaggtaccctcaggcttactagggtggggaaaaacccagccctggtaaattcgtggtcagactggttctctgctcttgaaccctgttttctgttgtttaagatgtttatcaagacaatacatgcacagctgaacatagacccttaccagtagttctgctttgcctttgtgctgttccctcagaagcatgtgatctttgttctgctttttgctctttgaagcatgtgatctttgatctactccctgttcttacaccccctccccttttgaaacccttaataaaaaacttgctggtttgagcctcaggtgggcatcacagtcttaccgatatgtgatgtcacccctggcancccanctgtaaaattcctctntttntacctgcccgggccggccgntcnaaagggcnaattccancacactggcggncg

SEQ ID NO: 7523 - DNA, 410 bp, Homo sapiens
  misc_feature 264, 324, 341, 382: n = A,T,C or G
cccttagcgtggtcgcggccgaggtactttctggggtcttagatacagaactacgatataagtcagacttgaaagagggctccagaaaaagtagatgcgtatctgtacttcagctactctggtgccttcaagtgtctgagagacggggctggagacgtggcttttatcagagagagcacagtgtttgaggacctgtcagacgaggctgaaagggacgagtatgagttactctgcccagacaacactcggaagccagtgggacangttcaaagacttgccatctggcccgggtcccttctcatgcccgtttgtggcaccgaaaanttgtgaattgggcaaangggagggattgcccattctgggaaatcttttcttcccgccnagggccaccaagggaaaaaagttttttg

SEQ ID NO: 7524 - DNA, 304 bp, Homo sapiens
  misc_feature 123, 131, 149, 152, 166, 201, 284: n = A,T,C or G
tgaattcgcccttagcgtggtcgcggccgaggtacttactctcggggttgtgagaatgaaattatacaatgcatttaaagtatttagcagccaggcatggtggttcatgcccataatcccagnactttggngaggcctggggcagggcnganagcttgagcccagnaagttttgagactcagccatgggcaatatggcaanaaccctatctcttcaaaaaatgcaaaaaattattcagggaagtggtggcgcacacctgtagtcccacctacttattgcagctnaagatgggataatttgcttg

SEQ ID NO: 7525 - DNA, 237 bp, Homo sapiens
  misc_feature 56, 133, 140, 143, 147, 148, 150, 156, 160, 161, 162, 164,165, 170, 172, 175, 183, 189, 191, 202, 204, 209, 214, 218,219, 221, 222: n = A,T,C or G
cccttagcgtggtcgcggccgaggtactttttttttttttttttttttttttttgnttttttgttttttttttttttttttttttttttttttttttttttttttttttttttttttttttttttatattatntaaatcnatntatnntntttaanaatnnnannatatnantanaataaaantttatntnaaatttttttngnatatnttttnaatnntnnaatataaaaaaaaaa

SEQ ID NO: 7526 - DNA, 395 bp, Homo sapiens
  misc_feature 317, 345, 351: n = A,T,C or G
ccctttcgagcggccgcccgggcaggtactcactttgtccagttatgctgccaaagaaatattcctctgctgttccttcaaaacattactggatttatggttggtagagagtatgaagctgaaggaattgccaaggatggtgccaagatggtggccgctgtggcctgtgcccaagtgcctaagataaccctcatcattgggggctcctatggagccggaaactatgggatgtgttggcagagcatatagcccaaggatttctcttacatttggcccaaaatggcttcgttatcctcaagttgggtggggaagggagnaggcaagggcagcccaatggtgtttggnccaccngattaaccaaaaagggacccaaaaggagccccgggggaagggaa

SEQ ID NO: 7527 - DNA, 493 bp, Homo sapiens
  misc_feature 446, 483: n = A,T,C or G
ccctttcgagcggccgcccgggcaggtacatgtgtggctgcaaatgttctcagtgatttcagagttcatggacccttttcaaaggtctcccagtggtaactatccaaaaatgggatgagtaatgtaggctacagtttattcacagttggcttcagtttataaaaacaggctgggcgtggtggctcatgcctgtaatcccagcacttcaggaagctgaggcgggtgatcacccgaggtcaggagttcgagaccagcctgcccaatatggtgaaaccccatctgtaccttttttctaaaattaccaaagatattacacaaaggtaaattatgttctctgttttatgctttatctgatgaagccaaatatcctcttattgttgatcaaaggaggcaaaagaatttagaggcaaatgacaagcgataggctattgcaacctgagaaaganaactgctccttcatcgtaaatttagaagaccaagtanataatggaac

SEQ ID NO: 7528 - DNA, 280 bp, Homo sapiens
  misc_feature 157, 160, 173, 196, 213, 214, 220, 228, 230, 262, 275: n = A,T,C or G
ccctttcagcggccgcccgggcaggtacgcgggggttcttggaaggcggtgctctgagaagccggactacgcggcagcggctcttcaaagcggagccgggagtttttgctacagttttcgccaccatgaattcgcaacctataattgattaacctgncangtttctttggaanaaagatcaaattaaaaaaactgnctggaagggattcaaannaaaggngcttttcntngccccaaacaattgcaaagggttgaaaaggtngtttttcctaatngtgaa

SEQ ID NO: 7529 - DNA, 248 bp, Homo sapiens
  misc_feature 22, 46, 104, 140, 157, 158, 159, 165, 170, 171, 172, 173,174, 175, 176, 177, 178, 179, 180, 181, 182, 183, 184, 185,203, 205, 210, 212, 216, 223, 224, 226, 231, 232, 241: n = A,T,C or G
gggcggaattgggccctctagnagcatgcctccgaaggccgggggncccgccagtgtgatgggatattcttgcaagaaatttccgcccctttaagccgtgggtnccgccgggccccggaggggttaacccccttggccgncctttgggggccttttnnncccccncgggnnnnnnnnnnnnnnnnaaaacccttttaaggggnanaaacnancccngggggannanccccnnggaaggggnccccggg

SEQ ID NO: 7530 - DNA, 366 bp, Homo sapiens
  misc_feature 186, 294, 301, 305, 312, 315, 316, 323, 333, 334, 335, 359: n = A,T,C or G
ccctttcgagcggccgcccgggcaggtacaacgtataatggattatgcagtgcaaagtaatgtcactggaccaaaatttagtttaatcatttttatttcaagtgtatttaaaaaatcataaatggggtttcataatccaaaggttgaaacattttattcttcatagcttcagaaatttaacaaccnaatttgtagaccattgctttccaaatccagtcttctttgctatttttcaaaacttctgagatctagtatttaaacttgctccattctaaatgtatagttttttaaganaaggtanttgnactcttnatnntggtttnttttcttatnnngaggcttggaaaatttggaaagcnttttttt

SEQ ID NO: 7531 - DNA, 909 bp, Homo sapiens
  misc_feature 23, 133, 134, 153, 177, 188, 190, 202, 227, 244, 253, 258,260, 287, 289, 296, 302, 312, 318, 344, 363, 366, 384, 405,411, 422, 427, 441, 455, 477, 510, 514, 518, 537, 554, 561,565, 576, 577, 593, 639, 643, 649, 661, 671, 688, 708: n = A,T,C or G
  misc_feature 740, 763, 800, 803, 840, 844, 851: n = A,T,C or G
cccttagcgtggtcgcggccgangtactgcagtcagcttcagggcagcttcctgccacagcagcattaaatgaagttggggatttacaaaaactgggcttcaaaccaaaggaattgtttttgaaagaaatttnntacctttaaaattttttgnagggggaaccaaaatattttgggnccccttaaaantnaaccttgggggnaaaaaaataattaaaaattgggttnccttttttttccaaggnaaaaaaaanaaaangnggtttatttttccctttttttttgggngnttatttntttctngggttctttnttcccntttaaaaaagggggggtaaaaaaggnaaaagggggggaaaaaaanggncccccccaaaaaattttnttggggggggaaatttttttnttcccnaaaaaaagggngtttnttcaaattttaaanttttgggaaaattnggggaaaaaaaaaaaatttttntcccctttgggggaaaaaaatttttttaaaaantttngggnaaaaaaaaaaacccttttngggggggtaaaaaaaanaaaaaancccnttttttttttnnaaattttaaaaggggnaaaaaaaatttttttttaaacccccttttttttaaaattttttttnaaantttttncccttttttttngggggggggnaaaattttttttttttnaaaatttaggggggggggtnttgggggtttttttttaaaaaatttttttttnaaaaaaaaaaaaaaaaaaatttnggggcccccctttttggtaaaaacccccccccaaaanttntaaaaatttttttttttttcccccccctttttttttncacnaaaattntcccccccctttttcccctttttttgggggttttttttcccccccctttttaaaaaaa

SEQ ID NO: 7532 - DNA, 337 bp, Homo sapiens
  misc_feature 106: n = A,T,C or G
ccctttcgagcggccgcccgggcaggtacaagtgatcaaggaaaggtaatggatgtgatgaaactaacaagggccctgacttgtgctgtcaagaagcctctgaaanaagttgacatttaagatgaaacctaaaattatgagagaactgcagctgttacagccaaaggggaaatgatgacatggacaaaggcctcgaggcaggaggagctgctggcagccagctctcggcataagctttggcatacagtaagtgccttgcatactgctgtattgcaattgaaaaaataagggatctggccaggccgcggtggctcacaccgggtaattccagcacttt

SEQ ID NO: 7533 - DNA, 349 bp, Homo sapiens
  misc_feature 268, 288, 295, 299: n = A,T,C or G
cccttagcgtggtcgcggccgaggtacccgaggcagctgggcagtgggcagtcacattccagtaggccctgaggaatccccaaataagtcacgctgggaggaaagtgagacaccaaaacagaaaaccattgcccttgccatccgggcgtggctcactctgtcttccgcgcagggctggttggcatggtgctacactcccgagacctccctccttctccccaagaacagctctgcttatcgacatgcacgcagcccaggctcccctagnatccctgggaggctccagtnaacaccnaagnggtccaaaaccgccaagcaagcccacttaaacccaaaacccccacgtcct

SEQ ID NO: 7534 - DNA, 373 bp, Homo sapiens
  misc_feature 221, 285, 312, 314: n = A,T,C or G
ccctttcgagcggccgcgggcaggtaccacaacctctgcctcctgggttcaagtgatcctcctacctcagcctcctgagtagctgggattacaggcacctgccaccacacctggttaattttttgtattgttagtagagatggggtttcactatgttggtcagggtggtctcgaactcctgattacaagtgattcacctgccttggcctcccgagccttancccttttgattccctgacatcaaatgctacttctcttggatagttatactgtgagaagttggtngacgggcaaaacgggagcccaggccantntcagaaactcacccagagtccgcaggaacaaagctgtttgtgtgggtttcttccctgtg

SEQ ID NO: 7535 - DNA, 566 bp, Homo sapiens [sequence omitted]

SEQ ID NO: 7536 - DNA, 993 bp, Homo sapiens
  misc_feature 7, 8, 20, 40, 122, 125, 128, 130, 141, 151, 174, 194, 203,247, 294, 306, 309, 318, 338, 343, 356, 403, 404, 408, 430,435, 439, 445, 454, 459, 481, 513, 514, 535, 539, 540, 547,551, 560, 603, 626, 636, 641, 647, 651, 655, 656, 657: n = A,T,C or G
  misc_feature 663, 686, 691, 710, 721, 726, 731, 732, 743, 755, 786, 796,808, 818, 825, 834, 842, 871, 877, 890, 897, 907, 922, 943,953, 954, 993: n = A,T,C or G
acttggnnattggccctctnatgctgctcagcggccgccngtgtatggatatctgcagaattcgccctttcgagcggccgcccgggcaggtacacccccatggctcctgggtaactacctgnatncangntgggttcaaanaattaaccgnggtgggggggccccccaaaaccnccaaccaaatttccgggttnggggggggncccaaagggtttccccccccttttttcccaaaaaaagggggggnccccccaaaaaaggggggggtttggggaaaacccccggggggggggnccccccccaaanggnccccggggnttttccctttttaaaagggnttttnccccaaaaggggnccccccccccccttttgggggggggcccctttttccccaaaaagggnncccncccccaaaaaaaacccccgggnaaaangggngaaaanccccccccnttttncccaaaaatttttccctccccnaaaaccccaccccccccctttttggggggggnnttttgggggggggggaaaaangggnnttttttncccnaaaaggggntttttggggggaaaaacccccccccccaaaagggggggggggnttttttcccccggggggtttttncccctttttnaaaancccccnaaangggnnnaaaaangggggaaaaaacccccccccccnttttngggggggcccccttttttnaaaattttttnaaaanggggnncccccgggggncccccccccccnaaaattttttttttttccccccccccccccnaaaaaaaaangggggggggggncccccaaaanttttttnccccccccnttttttcnccgggggggggggtaaaaacccccggggncccccncccccaaaagggnggccccnaaaaaaaaanggggggggggttttngggggaaaaaacccccccccntttttttccnntttttaaaaaaaaaggggggggggggggggggggggggn

SEQ ID NO: 7537 - DNA, 795 bp, Homo sapiens
  misc_feature 113, 118, 129, 137, 156, 165, 183, 197, 198, 199, 225, 248,257, 271, 320, 323, 349, 350, 354, 360, 364, 367, 382, 385,388, 395, 408, 454, 460, 461, 472, 506, 513, 516, 540, 566,593, 612, 620, 643, 673, 676, 691, 711, 715, 729, 769: n = A,T,C or G
  misc_feature 774, 785: n = A,T,C or G
cccttagcgtggtcgcggccgaggtaccttctcagagtcttcggtttggtctcaacaatcttctagaccctccttgaaagatggtgcctctgggaagagccccaaagtatttnccagnaaggaaaattngtcccccnaagtttttaacccaccttnatttcaagnaagtggaaagaaaaaccnccggtttttccttnnnaaaaggggcaaaaaaaaacggttttngggggtttttttttttccaaagngggcccccnttaatttaaaaagntaaaaattttttaaacccttttttccaaggtaaagggccctttgggggnttngggccctttccaaaccctttgggggnnaaantttttngggnttncctttttttccaaanttnttnttttttnccccccttttttnaaattttttcccttttcccccctttaaaaaaaaaaacccaaacccntttggnncccaaagggcncttttcccaaaaaggggttttttggggccccccntttaaanttnggttttggggccccttttttcccnaaaaaggggaaaattttttggggggntttgggggggccctttttttttttccnaaatttaaacccctttggngggggggncccaacaataaaaccccaaaatnaacccaaaaaaaaagggttttaaatttggnccntttaaaaaaaaattnggtttcccaaaccccccggntttnaaaaaaaatttggngggaaatgtgggaaaggggggaaaaaaaaattggggtttnaaaancccccgggaanggaaaaaagg

SEQ ID NO: 7538 - DNA, 176 bp, Homo sapiens
  misc_feature 105, 109, 132, 138, 141, 144, 153, 155: n = A,T,C or G
cccttagcgtggtcgcggccgaggtacacccaaggattctgttctgcaactccatcctcctgtgtcactgaatatcaactctgaaagagcaaacctaacacgaanagangacaaccccttataaggctgtgnccaacnganttnacctccacntncaagaacaagatcctggcctt

SEQ ID NO: 7539 - DNA, 391 bp, Homo sapiens
  misc_feature 127, 323, 341: n = A,T,C or G
cccttagcgtggtcgcggccgaggtacctcctcctgctcctcaagagtgtggtctattttgccatcatcacctgctgtctgcttagaagaacggctttctgctgcaatggagagaaatcataacaanaccggtgggcacaaggaggccatctttttcctcatcggttattgtccctagaagcgtcttctgaggatctagttgggctttctttctgggtttgggccatttcagttctcatgtgtgtacctgcccgggcggccgctcgaaagggcgaattccagcacactggccggccgttactagttggaatcccgagcttcgngttaccaaagctttggcngttaaatcattggtcataagccttgttttcccttgttggttgaaaaattt

SEQ ID NO: 7540 - DNA, 392 bp, Homo sapiens
  misc_feature 42, 53, 55, 85, 95, 100, 104, 118, 136, 138, 146, 150, 166,168, 170, 175, 184, 185, 193, 194, 199, 200, 202, 209, 212,223, 233, 242, 249, 253, 255, 262, 268, 270, 271, 272, 276,284, 287, 292, 298, 312, 314, 316, 334, 337, 340, 357: n = A,T,C or G
  misc_feature 378: n = A,T,C or G
cccttagcggggtcgcggccgaggtacattaactcatatgtnaaaacaacatntngagaaacaaaaaatgaaagtaaaattgganaaaaagattnataangaangttgatggccaagnggagaaaaaagtaaatgngngcaaaaantggnagcaataggttataanananaaggnatagttttnntattttanngtggnncntaataanttnttttaaggtgngaaaaattcnagttattgntttgggnaaananaaacacntattgngnnntttntaaaaacnatnttttntaaganaattgccaaaaaantntngaaaataaaataaggtgnaantgncacaaaatattaaaaantggggaaaaaaagggaaaggnggttatatttttaa

SEQ ID NO: 7541 - DNA, 975 bp, Homo sapiens
  misc_feature 16, 71, 79, 97, 110, 124, 126, 176, 192, 207, 212, 229, 239,328, 331, 338, 344, 355, 426, 447, 454, 459, 507, 570, 578,589, 615, 724, 747, 769, 794, 798, 800, 820, 954: n = A,T,C or G
tggttaaattacccgnactttcactttatttaaggggggggcccggaaaaattttgggggggccccccttnctttaagnaatgggcccattgggccnttcccggaaaggnccggggccccccgncnccaaggttgggttgggaaatggggggaatttaatttccttgggccaaggnaaaatttttccggccnccctttttttccggnaaggnccggggggccccggccncccggggggnccaaggggggtttaaccaaaaaccaaaaaaaaccgggccttccccgggggggggaaaaaaattggggggaaaaaaagggcccccaaggnttntgggggncaaggnccccccaaccnaatttgggttgggggtttttaacccctttccaaccaaccccaaaggtttccaaaaaaaaaaaaggtttggnaaccaagggttggggggaaangaaaggnccaanccttcccccccggaatttttttgggggaaaaaaaaaaaaacccaaaanccccccaaaaaaattgggaaaaaaaaaatttgggggtttgggttaaatttccttgggtttttnccaaaggnaaaaaattggnaaaaaaaaaaattttttttttttggnaaaaaggtaaaaaaaaaatttttaaatttaaaaaaaaaccctttttaaacccccccccaattttttgggggggaaattttccctttaaaaaaaaacccccaaatttccnccaaagggaaatttttaaggggnaaattggggtttcccaaacccnccaaaaaacccaaaggggtttgggnaagngnaaagggccccccccaaaggnaaaaaaaaaatttttcccccttttttttttggggaaaaaatttccccccaaaaaatttttttttttgggggggccccctttttttttgggaaattttgggaaatttgggaaaaaaggggggggggaaacccaancctttttttgggggggggccc

SEQ ID NO: 7542 - DNA, 333 bp, Homo sapiens
  misc_feature 125, 293, 299, 300: n = A,T,C or G
ccctttcgagcggccgcccgggcaggtacttgttggctaggagctgagcttatcacaacaaacaacagcattacaggaattgtcttatatgtggtcagttgtaaagctgataaaaattatttctntaaaatcttgaaaacctaaaaaatttacacaagaaaagacatcacttgtctactgtaacatccaaaggctttgcccagtatgagctctttaagtcctctgccttggatgatacaatcacagcatcacaaactgcgatcgcttttggatatttcctgggagtcctgtgngatgannattcttcaaaatccctccactctcttcaaactg

SEQ ID NO: 7543 - DNA, 227 bp, Homo sapiens
ccctttcgagcggccgcccgggcaggtcatactggcctctgtgattacatagatcagccattaaaataaaacaagccttaatctacaaaaaaaaaaaaaaaaaaaaaagtaccgtgtaaaattcttctattgtcaactttttctgatgtatgccagttcatttactgacaaatgttgttactaagtgcttattaagaagtgtaatacgctataaaaaagttaatact

SEQ ID NO: 7544 - DNA, 545 bp, Homo sapiens
  misc_feature 72, 182, 246, 259, 317, 320, 441, 447, 460, 488, 493, 512,545: n = A,T,C or G
cccttagcgtggtcgcggcccgaggtacccagcatcaggtcaaaaaccagaatcgttgcagtgtgccagtanatcaggcctctgagtcactgctgaaaagcaaagcctgctttggagctgaaaacctcatgagggttctggggaactattgccgccttggtgaagtgcgcacccacattcgngtgggtgttgtgggtcttcccaatgttgggaagagcagcctgatcaatagcctgaagcgcagcncgcgcatgcagcngtgggagctgttcctggaattaccaaaattcatgcaggaggtctacctggacaagttnatnccggctcttggatgctccaggcattgtcccaaggcccaactcagaggtgggcaccatcctgcgtaactgcgtccacgtgcagaagctggcaaacccttgtgaccccagtggagaccattcngcaacnctgcaacctggangagaattccaactattatggcgtctctngggtncaaaccacttgacactttntgacgggagtggcccaccgttgggggaaaaaan

SEQ ID NO: 7545 - DNA, 376 bp, Homo sapiens
cccttagcgtggtcgcggccgaggtacagagacagaggaaggggggctccaaagccaagagagggaaccccacctgccacagataccagctaggtatatatacagaggctggaggaggcagtgtctgatttgcacaggctcaggggattggtttgactaggcatgtcattcacgtagcccgcaggaaaagctggctctcccaccctagccttttaatatgcaaatgcagggcaccatgatcttctacacaggtggggatacttcgggggtgtccatgtatccagggaatgtggggggaaaggggcaaagaagtccaccagggaatcgccatgttttgggggtgggaccccacttttctaatgggcttgggcatttt

SEQ ID NO: 7546 - DNA, 374 bp, Homo sapiens
  misc_feature 349: n = A,T,C or G
ccctttcgagcggccgcccgggcaggtaccagttgggcagctctgggtggaattgctgcggttctatgctttagaatttaatttggctgatttagtgataagtattcgtgtcaaagaattggtatctcgggaattgaaggattggcccaaaaagcgcattgccattgaagatccctactctgttaaaagaaatgtggcaagaaccctaaatagtcaacctgtgtttgaatatatacttcattgtttaaggacaacatacaagtattttgcttcttccacacaaaaattacaaaattccagccttctaaaagcctcttgaaatgccaatttacattgtattttcagaaancattcttaaaagaagttaattaaat

SEQ ID NO: 7547 - DNA, 339 bp, Homo sapiens
atatctgcaggaattcgccctttcgagcggccgcccgggcaggtacatgggactacaggcacgccccaccatgcccagctcatttttgtatttttagtagagacagggtttcaccatgttggccaggatgatcttgatctcttgacctcatgatccgcccctcttggcctcccaaagtgctgggatcacaggcgtgagccaccacacctggccctctatttattctctttaaagagagagaaaactatgagaggccaaaattatttaattaaatctttaccttagcacaaggggaaaaaaatgggaatttgcctaatataaggtggatgaaagcattac

SEQ ID NO: 7548 - DNA, 400 bp, Homo sapiens
  misc_feature 4, 7, 9, 10, 15, 17, 19, 20, 24, 27, 35, 38, 50, 378: n = A,T,C or G
cggnccncnntgggnangnntttntgnaaaattcnccnttaccgtggtcncgggccgaggtacaacagatgcagtctgtgtgctctgattgtaatggagaaggagaggtaattaatgaaaaagaccgctgtaaaaaatgtgaagggaagaaggtgattaaagaagtcaagattcttgaagtccacgtagacaaaggcatgaaacatggacagagaattacattcactggggaagcagaccaggccccaggagtggaacccggagacattgttcttttgctacaggagaaagaacattgaggtattttcagaagagatggggaatggatttgcacattgacatataaaatagggacttgtttggaagctctatgtgggnttttccagtttcacattttaag

SEQ ID NO: 7549 - DNA, 235 bp, Homo sapiens
  misc_feature 158, 206: n = A,T,C or G
ccctttcgagcggccgcccgggcaggtacgcggggactccagccacgacctcatgctgctccgcctgtcagagcctgccgagctcacggatgctgtgaaggtcatggacctgcccacccaggagccagcacttggggaccaccttgctacgcctaaangcttggggcagtaatttgaaccaggaggagtttctttgaccccaaaanaaacctttaagttgttgttgggacccttc

SEQ ID NO: 7550 - DNA, 353 bp, Homo sapiens
  misc_feature 117, 213, 226, 270, 272, 280, 283, 284, 296, 300, 310, 313,320, 324, 331: n = A,T,C or G
cccttagcgtggtcgcggccgaggtacaagcccctggacctgcggcctaagaagacacgtgccatgcgccgccggctcaacaagcacgaggagaacctgaagaccaagaagcagcanccggaaagggaagccgggctgtacgaatctacagaagaaaaacccttttattcaaaattgagggacattccttttaaactttgtttctcggcagtnttttatcataacngatgtttaatgctgtcaaatgtactccttctgtatctgttttgnanatggactntannaacttttctttnattnttgcactgtnganatttacnttanatttttnatttttaaaattttattttaaa

SEQ ID NO: 7551 - DNA, 247 bp, Homo sapiens
  misc_feature 17, 23, 28, 29, 30, 32, 41, 43, 66, 68, 75, 114, 123, 130,156, 162, 164, 168, 226: n = A,T,C or G
cgccagtgtgatggatntctgcntaatnnntntttgcaaantncccccttagcctggtccctgccnangtacacnaaggtggtgcattaccggaagtggatcaaggacaccatngtggccaanccctgancacccctatcaaccccctattgtagnaaactngnaacnttggaaatgaccaggccaatactcaagcctccccagttctactgacctttgtccttangtgtgaggtccagggttgctt

SEQ ID NO: 7552 - DNA, 582 bp, Homo sapiens
  misc_feature 1, 25, 361, 370, 390, 507, 547, 548, 555: n = A,T,C or G
ngggcccttagcgtggtcccggccnaggtactcaaagacgaatcatgaaaaagaaaaaaaactttatttcaaacaggttcagtgatatatgtgtgtgctacagcaaaggctggttgtggcaaagtttcatttcaaactgtatgatgtgggctgggcaagggggctcacgcctgtaatcccagcactttgtgaggccgaggtgggctgatcaccctgaggtcaggagagaccggcctagccaacatgccgaaaccccgtctccactaataacacaaaaattagccaagtgtggtggcgcgcacctgcaatcccagctactcgggaggctgaggcaggagaatccccccaacccggggggcanaggttgcanatcacgccactgcactccancctgggtgacagagccagactcaaaaacaaaacaaaataaaacaaacaaaaaaacagaactgcatgatgtataattttgacattatgtgggaatgtttaacttctgccaaaatgtanattcaatccaacattatgccaatttttatattaattttannccctaanttttcataaccaaaaaaaaaaaaaaaa

SEQ ID NO: 7553 - DNA, 479 bp, Homo sapiens
  misc_feature 465: n = A,T,C or G
ccctttcgagcggccgcccgggcaggtacacaggccgggcacagtggttcacacctgtaatcccaacactttgggaggctgaggcgggtggatcacaaggtcaggagatcgagaccatcctggccaacatggtgaaactctgtctctactaaaaaatacagaaaattagccagtcatggtggcacgttcctctagtcccagctactcgggaggctgaggcagaagaattacttcaacatgggatgtggaggttgcagtgagccgagatcgcgccactgcactccagcctggtgacagagcgagaccccatctcaaaaaaaaaaaaaagttgtatgtgacagctaaccataataaaaaaaaagaaagaaaaaagagagagaaagtagggacaacactaaatcattagtaatttgagcacatttcctccaaggcatatgctatttttcaacttggtttcaatcatgnatctttattggttt

SEQ ID NO: 7554 - DNA, 382 bp, Homo sapiens
ccctttcgagcggccgcccgggcaggtaccacaaaaacctaaaagttaaatgttagattaaataaaattataaaatatccacaccgagaagtatgtgtatacaaagtattgtatgtatgcagtgaaatgagagtgcccatacagttatatgcaaacttttgaaagtttcatagttgtttaacaaaatatttttaatgttgatagtgacataaaaacatcacaagaattatctagataatatagcaatattgccaaaatttgagtcaatgttacctgtgagtgcaataggtcatcattgatcgcgtcctttcatgacctgggcggtaatttagatgattgaaggaatattatgaatgtatttacactgtgaagtgtggaaagg

SEQ ID NO: 7555 - DNA, 286 bp, Homo sapiens
ccctttcgagcggccgcccgggcaggtactcagctgtcttaataggatgaagccttaagcagtggaaatttcagttattttccacagtattccattttggaggatttggggtgtttactttttaaattcttgaacaacttaacctccatgaggctttgtgaagtcagctgtgaccaccctcctcttactgtgttctcagtattcattcacttccagggaagaatgacagccacagggagatggtggtgggcaagaatgagagtcccaggatccagatttagcctca

SEQ ID NO: 7556 - DNA, 352 bp, Homo sapiens
cccttagcgtggtcgcggccgaggtactatatggacaccaacatggagcagaaaatgagggcagcagtgtccaatcccattccaggtgagaagttgcacagtgtccaataggtgcatacatctccttagtaagtagttgtgattaacaatgaaatagaaatgaaaaatatatttttttatttatgtgtattatatttttcaagcagctaataagttggtaggacataatatttaattcgttggggacctaattatttataaattgaatggttaggatatttcttttggcctaagccacccatggaaaaaatcactgagggcgcctaaggggaaaacatggaactaaagaagc

SEQ ID NO: 7557 - DNA, 262 bp, Homo sapiens
ccctttcgagcggccgcccgggcaggtactttgttggagatgccacctcagaagttcacactgtgcaggaaaaaggttttattctctcctggcatacactagaatgtcagatgcttgcatccatgtggaccacagatgggcctctaaaaattggtgggcagggggtttgcttatgagttttctctggaaaccgattttactcctggatgtattgaatgccccttgagctttatgagatacgagtccacatggataaaatgtt

SEQ ID NO: 7558 - DNA, 943 bp, Homo sapiens
  misc_feature 83, 106, 115, 117, 129, 141, 155, 169, 174, 187, 190, 255,263, 267, 297, 305, 320, 331, 351, 355, 358, 362, 370, 371,378, 384, 385, 386, 402, 412, 413, 416, 428, 436, 452, 472,475, 488, 495, 500, 512, 537, 550, 578, 617, 622, 634: n = A,T,C or G
  misc_feature 638, 643, 683, 692, 701, 713, 721, 749, 786, 806, 861, 880,888, 913, 941: n = A,T,C or G
tctgagaattcgcctttcgagcggccgcccgggaaggtacgtccacggtcagccttgcgacatttataagttttcttaccaantggaaaacttccaaccttggggnaagggaatngnccaaaaaagggnaaaaaaaaaggnttgggtttgggggnaagggaaaatttgnggggnaaaggaaaacccnaancccccccccccccaaaaaaatttttcccggggaaaacccttttttcggggccccccccaaagggnttttcccntttnaaaccccaaaggggggggtttggggttttnaaattttncccccccaaaggggncccaaaagggncccctttttcccccccaaanaaanaangggnaaaggggnnaaacccnaaaggnnncccaaaaaaaaccccncccaaagggnnccnaaaaaaagggtnaaaaaaantttggggggggggggnccccccccaaatttttaaanggnttttgggggaaancccgggnaaaantttggggggggntttgggggggggttttttttttttntttgggggtttgncccaaacaaaaaaaataaaaaaaggggnaaaaaaaaaaaaaaatggcgggtgggtgggtgggtgggnggggnaaaattttaaantttnggggntttaaaaaaaagggggggggaaaaaaaaaaaaaaagggtnaaaaggggnaaaaggggnaaaattttcccnaaaggggnaaaaccccttttttttttttccccaaanccccttttggggttttgggggttttccccttttaaantttgggggttttaaaagggnaaaaaaaaaaaaaaaagggggggggaaaaaaaggggaaaaccccaaattttaaanggggggggaaaaaaaaaancccttttncccccccaatttttttttttttttnggggaaaattttccctttggggtttaancc

SEQ ID NO: 7559 - DNA, 235 bp, Homo sapiens
  misc_feature 89, 123, 125, 136, 151, 156, 180, 221, 230: n = A,T,C or G
cccttagcgtggtcgcggccgaggtactttttttttttttttttttttttttttttgctttatctttagttctattttaagagatcatntgcatttttttctgtaataaacttaaaagatatncncccatttttgncagatttatttattntttancaatttaagtattaaaatcacagnttttgtctcaatccttaataatactatattcattatatttnatgttttanctttc

SEQ ID NO: 7560 - DNA, 305 bp, Homo sapiens
  misc_feature 167, 204, 205, 242, 271, 272, 278: n = A,T,C or G
cccttagcgtggtcgcggccgaggtactactactccctaacccaaaccaggtgattctagtgaagactgtcaataaacggagcatgtgatcaagcagggcccatcagaatccttccctaagatttttataaaaagctgggaccttattcttttttcccatttgagtnggcaaaatattttgaagaatattgaaggtctaaaagnntgtgatggcttatttcttccatccctgtgttaaattnctggtctatagtaaagcgaaaacaaggcnnattagngccagtaggggcagcaagatacataaa

SEQ ID NO: 7561 - DNA, 332 bp, Homo sapiens
cccttagcgtggtcgcggccgaggttttagccagaagtccaacctcagcagacaccagagaacacattcagaagagaagccttatttgtgcagggagtgtgggcaaagctttagaagtaagtccatcctcaatagacatcagtggactcactcagaggagaagccctatgtttgcagcgagtgtgggcgaggctttagcgagaagtcatccttcatcagacaccagaggacacactccggtgagaaaccctatgtgtgcctggagtgtggacgaagcttttgtgataagtcaaccctcagaaaacaccagaggatacactcaggggagaagc

SEQ ID NO: 7562 - DNA, 369 bp, Homo sapiens
  misc_feature 7, 8: n = A,T,C or G
ccctttnnagcggccgcccgggcaggtaccaaagagatcatattccaagtagcagccaagctgagcaaactccaagagctctttcttatcaagaatagtcctatccaggtgtgacatgactgttttggagatgtctgcgcctgcttcttgcaatattcggataatctgaaatggtgccctggagctccgtccaggatggataataacaggacaaccaagctgagcctgggcatgagctgtggcctggagaacctttctttcactctcagtcaaaggccaggagcaaccaatttctccaataatgccacacttggatactggttccatcagctccatggagaatttcattcataaggaccatcgggtaag

SEQ ID NO: 7563 - DNA, 338 bp, Homo sapiens
  misc_feature 292: n = A,T,C or G
ccctttcgagcggccgcccgggcaggtactggttcttaaacagcccataaaaacccattggcctgaagcttatatctcaggcctatgcccatcttatagtcttggaagacaaaaggctggtagaagacagtcttcagtggcttcagtgatgctctgtagaggccagggtgtcttgagtgctgtaactcccaagcactgggctagcctgacttctgtatctccctaccaccacccccttaaaaaaataaggtaacagccaaatctatagtaaaaacccatgttctggcatagnaaccgtgtttcaaaatccctctgtttttcatttaaaatggtaaaaa

SEQ ID NO: 7564 - DNA, 351 bp, Homo sapiens
  misc_feature 268, 294: n = A,T,C or G
ccctttcgagcggccgcccgggcaggtaccagcataaaaaaatgaaatgtgtattgatttctaatggggcaataccacatatcctcctctagcctgtaaaggagtttcatttaaaaaaataacatttgattacttatataaaaacagttcagaatatttttttaaaaaaaattctatatatactgtaaaattataaatttttttgttttgtaatttcaggttttttacattttaacaaaatattttaaaagttataaactaacctcanacctcttaatgtaagtttgggtttcnaaggattgggggatttttggggggttttttttttttaggtattttttaggaaaataa

SEQ ID NO: 7565 - DNA, 344 bp, Homo sapiens
cccttagcgtggtcgcggccgaggtacctgtcatttgcctttgagcattgtcaccgttctagtcagaagaacaaaaggatgattctgatctatttgcttccagtaaaaatgctattgggtcacatgcccactgtggagctcctgaaaaagtatcacctgatgcagtttgcggaagtaaccagagctgtgagcgggggcaacctgctgctgctgcacgaggccgctggcgaagcacgaggccttcttcattcgctgcgggaatcttcctcatcctggagaaagcctggaagaatcatcaccctacagggaaccctctttaagaaaagtgttattttggtttacct

SEQ ID NO: 7566 - DNA, 326 bp, Homo sapiens
ccctttcgagcggccgcccgggcaggtacttttttttttttttttttttgttaaaacttcatttatttaagatgactagtgatgcagctagcaaacccaagaagccaactggaatggaaatgctcagtggtgctcagccattacccaggaccagagattcctttgttaacagttcaatttgttgaggcacaagtgaggataaattgggccatgacaaaactatgagattgaatgataatcatagtaacatctgacatatattaaatttggtgttatgccatttctcagttccaccaaatgtacctcggccgcgaccgcgctaaggg

SEQ ID NO: 7567 - DNA, 357 bp, Homo sapiens
ccctttcgagcggccgcccgggcaggtactatgtgcatgtattacattggcaatgtaggaaaagtgagcaatgtgagaaaaaatattgtattaagcaccaggagagttcacaatttattggaaaaagatatacccttaaataattgaaatgaggtgataaaaaaggtaaagatataatatgaagtatgataaatcaattaggaaaatccattgatatgagaaatcaataatgaaaaaataattttgaaaaagatgaaataattgggagggagagggagaagtcagttgaaatggggctagcacagaaaatgaacacccagaatacggggaggaaaatagaaaactatgtttgggtcg

SEQ ID NO: 7568 - DNA, 166 bp, Homo sapiens
  misc_feature 113, 116, 132, 137, 139, 149, 159: n = A,T,C or G
ccctttcgagcggccgcccgggcaggtaccggaattgacggaggcttttgtcattgtcgcgatctggaagcaggtggagggttatgggaaggatgtaagtcactggatatatnttnatatgcacctcgaaancatanantacagctgcncactctaacnagtcttt

SEQ ID NO: 7569 - DNA, 978 bp, Homo sapiens
  misc_feature 50, 54, 86, 93, 95, 99, 101, 108, 125, 144, 146, 151, 167,180, 183, 197, 199, 201, 239, 244, 256, 266, 290, 302, 310,315, 357, 380, 390, 422, 460, 481, 494, 506, 508, 527, 537,546, 550, 567, 578, 581, 594, 612, 653, 659, 705, 708: n = A,T,C or G
  misc_feature 710, 722, 760, 767, 797, 805, 815, 850, 873, 890, 892, 902,945, 946, 952, 954, 960: n = A,T,C or G
taatttaaggggggggccgggaaaaatttgggggggcccccctttccttnaagnaaatgggcccattgggcccttccgggaaaggnccggggncncggncncaaaggnttggttgggaaattggngggaattaatttccttggncnagggnaaaaattttccggccnccctttttaaggnccngttgggggtttccngncnggggcccccggaagggggttaacctccccctttccggnttggnttggcctttccntgggaagggnccttaaaaagggccccaaaccaanttaacccttaanaaaaaccnttggnaaccttttttttttggggggttatattgggttaattaaaccncccccttttgggccttttccccnccgggccccntttttcttgggaaattggggaaaaaaaaaaanccatcccctttttaacccccccctttcaaaccaaaaanccccaacccccaattcctttnttttcccctttcnttcccccttttntnccccaaaaaaaggaccttnccttttttcnccaaccccntttnggcctttgggccaaccnttaaaaaaggnaanttaaaaaaagggntggtaacccaaccttttntcccaaactttaaatttaatttggtttccaaaaatttttcnccaaanccaacccaaccaaattttttttaaattttaaaggggggtttaaccnaantnggaaaaaggccntttccttgggtccccaccccccccccaattttcccccnaaaaagnttgggccaaaggggggaaattttttggccnaaaaattnaaaccaaccnaattggccttaaccctttaaaaaaattaaaaaaanttgggccttttcctttaattggnttgggaatttccaaggnanttttaaaggnaattttaattttaagggaatttttaaaaacccaacccaatttnncaaggntngggaanccaaattaaaaattttaa

SEQ ID NO: 7570 - DNA, 354 bp, Homo sapiens
cccttagcgtggtcgcggccgaggtaccagccacttgtcctagccaaatgtccaaaacacgcccttgggccccgccacgttacaatccacagattgtctgtctgagtcgtttaaggcatttcctggtgcttgtgttccatgaataaaaggacaaagtcagaagatcactgatgtcttactgtcaacagagatattttaaaagagagaagcaggaaaagatcttcctttttgatctacaacttatatagttttcttgattatgcacataatagatatgcctttccagatgcataaagggcaaacaatctggaaaagaaatataccccaaaatcttagcagggggttatcttttgg

SEQ ID NO: 7571 - DNA, 908 bp, Homo sapiens
  misc_feature 3, 12, 23, 29, 105, 147, 156, 158, 164, 187, 190, 199, 206,212, 216, 234, 244, 260, 264, 265, 266, 274, 287, 303, 313,315, 326, 329, 348, 353, 369, 377, 415, 428, 443, 447, 452,460, 469, 476, 482, 491, 506, 511, 530, 545, 551, 554: n = A,T,C or G
  misc_feature 564, 576, 579, 589, 612, 655, 657, 660, 672, 699, 701, 717,718, 721, 723, 748, 758, 761, 762, 772, 802, 812, 815, 825,837, 865, 881, 896, 899: n = A,T,C or G
ggnccaattggncctttcccggnaaaggncccgggggccccccggccccccaaggtttgggtttgggaaattggggggaaattaatttcctttgggcccaagggnaaaaatttttcccgggcccccccctttttaaaggacccgggnttggcgggntncccgcnccggggggcctcggtaagcgggnttnacctttaanttaattnggcccncaanttgggggaaattgggttnggaaaaattntctcccccccaatttnatgnnnaaaagggnccttgggggtttnggaaaccaaattgggntatttcgccntngggggaaaaangancgttccttggggggggccnttaanccaaaccccctttggnggtccaanttgggaacccaaacccttttggcctttttttggggttnatttgggcccttncaaaaggttgggttngggnttttnggtttggnaaaaaaaanggatttntttggnggaaaaaangagggttccaatggnaaccnccttttttttttttccttncccaaaaagaaaaangggggnaanccaaaaacgncccccctccttnggntagttttaanaagggaaaaaaaaaaccaaattngggccctttccaattttttccttcggttcgggaaaaaattttntnttnttggtaaataanaaggggtaccaacaacccaaaaggttntnccaaagggggaaaggnnaanangaaaaaggtaaaaaggtgggggaanaatttttttnggnnaacaacggcnaaaggcaaaaaaaaaaaaaaagtggggaanaaaaaaaaanttnttataataanaaaatttttaanccttttaaaaaatctttaaaaaattttnttttttttaagggaantttttccaaaaattnaantttttttaa

SEQ ID NO: 7572 - DNA, 170 bp, Homo sapiens
  misc_feature 98, 128, 162: n = A,T,C or G
cccttagcgtggtcgcggccgaggtaccaaagaaactgaagaagcctgcaaagcctttactttcaaagataaaattgagaaatcatttgcaagccggntggagcaaaagaatgcttcaagaaaactcnaaatgggaaacttagtacctgcccgggcggccgntcgaaagg

SEQ ID NO: 7573 - DNA, 174 bp, Homo sapiens
  misc_feature 10, 42, 43, 48, 78, 116, 124, 134, 149, 173: n = A,T,C or G
gtagataggnatattcctgccagaattccggccccttttttnnccggnaaaggccggggccccgccccccgggggcangggtacctttttcttaccctttaaaaaaaaattcaaantggaaggnatttttttanttttaaaattggaancaattcaaattttccctttttttna

SEQ ID NO: 7574 - DNA, 343 bp, Homo sapiens
ccctttcgagcggccgcccgggcaggtactgtctgtccacaccatggtctcctcagtcccctccacgccagcccctcttccccacacctagtaggtgtgctacacctccctttgccaagtcatcccgccatgggatggggagcctacttggtgccctggcaaacctgtttacactaaggagatgcccacagggagcgggaagctcccaaaccctcagtcattctccagcagagacctttgctcttggccaggtttgaaacgatgttcaacctcgccacgtcaatgtctcagtaaaagacactatagatagttatggacaatacactccaagaaatactgggct

SEQ ID NO: 7575 - DNA, 366 bp, Homo sapiens
  misc_feature 346: n = A,T,C or G
ccctttcgagcggccgcccgggcaggtacgcgggggggggtcgcattccttacctcacctttgtccctgcgcgggctgcggctgggatccggtctttccagccccgagagggacctggttcctctgcccaggcttctgtcactctgtcacctacgctatgccctgctgtagtcacaggaggtgtagagaggaccccgggacatctgaaagccaggaaatggaggagtgggctttgctggatatttcccagaggaaactctacaaggaagtgatgctggaaactttcaggaacctgacctctgtaggaaaaagttggaaagaccagaacattgaatatgagtacctnggcccgcgacacgctaaggg

SEQ ID NO: 7576 - DNA, 349 bp, Homo sapiens
cccttagcgtggtcgcggccgaggtacttcggcagctatggaactctgaaactccacttggagatgttggcagaccagccacgaacaactaaataccacagtgtcatcctgcagaataaagaatccctgacggataaagtcatcctggacgtgggctgtgggactgggatcatcagtctcttctgtgcacactatgcgcggcctagagcggtgtacctgcccgggcggccgctcgaaagggccgaattccagcacactggccggccgttactaggtgggatcccgagcctcgggtacccaaagcttgggccgttaattcatgggtcattaaggcttgttttccctggtg

SEQ ID NO: 7577 - DNA, 413 bp, Homo sapiens
ccctttcgagcggccgcccgggcaggtacttctggttggggctctctttacttactgcttaggcacatagtcaccttctctggactccctgcttccatgctttctccttcagtccattccgcaaactcttgtgatcttccaaaattagctctgattagctttcacttcctgtagaagcaagaacaagctcctctgcttggtacttgacctttatcttctaaccattcttttatgtcatcaagaagttgcatcagttgggaagcctttaatataaacagatctgttttttacatcatttttatactcatcagtcacttcaggtaggggtttgcttggagaccttctgattttaagttttatcttcactgatttccatgagttctgccttggatttgctcaatgcttccacaatt

SEQ ID NO: 7578 - DNA, 986 bp, Homo sapiens
  misc_feature 15, 63, 84, 93, 102, 114, 119, 154, 182, 443, 481, 521, 670,849, 865: n = A,T,C or G
actttcactttattnaaggggggggcccggaaaattttgggggggcccccccttcctttaagnaaatgggcccaatgggccctncgggaaggncgggggccnccgcccccaagnttggntgggaatgggggaaattaattccttgggccaaggnaaaatttttccggcccccctttttaagnccggtttgggggttccggccgggggcccccgggaagggggttaacccaaaaaggggggcccttaaaaaagggcccaattttttttttaaaaaccctttttttaatttaaccctttggggggaaaaaaaaaaaaaaaaaaaaatttccaaaaaaaacccaaaaaaaaggggggggggggaaaggggggggggaattttaaaaaaaaagggggggaaccctttttaaaaggtttcccaatttccctttttttttgggcccaancctttgggggggaaaaaaaaaaacccaaaaaaaaaaanttaaatttgggttaaaaaatttttaaaaaaaaattttttncccccccaaattaaaggccctttgggccaaatttgggttaaaaaacccaaatttttgggaaaaaatttttcccttttttcccccaaggggggtttttaaaaaaaaaaaaaaaaaaaaaaaaaaaaagggtttttaaaaaatttcccccnttgggtttgggaaatttaaatttttaaaaaaatttgggggggaaaaaatttgggaaccccaatttttttttttttgggaaagggggggtttccttttttgggaaagggaaaaaaatttgggggggggcccaaacccaaaaaaaaaaaagggtttggggggggggaaaaaaaaattgggnaaaaattttttttttnccaaagggttaaatttgggggggggcccaaaaaaaagggaaacccaaccctttgggaaaggggggaatttgggaaaatttgggttttttgggaaatttttaaagggaaaattaaaaaattt

SEQ ID NO: 7579 - DNA, 587 bp, Homo sapiens
  misc_feature 13, 105, 127, 138, 142, 144, 166, 167, 173, 180, 186, 189,198, 214, 219, 220, 229, 233, 239, 266, 285, 291, 293, 295,307, 323, 335, 337, 344, 368, 373, 375, 378, 381, 383, 404,412, 414, 416, 419, 431, 440, 442, 443, 452, 464, 466: n = A,T,C or G
  misc_feature 471, 482, 483, 491, 504, 518, 529, 533, 535, 540, 545, 554,561, 577, 580: n = A,T,C or G
cccttagcgtggncgcggccgaggtactcagtgcagcaaagaaagactacagacatctcaatggcaggggtgagaaataacgaaaggctgcttgactttaccatntgaagggccccaccacaattcntggctggaaantggnanaattaatttaaaacaattccannttaagnaaaaacnaagtcnaangtaaatggnaccaaattaattaaantggtnncttaaaagntaancattgnaaccaattgatttttttttggccatcnaatattttacacaaggacntccccncntntttttaaaaaantaatttcctccatccnaaccaatcaaancnatggggnaaaagggccaacccaataaaaaanggggnanaanggncnacccaaggtaagggaatttcncccccttngngnggnaagggaaaatantggtcctcncnnggggacccnggtccccaaatncnttttngggggggttannattttcgnaattgggaagggnccccttgctggccncccccttgggntggncnccttnggggntccacccgnccttatnggttgaaaaggagggnaanaaggggg

SEQ ID NO: 7580 - DNA, 986 bp, Homo sapiens
  misc_feature 17, 59, 71, 92, 93, 101, 113, 119, 123, 129, 138, 148, 155,167, 179, 187, 207, 221, 224, 235, 251, 303, 314, 317, 327,331, 337, 339, 342, 345, 350, 352, 354, 357, 360, 363, 365,371, 374, 380, 382, 384, 407, 433, 524, 531, 549, 564: n = A,T,C or G
  misc_feature 579, 582, 615, 629, 632, 634, 644, 649, 658, 706, 789, 797,806, 811, 827, 843, 878, 888, 898, 906, 933, 955, 966, 975,979: n = A,T,C or G
aaattaacccggaaacnttccaaactttaatttaaaggggggggcccgggaaaaaattnttgggggggggnccccccctttcctttaagggnnaaattggncccaaattgggncccttnccgnaaaggncccgggggncccccggccnccaaagntttgggtttggnaaattggggggnaaattaanttccctttgggcccaagggnaaaaaatttttccnggnccccccctttntttttccgggaagggncccggggggccccccggccccccccgggggggggcccaaaggggggtttaanccttttttttnttnttcccttttntttntttttntnttnttnttttntntnttnttnttntntttttnccnccgggntncnttccccccccccaaaaaaaaggnccttttttttaaacccctttgggttnccctttttgggaaaccttttttttttttttaaaaaaaaaaaaaaaaagggtttttttgggggggggggggggcccaaagggaaaatttttnctttggnaaaaatttttgggggccnttaaaaaaaaaaagnaaaaccaaatttggnccnaattttttttttttaaaaaaaaaaacccttaangggccaaaaaaccnttncnttttaaattnttttnctttttttncccctttttttttaaaaaaaaaaaaaaattaaccccaatttaaagggncccaattttttaaaaaaaaatttccccccccaaaaaaaaatttccccccttaaattttttttaaaaaaaaaaggggaaaaccncctttggnaaacccaanggtcnttttttggggaagganaaaaaagggggggttnccaaaccctttaaaccctttgggcccaaatttttnttaaattaangggggggaancccccttntttcctttgggggggttggggggggtnttccctttggccctttgggttntttaaacccgngtttttttngggnaaaaaag

SEQ ID NO: 7581 - DNA, 312 bp, Homo sapiens
cccttagcgtggtcgcggccgaggtactaagtgtttgacatatggtatctcatttaaaccttctgtgatcctctgaagagtgtcctccaatttttcccattttaacagatgataaaactcacagaagggcctatggttatatagctagtaaaagtggcagagtccgttgaacttgaattcagattggcgaatgctttaacagttggtatccagcagctacaggacttaatatttctcagtgttgtttcctcatctctaaattgaagatattaaagctcactttgcaaaaaaaaaaaaaaaaaaaaaaagtac

SEQ ID NO: 7582 - DNA, 241 bp, Homo sapiens
  misc_feature 4, 66, 68, 111, 120, 124, 131, 141, 145, 152, 156, 158, 179,183, 185, 191, 201, 202, 206, 207, 209, 214, 229: n = A,T,C or G
aacnccctttcgagcggccgcccgggcaggtacgcggggacatcaatgcagagtccctctgggaantnacaacacccaacacccatgagtgcagtccttaagaaggaaaantgagcaagnattnaattggncggacattgntttnaagaggnccananccaggctaactctagaaaggntatncncaaacntagggggccnntttnncntcggncagaggaccattctnaggggcactggg

SEQ ID NO: 7583 - DNA, 384 bp, Homo sapiens
  misc_feature 168, 327: n = A,T,C or G
cccttagcgtggtcgcggccgaggtactggttggggatgggaatcgtgcttttctttaaacttcagtttacgagatgctttgagagcgttaggcaaaagcagaaataaatatcaggagcaacggggaaagcttttgtaaaaagatcatggtggccactgttgcaagcntttgaagaatgagtgttggcttgaacagttctttgcctgcatcattggtagctgcactgaaaggaaaaaactttcaccttaagaatttgaaaaggaagaaaacctgggctctggtcttcatggcatttaagactggagaatgccttaaacagaacaagnaagtaataccgccatttcctgcccatagggatagggggaaaaatggtaaacaaggct

SEQ ID NO: 7584 - DNA, 494 bp, Homo sapiens
cccttagcgtggtcgcggccgaggtacttttttttctttttttttttctcttatttcttttttcttatttgttttcctttttgctttttctttttatcttatttcttttacttatttttcttttttttacttttatttcttctccgtttttcctcattcttttcctcttatttctttgacttttctgatttctttttttttcttattttccttttttttttcatattccttttaattttttcttacttcttttacttttcttatttgccctcttgtggaaatgaggcacagcctcccttatggttgagccgtaagttctagctgagcacggatggtttgatcctcctgtgttggggcactgtatggtgtgagggcacaaaaccttgacccacatgggtctggtcaccttctcacagaggtcacctttacagccccccaactctttgaaggaatgtgtcccaaaggtggtctcaagtctggatgcaatgaaagcc

SEQ ID NO: 7585 - DNA, 188 bp, Homo sapiens
  misc_feature 50, 53, 58, 139, 164, 175, 183: n = A,T,C or G
cccttagcgtggtcgcggccgaggtacttttttttttttttttttttttnganaatancaaatatttattgaatgcttatcaagtaaatttcattattctaaagactttccctacattgttttattcttcgtattttanattctttaaaatgaagagactgacncatggagaatntgaacatnttttt

SEQ ID NO: 7586 - DNA, 363 bp, Homo sapiens
  misc_feature 311, 318: n = A,T,C or G
attcgccctttcgagcggcccgcccgggcaggtacagaaatttaagctcacatgtatttgacaaatatagtttagtagactagctctatgtgcttttcactttcctctgattttctctccctgattcattattatctgtgcagctcacagttttttttttgtatacaactcacagttctcaaattttcgttacccatgggcttctgttgtcccatgttctctccagttaagatctaatttaaaattcattggattgaaatttattgaatataattcagcttttgtaactagggtaagacttttcttatagnttttagnttttaatattagtttaaggggtattacttggcttttttcccaggg

SEQ ID NO: 7587 - DNA, 266 bp, Homo sapiens
  misc_feature 110, 115, 124, 141, 142, 143, 146, 148, 150, 153, 155, 161,163, 171, 174, 178, 179, 183, 184, 186, 189, 190, 192, 195,203, 205, 216, 218, 224, 236, 237, 239, 241, 242, 253: n = A,T,C or G
ccctttcgagcggccgcccgggcaggtacttttttttttttttttttttttttttttcttttttttttttttttttttttttttttttttttttttttttttttttaacnaaaanaaaaatttntttaaattaaaaaaaannnggntntnttnanaaaaananaaaaattnttnaaannaaanntnatnntnggntttaaaangnattaaaaaatntnattttnaaataaaaaaanncntnntaaaaatgaanaaaaaaaaaaaaa

SEQ ID NO: 7588 - DNA, 162 bp, Homo sapiens
  misc_feature 116, 129, 147: n = A,T,C or G
cccttagcgtggtcgcggccgaggtacagtaaaaacacatctaacatctttgaagaccaaatttcctgctgaacagtattacagatttcatgagcactggaggtttgtgttgcaancgcttggtccttnttggcaagaatttttttntggtattttggaaaa

SEQ ID NO: 7589 - DNA, 338 bp, Homo sapiens
  misc_feature 306: n = A,T,C or G
ccctttcgagcggccgcccgggcaggtactcaccttaaaatgctctacaattttgatcaaaatccagggcgccactcccagacctactgaatcagaatcttcaagagaggagcctgagaatccatatggtttaacaaactccaggtgattatttttatttacttttgagacggagttttgctcgtgttgctcaggctgaagtgcaatggtgagattggctcactgcaaccaccacctcctaactccaggtgattcttattatcagacaagttttaagaaaaaactcccaatgggatagtggaaagnaataccttaagaaaattttttgggaggatggg

SEQ ID NO: 7590 - DNA, 100 bp, Homo sapiens
cccttagcgtggtcgcggccgaggtacgatttcagtatgtcttaatcgcagctgtgattggaacaattcagattgctgtcatctgtgtggtggcctctgc

SEQ ID NO: 7591 - DNA, 235 bp, Homo sapiens
  misc_feature 171, 188: n = A,T,C or G
ccctttcgagccggccgcccgggcaggtactaccaccggttgtagtgacaaccaaaaatgtctccagacatctccaaatatcccctggggcgtaaaactgcatatcattgagaactttatggccctaaagaaagagatacagttttattctctgctcgctttcttttctgntagtcttgattatttgncatttacaatatttaaccttgctcagcaaaattttaacctttcaaat

SEQ ID NO: 7592 - DNA, 244 bp, Homo sapiens
  misc_feature 32, 33, 35, 36, 38, 39, 42, 45, 52, 65, 84, 144, 146, 175,215, 225: n = A,T,C or G
ccctttcgagcggccgcccgggcaggtacttnntnntnnttnttnttttttntatgcgcagcttnatttttttttttttagtanagacagggttttaccatgtttggccaggatgattccttgatctccttgaccctcatgatncnccccttcttggcctcccaaagtgcttgtngatcacaggcgtgagccacccacaccttggccctctattntatccctctntaaagcagagagaaaaact

SEQ ID NO: 7593 - DNA, 674 bp, Homo sapiens
  misc_feature 156, 161, 176, 227, 248, 322, 324, 327, 343, 387, 400, 409,412, 422, 427, 441, 451, 455, 478, 525, 531, 535, 555, 616,659: n = A,T,C or G
cccttagcgtggtcgcggccgaggtacattgatgggctggagagcagggtggcagcctgttctgcacagaaccaagtaattacagaaaaaagtccagggagcctggaagaaggccaccaaaaccattcttcctttgggttaggcttcaagccttcncgtcncaggccttggcaagnaccggccttaaatttggccttcaaaaaaccttttccccaaaaccaaaaaanggccttgggcccccccaaggnaacccccaaggcccaacctttttgggttgggtttttttttttgggaatttttcctttttccctttttttattantnttnccccccccttgggggnccttttcctttccaatttccaaatttcccccttgggcccccccnaaggccctttttncaagggttnccnccaatttttnccccnaaggaaaggtttcnggaaaccccnaggnaaaagggcccttggggggggttncctttggaaggggggaattttaacccccaagggccccctttcaaccngggggnaagnttgggaaccctttttccccnaaggaaaaaaatttaatttcccctttgggaaacccccccaaccaaaagggggggaacccgntttaaaaaccaagggaaaaaaaaaaattcctttgggggaaggnaacccccccaaaagg

SEQ ID NO: 7594 - DNA, 176 bp, Homo sapiens
  misc_feature 40, 91, 103, 165: n = A,T,C or G
cccttagcgtggtcgcggccgaggtacttgggaggctgangcaggaaaattcttgaacccaggaagaccggaagttgccagtgaacttganatcaccaccacntgcccttccaaccctggtgacaaaaacaagaattccggctttttaaaaaaaaaaaaaaaaanggggggggggg

SEQ ID NO: 7595 - DNA, 559 bp, Homo sapiens
  misc_feature 60, 86, 100, 104, 109, 112, 116, 117, 125, 152, 153, 158,180, 181, 195, 196, 198, 202, 205, 208, 216, 221, 224, 235,243, 247, 260, 262, 268, 269, 273, 306, 313, 317, 319, 322,332, 343, 348, 359, 361, 363, 366, 368, 370, 383, 387: n = A,T,C or G
  misc_feature 403, 413, 417, 427, 436, 439, 445, 450, 465, 469, 477, 495,498, 500, 518, 536, 542, 547, 548: n = A,T,C or G
ccctttcgagcggccgcccgggcaggtacttttttttttttttttttttttttttggctntttgtaaattctttattgccaggagntgaaccctaaagcnaggnccacnaanaaannggcccccnattttttttttaaaatttaaaatttannaaagngaacaaaaaaccccaatttttnnaaaaattttttganntnttanagntgnatccacangtttnttngcactattttntccccaanaaanttttctattatananggccgnncaanctttccaacctccaattgataaaaaattggggnaattatnaaangnggnttttaacccnctctttggggngaggnaattttcttgncnanccntngncccgattggtaanaatnatcctttgcttgaaanaaaataggtncctnttggttttgntgcaattanttntttggngtggnaattatggaagtaanttangggaacgnaaaaaaatcgggaaaagngtnanttaattttttacttactnaaaatggtactcaccctnttttgntaagnnggtttttcccc

SEQ ID NO: 7596 - DNA, 160 bp, Homo sapiens
  misc_feature 38, 50, 98, 145: n = A,T,C or G
cccttagcgtggtcgcggccgaggtacgcgggtgcctntgacttcctggngcaccatcatctgctgctgccttcagcagctgccatattttattcctncccctccatttcttacttgagtcgaattcaggtgaggttgctagatntaccaaataaaaata

SEQ ID NO: 7597 - DNA, 331 bp, Homo sapiens
ccctttcgagcggccgcccgggcaggtacagtatccaacattctcagctccagctggtggttccccgacaccagtaaactccacagagtaatcatagcgatttgccacatataaagcccaggtctgaaactccattctggtccactcaaatttatgatctgaatctcttaaggtcactgatggaaacaggggattgaatttcagagtttggtgtgctgatgacaatcatggatggaagacaggtacaaagatcccagactggttctttgaacagacagaaggatgtaaaggatggaaaatacagccaggtcctagccaatggtctggacaa

SEQ ID NO: 7598 - DNA, 478 bp, Homo sapiens
  misc_feature 133, 137, 145, 146, 155, 163, 173, 183, 193, 198, 199, 202,204, 207, 208, 209, 210, 211, 217, 220, 221, 222, 223, 225,231, 232, 233, 238, 241, 244, 257, 258, 260, 262, 263, 265,267, 268, 276, 277, 278, 279, 285, 287, 291, 293, 295: n = A,T,C or G
  misc_feature 299, 300, 301, 306, 307, 308, 313, 322, 323, 332, 333, 337,342, 348, 349, 351, 357, 360, 364, 376, 382, 385, 388, 392,395, 396, 404, 405, 410, 412, 413, 415, 416, 419, 432, 434,438, 441, 452, 458, 461, 464: n = A,T,C or G
cccttagcgtggtcgcggccgaggtacttttttttttttttttttttttttttttttttaatttttttttttttttttttttttttttttttttttttttttttttttttttttttttttttttaaaaaaaangggntttttttnnaaaaaaaantttttttntttaaggggnaaaaaaaaanttttaaaaanccctnnaangnaannnnntttttnaannnnanaaaaannnttttnggnaantttttttttaaanngncnnancnntttttttnnnntttccnangggncnanggtnnnccccnnnttttngaaaaattnntttttgggnnggtnaaaanaaaaannancccccnttnaatnaaaaacccccantggggnttnacnttanagnntttttccnncttcncnntnnggnttttttttaaaantngggnaancaatttttttnaaaaanccntgnccaaaaaaggggaa

SEQ ID NO: 7599 - DNA, 342 bp, Homo sapiens
cccttagcgtggtcgcggccgaggtacatgggactacaggcacgccccaccatgcccagctcatttttgtatttttagtagagacagggtttcaccatgttggccaggatgatcttgatctcttgacctcatgatccgcccgtcttggcctcccaaagtgctgggatcacaggcgtgagccaccacacctggccctctatttattctctttaaagagagagaaaactatgagaggccaaaattatttaattaaaatctttaccttagcacaaggggaaaaaaatgggaatttgccctaatataggtgatgaaaggcatacacaatgaataggaaacaatcac

SEQ ID NO: 7600 - DNA, 569 bp, Homo sapiens
  misc_feature 451, 494, 508, 520, 525, 530, 531, 532, 534, 535, 536, 537,538, 539, 541, 542, 543, 544, 545, 547, 551, 555: n = A,T,C or G
cgccagtgtgatgggatatctgcagaattcgcccttagcgtggtcgcggcccgaggtacagacttagaaattatctaaagatttcatctttttacctcatatttcttaggaatttaatggttatatgttgtctttttttcctatgtcttttggctcaagcaacatgtatatcagtgttgactttttctttcttagatctagtttaaaaaaaaaaaaaccacataacaattctttgaagaaaggaagggattaaataatttttttccctaacactttcttgaaggtcaggggctttatctatgaaaaagtaagtaaatagttctttgtaacctgtgtgaagcagcagccagccttaaagtagtccattcttgctaatggttagaacagtgaatactagtggaattgtttgggctgcttttagtttctcttaatcaaaattactagatgatangaattcaagaacctgttacatgtattacttgggtgtatcgatnatcatttaaaagtnaagactctgccntccanaatannntnnnnnntnnnnnangtanctgnccgggccggccgtt

SEQ ID NO: 7601 - DNA, 375 bp, Homo sapiens
ccctttcgagcggccgcccgggcaggtactttttagaaagtgaaatgctgtggacatttaaggtggagccactgtgagagtctagggggatagatggtagtcgtctcagaatgaaacgaattacaccccctctcagagccctttccaaggatcccctccttctttcagctccttccctccacctcaatacacactcctgtcccaggaacctaacctcatctagaaataccagggccagcatgccttacacctagaggtttggttggcttcagagaaacttctggaggctaaaagcagccaagaaagaatcagccactacatgctgggccttgggatgaaacaggaagccagtggaagctgtgatgggggctgggg

SEQ ID NO: 7602 - DNA, 325 bp, Homo sapiens
  misc_feature 84: n = A,T,C or G
cccttagcgtggtcgcggccgaggtactgcaataatcacagcgtttatccgtgccttgatgtcaaaagttaagagagggtgganaccagaccgaactattgttttctgttcttggggaggaacagcttttggcaatattggctcatatgaatggggagaggatttcaagaaggttcttcaaaaaaatgttgtggcttatattagcctccacagtcccataagggggaactctagtctgtatcctgtagcatcaccatctcttcagcaactggtagtagagaaaaataatttcaactgtacctgcccgggcggccgctcgaaaggg

SEQ ID NO: 7603 - DNA, 219 bp, Homo sapiens
  misc_feature 18, 19, 111, 138, 147, 161, 197: n = A,T,C or G
gggggcccccttcttagnntgccatggccttccggagccgggccccgcccagttggttggatgggattttctggcaggaatttccgcccctttaaccgtgggtccgccggnccgaaggtaccagaagtttaaccaagnttttggagntttttttattttanggaaaaagccctaattcaatttcaaaatgccttttnttaaaaaaaatttaccctttta

SEQ ID NO: 7604 - DNA, 159 bp, Homo sapiens
  misc_feature 89, 124: n = A,T,C or G
cccttagcgtggtcgcggccgaggtacattattttccatatacttatgtagctcgaattttattatgtatctaaatgtcctctgtcagntttaatttggtttaaattcttggataccaaataangccttcatcaattcctaagaaaatcactgctcatt

SEQ ID NO: 7605 - DNA, 477 bp, Homo sapiens
  misc_feature 49, 54, 57, 59, 65, 69, 70, 81, 83, 93, 98, 102, 106, 114,119, 128, 132, 134, 139, 144, 149, 153, 156, 157, 161, 167,169, 173, 178, 184, 189, 190, 198, 201, 205, 206, 208, 214,216, 230, 231, 238, 239, 242, 246, 248, 257, 260, 261: n = A,T,C or G
  misc_feature 277, 280, 289, 291, 293, 294, 333, 337, 343, 346, 351, 357,358, 362, 365, 377, 380, 390, 396, 406, 410, 426, 448, 464,472: n = A,T,C or G
cgaattcgccctttctagcggccgcccgggcaggtacatacatttaaanggtgntananggcaanatgnnaagtcatggtnantgtcttaaanaaggnttantatnattcaatntgtcncatactacnaaananattanagtcntaaanaatnttnngcgnaaaaanangctnttaantttgcntttcnnagaacaanctntatnntntcaagngnatatttgtgacctnnactaaanntantatnanctgtctaanacnnagcagaattaacaaanttnaattctttnantnncacaaaatatttgctcttaaattttgcatgttcaactanaaantcgtangtncaaancctttnngcgnaanagaaaatatgtnacntcccttgctncatatntggttttttnttanaaattattaataaaancttcccctttaaagttttttcncttggaactaaattcnaaaaattngaaaa

SEQ ID NO: 7606 - DNA, 305 bp, Homo sapiens
  misc_feature 211, 237, 247, 261, 279, 289, 303: n = A,T,C or G
cccttagcgtggtcgcggccgaggtacacataaaaaagtcatgggacttttctgttttgtaataaataaggcagtggccaattattactcattagtaacttttttgagataagctattaagtctgccctttcttccttcttcttaatgccgacaaagatcatttttgttccagggatgtactttttttttttttttttttttttttcccanagattataaaaattttattaataaanaaaatctgcnttacacatatcccntttaaaaacaaccacctnaaacatgtanaaatgctttatttngg

SEQ ID NO: 7607 - DNA, 431 bp, Homo sapiens
  misc_feature 14, 137, 141, 147, 148, 156, 157, 158, 159, 164, 168, 173,190, 196, 198, 210, 215, 220, 223, 233, 235, 236, 241, 257,262, 265, 268, 270, 272, 278, 286, 288, 292, 309, 312, 315,320, 345, 347, 356, 358, 370, 371, 379, 384, 387, 397: n = A,T,C or G
  misc_feature 398, 400, 405, 409, 426: n = A,T,C or G
cggccgccagtgtngatggatatctgcagaattcgccctttcgagcggccgcccgggcaggtacttggcttggagactggcgcggcgttcgtgtccgagttctctgcaggctcactagtcttcccggtagattcaantctngcaccnnttgaattnnnnacccngttntggangaaggccccagtttccnagtaangngaacttttttgnaaaanatttncanaattgaacantnnaaagntgaaaaattcctttcntttgntanaananangaggantcctccangngtanaaaatctgtaatagctnggnaanggccnttaaataaaacctttcctttaaccntnccggccttnanttaattataagnnccatgggngtccncancccttggtannangaggnaacntccttattggtttaaanccaat

SEQ ID NO: 7608 - DNA, 346 bp, Homo sapiens
ccctttcgagcggccgcccgggcaggtacccattaaaagtggttttgtgtgcaattaacagacacatgttctacccatacattgttttccaaaattattgtgtggctttaaaaaaaaaaacccacacaacaaattgcaaaaggcactgagataacatctgcttctagatcattgctaggctcgaaaaataaagcttgttctaccaggaatgacaagttagaacttagtatttgccaaagcagaaattatatagtgtcagttatttcaggcaaaccttattcggctctcatccccaactatctgtcagaacaattaaaagagatcaaaacagtccagcataactagg

SEQ ID NO: 7609 - DNA, 344 bp, Homo sapiens
ccctttcgagcggccgcccgggcaggtactaacagagacttgatataccaggttttgaatatctaagtaaagcttaaaatacgaaagcaaaaacataatatagaaagaactatctatggttgatattctcacagactttataatttatttagtcatcctaataatactttgattttactgtctgtgtctcttgttgcagttttaaaacatttcctttactttggatatctgataaaattagattacattttcttatcaaattttctatcagatacattatataccataattatagcccccataaattgacaaatttgttgatttgcctcttctcattggtagca

SEQ ID NO: 7610 - DNA, 728 bp, Homo sapiens
  misc_feature 32, 33, 37, 130, 184, 343, 388, 395, 408, 422, 437, 469,482, 499, 522, 529, 564, 607, 611, 615, 619, 635, 652, 653,656, 662, 667, 679, 686, 687, 691: n = A,T,C or G
ccctttcgagcggccgcccgggcaggtacttnngttnttttttgttgttttttccctcacattacatgatttccaatggcctatctacaagtttgatagccctttcttctgcttcatcgattcttctgtnggacacattaaatttttgagtccagttattgtattcttcaactttatacttttngttatcttttatttctttatgaaaattctcagtttgttcatgcattgctcccatgagactctttatggttgctctttttaatttcctgtcaggttaatcacatatcttcatttcattaggggttgggtttctgaaaacttatcttcttttatttagagngtttctgggtttcatttttcttgactcaaatgtgttgatttctgngaattanataagataacctnctctaccagtcttnttaaactggccttcnggtaggagaatgtttctctccaaataacccantgaaagatctaanatgcctctttgttcttntataacccacttttactggcctncagaggngagggatgaactaagtcataaattttggccttganacaggtacccaaaagcgccaaatcctgtttgccatatctttgncttntttnaggnttcaccggctcctaancaaaaaaaaaaaaaaannccntttaanctaanaaggggggcatnctattgnnaagntaaaaagttttcaaaatccatcttaaaaaaatttttt

SEQ ID NO: 7611 - DNA, 341 bp, Homo sapiens
  misc_feature 11, 338: n = A,T,C or G
ccctttcgagnggccgcccgggcaggtacttctattttaaaacatttcagaaaaaaatatatgttatagcaatactcttactcaaaagaagaaatttcctaactctatcagataaactcatctttagtataaataagcattatttgcaggttgccacaggtggacttttagtaagtaacctaacccatgtttcagcttctaaatctgcaaaatgagcaaggtacctcattagtaattgtttttgttgtttcatttttttctaatgtctcccctctaccagctcacctgagataacagaaatgaaaatgggaagggacagccaagattttctccctttngct

SEQ ID NO: 7612 - DNA, 363 bp, Homo sapiens
  misc_feature 247: n = A,T,C or G
ccctttcgagcggccgcccgggcaggtacagactgagcttcctgaaggaggattcccagagttgggtggcagcactggaagcatcaggaaccctggctgctctctaccctgtggccttcagcagccacctcgtacgctcttcccactctgcggttctgccaagcaccttgcctgggcacttgtgtgtgtgcaagactctacagtgtgttgtctgctgcttttttttttttcttcttctgtttcaatnggcagctctgtttcctaaagtggaatgaactgaagatacaaatactaatagaagataaatacccataagctgaaaaaagagacagagagcaatcatgttcaatgtcaccatcctgc

SEQ ID NO: 7613 - DNA, 608 bp, Homo sapiens
  misc_feature 481, 514, 565: n = A,T,C or G
ccctttcgagcggccgcccgggcaggtacgcgggctccagtggattgttggccatgtctttccaactccacaatatctctatcatgggaaacacctggggtttttgcgccacataggagaaagatctggaaactatttgggttttgttttcaacttttcatttggatgtttggcgttgcacacacacatccaccggtggaagagacgcccggtgaaaacacctgtctactttctaagccagtgaggttgaggtgagaggtttgccagagtttgtctacctctgggtatccctttgtctgggataaaaaaaatcaaaccagaaggcgggatggaatggatgcacccgcaaataacgcattttctgagtttttcttgttaaaaaaaaaaaatttttttaagtaagaaaaaaaaaggtaataacatggccaatttgttcataaaatgacttttctggtgtataaattattcctaaaaaatcctngtttatataaaaaatccgtagatgaaaaaaaantttcaaaaatgttttttggaatattctgttggtaagaaatttaattcctgntaattgcgaatatacttcttggatttcttttaacataaatggg

SEQ ID NO: 7614 - DNA, 300 bp, Homo sapiens
  misc_feature 292: n = A,T,C or G
cccttagcgtggtcgcggccgaggtactaggaaggcagacggctcgggacttgcccagcatcctcaagctggcaccataccagcgtgactagagccacctcccttggctccttgtccactgccctttgcatctcatgcgggtctccagaagaccccgctcctgctgtgcaggctcccacgcataccttagacactgctgtggtgttgggtggccacgtgacccacacaggccttttctagttcaccaagttttctgcaaggatgctggttagggaagtgtctgcaggaggancaagtctt

SEQ ID NO: 7615 - DNA, 290 bp, Homo sapiens
cccttagcgtggtcgcggccgaggtacagttcccatcacgtaagtcagtaatgttgtatgcagcagaaatgatacctaaactaaaaacaaggacacaaaaaacaggaggtgctgaccaaagtcttcaacaaggagagggaagtaaaaaagggaaaggaaagaaaaagaagtaacctagtatcagcatcaagtatgtggtacattgatgggctggagagcagggtggcagcctgttctgcacagaaccaagaattacagaaaaaagtccaggagctggagaggcacaacat

SEQ ID NO: 7616 - DNA, 357 bp, Homo sapiens
ccctttcgagcggccgcccgggcaggtacatgggactacaggcacgccccaccatgcccagctcatttttgtatttttagtagagacagggtttcaccatgttggccaggatgatcttgatctcttgacctcatgatccgcccctcttggcctcccaaagtgctgggatcacaggccgtgagccaccacacctggccctctatttattctctttaaagagagagaaaactatgagaggccaaaattatttaattaaaatctttaccttagcacaagggaaaaaatggaatttgcctaatataaggtgatgaaagcataccgcaatggaacaggaaacaatcaccattttttaagtaa

SEQ ID NO: 7617 - DNA, 480 bp, Homo sapiens
ccctttcgagcggcccgcccgggcaggtacttccatttcttgggaaattactcagtaatttaaaaaaaattgttaatgcaacaacctagatgactattcagagatttgtgctgagtgaaaaaagcaatcccaaaaggttgtatcttgtaattccatttatgtatttttcctgaaatgacaaaactgcagaaatgtagaacaaattagtggctgccaggtgttaaggagaaggtgaagataagagaaaaatgtgtgcagctataaaagtgcaacatgagggatccttgtggtagtgaaactattcggtatcttgcttatatcaatgtcagcatgttacttgtgattttgtggtgtttgatttttttggcgttgttatagtttttccattggtggatattgggtgaatagcccatgagatatatctgtattatttcttccaactgcatgtgaatctacaattatctaaaaattaaaatttta

SEQ ID NO: 7618 - DNA, 191 bp, Homo sapiens
  misc_feature 49: n = A,T,C or G
ccctttcgagcggccgcccgggcaggtacgcaggggccccggtcgggcngggacttcctgtgtcgtatttccaaggactccaaagcgaggccggggactgaaggttgaacagcagagaatttcaaaggaccttgctaatatctgtaagacggcagctacagcaggcatcattggctgggtgtatgggggaa

SEQ ID NO: 7619 - DNA, 345 bp, Homo sapiens
ccctttcgagcggccgcccgggcaggtacatctacctaaaggactattatgtggaataatacatactaatgaagtattacatgatttaaagactacaataaaaccaaacatgcttataacattaagaaaaacaataaagatacatgattgaaaccaagttgaaaaatagcatatgccttggaggaaatgtgctcaaattactaatgatttagtgttgtccctactttctctctcttttttctttcttttttttttattgtggttagctgtcacatacaacttttttttttttgagatggggtctcgctctgtcaccaggctggagtgcagtggcgcgatctcggc

SEQ ID NO: 7620 - DNA, 451 bp, Homo sapiens
cccttagcgtggtcgcggccgaggtacatttcacagttttcagtattcagtccctcatgaacattttatagtcatctcttcggccctgttgtgaaatatgtgattccagttcaattcagagtgtatgattccgcttttcacgctgatcaagtaaatttatggtgtctcttttctgatcttcaacattaaaaactaaaaaggaaaaacacataatattctatagagcattaaatgagatactagccctaggcaggtcccattttcttatcaacttctagaaactgtcataaagaggactgcatctcccacagcaacactgtaattgggagttgtattcctcatcaaggacaagatggcaacggtgatatgggagggggacagggaagtgctgggtagagaagggcagggtcactggcaagggctccaccctcaggcttgtgcccatggacct

SEQ ID NO: 7621 - DNA, 296 bp, Homo sapiens
  misc_feature 106, 117, 147, 215, 223: n = A,T,C or G
ccctttcgagcggccgcccgggcaggtacttttttttttttttttttttttttttttttaacactacaggtttcaaatgaatacttttcttatgttgcccttcaanaggttcaggantttttgcttttaaaacctgcagcctaccgngggaaaccaaaaaagcattccctatttccaactgcagtatgtataaatacatatcactacaaaatgtntagaaagngtgatgagatacatgaatggcatttttattggtcataacattttgatgaaaagcatttaaagttttaacttta

SEQ ID NO: 7622 - DNA, 369 bp, Homo sapiens
  misc_feature 161, 250, 297, 313, 353: n = A,T,C or G
cccttagcgggtcgcggccgaggtactttttttcattctcattgttacatgattttttaaaaaaaggaaaagaaaatgtgaaacacaatttagtcctcattatttatttgtagatcctgcagcatcatggttgtaattaaattttttttgggagtttccgntaaatgtaaatattgcttcttcttgttaccatactgatttcttttcctatttataaacgtatttttgattgggcagttaaaacaaaagntgtcttaaaaagttttaaaattagagaaaatgtgcttttaccacagnttgccctataaaaaangtgctcctatggtttatccccaaggccaagtttcattacntattaaaggcctttcc

SEQ ID NO: 7623 - DNA, 296 bp, Homo sapiens
  misc_feature 117, 256, 262, 276: n = A,T,C or G
ccctttcgagcggcccgcccgggcaggtacaatcactgcccccccgctttttttttgagatggggtcttgctatgttgcccaggctggtcttaaacgcctgggctcaagcaaccctnccgcctccctgctgagattacaggtgtaagccaccataccgcaacctcaatgacacccttctgatggtctttacacagtctgtgatgtctggtggcccccctgccctggactcaataattgatagattttcctagagtnacaagnatgagaagctccanctattccattaaaagtatta

SEQ ID NO: 7624 - DNA, 286 bp, Homo sapiens
  misc_feature 251, 260: n = A,T,C or G
ccctttcgagcggccgcccgggcaggtacccaggaaagacaacataagtatgaaatctatacactgaagttagccaaaagtgagcatgtgttttctgctttaatttactttaatgcaaaaacagaaatgactatttcttaaagtgtatattttaggagaagatgtttcaaatgaaaaagagcaccacaattgcatcaatatgagaaatagtgaatattctatctatcttcttggtgttttcaatcttttanaagtgctgntgcaaaaaaaggaatcttgttttaaa

SEQ ID NO: 7625 - DNA, 101 bp, Homo sapiens
  misc_feature 99: n = A,T,C or G
cccttagcgtggtcgcggccgaggtacgcaaaaagaaactgcaatagatgcttgtttctctcaaccctttattggttatcaatagtttgggcaaaattncc

SEQ ID NO: 7626 - DNA, 391 bp, Homo sapiens
  misc_feature 257, 340, 351: n = A,T,C or G
ccctttcgagcggccgcccgggcaggtactggattctataggtccaccattaaaagctggtatgggacaccaatttatacacataagggttagattaaaattttaattttttggttgatattaaactgaaatttatataactgaggtcttgaatcttaaaaaaagtaaatgataaaaatttaatatagttaactgttcactgatatgtctattcacttcatcataacctatatatttaattaaaaatcaaattatgnagtctgcaaatcaggatgcctatcaaagccaaaattgcccatcccagggggtccattaaattctttttttatattttttaatnctcaaggatgnaattattaattaccgaatttcaagttaaaaattttttaaa

SEQ ID NO: 7627 - DNA, 326 bp, Homo sapiens
  misc_feature 305, 319: n = A,T,C or G
ccctttagcggccgcccgggcaggtaccagccctaccctgcttatttttaataatgcagagattacttactacactttctgaagccttattttgaaatttatttcacatttcagacatgtccataatttactgttgaggaaataaaacagcatgtagaacataattctatttatattaaaattacataggtatgtgtggtatacatacatgacagttcttttctccttctgagtatggtaggggttgtagatgatttttacttttttatttatacttcttaaatgttctgacctgctttacagtngttcactttttgtntaattaa

SEQ ID NO: 7628 - DNA, 121 bp, Homo sapiens
  misc_feature 38, 86, 107: n = A,T,C or G
cccttagcgtggtccgcggcccgagggtaccctcttgnaggtaggaaatgctctgtgattggtaaataaaatttggagcagaacangaaaaagattttagcaaatgnaagaaattttttta

SEQ ID NO: 7629 - DNA, 106 bp, Homo sapiens
  misc_feature 17, 40, 43, 51, 61, 79: n = A,T,C or G
aaaatgatagttttatnatactgataatacaaccactaanaancagaaaanagaagatatnctcgtgggggagaacaanggctgggaggggaggaagcatggccaa

SEQ ID NO: 7630 - DNA, 118 bp, Homo sapiens
  misc_feature 18, 57: n = A,T,C or G
gggcgaatggccctctanagcatgctcgagcggccgccatgtgatggatatctgctnaattcgccctttcgagcggccgcccgggcaagttctgattatatcatcgcccagtaaacat

SEQ ID NO: 7631 - DNA, 393 bp, Homo sapiens
cccttagcgtggtcgcggccgaggtacttctatatctacaagggggtccgcaagacaatcccatgaggttggtagaacagagattctcatctccgttttaactgaggctgctgacttgagtaaaccaatagataaaaggatatacaaaggaacacagcctacttgtcatgacttcaaccacctaacagccacagcagaaagtgtctctctcctagtgggcttttccgcaggccaagtccagcttatagacccaatcaaaaaagaaactagcaaactttttaatgaggaaatggcaagttcctagcgtgcgtgagccaggacgggtttctgcgggtgttcaactttgactcagtggagctgcacggtacctgcccgggcggccgctcgaaaggg

SEQ ID NO: 7632 - DNA, 439 bp, Homo sapiens
  misc_feature 4, 8, 10, 19, 23, 27, 32, 332, 413: n = A,T,C or G
ctgnctcngncggccgccngggngatnggatntctgcagaattcgccctttcgagcggccgcccgggcaggtacagtttcatatgccagttttactaggaaaaaaatatgaaaactattgttaattcaaatctaaatttatttaaaccctaaaacacatggttttgatggctgtaatttaaagtaaggagctatcaaatgatgctgacaaaagaaaaaccttccaaaatacaaaagaaagagaactctattatttacttacctgtattaatgaagaaaaatataaataattccacaaaattggattgtttttcctaaaggaggcttaaaagnatttaggaggttaaaaaaattgggtttttggaaaaccaggaaattattccttggttatttttttgcctgggaggaggaagngggaggggaaaattcaggaaacccaa

SEQ ID NO: 7633 - DNA, 171 bp, Homo sapiens
  misc_feature 18, 131: n = A,T,C or G
ccctttcgagcggccgcnccggggcaggtactctggcaattcacctttcaattcaaatatcctgtagagaacgctttcctctgagaagccactggatgtctgtatggtgcaggaaggtttatggtgctggncttgtccaggttttttggttttggggttgttttttttttt

SEQ ID NO: 7634 - DNA, 629 bp, Homo sapiens
  misc_feature 9, 23, 96, 104, 109, 117, 124, 127, 153, 159, 165, 169, 171,176, 180, 210, 216, 233, 253, 267, 276, 290, 292, 300, 301,304, 306, 308, 312, 326, 332, 339, 346, 350, 352, 356, 359,361, 363, 385, 391, 392, 401, 411, 423, 428, 436: n = A,T,C or G
  misc_feature 438, 446, 453, 457, 467, 472, 488, 505, 511, 519, 532, 548,551, 555, 559, 561, 567, 569, 574, 593, 602, 611, 614: n = A,T,C or G
cccttagcntggtcgcggccgangtacattattgcattagggagccacaaaattatgtagcatcatttacaaatgaaaacaggtttaaaaatgaantaaagatncttantaataggnaaattancantgggtattccatatgatccttccttngcaagnaattgncaananagtanggtngccataataattgttgtccaattttataanggaatnttttacattcttttttntggtatttggtgaattaacngctctttttgtccntattaatgncaaagctatcaaanancttctatnnttngnangggnaatatgtccttaancaacantataatnaaaaggnttgntnatanatncnanatatatatttaagtccaatatngcctanntgtttaacngtttaataantttttaaattanggtcnttaattangntgttcaanttaaatntggnggccgttgtntttcnttaaattattttccanattttttaaaaaaattnattttntttacccnataaaatttaatnaaaaaaattggttcgnaanatanttanancatgtnanaaaanaattaaccaatttttaatnttctgtgantgcctattntanaaattttccttcctt

SEQ ID NO: 7635 - DNA, 359 bp, Homo sapiens
  misc_feature 94, 182: n = A,T,C or G
ggatatctgcagaattcgccctttcgagcggcccgcccgggcaggtacgctggatagcctccaggccagaaagagagagtagcgcgagcacagntaaggccacggagcgagacatctcggcccgaatgctgtcagcttcaggaatgccccccgcgtactttatttttttttttttttttttngggaaattctttattgccaggagtgaaccctaaagtggctcacaagagtgccctatttctttcaattaactacaaggacaaacacatttcaaagtttgagataagtgaccagtatgatttgccaaaattctaaagcgcctcaccatgaaatggataaagggttacctttggggattt

SEQ ID NO: 7636 - DNA, 397 bp, Homo sapiens
  misc_feature 316, 333, 358, 386: n = A,T,C or G
ccctttcgagcggccgcccgggcaggtactacctcagctgggagaaatgttggaaatggtttaaacacattatcagattcatcttggaggcatagtcaagttcctagatcttcatcaatggtacaccaaggtggtgcattaccggaagtggatcaaggacaccatcgtggccaacccctgagcacccctatcaactccctattgtagtaaacttggaaccttggaaatgaccaggccaagactcaagcctccccagttctactgacctttgtccttaggtgtgagggtccagggttgctagggaaaaggaaatcancatgaccccaggtgtanaccagaagtgtttttctttaaaatnggtggtaattttttggtcccttcttttngtggtccctgg

SEQ ID NO: 7637 - DNA, 342 bp, Homo sapiens
  misc_feature 302, 311, 316, 339: n = A,T,C or G
ccctttcgagcggccgcccgggcaggtacccctgttggtatctaggaagtaactagcttgcttttgattttacaggctcataggtggaagggacttgccttgtctcagatgagactttggactgtggatttttgcgttaatgctgaaaagagttaagactttgggggactgttaggaaggcgtgattggttttgaatagtgaggacatgagatttggaggggccaggggtagaatgatatggtttggctatgtaccccacccaaatctcaacttgaaattgtatctaccaggaattcccacnttgttgttngggantagacccaagggggagggtaatntga

SEQ ID NO: 7638 - DNA, 325 bp, Homo sapiens
  misc_feature 118, 165, 188, 190, 200, 216, 220, 221, 222, 226, 231, 234,277, 281, 288, 307, 313, 315: n = A,T,C or G
cccttagcgtggtcgcggccgaggtacgcggggcctttctcgttccccggccatcttagcggctgctgttggttgggggccgtcccgctcctaaggcaggaagatggtggccgcaaanaagacgaaaaagtcgctggagttcgatcaactctaggcttccaactncgttatgaaaagtgggaagtacncnggggactcanagagaaaaagtaaaanaccnnnaatngatgntgnatagaccaggatccttccagctgaacaaagtcagccacaaaancagnactaatnccaggccttgctaacaatntgggantncaagaagttc

SEQ ID NO: 7639 - DNA, 379 bp, Homo sapiens
  misc_feature 120, 121, 129, 130, 142, 271, 299, 309, 369: n = A,T,C or G
cccttagcgtggtcgcggccgaggtactatgcccccgtatgggcagggaccgccaatggtgcccccttaccagggtgggcctcctcgacctccgatgggaatgagacctcctgtaatgtnngcaagggnnggccgttacttnatcttactttcatccaggtctaataggtttggagattaaaccttttctcaacttgtgctgtttatatagccaagcttccgtcaataaggcttcattgtgactttaacaaacattatcttcccacatacncagggaacctattgggacatttattttnaccatggggnaaaaaaatttatttttggggaataaataaaaggcagggaacttttccctggaaaggttgncaaattttta

SEQ ID NO: 7640 - DNA, 109 bp, Homo sapiens
  misc_feature 40, 52, 64, 98, 100: n = A,T,C or G
gatatctgcagaattcgcccttagcgtggtcgcggccgangtacctgccatnactgattgtagnctggtgaggcctgttttagacttctgacctgtananctgtaacat

SEQ ID NO: 7641 - DNA, 301 bp, Homo sapiens
  misc_feature 247, 258, 279, 283, 284: n = A,T,C or G
cccttagcgtggtcgcggcccgaggtactggtctgtggcctgctaggatccagggtgcacagcaggaggtgaatgtaggatgagcaaacattactgcctgagctcaactttctgtcagatcagcagtggcattagattctcataggagcatgaactttattgtgaactgcacatgcaagggatctaggttgcacactccttatgagaatctaatgcctgatgatctgaactggaacagtttaatccncaactccagtnccgtggggaaaaatgtttttncacnnaaacttggtccctggtg

SEQ ID NO: 7642 - DNA, 314 bp, Homo sapiens
  misc_feature 272: n = A,T,C or G
ccctttcgagcggccgcccgggcaggtacctactccataaagttacgaagaacacataaaacctgtgaagcacttataatagtgccagaacattgtgagcacacatgagatgttcattggcattattattaagggcttatataaattcccaggtaatgcataataacagtagagactgtgacaagccctggcttccataaattgtcagcttcattttccctgtttcatttgatatgttattccattttatgctttgagacagctaaccatantaaaaaaaaaggaaagaaaaaagagagagaaagtagggacaa

SEQ ID NO: 7643 - DNA, 374 bp, Homo sapiens
ccctttcgagcggccgcccgggcaggtacgatcttggctcactgcaacctctccctcccgggttcaagtgattctcgtgcctcagcctcttgagtagctgggattacaggcgcgtgccactggcggtccggctaatttttgattttttagtagaagatggggtttcaccatgttggccaggctgatctcaaactcctgacctcatgtggtccacccaccttggcctcccaaagtgctgggattacaggcgtgagccaccacgctcagcctacaagcaattttttaaaaactgacacctattactgataaaattctctgtttaaaatcctattttactattttaaaggataagtattaagttttttttttaaaat

SEQ ID NO: 7644 - DNA, 118 bp, Homo sapiens
  misc_feature 11, 12: n = A,T,C or G
ccctttcgagnngccgcccgggcaggtacacgccatttaggagactataaaattcctttcatttatgccatgtgaacaagttgaggcggtgcatttccaaggttgaattcattgaatt

SEQ ID NO: 7645 - DNA, 261 bp, Homo sapiens
  misc_feature 115, 139, 141, 176, 199, 215, 252: n = A,T,C or G
ccctttcgagcggccgcccgggcaggacctctgcagagactccttgcgtatcccaagttgaaccgcttatgtgctaatgaagagatgatgagatcagtcattgctgactcaattnctctgaacagtgatggttctgcantnggtggctgacctgcctaattattttgatgaaaaanttgaagttttgaaccatgttttntttcctgaaatttaangggctcaacgaaaggtgggcccaacttaaaaattaantttttttgg

SEQ ID NO: 7646 - DNA, 370 bp, Homo sapiens
ccctttcgagcggccgcccgggcaggtacacctgcaaggctgtcaacagtcttggagaagccacctgcacggcagagctcattgtggaaacgatggaggaaggtgaaggggaaggggaagaggaagaagagtgaaacaaagccagagaaaagcagtttctaagtcatattaaaaggactatttctctaaaactcaaaaaaaaaaaaaaactcaagatagtaaaagcacctagtgtgatagattatcggttaggtcatttgtgggttgattcttcagaaacagcagttgatacctagcagcgttattgatgggcattaatctatgttagttggcaccttaaagggtacctagtgcagctaggatttcattt

SEQ ID NO: 7647 - DNA, 390 bp, Homo sapiens
  misc_feature 329, 343: n = A,T,C or G
ccctttcgagcggccgcccgggcaggtacaagttgggaatgagctggtcttcttcatggctcattcctgaacgaaagtgtgtgatacctacatctgtctgtttggaccacctggggtcggattgggggatgagcacatggcccattgagagcatgccgagtccacccaactccttaggggtgtagaacacaaccggggggaacccgacttggcatcttggagttgagtccaatcttgataccgtgtctggattttgttctcacactttcaccaagtaaagttcccaaggagcctcttgggggtggtttcacccaacaagccctccccgnaaaggtatggtcantaaagggcccaaatggagaagcctggtatttccacctttattcaaca

SEQ ID NO: 7648 - DNA, 294 bp, Homo sapiens
  misc_feature 8, 140, 160, 176, 186, 187, 204, 238, 243, 267, 275, 285: n = A,T,C or G
ccctttcnagcggccgcccgggcaggtacagggcacatccaccagcacccggtcataggtgtccccctccagtttctccccatttcctgccatcccatgaggtaactcgaacttgatttccatccctgatctcttcaggncaccatagctggtggaaggnatccttcttgtgagancttgggctanntctggagaccggggtgnagaaggatcatttgggtcatgctaaagtatttgnccggncaaaccaagccaagttcttgaaangccaaacnggcttaggtngttcttttt

SEQ ID NO: 7649 - DNA, 547 bp, Homo sapiens
  misc_feature 362, 536: n = A,T,C or G
cccttagcgtggtcgcggccgaggtactgttccaagcacccaagtgcttgctttggcccttccattgacttaccatgccaccttggcaaactccttaattgctttgggattcatacaaaaaaccgatatacctgtgtagtccagctcatggcattgtaaggatcaaatggcatgctgtatgcaaaaggtctttggaatctatacacaaggctgtaaaactatgtcacactgtttggatggaaagaattctgtattcaggagccaaaatcagatattcagagacaaaaaaaggaagagatggctcctgcggatctatccctccacttccttgcatttctctacattttaaagtcatctcttancactataaaaaggaaatccagcactttcacaagctcctgacttgaacttccatatttttaatttagagacaaggatggtttaagaacttagaaagatgttgccctaccacccaagggaaaatgtctgacaggttttctatctttggattcacctactatttaatgaaatattantcattatttta

SEQ ID NO: 7650 - DNA, 363 bp, Homo sapiens
  misc_feature 95, 105, 110, 197, 199, 206, 303, 331: n = A,T,C or G
ccctttcgagcggccgcccgggcaggtactttttttttttttttttttttttttttttttatcttacactattaacactttattgaaaatatttntattgaaaanaactntggaaacacataaaaatattttggtaagaaaacaaaaagcacatttttactaccagtgtgaattactacctgacaattatcaacttntnaaataanaacattaacctacttgtgattgaagaaagaattatcctgtctatggatgacataagcaacttggccaggacagaaccaatgggatgaaaccacattntaattccaatttggccagttaacttatngtaggttgaaatgaaaaccagtttaaacttta

SEQ ID NO: 7651 - DNA, 459 bp, Homo sapiens
  misc_feature 14, 17, 21, 28, 30, 37, 38, 46, 59, 61, 65: n = A,T,C or G
ttaaaaatttcccnttntcgnggtcccngnccaagannaaaaaatncccctttaccttntntttnttgatgaagtctgtagaggtgccaagagagctgcagatgcacagtcacctgctgaagacacatgttcagtccagaatggagaagatgatggacggaatcaagctagactgggccaccgcggaagctcttgccttgggttctttacttgctcaaggttttaatgttcgtctaagtggccaagatgttggtcgtggaactttcagtcagaggcatgcaatggtggtttgcccggagacggatgacacctacatccccctgaaccatatggacccaaatcagaaggggtttctagaggtcagcaacagccccctgtcagaagaggccgtcctgggattcgaatatgggatgagcattgagagcccaaagttactgcccctgtgggaggcacagtttg

SEQ ID NO: 7652 - DNA, 653 bp, Homo sapiens
  misc_feature 59, 72, 217, 220, 244, 262, 317, 319, 351, 356, 432, 446,468, 481, 486, 489, 510, 531, 535, 543, 551, 554, 563, 565,566, 596, 607, 622, 623, 624, 626, 627, 630, 633, 634, 635,636, 637, 639, 645, 646: n = A,T,C or G
ccctttcgagcggcccgcccgggcaggtaccaggtctgtaggctgatggaatagcacanggaaggtagtcanaaggtccaggtgaacactcagcaatcaggaggcacaggacataattcactttggatggagcatcctcagtttgcactgagggtctggacagaaactcaggtcttctaattcccagtaacagtgctggtggtagtgcttgctcagncgntgtctcttttctcacagcaaggtnaacagtcccaaaactcanaaataaaaaaaaatctacctccagtgttcctgccgcatcgtgacaagctctttcngnttccaggtccaggtcttgaaaatctggaaatntggantccatggctgtggctacactgaaagttatctgccccaactattgcataacactgtaattgaaatcttttcaacctncaatcctggacatnttatgttttgccacaaaatttnaagctttgaggtncagtnggnttttttcccctcctttctggngagggaaagcattttatcccncacnctttaaanttttttanggncccttggcncnnaaccccctaaggggggaaatttcaaacaanctggggggccnttacttaggggaccnnntnnggnccnnnnnangggggnnaaaaagg

SEQ ID NO: 7653 - DNA, 357 bp, Homo sapiens
  misc_feature 61, 125, 136, 161, 179, 182, 212, 214, 240, 244, 257, 271,298, 342: n = A,T,C or G
ccctttcgagcggccgcccgggcaggtacttttttttttttttttttttttttttttttgncctaaattgtttattaagtatgaattttacaaactttacttatattagcggtaaccgggggganctggaaaagtnttgcgccttttccaagctgcccggngagagccaccaatagtgnggnggaacctgtggccctttccaaggccacggntntttcggcctgcaaatgtcagcccacncatntccctgtgcttgnggactggttttggngatccacctggggttgtcaggaatttnttctgaatagcctttatgggaaatgggatcaaatggagggattnaccctcaaaaaattt

SEQ ID NO: 7654 - DNA, 358 bp, Homo sapiens
ccctttcgagcggccgcccgggcaggtacgcgggggggccgcacgctacgaggcccgcacacccagaaggtggagccccggccgggttacgaggaccacccagctgtctggagagatgaagaaaatgaggttcaaagagatgaagtctcttgcctaaagtcagtgacagaaagtgacagagctgggatgtgaatcctggtctgactctacagtcccacatggtagatggaacctccgagcaacacctaaacaaagggagttgatgccttcgaacagagtaatgtcgctggagacactaagcatcgtcggcccctggcaggagctccctaaatattgtgtttggatggatgggaaaaaa

SEQ ID NO: 7655 - DNA, 386 bp, Homo sapiens
  misc_feature 102, 127, 165, 171, 178, 182, 189, 237, 239, 240, 247, 264,271, 273, 282, 284, 285, 291, 294, 298, 304, 307, 309, 312,316, 319, 334, 337, 339, 340, 345, 352: n = A,T,C or G
ccctttcgagcggccgcccgggcaggtactttttttttttttttttttttttaagatgttttgctcgtcgcctaggctggagtgcaatggcgcgatctcggntcgctgcaacctccgcctccctggntcaaaggtgaattattcttggcctcaacccccctggangtaacnagggganttanagggcgncacggccacccaaaaccttgggcttaaattttttggtaattttttttnannaataaanaccggggggttttttgntccatgntntggcccaangnntttggnttnttcngaaacnttncntgnaacncancaagggttggaaacnctngnncccanctttttngggcccttccccaaaaaaatggcttgggggaatt

SEQ ID NO: 7656 - DNA, 399 bp, Homo sapiens
  misc_feature 245, 265, 300, 356: n = A,T,C or G
cccttagcgtggtcgcggccgaggtacattattctgtatccacattctctgcatctgattggatccctagattttatttcattttctgtgtgacactctccacagatatatatcattggttgctgctttggaggttgaacgtccttctgggtgtccattgttagcccctacacagcacggaaaaactcactccgcgtttccaaatacaacccggctagtccccccgcgtactttatttttttttntttttttttttctttttttnaggtgcaaagattcactttatttattcattctccnccaacattagcataattaaagccaaggaggaggaggggggttgaggtgaaaagatnaagctggagggaccgcaataggggtaggtcccctggggaaaaa

SEQ ID NO: 7657 - DNA, 391 bp, Homo sapiens
  misc_feature 252, 300, 364: n = A,T,C or G
ccctttcgagcggccgcccgggcaggtactttttttttttttttttttttttttatttaatcaaagactggtgaataaacataaatacagcacaattacttcagatcattcttcatattgtatacacacaaacccatgaacataatctgaaagaaacctgtagacagcaatgaaatgcatacagctttttcttccctcgctcaaaaaaaagtttaaacacacaaacttacaatctcatcagcacacactctnttgtgacaaatggatttcaggacataaaataggtggggtggcaaaagnaaactattattgcctaaccattatggaattaacccctttgtttaaatggaaaaaaacaggaagncagcccattaattggatttaaaggata

SEQ ID NO: 7658 - DNA, 249 bp, Homo sapiens
  misc_feature 1, 3, 15, 31, 35, 39, 40, 41, 141, 148, 159, 174, 177, 189,194, 195, 196, 197, 198, 199, 200, 206: n = A,T,C or G
ntnagggggcggaanttggggggcccccttncttnaaannnaaagccatggctccggagccggggcccggcccagttggttggatggggattattcttggccaggaaattttccgcccccttttttccgaaggggggcccncgccccnggggcccaggngggggtttaaccccnaanaagggggggggnccccnnnnnnnaaaaanccatttttttaaacctttttattaacctgggaaaaaaaaaaaa

SEQ ID NO: 7659 - DNA, 258 bp, Homo sapiens
  misc_feature 193, 206: n = A,T,C or G
tgcatgctcgagcggcccgccagtgtgatgggatatctgcagaattcgccctttcgagcggccgcccgggcaggtactgatggagatagactcaaaacagttatttttttacaattaatctacaaagggaattaatattgttgacttttaaaacatctgctggatatattatatgcaattaatagtagttaanaatttattcattnggtagatatgtttatttggtttttggttgtcatcgatttacattgccactaa

SEQ ID NO: 7660 - DNA, 273 bp, Homo sapiens
  misc_feature 28, 103, 240, 250, 264: n = A,T,C or G
tggctaattttaaaaaaatttttgtaanaaatggagtcatgaaactcccttgggctcaaggtgattccctcccacctcaaaccttcccagaagttgtttgagntgatgaattacagttattgagccaccatccctggccaataaaggtgttttgtaatacctataagaatatttgcctgcaaggatgtttgataggtttcttgatatttcattctctcttgaaatgttttgctttcctcnatttttttantttttcataaaaancctttactt

SEQ ID NO: 7661 - DNA, 546 bp, Homo sapiens
cccttagcgtggtcgcggccgaggtaccagtgggctctccccgtgtcctttggtgttattggagctggtgtatgacagactcaaggaaattttttaaggaaaatgaagaagaaatcaacctttatggttctctttcattggaagaggagaataaggaaagaaatggcaggtagagagggagggggaaaggaatagaaatggcatgtctttgatgctgtggcttgtgtggggacaatgggaagagcacagcaggcacaacatatctgtgttagtgccacgtggtatctgttaagtatggccagagcctcacatataagtgaagagagttaagacaattcttgctctttgaacaataatagtctatagaatttctattggcaaaccatcccagacaacctgacctatcaaacaaaagcaaataatccctgtctcaaaactgctggtctaaaagctagaaggggcatgataatggaaattgctagaaaagaaagaatgctctactctctttcctgtgcctacctacccccatctaaaccctgtaaaaca

SEQ ID NO: 7662 - DNA, 456 bp, Homo sapiens
  misc_feature 332, 361, 376, 420, 427, 428, 443: n = A,T,C or G
cccttagcgtggtcgcggcccgaggtacagaaaaagagagaagaagagaagagaaaatcagaatataagtcataccggctgcgagcccagctatataaaaagagagtgccaatcaacttctggggagaaaagttccctgggactgacacaagtttattttcctcagagccttggaattctattttatgaacctagagaagcagaatccttacttttgtgagtctggttgaataaagcttattctttgtcatgtgtattttagaaatagtaacttctaaagagtctggacaaaagtggggattaaaatcctaatgggtttgggaccatctttnttgcatagggggccttgtccatggcctgnggtgtaccaatgatnttgacatttctcaaggataggccccttttggatggggttttaancctttannaaataaaacctttgntttaaaaaaaaaa

SEQ ID NO: 7663 - DNA, 383 bp, Homo sapiens
  misc_feature 358: n = A,T,C or G
cccttagcgtggtcgcggccgaggtacagaaattattgctactatacttcactacaaagcttgtctatacagtatcatatgacctttgattatgaaaaaatcagaataaaaatctttagtgaccataaagcccttacaatcgtatacaacattcacatgggcaatattagacagttaagcacccaatacccatagttgacaaaatgtcccactgaccagcattcatttaaatacatccttcgtatagagggaggaaaaagagacagtgtcagctttccaaggcttgtcaaaaaaggattctcatgtactcaatgtcacctaatggttaaaatttttcacataacactttttaccattnatttttttaaaaaagccttttattt

SEQ ID NO: 7664 - DNA, 512 bp, Homo sapiens
  misc_feature 5, 18, 25, 27, 35, 39, 42, 45, 53, 78, 93, 167: n = A,T,C or G
gaatngggccctctagangcatgcncnagccggcngccntgnggnatgatatntctgcagaattcgcccttagcgtgngtcgcggccgaggtnccagggcagcaacccaatcagtgacatttgggctacccacgcgctgcggatcgtggctaagtatctgaagaggntgtcagaaatcccgatgatcttgaagcaaggtctcatatgcacttggcaagtgcttttgctagcatcggctttggaaatgctggtgttcatctgtgccatggaatgtcttacccaatttcaggtttagtgaagatgtataaagcaaaggattacaatgtggatcacccactggtgccccatggcctttctgtggtgctcacgtccccagcggtgttcactttcacggcccagatgtttccagagcgacacctggagatggcagaaatactgggagccgacacccgcactgccaggatccaagatgcagggctggtgttggcaggcacgctccggaaattcttatt

SEQ ID NO: 7665 - DNA, 446 bp, Homo sapiens
  misc_feature 260, 327, 334, 348, 352, 373, 376, 387, 392, 410, 420: n = A,T,C or G
ccctttcgagcggccgcccgggcaggtacgatcttggctcactgcaacctctccctcccgggttcaagtgattctcgtgcctcagcctcttgagtagctgggattacaggcgcgtgccactgcgtccggctaatttttgtatttttagtagagatggggtttcaccatgttggccaggctgatctcaaactcctgacctcatgtggtccacccaccttggcctcccaaagtgctgggaattacaggcggtgagccaccgngcttcagcctacaagcaatttttttaaaaaactggacacccctatttactgataaaaaaatttcttntgttttnaaaaaatcccctantttnacttattttttaaaaagaatnaanggtattttagnttttntttttttttaaaaaatanccaactaaantttcttggttattggggattaaaaaa

SEQ ID NO: 7666 - DNA, 388 bp, Homo sapiens
  misc_feature 273, 304, 333, 345: n = A,T,C or G
ccctttcgagcggccgcccgggcaggtacgatcttagcatcagcagggcagcagcgttctcggatgctagctactctttttaaggatgaaaggtgccagcaacttgctgcctatgggatcctagagaaaaatgtatctagatagggatcatcagaggaaatcaacttcaagaatttgctgccatgctgatgcctcaccaaaaagcaactacagctgatggttccagcatcttggacagagctgttattgaacacaatttgtttgtctgcaagncaaattatataataaattatttacccttcgnaagaaacttgggagcttctttttaggagnatccctggcagnctaaagggcgggaaaaaagatagccattcctcaaaatggatta

SEQ ID NO: 7667 - DNA, 361 bp, Homo sapiens
cccttagcgtggtcgcggccgaggtacatgctgtatgattccatttttataacatgctactaatgacaaaactaaagatggaaagatttctgattgccaagggttagggctgaggagaggttgtgactataaacaaggagcatgagggagtttgcattgatgcaacattctgaatctcgattacggtggtggtgacatgaatcaatatatgtgttaagatttcttaaagctacatataaaaaacaaacaaaaatgcatgccatgttaaaactggtgatttccaaataaattctgtagttaacagtattgtaaacaatttcacttttcctgtattttgggtaaccgaaccatgccttattgt

SEQ ID NO: 7668 - DNA, 273 bp, Homo sapiens
  misc_feature 56, 223, 257, 261: n = A,T,C or G
cccttagcgtggtcgcggccgaggtacctgtgagcacacactcacggccaccccantagacacgtgcagccacacacacccacactcactcacacccacacccacacgcacacccactacacacacacacacacacacacacacacggctgtgacagcccaagacccacaccctggacccctggaatgtctttggaccagaaccgaacagctggatccacagnaccttcccgggcggccgctcgaaagggcgaattncagncacactgggcgg

SEQ ID NO: 7669 - DNA, 355 bp, Homo sapiens
  misc_feature 180: n = A,T,C or G
ccctttcgagcggccgcccgggcaggtacgcgggggatcgaaattaacaccaggtggtgaatagagcccctcctaaggttgctcaggataaatcatttattaaataggtctgcttatcaggaggggcgtgaaggctcccaaaaggaaatgctggcacctgggcccagaagccagggcctntaactcctggggttgattccttcagtgaagttgcaccctacaaagggaatatggccaaagcggcactcaactgaaggctgatatcaggcgattagacagccatgcattctgcgtttgtctggaatggattgtagagagatggacttatatgaaggactaccagtccccgtttgat

SEQ ID NO: 7670 - DNA, 761 bp, Homo sapiens
  misc_feature 87, 136, 158, 163, 213, 218, 223, 234, 285, 317, 323, 351,361, 371, 384, 414, 441, 447, 450, 480, 510, 593, 596, 627,693, 697, 735: n = A,T,C or G
ccctttcgagcggccgcccgggcaggtacacaagcgtgctgaagtggttggagaagagttcagtgaggacatcattgggggtggagnaaacctttccgttaagggttttccaaaggccccattttccttcccaagnaaaaaaggaagggggccggggnaaccnaaaaaaccttttggggggggtttcctttgggttccccccttttttttaanttggnaaagnaaaaggttttnccggttttaaaaaaaaacccaaatttgggaaaccctttttttccctttttngggaaaaaagggggggtttcccaaagggcccnaagggnaaacccttttcccccccccaaatttccnggggggcccnggggggtttncccaaattttttnggggggtttggggaaaaaaaaaaaaatttnccttttccaaattttcccaaatttttngggggnccntttaaaaaagggtttcccccaaagggcccnttggggggtttttttcccccaaaccttttncccccaaggtcccaagggaaaaaagggcccttttttccaaaggcccttgggccccccccaatttttccccaaagggttttaanttncccccctttgggttccttttgggccttttcnaaccttttgggggttggccctttgggaaaaagggggccttttttttgggttaatttaaggaaaggnccgntttaagggggaaagaaaaattgggggcccaattttttngggcctttccaaccaaaaattttttt

SEQ ID NO: 7671 - DNA, 332 bp, Homo sapiens
  misc_feature 196, 224, 291: n = A,T,C or G
ccctttcgagcggccgcccgggcaggtacccttactctgacaaccttatgagtgagggggacagaaattaaagttcagggcccatataaggtgatgaacctaacagggagaccctccacacaataggctgagactcccaaatactttcacctttaggatgataatgaatcagaaggtggaagaaccaatgtaaaanaacaggcaaggtttaaaattgccccagngatctaaaaaaatcttaagcactgagcttcttttaaggtgttcccacactagtaatgcctccaggtngacagagaaaataaaatgtaaatacttttcatgggaaaagt

SEQ ID NO: 7672 - DNA, 353 bp, Homo sapiens
  misc_feature 311, 328, 334, 340, 346: n = A,T,C or G
ccctttcgagcggccgcccgggcaggtacatgggactacaggcacgccccaccatgcccagctcatttttgtatttttagtagagacagggtttcaccatgttggccaggatgatctttgatctctttgacctcatgatccgcccctcttggcctcccaaagtgctgggatcacaggcgtgagccaccacacctggccctctatttattctctttaaagagagagaaaactatgagaggccaaaattatttaattaaaatctttaccttagcacaaggggaaaaaatgggaatttgccctaatattaggtngaatggaagccatacancaatgnaacagnaaacanatcacat

SEQ ID NO: 7673 - DNA, 782 bp, Homo sapiens
  misc_feature 18, 98, 117, 134, 153, 165, 185, 189, 196, 241, 246, 248,252, 270, 279, 299, 336, 343, 344, 356, 362, 368, 376, 400,404, 467, 491, 517, 518, 525, 527, 542, 544, 584, 597, 606,624, 638, 642, 647, 654, 656, 667, 689, 692, 694, 700: n = A,T,C or G
  misc_feature 703, 735, 738, 744, 763, 771: n = A,T,C or G
ccctttcgagcggccgcncgggcaggtacttttttttttttttttttttttaatgtgagaagcacaatgtgcttctagaaaactggttttaagggagnatgcagcctggagaaaagnaaaattggtgggaaatngggaagttattaatttttngaggggaggggnaccaaaaaaaaccaattaanatcntttccanccttttttttgggaaaaccacgtaaaaaaacccccaaacctttcntttangncccnttttgggccccccacganccaattagnggcggaaaatttgtttttantaaaaaaccccccaaaaaggtaaagaaaaaggtgttnaaaggannaaaaaaaatttnaatttnaacccncccgccanatttccccttttttaaattttttnttanttaaaaaacggatttttttgggggggggcttttttattaaaatttggggggggccaaaatttngccgggcccttttgcccaaatttnaattttccctttggggttaaaaaaannaaaaagngncccaaacccttttananccaaaaaaaaaaccctttccctttttttttaaaaaaaaanggtaaaaaaaaanaaatttttngggggggggaaaaaaaancctttaatcccaangggnaaggnaaaaagntntttccaataanaagggtaaaaaaaaaatatgangancncccttnggntttaaaaaccccccccaattaaattttttttnccnttaatntttggggccccccccaaanggggtttnatttaaaaatt

SEQ ID NO: 7674 - DNA, 973 bp, Homo sapiens
  misc_feature 6, 10, 18, 61, 65, 83, 87, 95, 104, 108, 110, 116, 120, 139,149, 153, 168, 172, 180, 182, 194, 202, 204, 208, 212, 214,244, 246, 252, 258, 267, 269, 273, 275, 277, 300, 311, 315,346, 386, 399, 461, 468, 534, 550, 707, 728, 749: n = A,T,C or G
  misc_feature 844, 948, 967: n = A,T,C or G
aattanccgnacttcacnttattaagggggggcccggaaaattttgggggggccccccttncttnagaaatgggcccattggncctnccggaagnccggggccnccgncnccaagntggntgggaaatgggggaataanttcttggccnaagnaaaaattttcggccncccnttttaagncngttggggttccngccggggncnccgnaagngntaaccttccttttaaacccccttttgggtncncccttnctttcncttaaaaangngggnangnccaccaaaagggggaaaaaaccnttggaaaaagnaagnaccttggaaaaaaaaaaaggaaaaaggaagnaaggtttttttggttaagccttgaaaaaaaaaaggaaaantaagggggggaantaaggccaaaagggggaaaaaacccccccaaagaaaaccttgggccaattttcccccccttnaaaaggntggggggggggcccccaatttccccccaaattggttgggaaatttttgggaaaaaattttgggttncccccaatttaaaggnccctttttgggcccctttaaattgggggggttgggaaaaggaaaaaaaaaattgggtttgggccaaattgggcccttttccccccgggtttgggaaagggcccctttgggggggtttccctttccttttttggggaaaaaaaaacccaaaggggggnaaaccctttttaaatttgggncccttttttcccccctttccntttaaatttaattttttccctttggggggttttttaaaaaaaaaattttttttttttccccccaaaaaaaacccaacccaaattttaaaaagggnttttttccaacccttttgggaaagggcccaacccaaagggaaattttttttcctttttttaatttcccccaaagggaaaggaaacccaaaaagggtttaagggnaaaaaattcctttaaaaancccccc

SEQ ID NO: 7675 - DNA, 299 bp, Homo sapiens
  misc_feature 101, 105, 133, 148, 169, 179, 216, 246, 266, 271, 274, 279: n = A,T,C or G
cccttagcgtggtcgcggccgaggtactttttttttttttttttttttttttttttgagaccctcatcaatagatggagacatacagaaatagtcaaaccncatntacaaaatgccaattttagggcgggggntttcaaagccaaaantgatgttttggatgtaaaagngaaatattanttggcggatgaagcagatagtgaggaaagttgagccnataatgactgtgaagtccgtggaaccctgnggctacaaaaaatgtttgancccgnaanatgcncgtcggaaaaatggtgaaag

SEQ ID NO: 7676 - DNA, 346 bp, Homo sapiens
ccctttcgagcggccgcccgggcaggtaccgtaagttttcttccacatattttgggaaaaaactaaaaaaagaaaaaggacttcctttttgtggacatctacagatgttagggttgccagaagcaaatcccaggaatgagatcagtattttcattgcatcttaaatgtataaccttcctgtgggagttcagtttgtctgtggttaagtgggtgtgcttaatcattctcgaaattgtgatcagatgaaataaaaaaaaaatcttgatgcaataacagtggttttgccacttctggttgtttgcgatgggatctgtcccatggtcagtctgggggttttattcagctt

SEQ ID NO: 7677 - DNA, 378 bp, Homo sapiens
  misc_feature 101, 129, 173, 308, 333, 336, 341, 345, 367: n = A,T,C or G
cccttagcgtggtcgcggccgaggtacttttttttttttttttttttttttttttttacttttttttaaattttactttacgttctgggatacgtgtgcanaatgtgtaggtttgttacacagggtttnccttgggccataagtgggtttgctgcacctatcaacccatcatntaggttttaagtcccacatgcattaggtatttgtcctaatgctctccctcccctgttctcccaccccccgaatcacttattttaaaagtcagcaataaaaataaattgaaactaaatcaaataaaattgatgctntagagaacaaaataataacaaccgntantatantagntaaaaaggaaaataataataantaaaagagaat

SEQ ID NO: 7678 - DNA, 396 bp, Homo sapiens
  misc_feature 55, 110, 125, 142, 144, 161, 187, 199, 203, 214, 225, 266,284, 288, 294, 307, 312, 313, 333, 348, 355, 359, 369: n = A,T,C or G
atctccaaacttggagacccctcccttcacctctaatgactgaaggaaatggaantgggtcccacaactttccatcagccgttttactctaggtcttcagagcagccttnagtcaaacggctgtnggggaggcaacggtctntncgtcagggaccagcaangcatgagagcaggttccaagaaacangcttggagacanaaangatgggaccanggatgtctatncctcactaagtccgtattttcccccatccccaatttctccntggcttcttgacaaaatnaatntgggcncacaattttaccnggaannatggttttagcccccgtttnatctttggaagggtngagcatnctangatggggcangattaaaccaactgttgttttttaaat

SEQ ID NO: 7679 - DNA, 174 bp, Homo sapiens
  misc_feature 35, 98, 153: n = A,T,C or G
cccttagcgtggtcgcggccgaggtactttatagnttaggctggacattggaaaaaaaaagccagaacaacatgtaatagataatatgatttggctgnacacttccagactgatgaatgatgaatgtgatggactattgtatgggagcaacancttcagcaagagggggaaata

SEQ ID NO: 7680 - DNA, 963 bp, Homo sapiens
  misc_feature 4, 24, 49, 61, 68, 72, 80, 86, 88, 94, 100, 123, 131, 137,146, 187, 193, 225, 228, 296, 298, 323, 333, 339, 353, 526,648, 666, 720, 735, 775, 777, 809, 922, 937: n = A,T,C or G
ccgnacttcactttataagggggnccgaaaatttgggggggcccccctncttagaaatggnccatggncctnccggaagnccgggncnccggcnccaagntgggtgggaaatgggggaattanttcttggnccaggnaaaaatttncggcccccccttttaagccggttgggggttccggccggggncccggnaaggggttaaccaaccttaaattttaattttnggnaaggcccttttaaattgggaaaaatttaaaaaaacccttcctttggcccaacctttttccaaaggccncntggggggggcccaaaaattaaaaanaaggcccaanaagggnaacccccccaaggnttcccttcctttaagggaaaaaaaaaaaaaaaaaaaaaaaaaaatttgggaatttttaaaggggggtttaaaaaaagggaaaaaaaaaaaggaaaaaaaattcccaaaaaaaattttttttttccaacccaaaaattggggggggaaagggaaaaaattgggtttggggggtnttttttaaaaccctttaattttcctttgggcctttaaggggggccccccccccctttccccccccaaatttcccaaaaaatttttcccttttttaaatttttaaaaaaaaaaaatttttccntttccaaaaaaaaaaaantaaaaaatttcccccttttttttggggaaaaaaaaaaaggggggggggaaaggntttaaatttaaaaanttttttaaccccaaattttttttttttaaacccaaggggntngggaaaccccccctttgggaaaaaaacccccntttttaaaccccccccaaaaaaaaaacccaaaaaggggttgggggggggggaaaaaaaaaggggcccccaaagggggggaaagggcccccccaaaaaaaaaccctttaatttnccaaaggggggcccntttcccccaaaaaaaagggccctttt

SEQ ID NO: 7681 - DNA, 342 bp, Homo sapiens
ccctttcgagcggccgcccgggcaggtactagttgcttcctgcgctggatcggaaacttagatgatgaactacatgctattatagctggatttttggcaggtatatcaatgatgttttataaaagcacaacaatttccatgtatttagcgtccaaattggtaggagacaatgtatttcaaaggcattgaagcagggaaggttccctattttcctcatgcagatactatcatctattccatctctacagcaatttgcttccaggccagctgtcatgggaagtttcagactttggagaccatcttactggggagttccttttaagactcaccaaggggcaaatt

SEQ ID NO: 7682 - DNA, 162 bp, Homo sapiens
  misc_feature 63, 81, 83: n = A,T,C or G
cccttagcgtggtcgcggccgaggtacgcggggggagtagcaagtggccatggggagcctcancggtctgcgcctggcagnangaagctgttttaggttatgttgaaagagatgtatcctcatctctaaggcttaccataagctctgattttgaagagaata

SEQ ID NO: 7683 - DNA, 388 bp, Homo sapiens
  misc_feature 323: n = A,T,C or G
cgccagtgtgatgggatatctgcagaattcgccctttcgagcggccgcccgggcaggtactgttcctgcctcttgacctcaccaagcctcagcttcctcgcctgttaaatggatacaattgtcgtcattatcatctgttgagaactccctaaaatgccagctgagcataggcacagaagtttaggtgtttggaccaaggtcacacaactgatacaacagtagcttcttcacagacttggcacttctccagaaggaggaggacaaaatgacgaagtctaaggaggcagtgacattcaaggacgtggcttgtggtcttctctgangaggagctgcaactgctggaccttgcccagaggaagctgtacctcggccgcgaccacgctaaggg

SEQ ID NO: 7684 - DNA, 372 bp, Homo sapiens
  misc_feature 334: n = A,T,C or G
ccctttcgagcggccgcccgggcaggtactgtatttctgcaagtctaagacaccactgctattaagatacaccagcactttataaatcactaagcaatgaaaaaattgttccaaatggttttgacacaccattggattataagatgcattgtcatttcaagaggtctttaaaatgcctcaaaaatgtgttttagaagtgacaaaatggaaataaaagtttagtatcatcacacactgacacttttcattgttctctcctgcaataaaatttataggggattttcattatggatacttagaacataaccattttataagaatttcctctccatantatatttctattaacctgctatactcttcactagggat

SEQ ID NO: 7685 - DNA, 472 bp, Homo sapiens
  misc_feature 274, 278, 329, 340, 356, 386, 398, 417, 429, 441, 449, 451: n = A,T,C or G
cccttagcgtggtcgcggccgaggtactccagccagggcaagagagcgagaccctgtctcaataaataaataaataaataaataaataaataaataaataaataaaaaaaaacaaagtttgattaagaaaggaagtataggccaggcacagtggctcacacctgtaatccttgcattttggaaggctgaggcaggaggatcactttaggcctggtgtgttcaagaccagcctggtcaacatagtgagaccactgtctcttaccaaaaaaagggnaaangaaggggaccccattattcaaaaccttgaaaaccaaaaatttaggaaaatngttaattttanttgttttcttaaaagntggccccttcccaaggtttccaaaaaaacnttttattttggngaaattggtttgaagaagnttggtgggtttncccaaaaaattncccttttnangggaggggaccaaaaaagggg

SEQ ID NO: 7686 - DNA, 389 bp, Homo sapiens
  misc_feature 271, 273, 293, 313, 322, 325, 330, 331, 335, 341, 353, 375,376, 377: n = A,T,C or G
ccctttcgagcggccgcccgggcaggtacttttttttttttttttttttttttttaagtcttcaaatattttttattggaaggccatgcattgccttcatttattgtatttcaaatcactgtaccacaccccctggcccccatattcttcccattgcataagcatgaggtgtatacagcaatgcaagaataggtaactccagtccaagataagaaaatagaatggattttcttggttgtgagtttttcaaaatgtgccaccagtggtaagncnacagcaaaacacccttaaanaaattccaggggaggggacnctagaaagnttnaggcnncaanccttgnttaagtgaattnaaaaaaacttgggttagaaaannncctttttcgggg

SEQ ID NO: 7687 - DNA, 223 bp, Homo sapiens
  misc_feature 1, 3, 9, 10, 13, 14, 20, 24, 29, 194: n = A,T,C or G
ngnccgccnnggnnatgggntttntgcanaattcgccctttcgagcggccgcccgggcaggtactttattttcaaaacactcatatgttgcaaaaaacacatagaaaaataaagtttggtgggggtgctgactaaacttcaagtcacagacttttatgtgacagattggagcagggttttgttatgccttgtanagaacccaaactaatttattaaacaggat

SEQ ID NO: 7688 - DNA, 369 bp, Homo sapiens
  misc_feature 222, 230, 231, 252, 253, 309, 331, 338: n = A,T,C or G
ccctttcgagcggccgcccgggcaggtacacacacacacacacacacacacacacacacccctgctcaacagaggtttagtttacagtctctgaactaaagtagtaacctcccaaattgtttttttctaataagctgagatttcccatttctcttaagggagaaagccacccatgagatgtctttttccctttctcccattcatctttaagagcccaaggtnatatggtnnctttgtcttaatcccatgtanncttttttttggttcaaatggaaccttggatccattcctggcattccttttttttgnaattttttttaaacaaggatangttaaangttaaaaatttttgggttggggttttttttt

SEQ ID NO: 7689 - DNA, 536 bp, Homo sapiens
  misc_feature 434: n = A,T,C or G
cccttagcgtggtcgcggccgaggtacctttctctttggcttctttctttttctggtcattttccttcacacgtttcaggaagctatctcggctcttagagtgcttaatgtgctcaatacgcacattaattctcttggcaagaatcttgcccttaacttgtttgtttacaacaatgccaacagcatgctgggtaacattgtagactcttccagttttgccatggtaacacttgtggggcattcctttttgaacagtacccaatagttatcttttctgctcctctcccaaggaatattctgtaaccatctaagaacaacttcagttgataaactggtcaaaaacttaaatctatagaccttgctataaaattaattttgttaatattgagtttacttttttaacttatctgtatctgattccaaggatcccttanttttagcaatttttgccatcatttagcattaattaaatcaaacttgtttaagtaaataatgtgttttcctccaagaagcactcagaatgcattaaggtaact

SEQ ID NO: 7690 - DNA, 329 bp, Homo sapiens
cccttagcgtggtcgcggccgaggtactttattgtattccaatttaaaaaaacaaaattaagtctatattttaaaaactctgacaatagcaagatatttaatgaactctacttcatatctagttcatttttttttctggtttgaaaaaaagatcagctttccctgaataaacaaaaatgaatgtaaataaacatgaaaatacaaaaccataatttccaaaaacgaaatgaatgggccaacagtaaaatgcacaatgagccacaactgccctggtatttaagaaaataaaggtcaactgtgggtcataaagaagtatcaacttttaaaaa

SEQ ID NO: 7691 - DNA, 365 bp, Homo sapiens
  misc_feature 33, 46, 54, 73, 102, 103, 105, 119, 129, 137, 146, 168, 169,178, 187, 224, 257, 268, 293, 313, 314, 340, 345, 353: n = A,T,C or G
ccctttcgagcggccgcccgggcaggtactttnttttttttttttntttttttngggcattcacctgaatagnctgggaactttcacctattttatttaggnntnctttttcttttttnggttgggctntttaaaanttccacccnaaaaaggcttaaaataccaatnnggaaaactnggtaaagcnctagtttttactccaaagggagtagggatcattcacnatttactccaataaaagtattgcaacccttaancaaagcttttnttcatttaaaagggaggaaaaaagnaaaccttataacaggcaggnntctttcctttatgtttcattgccacnaaaantgaaggtntctgcttttaga

SEQ ID NO: 7692 - DNA, 366 bp, Homo sapiens
  misc_feature 326: n = A,T,C or G
ccctttcgagcggccgcccgggcaggtaccacaaggagccactgggtttctcatttgcatggctacattggggaccatgctgttcagtgcaatcagtaatatagggagaggagcagggaggtgaaagaaagagaagataatgagttggattttgaacctcttgagctttaaatatctaatgttcatctaaagcaatatagcccataggcagcatctattggaaattaataaaaataagggtctaggcattcaggttaagtggtggggatggaagaaaagacttgagagtcgttgaaattcttgtgggggaagtccaaagcaacagnagcagagagaggattggtaagccgaatgtgttgggagaaa

SEQ ID NO: 7693 - DNA, 352 bp, Homo sapiens
ccctttcgagcggccgcccgggcaggtacatttcagtcatttagatttttttcagagtgaacatgacagccattaattttattagtctaaaaaaatgacttattctactctaaaattgtgctagaatttgaaattattttagcatatcctgtccgtctaggtccctctatatcaagggatttcatttttagacattcctttccacccacccctgtgccccccttggatgtaacaaggaaaaaggaatgtctcttctgtttaaaaaaaaaaaattctgagaaacctgattgcagaaatgagtgcttaaaatttataataattaaccaacataatgaaatgtggtttttaaaga

SEQ ID NO: 7694 - DNA, 345 bp, Homo sapiens
  misc_feature 127, 131, 133, 137, 143, 144, 147, 150, 152, 160, 165, 179,185, 186, 189, 190, 191, 192, 195, 200, 204, 209, 210, 213,214, 218, 224, 228, 229, 237, 244, 252, 266, 276, 283, 285,286, 287, 288, 290, 307, 308, 309, 310, 311, 313, 314: n = A,T,C or G
  misc_feature 321, 323, 327, 332: n = A,T,C or G
cccttagcgtggtcgcggccgaggtacttttttttttttttttttttttttctttttttttttttttttttttttttttttttttttttttttttttttttttttttataggttttttttttttaantttntntttnggggcnnacnccncnatattttnttttncttttaaaaaaaantttttnnggnnnnggnttttntaanaattnnaannggangaaaanatcnnacaaaatnggggganaatttttnttttttttcccccnaaaaattttnttggggncnnnnantttaaaaaaaaaatttnnnnncnntattttnancagnggggngggaaaaaaaaat

SEQ ID NO: 7695 - DNA, 274 bp, Homo sapiens
cccttagcgtggtcgcggccgaggtacagccacttactcttaaagagactgctgaaagttttggaggcccaccaaaagaagaaatgggaaatgaacacatcagtgtccaccctgaaaactcagactgtatccaagcagatgttaactctgatgattacaagggtgataaagtataccatccagaaacaggaaggaaaaacgagaaagagaaagttggaaggaagggcaagcatctgttgactgttgatcagaaacgtggagagcatgttgtctt

SEQ ID NO: 7696 - DNA, 362 bp, Homo sapiens
  misc_feature 244: n = A,T,C or G
cccttagcgtggtcgcggccgaggtacacaggccgggcacagtggttcacacctgtaatcccaacactttgggaggctgaggcgggtggatcacaaggtcaggagatcgagaccatcctggccaacatggtgaaactctgtctctactaaaaaatacagaaaattagccagtcatggtggcacgttcctctagtcccagctactcgggaggctgaggcagaagaattacttcaacatgggatgngggaaggtttgcagtgagcccgagatcgcgccacttgcactccagccctggttgacagaagccgaggaccccatctcaaaaaaaaaaagttggtatgttgaacagcttaacccataat

SEQ ID NO: 7697 - DNA, 247 bp, Homo sapiens
  misc_feature 99, 147, 168, 199, 232: n = A,T,C or G
ccctttcgagcggccgcccgggcaggtactttttttttttttttttttttttgggggcatcagagtgtggcacagaaagttataaaactatagccagtngtttgagaccagtctgaaaaatgaagaccccccccgccccaccatttntataacataaaaataagacanttagccaggcacattgattcatgcctgcagntagtcaggagactgaggtgagaggatgcttganccctgaaaggtcaag

SEQ ID NO: 7698 - DNA, 344 bp, Homo sapiens
  misc_feature 187, 216, 238, 249, 264, 278: n = A,T,C or G
cccttagcgtggtcgcggccgaggtacaggtagatttttccgtccctcattaatagtgccttcttaattaatacatgactggtgttagctataacaaaactccagtaaggccaaagaatcccaagttctttgtggaaaaaaaaaaaaatcttttagggtcagattttcccttctaatatcattgaanatgatgttgcattgatttattcataaagnattttaactataggaactctanaagataatggncaggcaagtgatttnttataaatatggtnggcgtaagttgtattttgaaattcacttattttaaaatcgaagaggatttgtaatcatggaaatag

SEQ ID NO: 7699 - DNA, 347 bp, Homo sapiens
  misc_feature 330: n = A,T,C or G
ccctttcgagcggccgcccgggcaggtacatgggactacaggcacgccccaccatgcccagctcatttttgtatttttagtagagacagggtttcaccatgttggccagggatgatcttgatctcttgacctcatgatccgcccctcttggcctcccaaagtgctgggatcacaggcgtgagccaccacacctggccctctatttattctctttaaagagagagaaagctatgagaggccaaaattatttaattaaaatctttaccttagcacaaggggaaaaaaatgggaatttgcctaatataaggtggatgaaagcatacacaatgnaaacaggaaacaatcac

SEQ ID NO: 7700 - DNA, 365 bp, Homo sapiens
  misc_feature 290, 354: n = A,T,C or G
cccttagcgtggtcgcggccgaggtacattcccaaaagaaagtagtgttataggaaatccaaatgcacttcagtgattcactcctgaaaagcagcctgggtatgttggcagattttgtttgcatttgtcttgcgtatttaaagtctcaggaaatctagtcttggtccaaaacactggagaaaaaaataacaccagacaaaacacatttgagtaacttgaagtagcagcatagaataggcccaactaagaagttggaggggcaaagagaaagccgacagaatcagcttctnctggaaggtgaaagcatcaagttctatttatggtagacagagggtccttatttgcttgtcccgnggtgtctatgt

SEQ ID NO: 7701 - DNA, 331 bp, Homo sapiens
cccttagcgtggtcgcggccgaggtacagtttttaactgaatgtgtattgcttttgccccattataaagttgaaaaaccataagtcaaaccattgttaagtcggactgtttgtgttacatatatttgggattttttagtggccctttttaaaaaagctgtttcttatttctgatcattgtgagtggggatagatgtgggaagaaccatgtctctactaaaaatacaaaaaatagccaggcttgttggcacacacctatggtcccagctactcgggagaccgaggcaggagaatcacttgaaccgggaggcagagggcagatcatgccactg

SEQ ID NO: 7702 - DNA, 250 bp, Homo sapiens
  misc_feature 204, 221, 247: n = A,T,C or G
ccctttcgagcggccgcccgggcaggtacaggctatctatgtgcctgctgatgacttgactgaccctgcccctgctactacgtttgcccatttggatgctaccactgtaccattggtagttgtttatgaaattaccagatattcataaatgtgacaaaatgaacagcaggattatgaatttatcaaaggaaaaaagtatttggntgagggtgaaaaaaatntgaatgtttttgagggaaagtttttntat

SEQ ID NO: 7703 - DNA, 294 bp, Homo sapiens
cccttagcgtggtcgcggccgaggtacgcgggggaaaatgatgtcagaaactttaaatttttaaaaaggcttctagttagctgctttaaatctatctatataatgtagtatgatgtaatgtggtcttttttttagattttgtgcagtttaatacttaacattgatttattttttaatcatttaaatattaatcaactttccttaaaataaatagcctcttaggtaaaaatataagaacttgatatatttcatttctcttatatagtattcatttttcctaccctatattacaca

SEQ ID NO: 7704 - DNA, 358 bp, Homo sapiens
  misc_feature 7: n = A,T,C or G
ccctttntagcggccgcccgggcaggtacaaacgtggcatctgaatagaagcttagctagagaagtggagttagagtccctattttaatgaactacatatatttttcaatcaaaatgtgtaattatttaattatctagcctgctcagtaatcataactctccaacttcttcaaagggcctttattcaatatgttaccactcatatggtcattacttggtaagtgttttatattttgaatttcttagatgctttcagtgtatgtgctagtgttttattaatattaaaaattttttgtttacctatatatcaagctgctgcaaatggacctaccttattttaaaagtttaggaaataaaa

SEQ ID NO: 7705 - DNA, 107 bp, Homo sapiens
  misc_feature 1, 15, 17, 25, 30, 34, 68: n = A,T,C or G
ngcccttagcgtggncncggccgangtacncggngctttttcgcaacgggtttgccgacagaacacangtgtcgtgaaaactacccctaaaagccaaaatgggaaag

SEQ ID NO: 7706 - DNA, 381 bp, Homo sapiens
  misc_feature 3, 8, 15, 29: n = A,T,C or G
cgnccgcnagtgggnatggatatctgcanaattcgccctttcgagcggccgcccgggcaggtacgcactgtgctgctccctaaatctgggggtgtggtggagcgctccaaggacttccggcgggaatgtagggatgagcgtatccgtgagtatttttatggattccgaggctgtttctatccccatgccttcaatgtcaaattttcagatgtgaaaatctacaaagttggggcacccaccatcccagactcctgtttacctttgggcatgtctcaagaggataatcagctcaaggctggtaccctcgggccgcgaccaacgcctaaggggccgaatttccagccacactgggcgggcccggttactaggtgggattcccga

SEQ ID NO: 7707 - DNA, 334 bp, Homo sapiens
  misc_feature 291: n = A,T,C or G
ccctttcgagcggccgcccgggcaggtacttttagtagagacagggttttaccgtgttacccaggatagtctcgatctcctgacctcgtgagccgcctgcctcggcctcccaaagtgctgggattacaggcatgagccaccgtgcctggccacgtccctattttagaaatgagaggagtgactgcacataggaaaatgccacttttagcaattcaaagtggaaaaacttcttttatataaaaattatcccaactcccaccccttggctctcagtgttgcatctcccacaanagggtaaaagttgtgcccatttttcccacggctttaaacaaag

SEQ ID NO: 7708 - DNA, 410 bp, Homo sapiens
  misc_feature 53, 81, 123, 149, 216, 224, 267, 286, 291, 310, 340, 346,370, 387: n = A,T,C or G
ccctttcgagcggccgcccgggcaggtaccagtttttgagttttcagttgttngagtttcagatgttttcagttcatttgngtatataccaaggagtggaattgctggttcacatggtagctntatattctactttgtgaggaattgtnagactgttttccacggaagctgcaccattttacatttccactggtaatttatgagggttccagtttncccacatnttcaccaactcttgttatttttcatgcttatggccatcctagntagtgtgaagtaacatctnattgnggtcttctcttccattttntaaaaaagaattttgacctacaccaagcanggcaanagaccagagtcaagtcccccttgnggagcaatctgtggttntgataatcaccaccttgggatga

SEQ ID NO: 7709 - DNA, 416 bp, Homo sapiens
  misc_feature 303, 312, 355, 358, 379, 385: n = A,T,C or G
cccttagcgtggtcgcggccgaggtacttcagatgtcttgctcatactaacagactgactgctttagggcatgcatgtaacacagcctccaaaagccttttttagaagagggcaacagctcttcgaatctgcttgcgttgcttttaaagtctggccctccatgtctgctgctctcgggaaattcacataaccagatgcatttctccttacaaacaagcgaagcagggtggctcacagagtaatacccacattcaaattgccatcaatgaccgacctatcagtggttggtagggatcttccccntaagctttnttgctgaaagggagggaaccaagaccatttttgagccttgtanggnaccctttcaaaaaaaccaacnaaaatncccccccccttttctttaaccttagggaaaa

SEQ ID NO: 7710 - DNA, 154 bp, Homo sapiens
  misc_feature 45, 47, 54, 61, 81, 90, 104, 115, 130, 137: n = A,T,C or G
cccttagcgtggtcgcggccgaggtactgagaactgaaatgttgnantgcctangagacantgattttcttgccaaacttnactgtattngacaggcttttcangtaattctttnagaatcagctaacangatattnctcgctgagagcggaag

SEQ ID NO: 7711 - DNA, 404 bp, Homo sapiens
  misc_feature 17, 26, 33, 45, 49, 72, 233, 259, 299, 304, 305, 309, 344,384, 397: n = A,T,C or G
agcggccgccagtgttntggatatcngcattantcgccctttttngcgnccgcccgggcaggtacttaaaangttcacattatccaactccccaaagcaagctttgcaggaatgatgaggcgagagcactattagaatagcttgtgcagtgctgtaatacaaaaatgtattttgaaagctattgagtgaccattaaatactgtttctataaaaaatggttttggtgtatttgntgacagacacttaatccactacattnaataaacagggccattggggtgtaccaagatgacatatcngaggnncttnccacccttacagaagcaggagttcagaaccaaganaaaacaggactgttggccaaggaggaaacgaaaatggaangatgatgaggggnccccagt

SEQ ID NO: 7712 - DNA, 154 bp, Homo sapiens
  misc_feature 128, 135, 139: n = A,T,C or G
cccttagcgtggtcgcggccgaggtactctgggagtgatgatgatgatgattttaacaaacttcctaaaaaagctaaagggaaagctcaaaaatcaaataagaagtgggatgggtcacgaggaggatnaggatancagnaaaaaaattaaagag

SEQ ID NO: 7713 - DNA, 851 bp, Homo sapiens
  misc_feature 5, 22, 26, 40, 42, 48, 54, 60, 66, 68, 72, 76, 80, 86, 88,92, 94, 100, 102, 104, 106, 108, 112, 114, 117, 125, 127,129, 131, 137, 144, 146, 150, 152, 156, 164, 168, 174, 176,180, 182, 186, 188, 192, 196, 198, 200, 216, 218, 224: n = A,T,C or G
  misc_feature 226, 232, 234, 236, 250, 266, 278, 294, 300, 331, 357, 372,403, 408, 413, 421, 447, 506, 570, 612, 843: n = A,T,C or G
acctncactttattaagggggnccgnaaaatttggggggncncccttncttagnaatggnccattngncctncggnaagnccgggncnccgncnccaagntngntngnaatngnggnaattaatncntngnccaggnaaaaatntncggncncccnttttaagnccgntggggntnccgncngggncnccgnaagngntnaaccttaaccaattantnggccangnaaaatncntnggaattaaccaaantgggttttaaaattanggaaacctgggnaatttaaaaaaaattncctttnggtttaaaaaccaaccttggttaaaattggnaaccggggccaaaacccccaaaaccnttccttgggcctttncttttttttgggaaggtttccaaaaagggtnggaanttaancctttggnaaggtttttttttgggaaattggaanccttccaatttttccttttttttttggggggcccccccgggggttgggtttaaaagggncccccaaccctttttttttttcccccatttttgggcctttggggggaaaaacccccaatttccnaagggtttaaaaaaaaaccaaaccctttgggcctccaaaggnaagggcccaattttttttttttttttaaaaaaaaagggggccctttttaaatttgggttttttttggggggttaaaaaaccctttttttttaaaggggggtttaaaaaaaaaaattcccccaaaaagggtttaaggggtttcccaaaaaatttttttttttttaaaaaaaaaaaaaaacctttgggggggaaaaagggaaaattttttttttttttggggttttttttttngggggggg

SEQ ID NO: 7714 - DNA, 190 bp, Homo sapiens
  misc_feature 133, 169, 172, 173, 176: n = A,T,C or G
ccctttcgagcggccgcccgggcaggtacaagtgaaatatttaaataggaatcttgaaacaaaacgaattcaatcttgatcaaatccacaattaatttgaagttttcattttattcaattgtgaataaaatancagacactgttttcatccaataaagccaatgatatnatnnttnggagaaaatgatct

SEQ ID NO: 7715 - DNA, 372 bp, Homo sapiens
  misc_feature 65, 111, 118, 119, 127, 128, 133, 143, 144, 155, 157, 161,164, 168, 169, 183, 196, 198, 215, 251, 259, 328, 330, 358: n = A,T,C or G
ccctttcgagcggccgcccgggcaggtactttttttttttttttttttttttttttttttatttncactttaacaaatctactttaattcttaaaagaaattaattctaanaactgtnngaaatacnnaacanaactttttannggttttttttnanaggnatntatnntaataaaaagtttnatttgggtattgngncaatgcataactctatnttagatttgaatcctaacagggatgaaaatactttnttgcaacnactttatgcttatgaaaggggtgaacttgcaatgtcctcctgtcttaaacccaagttgacagtgccctntnaaaactttttcataaataattgacctanttttcatttaaaaa

SEQ ID NO: 7716 - DNA, 135 bp, Homo sapiens
  misc_feature 1, 4, 14, 16, 17, 19, 25, 29, 32, 35, 51, 60, 73, 75, 82,90, 113, 128: n = A,T,C or G
natnagggggccgnanntnggggcncctnctnagnatggcatggcctccgnagccgggcncgcccagttggtngnatggggnatatcctngccaggaaatttccgcccccttnagccgtgggtccgcngggcccg

SEQ ID NO: 7717 - DNA, 340 bp, Homo sapiens
  misc_feature 135, 297: n = A,T,C or G
cccttagcgtggtcgcggccgaggtacttgaccactttaaggggttttgtggcatttcaaaaatcaaaatctctttatccagatccttgtaaatattcaccattacaggtaagaaaaaccgcattttaagggaangcagtgaattctccacttggaatcaacctactgattgataattaaattatttcactgtgaaccagaaggctagtatttagaaagcaaaatatttagaagtgaaagaggggggaagaaagaatgatctacaatgtaatataaattaacctaatttaaattagnatttttaatttaaacctactttggataggtttttttaaaaaca

SEQ ID NO: 7718 - DNA, 357 bp, Homo sapiens
  misc_feature 315, 328: n = A,T,C or G
ccctttcgagcggccgcccgggcaggtacatgggactacaggcacgccccaccatgcccagcccatttttgtatttttagtagagacagggtttcaccatgttggccaggatgatcttgatctcttgacctcatgatccgcccctcttggcctcccaaagtgctgggatcacaggcgtgagccaccacacctggccctctatttattctctttaaagagagagaaaactatgagaggccaaaattatttaattaaatctttaccttagcacaaggggaaaaaatggggaatttgcctaatatagggtgatgaagncatacaccaatgnaacaggaaacaatcaccatttttaagtaa

SEQ ID NO: 7719 - DNA, 343 bp, Homo sapiens
  misc_feature 125, 251, 270, 275, 286, 294, 297, 316: n = A,T,C or G
cccttagcgtggtcgcggccgaggtactttttttttttttttttttttgggattttttaggtagtgggtgttgagcttgaacgctttcttaattggtggctgcttttaggcctactatgggtgtnaaattttttactctctctacaaggtttttttcctagtgtccaaagagctgtccctctttggactaacagttaaatttacaaggggatttaaagggttctgtgggcaaatttaaagttgaactaaanattcctatcttggacaacncagcntatcaccaggnctcggtanagntttggttcgcctacttacnctataagatcttcccacttatttttgc

SEQ ID NO: 7720 - DNA, 319 bp, Homo sapiens
  misc_feature 262, 277: n = A,T,C or G
cccttagcgtggtcgcggccgaggtacaaggagtcttggagtcactgcagctagtgtcttcttccacttgactgccactgtccttttccgtgtctgactcaccatcttcctctaaagttaagttcaaaactgggaatttctcaagtttggaccctgccggccctcctctgggtcatcaggtgcaggagaggggctctgagggattgtgctctggtacctgcccgggcggccgctcaaaggggcgaattccagcacactggcnggccgttactagtgngaatcccgagcttcgggtacccaagcttgggcgtaaattcat

SEQ ID NO: 7721 - DNA, 486 bp, Homo sapiens
  misc_feature 323: n = A,T,C or G
cgccagtgtgatgggatatctgcagaattcgcccttagcgtggtcgcggccgaggtactttttgtattttttttctttttttttttgagaaggagtctctctctgtcacccaggctggagtgcagtggcacgatctcggctcactgcaacctctgcctcctgggtttaagcgattctcctgcctcacctctggagtagctgggactactcgtgcatgccaccacgcccggctaatttttgtatttttaagtagagacagggtttcacccgtattgccaggatggctcgatctcttgacctcgtgatccacctgcctcggcctnccaaattgctgggattacagcactgtgccctcctaggaaattattttttaaagtgaaattttatttttattttttttaggattttggtagagaatgagtaggcctactcatcaatatcaaacaggacatttaagtttcttttcttaagaacagacataaattt

SEQ ID NO: 7722 - DNA, 345 bp, Homo sapiens
  misc_feature 252, 261, 285, 315, 316, 325, 337: n = A,T,C or G
agaattcgccctttcgagcggccgcccgggcaggtactattaactaatacacagtgtaaattcacatttttccaattgtccttaaaaaatgacccttttttttcaattcaggatctaatcaaggatcaacaatgcatttaaaactgccatgtttcctttaatgtagaacagtccctgccccttgcctttttatgtctttcatagcactggggtgcgtgtgtgtgtgtgtgtattttttttttagggtggggntcacactgngtccgccccagcctggaatgtggntggccacaatcattggcttcaccttgccanncttcaaccntctttgggggcntcaaaaat

SEQ ID NO: 7723 - DNA, 225 bp, Homo sapiens
  misc_feature 132, 133, 138, 146, 175, 181, 192, 196: n = A,T,C or G
cccttagcgtggtcgcggccgaggtaccctcacatacaaagggatcaaatttgacctggtgttattttagccccaaatttatgacattacacaatattaaaaatgtaaatgtttctttacccaaactacttnnagatnttctagtntttgcttctggcggaattaaatgaccggnttaaantggcttattantagnacgaatcgaatggatggatgttttgcatg

SEQ ID NO: 7724 - DNA, 953 bp, Homo sapiens
  misc_feature 2, 33, 59, 82, 88, 98, 107, 113, 132, 150, 162, 188, 211,214, 229, 275, 294, 344, 379, 389, 423, 486, 489, 510, 566,631, 652, 663, 678, 818, 836, 837, 855, 906, 915, 953: n = A,T,C or G
anccggaacctttccaaactttaatttaagggngggggcccggaaaaattttggggggnggccccccccttcctttaagganaatggnccaaattggnccttcccgnaaaggncccgggggccccccggccnccaaggtttgggtttggnaaattggggggnaaattaatttcctttgggcccaaagnaaaaatttttcccggcccccccnttnttttcccggaagggnccggggggccccccggccccccccgggggggggcccaaaggggggnttaacccaaaaaggggggnccttaaaaaaggcccaatttttttttttaaaaacctttttttaatttaancctttggggggaaaaaaaaaaaaagggaaaaattncaaaaaaaanccaaaaaaaggggggggggggaaagggggggggnaattaaaaaaaaggggggaaccttttttaaaggtttccaaaatttcctttttttggggccaanccnttggggggaaaaaaaaaaaanccaaaaaaaaaaattttaattttgggtttaaaaaattttttaaaaaaaaatttttnccccccccaatttaaagggccctttgggcccaaatttgggttttaaaaacccaaattttttgggnaaaaaatttttcccttttttncccccaagggngggttttttaaaaanaaaaaaaaaaaaaaaaaaaaaaaagggttttttaaaaaatttccccctttggggttggggaaatttaaatttttttaaaaaattgggggggaaaaaatttgggaaacccaaattttttttttttggggaagggggggttnccctttttggggaaaggnnaaaaaattgggggggggnccaaacccaaaaaaaaaaaagggtttgggggggggggaaaaaaaaaaattngggaaaaanttttttttttcccaaagggtttaatttggggggggggn

SEQ ID NO: 7725 - DNA, 142 bp, Homo sapiens
ccctttcgagcggccgcccgggcaggtactgctgcctgtgcttcagagctgtcttattaccacaaggccggcaagcatcaatgtccccacatccccctctgcctccccctgaaatgtacctcggccgcgaccacgctaaggg

SEQ ID NO: 7726 - DNA, 939 bp, Homo sapiens
  misc_feature 5, 58, 67, 78, 82, 86, 90, 96, 98, 102, 104, 110, 114, 131,148, 163, 171, 185, 189, 197, 199, 229, 289, 320, 388, 395,406, 414, 422, 438, 466, 476, 482, 488, 513, 524, 561, 576,583, 586, 591, 599, 610, 626, 655, 675, 681, 705, 707: n = A,T,C or G
  misc_feature 723, 726, 739, 764, 772, 790, 812, 838, 840, 843, 861, 873,879, 894, 899, 903, 905, 912, 926, 932: n = A,T,C or G
cccgnacttcactttatttaaggggggcccggaaaattttgggggggcccccctttcnttagaaatnggcccaattgncctnccgnaagnccgggncnccgncnccaagntggntgggaaatgggggaatnaattccttggcccaagnaaaatttttcggccncccttttnaagccggattgggntccngccggggncncggaaaggggttaaccaattaaaaaaattnggggggaaccggccggtttccttgggggaaatgggaacccccggaaaatttcaatttttncggccaaccaaggaaccttgggggggaaccngcccaaggggcctttttttaaaaggggaaagggggggccaaagggggcccaaaaattaacccggggcncccgttngggggggcccngaaatccnttgggggnggggggcccccaaggnggttttccgggggggaaattggaaaggnttaatttccngggacnaagggnggaaacccttaaacccgcaaattgncccttgggggngggaaaggaaaggggggaaggggggcctttaatttgnggtaaaaaaaaaaanccttggnggnccaancccaaagnaaaaaaccccnaaggttttgtaaaagntttgggggtttggaaaaggaaagggcccnttcctttggtttccaaaggntttggnaacccaaaaaaaaccaaccctttncnccttttttttgggggnccnccttgggtttttnggaaaaaattttttttggcctttgngaaaaaangaaaaaaaccaaattttnaaccccctttaaaaaaaggttnctttggccaacccaaacccgtaaagncnccncccaattttttttttaanccccaaaaaggnaaattntttggaaattccaanggttnggtncnttttttnaacctttggaaagncccttnggggaaa

SEQ ID NO: 7727 - DNA, 287 bp, Homo sapiens
  misc_feature 229, 235, 262, 269, 271, 278: n = A,T,C or G
cccttagcggggtcgcggccgaggtacgaagaaaacaaagagctcggttaccataaagaaggtagttttcaggtctatattcaatggctctggcgtaatagataatagctatatcaaatctttctttggaaaactcttcatttcctttcattttcattaagttctccttcctctatacaatccatacaactttgaggttttaaagtttccttcaaagccaaaattgcantctttnccatttaccaattttttagtttaatgntgggtancnccggggngaaggaaaa

SEQ ID NO: 7728 - DNA, 368 bp, Homo sapiens
  misc_feature 117, 120, 142, 160, 272, 306, 334, 339, 358, 359: n = A,T,C or G
cccttagcgtggtcgcggccgaggtactttttttttttttttttttttttgggagggagtctcgctctattgcttaggctggaatgcagtggtgcgatcttggttcactgcaacctncanctcccgggttcaaagcaaattnttcctgctttggcctccntgaagtagcttgggatttacaggcaccataccaccaaccctggctaaatttttcttgtatttttagaaagagacagggttctcaccatgtgggccaggcttggtctcgaacnccttgacctcaagtgatccacccacctcagcctnccaaaggtgctggggattacaaggttgntgagnccactgcactgggcctaannatttttcat

SEQ ID NO: 7729 - DNA, 126 bp, Homo sapiens
  misc_feature 41, 54: n = A,T,C or G
cccttagcgtggtcgcggccgaggtacaaggctaagcattntaactttatactnggaaaaaaaatcaaacaaaggggagggataaaggacttagccatcttttgcactggaaaacaaaatatgtaa

SEQ ID NO: 7730 - DNA, 359 bp, Homo sapiens
  misc_feature 311: n = A,T,C or G
cccttagcgtggtcgcggccgaggtactcgatcataaagagtttaaagctcgagtgaaggagtatgcacgaaacaaaaacatccattactatttcatggccctgaagaatgatgagataatagatgccactcaaaaaggaaattgctctcgtttcatgaatcacagctgtgaaccaaattgtgaaacccaaaaatggactgtgaacggacaactgagggttgggttttttaccaccaaactggttccttcaggctcagagttaacgtttgactattcagttccagaggatattgggaaaaggaagcccagnaaatgttttctggcgggatcagcccaattgcccgggggttaccctggg

SEQ ID NO: 7731 - DNA, 131 bp, Homo sapiens
gccgaggtactgcaataatcacagcgtttatccgtgccttgatgtcaaaagttaagagagggtggagaccagaccgaactattgttttctgttcttggggaggaacagcttttggcaaatattggctcata

SEQ ID NO: 7732 - DNA, 378 bp, Homo sapiens
ccctttcgagcggccgcccgggcaggtacattattttgaatttaacttaactgttttgtggtgggtgtgaacaaaacattagaaatatattatctttttgtgataatactctctgacctcacttaaagtgatctgccatgaggtatccatgatcaagtttatgtttattctaatacctaaggaattcagccaactttgtttctatcatcagataatctcagaaaatagtgtgttttatctatattactgcctcttttcaatatttaagagaataattgtcttctggtttctactgagccctaagtaattaatcactaaaagacctaaaaaaagggaaattcccttctggttaaagaagtattttgggataggccccat

SEQ ID NO: 7733 - DNA, 394 bp, Homo sapiens
  misc_feature 259, 260, 278, 281: n = A,T,C or G
cgccagtgtgatgggatatctgcagaattcgcccttagcgtggtcgcggccgaggtacagtgcatattggcggcgcacgcctcattacgattcgcctgcttgcttctcctgttcaatcgtttctttggaaggcagtggatttttctcttgcgtctctgtcttcttcagtttcgacttatcgaatttctcgatctcagccatatcgggtttgtcagacatggttgcggaggaaaagcgaagcgaggcgcacgagtacttnntttttttttttttttttnggnatcaaaaagctttatttccatttggtccaaggcttgttaggatagttaagaaagctgcctattggctggagggagaggcttaggcagaagccctattactttgcaaggggccc

SEQ ID NO: 7734 - DNA, 295 bp, Homo sapiens
cccttagcgtggtcgcggccgaggtacccaggacatgttctagttacagaagccttgctctgctgtcaacaattgggaaatgctcattttttcatgttttgtgaatactctggtcttgctgtaagctaatgtcatggctgtgggatattagagaagtgggtttatgactctgaagaccagcagacaccagactttaaaagtgcttaaattggaatttggaaactacagtaaagaaaccttcagataccagttccatcctgaagccctctgttgaacaacagggccagatcctaaa

SEQ ID NO: 7735 - DNA, 793 bp, Homo sapiens
  misc_feature 75, 101, 116, 127, 174, 261, 272, 282, 310, 337, 357, 359,365, 372, 373, 387, 391, 400, 417, 423, 462, 483, 507, 544,551, 572, 573, 634, 636, 685, 700, 720, 789: n = A,T,C or G
ccctttcgagcggccgcccgggcaggtacatgaggttttacctcctccattcctgaccaataaccacccataacntaccgggcattttcttctggtggacntttccctttaaaaancaagccaaagnttggaattgggggggaaaaaggggggaattccccaaaattaaggttnaattccttttccaaaagggggcccccttttggggggggggaaaaaaacctttttgggccaaggtttggggggggtttccaaaggttngggggtttccnttggtttggncccccaaaaacctccaaaaaaaaccggnaatttaagggcccccccccccaatttnccccaaaaaggtcccccaangncccttnggaaagnnaaaaaccccccttnaagngggaaaaangggggtaagggtttaanggtttnaagggggggaaaaatttaatttgggggggttttttgggnaattttttaaagggaaatttntttgggggggaaatttccttttcnccccccaaaaaagggtttttttttttttaaaaaattntttgggnaaaaaaaaagggggggaaagnnaaaccctttgggtaaaaaacccgggaaaaaaaaaaaaaacccccctttttttaccttgggncntttttttttccttggggttaccccgggttttttaaaaaaagggaaaggncctttccccctttcnaattttcctttgggaaattncctttttgggcccaaaggccctttaagggaaaaccccccctttttttggggaaagggaaaccctttttnaaaa

SEQ ID NO: 7736 - DNA, 371 bp, Homo sapiens
  misc_feature 90, 103, 109, 133: n = A,T,C or G
ccctttcgagcggccgcccgggcaggtacttcctggctagtcggtgtaagcgttgcaaaaccagtctgtgggtctgagagctaatgcggnccatggatctggngaaggnacaacatcttcttggtagctcagntccgtcagctgcagacgctaattgctcaaacttccaacaaagctgcccagaccagcacttgtgttttgattcttcttttttccctggctctcatcatcctgcccagcttcagtccattccagagtcgaccagaagctgggtctgaggattaccagcctcacggagtgacttccagaaatatcctgacccacaaggacgtaacagaaaatctggagacccaagtggtagagtccagact

SEQ ID NO: 7737 - DNA, 104 bp, Homo sapiens
  misc_feature 35, 73: n = A,T,C or G
agatggatatctgcagaattcgcccttagcgtggncgcggccgaggtactctttctctcccctcctctgaatntaattctttcaacttgcaatttgcaaggatt

SEQ ID NO: 7738 - DNA, 152 bp, Homo sapiens
  misc_feature 66, 114, 115, 120, 125, 132: n = A,T,C or G
ccctttcgagcggccgcccgggcaggtacatatgtgactactaacgtcttccttattccacctcgnagtgagcaactggtgaattttaccgggaaggccgatatgggaggaccnntttcntatgngtacctnggccgcgaccacgctaaggg

SEQ ID NO: 7739 - DNA, 373 bp, Homo sapiens
  misc_feature 90, 112: n = A,T,C or G
ccctttcgagcggccgcccgggcaggtactttttttctttctttttttttttattatggttagctgtctcttaaaaagcaagaaaagaangagaagactgagaattaaggangatcctctttgaaaattaaaaataagactgctaaaagtatttggtatacagtctggaaaataaagttgagggaatctctccagataaagagcaaaaagaaatagatagaaaaatataaagaaagaaaaaagacatagacaatcaatatgtaatgttaggagttcctggaagagagaacagagacagtgtaggttgaagaaataaaaagaaaaagaattgaagaacagagcaagctaagtctccagattgagagggcccaat

SEQ ID NO: 7740 - DNA, 356 bp, Homo sapiens
  misc_feature 53, 207, 209, 222, 227, 229, 239, 253, 306, 317, 324, 337,338, 342, 350: n = A,T,C or G
cccttagcgtggtcgcggccgaggtacttttttttttttttttttttttttanactgtcctaaattgtttattaagtatgaattttacaaactttacttatattagcggtaacggtggagctggaaaagtattgcgccttctccaagctgcccggcgagagccaccaatagtgtggtggaacttgtggcccttttcaaggccacggntnttttggcctgcanatgtnancccacgcatnttccttgtgcttgngggactgggttgggtgatcccactggggtgtcaaggaattttcttttttgaanaagctttattnggaaatnggatccaaatggnngggnttaacccnttaaaa

SEQ ID NO: 7741 - DNA, 273 bp, Homo sapiens
cccttagcgtggtcgcggccgaggtaccttcatctcttgtgctagcaaactcttgatcacctcaccaggtagggctactgacttcctgaggaaagactcacagtccctttccaaccacaggcagaaaatggctttcagaggacgtgcttctaaaagtcctgttgccatgattatttggcccacctccgcggcagcgcattcgtcgaccctcttcgcggattctggcatctcttcactcccccgcgtacctgcccgggcggccgctcgaaaggg

SEQ ID NO: 7742 - DNA, 484 bp, Homo sapiens
cccttagcgtggtcgcggccgaggtaccaggagaatttcctaagcttctcagaaagcctgtcagaagcttctgaatatcagactgaccaggtgtaaaccatcagtttttccttgctggtgaggtgggtgtgacagtgggggaggggccagtaggacacactcacaggacttgacatagaacctcatttcacacacacacacacacgcacattcatggccacatttgccaaatgagcttttcagggcgagttatttctttaatgaaaaagcacaagcccttatgtgtcgaaatacacgctgttacactgaaaatatatgcacgacagagcaagaagcttgtgcatgatcacttcttatccgtccccttcccagcactccctcctcttccattctctccacatgtctcaagcaccctaccgagtagggcaggccaaatgttccttgggagtaatgccaactcccgacgttgccttcaggtccaaag

SEQ ID NO: 7743 - DNA, 340 bp, Homo sapiens
  misc_feature 301, 320: n = A,T,C or G
ccctttcgagcggccgcccgggcaggtacttttaaattcaatacagatgctgctgaattcattcctcaggagaaaaaaaattctggtctaaattgtgggactcaaaggagactagactctaatagggattggtagaagaaattacagttcaccacctccctgtcacctttccaggcaggtcccttatgatgaaatctctgctgttcatcagcatagttatcatccgtcagggaagcaaacctaagagtcagcaagacggtctttccagttcctctccttggtaaataaaatcgccccaagnagcccatgggcctttcagnaatcaaccctttgggcagga

SEQ ID NO: 7744 - DNA, 239 bp, Homo sapiens
  misc_feature 61, 102, 108, 111, 112, 121, 127, 137, 139, 141, 145, 146,153, 157, 177, 181, 219, 227, 231: n = A,T,C or G
ccctttcgagcggccgcccgggcaggtactttttttttttttttttttttttttttttttnattttttttttttttttttttttttttttttttttttggangcaacncannaattttttnttgcanctggaaaaanantncatnncaaaaantttntggtaggtttggggaaaagngttntttacaataaatgatgaaatagtttgtttttggcaatntgattacntacnaaaaatgc

SEQ ID NO: 7745 - DNA, 302 bp, Homo sapiens
  misc_feature 151, 176, 179, 186, 227, 231, 235, 237, 244, 253, 254, 255,260, 261, 262, 263, 264, 265, 266, 267, 268, 269, 270, 271,272, 273, 274, 275, 276, 277, 278, 280, 281, 282, 296: n = A,T,C or G
cccttagcgtggtcgcggccgaggtactttttttttttttttttttttttaggggaaaataacttttattgagaccccaccaactgcaaaatctgttcctggcattaagctccttactttcccttttgccaaatttccggtctttttttantggtcccatgaaatgctttcttctnctncatgggnctgggaaaccggccatgggccaaacttgggaaggggggggngttnaaangnaactttnaaaaggggnnnaaaannnnnnnnnnnnnnnnnnntnnnaaaaaccccccccntttttt

SEQ ID NO: 7746 - DNA, 548 bp, Homo sapiens
  misc_feature 60, 75, 92, 106, 107, 108, 110, 113, 134, 135, 141, 146,179, 180, 184, 191, 212, 235, 237, 238, 239, 244, 268, 280,292, 296, 304, 312, 315, 316, 326, 328, 334, 343, 347, 355,363, 368, 374, 376, 382, 387, 403, 421, 426, 446, 452: n = A,T,C or G
  misc_feature 456, 467, 474, 476, 484, 485, 486, 489, 493, 512, 532, 533,547: n = A,T,C or G
ccctttcgagcggccgcccgggcaggtacttttttttttttttttttttgggctgcaagngtttattctatttanaagtctacaaatttganccttttaaagaatnnnanttncaccataaattatttcatttnnaaaaancccanccatttttttataggcttttattcaaaaaattnnttcnaacaatnattattttatttaactttggnggtcgtgggaaaaccaaatttantnnnttttncctcaaaattggccttggttcctnacaaaaaaccantcaaaggccttnatanaatataantctctgtntgnntttaataaantntttggntgtcttaanttancccaaccnatattacngcggntgatantnttttcnttgtnaaaaaaaagtccacangacaattttttaacatanaaaantaattttttttaatttttanaaaccnaaanaaaaaccttanccccccnanaatttttnnncanaatntggtatccttggttattcnttcccccaattaaccaaccnngccaaaaccattant

SEQ ID NO: 7747 - DNA, 332 bp, Homo sapiens
  misc_feature 275, 300, 317, 319: n = A,T,C or G
ccctttcgagcggccgcccgggcaggtaccttcagtcccttgttattgttccgtatattacctgtaagcagatactgtattttattttagcctatttgacagaacacatcactcagaaaaagtgaagtttcagagcaaacagtgaagaaatcagtgtgattgtagacaaaaagtcggttcacagaacggagcagcggggagaggagggaaaagcttcatagtttggtgcttatcacatcaagagattggtaaaatttctgaggaaagacaggctnatggggcactgaaatggaacaactncttttaaacgttgcaancncttttgaattttt

SEQ ID NO: 7748 - DNA, 334 bp, Homo sapiens
  misc_feature 295: n = A,T,C or G
ccctttcgagcggccgcccgggcaggtactgatgctttttaaggcatattatcaacatacagccatgactcgtccagagaatctcacctgacaaaaactcagagaagaaagagaaagaagatgaaatggctggttttcagatgtgtattctcattttatggaagacatgttgccagagtaaggcacaatatattcatcttgaaatgtaatactgagaagatatggaagttatggaagttgtggccttcagaattgacacttacggagagactagaacagcgtgggtgagttgagnggggcaggaagcatgtcttaatggacttaaccaattttc

SEQ ID NO: 7749 - DNA, 245 bp, Homo sapiens
cccttagcgtggtcgcggccgaggtactatctgtggaaaagccttcatgcgtctctcatcccttactagacacatgaggtctcacactggatacgagctatttgagaagccatataaatgtaaggagcgtgagaaagcctttagttatctcaaatcctttcaaagacatgaaaggagtcacactggagaaaaaccctataaatgtaaacaatgtggaaaaaccttcatatatcaccagccctttc

SEQ ID NO: 7750 - DNA, 559 bp, Homo sapiens
  misc_feature 117, 119, 120, 121, 126, 133, 137, 140, 146, 147, 148, 150,151, 152, 157, 164, 165, 173, 179, 190, 192, 193, 195, 199,200, 203, 216, 217, 219, 221, 228, 230, 231, 234, 241, 242,243, 246, 247, 251, 260, 263, 264, 273, 313, 319, 322: n = A,T,C or G
  misc_feature 323, 338, 348, 350, 360, 379, 383, 385, 393, 394, 398, 401,407, 412, 431, 457, 463, 482, 484, 505, 515, 519, 529, 531,540, 541, 542, 545, 551, 559: n = A,T,C or G
cccttagcgtggtcgcggccgaggtactttttttttttttttttttttttttccttttttttttttttttttttttttttttttttttttttttttttcctttttttccaaaaaaantnnnaaaanttttaanaaanttnaatttnnnannnttttnaaaaaanntgggaaantttttntaaaaaaaaantnngncccnnaantaaaaaatttttnntnantttcccnannccnattttannnaannccantttcttaanccnnttttttaangggggaatttttccaaaaaaatttaaaggggggttaaaanaatttnttnntccctttaaaaaaantaaattgggnantttggttgancaaaaaaaggaaatttttntttntngggggttnnaatnacnttgggntaatnaaacctaaaaaaatttttngggttttccccctcaaaaaatttttnggcaanttaaataaaagggcccccngntttaaaaaattttttttttanaaaatttttngggngttttttttntntttccccgnnnttntttccngggggggn

SEQ ID NO: 7751 - DNA, 296 bp, Homo sapiens
  misc_feature 266: n = A,T,C or G
cccttagcggtcgcggccgaggtactggggaatcacaggactctctccccgccctgtctagtggagacaggatagcttcttgatggccaggggtggtgtctccacctggaactggctggaaacattgtcacatgatcatctgaagcttgatggtctctaggtgacaggaaatgaatttggttaagagtttaacaaacatggtccaaaaaccaaggcaagtatagtcattactaatgggctggccagaggaaggagccatgaacccnaacttagcatttttgaccaggagccccatg

SEQ ID NO: 7752 - DNA, 581 bp, Homo sapiens
  misc_feature 103, 111, 131, 150, 177, 179, 184, 204, 205, 207, 217, 222,225, 244, 256, 273, 288, 296, 297, 302, 306, 309, 311, 312,321, 328, 329, 331, 334, 338, 349, 369, 383, 388, 392, 403,405, 414, 420, 422, 428, 430, 432, 434, 435, 437, 441: n = A,T,C or G
  misc_feature 442, 444, 457, 458, 468, 469, 474, 483, 495, 498, 520, 549,560, 570: n = A,T,C or G
cccttagcgtggtcgcggccgaggtacctcattagtaattgttttgttgtttcatttttttctaatgatctctcctctaccagctcacctgagtataaacagnaatggaanaattgggaaggtaccaagcncagattttccttcactttngctctctgcctccattacttcttctgnanagtcntaggtttacccctatttttnngnggtactccantttantangggccaactaaataccacnagtttttctccnaagagtcatttttgtgnacaagttttttcctnttggtaannttgcntttntangnnaaattgggntcttttnncnctntctntttgcttttangacccctttttcttcccctngtccaaaaaaatgnggccntacnaacattaccangnttcccctcnttttgncntttttngncntnncnaagnntnggggaacctttgnngtggccattnntctcnccaaggggngggccccattanagnggccttggtccccttatccttnttttttccccatttggtttctccccaacncctccaattgnaagtcccccnttcccccaact

SEQ ID NO: 7753 - DNA, 507 bp, Homo sapiens
cccttagcgggtcgcggccgaggtactccaaagattcaggtttactcacgtcatccagcagagaatggaaagtcaaatttcctgaattgctatgtgtctgggtttcatccatccgacattgaagttgacttactgaagaatggagagagaattgaaaaagtggagcattcagacttgtctttcagcaaggactggtctttctatctcttgtaccttacatcaatggcaagtttaagaaggataattaattacacaaacccttcacagactgctctggtgcctggtggtgctagctcctcccacctcagcacctgctgcatctggagcagcccaagcctcaggatggacaagaggaaacccacagctcagcttcaggcttcttatgtttctgaaaacagcttggatattttaatgcacgttgcattaaacctcactgaaacctgtaaaaaaaaaaaaaaaaaaaaaagtacagcagtgcgatctcggctcactgcaacctccgtcccc

SEQ ID NO: 7754 - DNA, 155 bp, Homo sapiens
ccctttcgagcggcccgcccgggcaggtactctggcaattcacctttcaattcaaatatcctgtagagaacgcttcctctgagaagccactggatgtctgtatggtgcaggaggtttatgtgctgtctgcccaggtttttgttttgggtgttttt

SEQ ID NO: 7755 - DNA, 335 bp, Homo sapiens
  misc_feature 268: n = A,T,C or G
ccctttcgagcggccgcccgggcaggtacgcggggagggtagagtgagaagcaccagcaggcagtaacagccaacccttagccattgctaagggcagagaactggtggagcctttctcttactcccaggacttcagcacctaagacagctccaaaacaaaccagaacagtcagctccgggggagcacgactgggcgagaggcacagaaatggacaccagaaataaggcccagctccttgtgctcctgactcttctcagtgtgctcttntcacagacttcggcatggcctctttacagggcaccttctgctctcaggttggggttgacagaattac

SEQ ID NO: 7756 - DNA, 313 bp, Homo sapiens
cccttagcgtggtcgcggccgaggtacaatcagtaagattttgatttttaacaagtttacatgtccaattacatgtagataaaaggaatgaaaaccagtaaagacaccttttataatctgaaaatagatttttaaaccttcctttaatgtgaaattttctctttaatgtgttatgaattctatcaaatataaccatttaggattatttatagtatgtcactgatcacttctactagtatagacaaataaatttataaacattattttgaatgtaactaattagcataattttatttaagagttagactgtgtt

SEQ ID NO: 7757 - DNA, 140 bp, Homo sapiens
  misc_feature 16, 17, 20, 24: n = A,T,C or G
cccttagcgtggtcgnnggncgangtacatttaccatggtttagtctaaatattaggacacacagacacacacacagacacacacacagacacacacacagacacacacacagacacacacacaccccttttggaactct

SEQ ID NO: 7758 - DNA, 415 bp, Homo sapiens
ccctttcgagcggccgcccgggcaggtacctgacagtgtaaagaaggagctcctacaaagaataagaacattccttgctcagcatgccagcctttaagattgaattagattgtgttgttgtggttttatttctgaaagtaaaacttgccataaattagaaaacaatttcccaaaataaaatccttttttgtatgatggtatacagttttcagtaatgatgtatacattgtattgatttttttccctaaatgtgttattttaataaatatctcatgaatgagtttgaagtttgcttggattttgaaatgaatgggactttgtctttatcactaattcaccaaatttgttgagcgcaaaagcaattaatgtagtttaagtatttaagtatgtacctcggccgcgaccacgctaaggg

SEQ ID NO: 7759 - DNA, 191 bp, Homo sapiens
  misc_feature 153, 175: n = A,T,C or G
cccttagcgtggtcgcggccgaggtactgcatcttaacagcaaagccattttattctactttataactgagagacttgataccatccatctctaggttacagaggataatttgaagagaaatgttactgtagaatatatagttctgtactttntttttttttttttttttttttngcatggcatgatactt

SEQ ID NO: 7760 - DNA, 374 bp, Homo sapiens
  misc_feature 122, 128, 133, 156, 159, 160, 161, 164, 167, 170, 180, 184,203, 204, 217, 232, 233, 234, 243, 255, 257, 258, 267, 275,283, 296, 323, 325, 329, 331, 341, 354: n = A,T,C or G
cccttagcgtggtcgcggcccgaggtacttgggaggctgaggcaggaaaattcttgaacccaggcagacggaaagttgcagtgagcttgagatcacaccaacttgcacttccaagcccctgnttgacnagaantcaaaggacttcccggcattccnttnnnaanaanaanatatactcanattntacacattgtagtaagtanntatggaagtcagnaaaattaaaaattannnaaaaaaaangaaaaatgggtngnncccttgtgngtaaaatnttggtttngcaaaatttccanagcaaaagggtaaattttaattatccncncccncnccaaaaattntgggttttttttntttcaaaaatcccccccccc

SEQ ID NO: 7761 - DNA, 355 bp, Homo sapiens
  misc_feature 55, 100, 127, 137, 165, 187, 213, 245, 264, 289, 333: n = A,T,C or G
ccctttcgagcggccgcccgggcaggtactttttttttttttttttttttttganaaacgttgtgtttaatggtaaagcttaacacaccccagcaccaanaatggtgtggagttgcagtagcaacangccgggtganccccccatggaggcctcacatggcgaanaggattgaggaaggcgaccatnaaacaagaaaagccccatggcctcanacagggcaaaagccaagaaatggcataggaanaagaagctgctgcttgaanagacggggtttcctgggccattagnccaaatggatcaaagcctggccaaaaccaccgggtttccaatgncccaggcccccctggaaaccca

SEQ ID NO: 7762 - DNA, 396 bp, Homo sapiens
ccctttcgagcggccgcccgggcaggtacacatgagagaaaaatctttccaatgtaatgagagtggcaaatcctttaattatagctaactcttaaggaaatatcagataatccatttaggatagaaacaatataaatgtgaggtatgtgacaaggtctttaatcagaattgattccttgtatgccataatagatgtcacactggtaagaaaccttacagttgttatgagtgtggcaagaccttcagtcagacgtcatcctttacatgctatcgtagacttcatactggagggaaaccttacaagtgtagtgagcataacaagacctttggttgaaattcagcccttgtaattcataaggcaattcatactggagagaatccttgcaagtgtaatga

SEQ ID NO: 7763 - DNA, 300 bp, Homo sapiens
ccctttcgagcggccgcccgggcaggtactagatctgtacctcttgtctgaattaaacatttttagttgctgtgtaaatgttaggaagcaaagtagctttgaattttctctgtaagagaataaaagataaaataatgtattttctttatttcacattttatttggagatatttaaatgaaatagaaagccatataacatagctataattactacctgtttgctatttttgtttaacttattttgtagcttcctcactggtttgtgttgctaagcaaacgtatacaaacagaaaaagagct

SEQ ID NO: 7764 - DNA, 403 bp, Homo sapiens
  misc_feature 320, 382, 394: n = A,T,C or G
ccctttcgagcggccgcccgggcaggtactcatgtattttttttttccagatctctttccccaagttgctattgtaagagtattctgctgcgtgtggatgcagttatacacattaaagcaagatctggagtctgaagtagctataaagcagctataaaacagaagtacatgcatagctgcagaaaccatgataggtagaggacttttcttttggttttgttttgttttgttttgttttgttttttggttttacagagaaagaggatttttatttaccaaaagaaaaaaaatttccaggttgaaattgtgccagaaaatgncttggtttttttacacccattccctaaaggaaaaaaccttttaccaaagggggttgtttttngggaagttaagnaaaaaaaaa

SEQ ID NO: 7765 - DNA, 340 bp, Homo sapiens
  misc_feature 210, 278, 324: n = A,T,C or G
ccctttcgagcggccgcccgggcaggtacatgggactacaggcacgccccaccatgcccagctcatttttgtatttttagtagagacagggtttcaccatgttggccaggatgatcttgatctcttgacctcatgatccgcccctcttggcctcccaaagtgctgggatcacaggcgtgagccaccacacctggccctctatttattctntttaaagagagagaaaactatgagaggccaaaaattattttaattaaatctttaccttagcacaaggngaaaaaaatggaatttgcctaatattaggtgatgaaagcatacacnaatggaacagtaaaca

SEQ ID NO: 7766 - DNA, 292 bp, Homo sapiens
  misc_feature 12, 36, 161, 186, 187, 189, 202, 207, 223, 226, 230, 232,234, 243, 244, 245, 279, 289: n = A,T,C or G
gggggccggaantttgggggccccccttctttaagnaaaggccattgccttccggaggccgggccccggccccagttggtgggatggggaattattccttggcaagaaatttcccgcccccctttaagcccggtggggtccgccggggccccgaagggtanctttttttttttttttttttttttnntnttttttttttttnaaagnaaaataaaaaaggggngcncctngntngggaaaaannnaaatttcccccagagggaaaaaaaatttttttgntttaattttnaaa

SEQ ID NO: 7767 - DNA, 572 bp, Homo sapiens
  misc_feature 426, 456, 510, 565: n = A,T,C or G
ccctttcgagcggccgcccgggcaggtactggcactgaatatacacatacccataaagtcggatatgttcattaatcccagagttgactgataaaatgctgattaaacaaaggtaggctatatgaggcagccacaccctcccaaaacatgtccccagagaccgggtggccttctttcttaaggctgtaatttatgcacagttaggagttactctctcatcctattaatatttaggatggctctcagctggctgattggagttaacacagaataggatcatacagattctgacatggtcccattttgtgtcgttgaattatacatggaaagcaaaaccaggttttttttttctctctttttcaggggaggtgggtgcagataagggtgggcagggcactgtatagggaggaaaaaaatactgatatngatgggtcttgggattgcaataagtcagtntaccatttaagaggaaaatttaaatattcagtggaatgaggcactcaaagggtngaaatgcgatttttctttggtttccagggacctgtccctgggctcttactccaangttaagt

SEQ ID NO: 7768 - DNA, 194 bp, Homo sapiens
  misc_feature 144: n = A,T,C or G
ccctttcgagcggccgcccgggcaggtacttccaaacatgggctcacaagttggtgctggctggggaatctcagttcctctctacatgactgtttgagtgtcctgcatggtgattggctgcagccagcattccaaaacactaangcggaagctataatgccttttgtgaactagccttgggaatcacacatcat

SEQ ID NO: 7769 - DNA, 142 bp, Homo sapiens
  misc_feature 3, 33, 38, 100, 103, 108, 124: n = A,T,C or G
ggncgggaaatttggggggggcccccctttctnaaaanatagcccataggcctttccgggaggccgggccccggccccaggttggttggaaatggggaantanttccnttggccagagaaaaanttttccgggccccccttt

SEQ ID NO: 7770 - DNA, 390 bp, Homo sapiens
  misc_feature 333, 353, 358: n = A,T,C or G
cccttagcgtggtcgcggccgaggtactgttcgtgtcgcagcaggaggcctgggtggtggagcgaatgggccgattccaccggatcctggagcctggtttgaacatcctcatccctgtgttagacccggatcccgatatgttgcagagtctcaaggaaattgtcatcaacgtgcctgagcagtcggctgtgactctcgacaatgtaactctgcaaatcgatggagtcctttacctgcgcatcatggacccttacaaggcaagctaccggttgtgggaaggacccttggagtatgcccgttcaccccagcctagcctcaaaaacaacccattgnagaatcaggagcttcgggcnaaacntctctcttgggaccaaaaggtctttcccgggg

SEQ ID NO: 7771 - DNA, 514 bp, Homo sapiens
  misc_feature 272, 387, 398, 411, 439, 480, 491, 498: n = A,T,C or G
cccttagcgtggtcgcgggcccgaggtacagtcacaatattgtgcagtcactagcattgtccatttctggagctttaccaaggcgatgaaaccttttagaaaggttaataggttacaagtaagtaggctggacttcacttgatgatgagctaggatctgaaattaaatgacagaaaatcaacttgacacagtcccagaagccaagctcatttccctcactctaacttccgggcctaagatggcattaaagttaaaggattcagggttctctncaagcatagttcagttaatagaagttgaaaaataaaagtataggcccttggttggggagaatcctggttttcccttctcacccatgaaggagctggtgcttatagtagaaccaancttcttggaanggaaaaaaaccantgtggcaaaaggtgtgtctgtgtgtaanaggcagtatgctacaggagacttgagggtaagaaatctaanagctgactttngttctgnttttaaggctttttca

SEQ ID NO: 7772 - DNA, 357 bp, Homo sapiens
  misc_feature 117, 290, 301: n = A,T,C or G
cccttagcgtggtcgcggccgaggtacacctccaataaccagctggggggcatccagattatgcacaacaatggggtgacccactgcactgtgtgtgatgactttgaaggggttttnactgtccttgcactggctgtcttacatgcccaagagcgtgcacagttcagttcctcttctgaactcaaaggatcctatagacagaattatcgagtttgttcccacaaagaccccatacgatcctcgatggatgctagcaggcccgtcctcacccaacccaaaaagggtcaagntggtttggagntgggcttttttggactaatgggatctttcttcaggaggattattggcaagcccttg

SEQ ID NO: 7773 - DNA, 399 bp, Homo sapiens
  misc_feature 1, 15, 29, 347: n = A,T,C or G
nggcggccgccggtngtggatgggatatntgcagaattcgccctttcgagcggccgcccgggcaggtacatgtttggaaatgagttagatacttgaaaagtctaaacacactgatttaggagtgcgtatgttgctgtctcaatgaacaatgggtcaatagttcatatggactaaattaatctctgggtagcacgtatgtgtgtaaatataaaattatattagacattagcaccagtgcagaacatgctcagcatcataagatccaaaacaccagcacaagtttatccatcattaaaaacaattacctccttcctaaaatgtcagaaataggtagggtaacctggagnattaataaaatcttatccaaaaaaggtaacctcttataacattaaaaaggtt

SEQ ID NO: 7774 - DNA, 389 bp, Homo sapiens
ccctttcgagcggccgcccgggcagatacaaatttagtaacctactaagaaacatgtgcatttttttttcctttcacaagtgctgctgttacttgaaaagaatgcttctgaattagaataactggaataaatatttaaaaaaaaatagtgcagcaagaacctgagacttgcaaaaaacccttttaccagaaacttgctacaaaaaatctgctacatcttacttcatcaaatctttaaattctgtaacaatttccatccccgcgtacttagaataaaaaataaacagaggaaataagaactaactcgagttaataacaacatctttaaggacaagtttggtcatttaaaaactaagtcttgttttgttttgcttgtttttaattactcct

SEQ ID NO: 7775 - DNA, 370 bp, Homo sapiens
  misc_feature 360: n = A,T,C or G
cccttagcgtggtcgcggccgaggtacagaactgaaattcaaatatcgaggatagcaagaaaagctggcaacttctatgtatctgcagaacccaaattggcgtttgtcaccaggatcggaggttatcaattggggtgagcccaaaggtctgaaaggtgttgcaacttctttgccttcatcaaatcttcaatagaaactttgtgaagctcagcagggcttcaataatgtgctgaggtttgtagaaccatatattgcatgggcatacccaaatctgaagtcagtaaaataaacctaatctacaaaatggtggtttattaggcaaaaatgaataaagaaagcttactttgcctccaaacaagnataaatactt

SEQ ID NO: 7776 - DNA, 377 bp, Homo sapiens
  misc_feature 118, 122, 127, 170, 285, 331, 346, 349, 354, 359: n = A,T,C or G
cccttagcgtggtcgcggccgaggtactttttttttttttttttttttgagagaacctgaattaaatttttaatattttaaaaaaggaaagttgctgggaagctggtaaacagaaacngaanatttnggggggcctaactagaaaagagacactgggttgttaagcaganagatattgagggggctgtaagcctaaggtttgaaatctaaagatagagtggaaaagggagtaggcacccccaccagcccctgcttgacatctgctttagttcatttccaccaggnaagggagggggaaagggggcaggggaaggttagggggagccttctnagcaaaagcccagcnttncagcntttgnttaattctcaccccacct

SEQ ID NO: 7777 - DNA, 388 bp, Homo sapiens
  misc_feature 10, 15, 20, 21, 27, 28, 37, 42, 44: n = A,T,C or G
cggccgccantgtgnatggnntatctnnagaaattcnccctnangcgtgggtcgcgggcccgaggtacaccaaatgagatactatttggaaaggcaataaagggagtgtaaaagcctaggtagcttaaatacaggctctggaatttccttcgcaggaaggtgaagcaccaatgatggcaaaaattaaataaatacatcatcttaaaaaggcagagggtaggctgcgtgcagtggtttacgcctataatcccagcactttgggaagccaaggcgggcacattgcttgagctcaggagtttgagaccagcctggacaaccccatctctacaaaaaaataaaaatcggccaggtgtgatggggcaaacctgtggtctcagctacttgggga

SEQ ID NO: 7778 - DNA, 380 bp, Homo sapiens
ccctttcgagcggccgcccgggcaggtactttaaatttagtggttgctggagcacctaaaagtcagattgtcatgttggaagcctctgcagagaacattttacagcaggacttttgccatgctatcaaagtgggagtgaaatatacccaacaaataattcagggcattcagcagttggtaaaagaaactggtgttaccaagaggacacctcagaagttatttaccccttcgccagagattgtgaaatatactcataaacttgctatggagagactctatgcagtttttacagattacgagcatgacaaagtttccagagatgaagctgttaacaaaataagattagatacggaggaacaactaaaagaaaaatttccaga

SEQ ID NO: 7779 - DNA, 378 bp, Homo sapiens
cccttagcgtggtcgcggccgaggacatcctgaaagtcgaaaaattccttcagattccagacctgattcctcaactttctcaaaaaatttttgtaataccaggggaactttcactccagggtctttctttcggtcaccgtccaggaggactgtaagtggaactccgaaaatcccattgtcccgtccttttactttctctgttttgttccttttcagttgaattccaaaggcatcaaaaaaggcagtcaattcaatcagagagagatggcggattttcttcatgtcttcagcagacagatctcctgcttcagttaagccaaatctggttttctgaacattaaatttagttaaaacatagtcttctttcttaatctctga

SEQ ID NO: 7780 - DNA, 168 bp, Homo sapiens
cccttagcgtggtcgcggccgaggtactgacagaaattattgcttcaaggacacctgaagaactgagagccatcaaacaagtttatgaagaagaatatggctcaagcctggaagatgacgtggtgggggacacttcagggtacctgcccgggcggccgctcgaaaggg

SEQ ID NO: 7781 - DNA, 379 bp, Homo sapiens
ccctttcgagcggccgcccgggcaggtaccaaatataaaatgctgcaagattttgaatgaatggtgagagtgtaagaaaatgggctgtatttcaatgctcctgtggcaggatgtcaatcaagagcttggagccaaagaaaaagaaatcccttcctagcacaaagcttggctgttcagtgaatagcgtttaaataaccgtaaagtaaaaatcctgtttatgatttttattgattaggggcctacttaattaaggttaccaagtggaatgcaaatgttatctgccatattttaaaaatatcagccggaaatacaagtgggaaccgttgaaggagagagagaaaggtaaatggaatggtgatagttgtccttataaagtgga

SEQ ID NO: 7782 - DNA, 328 bp, Homo sapiens
  misc_feature 307: n = A,T,C or G
cccttagcgtggtcgcggccgaggtacataattattaacgacaatatttctcatctgcaatttttaaacatgctttctcaaataacaaacacgtatttttgtaagttttaaaggcaaagggggcagaatgatgacagacataaaaagctcacatttaaattactggtagattttatcaaaaaaaaaaaaaaaaaaaaaaaaaagtccaccactgcacaacagtatccaatttgaagactaatggtaaagaaaattcttcaggtaaaaactgaaaatccatcaaggctggaaaatctaaaattagttntactttctaatgaaaaaatta

SEQ ID NO: 7783 - DNA, 304 bp, Homo sapiens
ccctttcgacggccgcccgggcaggtacagtggttttcttttctttggtcggggagagtgggctggaatggagagtgaggcccacaaattacctgcagagacgtggaggcgtgagggagaacatgcttgttaaatatgcaggtagattaggagacaccaaacagagattcagacacagtaaggctgggatgagatcctcgaagctgtgttttaacaaactccactggagagtcccatattccctcaaatttgggaatcacgaccctgaaccaggttgggcctgaagcagtcaactgaattcact

SEQ ID NO: 7784 - DNA, 154 bp, Homo sapiens
  misc_feature 56, 83, 84, 88, 100, 119, 136: n = A,T,C or G
gatatctgcagaattcgcccttagcgtggtcgcggcccgaggtacagatgtccagnagacctactggatatgcaggcctgcanntcangggagagctggnttaataaccgtcaaggcantaatcatttgcatttanatggcgagttgaagccat

SEQ ID NO: 7785 - DNA, 290 bp, Homo sapiens
  misc_feature 45, 235: n = A,T,C or G
ccctttcgagcggccgcccgggcaggtactttttttttttttgtngtttttgttttacttaaaacttttaatttatccagaatggcagtagctttagcaagcagatggtcacaatctgttttctaaatcattttttattaaatgaatccaaagtatcctagctctttgtcaaagatggtctgtagaaatgtttttaaagattagggatgctggactttttttttttttttctttngggcccatttgagtattttgttttcaattagggagatagttggtattaggattag

SEQ ID NO: 7786 - DNA, 424 bp, Homo sapiens
  misc_feature 35, 44, 63, 87, 89, 105, 112, 115, 119, 133, 155, 158, 173,174, 185, 198, 199, 226, 239, 247, 249, 266, 291, 292, 297,301, 306, 307, 315, 319, 320, 323, 325, 339, 340, 379, 389,398, 400, 401, 408, 409: n = A,T,C or G
ccctttcgagcggccgcccgggcaggtactttttnttttttttnttttttttttttttttttncttggaaaattctttattgccagnantgaaccctaaagtggntcacaanagngccntattttttttcaantttacttacaggggacaaaaanacnattctttaaaagttnnaaaataaaggnggacccagtttgnnttttgcccaaaaattttttaaaagccncccctccaacccnttgaaaantnggaattaaaaagggttntacccctttttggggggaatttttnncaacnttgnaaatnnaaaatttncttnngtnanaaaaaaaaaccttnngttttggggaattttttttggggggttttaaggggggantttggggaanggaaaaaantnngaaaggnnttttttttttttttt

SEQ ID NO: 7787 - DNA, 331 bp, Homo sapiens
  misc_feature 296, 329: n = A,T,C or G
cccttagcgtggtcgcggccgaggtacaccctttggactcagaactctcagtggactaacgtgggtcacctctgtgtagctctgctctgtgctggagagtcaaacctggaattccggcagctctctggaactcagcacagcccgcaaggttgaaaggcccaggacaacacacctgatcccttcccctccctattctaaagggagagaaacatgactttatgggccaactgtgaaagggacaagcgaggctgacctgacaaagtcaaaacgcactgggagaaggggaaggaggaacnggctggaactttggacagctgagagaaaagcanca

SEQ ID NO: 7788 - DNA, 493 bp, Homo sapiens
  misc_feature 341, 430, 476: n = A,T,C or G
ccctttcgagcggcccgcccgggcaggtacactggaggctggagcctgcagatggcgtggctctgcggctcaccttgctgcagttggtggtggtgacagagactgcagcttgactgtagtgaatttggaaattatctgtctggaagctctgagtttatcttgggacctcaagaggagaggatcacccaactcacagcaatcaaactccaaatggtgctataaactgaaccacacatggacacgtcagtcttccgaggacccttagatcaaccccaggaggagccctagctgctgtccccattcgacgcccctttccagcaggaagtagccaagaagacatngttcgcccaaacctctaacagcagttagtgcggcatctccacaggggggaatgttgtaggagttattgataaattattttaggcagatntgagaggaaaaggggtccttagaaagtttttggttttttaaaagcnccgtcctgggaaaaagt

SEQ ID NO: 7789 - DNA, 209 bp, Homo sapiens
ccctttcgagcggccgcccgggcaggtacgcgggtctctatgttaatacgtagctataaagcaacagttggttttcttatcctttgataaaagcatcccataaaatataaagtagtaagttaacatagtattattgtcacacacaatgctttttttggttaaatgttgatacgaggcaatgttttggaattactttaattgatggagta

SEQ ID NO: 7790 - DNA, 490 bp, Homo sapiens
  misc_feature 378, 392, 395, 435, 447, 448, 464, 472: n = A,T,C or G
gtagacacagtgaaagtctgatctctcttttccttacatatcccccccttttctttttgacaaaaccaccatcgtcactatggcccattcttgctggttgctgtctctttggagctgctggatacacctgtagactggcgagtcgattggggtgtctccatctccacacttttctttgcatctccagtgagttcattgtagaactttaaatgtctagtgggtatccaaacaggaagctgattttctcctggtgaaacacaagcaaaacctctcccccacgttatcaccttccccatttcccatgttttatttttattatctttccaccaaatcagttttccttcatgtgggctggtccttttaccagtaagatgttgntctgcagaggtagnggnctgatttctataaatggttaaaacatttaaaggatagagngctagattaagnngcatctggggaggggnatactccnggcttttcctttttttgg

SEQ ID NO: 7791 - DNA, 279 bp, Homo sapiens
  misc_feature 68, 120, 242, 261: n = A,T,C or G
ccgggcaggtacagagatgtcatgttggagaactacagcaacttggtctcactgggatgcttcatttntaaaccagatgtgatttcctcattggagcaaggaaaagagccttggaaagtntgtgaggaaaggaagaagacaatatccagatttggagaccaagtatgagaccaagaagttatctttagaaaatgacatttatgaaataaatttatcccagtggaagataatggaaagaattngaaaaccatggccttaagnggtctcattttaaaaaat

SEQ ID NO: 7792 - DNA, 363 bp, Homo sapiens
  misc_feature 324, 344: n = A,T,C or G
ccctttcgagcggccgcccgggcaggtactactaccttgaccctgcatattaggaaaaataaattccttggcattaggagaaagagcagaggttttctgctgttgttgctgctgtggtggtggtggccggcggtggcggctggggctggctgctgctgtttgctgtggctgctgctggctacccaagccaagcccatacagagagtgcattgaggaagagatggctttctgcttcaagaggtcattcacattcaagcccgaggttttgatgggaagaaagtacctcggctcgcggacccaccgcctaagggccgaattccaagncacacttgggcgggcccgtntactagttgggatcccgag

SEQ ID NO: 7793 - DNA, 362 bp, Homo sapiens
  misc_feature 353: n = A,T,C or G
cccttagcgtggtcgcggccgaggtacaatttctgccactggtctaggtgtctgaggagcatcttcctggctcagagaccttttgctccaggtgcacatgccgcaaatggcaatctgcgcgcgaactaattcgcggccgcataatttaataacatcgtccttccatttggccgcgactgctctggaaaattggttcagtagtaaacagaattctagcaggtggaacaagaacaggcgaggcaccctgggcctggtctctcctggaggtctgggtgttgcagcctttcaggactgcggctgctgtggcctacacacctgggcctgtgtccccgcgtacctgcccgggcggccgntcgaaaggg

SEQ ID NO: 7794 - DNA, 392 bp, Homo sapiens
  misc_feature 306: n = A,T,C or G
cccttagcgtggtcgcggccgaggtaccggaatctgcagatcgccaagaattcctataatgatgccctcctcacgtttgtctggaaactggttgcgaacttccgaagaggcttccggaaggaaggcagaaatggccgggacgaagatggacatagaactccacgacgtgtctcctattactcggcaccccctgcaagctctcttcatctgggccattcttcagaataagaaggaactctccaaagtcattttgggagccagaccagggggcctgccactcttggccagcccttggggaagcccagncaagccttctgaaaggacttctgggccaaaagttgaaagaaaccgaacattcaaatgcctgcttgggggggaggttcccgagggag

SEQ ID NO: 7795 - DNA, 290 bp, Homo sapiens
cccttagcgtggtcgcggccgaggtacaagcttcatttgccacaaaactcacaaaaaagtaattgattaaagaatatctcttttatgcaaaatatacattttaggatataatttaattgatattctactatataccgacattgctccttgatcattgaataaaaaaatactctcattgccagaattatgtttttgtaatatttataattgaggtaataatgataaaagacttaaactatgaataatgttggtgagttccatttaagctataacaatttcccagaactaaa

SEQ ID NO: 7796 - DNA, 458 bp, Homo sapiens
cccttagcgtggtcgcggccgaggtacaaatctttggcctttctcttgacattttcgtatgtcaaaaaacaaaaaaccttcatgtatttcaatctagtgattactttttgcaccgattttgttttttacaccacaaaaggaggcactttcagtatctgtaaaaggtatttaatcctaaaacatacttacctagagaataattaaaacggaattcaatacaatctagtatctattaggaaattaagagttatcacttctaaaagtcatttgaaagtcaatgatgttatctggtcaatggcaggaaatgggaactggaacaaatataagaacttatgggatttcctacacggagacaaaaaaagatattcctttatgttgttaaaagtggcagctgctctttctttattccattttaatcaatggagtatttgattcaaggttttcctttctattttttc

SEQ ID NO: 7797 - DNA, 909 bp, Homo sapiens
  misc_feature 8, 10, 24, 30, 40, 46, 51, 56, 62, 67, 69, 77, 79, 101, 119,133, 165, 183, 192, 201, 217, 219, 241, 247, 265, 272, 284,288, 291, 305, 334, 355, 358, 362, 366, 369, 392, 398, 404,414, 423, 434, 444, 472, 502, 518, 539, 547, 550: n = A,T,C or G
  misc_feature 565, 576, 579, 597, 601, 623, 631, 639, 646, 660, 670, 673,678, 684, 685, 694, 696, 701, 707, 725, 743, 754, 786, 809,827, 844, 857, 869, 887, 888: n = A,T,C or G
cccttagntntggtcgcggccgangtacanctgtaggtgnacgagntagtncagtntatttnggctntnggcattangnccttaaccaaccaaccacaagnggggggtttcggaaattncccccaattttttntttttaaaaaaaaaaacccttttttttttttnggggggggcccaaaattnttttttttntggggtttncccccccttttcaaananttgggggggggggccccccccnaatttnaaaaaaaaaaatttaaanccccaanggggaaaaaaancccnccnttttttgggggttnaaattttttttttttttaaaaaaaatttntttaaaaaaaaaaattcattnttntttntttnttntttaaaaccccaacaaaataaanaaaggngggggnaaaggggggnaccctaaancccaaaatttngggcccctanaccccaaaaaaattttgcccgtttcccncccaaatttgggggtttgaaaaaaaccccnaaacaataaaaccccncccttttttttttaaaaaggnccccaacngcntttaaaggggggggnaaatttgggcnttnaaattttttttaaatttnaaancccggggaaaaccccaaagggntttttttnaaaccccnttttttnaaaaaaattttttntttccctttnaanggggnaaaggnnttttttttncnaaagngggggncccccccttttccttttnggggggggggaaaatttncccaaaaaaanccccccccccccccaaagggtaaaaccctttnggggggggggccccccccaaagngaaaaaaaaatttggggntttttttaaaagatttngggaaaaaaaaanggggggtttccnttttttttaaaatttttnngggtgggggcccccccccccg

SEQ ID NO: 7798 - DNA, 257 bp, Homo sapiens
  misc_feature 29, 228: n = A,T,C or G
cccttagcgtggtcgcggccgaggtacanatgtttgcaaagaggcagcagacatgatcctagtggatgatgattttcaaaccataatgtctgcaatcgaagagggtaagggatttataataacattaaaaatttcgttagattccagctgagcacgagtatagcagcattaactttaatctcattggctacattaatgaactttcctaatcctctcaatgccatgcanattttgtggatcaatattattattggatg

SEQ ID NO: 7799 - DNA, 320 bp, Homo sapiens
  misc_feature 3, 16, 248, 288, 315: n = A,T,C or G
ccntttcgagcggccnttcgggcaggtactgcccagggaaagccgctgtcctttccttatcctcatcctgggtcccatgctttatacagttagcctcattctgctggtggacaactgttaacagagttcccggattcggctggtaagtgcttaaagcatcctcaacattgcctcgcttgcaccaaccctaacccaacgggctaggaaacaagtgcctcaatcctagggccaagcacttctctgttctnccctgcgtcgcccttcaagtatggaggcgagggaggcacnttggctttaaaggaacacaagtggggntgggg

SEQ ID NO: 7800 - DNA, 188 bp, Homo sapiens
  misc_feature 119, 121, 132, 139, 155, 158, 163, 174, 180: n = A,T,C or G
cccttagcgtggtcgcggccgaggtacagggatgtaatgctggagaactataggaacctggtctccttgggtgagcttgggtccttccaccccagattgacctttcaggataccttttngnttttaaaggantttcccnttgctttctattaagnggnaattngttaacaaatnttgaangcttttgg

SEQ ID NO: 7801 - DNA, 650 bp, Homo sapiens
  misc_feature 584: n = A,T,C or G
cccttagcgtggtcgcggccgaggtactattccggatatacaagatcactgggagatgttgatgatggagacacagtgacagatttcatggcccaagagcgagaaagaggcattactattcaatcagctgctgttacatttgattggaaaggttatagagtcaatctaattgatacaccaggtcatgtggactttaccttggaggttgagcggtgcctaagagtgttggatggtgcagtggctgtatttgatgcctctgctggtgtagaggcccagactctcacagtatggaggcaagctgataaacacaatatacctcgaatctgttttttaaacaagatggacaaaactggagcaagctttaagtatgcagttgaaagcatcagagagaagttaaaggcaaagcctttgcttttacagttaccaattggtgaagccaaaactttcaaaggagtggtgggatgtaagtaatgaaagaaaaacttctttggaattgcaattcaaatgatggaaaagactttgagagaaagcccctcttggaaatgaatgatcctggaattgctgaaggaaacacctggaagcanggaatgccttaatttgaaccaaagttgccagattttggatgatgaaattttgctgacttgggtttt

SEQ ID NO: 7802 - DNA, 758 bp, Homo sapiens
  misc_feature 534, 539, 566, 602, 617, 628, 656, 674, 704, 712, 725: n = A,T,C or G
cgccagtgtgatgggatatctgcagaattcgcccttagcgtggtcgcggcccgaggtactttacacctgggtctgaagtagggttgccagatgaaatacaggacacccagctaaatttgaatttcaggtgaacaacaaatcattgtttagattaagcatgttccatgcagttctggggacatacttaaccttatagatttatttcatttatctaaaattcaatgaactggggcagtctgtatttgctaaatctgctggccttagcctagaggcagtggtatgttccagctgactccaatcagctcatgagagtcaactgtaaaatatttaggagatttatgagctggttattaaaccactggtggcttgaaatcaaccatggtgggagtatttacaccacagaaattggtgactaccacacatcagtgcttttcctttacagagctggttatagaacattccccctggctgggtgcggtggctcacgcctgtaatcccagcactttggggaggccgaggtgggtggatcaccangtcangagaacgagaccattctggctaacacngtgaaaccccatatctactaaaaatacaaaaattancccggcatggtggcncgtgcctgtantccacttcaccggaagcttaagcagganaatggcgtgaacccggangcgggcttgcatgagtcaaatccgccactngacttcancctgggcgaaaanccaaactccttttaaataaaaaaaaaaaaaaaa

SEQ ID NO: 7803 - DNA, 319 bp, Homo sapiens
  misc_feature 121, 223, 292: n = A,T,C or G
cccttagcgtggtcgcggccgaggtaccatgcgtgaaaaagcagctgttaccctccaagtgcaatatgaaatctggaacaagaccctctcagaggcctgcgtgtctcaatgagtgaccctnaaagaaaccaaaatgtataggaggaagtagctgaccagtcatgggcattctttccacattggggataatctttttaaaacagaaggcagctttttggacctntagccgtaaagagataggacctttacattctttgattttatttacactttttttaaaaaagataaagtntatctgaattctctcatcacaccttaa

SEQ ID NO: 7804 - DNA, 394 bp, Homo sapiens
  misc_feature 246, 276, 356: n = A,T,C or G
cccttagcgtggtcgcggccgaggtacattctgggagaatatcactgacgctcaaaccatttttatttccaatatgtatttcaatacatgtttgtttccacttttcccagtgccacacacacacacacaaaaacaaaacaaaacaaaaaaaaacagtcacaagttggattacattagaattggtgccacagttgactttaaaagcattttaataaccacccaactcttagattttgcagtttaggngacttcaagttcagaaaccaaaaaagcagnagaaatccgttttcatgtggaacattgaatgttctcttattagacccttctttggcttctcttagggtggaccaaattgncaagaagcccagggggcaaaaaagggtggttttaaagc

SEQ ID NO: 7805 - DNA, 281 bp, Homo sapiens
  misc_feature 110, 212, 223, 224, 227, 228, 271: n = A,T,C or G
cccttagcgtggtcgcggccgaggtaccatgctgacttcttggtatcttttaaggcctaattttcccttccttgagattactgtagtgtgttccagctaatttctatttnggaaacgagttggaacagctgaaaactaggtattattgaaggcaaagcagcctcacgtcagttttttatcagctcatttgggaagttttttttttttttttnttttttttaannaannagaaagtaggctgggcacggtggctcatgcctataaatcccancacttgggga

SEQ ID NO: 7806 - DNA, 349 bp, Homo sapiens
  misc_feature 328: n = A,T,C or G
ccctttcgagcggccgcccgggcaggtactcaggtttttaagactaataaccacacaaggtgggtacctaagaaggcagctgttaatacattctccatctttcctgcctggcaacagggaagatattattggtgagatagtgcaaaattgtgagaattggttatgttcgatgatgaataaattcaagatttttgaaggcttcactgctatttgggatgggaaggtgagtttacaaaatgaaaaaggtagatttttatgttacaggaaatcagtaaccgggtttcttgttgtgttaattacctttcacttgatttgccatgatgttttnttcctcattattggatcttag

SEQ ID NO: 7807 - DNA, 914 bp, Homo sapiens
  misc_feature 5, 48, 50, 53, 62, 68, 72, 80, 86, 88, 92, 105, 134, 154,176, 203, 240, 246, 262, 329, 379, 464, 500, 526, 556, 558,561, 587, 647, 693, 738, 765, 779, 879, 891: n = A,T,C or G
tcacnttattaaggggggcccggaaaaatttgggggggccccccttcntnagnaatgggccnattggncctnccggaagnccgggncnccgnccccaaggttggntgggaaatgggggaataattccttggccnaaggaaaaattttccggccnccctttttttccggaagggccnggggccccggccccccggggggcccanggggttaaccaattggttaaaattaattggccaaggnaggggntggttttttggttggnaaggccttggccaaggccaaggttaaggttggttaattcaatttttggccaattccttttttttggnaaacaaaatttgggttcttttttggggggaattcccaattttggtggaantgaaccaatccttggttccttttttatttgggggaagggaaaaaggaattaaatttttctttggaattccaaaacctccccgttnttttttaattttaatttccttccaacccgttccttnggaccggaattaaccaattccttggntgggtttcctttttttgggttccccaaggntnggnaaccttttttttttccttgggggccnaaccccgggttttaaaaacccccaaaggcctttaaaaaaaaatttttttccaaattgggnttaaatttggtttgggtttcccggtttttaaggggttacctttttncaaattggggggggttgggtttttcccccccccctttcccccttngggggggggaaatttcccccccaaggnaaaaatttcccggntgggttttgggggcctttcctttttcctttttttttcctttttggggcccccaaaaaattgggtttaaattcccttttaaaaattaaaaacccaattccnaagggggggggnaaaaaaaaaaaaattttttttcc

SEQ ID NO: 7808 - DNA, 306 bp, Homo sapiens
  misc_feature 62, 112, 126, 137, 158, 181, 187, 211, 224, 251, 265, 269,280: n = A,T,C or G
ccctttcgagcggccgcccgggcaggtacttttttttttttttttttttttttttttttggnttttttttttaagtaactttgttgctttaaatataagtgaaaaatactgntttttactttttgngtgcttccatntgaactaaagtttcccatggngcttaccgagttaggtctggctntggganaggagtggacagcagctggttganatacatccccatntggagacaggactgccactgacagaanatgtgagctgtgtntaantccagtcttgngcccagcccgtgtctgcgccttcact

SEQ ID NO: 7809 - DNA, 775 bp, Homo sapiens
  misc_feature 576, 578, 658, 676, 726, 732: n = A,T,C or G
ccctttcgagcggcccgcccgggcaggtacagattcctcttagtcaagtcctgattaaaactccagctaagacattagtaagccttggttagtgaagtggcatcaggaagtgcctacattttcatggcctggtagcgttcagtgaaaatgttcattaacagacacaggccattcagtcccgaatcccaagacactgaagactctgtttgaatcagactcacgggttccttcctagccactctcagggacaggaatgcttctggtgaagaagttttcggtggtggttcatggagcttccctacaccaacttggaaatggcattcattttattggcttttgttatcttttccttatttaccctggcttccatctacactactccggatgacagtaatgaagaggaagaacatgaaaaaaagggaagggaaaagaaaaggaaaaagtctgaaaagaagaaaaattgctcagaggaagagcacagaattgaagctgttgagctatgatctcatagccacccgatttttcttcgctaagaaagacagaggaagcaatccatgggaactacttattcacagntnaacaagaaggagggggataatgaaagaaaggttaaaatcacttactgattaaaccccgatgaataataaccctttaatgnactcaatactcgggaaangcttcacattttttgggacttcagcattatccaaaatttttattaagagncctacnccattcttgctgcaattggtttttccaaaaaaaaaaaaaaaaa

SEQ ID NO: 7810 - DNA, 354 bp, Homo sapiens
  misc_feature 91, 111, 128, 140, 143, 148, 150, 158, 167, 169, 171, 177,184, 187, 190, 199, 202, 208, 212, 218, 223, 224, 230, 238,244, 249, 250, 253, 257, 260, 263, 265, 270, 288, 312, 315,327: n = A,T,C or G
cccttagcgtggtcgcggccgaggtacttttttttttttttttttttttttcttttttttttttttttttttttttttttttttttttttnaaaaaaaaaggccttacatntttattactgaatccanccaaccaacgtnttnataananattcaaanaggaaaacncntnaaaatntccaaanagnggngacattttnagnttgatntggnaacatnatcgnnaccttnaaacagcntaaatntcccnngtncagnganttntnaaatnccctggtaattttccagntttttgaaaagatcaaagttcctnttnactggaacaaantaaacaaaccgccataccccaaactgg

SEQ ID NO: 7811 - DNA, 953 bp, Homo sapiens
  misc_feature 20, 24, 32, 53, 55, 60, 67, 75, 77, 84, 98, 102, 104, 115,135, 143, 149, 158, 160, 168, 174, 182, 184, 194, 196, 206,218, 235, 239, 241, 278, 299, 301, 303, 308, 353, 375, 379,383, 393, 411, 448, 467, 542, 549, 597, 676, 758, 807: n = A,T,C or G
  misc_feature 824, 854, 861, 864, 880, 888, 925, 944: n = A,T,C or G
cactttattttttggggggnccgnaaaaaatntcgggggggggcccccccctncnttaanttattgnccattggncntaccggnaagccccggggccnccgncnccaaggttggntgggaaatgggggaattaanttcttggnccaagnaaaaatttncngccccccntttttncggaaggncngggtctcggncnccccgggggnccagggggttanccaaagggggccttaanaagncnattttttttaaaaaccttttttaattaacctgggggnaaaaaaaaaaaaaaattcaanananccaanagggggggggaagggggggaattaaaaaagggggaacctttaagntccaattccttttttgggccancctngggnaaaaaaaccnaaaaaaaattaattgggntaaaattttaaaaaattttccccccaattaaaggccnttggccaattggttaaaanccaatttttggaaaaatttttcctttttcccccaagggggttttaaaaaaaaaaaaaaaaaaaaaggttttaaanaattccnccttgggttgggaaattaaaatttttaaaaaattggggggaaaaattngggaacccaaatttttttttttgggaaagggggggttccctttttgggaaagggaaaaaattggggggggggccaaccnaaaaaaaaaaagggtttgggggggggaaaaaaaattggggaaaaatttttttttcccaaagggttttaaatttggggggggnccaaaaaaaaagggaaacccaaccctttgggaaggggggaaatttgggnaaattggggtttttggnaattttttaaaggaaatttaaaaaattttnccaaccnttnccccgggttaaaaatngggaaatnccaattgggcccttgggttgggttgggccttaagggnttaaaaaagggtttatttnaaaaccccc

SEQ ID NO: 7812 - DNA, 372 bp, Homo sapiens
  misc_feature 320: n = A,T,C or G
ccctttcgagcggccgcccgggcaggtactttgtagaacacaaagctgatttggaagtgtcaaaccgacatgggcatacgtgcttgatgatttcatgttacaaaggacataaagagattgctcagtatttacttgaaaagggggcagatgttaatagaaaaagtgtcaaaggtgagttcagcttctttgtttttctaaatgtctaccacttattttcaggaagtttgatacatcattataagcactggtgttgagtaaaccagcattgacagacctgttttgattaggtaatactgcattgcatgattgtgcagaatctnggaagtttggaccatcatgaagatgcttcttatgtattgtgccaagatggga

SEQ ID NO: 7813 - DNA, 701 bp, Homo sapiens
  misc_feature 330, 481, 506, 546, 573, 577, 586, 596, 613, 624, 627, 635,679, 683: n = A,T,C or G
cccttagcgtggtcgcggcccgaggtaccaaatataaaatgctgcaagattttgaatgaatggtgagagtgtaagaaaatgggctgtatttcaatgctcctgtggcagggatgtcaatcaagagcttggagccaaagaaaaagaaatcccttcctagcacaaagcttggctgttcagtgaatagcgtttaaataacccgtaaaataaaaatcctgtttatgatttttattgattaggggcctacttaattaaggttaccaagtggaatgcaaatgttatctgccatattttaaaaatatcagcggaaatacaagtgggaaccgttgaaangagagagagaaaggtaaatggaatggtgatagtgtccttataaagtggacagttgagccaggccagtggctcacacctgtaatcccagcactttggtaggcccgaggcggggggatcaccttgaggtcaaggagttcaagaccagcccggncaacttgggtgaaaacctccgtctnttcccaaaatacaaaaatcaacccgggtgtgaatggcggncgcctgaaatcccagcttcctcgggangctnaggcagganaatagcttgnaccctgggagatggagnttgcggtgggnccnagataccnccatttgcacttccggcctgggcaaccaagaagtggaaactccntttnaaaaaaaaggaaaaaaaa

SEQ ID NO: 7814 - DNA, 353 bp, Homo sapiens
ccctttttagcggccgcccgggcaggtaccagctaacgcatctgggaggcaacaaaacaatactctcctgaggttaatgtggaccaaaaactagatttcatataaaagagtttattccttctacttgaggtgtgacatgaaggaaagtaatggaaataattctgccctcccattctcaagggccagggggaattcaaatattgaacggaagtgattttggaattgcatggaattctcactgccatcccaaagaaatgcctgatcttgtcactcttacctgtttcattccctgggggcaggaacaaaagggaccgcactccaaagatcggcatggaaccaaggaacctggggtt

SEQ ID NO: 7815 - DNA, 371 bp, Homo sapiens
  misc_feature 233, 306: n = A,T,C or G
ccctttcgagcggccgcccgggcaggtacgcgggggggcctgaggcgaacaatggcggagctgggcgaagccgatgaagcggagttgcagcgcctggtggccgccgagcagcagaaggcgcagtttactgcacaggccacgtgccccgtagaaaaagatacttcatcccacttgtggggtttttggttttcgcccgtcaccccacttgccttcacttggattgtgaagggatnatattgcgacaattgtatttgaaaaacgactaagaacatttatccggagggaaggtggactctgaagttaatncgcttgtaagactatggattgtagaaacaagggttttggagcccttcggacattggtttctaacc

SEQ ID NO: 7816 - DNA, 237 bp, Homo sapiens
  misc_feature 49, 69, 72, 119, 124, 140, 143, 146, 156, 158, 166, 169,173, 182, 189, 210, 216: n = A,T,C or G
ccctttcgagcggccgcccgggcaggtacaaagaagcctcaatccccangacacccttccgtgcatggngtnactgacatctttatttcttttgtcacgttctggtaaattcaccaatngaaangggggttattttcttnccnttntaatatattntnaattttgnaanaaangttcatttntatatanggccaatttcttttttaaaanaaaaanaaaggttgtgttaaaaccttt

SEQ ID NO: 7817 - DNA, 292 bp, Homo sapiens
  misc_feature 74, 120, 143, 144, 236, 262: n = A,T,C or G
cccttagcgtggtcgcggccgaggtacttttttttttttttttttttttttttgccttgaaatgtttttaatanaattggtctagtaatcgttcaggatttcggtgatgggccctccctntttgggacactgccaacccacanntggaggggcacttaaggcaccgtcattttgtgattagaattacacaaaatttgattaatattatagctgcaaaattaacatacacaattttnactcataatttaaaatattttggatnaaattctttgctttcacaataggaagatca

SEQ ID NO: 7818 - DNA, 437 bp, Homo sapiens
  misc_feature 395: n = A,T,C or G
cgccagtgtgatgggatatctgcagaattcgcccttagcgtggtcgcggcccgaggtactccagccagggcaagagagcgagaccctgtctcaataaataaataaataaataaataaataaataaataaataaaaaaaaacaaagttgattaagaaaggaagtataggccaggcacagtggctcacacctgtaatccttgcattttggaaggctgaggcaggaggatcactttaggcctggtgtgttcaagaccagcctggtcaacatagtgggacactgtctctaccaaaaaaaggaaggaagggacacatatcaaactgaaacaaaattagaaatgtaattatgttctaagtgcctccaagttcaaaacttattggaatgttgagagtgtggntaccaaatacgttaggaggacaaaaggaatgtgtaagtcttt

SEQ ID NO: 7819 - DNA, 300 bp, Homo sapiens
  misc_feature 163, 188, 189, 213, 220, 241, 262, 264, 278: n = A,T,C or G
cccttagcgtggtcgcggccgaggtactttttttttttttttttttctgaattaattaggtattggtaaaatacatttttaaatttagttagctttataaacacaattagaattacaattaattaaccagaaggtattaatttgtctcactttcagaagtgancattttattttttatttaagcacannttcataaagtaaaaatatattatnaaaaaantaattcaatttttcattatantaaaaaagggattatttttcntnccaccctttttaantaaaattgggcctatcaatttt

SEQ ID NO: 7820 - DNA, 360 bp, Homo sapiens
  misc_feature 263: n = A,T,C or G
ccctttcgagcggccgcccgggcaggtactactactccctaacccaaaccaggtgattctagtgaagactgtcaataaacggagcatgtgatcaagcaggggcccatcagaatccttccctaagatttttataaaaagctggacctattctttttccatttgagtggcaaatatttgaagatatgaggtctaaagctgtgatggcttattctccatccctgtgtaaattctggtctatagtaagccgaaaacaaggccattanggcagagggccagcagtagacataaagggtgaggaaagaggttgtggtctctgggtttttctagaccctgattctggttttgggaaggctttggcct

SEQ ID NO: 7821 - DNA, 299 bp, Homo sapiens
  misc_feature 121, 133, 147, 179, 230, 261, 287: n = A,T,C or G
ccctttcgagcggccgcccgggcacgtcgcggggaaggttttccatgatattgcttaatttcatctgcacaagatgagacacaaacataaaaattccctgctcattttaataccataaaanggcttgaggttnattttctctgtcantaaaaattgtaaataggcatttttttaaagtncaaaattaccattttaaaaacagttgggaattgttttcttacaaaattatnattatggtggttattattattacaataatgnctttctggaaaaataaaagggataantatttataatgg

SEQ ID NO: 7822 - DNA, 335 bp, Homo sapiens
ccctttcgagcggccgcccgggcaggtacaggaagacaggaaaaagaaaacagaaacaaaagaaaccagacagagcagacaggaaacaaaatctaaaatgacagacttaaaccctaacttaaatgtaaatggtttgaatttagcaattaaatgacggagtggtaaaatggattaaaacacatgacccagatatataatatttacaagaaacaaatttaaaacataatgatatagccagtttgaaaataaaagggttaaaaatacacaaacaccattcaaagaaaagtgggaatggctatattaatatcagataagatagacttccaagcaaagaa

SEQ ID NO: 7823 - DNA, 934 bp, Homo sapiens
  misc_feature 17, 85, 99, 100, 106, 114, 124, 140, 148, 155, 176, 180,187, 201, 208, 216, 223, 256, 268, 290, 291, 294, 314, 315,322, 329, 342, 345, 356, 363, 369, 377, 387, 390, 391, 400,403, 406, 409, 412, 417, 418, 420, 425, 428, 430, 434: n = A,T,C or G
  misc_feature 437, 446, 448, 450, 452, 454, 456, 458, 460, 462, 464, 466,468, 470, 472, 485, 489, 491, 493, 498, 509, 513, 518, 522,529, 542, 543, 555, 580, 585, 594, 601, 609, 612, 618, 625,627, 629, 649, 660, 664, 665, 675, 683, 687, 714, 723: n = A,T,C or G
  misc_feature 725, 736, 738, 739, 742, 747, 755, 763, 768, 769, 777, 784,789, 790, 805, 816, 826, 836, 838, 843, 855, 866, 881, 884,887, 894, 896, 897, 900, 908, 918: n = A,T,C or G
cccggtaaaaccttttnccaaacccttttaatttaaaaggggggggggggcccggggaaaaaaaatttttttggggggggggggncccccccccctttnncctttnaagggganaaaattgggncccccaaatttggggncccctttncccgggngaaagggaccccggggggggncccncccgggnccctcccaaagggntttgggnttttgggnaaaattngggggggggaaattttaaattttccctttgggnccccaaaggggnaaaaaaattttttttcccgggnnccnccccccttttttttaaaggnncccgggntttgggngggttacccgggnccngggggggcccncccgggnaaaggnggggtttnaaaccccttnttnnttgttgtanttnttnttnttnttatnntnttttnttntnattnttntcttttgtntntntntntnantncntnanancnanccaattttttaanaatntntntgggnggaaaccaaanaggnggagnccanaccttcncttttttaaaaannctttttgggaanaagattcccccaattaaaaaataanttttncaataatancaaggcntttaaaanccntaaagnccttttngntnaacacattttactatttttnggagaccaagnccanntataaaaggnggataggngtcntaagaaagaaaaaaattggccttaaanaagaaaatngntccccttttancnnttnatgcntgggaacnaaacaaanttttnntttttggnctttggnaaaannaaaaacccaaaaagnttttttctttnctttggtggnaaaaaagggntngtaanaaaaacctttcnaaaaataattnatggggggaaagggnaanggnaaaaccnannaanggtaaggnaattttaccncaacggggggtttaag

SEQ ID NO: 7824 - DNA, 370 bp, Homo sapiens
  misc_feature 117, 128, 235, 355: n = A,T,C or G
cccttagcgtggtcgcggccgaggtactgcataattatagtcaatgcttgcaataattttcagtttgtctcatcacgttagcagagcctattcatgcaatttagaaaggatttcaanacagccccaanccaaaaggcttaccggtcaacagaggggttagccttccataaatgagaaatccaaaaaagaataatgccacgtatttcaggaatgtcggttagaggtttggccttcntgggaaagtgtcacaatgcctgagtctaaaaactgcaaacaggttacccgtggtccaaagtcatgccaactctaaagggagggattgggaccgggtcacaattttgttgtcttttccagntattcaaaagcaccc

SEQ ID NO: 7825 - DNA, 373 bp, Homo sapiens
ccctttcgagcggccgcccgggcaggtaccagagacaaaaacagaagaggggaaacatgtttcctactgacgacaggtgattacacgtgtgcttctgatggagggatcaggaaaggatatgaaaaatcccgaagcttaaacaacatagcgggcttggcaggcaatgctctgaggctctctccagtaacatcaccctacaactctccttgtcctctgaggcgctctcgatctcccatcccatctatcttgtaaaccaaacaaccaaactgcatcagtcggctaaaattgtattaattcaagcgctgtttaccccataatggaaataattaaatgtagagttactccaggctccattaatacagtataaaatctt

SEQ ID NO: 7826 - DNA, 355 bp, Homo sapiens
ccctttcgagcggccgcccgggcaggtacttttttttcttttttttttttttttggcagttctcttctctgctaggcattaaactttaaaacatttgaatcattggaccataatgcttcaccctaacgatatttatataaaaggaagagaaagacattttcttttttttgagacggagtttcactcgttgcccaggctggagtgcaatggcgcaatctcggctcaccgcagcctccacctcctgggttcaagtgattctcctgcctcagccttccaagtagctgggattgcaggcatgccgccgccatgcctagctaaatttttttttgcatttttagtagaagacggggcttct

SEQ ID NO: 7827 - DNA, 383 bp, Homo sapiens
gatatctgcagaattcgccctttcgagcggccgcccgggcaggtactcagccttttaaagcttgaggtgggatgtgtgtgggctgaaattccgagctgcggttgtgcatgagaatacacccttcgtggtactaaataggtgggttaaatgtggtaattctagttcagtgtcttaccctgaagagaaagttgtaggttggctgttgaaattcattccttagatatgatcagtttgattgcccggctttattgcctttacaggaatgtgatactcaagggcttactctatacaccaatgagtcttctttgatcccaagaccaccactgaagttgtttaggttcttttggacaaacatgataaacttcttcagatacttttttttc

SEQ ID NO: 7828 - DNA, 118 bp, Homo sapiens
  misc_feature 95, 108: n = A,T,C or G
cccttagcgtggtcgcggccgaggtacctgccctcaatggagctcacagtctagtgggggttgaaagacaggatatagacaataaaataaatatntaaaaatatttgncatgttacat

SEQ ID NO: 7829 - DNA, 964 bp, Homo sapiens
  misc_feature 19, 26, 66, 79, 89, 151, 165, 175, 180, 184, 190, 196, 214,226, 237, 265, 332, 340, 372, 379, 426, 462, 547, 549, 595,628, 669, 706, 711, 787, 799, 945: n = A,T,C or G
aaaaattgtgggggcgggnccactcnttgcgttgaagccaaatcgttcccaattgggcccttgccngaaagggcccggnggcccgcccnggccccaagggtttgggtttgggaaattgggggggaatttaatttcctttgggcccaaaggnaaaaattttttccnggcccccccnttttnaggncccggntttggngggtttcccggacccggnggggggcccggnaaagggggttnacccgggaaaaaaaaaaaaaaaaatttncaaaggggggccctttaaccctttaaaaaaggacccccccaaccctttgggtttttaaaaatttaanttaaaggnaaaccgggcccaagggaacccccaaaaatttntgggttnttaaagggggggaaaaaccaaagggggtttcccccaaaaaaaaattnttggggggaagggcccaaccccccaaatttttttanaaaccccccaaaaaacccaaaaatttccaaagggtttgggaaatttggccccaagggaaaaaaattgggaaaggggggccctttnantttttgggaaaaacccaaaaagggttttaaaaagggggggggcccntttaaattttttttgggccccctttccaaaagngggggggccccccttgggggggggggggaaaaaaaaaaaanaattttttccaaaaaggggggaaaccctcctccaaanggggngaaaaaacccaaagggcccttttttttcccccccctttaaattttttaaaaaattttttccaaaaaatttttaaangggaaacccaanaaaggggggcccttttcttttttaaaaaaaagggaaagggcccccccaatttaaattttcccccccttggggaaaccctttttttttgggttgggggggcccaaaaaaggggaaaatttttaaacccaaaaaagggaaaattgggnccctttgggcctttccaaa

SEQ ID NO: 7830 - DNA, 947 bp, Homo sapiens
  misc_feature 13, 41, 48, 50, 53, 54, 59, 66, 75, 81, 87, 94, 100, 117,120, 127, 131, 140, 147, 154, 173, 183, 193, 203, 254, 260,267, 271, 274, 277, 288, 302, 306, 312, 323, 326, 327, 339,343, 346, 348, 363, 364, 367, 373, 374, 376, 388, 404: n = A,T,C or G
  misc_feature 407, 414, 435, 451, 465, 470, 473, 481, 483, 531, 540, 556,566, 573, 589, 594, 610, 621, 624, 636, 641, 658, 671, 682,692, 701, 702, 726, 730, 739, 742, 753, 761, 777, 782, 802,810, 815, 823, 826, 831, 844, 856, 861, 865, 876, 884: n = A,T,C or G
  misc_feature 887, 914, 916, 924: n = A,T,C or G
aaagggggggggncccgggaaaaaaatttttgggggggggnccccccncnttnnctttnaaagganaaattgggncccaanttgggnccctttncccggnaaaggacccgggggggnccncccgggncccncccaaaggntttgggntttgggnaaaatttggggggggaaanttaaaatttnccctttgggncccaaagggnaaaaaaatttttttcccgggcccccccccctttttttaaaaaacccaaaancctttnaaatttncccngcnggnaaaaaaatttnaaaaaagggggggngganccgggnaaaaaaatttnttnncccccaaaggancccnaancnaaacctttggggggnnccngggggnncnccgggttttttnaacctttaaagggttnggngggaaanttgccaccaggaaagggcccnttccggggggttttancccccaaaaaaggnccttnttngggggccngnttaaaaaattcccaatttggggggtttccaatttaaaggacctttggnttttttccncctttgggttggttgngaaaaaaaanttttggntttaaattcccccggnctttncaaaccaaaatttttncccaacccaanccnaaaccaatttancccgnaaagtccccccgggggnaaaagggcccaanttaaaaaaaanggttgggttnaaaaaaagnnccccctttgggggggggggttggncccntttaaaaanttngaaagggtttnggaaaggnccttaaaaaccctttncaacncaaatttttaaaaatttttnggcccggnttatngggccggnccntttcnaaccctttgggcntcccccgggacnttatntttncaccaaagggnttttctgnggnggaaaaaaaaacctcctttggattcangntttggtcncccaaggggcctttgggaccaat

SEQ ID NO: 7831 - DNA, 349 bp, Homo sapiens
  misc_feature 3, 326: n = A,T,C or G
ccnttagcgtggtcgcggccgaggtactattaggaaaaatctgtgtgtattgtatagctctagctgtttgactatctgtaatgaaaatgctgcacttcaactggtattccattagagaaccgtgtgtgtgcgtgtgtgtggtgcctttgagcaactttatttatggttaccatattttaaaaagatttttttgtcagggtgacttaacatggactcttatagggtattaaaacaatctagattattccttttcatcctaaataagcctaccaaatttcatgctgttggtttgccatgaatgatattacttcctacattatatttgngttttttcaaatctgctatggaa

SEQ ID NO: 7832 - DNA, 425 bp, Homo sapiens
cccttagcgtgtcgcggccgaggtacattgtttttctcctgctgttaattaggtgtatccccaagacaataaatacatgaatggaaaagtatattctgtgttttaagtctctttaataaaaaacaaaacaaaatccaaaaaaactcctaacatggcaactcaggacattttaatccttttttttgttgttgggcttctgataggatccattttattgattccataaatatttaagtagactttagacatattaatacattgtagtttgagttaatttgcattaaattctgttttttccccctaggtatagattgtctgttggaaaaatatattgcttgtggatttcttggggagtgggaaggtgaattatacctgttgtctctacagtccactaccttccacaccctaaggcaagtggtccccaa

SEQ ID NO: 7833 - DNA, 506 bp, Homo sapiens
  misc_feature 86, 236, 317, 469, 481, 490: n = A,T,C or G
ccctttcgagcggccgcccgggcaggtacccctccaccttcagcttgtagcgagtcttggcatctcccacgctgaacttgtcatanacagcaaaggctgtctccccatggtcccgcaggtccacccggagctcgtactccagccagggcaagagagcgagaccctgtctcaataaataaataaataaataaataaataaataaataaataaataaataaaaacaaagttgattaanaaaggaagtataggctaggcacagtggctcacacctgtaatccttgcattttggaaggctgaggcaggaggatcactttangcctggtgtgttcaagaccagcctggtcaacatagtgagacactgtctctaccaaaaaaaggaaggaagggacacatatcaaactgaaacaaaattagaaatgtaattatgttctaagtgcctccaagttcaaaacttattggaatgttganagtgtggttacnaaaatacgntaggaaggacaaaagg

SEQ ID NO: 7834 - DNA, 366 bp, Homo sapiens
  misc_feature 306, 311: n = A,T,C or G
ccctttcgagcggccgcccgggcaggtacgcggggagatggctgtgtctgtaagcgggaggcgtgcccggttcatccaaggcgcaagatggcgctgctttttgcacgttctttgcgcttgtgccgcttggggagccaaacgattgggagttgcctccacagaggcccagagaggcgtcagtttcaaactggaagaaaaaaccgcccacagcagcctggcactcttcagagatgatacgggtgtcaaatatggcttggtgggattggagcccaccaaggtggccttgaatgtggagcgcttccgggnagtgnggcagtggtgctggcagacacagcggtcaccagtggcaagacactactggggaag

SEQ ID NO: 7835 - DNA, 371 bp, Homo sapiens
cccttagcgtggtcgcggccgaggtacttttttttttttttttttgtggtgggattatgtgcctcccatccactagaaaatgagaaaattgtctgggttccaaaatattgacattgaatggatcaatacacacacacagacatatatatatatgcacacatatataggcagttgcatgctagcatgggtatttttataacaatataactgagttatattggaattataaatattttccgtcacttaaatttgttctttgtttagcctgaaaacctttatggctcaagatcagattcctgactaacccctctcttagagctacagcgagctgcattaccagcttaaaacacttcttaggggattaaatatag

SEQ ID NO: 7836 - DNA, 621 bp, Homo sapiens
  misc_feature 473, 560, 589, 608, 613: n = A,T,C or G
ccctttcgagcggccgcccgggcaggtacaccatgacgatgctgatttgtgaacaggataccaccaggatgatgaaaacaaggaacaggaagccaaagaggtaatagaactgattctcccagatagcactgaagatgaagaagagctcgatgaacatggcgccgaagggcaagatcccagccatgaggatgcccacaaatcggttcatgtactcgaaaccttcaccgtgaagtcctgtcctgatgccatcaaagaggtcttcgacaataaattccacatcatcggcgcagtgggcatcggcattgccgtggtcatgatatttggcatgatcttcagtatgatcttgtgctgtgctatccgcaggaaccgcgagatggtctagagtcagcttacatccctgagcaggaaagtttacccatgaagattggtgggattttttgtttgtttgttttggtttgtttggtggttggtgnttggtttttgccactaattttagtattcattctgcattgctaggataaaagctgaaagttacctttatgtttggcttttaatgcttnattcaatatttgacattttgtaggttganccggggggtttggtttggnttggnttatattt

SEQ ID NO: 7837 - DNA, 244 bp, Homo sapiens
cccttagcgtggtcgcggccgaggtacttttttcacttttttccctttgtatatcagttacgggttacaactggttcattctgaaaacaacaacaacaaaagtccattcatatttttttaacaattgtataagtgcccaagtaattcactacagcctaaagccttgcctttgtaattttgacttctgacatggtttggcaattaaaagcattgcaccttgtaacaaatgaaaaaaagaaaaaaa

SEQ ID NO: 7838 - DNA, 341 bp, Homo sapiens
cccttagcgtggtcgcggccgaggtaccccaaattatattcaagtccctgtgactccaatgcttggagaagtcattgatatgatttgattaatgttataactttgaatttcctaactttctcagcggcatagattctaagccacttccatgtgctttcagatggcatcttaatagattggtgtttgaggttattttaatgtccataaacaagaaaggtctgggaacaatctgtatggatttttctttcacatttttcttatctttgccactgggaggtttaacctgttcgtccagatattggcatattgaaattgtggaaaatggcaaaagaaagcaaaac

SEQ ID NO: 7839 - DNA, 295 bp, Homo sapiens
  misc_feature 33, 161, 168, 185, 202, 212, 216, 243, 267, 275: n = A,T,C or G
cccttagcgtggtcgcggccgaggtactggaanattatgagataaagtgcacatgctagtctttcctggattgaatttaccaaaagccaaacatgctgtgaaacgtctgcaatcagaacagtgctgatagccgggcgggtggctcacgcctgtaatcccancacttcnagaggccaaggcgggtngatcacttgaaggtcanggaaatttcnagantagcctagccaaccatgacaaaaatcnccattcttctttcttaaaaaattncaaaaaanttaagccttgaaccgttggg

SEQ ID NO: 7840 - DNA, 425 bp, Homo sapiens
  misc_feature 413: n = A,T,C or G
cccttagcgtggtcgcggcccgaggtacacaagtaactctgattatttgcaaatactaattaaaatatatcacaccaaagaactgcaagtttttatattgtggtctgtggtcctgtcataatctgttttcccagtgcaaaattaataatgctatgtgttcatccaactcagccactgcttttcacagggcatagagctctttgagagctcagctgagaagtgtaatgcatggttgtagctcaacaagtgaaggatagaccaaacgctttttgtcagaagtcattcagtccttggtcctatctgctaagttaatgtccttttctgtgggttaagttacaaaaagtgaaatcaaattctcaaatctcatagactccgtaaggtaaagatacaaactatgtacctgcccgggcggncgctcgaaaggg

SEQ ID NO: 7841 - DNA, 964 bp, Homo sapiens
  misc_feature 34, 39, 75, 93, 102, 114, 141, 146, 197, 205, 208, 238, 249,257, 265, 280, 297, 351, 364, 371, 474, 513, 555, 566, 576,594, 600, 681, 706, 752, 755, 769, 790, 811, 838, 839, 866,919, 938, 961, 964: n = A,T,C or G
aaaatgtgggggggccaccctttcctttaagggnaaatnggcccaattgggcccttcccggaaaggcccgggggnccccggcccccaaggttnggtttgggnaaattggggggnaaattaatttccttgggcccaaagggnaaaanttttcccgggcccccccctttttaaaggcccgggttggggggtttcccggnccgggggnccnccgggaaagggggtttaaaccaaaaaaccnccccctttgtnaaaagggnaaaaaggnaaaggggggaaaggnggccctttgggggtttncaaacctttttgggttaaattaaagggaaaccttttttaattgggcccaaaaanaaggccctttttncttgggncctttttttgggaaagggaaaaaaaaattaatttggttgggggggaaaaatttttttggggggccaaaaacctttcccccaaaaggttaaaggaaaggttccnaacccccaaccaattggaaaaattggttttttaattccntttaaaaaaaaaaaaaccttgggttttttaacccaaaaaggnccaaccaaccnttgggggttnggggggtttaaaaaaccnttgggntggggggccctttttttccccccaaaaatttttcccgggttaaaaaattttttaatttaaaaaaaaaccaaaaaaaaaggnaaaccctttcccaaaaatttaaaanaaacccaaattttttttaattttttgggaaaaatttgggggggggnaantgggggggcctttncaaaaaaaaaacccttggggnttcctttgggcctttgggccnttggggttgggcccaacccccctttcnnccccaaacccaaaaaggggggccaaanccaaaaggtttaaagcttaaaaggggggttaaagggccctttaattggggttnccccccttgggtttttttncttttcctttaacccaatttttnggn

SEQ ID NO: 7842 - DNA, 328 bp, Homo sapiens
  misc_feature 271: n = A,T,C or G
ccctttcgagcggccgcccgggcaggtacgcggggatctcgcgagactgtcggacgtatggcgagaggtgtgggaggaagattgtgttgtcgcgagaactctgcctttgggccgtaggttagtgtggggccgtgtctcagtccacccaaggtctcctcggatcgcctggagaggcactcggacctggagcagtgaggagaatgaataccttccaagaccagagtggcagctccagtaatagagaaccccttttgaggtgtagtgatgcacngagggacttggagcttgctattggtggagttctccgggctgaacagcaaattaaaga

SEQ ID NO: 7843 - DNA, 994 bp, Homo sapiens
  misc_feature 56, 64, 87, 95, 105, 110, 114, 120, 131, 157, 169, 179, 196,197, 233, 235, 242, 254, 265, 274, 294, 300, 345, 355, 369,397, 446, 510, 554, 579, 599, 610, 647, 652, 667, 681, 691,699, 716, 797, 836, 891, 894, 946, 949, 952: n = A,T,C or G
aaattaaccggaaccttccaaactttaatttaaaggggggggcccgggaaaaaatnttgggggnggccccccccttcctttaaaggnaaattggnccaaattggnccttnccgnaaaggncccgggggccnccggccccccaaggtttgggtttggnaaattggggggnaatttaattncctttgggcccaagggnnaaaaaatttttcccggcccccccctttttttttccngnaaagggncccggggggccnccgggcccccnccggggggnggcccaaaggggggtttaanccaaanaagggttttttggtttgggcccaaaaaaaagggtttgggaaaggnaaaaaaaggnaaattccctttttnttgggtttgggggggggcccaacccaanaaaaaaaagggggaaaaaattcccccccttccaaattcccttggggggnttgggaaaccttttccaatttgggaaaattggcccccccccgggccaaaaacccccaaatttcnccgggcctttaaaccccccccccgggaaattccccccccccttncaaatttccaaaaaaaggggggttngggaaaaaattgggaaattnaaccccccaantttttcccaagggaaattttttgggaaattttttttnaaggnaaagggaaacccttngggggcccaaaaangggaaaattnttaaaccnttggggaattttttttnccaattttccaaaaaaagggttttttcccgggaaaccaaaccctttggggggttaaaaaccccccctttggtttgggtttnaaatttgggggggttgggaaacccttgggggggaaaggngggttgggccctttaaaaaaccccccttaaaggggggaaaaaaggggaaaaattnttnggggggtttggggttgggaaaatttccaaacccccaaaaaaccccaaagggnaanggnaaagggaaagggggggcccaaccccccccctttgggggggaa

SEQ ID NO: 7844 - DNA, 241 bp, Homo sapiens
ccctttcgagcggccgcccgggcaggtactggcacaagttgatgggtccattttcttcatacagcatacatggcataattctttatcatctttgccatcagaactggcacacgtacttttttttttttttttttttttcacaattgcaggagattttattggccccatgacatccagtgacagttgtgggagcaggctactctccagggacatgtttttggaggcatatggagaagggggc

SEQ ID NO: 7845 - DNA, 539 bp, Homo sapiens
  misc_feature 82, 100, 122, 132, 139, 148, 176, 187, 189, 214, 219, 235,268, 270, 274, 290, 296, 303, 307, 314, 336, 341, 344, 353,357, 362, 369, 379, 384, 404, 409, 421, 422, 423, 424, 435,437, 442, 448, 454, 464, 470, 489, 496, 532, 539: n = A,T,C or G
cccttagcgtggtcgcggccgaggtaccctcattgtagccaggggaaaattgatgttcagtggggatcagtgaattaaatgngggttcattacacagtantaaaaaaatttaataaaataanagacctttcnaatggcncacaaaatnctctattattgtattgtttgggaaatgnaaacctgggtntnaggcaagaaaggaaccccataaccnagggnggttaagttggggggntttttaggtaagtaatttttttccacaagtgangnttcntttttaaccaattttnttttcnctaaggnaagnggtaagnggtatatttttttaaaaatatnttacnttnttccttacnaacntttcnaatttcnccaaagtgtnggatntttggttaaattttttttangtggnaaaaatattttnnnnctttggggccnanaaacnaatgtnaaaaanctttcaattngggggntttttttaaaaatttctcnccaaccnttaagtcccttaatttttgggcctttttaatttttngggtccn

SEQ ID NO: 7846 - DNA, 290 bp, Homo sapiens
  misc_feature 233, 248, 276: n = A,T,C or G
cccttagcgttggtcgcggcccgaggtactatgatcagtgtgaatcccagtggcgtaatccaagattttatatttttttgtgatgccgttgcatcatggattaacccaaaagatgatctcagagacattgttcttgtaagatccttcatggatttaaaaatcaagtttggcgattgaaaattggaggcgtttctctgaccagtttcctcttcccttaaaaagagccgtcttgnagcttttttattggngtttaatctaataacacttaaagctgcnagtcccaaaaatta

SEQ ID NO: 7847 - DNA, 150 bp, Homo sapiens
  misc_feature 50, 129, 135: n = A,T,C or G
ccctttcgagcggccgcccgggcaggtacgcggggagattacctcatttnagctcaataaaacatcaccaaattcccttaggcagaaaaagggtggggagtgccctttcttgaaggaatccccttaagnggcacngtcctccccgttttt

SEQ ID NO: 7848 - DNA, 360 bp, Homo sapiens
cccttagcgtggtcgcggccgaggtaccgtctttgttgacacagtagggctgggcagtgtttaatccttccattttatagatttttttttaatcaggccttttggacttcattcataattttgcaataatctcttttcccttgtcatgcaagccaaaaatataccagtaaaacaagattctgacgtgtttgtagttatcaaatgaatggctccgaaacacttctcaaaaggatatacgtattgaccccaacaataaatgtttgtggctagtgacttgttttttgctatgttgattcagtggaatgacctagaagtcaggtcttgatggaaaaaaagatattggtttatggcaaccctttg

SEQ ID NO: 7849 - DNA, 342 bp, Homo sapiens
  misc_feature 292: n = A,T,C or G
cccttagcgtggtcgcggccgaggtacaggtataatgttaatcaacttggtgatgcccatgactggaaccagaacagagcaaaacaagctatcgatcagggaagatctccagttataatagataacactaatatacaagcttgggaaatgaagccatatgtggaagtggccataggaaaaggatacagagtagagtttcatgaacctgaaacttggtggaaatttgatcctgaagaattagaaaagaggaataaacatgggtgtgtctcggaaaggaaggattgctccaagnatgtttgggatcggttattgaaatatcaaaatggtccattttctatttgg

SEQ ID NO: 7850 - DNA, 347 bp, Homo sapiens
  misc_feature 272, 322: n = A,T,C or G
ccctttcgagcggccgcccgggcaggtacgcgggaccttgagatctgagcaactgtgttaatgaagtaatagcaatggtccacagtgaaagatgtgttggggtttgcaaaacaagcattccgtcaccctctttaataatgtcacagactttttaaaagagaggctatcaagttgtaatataatctgtcatgttttatttaggaaggaaggtaaatttgtgcttgcaccggggatcattttgtattatttttgctaatacccagtttgaaagnctaaaaaaggcaactattttggaatcctgtgaaattaaattttataaagnaatggttaaaaccaggcttttggga

SEQ ID NO: 7851 - DNA, 358 bp, Homo sapiens
  misc_feature 333: n = A,T,C or G
cccttagcgtggtcgcggccgaggtactagctctctgcttcattaaaagctcttggaaagaatattaaatctcaagacaacagaataattgaacacacaatacatttgtgtctttgtatccaatatatttacctttgtcttattaacaaaaattatatctctcattatatatttcttggatctgaagtttttattcacactcagtaatttctgtaaaggacaaatctgtctctattttccatatcatttagaaatataccacattcactcttttttggatgtggaacctttcccagggaaaaattcttcttgtgccccattttagtttttagnaaggagtggtcatttttgtggctat

SEQ ID NO: 7852 - DNA, 996 bp, Homo sapiens
  misc_feature 43, 55, 62, 74, 85, 90, 166, 173, 182, 188, 197, 205, 227,239, 261, 280, 282, 293, 296, 301, 302, 304, 309, 312, 314,321, 323, 324, 335, 342, 343, 360, 385, 389, 392, 402, 410,415, 423, 434, 446, 448, 449, 486, 537, 550, 552, 566: n = A,T,C or G
  misc_feature 584, 588, 590, 596, 600, 603, 612, 617, 636, 641, 643, 651,658, 676, 678, 695, 703, 709, 717, 719, 729, 760, 770, 774,807, 815, 844, 846, 852, 854, 881, 887, 888, 893, 895, 898,908, 922, 935, 937, 941, 951, 957, 987: n = A,T,C or G
ggcccggaaaaaatttggggggggccctccctttcctttaagnaaatgggcccanttggccnttcccggaaagncccgggggccnccggncccccaagggtttgggtttgggaatttggggggaaaattaatttcctttgggcccaagggaaaaaatttttccggnccccccnttttaaagncccggntttgggggntttccggncccgggggccccccggaaaagngggtttaacccngacccgggggggggggcccttntttccttttttttttcccngnaaggggggttnccnggggnncnccggnccngntttgggngnncctttgggggnaaaaagnnaaaccaatttggggggnccccccaccctttcccccaaaaganttcnggngggtttgggnttttgggnaaagnccaaaccnggggggcccgnaaagggccaaangnnttcctttcaaaggggggcccccctttttttaatgttngggaaattggaaatttggaaatttttaaaaaaaagggggttgggggcccgnggccctttggttngnggacccctttttgnaaaaaaaaaaccaagggnttcnantttgtnttgnaanaaaaaaacntttcnaatttctaacccccttttnaaaangngggttggnttttaanaaggtttgggttaaaaangngggaatttcctttttcnaaaccggnaattgnaaaaaaantnttttccttgnttaaaaaaatggggggtgggccaagtttccnaagggccccnttcnaaagattattttccccaaaaaaagggcccccgngggaaaanaaaaagggggaaattcccccttccttaangntttaangnccccaacccggggtttgggttgggggncaaaanncattngnacntttcctttgnaaaaaccccaatgngggaaaccccttngngtancccccccggngggaancccccccaaaaaaaggattggccccaaatnggttccatt

SEQ ID NO: 7853 - DNA, 369 bp, Homo sapiens
  misc_feature 300: n = A,T,C or G
ccctttcgagcggccgcccgggcaggtactttttttctttctttttttttttattatggttagctgtctcttaaaaagcaagaaaagaaagagaagactgagaattaagaaagatctcttttgaaaataaaataagactgctaaaagtatttggtatacagtctggaaaataaagttgagggaatctctccagataaagagcaaaaagaaatagatagaaaaatataaagaaagaaaaaagacatagacaatcaatatgtaatgttaggagttcctggaagagagaacagagacagtgtnggtgaagaaataaaaagaaaaagaattgaagaacagagcaagctaagtctccagattgagagggcccaa

SEQ ID NO: 7854 - DNA, 981 bp, Homo sapiens
  misc_feature 4, 13, 26, 33, 35, 37, 41, 47, 52, 59, 61, 63, 67, 70, 76,78, 82, 84, 89, 93, 95, 97, 102, 111, 113, 115, 117, 123,129, 131, 135, 137, 149, 153, 159, 161, 165, 167, 169, 171,173, 177, 181, 183, 189, 204, 208, 226, 254, 267, 269: n = A,T,C or G
  misc_feature 283, 285, 287, 327, 353, 366, 383, 386, 398, 400, 408, 421,443, 466, 491, 498, 505, 543, 546, 589, 616, 649, 655, 715,739, 745, 815, 863, 886, 912, 918, 920, 975: n = A,T,C or G
actncactttatnagtggggccgganattgggngncncctncttagnatggncaatggncntnccgnagnccgggncnccgncncaagntggntngnatggngggattatncntngnccaggnaaaatntnccgncnccccttttaagnccgntggggntnccgncngngncnccgnaagngnttaccncaaaaagtaaaaaanggtncgggggggaattccggtncgggggttaaaaaattaaccgggggggnaaccccccggccntnatggggggggggcncntnctcccttcccggggaaaaaaaaaattggggttggaaaaantaaaaaaaaaattttggaaaaaattncaaggcccaaggnccaaccggccccaaaanggntgggttaccccnanaaaaaggnaagggggggccanttaaaacttaaatttcaagggnttcctttcaaaccaaaggttaanggggggggttattccaaacaccaantttcgcnttccccnaaaagggtttgggaaaaaaaaaaaaacccaattttttnggntttttcccccgggaaaaaatttgggggggggcccttttttttncccccaaccaaaggggggccctttaanccaaaccaaacccaacccaaaaaaaaaaaaccnaaaggnggggaaaaaaaaacccaaatttgggccccccaaaaagggtttttttgggtttttttttcnaaaaacccgggccaaatttttggnaaattnggaaacccttttttcctttccccaaaaagggggggaatttccctttttcccctttttttggggggccaanttcccgggaacccccaaacccaattttttcaaaggggggggggggccnaaaaaaaagggaaaaaatttttntttcctttccaaattaagggcccaanccaaangnctttccaaacccaaaaatttaacccaaggggggggggcctttccccttttttttnctttcc

SEQ ID NO: 7855 - DNA, 103 bp, Homo sapiens
  misc_feature 1: n = A,T,C or G
naatttccggcccccttttagcgtggtcgcggccgaggtactttttaccctcagcatttatgatgtaaatctctttcctctaatgggattaataatcctgggt

SEQ ID NO: 7856 - DNA, 358 bp, Homo sapiens
ccctttcgagcggccgcccgggcaggtacctcctgttccctgtctgagcatcctgcatggaagtcaaaggaaatccctttcttggtgacgacttaaatctgggttccctcagacattggggttgcaccccaacaaatattaaatggcttcttcttaaagcccagagaaagaggttttttaaaagactgtcgccaaatagctgagccaaaaggctgatcagaattcactttttggaatgtggcagttaaacactaccttgatcattctctcctctttcctcgaggaactcctggaggggtttgagcgtctggaaactctctgctctgacccgagggaagcaccctcctgacgccgcctt

SEQ ID NO: 7857 - DNA, 144 bp, Homo sapiens
  misc_feature 68, 76, 93, 104: n = A,T,C or G
cccttagcgtggtcgcggccgaggtacagagaattcctagatagccctcacccagccttcagtttctntaacagtnatcatcttacattaccntagctatattntgtcaagatcaagaaaacaacactactgttaaaaaatact

SEQ ID NO: 7858 - DNA, 385 bp, Homo sapiens
gtgatgggatatctggcagaaattcgccctttcgagcggcccgcccgggcaggtactttgaatatggagtagtttacagctatttttttttcttactggtaatcttaactaatatgattcccttattagagagcctctcactcccccaccccgaaaaatgtctactattcatgacagtaaccaattattctggacaaattgcttctttttaatttgagctatctgccatggactttctaaaatggaaacacagcctgagtgtatcttagggagagtttgattgaaaaaatccaaatcactgtccatattagatcatgggatataaaggagataccctggatttttatttaaaaaaggatacctttttttcaaaatttaaaaaggt

SEQ ID NO: 7859 - DNA, 106 bp, Homo sapiens
  misc_feature 25, 92: n = A,T,C or G
tcgccctttcgagcggccgcccggncaggtacgcgggggcagccgagggggaccaggaagatctgcatggtgggaaggacctgatgatacanagctcttctagaga

SEQ ID NO: 7860 - DNA, 604 bp, Homo sapiens
  misc_feature 17, 526, 527: n = A,T,C or G
ccctttcgagcggcccntccgggcaggtactcaccaaaaagccaaatttcccctttggagttggtgacttagtgtagtctgtggctgacctagaaagacacagagttatcaagagtttcccttcctagaagatgaatgttaccttttgtgttaggaggtagagaaaataaaaatagcttttttttccctagaattgctaattactcttaacagcaaattaaattcaaagcctgtccttgagaactggaaatgtaaaatcatggttcaagttttataccttagtgattcctcagtaggtgttactaggagttcactgaatgaacttaggagtgaaccttcgatgtgcttgattttcttttgtgccttagtttctctgaatagcagaggcatcaaattttggtggggaatgagaggagtattaggggaaagtttgaaaatagctctcctggagatggagggcacacagagtggtcctcaagctcaccttgactgagttgattcacagttatcctgcatcagaccattnnaatttctttagtgctatgattataatagggatttttgaatcaccaaaaacaggttttaagaatgttattgttccttt

SEQ ID NO: 7861 - DNA, 352 bp, Homo sapiens
cccttagcgtggtcgcggccgaggtactacagcctcaaactcctggcacaagggctcctcctaccttaccctgcctagtagctgggactacaggcacaccgccacacgtggctaagttggttgactattaattaaattaagcatttgtttaatttaatatcactaatttaattatttcctagaagccaactgaaacatcataacatttattttcttggtagaccttatgagtttattctcaaaggcaattaaaaaattctccttcagggaaagcccatggcacattttttattaatcatatttatactacttaacaaatggcttgggcctggatgatttaaaaaaatacctt

SEQ ID NO: 7862 - DNA, 408 bp, Homo sapiens
  misc_feature 267, 304, 307, 353, 367, 377: n = A,T,C or G
cccttagcgtggtcgcggccgaggtactaatcaaataataatcaatcaatcagcatatacatttcagccaaagccatagaagaaaaagcaatagttgcttgaattatgatcatctaccaccaactctgctcagccctgtacagggtagggagagggtataacaggaagagctttgacttgtccctgtctatacattctctgtatcttttgggggtaacttcttggccagtttttcagtgtttcagccattgtcaagtctgaaacttnggatttttctgtaggatttttttacttacccaatgtnagncctaacacttatccctgtaaattcattttttcttcaagggcttatngtggttaaattgtnaggaaccccntaaattttttttcttattaaaaaaaaaaacc

SEQ ID NO: 7863 - DNA, 596 bp, Homo sapiens
  misc_feature 356, 431, 442, 468, 492, 520, 560, 568, 581: n = A,T,C or G
cccttagcgtggtcgcggccgaggtacacatgagagaaaaatctttccaatgtaatgagactggcaaagcctttaattgtagctcatttgtaaggaaacatcagataatccatttaggagaaaaacaatataaatttgatatatgtggcaaagtctttaatgagaagcgatgccttgcacgccatcgtagatgtcacactagtgagaaaccttacaagtgtaatgaatgtggaaagtccttcagttacaagtcatccctgacatgccatcgtaagatgccacactggtgagaaaccttacaagtgtaatgaatgcggaaagtccttcagttacaaggtcatcccttacatgccatnataggtgtcacactggtgagaaaccttacaagtgtaatgaatgtggaaagtccttcagttacaagtcatcccttngatgccatcgnagacttcatactggaataaaaccttncaagtgtaaatgagtggtggcaangatgtttgggtcaaaattcaacccttgnaatttaataaaggcaattcatactggggagaggaaaaccnttacaagnggtaatgaatggnggcaaagggttttta

SEQ ID NO: 7864 - DNA, 302 bp, Homo sapiens
cccttagcgtggtcgcggccgaggtactgttaactagaatagttactactaagcatgatttcattcactgcagcaggcatacttgcctgttcctaaattcattctgggttgcgggcatgaggacaatcacagtggtttgctctgtgatgcctatttctttccaatgtttttagttttgttgcttaaaaattctggctcacacaaataagttgctgtgaatgctattaataacaacagtgaactctgtttagcaatggaaagtcttctttaatcttaatctaaaatggctataaacttataat

SEQ ID NO: 7865 - DNA, 352 bp, Homo sapiens
  misc_feature 28, 87, 153, 270: n = A,T,C or G
cccttagcgtggtcgcggccgaggtacncggggttccggcgccgtaactgctgccatcttctccgtgctatggctgcgttcggccgncaggtccttgattgcaccgcctgatccccctcacctgggcctgtatggctaggcagactcctcatnttggagaacagagaaggacgacagcttctttgttgcgcaaactgactacagcctccaatggaggggtcattgaggagttatcttgtgttagatccaataactatgtgcaggaaccanagtgcaggaggaatcttgttcagtgcctccttgagaagcaggggactcctgtggtacctgcccgggcggccgctcgaaaggg

SEQ ID NO: 7866 - DNA, 771 bp, Homo sapiens
  misc_feature 44, 97, 107, 156, 163, 167, 172, 204, 234, 254, 259, 277,289, 298, 310, 339, 387, 394, 420, 423, 428, 429, 450, 459,486, 501, 508, 509, 510, 511, 526, 533, 536, 541, 569, 590,591, 596, 612, 629, 630, 637, 666, 671, 692, 703, 711: n = A,T,C or G
  misc_feature 715, 718, 729, 759: n = A,T,C or G
gctcagcggcgcagtgtgatggatatctgagaattcgcccttantttggtcgcggccgaggtacgcctgggaaaagtcattttcaaatcttattacncaattttcgnagaaaaggaagggagtatttttcccaaaggaatttccttggaaggaaanggttttncccntgggncccttttaaaagggggggggggggaaattggnaaaaattttttttggggggccttttttccnggtttttttttttttttccnaaggnttggggcccaaaaagggncccaacaaaaanaaatttccnaattttccgggnttggggttttttcttggggttggggaaancccccctttttttccaaaaccccccaaaccccccctttaaaacccggntttgggncccttttcccccctttccggggggtnccnaaggnnttgggggttggggaaaatttnccaaacccnaaggggccccccaagggaccccccggncccggatttgggttntttcccnnnnttggggggcccaagngtttggnaancccgnccctttgggttaaattgggggggggggncccccggtttggcccgggggnntttgngaaaccggggggtttnaaccccccttccttttnnttttttnccccccctttcaaggcccccatttttggnaaagnaagggggggttgggtttcaangaaagggggcnaaaaattnctgnttncaaagcccaanttccccggaaaaggaaaaattccccaaggnaacccctttttt

SEQ ID NO: 7867 - DNA, 463 bp, Homo sapiens
ccctttcgagcggcccgcccgggcaggtactgcataattatagtcaatgcttgcaataattttcagtttgtctcatcacgttagcagagcctattcatgcaatttagaaaggatttcaatacagcccaaaccaaaaggcttacggtcaacagagggttagccttccataaatgagaaatccaaaaaagaataatgccacgtatttcaggaatgtcggttagaggtttggccttcttgggaagtgtcacaatgctgagtctaaaactgcaacagttaccgtgtccaagtcatgcaactctaaaggaggatggacggtcacatttgtgtctttcagtatcaaagcacctttaagggcttccattttgagaaagtagtattttctcttccttctcttttagaacatatgataaaatattgcccttctatcctttaaccatgtatccatttttttttttttgatggg

SEQ ID NO: 7868 - DNA, 560 bp, Homo sapiens
  misc_feature 15, 82, 114, 123, 127, 156, 168, 182, 188, 192, 201, 210,221, 231, 251, 264, 276, 284, 301, 305, 307, 317, 319, 324,351, 365, 378, 379, 392, 403, 404, 445, 446, 451, 469, 470,474, 478, 480, 482, 490, 527, 547, 550, 557: n = A,T,C or G
gcaggtacagccagnatgtagccccctaaatcctccaggagtcatatcaccatgggctacgatggacaccatagtttccagnacagggaaagggatttttttaatttccttccnaaattgtangttntccttgaataaaaaaacttccattgaaangctttgggaatncttttattatttanccttgncacncaataaatngttccttcncaattccaggnaacaccatgnaacgaccttttaagcccttncaattttttggcntttcctcaattntgggtatngtcatttctaaactaantcgngnccaaaaaaangnggccnccttctcctcttaccaagtggaaaagncttggggtaaaagnaaaaaatttttgnntgggaaggggggnaaaaaaaccannaattttggggttttccaaaacctctccatacaattccaagnnaagtntttctccttccgggaaanntttncaangntngtccttgnggccttttagctaaaaaaaaaaccttaaccttgggangaggggcaaaagtaaaatanccntggaaanaac

SEQ ID NO: 7869 - DNA, 205 bp, Homo sapiens
  misc_feature 99, 156, 161: n = A,T,C or G
ccctttcgagcggccgcccgggcaggtactgagtccgtgttgatagggttaagttcttaaacttggcgcaagatgaatttaactgtgatttctctaagntttagtgcctactgtttcaccagacacctacaatctatactggttttagaatctgcnagtgnccagggtttgagcaagatactttagtgaatagaagcattaagga

SEQ ID NO: 7870 - DNA, 184 bp, Homo sapiens
ccctttcgagcggccgcccgggcaggtacaaggctaagcattttaaactttatactgggaaaaaaaaatcaaacaaaggggggaggggataaaggacttagtcatctttgcactgggaaaacaaaatattgtaattaaattcccatagctgcatgtaacattgaattcttccaggttaaaaaaa

SEQ ID NO: 7871 - DNA, 227 bp, Homo sapiens
ccctttcgagcggccgcccgggcaggtacttagaaccatgcctagcacatcagaatccctcaaagaacatcagtataatcctataccatagcaagtggtgactggttaaggcgcgacaaaggtcaagctggcagattacttgtgtgcaaacttgatacttttgttctaagtaggaactagtatacaagttcctaggattggtacctcggccgcgaccacgctaaggg

SEQ ID NO: 7872 - DNA, 499 bp, Homo sapiens
cgccagtgtgatgggatatctgcagaattcgcccttagcgtggtcgcggcccgaggtacgcgggggtgagcaaatcttggtggtggtggtggtggggcggcctgagaagatattatggctgctgccacggagcataatcgcccgagcagcggtgacaggaacctggagcgaagatgcagccccaacctctcccgagaggtgctctacgaaatctttcgctccctacacaccctggttggacagcttgacctcagagatgatgtggtgaaaattacaatcgattggaacaagctccagagcctctcggcattccagcctgcattgctctttagtgcacttgaacaacacattttatatttacagccttttttagcaaaacttcagtctccgattaaagaggagaatacaactgcttgttgaagagataggaagagcagaaaatggggaacaaaaatgaagtaaatgacaaattttccattggcgacctacaagaggaaga

SEQ ID NO: 7873 - DNA, 402 bp, Homo sapiens
ccctttcgagcggccgcccgggcaggtacaaagacaccagtcttgcctccaaagcttggcgtaagaaagttcttttctctgacttggcccattcgatgcactctaaacacagctcgacctcccgccctgtagctgcttccatatcaagaaacagatcaagaagagatcggaccaggcgagctgctttagccttgctgatggaattcaagaagggtcgtactttaagagatcttctacagttcttcaagcctagacaacctaagaaactttactatcagcagcttaagatgaaaatcacagactttgagaacaggcgaagttttaaatgtatatggttaaacagccaatttagggaaggggaaataacactatatccagacaagcatgggtgtgtccgggacc

SEQ ID NO: 7874 - DNA, 317 bp, Homo sapiens
cccttagcgtggtcgcggccgaggtaccaaagccaaactctggctggccaagaggcaaaatccatgtttggtgaccagagctgtatatattgatattctcttcctattgacttgctgcctcaacagatctgcaaaggacaaccagccagttctggagagtcttggcttctgggaggaagtcagagggattatctcaggatcagagctgataacgggattcccttgggccttcaaggtgccaggcctgccccagtaccttgatggctgtttgtggtcatacactccgtggaccagtcttgagggatcacagggccaac

SEQ ID NO: 7875 - DNA, 463 bp, Homo sapiens
  misc_feature 27, 75, 85, 88, 100, 108, 133, 158, 182, 190, 224, 280, 286,362, 366, 371, 379, 421, 452: n = A,T,C or G
ccctttcgagcggccgcccgggcaggnactttttttttttttttttttttttttttttgggatggagtcttgctntgttgcccanctngaatccacgggnatgatcgnggctcactgcaacctctacctcccngtttcaagcaattctcctgcctcancctcccaagtagctgggactacangcacttgncaccacaccgggctaatttttttgtatttttagnagagacggggtttcaccatgttggccaggctggtctcgaactcctgaccttaggtnatttgncggcctcggcctcccaaagtgctgggattacaggcgtgagccaccatgcctggccaaaaacccttgctttttaacntagnttganacttaacnaaaattttccacattccactttttgacagtttacattaaaancctgtggtctgaaatatttgtttttacttanaggggggaccc

SEQ ID NO: 7876 - DNA, 797 bp, Homo sapiens
  misc_feature 37, 84, 101, 118, 122, 134, 137, 148, 177, 198, 206, 243,278, 279, 319, 326, 334, 354, 380, 395, 407, 411, 412, 416,436, 441, 462, 473, 484, 495, 502, 507, 508, 513, 516, 521,523, 534, 536, 537, 538, 542, 550, 557, 560, 564, 573: n = A,T,C or G
  misc_feature 575, 576, 577, 582, 586, 587, 588, 589, 591, 614, 624, 650,651, 660, 662, 665, 684, 687, 689, 691, 692, 698, 704, 707,711, 733, 764, 771, 779, 781, 782: n = A,T,C or G
ttgtaatacgactcactatagtgggcgaaattggggnccctctagtatgcattgctcgtagccgggccgccaagtggtggaatngggaataatctggcaanaaattcggccccttaanccgntggggtcccgcnggncccgaagggtnacaaaaattttgggggaacccttaaaaanttttttaaaaaaaaaatgagnttggtggngccttgggaataattaatgggggaaaaaaattgtttngggggccccccaagaaaaggggaaaccccgttaannaagaattcaggaattatttaccaaaaccaagcctttttgnttttttnggaggggnttttaagaaaaaattaatgnaaaaatggaattttggggttttattnaaaacccccaccaantttttaaagggncaannaaangggggccccaaaaaaaattnttttnaaacccctttttttgcccccnggggggggggnttaaatttttncccttcccccnaaaaaanttttnngggcnttnccccntnaaaattggttnannnccanaaaaaggntttttcnccncaanttttttttngnnntttgngggnnnnanaaatttttttttttttggggganaaaacccccnctttaaaaaaaaatattttttttccnnggggggggngnggntttttcccccccctccaanaanantnngggggnaaaaancgncccncccctttttttgggggggaacnctttttttttttaaaaaaaaaattttttgtntaaaacncccccccntnntaaaaaaaaaaaaaa

SEQ ID NO: 7877 - DNA, 274 bp, Homo sapiens
ccctttcgagcggccgcccgggcaggtacatacggaccttcagccagtccccgtagtggacgtagcccccgatgtaggcggcgtaggtgctaatggccaattggagtgcggcccccagcgcgaaccaacgccggtttcacgccaaaaggacattgaaactagcgcacaagcaccggctgcccccatgtcgaaaatacaggtaaggcactgggatgtcgggcttccggcgtgcctcagccctctcagcgtacctcggccgcgaccacgctaaggg

SEQ ID NO: 7878 - DNA, 393 bp, Homo sapiens
  misc_feature 92, 113, 114, 121, 127, 166, 298, 299, 302, 308, 328, 349,375: n = A,T,C or G
ccctttcgagcggccgcccgggcaggtaccactgcactccagcctgggtgacaagaagtgagactctgtctccaaaaaaaaactttgcttgnatattatttttgccttacagnnggatcantcttantagggaaaaggaccaataaagaattttttatcaaaaatngtgtcaatgcccagtaaagaagatgttatatttctttttctcatttctttcccaccccaaaaaataaagcctacccatatagcctttaataaggtcttcaaaatttttttggccttttttacctaaaaaaanngtngaaatngggtttctaatttcaatttngggggtattggcctttcaatnacccctattattttaggggcaaaaanttcccaattttttttttt

SEQ ID NO: 7879 - DNA, 373 bp, Homo sapiens
  misc_feature 167, 184, 192, 197, 202, 210, 216, 233, 251, 259, 273, 283,284, 285, 291, 297, 304, 307, 308, 311, 327, 348, 349: n = A,T,C or G
cccttagcgtggtcgcggccgaggtacaggcacctgccaccatgcccggctaattttttatatatttttttagcagagacagtgtctcactgtgttagtcaggatggtctcgatctcctgacctcgtgatccgcccgcctcagcctcccaaagtgctgggattacangccgttgagcccaccgngcccagcnaaggngggtnttggttgngttttnccaaaactaaaaaaatngggttttgaaatttccanggggtttnaaaaaaaaattttncccccttaannntttccncaaaangggtttnggnnaanaaaaaggggggggggnccccccccccccccccccccnnttttttaaaaaaaatttttttttt

SEQ ID NO: 7880 - DNA, 399 bp, Homo sapiens
  misc_feature 151, 312: n = A,T,C or G
cccttagcgtggtcgcggccgaggtacctataatcccagctacttgggaggctgaggcaggagaatcgcttgaacctgggaggtggaggttgcagtgagctgagatcgtgctattgcactccagcctgggctgacagagcaagacgccatntcaaaaacaaaaaaacaaaattcatgttactaaaagacaggtagccatatacagacggtatatgccctattttttttaactgactcttaatgaaactttaattttacttaattaaagaaatggaatttatatacaaaaatatttttccattttcccgttanttatgctaaattgttgtaatgaaaataaagtgcaaattatactttcttcttttgagatatccaagaagtatatttcttgctctggta

SEQ ID NO: 7881 - DNA, 352 bp, Homo sapiens
cccttagcgtggtcgcggccgaggtacacaagtaactctgattatttgcaaatactaattaaaatatatcacaccaaagaactgccaagtttttatattgtggtctgtggtcctgtcataatctggtttcccagtgcaaaattaataatgctatgtgttcatccaactcagccactgcttttcacagggcatagagctctttgagagctcagctgagaagtgtaatgcatggtttgtagctcaacaagtgaggatggaccaaacgctttttgtcagaagtcattcagtccttggtcctatctgctaagttaatgtccttttctgtgggttaagttacaaaaaagtgaaatca

SEQ ID NO: 7882 - DNA, 684 bp, Homo sapiens
  misc_feature 398, 459, 496, 513, 515, 534, 537, 572, 580, 594, 615, 620,630, 645, 656, 660, 661, 664, 668, 677: n = A,T,C or G
ccctttcgagcggccgcccgggcaggtactggagagctgttcgcacagatgtttagacctttctctctctctctcttttcttctttctcaacaactctttcacagaggcagcattttgaaaggttgaaatatttggcctttaccaaagagcttttttttccttaagcaaaatcctttcagaaagaaacaaatggggaagggcagattaagaatgcatatgtcccaatccacttctataggagtttaatcatattcacatgagtaaaatgatggaagaactctttaaggtaatcctttgggataaaggatcctgggaagttctctcaggtaaagaaagcttacagcagatttgtaatatatgtctggagagctatttataagaaatttaagaggattgntttggtttcctttattaaagaattaagcctttttactttgcaaaaagaaaacttccaaagntttatagatataactttgcttaatttttaaacttttnttgaaacgattacctgnancccaaattatgtgggtacnttntgctacattagaaattggaaaatgccatatgtggngggaaaantactggttggaaanttattaatgggccctggtatnaatcnaaattttggnaacttttggaaagtnattttcccccnttannctnggantcttattgntttttaa

SEQ ID NO: 7883 - DNA, 397 bp, Homo sapiens
  misc_feature 207, 294: n = A,T,C or G
cccttagcgtggtcgcggccgaggtacaaacgtggcatctgaatagaagcttagctagagaagtggagttagagtccctattttaatgaactacatatatttttcaatcaaaatgtgtaattatttaattatctagcctgctcagtaatcataactcttcaacttcttcaaagggcctttattcaatatgttaccactcatatggtncattacttggtaagtgttttatattttgaatttcttagatgctttcagtgtatgtgctagtgttttattaatattaaaaatttttgnttacttatatatcaagctgctgcaaatggactaccttattttaaaagttaggaataaaatgctattactctctaaacaagaactttagcatatcttgttttga

SEQ ID NO: 7884 - DNA, 383 bp, Homo sapiens
ccctttcgagcggccgcccgggcaggtacaggaatcctgaaaacattcagttattctacaaatatgtatcgagaacttcctttaagggcctggggagaggggacaaggaactgggcagatacttggagtaggtattttatagtttaacacatgctgaagtatcagatttcccttaaagcctggtagaggtaattaagtaaaaagctttgccctgttggtatcaaaaaatgtaaatggctcttctcagtcaacagttacaaccaagaaccaaagacatctatgaaaatttcaaaactaaggaaatttgcaattccaggcaaggccatattactctgagtttccaataagacctgaaggtcacttactttgtgttaatattaaag

SEQ ID NO: 7885 - DNA, 339 bp, Homo sapiens
ccctttcgagcggccgcccgggcaggtacactgaatctcaaccaggcactgaggacctgcagccttctgattcgggagcaatggatgtatccacttgcaatgctggctgtgcccagctcagcaccaaacatagggaaaaagatgctctgtgtctcgatatgaagtcttctgcttctgtagatttgttcgtagactcgtcagactctcacagccctctacacttgacggaacagaccccgaagaagcctcctcctgagataaaccctgtagatggaagagagaatgccttgactgttgtccagaaagattcctctgaacttccaaccactaaatcgaatt

SEQ ID NO: 7886 - DNA, 383 bp, Homo sapiens
cccttcggcggccgcccgggcaggtacagctgaaaaataagtgagggagaaaaaaccagagtatcaacaatttgcaaccactgatgaaataatgcatccaggcatgaaacattaatgtcagccaagccctccaaaaattaaagacaaccaggacattatgtgcttcttgataaaagaagtgaacatcaccttataatgtagtcttacccttactcacctaaaaaagaacctgaagctgaaactctagagccaacttgcaatttataggggacagatgaacatgttaaattataccatgggatacaaaagcaaaattcaaactatgggaaaacgtgaaagacaaataaccttgtttcttaaacaataaattatgaagaataaaa

SEQ ID NO: 7887 - DNA, 415 bp, Homo sapiens
  misc_feature 199: n = A,T,C or G
cccttcgagcggccggcccgggcaggtacaaaaattagctgggtgtggtggcgggtgcctgtcatcccagctactcaggaggctgaggcaggagaactgcttgaacctgggaggcggagggttgcagtgagctgagattgcgccactgcactccagcctgggcgacaagagcaagactccatctcaaaaaaaaaaacanaagaacaaaaaacaaaaaaccaaaaaaacctggttcttgacctttgaaacacacaaacacacactcttctctctcatacacacacagagacccactggaaattcctccttttgattacagtatgttgagaacagtatggttctgcttattcaaatttatgacgcccctttctgttttgtttccagttagacgtgggaaaaaccaattcaattataa

SEQ ID NO: 7888 - DNA, 299 bp, Homo sapiens
  misc_feature 8, 274: n = A,T,C or G
cccttagnttggtcgcggccgaggtacaaacatgaccagctcttgcagctttcattaaaggagttcttccaccttcagattcatgttccagatctgcgcctgcctgaagtaagacatctgctacatcagtatgaccattttcacaggcatatgttagtgctgtatcccctgttgctgttgttgcatgaacgttagctcctgcagctaataagtatttaactaactccaaatgaccctcttgagcagcttccattaaaggggtagaacaccctanttctatatcggctcctgccttaatt

SEQ ID NO: 7889 - DNA, 399 bp, Homo sapiens
ccctttcgagcggccgcccgggcaggtaccagtccatggcccaggggtttggggatccctgacctaggccattccacttattatagtcatcaagttattctccagcatacattgcatatgaatattaaagcttgtggaacataaaagggttttcccacaatccttgaattcatagtttctctccagtttgtgttctaaaatgtttatcaaggactaagtggcaggcaagggctttcccacattccttacatcaatatggcttctctccactgggaatcctgacatacactttaaggcttgagaaataagtgaagattttcccacattccgtataaacataggttttctcctagtgggagttttgtggtatcagtcctatggattaaatgaagcctttcc

SEQ ID NO: 7890 - DNA, 721 bp, Homo sapiens
  misc_feature 15, 17, 31, 651, 700: n = A,T,C or G
ccctttcgagcggcncncccgggcaggtttntcattagtaattgttttgttgtttcatttttttctaatgtctcccctctaccagctcacctgagataacagaatgaaaatggaaggacagccagatttctcctttgctctctgctcattctctctgaagtctaggttacccattttggggacccattataggcaataaacacagttcccaaagcatttggacagtttcttgttgtgttttagaatggttttcctttttcttagccttttcctgcaaaaggctcactcagtcccttgcttgctcaagtggactgggctccccagggcctaggctgccttcttttccatgtcccacccatgagccctccactggacagctcagtaagcctggcccttcattctgcgctgtgttcttcctctgtgaaaatccaatacctcttacctcctctgcatgcaaagattctcaaggattgtcagacttcaaacgtaacagcagaaccaccagaaggtcctataaatgcagtagtgaccttctcaagctgtcaggtctttaaataggatttgggatttaatgctatgtatttttaaaggaaagaaataagaagttgctagttttaaaaatgcatgtcttttagccaattcagaatctgnccccaaacttttttaaaaagtcaagacagataaagctttgggggagacngaaaaaaaaaaaaaaaaaaaa

SEQ ID NO: 7891 - DNA, 364 bp, Homo sapiens
  misc_feature 81, 128, 129, 145, 193, 195, 243, 265, 286, 304: n = A,T,C or G
cccttagcgtggtcgcggccgaggtacatccacgtctaaaagcattctataaataggccttgtttagctacacgagtctgnttagcagcccatggggagtgaggtttctttaaagaaatacagtatcnntcaaggtcataaactncctgagtcctcctattagtgttctcatcccccgtagtataacaaatgntntattacaactaaacagtgtaaggcctaataattaatgggtaatcaaanaacctttcacaatatcaccttntatctccaactatcggtctgngccacaatggtgagtgcntgctctaaaaacattcatattggatagatgtacctgcccggccggccgctcgaaagggcg

SEQ ID NO: 7892 - DNA, 324 bp, Homo sapiens
  misc_feature 17, 25, 55, 162, 169, 172, 178, 186, 188, 208, 218, 228,229, 241, 253, 277, 306, 308, 309: n = A,T,C or G
ggcccattgggcccttnccgggaanggcccggggggccccccgggccccccaggntttgggtttgggaattgggggggatttatttccttgggccaaggaaaatttttccggcccccctttttttccggaggcccgggccccggcccccgggggcccagggnaaccttnccntttttntttttttntnttttttttttttttcccggncttccccccnaaaacctttnntcctgggccttnggaccttttttnaaaaaaaagttttggggggggccnaaatttcttgaaatttgggctttaaaaanannattgccttttttttt

SEQ ID NO: 7893 - DNA, 383 bp, Homo sapiens
  misc_feature 365: n = A,T,C or G
ccctttcgagcggccgccgggcaggtacttaagggcaacactacatagtaagcaaaatctgctctgaaccctttcacagaagagacacttcagaaaggaattttacatctcctgacagttttacaacattcatacctctgatgcacttcaagccccaacccatctctcattttctaacttctttaacagaaatgtgtgttcacaagttgtgtgtgcgtgcacatgtgcctctgtgtgtacaccagcaaggaccgctatttctattttgggaagcttgatggccagatctcctctgcctaccccagccaagaggggcaggtgcttggtgggcatctatggccagtatcaactccttggcatcaagnagcattggctttgaatgg

SEQ ID NO: 7894 - DNA, 411 bp, Homo sapiens
ccctttcgagcggccgcccgggcaggtacagagacagaggaaggggggctccaaagccaagagagggaaccccacctgccacagataccagctaggtatatatacagaggctggaggaggcagtgtctgatttgcacaggctcaggggattggtttgactaggcatgtcattcacgtagcccgcaggaaaagctggctctcccaccctagccttttaatatgcaaatgcagggcaccatgatcttctgcacaggtggggatacttcggggtgtccatgtatccaggaatgtggggaaagggcaagaagcccacaggaatcgccatgtttgggtggacccacttttctaatggctggcatttgggatatcgggtaactggcctggcttttaaagaagctggagctttacaag

SEQ ID NO: 7895 - DNA, 388 bp, Homo sapiens
  misc_feature 14, 319, 320: n = A,T,C or G
ccctttcgagcggncgcccgggcaggtaccatgttgacaaaaatgccagatcaaatggatttgagaaataagcccaattcaaggctggctcagccctccacggggcctcccagggaaaggaattcctttatgttcttggaagcccttttctagaaaagccattccatccatacctttgtagagcagtgggctgggtgtggagggcagcgcggagggtatctgcaagagcctgtattttccgcctccctgcccccactccttttatccttttaaaagtcctatcagccctgccttcgtcccttccgccctaagccctaannagtggggggaggtttaataacggccaatgggatcttgtataaaagtctacgtaaagtttttaaattta

SEQ ID NO: 7896 - DNA, 370 bp, Homo sapiens
  misc_feature 256, 264, 324: n = A,T,C or G
cccttttgagcggccgcccgggcaggtactactcgattgtcaacgtcaaggagtcgcaggtcgactggttctaggaataatgggggaagtatgtaggagttgaagattagtccgccgtagtcggtgtacaagtttcccttctccagggtgacagatgagccttttccgaagttctaagctttctcttctatcgaaacttcccatgtcggttaaagtgtttgtagagatagcggatgcgtttattaaggttgtgcangtcatcancgaacattctacttccaaccattttcctctttcggatacaacgttgcaattcattccctntccaacctcgaagccatatgggccccctgatcagttctttggggtg

SEQ ID NO: 7897 - DNA, 282 bp, Homo sapiens
  misc_feature 161, 190, 193, 196, 197, 217, 273: n = A,T,C or G
cccttagcgtggtcgcggccgaggtactaaagaaaacacatcattttaataaaaaccaaacctgcttaagagacataacagagttaagcaaaagtataaactactataataaagcagttgcttaagattttaatataagaggatttgttttcactggaaanagcgttaaagccctttcttttttctgganccngannacagttggcttgcgttctanttattcaatatttctacagtaatttttttaattattgtacctgcccgggcggccgntcgaaaggg

SEQ ID NO: 7898 - DNA, 176 bp, Homo sapiens
  misc_feature 93, 101, 133: n = A,T,C or G
cccttagcgtggtcgcggccgaggtacccattaatttgctcagatatagcaggctaaatggttctatattttcaaaagtttttaagaatggtnttctaacntaggagagggaaaacatccaccattccttttnagaaattttaaaatgtgagtggctagtatatacatttcttttt

SEQ ID NO: 7899 - DNA, 290 bp, Homo sapiens
  misc_feature 75, 82, 96, 198, 248: n = A,T,C or G
ctgctgcagatggacctgtaaatgaatacatgttgccatttgaggaggaaattggccagcatccatctcttgaanacatgcnaggaagttgttgtngcataaaaaaaagaggcctgttttaagagattattggcaagaaacatgctggaatggcaatgctctgtgaaaccattgaagaatgttgggatcacgacgcanaagccaggtaatcagctggatgtgtaggtgaaagaattacccagatgcanagactaacaaatattattaccacagaggacattgtaacagtg

SEQ ID NO: 7900 - DNA, 333 bp, Homo sapiens
  misc_feature 51, 114, 183, 219, 228, 250, 273, 314, 328: n = A,T,C or G
cccttagcgtggtcgcggccgaggtactggagagctgttcacacagatgtntagacctttctctctctctcttttcttctttctcaacaactctttcacagaggcagtcatttntgaaaggttgaaatatttggcctttaccaaagagctttttttttttccttaaagcaaaatcctttcagnaaaagaaacaacatggggtgaaagggcagattaagnaatgcatantgtcccaatccacttctatagngagtataatcattatttcacatngagtaaaaatgatggaaagaactctttaaggtaatcctttngggataaaaggatncctgg

SEQ ID NO: 7901 - DNA, 419 bp, Homo sapiens
cccttagcgtggtcgcggccgaggtacagatgatgaagcttccagagcttatctgatctcttagacagaactcacataaacacacaaatacaagaggttattttcaagacacacactttgcaagtaatctttctatagaaattggccacagcattataatattcaaaatatggaagattgacagtctgaggattttctagaggaaaaaaaaaatcaagggacttgccaaaaggataactacataacagatatgacaatctacaggacaaaaagacaacatgtcaccaaatattgttcatacaacagccgttaatggaaaacagtaaaacaccttttagcagtgtgcatgttaagtcttttagtaagattatctgtaatgaggtttgaaaggtaaatcacttagtagaccaaagttaaac

SEQ ID NO: 7902 - DNA, 171 bp, Homo sapiens
  misc_feature 131, 157: n = A,T,C or G
cccttagcgtggtcgcggccgaggtacgcggggagccccaagcttaccaccttgcaccccggaagagctgtggtcaccatgtgggtcccggttgtcttcctcacccttgtcccgtgacgtggatttgggcncttgcgcccccttatccttgtcttcngattgtgggaggct

SEQ ID NO: 7903 - DNA, 402 bp, Homo sapiens
  misc_feature 3, 19, 50, 55, 137, 143, 387: n = A,T,C or G
ttnccttagcgtggttttnggccgaggtactaatctgggcattgttctangcacntgaaataaactatctcaattcatccttcaaataacccagtgaagtagatcatactatatcccactttatagatcatactggnggtatncccattttatggatggggaacctgaggctcagagatgagaaatgatcatccaatcatccacattcactcaactagtaaacaattgggctaaacttcagctccagctccatgcaattccaagtcctcgttgaaccactttgttattgagcttgctccaactgatctcctgtgtctctggccatcccatcgttttcaagtagtgccccagtttggaaagtcccacttcatcatcaggcattccagntgccctttccaagcc

SEQ ID NO: 7904 - DNA, 387 bp, Homo sapiens
  misc_feature 369: n = A,T,C or G
cccttagcgtggtcgcggccgaggtacgatcttggctcactgcaacctctccctcccgggttcaagtgattctcgtgcctcagcctcttgagtagctgggattacaggcgcgtgccactgcgtccggctaatttttgtatttttagtagagatggggtttcaccatgttggccagactgatctcaaactcctgacctcatgtggtccacccaccttggcctcccaaagtgctgggattacaggcgtgagccaccacgctcagcctacaagcaattttttaaaaactgacgcctattactgataaaattctctgttttaaaaatcctatttactattttaaaagataaagtattagtttttttttaaatnacaaataatttcttgtta

SEQ ID NO: 7905 - DNA, 434 bp, Homo sapiens
  misc_feature 54, 173, 200, 216, 237, 244, 260, 273, 280, 292, 303: n = A,T,C or G
cccttagcgtggtcgcggccgaggtacattattgcattagggagccacaaaatnatgtagcatcattacaaatgaaaacagggttaaaaatgaagaagatacttatatagaaatacatggattcattgtcttcttgcagaatgcacaatgaggtgcaaaaatgtgcaatttangaagctctttttctgtttgtatacgtntgctttagcaacacanaccattgagggaagctacaanataaagnttaaacaaaaatagcnaacaggaagttanattatanctatgtaatatngctttctatgncatttaaatatctccaaataaaatgtgaaataaagaaaatacattattttatcttttattctcttacaggagaaaatttcaaaggctactttgcttccctaacatttacacagcaactaaaaaatggttta

SEQ ID NO: 7906 - DNA, 151 bp, Homo sapiens
  misc_feature 8, 17: n = A,T,C or G
cccttcgntcggccgcncgggcaggtactactcgattgtcaacgtcaaggagtcgcaggtcgcctggttctaggaataatgggggaagtatgtaggagttgaagattagtccgccgtagtcggtgtacctcggccgcgaccacgctaaggg

SEQ ID NO: 7907 - DNA, 366 bp, Homo sapiens
  misc_feature 118, 167, 201, 205, 242, 243, 269, 276, 277, 282, 307, 312,349, 355: n = A,T,C or G
cccttagcgtggtcgcggccgaggtacttcgaatttgagtttgaggcttaagaagctggatctcctgccgggcgtggtggctcatgcctgtaatcccaccactttttttttaaggcangcggatcacctgaggtcaggagtttaagaccagcctgaccaacatgganaaacctcgtctctactaaaaatacaaataattanccangcatggtggcacacgcctatagtacccagctactcanngaggctgagggcaggagaatcacttnaacccannaggcnagaggttgcatgttgagctgagatnacttnattgcacttccatcctgagcccacaaagagcaaaacntcgttnttaaaaaaaaa

SEQ ID NO: 7908 - DNA, 555 bp, Homo sapiens
cccttagcgtggtcgcggccttgtacatgctatcagcgtgacttattactgttagtgttaatcttgataacctagccgagatagtgtttatcagatttctccactacaaagttattttccccctttccatatgtaatttttggaaggaagtcactattcagctcacactagagaagtaggaagttctgctccatatccttgagggcagagttcataaattatttggaattcttcttcatgggagattcatctattctaccccatttattaatgtattcaattttctggcactacaagaatatatatatatttttgtaatcgactttaaaataattaggaaaatgatagaacattttaatataagagcaagatatggtaaattgatgaatattattagacattatcagtaacaagagctttgtatcttaagttgttttgagttcaatttcttgttcacatcttttagcttggttgagctaaaaaatcattaaccattgattttttttgtaaccttgcatataatatgtacctgcccgggcggccgctcgaaagggc

SEQ ID NO: 7909 - DNA, 739 bp, Homo sapiens
  misc_feature 535, 556, 569, 570, 571, 592, 605, 618, 621, 622, 623, 630,631, 633, 637, 650, 654, 655, 656, 683, 686, 716, 719, 721,722, 731: n = A,T,C or G
cccttagcgtggtcgcggccgaggtacttctttgctgatgacctacctcttcataagccaagtgaaacaagttgacgaactgcctaggacttccacgtgttgctcacatacatgatgatttctgtcacgctcttgtgttcagacacactgacattaccatgtatgtcagacctccttatgatcgcatgtcctgacagttaagctgattgcaaacagactattaaatatgaatggagcaaacgctgtatgtcatggatatgttctggagaaattcttacccatctggatggggcagggcccttgactcacctgaatcatgaccaggcaaacattttatctgtcctttctgcaggaatccgttctgtgtcatgctaggagaatgggttcagtatatggggccatcaggcagtataccctctgaatgtttttcattgttgtatttgcttagagtaactaaacaattgtatcttttaatttatcttttaattcaaaagaggaaacctttggctttctgataacttttggttggggtggnatcttaatggcctatagctgncattactttctgnnncttgcagtacctgcccgggcnggcggttcgaaangggcaaattccancannnccgcccnngntttntttttgcttcccntttnnnccccccccccccccccccccccttttnccntccccccccccccccccccccgttaatttntgnanncccccttgncccccccc

SEQ ID NO: 7910 - DNA, 205 bp, Homo sapiens
  misc_feature 22, 23, 26, 33, 34, 92, 97, 113, 131, 151, 153: n = A,T,C or G
gcgaattgggccctctagatgnntgnctcgagnnggccgccagtgtgatgggatatctgcagaattcgcccttagcgtggtcgcggcccgangtctntttttttttttttttnttttttttgatgtcaaangtttatttctatgccataantngcctcagcacaatttgtaaaagaaaggaatcaaaaaatgaaatttttttagt

SEQ ID NO: 7911 - DNA, 423 bp, Homo sapiens
cccttagcgtggtcgcggccgaggtactcctgggaactgggtaggacatatccatattgtagttcccaaggtgtctggttgagagttagagaacttttaaatttctttagccagacaggtctctatttttttaagttatccaaggacttccaagaacccatagttactgaaaagggagtcctgatacatctaatattggtagcatgtaacagtgtttgacaaagagtaagtaagcagtattcttgggagtcagtgttatgtgtttcagcagagtattattttgtatatgtatgccattttctccctgcaaagcagctcaacaagagaaaaagctctagttatagggcttaaattgatttctatttcaaataatttcctaagagattctagagtagaactgaagagtattctattggaaaagtg

SEQ ID NO: 7912 - DNA, 403 bp, Homo sapiens
  misc_feature 351: n = A,T,C or G
ccctttcgagcggccgcccgggcaggtacaacaatgttattaagctgcaaatctatagcaagactttgaaagtaaccaaatgtttagaaattaagcatcacatttctaagttattcatgcatcaaaaaagtaattacaatgaatattaaaatatattttgaatttaataaaaatgaaagtaaaaatactgcttgttaaaagatgggaggcttaggcaaacctcagcttggagataaatgcatatgcttgtttaaaaaattaaagcttgaaaattaataatctaattgtcaatctcaaaaatttaaaatgtgatgtcaaattaaatccaaagaattagaaaagagaaagatncataagaagcatgagaaaaggaaacaatcataaaataaatgaaatcagcaaa

SEQ ID NO: 7913 - DNA, 834 bp, Homo sapiens
  misc_feature 35, 43, 95, 182, 248, 330, 356, 395, 409, 460, 472, 474,515, 583, 604, 610, 629, 644, 656, 661, 663, 671, 679, 686,711, 724, 790, 833: n = A,T,C or G
aaattgggggccctctagaatggcatggctccgangccgggcncgcacaggtggtggaatggggaatattctggcaggaaattccggccccttangccggtggggttccggcgggcccggaagggttaccaattccaagggaacaaaaatggaattaagccccctaaaaatggaaaaacctngtaaataaattttccaaggtggggaaaaaccttcaaatcctggttttttttaaccctttttaaaancaaggtggaaatttttttacaatggaaaatggaaaatggggggttttccttttcaaccttttttttttttttaaggttaatnggaagaaaaaaaaattttataaccanggtgggcttttaaaattttttttcaaggaagggaatttncttttttcccaatnaattggtttaaccttaaaaaaaaaaaaatggtttttttgggttttcaaagnccccttaaaacnantaaccttggaaggtttttttttttttttaaaacctttttcnttaaaaaatttaattttgggaaattttttccccattccaattgggcccatttttccaattcccaaaanaaaatttaaaaggggccaggnaacctnggttttttgggggaatttnctttttcccaaggtngggcccccaagnaattngnaagggccnttaaaaanttttaanaaaaattccaaccaaaaaaaaaggnccaaggaattggnccttttttttggtaattgggaattccttcccaaaaaaatttgggcccccaaaacctttttaaaaangggggaaaaaaattaattttccttccttttgggaaaaaatttng

SEQ ID NO: 7914 - DNA, 322 bp, Homo sapiens
  misc_feature 131, 209, 215, 258, 270, 275, 279, 289: n = A,T,C or G
cccttagcgtggtcgcggccgaggtacaataaaggaatggggaagggggaaatgaaagaatagagaaaactatacggtagtagtcaggatgtggtggaaccaaattgcagttttctaattgagaatgtaantctttggtctttaaaagaacagagtttctggagtaaagaagcaggtttcccttttcagttagacacctcccgtctgcntgttgnaacacatcaattgtatcttcatcctccatttccaactgtgcangtgtgtctgttncattngatntggttgcccntcaaatcggaatctgatcttgcctcattgacaa

SEQ ID NO: 7915 - DNA, 402 bp, Homo sapiens
  misc_feature 134, 146, 175, 368, 377: n = A,T,C or G
cccttagcgtggtcgcggccgaggtacaacagcaagctcatgctgtccccaagtgcttgcacattctaacagctgcagagtatatgaccaggtggaaagtccaacagatgccccactcacaagatagggccctncaattcaagtcnttttggctccttttcactcatagtaactnggttgctcttcctattggtcatagataaatgacacctgcacaattctccgagtgctttcaagcaacttcgggaggcagtgactaagaccctttccttgctcccagcttcctatgtcccagggctgccttgtggcacctggactgctgctgccccccgcgtactacagcaggtcaaagaagaatctccactagnagatcaagnaaagaagccaccactatttttcttt

SEQ ID NO: 7916 - DNA, 319 bp, Homo sapiens
cccttagcgtggtcgcggccgaggtactgaatctgaagggatcagccccaataactctgcctggaatgggccccagctctcttcttcaaacaataactttcaacagactgtctctgataaaaatatgcctgacagtgagaaccctacgtctgtattctctcggatctcagaccattcagagactcctaatatggagttatcctgcagaaatggtggttcacacaagtcaagttgtgaaatgagatctctggttgtttccacctcatcaaacaaacaggatgttcttaacaaggattctgggaagatgaaaggccatgag

SEQ ID NO: 7917 - DNA, 313 bp, Homo sapiens
  misc_feature 47, 49, 62, 116, 117, 125, 128, 135, 197, 205, 260: n = A,T,C or G
gccctttcgagcggccgcccgggcaggtactaatgaaaaatacctanantgtggggaataanaattaaatctatttcaagcacatgcaacttggaactcgcaaaaaaaaaaaaaanngaatcganagnaagaaanaaaaaagagtttgggagggcccttaaactaaaattgttgcttaatacagcttcatgagaganctgccttntttcaaatcttgaattttgaacataggcaaaataacaattagggttgatatattntccctgcagcatgggaagtaagttaacttcccccaaggccaaaaatgatctca

SEQ ID NO: 7918 - DNA, 376 bp, Homo sapiens
ccctttcgagcggccgcccgggcaggtacaggtccttctgagcagggccgaggagctgccactcctcccaagtgaactccacagccacatcctccagggtcagtgattcctgggacttgatcattttcttttgttactgggaaatagccagtaagtaggatgctgtgtctgtagtctctccttgagctgccctcaatttctggctagaaatcttggtctctggtgaattacatccctgcaaaggatggtatccaggtcctggaacctcctcctcacctcacttgaagtgtcttgctcctgaagtcaggacctgtgggtttgaaatgcaccaaaaaacaaagcaatatttacaagatggataaatgttggctgggtg

SEQ ID NO: 7919 - DNA, 295 bp, Homo sapiens
  misc_feature 1, 3, 6, 16, 26, 29, 33, 40, 43, 59, 96, 97, 198, 265, 270: n = A,T,C or G
ncngancttggtaccnaacctggcgntancatnggtcaanagntggtttcttgtggtgnaaattgtaatccgttaacaattcccacacaacatacnnagcccggaaagcataaaagtgtaaagcctggggggtgcctaattgagtgagctaacctcacattaattgccgtttgcggctcactgcccgctttccagtcnggggaaaccttgttcgtgccagcttgcaattaatgaatcgggccaacgcgccggggaagaagggcgngtttncgttattggggccgctctttccgct

SEQ ID NO: 7920 - DNA, 403 bp, Homo sapiens
ccctttcgagcggccgcccgggcaggtactttgatggcttcactcaccagcacatctggtggcaacacccccgttgactcaacagagactggggaccaaagagacactttagtctaggcagggcttgcctgtaaaacttacttcataaacttcacatctagactggaaggaagctgcagcaccaaagagcactgcccactcatctcaccacttcatactcacagatataatgatctcgaacccgggcaagcctcgcaaccttctttagcttctcattccggaagatttctctgctgaaggtatccagccgggggttggcaactctggccacctttttaccttggacttcccgcacctcaataacaccaggtgagaagcacctgctcaactcctcagctgcctc

SEQ ID NO: 7921 - DNA, 715 bp, Homo sapiens
  misc_feature 587, 596, 667, 675, 676, 677, 678, 679, 680, 681, 682, 683,684, 685, 686, 687, 688, 689, 690, 691, 692, 693, 694, 695,696, 697, 698, 699, 700, 701, 702, 703, 712: n = A,T,C or G
ccctttgagcggcccgccggggcaggtacccaaatatcaaaggcagagaccccatggggctccaaagagctgcagtctccttcccaaggttttctggatataaatttgcatggtatagtcataatagcttttgagctttttatatgcatttggcaccaagactgggatccacaactttgtagacactgcgatgaagttaacatattagctatactataaatagtgtttgtaactacacacacacacacacacacacacacaaatacatacatatattctgtaaaaacaaaaaaaactttttaagatccttgggtatgtgtttgctttactccatttcagaagaaaattacttttcttctaacaaaattattttatagcttctccatttttaaaacttgtgagagcattgagaagagaactctgactgtgttaacagaagagagttgaattggagtctctgttgtgttaaaatgacctctcgttactccacagtagttatttgagccagtgactgagtcgcgttgaggagttctgaacccggacctctgacgttgttgggaggtggctgttacccacacccagacctnttgagtaangacagaaaccgttatcattggggggatataatgagattctttcttaacaattgaaagtaattaaagagttnattttccnnnnnnnnnnnnnnnnnnnnnnnnnnnnngggaaaaanaaa

SEQ ID NO: 7922 - DNA, 379 bp, Homo sapiens
ccctttcgagcggccgcccgggcaggtacgcgtatatatccctctagtaatcacaacattttagggatttagggatacccgcttcctctttttcttgcaagttttaaatttccaaccttaagtgaatttgtggaccaaatttcaaaggaactttttgtgtagtcagttcttgcacaatgtgtttggtaaacaaactcaaaatggattcttaggagcattttagtgtttattaaataactgaccatttgctgtagaaagatgagaaaacttaagctttgttttactacaacttgtacctcattagtaattgttttgttgttttcatttttttctaatgtctcccctctaccagctcacctgagataacagaatgaaaatg

SEQ ID NO: 7923 - DNA, 364 bp, Homo sapiens
  misc_feature 87, 237, 303, 308, 317, 331, 346: n = A,T,C or G
ccctttcgagcggccgcccgggcaggtactttttttttttttttttttttgcttattacggaaaaacacaccacataattcaactancaaagaagactgcttcagggccgtgtaaaatgaaaggcttccaaggcagttatctgattaaagaacactaaagaagagggacaaggctagaagtcgcaggatgtctacactatagcaggcgctattttgggttgggctggagggagcctnttggaaaacaatggaggagattggtgctggagatccgccatggctatttcctcattgttattacangagtngaggttctntgtgtgcccacctngtttgaaaaccgttnttaccaaattaaatggat

SEQ ID NO: 7924 - DNA, 668 bp, Homo sapiens
  misc_feature 19, 23, 39, 76, 103, 132, 150, 209, 231, 270, 289, 443, 445,468, 484, 498, 507, 538, 546, 560, 566, 573, 592, 596, 599,617, 618, 621, 628, 657: n = A,T,C or G
aatcccctacgggccgcgngacncggggcaaaataaggnttgtccgacaactatatacggtacacttgtcaatgtnccagcccttttcttcttaattgtgaanaactcaaagctgaacatcctttgctcttngaaattttcctgtgtatnaatcattgcaagaaaagagacacacgtttgggatccaggatgggacacctgaaactacncacatacatgaatttactggtnacgggccagaaagcactggcaaagacacagatgtatcgnagacatgagaataataaanacggagttgtcaagaattatctttctcataaagacagatgtcatcacaatggatcccaagacaattgtcaaaagatgcaatgatacactactgctgcagctacaaacacctctgcatatacatgtccaaacgagtcttgccttgctgggagacngntcaccttccacttgctgaaaggncaaggctttttgctgnccatctggcttgtngctgtgccntgtggctgctgcacacagctgtctgccgttntgaacccngtaagttgaaccangaagantcggagnatctgaccaagatttgganttgnttnttgataatcaccaaaagnncanttaccgnttatttgctaacaaggataaagcttcttnttataaaaaaa

SEQ ID NO: 7925 - DNA, 509 bp, Homo sapiens
  misc_feature 456, 480: n = A,T,C or G
cccttagcgtggtcgcggccgatgtactccgcctgggcaacaagagcgaaactccatctcaaaaaaaaaaaggaagatgaagctgaccatatagaacttattaagataattttgtaaagaacaaagattttcaagaggatgaaattttaaattgagagaatattttgaaactttactatttagaaacatagttgcctatttaatgaagctgaaaagaacgtgtatcatctggaaactctggtcatggtctccattttgagatgaacttcgtataaccaacattacacctctggctttgttgccaatatctaacacatgaaggaaacacagaagacgctgcactgtaactgcttcccatcactatgacatggaacaaataaaaatttgggatgtgaagaaaatgggtaagatgctttccaattttttgtggacttatcataccctcaagacaactgnatttaattcaaaggttatcaagcntaataatccttatcaaaataaagggaaaa

SEQ ID NO: 7926 - DNA, 276 bp, Homo sapiens
  misc_feature 194, 219, 243: n = A,T,C or G
cccttagcgtggtcgcggccgaggtacagtggtgcagtcatagctcaccacagcctcaaactcccgggctcaagcgatcctcccaccttggcctcccaaagtgctgggactataggcatgggccaccacacctggccaggactttataaagattatacaactcttctccaggacattttaacaccaaaaagaanaagctttgcagaacttactatgcanaggacagtccttttgattatatgntagctttaagagccacttttatttttccttttt

SEQ ID NO: 7927 - DNA, 364 bp, Homo sapiens
  misc_feature 129: n = A,T,C or G
gatatctgcagaattcgccctttcgagcggccgcccgggcaggtactctatgttggctgttccgcagtgtaatgactggttaataaaagggccactcagcctggacaatatagtgaggcctcgtttctnaaaaaaattagccaagcatggtgacacgcacctgtggtcctagctacttgggaggctgaggcaggaggatcacttgagcccaggacacagaggttgcagtgagccaagattgtgccactgaaatctactctaacctgggtgacagaaagggaccttgtctcaaaaacaataataataatattaaaggagccacccgtttaatccttttcttgctggtctcatccaaagagtaagc

SEQ ID NO: 7928 - DNA, 371 bp, Homo sapiens
  misc_feature 156: n = A,T,C or G
ccctttcgagcggccgcccgggcaggtactttttttttattttttacattttttgatgtccgtttgtattgaataatttgctacatttgtaaaatgtaagaggtatataatatatgtatatttctaaccgtaaaaaaacataattttttttctttncaagattttttcttaaaaagatgagagaaacatattttttcaggaaaaacaaactttaaaaaaaaaagaggagaaataaaaccttttctcccctttccccatcctctatctatccctctttcccaggaacaaatcaaaaggtgggattatcttctgaaggaatggaaaactgttagtccagaaatgatgtctttttctcaatgcaggtggagtta

SEQ ID NO: 7929 - DNA, 357 bp, Homo sapiens
  misc_feature 64, 126, 131, 138, 141, 149, 162, 173, 188, 204, 216, 241,258, 260, 262, 264, 286, 314, 324, 326, 330, 331, 343: n = A,T,C or G
cccttagcgtggtttcggccgaggtacttttttttttttttttttttttttttttttgcctagngccaggtttattccctcacatgggtggttcacatacacagcacagaggcaccgggcaccatnggaanagggcancanttcctgcnttttgaggggatnttggccttacnggtgtaagaaggganaggatggtttctcttntgccctcactanggcctagggaacccaggagcaaatnccaccacgccttccatntntnanccaagggaaaaaccgcctttgntgacgtttaagttccaaccatttatatnttaagttggnanaaannggaatatggccntgtgtcccaaacca

SEQ ID NO: 7930 - DNA, 378 bp, Homo sapiens
  misc_feature 39, 46, 92, 164, 183, 260, 298, 304, 340, 343: n = A,T,C or G
cccttagcgtggtcgcggccgaggtaccagtgctttcgnttttgtngttttttgagacagagtctcgctctgtcgctcaggctggagtgcantggcgcgatttcagttcactgcaacctccacctcccaggttcgagcatttcttctgcctcagcctcccgagnagctgggattacaggcacncaccaccacgcctgggcttgattttttttgtagaagaacaggggtttcactttcaatttccattgttatgaagaagnctccgtgccctgtgtatacatgcctttatgtaagcctngctcangctacagtatcaacaatgctggcactaagcaaaagnttngagcctcagctttaccttttacccttttcccttct

SEQ ID NO: 7931 - DNA, 400 bp, Homo sapiens
  misc_feature 135, 151, 246, 309, 382: n = A,T,C or G
ccctttcgagcggccgcccgggcaggtacttttttttttcctttggacttttgaagctagtgcattggaaaaatgcaccctttccctcctttggaaatgctgtattaatgtaggtataataattacctgggtttngaaacttgttctgggnaatgtccttcccgggactctttttaaaatgtctccccctaagtttttatacttggattgtattattaggtctgtttttaaaatggtttttgcccnggttttttctcttcaaataattttgtgtataataaaacccgatctttccgtggatactggtancttaccttttttaaagaaatttaagaagaaccaggtaacctcccaaaaaataaattggtcccttttttttctntttccttttccttttttt

SEQ ID NO: 7932 - DNA, 379 bp, Homo sapiens
  misc_feature 7, 317: n = A,T,C or G
ccctttngagcggccgcccgggcaggtactaggtcttccttaagcagcaagaaaatgtggggggttttacagaagaaaacaagcaatctgggctatagcagaagagcactaatcaacttaaagtccaccttccatggtggttcagaaaccagactaccttaacgattttacccacgaaatcccaaatatccagactgactcctatgaaagtatggcaaaaaccacaccaactggtggccttccaagggacccccaagaactcatggttgataaccctttgaatcagctctcgactctagcagggcagttgtccagtntgccacccgaaaaccaaaaccctgcatcccctgatgtagttccctgccctgatgaaaagcct

SEQ ID NO: 7933 - DNA, 422 bp, Homo sapiens
  misc_feature 62, 308, 361, 368, 377: n = A,T,C or G
cccttagcgtgggtcgcggccgagggtactggcgagcaggttctttccaattcgatggaatntaatcctcttgagggagttaggggtagtcataattgatgacaaaatttcacatcttccacatctagccctctgggaggccacatctgtagcaatcaagaataaggagccttttccatgttttgaaattcattttagaacccagtcacgcctctttgttggactcttgtcacccatggatacccatggcagggcccacccaatctctcctcatttttcttggtaagcctcatcacatctttcttttnggtttcccacaaaaaaacaatgggttttttaattttctccctttcttcacttncatggantcctctttnccaatttaggaacgaaaataaaggtttttttcaattccctttttt

SEQ ID NO: 7934 - DNA, 415 bp, Homo sapiens
  misc_feature 11: n = A,T,C or G
cccttagcgtngtcgcggccgatgtacgcggggaagtcagagcgatgtgctgtgaaatctactaccgtttgctggttttgaaaatggagaaaaagagtgaggaactgagaaacatggatggccttgggaacgtggaaaagggtcactgaaatgggacgacatgaactcaaggagactatttatgaccatgtcatttgcaacatgaagaaagcttatctggagtgaaagtaaatgagaccaacagagatgagagacccggagaaatcctggttacactgcttgaatcctacacatactaacaaaaggccacatgaggacgcagtgagaagctggaagtctacaacccagaagagagccctcaacagaacctaaccatgctggtacctgcccgggcggccgctcgaaagggcgaatt

SEQ ID NO: 7935 - DNA, 131 bp, Homo sapiens
  misc_feature 6, 22, 28, 112, 114: n = A,T,C or G
cccttnctagcggccgcccggncaggtnctagggatcatgtgtttaaaaaaagaaaggctacgatgactgggcaagaagaaagatgggaaactgaataaagcagttgatcangnattctattgggaaacat

SEQ ID NO: 7936 - DNA, 331 bp, Homo sapiens
  misc_feature 275, 286, 310, 329: n = A,T,C or G
ccctttcgagcggccgcccgggcaggtacatcttccatacactttactaccttggagtaaagtagtaagaatacagctttttccttaacctttaccagctaactcagtgcttaggggccttggaatgcctgctgtccagcaggtgtcacaggcctgactgggaggcatggccattatcaacagtgtatgaaggtcacatatggctccctgaagtgattacatacttggaccacgtcacctcagccccttgcaaaattgcatttaatgttacaccnttggcttttgnagaaacaggcaacaagacactatnatataaaactttgtacctngg

SEQ ID NO: 7937 - DNA, 510 bp, Homo sapiens
ccctttcgagcggccgcccgggcaggtaccccacaaataatacagacaccccatcctatctgtgtcctcagagaaattgagtgatatgtctccaggcatggccagtattccccaggacacagagaggacaaaattacaccatttaagaaacactctggtctacacctgtgtctgctgatttcttttcctagcaaccctggacctcacacctaaggacaaaggtcagtagaactggggaggcctgagtcttggcctggtcatttccaaggttccaagtttactacaatagggagttgataggggtgctcaggggttggccacgatggtgtccttgatccacttccggtaatgcaccaccttggtgtacgcggggaaggacacacttggactaaaatggttattgctttatcataatttggggatctctatcagagatgatttaggccagagtttctcaccctcggcactatcagcattttaaattagattcttctctgtggcgggggcccg

SEQ ID NO: 7938 - DNA, 252 bp, Homo sapiens
  misc_feature 1, 8, 10, 88, 98, 99, 105, 111, 126, 134, 138, 148, 151,178, 190, 205, 216: n = A,T,C or G
ncccttancntggtcgcggccgaggtacctggtgtatttgaatatagactagagagctttcattttccagagagcatggggataaatnagtgatctgnnaatttntctttngttaagaaaacaaanctgaggtnattntgaaccccanganaaataaaaattcaaaaactacactgcntatctgaactgngaacaatactacccntataaagttantcataattatgtaattactgaatattgattttataa

SEQ ID NO: 7939 - DNA, 389 bp, Homo sapiens
  misc_feature 14, 15, 56, 58, 131, 133, 156, 167, 169, 188, 215, 223, 227,233, 235, 242, 250, 251, 271, 280, 298, 367, 369, 371: n = A,T,C or G
cccttagcgtggtnncggccgaggtactttttttttttttttttttttttttttgntnaaatatgtttaaattatcacactgctggcactcctcatttgcatgaagctctgcaccatacttactaatttgnantaaaggttaccccccaacccacngaaaaaaaacntnctttggaagaaaatttttnactgaaatataaccaaacttctttaantggattgngacnagattntnaatgatntgaaaaannacatttaaaatttggccatnaactttaanaaatggtttgccttatanaaaattttttgtaattttttaaaagataatatattctacccctcaataatgggtcctcagaaattaaancntnatgaaccagggaagaaaa

SEQ ID NO: 7940 - DNA, 380 bp, Homo sapiens
cccttagcgtggtcgcggccgaggtacaaagcagactgcccgcaaatcgaccggtggtaaagcacccaggaagcaactggctacaaaagccgctcgcaagagtgcgccctctactggaggggtgaagaaacctcatcgttacaggcctggtactatatgggttagcatgctggcaagaggaggacagggtgccaagaagagtgctattggtcagcgcattgtggcaactctaccatatatcaagcaagaagttcccatcattattgtgttcagagcattaggtttttgtgtccgacagagatattttagaacatattatttatgattttgaagatccagagatgatgggaaaatggttaaaccttctttcgatgaagctt

SEQ ID NO: 7941 - DNA, 207 bp, Homo sapiens
  misc_feature 149, 159, 172, 177, 193: n = A,T,C or G
cccttagcgtggtcgcggccgaggtacttttttttttttttttttggtggggggcacaccaaccatccaaaaaagttgcttctgtttttactgtagttcaattacaggagttgggtttttccactttttaaagggcattggcttttatntttaactttntgaattttttttnctaantttacctaaaatcttntattttacttaaat

SEQ ID NO: 7942 - DNA, 401 bp, Homo sapiens
ccctttcgagcggccgcccgggcaggtacgcggggaacgccgaggcgcttctgcatctgtgggccgagcattcttcaggtcatctgaaccttctgagaaaacatggtcaacgtcttgaaaggagtgcttatagaatgtgatcctgccatgaagcagtttctgctgtactccccaggaactggggacctacgggatatcggggctggcaaaggcaagtattatgctgttaactacccgctccgagacgggattgatgacgagtcctatgaggccattttcaagccggtcatgtccaaagtaatggagatgttccagcctagtgcggtggtcttacagtgtggctcagactccctatctggggatcggttaggttgcttcaatctaactatcaaaggacaccg

SEQ ID NO: 7943 - DNA, 359 bp, Homo sapiens
  misc_feature 128, 131, 135, 145, 146, 160, 199, 239, 283, 284, 285, 295,298, 326, 335, 336: n = A,T,C or G
ccctttcgagcggccgcccgggcaggtacttcgagtctcccttcaccatttccgacggcatctacggctcaacattttttgtagccacaggcttccacggacttcacgtcattattggctcaactttnctnactntcttgctttnntcccgccaactaantatttcacttttacatccaaacatcaacttttggcttcnaagccgccgcctgatactgacattttgtagatgtgggttngactatttctgtatgtctccatctattgatgagggtcttaatannnaaaaaaaaanatnaaaaaaaagtaccttgggcgcgaccacnctaaggggnngaatttccagcacacttggcggc

SEQ ID NO: 7944 - DNA, 395 bp, Homo sapiens
cccttgagcggccgcccgggcaggtactttgaatatggagtagtttacagctattttttttcttactggtaatcttaactaatatgattcccttattagagagcctctcactcccccaccccgaaaaatgtctactattcatgacagtaaccaattattctggacaaattgcttctttttaatttgagctatctgccatggactttctaaaatggaaacacagcctgagtgtatcttagggagagtttgattgaaaaaatccaaatcactgtccatatagatcatggatataaagagatacctgatttttattaaaaagatactttttcaaatttaagagttaatcttggaaatttggaacaagtaaaggggccaagtaaaccttttgatgaaat

SEQ ID NO: 7945 - DNA, 365 bp, Homo sapiens
  misc_feature 8, 146, 171, 174, 202, 295, 340, 351, 363: n = A,T,C or G
cggccgangtacgcggggtcagtgaatggataatctaatgtgcttctagtaggcacagggctcccaggccaggcctcattctcctctggcctctaatagtcaatgattgtgtagccatgcctatcagtaaaaagatttttgagcanaaaaaaaaaaaaaaaaaaaaaaaangtnctggaaacttcaatgtgttagctgttanaatcgctgttctggcatccatttgcgtaactcaggcatttatgatgtggaagttcattaattttcagcttcgaaggtggagggaacattctgnttttcaggcaccagctgtgaagaagaaaccaaccagtaactaaanggcagatcttntaaaaaaggaanca

SEQ ID NO: 7946 - DNA, 209 bp, Homo sapiens
  misc_feature 114, 128, 151, 152, 164, 175, 208: n = A,T,C or G
cccttagcgtggtcgcggccgaggtacttttttttttttttttttttttttttttttttttatttcaaaataacatttttattatataaaaatgtaaaaatccagcaaaaccanaaataccgaatatntttttctgggctttcacatttgnngatttttattcncgatctttttnaatacaatttacaccctcatccccatttccagnc

SEQ ID NO: 7947 - DNA, 409 bp, Homo sapiens
  misc_feature 239, 294, 344, 354, 376, 377, 381, 394: n = A,T,C or G
agaattcgccctttcgagcggccgcccgggcaggtacactctgagaggtaaaatgctctgggaaatggaacaagaatcgagtggatgctgactctgtgtgcccacctcctcaactgattgatactggttgaccttgggcaaagtcacttctttcaatgcctcagttccccatctgtcaaatggggttaataatactgacctacctcacaggggtgtttgtttgtgaggcattgtaaatnaaagttaaataagaatacttcagggtccttctgtggagggatgtcttggagccanaagtttaagccttgacacacaggcttttggtcctcactgagcctgtcttncaaagaactnggaactaccttggttgaacttnngggnaaaaaattttttnttgccccccccaccc

SEQ ID NO: 7948 - DNA, 402 bp, Homo sapiens
ccctttcgcgcggccgcccgggcaggtaccttatcagttaattggactcttttgatatgttgagaatctgtttacacaagttaactccttgaagaagggggtgggtaaggagtccttaatgtcttacaaatcaagggggccagatggagttcgtccggctttctcagctaagcgagagttttagtcatgtggaaacaaggctaggtgattaagagagcaaaagggagagtctaaaaacagggttagtaaaaacaatgttgggcattacattcaccacccatgttttcggggaatcaaattgttgattcctcagttattaacaagggtgtcatattgagtcttaagatacgtaagtttgacagaagctatgcgttgttttataaaattaagaaacgaatttaa

SEQ ID NO: 7949 - DNA, 370 bp, Homo sapiens
  misc_feature 100, 124, 156, 166, 167, 178, 210, 211, 215, 217, 222, 224,229, 230, 231, 232, 234, 235, 236, 238, 242, 247, 252, 253,255, 256, 257, 259, 266, 277, 279, 291, 297, 316, 336, 357: n = A,T,C or G
ccctttcgagcggccgcccgggcaggtacttttttttttttttttttttggttttttttttttttttttttttttttttatttttttttttttttttttntttttttttttttttttttttttnattttttttattttttttttttaatttggttntaaaaaaaannatttttaaaanaatttttttttttatttttaaaaaaaattttnnaaantnaaaananttttnnnntnnnanaaanaaacntcccnncnnnanaaaaatnattaatttttntntaaaaaaaaaancccccnttaaaaaaatttttttaanataaatttaacccttttttnaaaaaattttttttaaaattntttttttataaaa

SEQ ID NO: 7950 - DNA, 277 bp, Homo sapiens
ccctttcgagcggccgcccgggcaggtacatttattgcaaattatattaaactaaaatgaggggaaatcaaaatatggactgtttactacttgcaaatcaataattttaattttctcactctgataaaaatcagaaagcaacatttataaaattgctaccacatcacttttcatagcagggaaccgaaatctgtacacaataaatagaaaatagggatgcatagtgctggagacattcaaccaacttatcttcatctgttgcctactgttgtagaca

SEQ ID NO: 7951 - DNA, 477 bp, Homo sapiens
  misc_feature 11, 25, 294, 357, 415, 420, 445, 456: n = A,T,C or G
cccttcgagcngccgcccgggcttntacagatgtcaattctcaaattaatctacaaatttaaggtaatcctattcaaatcccaagatagtttttggtggtggctgtttttgagacaaggtctcgctctgttgcccaggctagagtgcagtggtatgaccacagctcactgcatcctcgacctcccaggctcaagcaatcctcccacttcagcctctgaagtctcttatatggtgtccaagaaatggggacaaatctcacaaggggactaggctcgggagggctggaatattcanggaaagtttctttttttttttttttgaggcaaagtctcgctctgcccccaagctggagtgcancggccccatcttggctggctgcatgctccaccttccagggtcaatgccattttcctgntttancctcacaaagtagctgggacgaaanaagcccggcancaaaaccaagttaattttttg

SEQ ID NO: 7952 - DNA, 187 bp, Homo sapiens
  misc_feature 68, 102, 120, 139, 143: n = A,T,C or G
cccttagcgtggtcgcggccgaggtacagtgaaaagagccaaggctgtgtgaccccctcatcacttanccaggcgtatggtcctggtttctgaggcttggcngaaagcaatcttaagcantttggtgtttggggtgggncatnccctgacttatttctaaggcttgggagggttcccctaaaagagg

SEQ ID NO: 7953 - DNA, 300 bp, Homo sapiens
  misc_feature 237: n = A,T,C or G
ccctttcgagcggccgcccgggcaggtaccttaatgaatgcattttatttatctcaatttttatttgcttcaaaatagaattggataagtttaaaatgttcctcttacatttgtgaatgtgtctatgagagaggggccatttctcacatattttaattaacaactaaataaacagacgttgttttaaaggaattaacacttaaatcccaaccatcctcatatagaataaaatatcancctaaatctttactatagatagtataattctattatgtacctcggccgcgaccacgctaaggg

SEQ ID NO: 7954 - DNA, 465 bp, Homo sapiens
  misc_feature 8, 21, 27, 29, 30, 36, 46, 52, 102, 120, 135, 149, 185, 196,205, 222, 265, 271, 282, 318, 322, 375, 407, 426: n = A,T,C or G
attcgccntttcaagcggccncccggncnnggtacntcaccgaacngactcnaattgacattaaaaaggggacaattcctttcaccttggttatcttccccnttcccgggcttggcaacngcccatctggatggnaagaaggaacccanttaattcccaacaattgggaagaaccccggcttggnattgccattgnaagggaagnctgggcccaaagcttcntcttgccggaccgtggaacttttccgccttccttggaagtttncaatanaaccattgggnatgggccaatccattttgtggccttgaccaaagggncttnggtggggaaaaaggttgggaaaacccaaagccttctttgtttccccacctatncaggttgaaggaatggccttggggcaattttnaaccccctttggaacttgncccttttccttaaggaagccttcaattggggaaccccaa

SEQ ID NO: 7955 - DNA, 355 bp, Homo sapiens
  misc_feature 14, 18, 31, 71, 104, 146, 154, 157, 163, 178, 182, 192, 196,197, 202, 215, 232, 254, 261, 263, 266, 274, 297, 302, 304,339, 353: n = A,T,C or G
cggcccgccagtgngganggatatctgcagnaattcgccctttcgagcggcccgcccgggcaggtacgctnggattctcaaacttagttggcctctttttcttntgtcagaggaccattcttagtggcactgggggaaaatcttgncacccagnagnaattcnaactggcgcttcacntgtngaaaaaattnacanntgggncctacaattgggnattttgttagtaggggnagaaaaaggcaagcgccctggntatttgntngangcctggtngcctaattcgaggaaatatttcnttttngnccccccttggaaaattggttgggtcccgattggcncataaaggggaaanga

SEQ ID NO: 7956 - DNA, 244 bp, Homo sapiens
  misc_feature 134, 136, 146, 153, 159, 180, 181, 186, 194, 210: n = A,T,C or G
cccttagcgtggtcgcggccgaggtacatttaatttgagttccaactgttaagcatatttctcagacttaaatttgattatgtccccatcaaaaagaatctccatcttctgaaggtctgttagttaattttganantaatttgttnaaagggnaagtantgtcaatattacctgaggctnncaagnttagtcangcagatgaagtgccantccaaccctttttctgggtatgttaattggtagg

SEQ ID NO: 7957 - DNA, 493 bp, Homo sapiens
  misc_feature 64, 68, 81, 83, 85, 96, 133, 147, 155, 159, 178, 190, 194,195, 210, 222, 224, 225, 230, 242, 255, 270, 275, 281, 289,291, 297, 309, 310, 315, 318, 324, 335, 339, 352, 353, 357,362, 398, 400, 401, 408, 413, 420, 425, 427, 431, 434: n = A,T,C or G
  misc_feature 439, 453, 455, 461, 466, 482, 484: n = A,T,C or G
cccttagcgtggtcgcggccgaggtaccccctcttccagcacccaggccagtattgagatcgantctntctatgaaggaancnanttctatacctncattacccgtgcccggatattgaaagaacctggaatngctgaccctgtttncggtgganaccncctgggtaaccccaatttnaaaagaaaaagncccnntttcagagtatgtcnccaaaatcttantnnctaangttgcagccaanaatgtccaatagnattactctagcttcncctgngatatngggatagngntttttnttaacattcggnnaattnccncactanacggtattttncaantaaaagtcctttnncttntctanaggaaacttttccttttccattattggggtaaaaantnncaaaacnttggnaaaattnaaaancnaagntcnattcntaaaaccccccttngnaatcgnataantcctttggctttagtncntttaattgg

SEQ ID NO: 7958 - DNA, 326 bp, Homo sapiens
  misc_feature 205, 210, 261, 289: n = A,T,C or G
cccttagcgtggtcgcggccgaggtactgcaataatcacagcgtttatccgtgccttgatgtcaaaagttaagagagggtggagaccagacccgaactattgttttctgttcttggggaggaacagcttttggcaatattggctcatatgaatggggagaggatttcaagaaggttcttcaaaaaatgttgtggcttatattaancctcnacagtcccttaagggggaactctagtctgattcctgtaccatcaccatctnttcaccaactggtagtagagaaaaatantttcaactgtacctgcccgggcggccgctcgaaaggg

SEQ ID NO: 7959 - DNA, 502 bp, Homo sapiens
  misc_feature 7, 14, 108, 110, 124, 130, 141, 156, 165, 175, 206, 213,242, 244, 249, 251, 253, 269, 281, 285, 301, 324, 332, 334,338, 340, 342, 345, 349, 363, 371, 374, 377, 386, 390, 402,403, 417, 421, 428, 453, 457, 463, 465, 475, 480, 493: n = A,T,C or G
ccctttngagcggncgcccgggcaggtacaaatgaggaagactacggtgagaaataagaaaggctgctgactttaccatctgaggccacacatctgctgaaaatggananaaatttaaacattnactttnggaaaacaggncaatggatgaccaanttttaaatngtcctataantaaggtgaacattgattttttttgacaacantttttcncaggtccctctttttaaaaattaattcgnancaacnancnaccatgggatatggcnatcaaatattgngganatgccatccaggaaangattctcccttgggtggaagganatatttgncncacngngnctncgancaaatttcttttgngggattcnatntcngtaattagnaagncctctttcgganncctttggattggcncttngggttanccccgggtcattttggttgtaagtngggnaaaagngngaaccaattnttagntaaaaaaatttgnaaaaatttt

SEQ ID NO: 7960 - DNA, 467 bp, Homo sapiens
  misc_feature 455: n = A,T,C or G
cccttagcgtggtcgcggccgaggtacccagtgcatatactctggagaggttctcaaagctggacagtaagtcctctggctcaggaactctgcccctaaagctgggaggaaagctggttgctcctaaacatggcttcctttctagaggctcgggccataaaaatcttatgtctttgggaaaatatccacagtttagctgtggtccacaaagtgactttgtttctttgatcctagtgttacaattagaatgagggttctggagcaagatatattacaccagaaagcatttttcctggctagagaaaccagtatgtttttttttcatttatacccatttacaacacaaataattagcttcttcagtatcataatagatctctaggaaatactttgaagaaaggcaggtccctgaaggtacctgcccgggcggccgctcgaaaggggcgaattccaancacactggcggc

SEQ ID NO: 7961 - DNA, 388 bp, Homo sapiens
ccctttcgagcggccgcccgggcaggtacgcgggagaagcttggaccgcatcctagccgccgactcacacaaggcaggtgggtgaggaaatccagagttgccatggagaaaattccagtgtcagcattcttgctccttgtggccctctcctacactctggccagagataccacagtcaaacctggagccaaaaaggacacaaaggactctcgacccaaactgccccagaccctctccagaggttggggtgaccaactcatctggactcaagacatatgaagaaagctctatataaaatccaagacaagccaaccaaaacccttggatgattatttcatcactttggattgaagtgccccacacaggtcaagccttttaaaagaaaggt

SEQ ID NO: 7962 - DNA, 422 bp, Homo sapiens
  misc_feature 337, 381, 419: n = A,T,C or G
tctgcagaattccgcccttagcgtggtcgcggccgaggtacatttgtaaaccatttactgtctgggcaatagtgactccgtttaataaaagcttccgtagtgcattggtatggattaaatgcataaaatattcttagactcgatgctgtataaaatattatgggaaaaaaaagaaaataccgttattttgcctctaaaacttttattgaagttttatttggcaaaaaaaaaattgaatcttggtcaacatttaaaccaaaagtaaaaaggggaaaaacccaaagttattttgttttgcatgggctaaagccattctgttattctctgtaaatactgnggaattttcttttttaatttttccttcttttaagaattttttgnttaaaaaggaaaatttcttaaaaaatttttttaaaacnacc

SEQ ID NO: 7963 - DNA, 370 bp, Homo sapiens
  misc_feature 7, 9, 304: n = A,T,C or G
cccttantntggtcgcggccgaggtacaaataaatgagtttgcagtgaattgggccttcaaattacctcaagtgacagatagtaagaaaagcttcttgagcaggtggaggtcactgaatcccctactatgcacttatcaagattttacttactttaatttactggaaattgattttttaaaaaatgactacactgtaacaagggaagggatctgggtttttttgttgttttattcttgttttttttaagtagttcaaaattctgaaactgtgatttaaaaattttttacagtcaagcattctgnatttttgaacataactcccttccctttctgcgtaacaaaaggtctctctgttatctcttaaaattt

SEQ ID NO: 7964 - DNA, 308 bp, Homo sapiens
cccttagcgtggtcgcggccgaggtactattcggccagcaacggggagcctgatgaagacgcttatggtaagctcccttccatggcagtatccccaagaagtcgaaacagttacattctttctacagattgtagtatttgattatttttaataaatgtagaatatttgactttaaaatttaaatttccctcaacctacctttatcaacctattagtagtagtaattaacttatctattaactaaccaatggttaatttctgtacctgcccgggcggccgctcgaaagggcgaattccagcacactggc

SEQ ID NO: 7965 - DNA, 115 bp, Homo sapiens
  misc_feature 44: n = A,T,C or G
tcgcccgggcaggtaccagagactcctatttatttataccagtnagggccctcccactgcctttgtctccagttaggtcagctgcatcatcagcatttaaaagcccccaaatatt

SEQ ID NO: 7966 - DNA, 309 bp, Homo sapiens
  misc_feature 44, 56, 138, 148, 154, 164, 167, 168, 171, 172, 175, 177,178, 180, 182, 187, 196, 197, 198, 201, 203, 208, 214, 216,222, 224, 234, 246, 250, 251, 252, 256, 263, 273, 274, 277,285, 287: n = A,T,C or G
ccctttcgagcggccgcccgggcaggtacttttttttttttttnttttttttttcnttttttttttttttttttttttttttttttttttttttttttttttttttttttttttttttttttgggaaaaaaaaaaatnaccttttttncgggtnaaaaaaaggncgnnccnnctngnnananaaaancccaaaatnnnggnantttcncagaantntaaggngngggggggcangttaattttttnaaannntttngccttanaaaaaaactnnttnaacctttntntgaaaaaaaaccctgttttttt

SEQ ID NO: 7967 - DNA, 628 bp, Homo sapiens
  misc_feature 27, 46, 52, 62, 103, 125, 142, 187, 192, 240, 244, 261, 277,339, 342, 350, 388, 411, 428, 429, 438, 450, 461, 482, 489,493, 499, 504, 522, 526, 534, 545, 552, 570, 577, 582, 586,601, 614, 616: n = A,T,C or G
agaattccaacacaatgggcggccgtnctaagtgggatccgagctnggtccnaagcttggcngtaatcattggtcatagctgttttccctgtggtgaaaattngtttatcccgcttcacaatttncaccacaaacataaccnagccccggaaagccattaaaaggttgttaaaagccttggggggtngcctnaaattgaagttgaagccttaaacttcaacaatttaatttggcgttttngcgncttcaaccttgcccccngcttttttccaagttncggggaaaaaccttgttccgtggcccaggccttggcaatttaaaatggaaaatttcgggacncanaacgtccnccgggggggaaggaaggggccggggtttttgccggttnttttggggggccgccttcctttncccggcctttttccttnngcttcaacntggaacttccgnccttgccggcnttccgggttccgtttttccgnggccttngccnggttcnaaagnccggggttatttaaaagntttnaacttttnaaaaaaggggncggggtnaaattaacccgggtttantttccancaagnaaanttccagggggggaantaaaaccgccagngnaaaaagtaaaac

SEQ ID NO: 7968 - DNA, 370 bp, Homo sapiens
  misc_feature 128, 131, 144, 153, 159, 160, 164, 170, 172, 180, 183, 186,187, 188, 189, 190, 194, 196, 197, 205, 209, 214, 223, 224,225, 229, 232, 233, 234, 237, 240, 242, 244, 246, 248, 251,252, 253, 260, 261, 279, 281, 284, 293, 298, 300, 307: n = A,T,C or G
  misc_feature 311, 315, 317, 324, 325, 326, 330, 331, 336, 337, 339, 346,365: n = A,T,C or G
ccctttcgagcggccgcccgggcaggtactttttttttttttttttttttttttcttttttttttttttttttttttttttttttttttttttttttttttttttttttttttttttttttttttttnggnttttaaaaaaaantttttttgnaaaaannaccnttttananaagggttnggnttnnnnntttnannttggaaanaaanggggnttttaaaannntttnaannnaantantngnangnttnnnttttttnncccccatttaagggaacntnggnaaaaaaaanttttncnggttttntttngggncnccttccnnntttnnccctnnanggaaacnatttttttttttttaaggnaaaaa

SEQ ID NO: 7969 - DNA, 116 bp, Homo sapiens
  misc_feature 13, 14, 42, 60, 70, 107: n = A,T,C or G
ccctttcgagcgnncgcccgggcaggtaccgggatcgcaatnacttgtatcatagatacnggatttcttngtaaagcatcctctacctctcagctgctgaaagctanaccttttgg

SEQ ID NO: 7970 - DNA, 287 bp, Homo sapiens
aggtacagattcctctggacagggtccagcagccccagctcctcctcagtgaagaccacagccacatccttgaaggtcagtccctccttgaatgtggtcatttttcctcctgtttctgggaatttgcagagtcctgagttatgccatttgagagaaggcagaatcgtgcctggaacagtggagctttgctttcagtagccaagaagtcagtccgcgcagtcctttttcaggcgtggaatgtgccgtgacaatcgccccccccgcgtacctgcccgggcggccgctcg

SEQ ID NO: 7971 - DNA, 112 bp, Homo sapiens
  misc_feature 63, 94: n = A,T,C or G
cccttagcgtggtcgcggccgaggtacgcaggggagcaagtatttaattggttggacattgcntaaaagaggtccatatccaggctaactctanaaattttattctcaaact

SEQ ID NO: 7972 - DNA, 346 bp, Homo sapiens
ccctttcgagcggccgcccgggcaggtacgcggggggagaatccggttggggtaggagctaaatctcaggaccacttgctctatatatgagtgccaagataatctagagcaggggagagggcagagaggcaggcagcctgctgggctcttcctgctgttgaaaacttacccggcccttacagaggaaatcttcctcctctcttctgccctgaatgttttcccaaacatgaaggtgataagcttattcattttggtgggatttatagggagagttccaaagtttttcaagtgcctcctcttccagtcaactgccagtgggacttctatgccccttggtcagaatgca

SEQ ID NO: 7973 - DNA, 628 bp, Homo sapiens
cgccagtgtgatgggatatctgcagaattcgccctttcgagcggcccgcccgggcaggtacataaatgggacgcgtctggatgaccgaatcattcgcacagactgggacgcaggctttaaggagggcaggcaatacggccgtgggcgatctgggggccaggttcgggatgagtatcggcaggactacgatgctgggagaggaggctatggaaaactggcacagaaccagtgagtggtgagagctctgtcaagtgacaaacactcctttggcctgttgaatttgctgaagaacatcacctaaagtctgcacacgagcccatttttaccaagatttgatcagtgtctttactgagctggaagcctctgaaagttattaaaggacagaatccaaaagaatgcctttaattcttgtcttgagaatcttggccatgtgtcaaattatcaagaacaattttgttaccaggtcagaaattgtgttctttgacaacagattggatctgtaatgttgattagtctttagccataaccactacacttttagaaagacagaaaaatgtaagaatttgttttaccataatgagtcttaagtaggttcatgatctacattgggggcctgggattatttttt

SEQ ID NO: 7974 - DNA, 424 bp, Homo sapiens
  misc_feature 287, 340, 341, 362, 404: n = A,T,C or G
cccttagcgtggtcgcggccgaggtaccttttggctaaagaccagacgaagattcccatcaagcgctcggacatgctgaaggacatcatcaaagaatcactgatgtgtactgaaaggagaagtaactcctgatcatcttatcagaatgagtccagaagaactagcttctaaagagttagctgcttggagacgaagagaaaacagacataccatagaaatgattgagaaagagcagagagaagtggaacgacggtcaatcaccaaaataactcataaaggtgaaatanaaattgagagtgatgccccaatgaaagaacaggaagcagccatggagattcanngaaccagcccgccaataagtnattggagaagccagaaggatctgaaaaacaaaaagaggaggnttgactctattgtctaaaga

SEQ ID NO: 7975 - DNA, 381 bp, Homo sapiens
  misc_feature 302, 364, 365: n = A,T,C or G
ccctttcgagcggccgcccgggcaggtaccttttattcctaaaagaaattacttggccaggtgcagtggctcacgcctataatcctaatgctttgggaggctgaggtggaagccaaggagtttcaggctgcagtgagctatgatcacaccactgtgttccagcctgggagacaaagcaagatcctgtctcttttaaaacaaaaaacaaacaaaccaaaaaaaaaacaaaaaaaaacctaagaaatgtaattaatcattaagtagctgcaaattgaactgttctattttgatacttcctaagnagtgtccagtgtaatcaggatcattttataatgggttatttgaccctagggtgtccttttannaaccaccctgggaaag

SEQ ID NO: 7976 - DNA, 330 bp, Homo sapiens
cccttagcgtggtcgcggccgaggtaccttgtgatgagtgttaataggtgtttttattatacaaagctgaatgtcatttctcgtttgtagctttctgtcactcattccatcttccttcagacatcaccacgttttctctaaagtcagaaaacattccgttttggtctttttcaaaaaggtcccaaatgctgcactctacacatgaaggccctctcacacagacgtgacgtcctgccagaaagagaatgaatgacagaaaaaaaaaagagagacaagctctaggaacaatgccgattcattccacgcagcagtattgggggtggtttcggg

SEQ ID NO: 7977 - DNA, 241 bp, Homo sapiens
  misc_feature 98, 118, 136, 189, 220, 224, 226, 227, 229: n = A,T,C or G
cccttagcgtggtcgcggccgaggtacttttttttctttttttttttttgagacagggtctcactctgtcacccaggctggagacgcagtggcgcacnacatggctccctgttacctnaaccttttaaaactccancaatccctcctgcgacagggatggcagtcaatggtgaatgcttggcctcgctnattactcacctggcagacctttctgaggatnagananntnatctagaaaatg

SEQ ID NO: 7978 - DNA, 373 bp, Homo sapiens
ccctttcgagcggccgcccgggcaggtacttttttttttttttttttttgtatttttagtagagacggggtttcaccatgttggccaggatgatcttgatctcttgacctcatgatccgcccgtcttggcctcccaaagtgctgggatcacaggcgtgagccaccacacctggccctctatttattctctttaaagagagagaaaactatgagaggccaaaattatttaattaaatctttaccttagcacaaggggaaaaaaatgggaatttgcctaatattgggggtgatgaaagcatacacaatggaataggaaacaatcacatttttagtaaaaaggcaaaaaaatttggagacttataagctattattg

SEQ ID NO: 7979 - DNA, 385 bp, Homo sapiens
cccttagcgtggtcgcggccgaggtacatgggactacaggcacgccccaccatgcccagctcatttttgtatttttagtagagacagggtttcaccatgttggccaggatgatcttgatctcttgacctcatgatccgcccctcttggcctcccaaagtgctgggatcacaggcgtgagccaccacacctggccctctatttattctctttaaagagagagaaaactatgagaggccaaaattatttaattaaatctttaccttagcacaaggggaaaaaaatgggaatttgcctaatatagggtgatgaaagccataccacaatggaacaggaaacaaatcaccattttttaagtaaaagggcaaaaaaattttggaggacttt

SEQ ID NO: 7980 - DNA, 345 bp, Homo sapiens
ccctttcgagcggccgcccgggcaggtacccaagcactcactcttgggtgaactaatgcttctggctgcctagcaagtgaagatctgttgagaaactgagaacgctccaagagagaagctgctctcccctccttgaagaagccgcggacacgggaaacccacggcgggcaagggcccagctgtgtgctcctttcctgtcatggcatctgctgatttgaaactccatgacgaacacgttgaactaaacatttttatttaaatttgtatcatgttcatagttgctctcttgttgagagagtcatctgtcctgtttgttaggggtattttttcttgttaaaatgtatc

SEQ ID NO: 7981 - DNA, 396 bp, Homo sapiens
  misc_feature 14, 133, 138, 141, 142, 145, 163, 173, 175, 176, 184, 187,227, 245, 249, 253, 266, 276, 277, 289, 291, 308, 313, 319,324, 346, 356, 360, 362, 366, 379, 387: n = A,T,C or G
ccctttcgagcggncgcccgggcaggtacttttttttggtttttttttttgtatgttggaacgtgccccagaatgaggcagttggcaaacttctcaggacaatgaatccttcccgttttttctttttatgccnacaanaannggnaattggtttttttactancctggctttngnnctttaatnttnaagaaaataaatttttaagaaaagaaaccaaataagccanaaagggccttggtttatntttncccntaaaatttttatnggggcaattnnaaaacccccccncncccttttgggtttcccnaaaanaattgnaaaangaaccgggggctatttcaaccngtaaaagacnaagnantttnccaaaaaaaaagnggaaaaanaagcccttt

SEQ ID NO: 7982 - DNA, 447 bp, Homo sapiens
ccctttcgagcggccgcccgggcaggtactgcaaggactaacagaaacaggaaaaatcctactaaaaatatttgttgatgggaaatcattgtgaaagcaaacctccaaatattcatttgtaagcccgtaagaggataagcacaaccatatgggaggagataaccagtctctcccttcatatatattcttttttatttcttggttatacccttcccaaaacaggagaccattcaacagttagttttagaatgggcccattcttcccaacattttaaaaaaaaaaactggcaccccccccccaatgggggtggaaaccaaaaggttaaaaaggaagttagttaaacccttaaagaagttttccaaagccttggaagttaaaagccccaccttggtggggaaggcccctttaaaagttggggtggaaggggtccttttcccaaatttttc

SEQ ID NO: 7983 - DNA, 397 bp, Homo sapiens
  misc_feature 282, 350: n = A,T,C or G
cccttagcgtggtcgcggccgaggtactcacagcttatgcatacaggaatcccaaaattggatactgccaggcaatgaatattttgacttcagtgctgcttctatatgcaaaagaggaagaagctttttggcttctggtttgctgtatgtgaacgaatgttgcctgattattttaatcgtcgaattattggtgccttggtggatcaggcagtctttgaagaacttatcaagggatcaccttcctcagctgacagaacacatgactgatatgacattcttttnctcagtttctctctctaggtttttcacactttttatttaagtgtgctacctattgaaaagtgcagtgnaatgtggttggaactgtttcttctatgaatggaaataaagggccatt

SEQ ID NO: 7984 - DNA, 403 bp, Homo sapiens
  misc_feature 286: n = A,T,C or G
cccttagcgtggtcgcggccgaggtactattagtatcattttacagatgaaattgagacctaaaacagagcagcaatttgggttaacagaaatagagctccactgagaattaggagacctgaatttcttgtcttgacctgcaagctgtgggaaagtctttaactcctctattgctattattaaataccagtaacaacttctcggcttacttcacaaagctcttgtgatgatcaaatgaaataatgtgaaaccggtttataaacctagagtattaatgttattccgnggaaaattacataaacacaaatatctttggaaaggtaatttaaacaaagttgtagaaaagataaaataacattatgctaagtcctttcatgttttttcattgtccttatttatatta

SEQ ID NO: 7985 - DNA, 187 bp, Homo sapiens
  misc_feature 141, 156: n = A,T,C or G
cccttagcgtggtcgcggccgaggtactttttattgcatggtgtgaactaagttattgctgcataaatttgtaatatatcctgtttgtatttttttccaagtgtataatgttggtgtggagttttcatgacagaaatatgncacattttgtaaatnttgtacctgcccgggcggcccgctcgaaagg

SEQ ID NO: 7986 - DNA, 377 bp, Homo sapiens
  misc_feature 314: n = A,T,C or G
cccttagcgtggtcgcggccgaggtacagagcctagagcaggaagtggctcaagaagaaggaacgagccaggccctgagagaggaggcccagcgaagggattcagccctgcagcagctgcgcacagccgtgaaggagctttcagtgcaaaaccaggacttgattgagaagaatctgacactccaggaacacctgcgccaggcccaaccagggtctccaccttcaccagacacggcccagctggcacttgagctgcaccaggagttggccagttgccttcaagatctgcaggctgtctgtagcattgtgacccanagggcccagggccattgaccccaatctctccctgctcctgggcattcactcacagcacccaga

SEQ ID NO: 7987 - DNA, 227 bp, Homo sapiens
ccctttcgagcggccgcccgggcaggtacatggataggtcccttgtaagccgaaggttgagaggcaagctgaacatgagctaggtgagatcactcaagggttataagatagtggctactgtggggttgagagtggaacagtgtcccggcgggatcctgggacatacaaaggacactaaaaaaaaaaaaaaaaaaaaaaaagtacctcggccgcgaccacgctaaggg

SEQ ID NO: 7988 - DNA, 167 bp, Homo sapiens
  misc_feature 90: n = A,T,C or G
cccttagcgtggtcgcggccgaggtaccgggttaaaaagtattgttaactctcttttccggctggaaccatggagggtgttgaagagaanaagaaggttcctgctgtgccagaaacccttaagaaaaagtgaaggaatttcacagagctgaagatcaagcgcctgag

SEQ ID NO: 7989 - DNA, 580 bp, Homo sapiens
  misc_feature 534: n = A,T,C or G
ccctttcgagcggccgcccgggcaggtacctaatgttttcattgtgtcattgaaactatagctgactggtatgtatactaagtgttcgttgatctaaaccagatataagtcattgacttttctgaaacttagttgtgtcagagatgaaccacctgctcactgaaccgtcttagtaaccagtgatgaagcatataattctaatgttggcaataggacattgctaacagtgcgtttaactgcaatattttaactacagtaatttttctgtttatttctctatccactcagtagaatttgtggttgaattccaccttcgctgccatagttttttaccacattcctaatggttttcaacctctatactgtagtagaaaattcatctaactactgaatttaattttaagcataatactggatcaaattgtttgaattttcattcctgtcatttttgatttttaaaaaatgaaacaaaactaaacaacaaaaccctaggaaaagaatggcttctttccaactagtcaaattaaaaccgtncagtatcttccccaaataaagccttaaggtttcttttaaccctctt

SEQ ID NO: 7990 - DNA, 368 bp, Homo sapiens
ccctttcgagcggccgcccgggcaggtacctttctctccatatgctcttacgggcttggctaacagagagccaatataaaactcatcagagagctaccattttaagtggaaatggtagcaacggattatttttaaatggacacctctttaaatttatgcctgaggttgtaattttttgaatttttgtaatcagaccttgacgatgaccgtgagcagtaagatataaataactcccacatgcttagcgttccaataatggaacactacacatacatggctagggttcaaaagaaacttgctctgttacaggggattacctaagaaaggactcttctgcaggttcaatttgtaaaaatttagcagcaata

SEQ ID NO: 7991 - DNA, 114 bp, Homo sapiens
gatatctgcagaattcgccctttcgagcggcccgcccgggcaggtacagtcatggatggcacactgtggggggtgtcctgtgcacccccagtgggtgctacagctgcccattgc

SEQ ID NO: 7992 - DNA, 383 bp, Homo sapiens
ccctttcgagcggccgcccgggcaggtaccgtgtgactgtgccgctgatgggggctgtgtccgacctgtgcgaggctctctccaggctgtctggcattgctgcagaaaatatggtggtcgcagatgtgtataatcaccgattccacaaaattttccaaatggatgaaggtttaaaccacatcatgcctcgggatgacattttcgtgtacgcgggatgttaatggagagaaaaagcacatgtattgtagagacaccaatattagctaatgtattttggagtgttttccattttacagtttatattccagcactcaaaactcagggccaagttttaacaaaagaggtatgtaagtcacagtaaatactaagatggcatttctatc

SEQ ID NO: 7993 - DNA, 366 bp, Homo sapiens
cccttagcgtggtcgcggccgaggtacccttgagacctggaaccagagccacaggccccttttgtgggttcctctgtgctctgaatgggagccagaattcactaggaggtcatcaaccgatggtcctcacaagcctcttctgaagatggaaggccttttgcccgttgaggtagaggggaaggaaatctcctcttttgtactttcctttaggatttactttttgaggaatggagataatacatgtaaatctttcagagtggtttttaatagacaatacataatggctatcattaaccacaatggttcaggtatgtgtgttttcttgtgggacccatcagggttttccaaagattcctgcctgtacct

SEQ ID NO: 7994 - DNA, 387 bp, Homo sapiens
cccttagcgtggtcgcggccgaggtacattttcaaagcctcggattgtttatcttgcaaggagagaaggggcctcttctccacagatgcagctcaaattagcaaaactgaactgtagagtttcaggccttttcccttccttaaaaatgcttgatagaatttctagaccagactttgatatttattggcttcttggtcttgctgtttaaacacacccattgccctttctttcttaggccctgtaagcaaagctggagtagcgtcttgggaaaaggccaactgaccaccctaatttttgtcgttccaagtctgcagagcgcacatattaagtaagtttgttaactgacatctttaggctccggtgagtgaaatgccagcaagcctgccc

SEQ ID NO: 7995 - DNA, 346 bp, Homo sapiens
cccttagcgtggtcgcggccgaggtacttaaaaaagcatttattactagaagactgaatgagattaacttaaaaaaattaataatatttcagttagataacttgaaaacaagggccccaaatggtaatcttttaagataatttggaaagtagggtttatcgattgacatgacatatcagcctcactaacacccaagcataacaccgtcttttcaaaataatcagtaattcatatgtaaatagcaacacaagctagtaatttccttactaaaagtgatatgcttgtgccctctggtggtaacatttagcatattcccctgatattgcatatattgggaaatataaaa

SEQ ID NO: 7996 - DNA, 340 bp, Homo sapiens
  misc_feature 37, 216, 290: n = A,T,C or G
cccttagcgtggtcgcggccgaggtacacctttccantttcgagcttcttctccagttgaagagctgcttactatggaagatgaaggaaattctgacatgttagtggtgaccacaaaagcaggccttctttgagttgaaaattgagaaaaccatgaaagaaaaagaagagctgttaaagttaattgccgttctggaaaaagaaacagcacaacttngagaacaagttgggagaatggaaagagaacttaaccatgagaaaagaaaggatgtgacccaacttgcaagcagnaacaaaaaggggtcttactggaagtaaccacaaaagctttaaaaaatggg

SEQ ID NO: 7997 - DNA, 411 bp, Homo sapiens
  misc_feature 315: n = A,T,C or G
cccttagcgtggtcgcggccgaggtaccacaacctctgcctcctgggttcaagtgatcctcctacctcagcctcctgagtagctgggattacaggcacctgccaccacacctggttaattttttgtattgttagtagagatggggtttcactatgttggtcagggtggtctcgaactcctgattacaagtgattcacctgccttggcctcccgagccttaacccttttgattccctgacatcaaatgctactcctcttggatagttatactgtgagaagttggtgacgggcaaaacgggagcccaggccagtgtnagaaactcacccagagtcgcagggacaaaagctgttgtgtgggttctttccctgtgagaatctttaaggatggaaaatggtgagcacaaacctttg

SEQ ID NO: 7998 - DNA, 361 bp, Homo sapiens
  misc_feature 122, 126, 134, 144, 154, 174, 282, 319, 328, 332, 339, 353: n = A,T,C or G
ccctttcgagcggccgcccgggcaggtaccactgcactccagcctgggtgacagagtgagactctgtctccaaaaaaaaactttgcttgtatattatttttgccttacagtggatcattctngtangaaagggncaattaagantttttttatnaaaaatgtgtcatgccagtngagaggatgttatatttcttttttctcattacttccccacccaaaaataagctaccatataagcttataagtctcaaatttttgcctttttactaaaatgtgatttgnttctattcatatgtgtatgcttcatcacctatattangcaaatttnccanttttttnttcccttgtgctanaggtaaaa

SEQ ID NO: 7999 - DNA, 209 bp, Homo sapiens
  misc_feature 96, 125, 134, 135, 143, 155, 159, 175: n = A,T,C or G
cccttagcgtggtcgcggccgaggtacgcggggctcattactcagttgtgagggggaaggtagactctttccagacctttgataaaggggctgctnaaaaaagccacgaccttgggccctgtganaaaaccatnngctttaanttaagtgagggngcanatatataaaaaacctnatccctctttctaatctcttatgtcctgcgagtg

SEQ ID NO: 8000 - DNA, 415 bp, Homo sapiens
ccctttcgagcggccgcccgggcaggtacatggcatactatgaaagcaaacactaaaccataccttcactgcccccatcttgttccaggcctgatagaccacgtccctacacatattcacatttgggaaatcattctcagtcacagtgcatcaagtccagatcacagcggcgggctttgctctcacagtctgtggcatatgtctctcctgggatccacacagccgaccactgaacaacgatgaagggggctttcgtgggaaagttcttctcactatgcctttccacaggcgacgcagggtcacatctcaatacaatttccgtcctattctatgatacactattatccactcaagaatattagtgccagattcagaacttcctcacgagctggttccaagccctttggacctgaag

SEQ ID NO: 8001 - DNA, 263 bp, Homo sapiens
cccttagcgtggtcgcggccgaggtacagttagaaagtgtatggataaaaattcctggaagcaagtcttttttattgacggaataaacacaacattgatggtagtaggatagagttggtggcaatgtcctgtcactgcaatttattgacattcaaatcaagacctacataactgtggctgcttttgattctttcaactttgaattttgattatctgtacctgcccgggcggccgctcgaaagggcgaattccagcacactggc

SEQ ID NO: 8002 - DNA, 401 bp, Homo sapiens
  misc_feature 12, 13, 14, 56, 59, 120, 124, 372: n = A,T,C or G
ccctttcgagcnnncgcccgggcaggtacttttttttttttttttttttttttctnagnggggagaaacttttatttccaggacacgtgtgcagaagcaacaagtcaaaattaaccattntatntgaaagagaagaaacatgtactactaattctacaatgcctttctctttagtcagtattaaaaatcttttttaaagtattggtatgaaaacaaatttttgttgccctgataatggaattttaaaactacccacagtttaagagaaaacataacttggtaaaaaaggtagccaataaaaccacaatttgaaattgataccattttctactcacaatggatgatgaaaaatttcacctttaaatgggtcanaagttgtctttgacatttaccatgaaaaa

SEQ ID NO: 8003 - DNA, 365 bp, Homo sapiens
ccctttcgagcggccgcccgggcaggtacagaaatttaagctcacatgtatttgacaaatatagtttagtagactagctctatgtgcttttcactttcctctgattttctctccctgattcattattatctgtgcagctcacagtttttttttgtatacagctcacagttctcaaattttcgttacccatgggcttctgttgtcccatgttctctccagttaagatctaatttaaaattcattggattgaaatttattgaatataattcagcttttgtaactaggtagacttttcttatagtttaagttttaatatagtttagggtattactggctttttcccaggtgacacactaagggactgt

SEQ ID NO: 8004 - DNA, 416 bp, Homo sapiens
  misc_feature 52, 99, 101, 104, 107, 108, 109, 120, 121, 123, 128, 135,137, 139, 140, 142, 153, 154, 155, 168, 169, 170, 176, 177,178, 191, 200, 205, 208, 224, 262, 298, 318, 321, 326, 327,338, 356, 357, 363, 380, 386, 393, 397, 403, 410: n = A,T,C or G
ccctttcgagcggccgcccgggcaggtactttttttttttttttttttttgnttttttttttttttttttttttttttttttttttttttttaaaaaangnggnccnnngggggaaaaannanttttnggggggnanannanccccccctgannnaaaaaaccaaaannntttttnnnggggattaaaaanggggggggnttttntanaaacagggtttttttnttaaaaaaaaaaaaaaatttttttttaaaagggggggnaaaaaaggggtaaaaaaaaaaaaaaaaaaaatttcnttttttaaaaaaaaaaaaanggnccccnnataaaaaatanatttaaaaaaacccttcnntaaaangggggtttttttttttntaaaanggggggncccnaatttnttttttntttttt

SEQ ID NO: 8005 - DNA, 590 bp, Homo sapiens
  misc_feature 296, 321, 345, 388, 419, 428, 456, 466, 475, 504, 509, 543,553, 555, 564: n = A,T,C or G
cccttagcgtggtcgcggccgaggtacacccaaggattctgttctgcaactccatcctcctgtgtcactgaatatcaactctgaaagagcaaacctaacaggagaaaggacaaccaggatgaggatgtcaccaactgaattaaacttaagtccagaagcctcctgttggccttggaatatggccaaggctctctctgtccctgtaaaagagaggggcaaatagtctccaagagaacgccctcatgctcagcacatatttgcatgggaagggggagatgggtgggaggagatgaaantatcacgcttttcttattccttttnattccttttaaaatggtatgccancttatgtatttacagggtggcccaaatagaacaagatgcactngctgtgattttaagacaagctgtataaacangaactccantgcaggagggaggggccgggcccagganaattcttcgnttgtccaanacagggggccttaaggaggggtctccacncttgnttgctaaggggcttgttgcaattttttttattantttgaaaagngnaaaggcctnttcttaactttttttccctttggggc

SEQ ID NO: 8006 - DNA, 329 bp, Homo sapiens
  misc_feature 28, 37, 44, 45, 48, 55, 67, 68, 73, 75, 78, 80, 82, 91, 98,102, 107, 133, 146, 150, 161, 180, 181, 199, 203, 210, 242,244, 258, 273, 312, 313: n = A,T,C or G
cccttagcgtggtcgcggccgaggtacntaagagtangagacannatnccactanataattagcatnncaagngnganantnagataaagnacttttnccancacantaaaacatacaagtgaagagcaaganaaaaggtcatatngatnatattctgctnctcacagcttttgacacanncaaacatctattgacaangtantttgggntcaaaaacatttcaaaagaaaagatccttggnangacaagggtcaccncacttgtgaactttnaaaccattggggggggtcacaacaacaattgaccggaannaaagtttgttccaaat

SEQ ID NO: 8007 - DNA, 374 bp, Homo sapiens
  misc_feature 69, 100, 118, 131, 234, 265, 267, 268, 318: n = A,T,C or G
cccttagcgtggtcgcggccgaggtacaaaacacaaccgaggagcgtatacagttgaaaacatttttgntttgattggaaggcaaattattttatattantattaaaaatcaaacccntatgtttcttttnaaatgaatcttcccaaagtggattattattaagcaggtattagatttaggaaaacctttccatttcttaaagtattatcaagtgtcaagatcagcaagtgttncttaagtcaaacaggttttttttgttgctgngnnttgctttgtttccttttttagaaagttctagaaaataggaaaacgaaaanatttcattggagatgagttagtgcatttaatttattttttttaaaaaaaccttttt

SEQ ID NO: 8008 - DNA, 220 bp, Homo sapiens
  misc_feature 44, 49, 52, 79, 121, 123, 144, 189, 208: n = A,T,C or G
ccctttcgagcggccgcccgggcaggtacatactgttaactatnaatanttnctactaacacatgatttcatttcactngcagcaggcatacttgcctgttcctaaattcattcttgggtngncgggccatgaggggacaaatnaccagtgggttttggctctgttgatgcctatttttttccaaatgntttttatgtttttgtgtgnctttaaaaaatt

SEQ ID NO: 8009 - DNA, 269 bp, Homo sapiens
  misc_feature 95, 111, 137, 138, 140, 222: n = A,T,C or G
cccttagcgtggtcgcggccgaggtacttttttttttttttttttttgagatggagtctcgctctgttgcccaggctggagtgcagtggtgcganctcagctcactgcatnctctgcctcccgggttcaagcaattnncntgccttcagccctcccaagtaatttagggattacaggcaccttgccaccatgccttggctaatttttttgaaatttattaantaatagacggggggtttcactattgttggctacggctggttcttgaa

SEQ ID NO: 8010 - DNA, 378 bp, Homo sapiens
  misc_feature 70, 100, 134, 138, 141, 374: n = A,T,C or G
cccttagcgtggtcgcggccgaggtacatactatgttcatgatagtgtgatttttttcacatttaagcangaatgcaatataaaaatgtgaatctcttanttctcagccatgtgcttattatatttctttttanaatnggntatctgtattaacacacacacacacacctaagagtctctatttcacaattatatttttgtaaatagtatatgcatttttaatacattggaggctttattttgaactaatttcttagggaatagttatattttctattacacaagtttaaaaatattattaacttgtattttcttaatatacaatctatcttttccacaaatatgagtgggaaataaatcagcacatttgaaanaaag

SEQ ID NO: 8011 - DNA, 404 bp, Homo sapiens
  misc_feature 236, 286, 389: n = A,T,C or G
cccttagcgtggtcgcggccgaggtacatttcaaaatataaaaatatattacaaatctgctgaattatttacaagcaatgttctattatctctatgcaacatttgtttaatacaatactaacaagttacacatatttccatttctgtaagttaaaaaaaatcgatatggcttcttgcttaccaagcaagaaagtgattttattttccttttcaagaccaactttggtgcataaaangattcagtttgaagatacttgtaaaaaaaatacagtttttcttacattangaaaaaacaactcaaaaaccaaatgatttcctcagaaaaaaaattagagtcatataggttaaatgaaaatatgaagattattcaaataatttgaaaggttttncaaaaaccgttaaca

SEQ ID NO: 8012 - DNA, 232 bp, Homo sapiens
  misc_feature 42, 52, 54, 60, 102, 133, 141, 150, 156, 160, 168, 182, 184,190, 206, 220: n = A,T,C or G
ccctttcgagcggccgcccgggcaggtactttttttttatanctggaaccananccacangcccctttttgtgggttcctctgtgctctgaatgggagccanaattcactaggaggtcattaaaccgatggtncttacaancctcttctnaagatngaangccttttncccgtttgaggtanangggaangaaatctcctcttttntacctttcctttangatttacttttt

SEQ ID NO: 8013 - DNA, 216 bp, Homo sapiens
cccttagcgtggtcgcggccgaggtactaattcaatcaaaatatttaaaacatttttaatatggaaactgaggctttttcactctaagaatctgcctccaaattcaagctgaagatttggatacactgtgattctgaataaacagtcaagaaacacaacatcaaacaataaaagcttttagccaaatgtacctgcccgggcggccgctcgaaaggg

SEQ ID NO: 8014 - DNA, 368 bp, Homo sapiens
  misc_feature 1, 12, 35, 152, 155, 206, 225, 230, 246, 260, 261, 268, 272,277, 280, 281, 282, 288, 300, 306, 309, 327, 331, 337, 342,368: n = A,T,C or G
ngccctttcganttgccgcccgggcaggtactttntttttttttttttttttttttttaaaagaatgagaaaaccatttttatattgatataaaatgatctccaggatatattaaatgggggaaaaaaaaaacatgcagagacagtctatanagnatgctgccatacttcaaaaaagggaaaaataactttttgctcatatatgcncttttttaaaaaatcactnaatgnattatcacactggctncttcttcttccttnntcccccntttnttttntannnctcctnccttctttcctnctttcnttnctttccccaaaaaaaaancccnctggtnttttnaagaaaaaaataaaaggaaaaaaatn

SEQ ID NO: 8015 - DNA, 280 bp, Homo sapiens
  misc_feature 150: n = A,T,C or G
ccctttcgagcggccgcccgggcaggtaccattggtggccaattgatttgatggtaagggagggatcgttgacctcgtctgttatgtaaaggatgcgtagggatgggagggcgatgaggactaggatgatggcgggccaggatagttcanaccggtttctatttccctgagcgtctgagatgttaggtattaagttagtttttgtttgctgagtgttattgaaaaaaggggcattacaaggactagggaagcacgataaggaaaaatgattatgagggcc

SEQ ID NO: 8016 - DNA, 372 bp, Homo sapiens
  misc_feature 282, 368: n = A,T,C or G
ccctttcgagcggccgcccgggcaggtactaatgaaaaatacctaaactgtggggaataagaattaaatctatttcaagcacatgcaacttggaactcgcaaaaaaaaaaaaaaaagaaagaaagaaagaaagaaaaaagagtttgggagggcccttaactaaaatgtgcttaagacagcttcatgagagagctgccttctttcaaatttgaattttgaacaagggcaaaaataacaattaggtgatatatttccctgcagcatgggaggtaagttaacttncccccagggcaaaaatgatctcaaataaatccatttattttatttaaatggaaaagggagggaagggccaaaatttgggtggaaanttaa

SEQ ID NO: 8017 - DNA, 376 bp, Homo sapiens
  misc_feature 68, 104, 107, 111, 116, 129, 131, 137, 142, 144, 147, 153,154, 161, 164, 168, 170, 171, 173, 176, 184, 186, 189, 190,194, 195, 198, 200, 202, 208, 212, 213, 214, 221, 226, 242,249, 255, 257, 262, 263, 264, 278, 283, 287, 297, 306: n = A,T,C or G
  misc_feature 316, 319, 320, 321, 322, 331, 338, 342, 353, 356, 362, 363,365: n = A,T,C or G
ccctttcgagcggccgcccgggcaggtactttttttttttttttttttttttttttttttttttttanttttttttttttttttttttttttttttttttaaanccncaanttttnccaattttttttntncaaaanaattncnatntaaaanntgggaantgntttncnntnccncccccccnanttnngaannttncnancccatntttnnnatttggnggggnagggttaaaaattacnttaaccncccttntnaaaannngaattttttttttnaaaanattnaaaatttgantgccagggntttttaaaantgnnnnccccccttnaaaaccngggnaaaataaaaanggncttttnnanttttttaaaaa

SEQ ID NO: 8018 - DNA, 357 bp, Homo sapiens
  misc_feature 14: n = A,T,C or G
ccctttcgagcggncgcccgggcaggtacgtgggacctgccacaggaagaactgggagatcaatacatggccactgccaaacactggtcctctcctcagggccacatccccaaaccagaccctcctaccttccaagccaggcaggtagaaacttctgcagcattgtagagcaatctagccctcctctcttagtcccacattcaaaatgttcccaggtttagcccattcactgtgtaggctcttccctcccatgcccctggccctggttcaggtcctcaggaccatgcagccagaccacaagcagtcacttcttatccaggatttaagcagcccagctccacagaccatgttaatccc

SEQ ID NO: 8019 - DNA, 381 bp, Homo sapiens
  misc_feature 130, 133, 142, 149, 152, 170, 180, 191, 235, 334, 364, 371: n = A,T,C or G
cccttagcgtggtcgcggccgaggtacccatcacgggtgtttgtgggagataccttctgttactttgctggcatgacctttgccgtggtgggcatcttgggacacttcagcaagaccatgctactattcnttnatcccccangttgttnaantttcctctacttcactgncctcaagctncctgcatattnatcccctggccctcgccaccgcattacccagactcaatatcaangacaggcaaactggagatgagctattccaagtttcaagaccaagagcctctctttcttgggcacctttatttttaaaaggtggcaagagagcctccagnctggtgacagtaccttgccccgggccggcncgctcgnaaagggccga

SEQ ID NO: 8020 - DNA, 358 bp, Homo sapiens
  misc_feature 148, 195, 203, 206, 214, 229, 277, 292, 306, 312, 314, 332: n = A,T,C or G
aggtacgcgggtggccctgggaatcaattcctcaggaattgccctcaagaactctgcttcttgctttgcagagtgccatggtcatgtcattctgaggtcacataacacataaaattagtttctatgagtgtataccatttaaagaatntttttttttcagtaaaaaggggaattatttacaattgttgggaaggnagagaatnagnttataagngggagctggtatttntcaaaaccgatggtccaagattttcaaaaaatcctattgattagtggntcattttttaatcanttgcacatcgtgtngctttngnatttcattcccaggttgntttatagcaccttttcccacaagttt

SEQ ID NO: 8021 - DNA, 421 bp, Homo sapiens
  misc_feature 279, 327, 340, 357: n = A,T,C or G
ccctttcgagcggccgcccgggcaggtactctcagagaacaggagatatgtgtgcatgccttagaaaaagcccttgagtaggtaaggaaggaagaaacctatgggcagacaggattgctgcagccaagggggcttcaaagcagaaatgaaagagatggcttgtgaaagctgcccgtgtcgtgtgggagtcgcatggcttctgcgagaaaagtgatttaggcagacgggaggttttttttctcaatcagaaggctttcaagtaaactcttgcttgatgcnacaggagaaaagaagacctttccttcaagcccttggccaagggcttancaaaggaagcccnaaacctggtttaagttngccaaaaaaaaaaagggacctttttaaaattaccaaaaaatttttcttttattttcccaagaaa

SEQ ID NO: 8022 - DNA, 394 bp, Homo sapiens
  misc_feature 53, 195: n = A,T,C or G
ccctttcgagcggccgcccgggcaggtacttctgaccttgggtttgtttttgntttgttttgtttttcctgttaggatttatttggggacttttggtagtttaaactctttaaccttttccttgccgtgtatgaggaaagctaaagctgttatcaacttcttattctacgatactaacacgggttttcagtgttngtttcgtttttattattattattaattttgccgtgatgcgaataccctctcccatcaatatttggtattatggtgctatatattggtaatgatcctttaatattggggaaggggatttttaaaaatactgtgaattaaaactggggttttcttcctttgatttttcattattttttaaaataaagccacaggtcatttt

SEQ ID NO: 8023 - DNA, 381 bp, Homo sapiens
cccttagcgtggtcgcggccgaggtacaagtgtcacagaaagtgaggttgcacgagccagaaatcttctgaaaacaaacatgttgttgcagcttgatggttcaactccaatttgtgaaagatattgggtagggcaaatgttatgctataatagaaggattcccatccctgagcttgaagcaagaattgatgctgtgaatgctgagacaattcgagaagtatgtactcttaaaaatctgttaagagagtggatctcattttaagggttcttaccacaataaaattaaatttttgaaataaatcagtcatatttgagtgaaatgaaacctttccgaagtagtttcagacaattgataataccctagtttacagttcctgtagt

SEQ ID NO: 8024 - DNA, 405 bp, Homo sapiens
  misc_feature 327: n = A,T,C or G
ccctttcgagcggccgcccgggcaggtacaaatgcagaaatgcagtaactgcctttaaaagaaatgccaaagaaatgttatcttttaacaaaacatgtatttatattacagcagttttactacagggacacgggtataaaaaaagaaaattagcacactacatataaatatgtataagaaaaatacctcttacttaaatttgtatgaaaacaggactgctccaaatatttttaaaaaaatttctccaataggtgatatgtaagtgtttaaaactcagctaagtgctttgcttttatttaaaagtttatttctaaaaggggagaagtnaaataaaaatattaagtattaggttcttaatttagagcattgggcgagggtctaagaagattcaatctgtaaaaagtt

SEQ ID NO: 8025 - DNA, 208 bp, Homo sapiens
  misc_feature 29, 33, 39, 43, 45, 47, 53, 65, 79, 103, 108, 110, 138, 139,164, 199: n = A,T,C or G
cccttagcgtggtcgcggccgaggtactncggncggtgncagnancncgtggnattgaacattgnaatgtggagcccanaccacataaaatggggtgaaattngcaancntttctattaacttatgttggcaattttnnccaccaacagtaatgctggcccttntaataaaagaaaattgaaaggtttctcactaaacngaattaaat

SEQ ID NO: 8026 - DNA, 303 bp, Homo sapiens
cccttagcgtggtcgcggccgaggtactactgcttattttcctcctggagccactttaaataacaaagagaaaaacagtattttgtttctcaactcattggatgctaaagaaatatatttggaagtaatacataatcttcccagatttttggactactttcggcaacacactagaggatcgtttggctcatcatcggtggctgttattttttcattttggaaaaaatgaaaattcaaatgatcctgagctgaaaaaactaaaaactctacttaaaaatgatcatattcaagttgggcaggttc

SEQ ID NO: 8027 - DNA, 400 bp, Homo sapiens
ccctttcgagcggccgcccgggcaggtaccagcggtggggataatttggggtcatcttagagttcttccattacacgggaattctcagctcaccaaatctgggattccgcatctggccattccttaagctgaaggcctggcatatttttgagtgtccatttggatcagctaataaacccagggtttgtctactggctggaggagtaagaactataaggctaattgaaatgaatctacttaaaatagtgacctgatttttctaataattactggaaggtaagggttgattgagactttaaaataaaaccaaaaattattctaaatttttcatattttatataagaaagttttgatttttactgcaaccattttctaactcttaaaataaagaaaggataat

SEQ ID NO: 8028 - DNA, 371 bp, Homo sapiens
  misc_feature 83, 222, 245, 282, 306, 324, 346: n = A,T,C or G
cccttagcgtggtcgcggccgaggtacttttttttttttttttcttttttttttttactttacgttctgggatacatgtgcanaatgtgtgggtttggtacacaggtataccgtgtgccatagtggtttgcttgcacctatcaacccatcatctaggttttaagtcccacatgcattaggtatttgtcctaatgctctccctcccctgttctcccacccccngaatcacttattttaaaagtcancaataaaaataaattgaaactaaatcaaataaatttnatactatagaggaacaaaataatnacaaccgtaatatattangtaaaagaaaataataataatnaaaggagaataaaagccacttttgg

SEQ ID NO: 8029 - DNA, 407 bp, Homo sapiens
ccctttcgagcggccgcccgggcaggtacgaattctacctagcaatataggtttcttatcaacataccttttttcctcactggtttcaaactgacaaaggtgtagggagaaaataattgaatggtttctgaaggccacactagccctttagccaagagttctgcttctgaattacatagaacatcttggtccacagacaatggaatggatttttggagagagtgtcaatttagggctaaagaaatacagggtgagaatgaagccctcaacaaaagctccaaaagggcacagaaactggtaagtgacctaaatatggagagacaggtgaggagaaaatacatagtaaatgctggctcgttattgcattttattctctcccttctctcatccattcatcttcttaagac

SEQ ID NO: 8030 - DNA, 358 bp, Homo sapiens
  misc_feature 113, 135, 241, 253, 260, 302, 307, 350, 358: n = A,T,C or G
cccttagcgtggtcgcggccgaggtactttttttttttttttttttttttttgggaactagggtttattttagcaaagaaaacacgtaagagccacactggtagtcccagganaggcccagcagcaaatgctganaaaagccagtggctttttgcacagcctgcccatggtggaggggagcacctgagctggctcctgggcccacagctgtgcctgggaatagtccaggctgtgcctgcantaggagctgctncaagcanaccctgaggtaagggcacatatcccaaaatgctgcttgcttnaaaanaggcacccctcggtgcctgcctccttttgagggcttggccagnttcctttn

SEQ ID NO: 8031 - DNA, 495 bp, Homo sapiens
  misc_feature 43, 97, 134, 137, 147, 154, 172, 196, 198, 214, 220, 230,233, 234, 244, 246, 247, 249, 281, 282, 283, 285, 286, 302,303, 314, 333, 344, 349, 351, 358, 360, 363, 364, 365, 370,371, 384, 386, 404, 410, 413, 418, 420, 440, 448, 462: n = A,T,C or G
  misc_feature 463, 467, 469, 477: n = A,T,C or G
cccttagcgtggtcgcggccgaggtaccatgggtgtgcccacntgtaatacaaaatatacgtatcattgtctgggtccatccactgtccgaagtttngaggaaagcttttaggattttggaaatgcatgtagtnttnaaaatggacnggtctcncttttgttgggaaattangttaaaccaattacccattagggntncttcatatttcaattnttgganttattggccnaannaaaaaacatnanntntttggggcaatacgtctaatatggaaaaggcnnntnnccccctttttgtttcnnaagccttttcnataaatttttttaataacnttttcaccatnggttnancttttcnancannncggcnnattaaaattattncnctacaagaggtttcctcntattantangttgngnatttacgaattaagggggtnttaaattnaagttttattttcnnagantnggaacccnagataataaaaggggaac

SEQ ID NO: 8032 - DNA, 394 bp, Homo sapiens
  misc_feature 6, 23, 53, 130: n = A,T,C or G
cccttngcagtggtcgcggtttnggtaccaacaaaggctactttagaggtatnctctatcataaaaaagaaaccaaatcaagctaaaaaaggccttggggccaaaaagggaagtttgggagctcataaanctggccaaacacatgctttaatgaaattgaaaaacaagctcaagctgcggataaaatgaaggagcaggaagacctggccaaggtggtatctaaagaagaatcaattgtttcatcattacgattagcctataaaggatcttgaaattcaaatgaagaaagacgaaaagatgaacattagtggcaaaaaaatgttgactcagacaggactcggcatgggatttggaaattgcagaagtgttatttcacatttcagtgacttcagat

SEQ ID NO: 8033 - DNA, 404 bp, Homo sapiens
  misc_feature 105, 123, 154, 163, 299, 311, 319, 327, 350, 358, 371: n = A,T,C or G
cccttagcgtggtcgcggccgaggtacttttttttttttttttttttttttttggttaaattctcctttcctctacctgcattcccaagtaacggaaaggagtanaggtttgaatcttatcanatgttattgtcagtcccgcgttggcaacctntgtctgcanaaatgtgtaacggtcaattaatttgtctctcgtttctgcagcacacaaaatatcaacatagtgaacgatgtaacagtctgaaaacttgtctctaactggtttgcaaagcttgagctgacaaaataggttgaaaccntatttaaagccnttccctgngggcaatnactttccactggaaaacctgggnggcctggntcttttattattnaagggctgggtaatgggtaaaaagcaaaatttt

SEQ ID NO: 8034 - DNA, 385 bp, Homo sapiens
ccctttcgagcggccgcccgggcaggtacatgcctgtaatcccagctacactggaggctgagtcaggagaatcacttgaacgtgggaggcagaggttgagtgagtggagatcgcaccactgccctccagcctaggtgacagaatgagactctatctcaaaaaaaaaaaaaatgatatcagttggtggatgctcctataggtagccaaacacattgattacctgttagattttaggatagaaatcaaggtagagcacgtcagcaaagagcctctttgtctcactccatcatttaaaaccagtatattcagtagttgaagaaagagctctccctgagtcaagttgcaaaacgtctatatttttaagatgccactacttttttcttaa

SEQ ID NO: 8035 - DNA, 581 bp, Homo sapiens
  misc_feature 7, 23, 28, 100, 116, 121, 123, 172, 187, 194, 207, 219, 223,226, 247, 251, 262, 274, 278, 282, 290, 298, 302, 307, 320,341, 345, 346, 348, 351, 360, 365, 392, 394, 405, 415, 417,418, 420, 426, 428, 433, 437, 444, 449, 453, 456: n = A,T,C or G
  misc_feature 462, 469, 479, 481, 493, 495, 502, 506, 519, 524, 527, 535,536, 540, 545, 552, 555, 566, 577: n = A,T,C or G
cccttancgtggtcgcggccgangtacncgggtgggttcagggaaatgggattgacttggccttcaggctcctttggtcataattttaaaatatgggagnttgaaaacaacaacanaatgngnatgggactctttaaaaacaaatgaaaaagagcatttatctgtattgtcnccttgaaatggtaancaatttngttctttggattntcataatttctncctntgntcaaaaatgttgaacaagttntaanatatcgggtgncattctaaatgnttantaantattaatnttaattanagtntttangcaataattaacnccaatttttttatttacaatntatnntnacntcaatttancccangcgggtttggaaccaatttataatcgncnaatttttgtanaaaatttttngnngngtaatntntttgngtgnttggggnaaagnccanttntaattngtttttnaaaaacattngnggaaaggttctngnttacatnatgnattaattgtaatntttcnccnctttctanntggnaaaantaaattnatngacatatatgnttttccttggntttt

SEQ ID NO: 8036 - DNA, 404 bp, Homo sapiens
  misc_feature 224, 241, 403: n = A,T,C or G
cccttagcgtggtcgcggccgaggtacaaataagcagtgtgcctaacaagcaacacagtaatgttgacatgcttaattcacaaatgctaatttcattataaattgttttgctaaaatacactttgaaactatttttctgtattccaaagagctgagatcttagattttatgtagtattaagtgaaaaaatacgaaaataataaacattgaagaaaaaaaaaaanaaaaaaaaaaaaaaaangtccagggaaggcctttcgggcagggcacatggttcactgccccatgacgtgataccttgaagcacaccattacggacaagtgggcccccagaatcacccgagcaggtgcttttgccccctgtccagcggtccagcacacagcatggaacttggtcaccttnt

SEQ ID NO: 8037 - DNA, 398 bp, Homo sapiens
ccctttcgagcggccgcccgggcaggtacatcttaccatggctgccggaaagagagagagtgagtagggaactgccacacacttttaaaccgtcagatctcatcagatcttgtgagaactctatcacaaaacagcattagggagctgacgctaaaccattcaaaaccatccccatgatgtaatcacctcccaccaggccccactttcaacaagtggggattacaattcaacgtgggatttgggtggggacacagagccaaaccatatcaatacctatcaaacagctacaagtttatactccctgtggcacattttctacagaaaacatggcaaggcctggaaatgtcttttggctatcaaagttatcaagccccctgcattaaagttaatacaagtta

SEQ ID NO: 8038 - DNA, 468 bp, Homo sapiens
  misc_feature 79, 81, 83, 118, 124, 129, 137, 139, 164, 189, 195, 206,232, 238, 241, 247, 249, 260, 264, 270, 303, 310, 315, 328,330, 340, 341, 346, 350, 352, 354, 359, 373, 389, 393, 395,405, 406, 422, 436, 443, 445: n = A,T,C or G
ccctttcgagcggcccgcccgggcaggtacaaggctaagcatttttaactttatactgggaaaaaaaaatcaaacaaangngnagggataaaggacttaagtcatcttttgccactgngaaaancaaanatatgtantntaaaatttccccaataagccttgcnattggtagaccatttggaaaaattnttttcncagggtttaanaaaaaaaaaaaaaaaaaatttaaatncccctnggntggaantnattttaaaatngggnaaaatnggaaccattgtttatcgtaaggggttacctttngaaaggnaaaantgggggggccaancnaaaaaaaaannatagncggngnanaaaanttggaaaatttttnccaagggtttatttgngggngncaaaaaaagnnaaccaacctttgaaangggaattgggaatnggttttngnaatttttatgtaattaaaaattt

SEQ ID NO: 8039 - DNA, 372 bp, Homo sapiens
  misc_feature 3, 16, 39, 54: n = A,T,C or G
canaattcgcccttancgtggtcgcggccgaggtaccanagttaggccaccagnggcactcaaaacttgtttctttctatgctattggacagacagaaaaacacaaagaggatagaaatccagagaggtggaaggaccagccaaataaactgtgtacatgagaatccttttttgacaagccttggaaagctgacactgtctctttttcctccctctatacgaaggatgtatttaaatgaatgctggtcagtgggacattttgtcaactatgggtattgggtgcttaactgtctaatattgccctgtgaatgttgtatacgattgtaaggcttatgtcactaaagatttttattctgattttttcataatcaa

SEQ ID NO: 8040 - DNA, 416 bp, Homo sapiens
  misc_feature 90, 91, 100, 120, 125, 127, 142, 148, 174, 177, 197, 203,210, 230, 236, 239, 255, 257, 292, 303, 325, 330, 332, 344,357, 358, 386, 401, 402, 414: n = A,T,C or G
ccctttcgagcggccgcccgggcaggtaccactagcactccagcctgggtgacagagtgagactccgtctccaaaaaaaactttgcttgnntattatttnctgccttacagtggatcatnctagntnggaaaggacaataangatttntttatcaaaaatgtgtcatggccctntanagaagatgtttattattgtntttttntcaattntgctttccccccacccccanaataantanagcctaccccattatnangacttttataaaagtttcttcaaacattttttttngaccctttttntaaccttaaaaaaattggtggnatttngnttttttcttggntctccaattttgnngggataattgccttttccattccatccncttaattaattttannggggccaaaaantt

SEQ ID NO: 8041 - DNA, 172 bp, Homo sapiens
  misc_feature 112, 117, 122, 132, 136, 143, 146, 148, 160: n = A,T,C or G
cccttagcgtggtcgcggccgaggtacaaggttttagaaaaatctatacacctgtgtaaccaccaccacctgtgtaaccaccaccgccagaaccaaaaacagtttctgtcanccacntgaanttcccttttngccnttcctanatnangcgccactccanccccagataacc

SEQ ID NO: 8042 - DNA, 350 bp, Homo sapiens
  misc_feature 1, 3, 130, 143, 176, 197, 210, 218, 220, 228, 259, 261, 269,272, 280, 307, 310: n = A,T,C or G
ntnctttgagcggccgcccgggcaggtactgtgtgcaaccttaaaatatatattattaaaaatctttcattttatatcccttgtgttctatatacctaataataaataccttccttatcttcctttcttncccctgggacatnataaatttacttccgtcttaaggactcttaaanaggtcctgccgtatgtgcttnaccttggacacanaagcaccngncgctgcangcctcaatcagtactgaggctggaatacaancnacagcctnttncccattcnttccaaccctttaattcttggccaatnaanccatttaacccccctttcccaattgccacccttaaaaacc

SEQ ID NO: 8043 - DNA, 404 bp, Homo sapiens
  misc_feature 37, 54, 147: n = A,T,C or G
cccttagcgtggtcgcggccgaggtacttaacatgtntactctaaaatttcagntgcaaaacttttttttaagtccttatcaggataaaaattaccttataaaaataaatctccccacctctgacatctaaattctccatccctgtnagttactaaattttttttaaaccttaaaaatttacctttaacgtatttcaatagtattttaatacacggactataataacaaaccagctggtatattattttgtccttttccattataattttcattcttgtaattagcaaccaagttaatgattgcattcaggattatctagactgtttttacaaaaaaccccacgaattaggagcctaacagctttctatttttttaattaaaaaaactgattctttttaatttt

SEQ ID NO: 8044 - DNA, 396 bp, Homo sapiens
  misc_feature 291: n = A,T,C or G
cccttagcgtggtcgcggccgaggtacacacatgagaactgaaatggcccaaacccagaaagaaagcccaactagatcctcagaagacgcttctagggacaataaccgatgaggaaaagatggcctccttgtgccaccgtctgttatgatttctctccattgcagcagaaagccgttcttctaagcagacagcaggtgatgatggcaaaatagaccacactcttgaggagcaggaggaagtacctgcccgggccggcccgctcgaaagggccgaattccagcacacctggncggcccgtttactagttgggatcccgagcctcgggtaccaagcttgggcgttaaatcaatgggtcatagcttgtttcctgtggtggaaaattgtttatccgctca

SEQ ID NO: 8045 - DNA, 367 bp, Homo sapiens
  misc_feature 14, 15: n = A,T,C or G
cccttagcgtggtnncggccgaggtacaccagggaggtgggtgtggacagaggcactgggcagctgctgggaagcgaggcacaagtctgtgcccctactcccagggctgcctggaggaagcagctcttacttttcatcagccggggacaaaaatgaacttaaactaaaaaaattattggccgggcgcagtggctcaccagaagcattttcttttcaaagtgtgtgcacagagtgaggaggccagcctgggcaacatagtgagttgagacctgtctctacaaaaaaataattaccgaaaattagccaggtgtgctggtgtgcacctgtagacgcagctacagactgaggcgggaggatcacttgagtc

SEQ ID NO: 8046 - DNA, 340 bp, Homo sapiens
  misc_feature 319: n = A,T,C or G
cccttagcgtggtcgcggccgaggtacttttacttgactggcagtgcaatagatttgtttacaccagtatcaccacaaacacgtgagtgatgtattgcaatacatatgtcatcactaggctatgacatcactagggcgatagaaatttttcagctccattacaatcttatgggaccactatcatatatgtagtctaccactgactgaaatgtcattatgtggcatacataatgtagagttttcaagggtacgcggggccttttttcttttttccggcgttcaagatgttcgaagacgaggacgtggtgggtcctctggngcgaaattccggatttccttg

SEQ ID NO: 8047 - DNA, 318 bp, Homo sapiens
  misc_feature 164: n = A,T,C or G
ccctttcgagcggccgcccgggcaggtacaaacagatgatacgcttaactttttggacacctgtgatttgcatactgagcatataaagccatctttacgcacgtccatcggtgaaagaaaacggtctttttttcgcccactaatttaaggtttttctccaagtnggaacaaaagattgaagaaccacaatagcatgtagtcttggagaactacctaatttaaaggaagaagacattttgaataagagccttgatgcaaaagaaccaccgtctgacttgacaagatgaagacgtacctcggccgcgaccacgctaaggg

SEQ ID NO: 8048 - DNA, 382 bp, Homo sapiens
  misc_feature 274, 368: n = A,T,C or G
ccctttcgagcggccgcccgggcaggtacttccagctgtggatcattaactttggcctgttgaccaaaccactctgcacggcatcacgtgggtccatcctagaacatttggacccagcttgcccattaactcccacttctaaaaactgaaagatgcccttttaatgtcccagcactaggactacccaattccattaaaccctttaccctgtatgttcattgtaatcaaggccttgcccttggatttctctgccaaacccgtggcaacactccanaagccattgcatacttctgaaaactggactctatcatccaaggctggcctccatgcttggaaagttctggatgcagctacattgctggcctcanaaggcacaaaaaac

SEQ ID NO: 8049 - DNA, 363 bp, Homo sapiens
  misc_feature 6: n = A,T,C or G
cccttngcgtggtcgcggccgaggtacacaagtggccaagataaagtagaaaaatgcacagaaaagcaagtaagattatgtcaactacgaagataaaatatgttgcttcaacagcaactggatgatgttcacaacaaagctgacaatcaagaaaaaacagtaactgatattcaagccaaatgtgatgctacagcacaaaatcttcaagctgagtgcataaagcaccgtcttttgctagaagaacaagaggatgatcaataaagttaatcatttgaaagaaaaacaatgtcaatatgaaagagagaaagcagaaagagaagtagttgtgagacaacttcaacaaaaacagggtgacgtcctaaa

SEQ ID NO: 8050 - DNA, 532 bp, Homo sapiens
  misc_feature 184, 196, 204, 211, 212, 241, 244, 252, 257, 260, 263, 270,273, 287, 296, 333, 350, 366, 371, 391, 395, 419, 426, 434,445, 474, 475, 477, 489, 509, 518, 524: n = A,T,C or G
cccttagcgtggtcgcggccgaggtacatcaaactcatttaaaatgctgttagaaattgctgactggcaagactgtcactgacaaaaacaccaagtttaggacagattccatgggaaacaaacttagaattaacctggaaaggcctaaaaaatagagcttaatgggtaagaagaaaagtctcangaaaacaaaggnacaggagnatcacannaaaagacaaagggaagggacttcctatangtnttttttcntgatntantgnaaagaanacntcttttggtgcttnaccttaatnttatcccttaaaaaccataaaaaagggcaattggagntaaaaaaaattttttcncaaatgggtaatttancaaanaagggggttattttcctcgnttcntaaaattggtacaaggggccttgnggccttncttcaagnggaattgggtntaatttaaaaaactctttggccccccaanngnttaattttaagnaaccttgttctttggaatgngaaggaacntgggtnggcccctt

SEQ ID NO: 8051 - DNA, 282 bp, Homo sapiens
  misc_feature 117, 124, 144, 146, 149, 168, 176, 189, 191, 199, 206, 208,232, 246, 257, 260, 267, 280: n = A,T,C or G
cccttagcgtggtcgcggccgaggtactttttttttttttttttttttttttttctttaaaagaacatttttattactttcaagtttatacagtaatctggcacaagctattgccangcattcntgccaagtacttagattttnanttnttttttttggcgagttganattttaanatcataaatcggngnggggccanacctttnantgccaggcccgggggcctcctatnttaatattgcctgnaaggctgcctncanccagggnttcccccatcccnta

SEQ ID NO: 8052 - DNA, 348 bp, Homo sapiens
  misc_feature 1, 2, 9, 48, 78, 83, 114, 167, 174, 178, 209, 219, 228, 251,252, 255, 273, 288, 291, 296, 300, 306, 308, 310, 333, 343: n = A,T,C or G
nnccctttntagcggtcgcccgggcaggtactgtgcctttaactttanacaactttttattttgatgtcctgtttggntcagntaattgctcaaagatatcaaatttgtttttnacaaaaatataaatttaacttgaactttggggcctaaaaatcataacacttgngcaacanaagnggtggtggatacaaactttaaacaaggtaantcaattctgnatttcaatncccataaaaattaattattatannggnaaaaaaccttttatgccnggttatacacatgcnaanttagngggncatatntntngaataaccttttgccaaggaatntggggggggnaaaaa

SEQ ID NO: 8053 - DNA, 344 bp, Homo sapiens
  misc_feature 256, 302, 309: n = A,T,C or G
ccctttcgagcggccgcccgggcaggtacttccccgcagctcctcattgctcacatagtaggcaatggcgttgctctcaaacacacagaatccatcatcaccctcaaatgctgggaccttgccggcaggaaatttgcggagaaattcaggggtgcggttggtttggccaaaatggaagtggggtggtgcggagagcacgcggacctgagccccgctgtacattattcaggtagctgagggaggggacaggaacctnaatcttcaacagaagcaaacaaactgggatggaggggcccagcctnatgaaangtgaccagaaggacccggttgctgcaaggctgtgt

SEQ ID NO: 8054 - DNA, 391 bp, Homo sapiens
ccctttcgagcggccgcccgggcaggtacttggtattgtattttttataaataagatttttatgtaaagcttagaatttgatttacagggaccttgctgcagtaaataccatctcaattttgtgccactggttcagctgttagcacagtaaaaaaatcatttgtatcaaaggggcaaatgctttattaaggtagtaaaagggaacattacttctgcttttaggaagttactgcaagcacaagcatttgtgcttttaagcaaattaaagtagtaaaagaaaaacttaagtgaaacctttgccatcttcatgttttataatataaagcttacccaacaccagttaagtcatggttaacctaaatgcctcatgccccagttcacaaaaggagga

SEQ ID NO: 8055 - DNA, 131 bp, Homo sapiens
  misc_feature 69: n = A,T,C or G
cccttagcgtggtcgcggccgaggtacctttctgtcacatgactggtggcagaccctactttaacccancccaacaatggtcatgctacagagctgctcatggcattttcctggactctcctcccttggtc

SEQ ID NO: 8056 - DNA, 415 bp, Homo sapiens
  misc_feature 60, 298, 304, 356, 368, 389: n = A,T,C or G
ccctttcgagcggccgcccgggcaggtactttttttctttctttttttttttattatggntagctgtctcttaaaaaagcaagaaaaagaaagagaaagactgagaaataagaaagatctctttgaaaataaaataagactgctaaaagtatttggtatacagtctggaaaataaagttgagggaatctctccagataaagagccaaaagaaatagatagaaaaatataaagaaagaaaaaagacatagacaatcaatatgtaatgttaggagttcctggaaagagagaacagagacngtgtangtggagaaaattaaaaggaaaaagaattggagaacagagccagcttagtctncagattggaganggcccaatacaatctacattntagacacaattttgtaaaattttgga

SEQ ID NO: 8057 - DNA, 383 bp, Homo sapiens
cccttagcgtggtcgcggccgaggtacccctgctgctttgcaggcaaggctctccctgcccccccgacccttcatcaccaagtgccaagaggatacggggcaatccggtcccatttgacatttgagcattccaggcacaatgccaaagtcttctggagggaaggaatcatcagatagttccacgtctaatgcagcacttgagccaacattgtagatgttgtactattcattaattgtatattttaaatctaatttggctacgtatggattatatatagtttaccgttacaaataaagccaagtttcaatatgtttgttgatataatattccctcaattatatctggtaatgatatttaaaacagcaggggttttaatttcatt

SEQ ID NO: 8058 - DNA, 381 bp, Homo sapiens
  misc_feature 314: n = A,T,C or G
ccctttcgagcggccgcccgggcaggtacatgccagaaaaaaataccgctttcacaaaactcgctcccacgtgacccacggaacacccaaagtcaaaaggagtccaaaggtcagaaagaaaagttatctgagtagactgatgctcgcaaacaggcttccattctctgcagcgaagagcctcataaattccccttcacaaggggctttttcatccttaggagacctgagtcctcaagaaaacccttttctggaagtatccgctccttcagaacattttatagaaaagaataatacaaaaacacacaactgcaagnaaatgccctttgaagaaaaatggattttatgggaaaaacactaacatgcccagaaagggaacccatc

SEQ ID NO: 8059 - DNA, 656 bp, Homo sapiens
  misc_feature 603, 614, 619, 630, 631, 639: n = A,T,C or G
ccctttgagcggccgcccgggcaggtacacagctggcaccagagcatcacagagagccctgtgagccaaaaagtatagttttggaacttaaccttggagtgagagcccagggacaggtccctggaaaccaaagaaaaatcgcatttcaaccctttgagtgcctcattccactgaatatttaaattttcctcttaaatggtaaactgacttattgcaatcccaagacccatcaatatcagtatttttttcctccctatacagtgccctgcccacccttatctgcacccacctcccctgaaaaagagagaaaaaaaaacctggttttgctttccatgtataattcaacaacgcaaaatgggaccatgtcagaatctgtatgatcctattctgtgttagctccaatcagccagctgagagccatcctaaatattaataggatgagagagtaactcctaactgtgcataaattacagccttaagaaagaaggccacccggtctctgggggacatgttttggggagggtgggggctgcctcatatagcctacctttgctttaatcagcattttatcaagtcaacttttgggattaatgagcatatccnactttatgggnatggngtatattcaanngccagacnttttttttttttttttt

SEQ ID NO: 8060 - DNA, 273 bp, Homo sapiens
  misc_feature 89, 106, 111, 134, 155, 164, 165, 194, 196, 203, 224, 226,227, 245, 253: n = A,T,C or G
cccttagcgtggtcgcggccgaggtacgcggggatcgccgccatcatgggtcgcatgcatgctcccgggaagggcctgtcccagtcggntttaccctatcgacgcngcgtncccacttggttgaagttgacatntgactacgttgaaggagcatnatttacaanntggccaataagggccttactctttcacanancggtgtnatcctgagagattcacatggngnntgcacaagtaccttgccngggcggcngctctgaaagggccgaattc

SEQ ID NO: 8061 - DNA, 377 bp, Homo sapiens
ccctttcgagcggccgcccgggcaggtacaaacattggcttcttagtgccattagcacttttaccaggaaatgcaaaagatgcaaccacataatgttttcactttggttttatgctgttcttcaatcgctctttttgtttatttgtttgtttgctttcattaaccaaactcaggggaatgtcatgatgtcaccaaggccaatgggtagagaaataaagaccagccatccataattgaatctgtaaaggtcagtggaacttagccttttcaggttcaaaattacacaaacacaagggatttttcttatctttcacctttcaaaagggttttcttttttatttttgcccacctgttttccaaataaaagaaaggtgggg

SEQ ID NO: 8062 - DNA, 173 bp, Homo sapiens
  misc_feature 85, 121, 127: n = A,T,C or G
ccctttcgagcggccgcccgggcaggtacgcggggggcgccactagagaagggcgagcggcgcggcagagtgcggcgcagcgcanctcctgaggttttggttatgaacaggattcggattnacggtnttgccaaccaatcgggggaggatcactccagtgcccaggtctcagg

SEQ ID NO: 8063 - DNA, 383 bp, Homo sapiens
ccctttcgagcggccgcccgggcaggtacactggaggctggagcctgcagatggcatggctctgcggctcaccttgctgcagttggtggtggtgacagagactgcagcttgactgtagtgtccatgttctccagagaagcagaacgagttggatgtatgttttggaagagattatgaggaaccggctcatgtgatgaaggaggttgagaggtcctgtgctctgccatctgcaagctgaagacctggaaagctgagggtgtggctccagtctgagtctgaaggcccaagaaccaggggaaccaacggtgtagattccaggttgaaggcaggagaagatggatgtcccagctcagcaggcaggcaggaagcaaatgaggtaaatt

SEQ ID NO: 8064 - DNA, 294 bp, Homo sapiens
  misc_feature 102, 175, 280: n = A,T,C or G
ccctttcgagcggccgccgggcaggtacgcgggctgttggcccgggccgagaagaaggctgctggcaaaggggacgtccaacgaagagaccacctgttcttngagcaggagttaacaccgtcaccaccttggtggagaacaagaaagctcagcttggtgggtgatttgcacaccnacgtggatcccatctgagctggtttgtcttcttgcctgccctgtgtctgtaaaatgggggtccctttactgcattatcaagggaaaaggcaatgactgggacgtntaggtccacaggaa

SEQ ID NO: 8065 - DNA, 104 bp, Homo sapiens
cccttagcgtggtcgcggccgaggtacaaatgcatttttatgtagaagattaatatataaaataggacaaaaaagaactattcttaggggttggggtattgggg

SEQ ID NO: 8066 - DNA, 222 bp, Homo sapiens
  misc_feature 77, 118, 175, 188, 202, 204: n = A,T,C or G
cccttagcgtggtcgcggccgaggtacgcggggtattagtcacgcatgtatggggaaatagtctcgggtatgctgtngtgaaattgaaactgtaaaagtagatggttgaaagtacgcnggaatgccccaactaaatactaccgtatggcccaccataatttacccccatacctcnttacactattttntcatcacccaactnanaatatttaaacacaaact

SEQ ID NO: 8067 - DNA, 501 bp, Homo sapiens
  misc_feature 487: n = A,T,C or G
cccttagcgtggtcgcggccgaggtacaacaatgttattaagctgcaaatctatagcaagactttgaaagtaaccaaatgtttagaaattaagcatcacatttctaagttattcatgcatcaaaaaagtaattacaatgaatattaaaatatattttgaatttaataaaaatgaaagtaaaaatactgcttgttaaaagatgggaggcttaggcaaacctcagcttggagataaatgcatatgcttgtttaaaaaattaaagcttgaaaattaataatctaattgtcaatctcaaaaatttaaaatgtgatgtcaaattaaatccaaagaattagaaaagagaagatacataagaagcatgagaaaaggaaacaatcttaaaataaatgaaatcagcaaaagccaaagttactttgaaaagactgataaaaatataccatgattatgcgtgaaattaaaaaaaaaaaagagtacctgcccgggcggncgctcgaaagggcg

SEQ ID NO: 8068 - DNA, 234 bp, Homo sapiens
  misc_feature 98, 103, 111, 125, 127, 129, 134, 135, 142, 145, 151, 152,157, 159, 165, 172, 177, 184, 192, 195, 197, 198, 208, 212,214: n = A,T,C or G
ccctttcgagcggccgcccgggcaggtactttttttttttttttttttttttttttcttttttttttttttttttttttttttttttttggaaaattnactgnttatttgngcaaaaaaaaaaananangccgnnactgtanttnacccanntgttntntttggnggccaanctttnatttttntgtcaagnaanannaattcaaatncccntncccctgggcagggaaatcca

SEQ ID NO: 8069 - DNA, 186 bp, Homo sapiens
  misc_feature 3, 14, 64, 75, 87, 99, 101, 107, 109, 139, 148, 149, 163,164, 184: n = A,T,C or G
aancccagcgtggncgcggccgaggtactttttttttttttttttttttttttaaaggacaagnctacaaaacanctttatttattnggtacatatgangntaaaananaactttgctttcaagcttcaaacttttttnaaacccttnntaaaaaaagacttnnggcccacctaaacaaaaacnga

SEQ ID NO: 8070 - DNA, 374 bp, Homo sapiens
  misc_feature 287: n = A,T,C or G
cccttagcgtggtcgcggccgaggtacgctagatagcctccaggccagaaagagagagtagcgcgagcacagctaaggccacggagcgagacatctcggcccgaatgctgtcagcttcaggaatccccgcgtacagagttaacaagttttgagttttttatataggaaaagcctagtcaattcagatgctttctagaaaaattaacattaaaaaacaaatagaaatccatgactaaagggggaaaataactttcaaaagttaccaaaattcgaatcattatcagagnaccattataaatttcaaaacagttagatttaccacacatattgcattttcaaattcttaatgtagcaaaacgtaaccacattaattt

SEQ ID NO: 8071 - DNA, 423 bp, Homo sapiens
  misc_feature 280: n = A,T,C or G
agaattcgccctttcgagcggcccgccccggggcaggtaccgcgggggagtagcttgcaccactagaaagatggcgggagcaagagcaaagaaaaatccctttggttccagaaaatctcctgaaaaagaggaaggcttatcaagccctcaaagccacccaggcaaagcaggcacttttggcaaagaaggagcagaagaaaggaaaagggctcaggtttaagcgactggaatcattcctacatgattcctggcggcagaaacgtgacaaggtgcgtctcanacgactagaagtgaaacctcatgccttggaattgccagataaacattccttggcctttgttgtacgcggggcctttcggccggaaccgccatcttccagtaattcgccaaaatgacgaacacaaagggaaagaggagaggcac

SEQ ID NO: 8072 - DNA, 222 bp, Homo sapiens
  misc_feature 15, 17, 23, 26, 28, 34, 37, 50, 56, 69, 89, 93, 97, 100,123, 124, 160, 161, 163, 164, 179, 180, 182, 186, 213, 215: n = A,T,C or G
ccagcggccgccagngngatggntancngcagantantcccccagcttgntcgccnccgagggacagtngctgcggggggatcaaacangtcnccgnggnggcccagcaaaacaagcggagcnnagaaaaagaacggcaaaagaaatgggaagggggatnnannccgaaaaaaaaaaannanaaanaaaaaggggcctgcccgggcggccgcncnaaagggc

SEQ ID NO: 8073 - DNA, 474 bp, Homo sapiens
  misc_feature 282: n = A,T,C or G
cccttagcgtggtcgcggccgaggtactgtaatcttgtccactcccactgctgttaaatttgcgggaatcatgccataggtccaccacagtcagctgaaaccagcagttcaggacaagtggaacagccagcaagacccagatcatccaactcagccgatcctgagatgagaccaagctgctgctgaggacgacagccctgctctggtcactctggaggctgaccagtctatgcacagctgaagctggaggggacgacaagcccagctctagtcacacaccanaagctgactagtctacgcacggccgaagcttgaggactcgtcaagcaagtaaatgtggttagaaatcttaagactagtagctttccttgtaatactaactgttttattattgttctgtcgttgtgctcaacctcctctgccaggcaaggccctcttctgtccttgctggatatgaacatgctgtacctgccc

SEQ ID NO: 8074 - DNA, 394 bp, Homo sapiens
  misc_feature 85: n = A,T,C or G
tgaattcgcccttagcgtggtcgcggccgaggtactattctcagcccattctcgtgaaggaaatcatagaacctccaaagattcncatcccaagacacctgaagcaaacctatatccgcagagttggagaagctgtcaatctggttatacctttccagggaaaaccaagaccagaattaacttggaagaaggatggtgcagaaattgataagaatcaaataaacattcgcaactctgagactgatacaatcatatttattagaaaagcagagaggagccactctggggaaatatgatcttgcaagtcaaaagtggacaaatttcgtgggaggaccgcatcaattggaccatccaagatcatttggacccggttccagggtcccaccccaaaaat

SEQ ID NO: 8075 - DNA, 412 bp, Homo sapiens
ccctttcgagcggccgcccgggcaggtacagatttttttttaaccactcaatcccaaatggaggcctacaaagaacatcgtaataacacatggaagcaaaccctgggtttttaagagcaaattctgtcccccctcactcccccaagtgacaagatactaatgaagaaagttcttcaccatagtgttttgttttaactaaactcattggagtctagttccaaatttggtagggtcatcatctctacattccttaggatttcttctccctatcaagctggcccagatacaagtacttctggactaaactggaattatgagtgaggaagagtgtttactaaataaatgactggggcaagcaaaattgaggaggaaattagaaactgtttgacaaactttaaagagctacttgaaa

SEQ ID NO: 8076 - DNA, 141 bp, Homo sapiens
cccttagcgtggtcgcggccgaggtactggaaggcctggaccagccgcagagcctcatccacggagcgtcccacaggcaaatcattaacagtgatctggcgaaggaccccgcgtacctgcccgggcggccgctcgaaaggg

SEQ ID NO: 8077 - DNA, 370 bp, Homo sapiens
cccttagcgtcgcggccgaggtacttttttttttccttttttttaagagtataaggtttacacaatcattctcataatgtgacgcaagccagcaaggccaaaaatgctagagaaaataacgggatctcttccttgtaaacttgtactgcagccgcctcaatatccccttccccttcatcgtcttcgcttacttctacatggtggtgaagaagtgcctcaagtgttgctgcaaggagaaaaacatggagtcttctgtctgctgtttcaaaaatgaagacaatgagactctggcatgggagggtgtgatgaaggaaaactaccttgtcaagatcaacacaaaagccaacgacacctcagagggaaatgaggc

SEQ ID NO: 8078 - DNA, 344 bp, Homo sapiens
ccctttcgagcggccgcccgggcaggtaccagccacttgtcctagccaaatgtccaaaacacgcccttgggccccgccacgttacaatccacagattgtctgtctgagtcgtttaaggcatttcctggtgcttgtgttccatgaataaaaggacaaagtcagaagatcactgatgtcttactgtcaacagagatattttaaaagagagaagcaggaaaagatcttccttttttgatctacaacttatatagttttctgattatgcacataatagatatgccttccagatgcataaggcaaacatctggaaagaaatatacccaaatcttagcaggggttatctt

SEQ ID NO: 8079 - DNA, 346 bp, Homo sapiens
  misc_feature 298: n = A,T,C or G
cggcccgccagtggtggatggatatctgcagaattcgcccttagcgtggtcgcggccgaggtactgttcaaaaaggaatgccccacaagtgttaccatggcaaaactggaagagtctacaatgttacccagcatgctgttggcattgttgtaaacaaacaagttaagggcaagattcttgccaagagaattaatgtgcgtattgagcacattaagcactctaagagccgagatagcttcctgaaacgtgtgaaggaaaatgatcagaaaaagaaagaagccaaagagaaaggtactgntgccgaagttgccccagttccatggggttcgtgtctttggcatcaaca

SEQ ID NO: 8080 - DNA, 369 bp, Homo sapiens
cccttagcgtggtcgcggccgaggtactgaagccaccacagagatgctggtaattcaaactgtgaaagcacgtggcgcagaggaaactgacacagaacagcacaccactggtgcttttatgcaacaccactgaccccaagatggtcactccattgatttttccgcattgtttacatccaggatgcatgctgtccagtgcaatagcgtctatgactataaaacaactaaaagctgcacttaagatgggagagccaaactcagatcttttttctccttctcttcaaagatcaaaagaagaataaaccaaaaaagattaaaaaaaagaataaaccaaccagtagctgccgagaatacagtgaaagaggaaat

SEQ ID NO: 8081 - DNA, 366 bp, Homo sapiens
  misc_feature 271, 333, 341: n = A,T,C or G
cccttagcgtggtcgcggccgaggtacttttttttttaaccccccaggggggtagttgggagtgagactataggccataaagaatgggactgcattggaccaaaataaatgggaaaatcgtggtttgaaaagaagcttttgggaagtgatgagtcattttgcaccaggtaataggggaaaattgtgtgacctccagcaaacacatgaatggttatttcctgggagcccggaagcactttgggggtccgtggtaattcccaaatgtttttcntgtgtcctaagttttaccctttctaaacacttgtcctttttgaaaagtttttgaaatatatncacatttntattgaaaacccttggaaactaaaa

SEQ ID NO: 8082 - DNA, 668 bp, Homo sapiens
  misc_feature 443, 528, 537, 551, 571, 580, 591, 616: n = A,T,C or G
cccttagcgtggtcgcggccgaggtacacatgagagaaaaatctttccaatgtaatgagagtggcaaatcctttaattatagctaactcttaaggaaatatcagataatcctttaggatagaaacaatataaatgtgaggtatgtgacaaggtctttaatcagaattgattccttgtatgccataatagatgtcacactggtaagaaaccttacaattgttatgagtgtggtgagaccttcagtcagacgtcatcctttacatgctgtccgtagacttcatactggagggaaaccttacaagtgtagtgagcataacaagacctttggttgaaattcagcccttgtaattcataaggcaattcatactggagagaatccttgcaggtgtaatgaatgtggcaaggtttttaatcagaaaagcacaccttgcacgtcatcatanacttcatactagagagaagccttacaaatgtgaagaatgtgaaaaagttttcaagtcccaaatccattttggaagacaaaacttnaaaagaggnggcgttgcccttgnttttgagaatgccctactgngtaagtggnaggggtctttnttttttttttttttaaaaccgggtnttacctgagccgagcctttgccctggccttaattaataattgggaataaatt

SEQ ID NO: 8083 - DNA, 403 bp, Homo sapiens
  misc_feature 168: n = A,T,C or G
cccttcgagcggccgcccgggcaggtactagctccagttaggcatataaatgacaattagaagggacagaagttatggttatgtcagcagcctccagtgagctaggatataaactaagtcttttcaagctgaacaaatatatacacattcaacccatttaagtgaagnagacacatttaagtccacaaaagcaaacttaactacctactatataacttactttttattgaaagtatcttgcattcatgatggatgctttctgggttttaccacatattttaatgttaaaagttaaattattctttacatgcaagtagtgtgaataattttctccacatgggaacactaattataaaaagatgacatcccacatgggttaagtgtctttttaattgaaaagcta

SEQ ID NO: 8084 - DNA, 365 bp, Homo sapiens
  misc_feature 359: n = A,T,C or G
ccctttcgagcggccgcccgggcaggtacactctacttgtgcagtagcaaagtctatgattatgtaagaaagattcttaagctgcctcattcttccatcctcagaacgtggttatccaaatgccaacccagtccaggtttcaacagcaacattttttcttttcttcaacgaagagtagagaatggagatcagctctatcaatactgttcattgttaataaaaagtatacctctcaagcaacagcttcagtggggatcctaagcagtcacagtttgcagggggtttatggacttttggtcttggaaaacttgatgctgatgaaacgccacttgcttcagaaactgttttgttaatggcantgggta

SEQ ID NO: 8085 - DNA, 404 bp, Homo sapiens
  misc_feature 384: n = A,T,C or G
cccttagcgtggtcgcggccgaggtaccaaacctggaactttaagtatcattttttagctcattaactatatagaagattactaagaccagtaagggagccattttcttcccctcctctatttttattacttatctctctcctctttactcttaaaattggcaatcttctgacaacccaagctaataaaataatatagctatatataattcaaataactaaagaacttttgagtccatatatgcaggatttttgaatacctcactacatttgctcttataccctcactgtcctggtatcataaatattattaagggaagataacctataaggggaaagcaattccaacctgggataaaaaagtgattacaaataattatcttgntgatagtaagggcttatggt

SEQ ID NO: 8086 - DNA, 727 bp, Homo sapiens
  misc_feature 55, 97, 104, 114, 122, 126, 135, 139, 141, 149, 159, 177,189, 194, 195, 213, 223, 250, 252, 255, 261, 262, 264, 274,282, 284, 286, 287, 289, 294, 295, 306, 308, 317, 322, 330,335, 337, 347, 351, 361, 365, 381, 391, 423, 425, 433: n = A,T,C or G
  misc_feature 441, 453, 470, 471, 479, 483, 487, 488, 497, 498, 505, 518,519, 529, 555, 578, 586, 588, 590, 591, 609, 621, 647, 673,681, 686, 696, 699, 702, 703, 723: n = A,T,C or G
cccttagcgtggtcgcggccgaggtactttttttttttttttttttttttttttncttttttttttttttttttttttttttttttttttttttttnagggacngatacatttnttagtttntaanaaaaaggcntacntngtgggcanagtaaaaatnctaacaaaaatttttttnttttgaaaccanttttnntcaggaaaactttttcanaaaaaatganctgaatttttaaatcccaaatttttcncnccntttttnngntttttttacncctaaatntntnncnccctnntttttggtcananacttttccnggaanattaaatngatancntttaatttgnggcnttcaaaaatntccnccctaaaactgaaagngaaattgctnttaaaaaaaaattggtttgattaaaaaattgntntttacctntttaaaanaaatttgggttntttatttttacttaacnncccatttnattntttnntttcaagcnnttctttntttaacctcaatnnttctcaaagngaaatcccttaaaaggcaaattaagnttttaatttcccaaaattttttntttcccantncnnttgacataaatgccctcngggtttccaaanataaaaaaaatttttttcccaccttnagggaaaaaaactttttggcctaccnaaaatctngcaantttaaacttnaantannctccaggacatttttttttntttt

SEQ ID NO: 8087 - DNA, 312 bp, Homo sapiens
  misc_feature 127, 131, 132, 134, 153, 187, 194, 198, 200, 297, 298, 299,304: n = A,T,C or G
ccctttcgagcggccgccgggcaggtactttttttttttttttttttttttttactttacgttctgggatacatgtgcagaatgtgtaggtttgttacacaggtatacgtgtgccatagttggtttngctnnanctatcaacccatcatctanggttttaaagtcccacatgcattaggtattttgncctaaangctntncctcccctgtttcttccaccccccgaatcacttattttaaaagtcagcaataaaaataaatttgaaactaaatcaaatataaattggattccttttnnngaacnaaatttat

SEQ ID NO: 8088 - DNA, 141 bp, Homo sapiens
  misc_feature 19, 35, 36: n = A,T,C or G
agtgtgatgggatatctgnaaaattcgcccttagnntggtcgcggcccgaggtacaagtcctcgtagaaattgaagaggtcggagataaaactggccagaatttctttcttgtcgtcaggggcgtggaccaacaggtgttt

SEQ ID NO: 8089 - DNA, 385 bp, Homo sapiens
  misc_feature 133: n = A,T,C or G
ccctttcgagcggccgcccgggcaggtacaggactgggaaccaggtagttctgatttctgtttctggccttgattccatctgcaaattttggcaagtcatttgacgtctcggtatcagaatcatcatcttttnttgtcaaaatattttaaatctggctgtctcatagaacagacactgtaacaatgatcagagaaaattccattgaatccatctgcaattctgcttattccagaggaatctgaataacgagaagggtgtagagtcttcctttttctttttttaggatactcattcatatcttttcaatttggtataattcttactactggagtgaggaaaaatgaattacaataagtttctgtaggacagtaaaaaatgccctcg

SEQ ID NO: 8090 - DNA, 694 bp, Homo sapiens
  misc_feature 68, 78, 83, 87, 92, 105, 122, 163, 181, 184, 185, 212, 214,251, 265, 303, 322, 374, 388, 403, 444, 503, 504, 514, 529,554, 557, 588, 595, 612: n = A,T,C or G
cgagccggcccgccagtgtgatggatatcttgcagaattcgccccttagcgtgggtccccgggccganggtccatttngtaangtcnagaantttaatattaatnggggtcttgtggaaaancaagaagggcttttttgcatttggtctcctttggacacccnaggaaaggtttaccaaantannggcattatttggggccaaaaaatgggntngtaatccaagggcttcaactttgggccccggtttttngttttttttttttnaaaaccaacaatttttttcaaccaaagttttttttttnaaggaaacaaccttggggnattttttcttttttaaattttaaaaaaaaaaaaaaaaaaattggccccaaanaaaaaaccaatttnattttttaattaacnaagggggttttggaattttggccttttttccaattggtttngttttaatttcccttggttaaccaattttgggaaggttttaatccttaattaatttttnnggttaaaaanccaaaaattttaaangttccaattgggggaaaaaaaaatnttnaattttccctaaaattttccccaaaaaaagnttccttncccctttttttttaagnttccttaaggaaattaaattcccaattttatttttttccaatttttttaaaaaaaattttaaggttggttttttttttccaa

SEQ ID NO: 8091 - DNA, 392 bp, Homo sapiens
ccctttcgagcggccgcccgggcaggtacccccattcacccacaaaatgcagcccaccacccagtcccccaattccagagagaaacacatcactagattgacgagggcttttagagactgctcctataattgaggaatcagcagcataggctttatctccctacttcctcccccaccctaccgcgttcaatttgtgtatctcagatatttgatttcttgagcatgtattggtcagaaagaaaaagaaagaaaaccattctctatttttccatgggtatgatctggcttaaaacaatatggaatatttttcctgacagacttgaaaactaggatcttcctcagatgtctgtaaataactctggtatccaactgggggtgtattctagtgtgga

SEQ ID NO: 8092 - DNA, 314 bp, Homo sapiens
  misc_feature 101, 103, 105, 125, 133, 169, 171, 205, 206, 224, 266, 272,288: n = A,T,C or G
ccctttcgagcggccgcccgggcaggtacaatgtaagggttttagggagcaacagtatttaactggaagaaagaattgcatatttaatgtagtctaatatntncncatttgccaacatgcaacangggtgttnaattcacatatacatcattatacaatttaatcactntnggaataaaattattatagccttttttctataggnnaaaatttgtatagatgtncccactccataggtttatttccaaaatgaatgagcccccttnatttgnaaaaacttggtcaagntagaatttctttttttagtgggatta

SEQ ID NO: 8093 - DNA, 381 bp, Homo sapiens
ccctttcgagcggccgcccgggcaggtacatttcagtcatttagatttttttcagagtgaacatgacagccattaattttattagtctaaaaaaatgacttattctactctaaaattgtgctaagaatttgaaattattttagcatatcctgtccgtctaggtccctctatatcaagggatttcatttttagacattcctttccacccacccccgtgccccccttggatgtaacaaggaaaaaggaatgtctcttctgtttaaaaaaaaaaaaattctgagaaacctgattgcagaaatgagtgcttaaaatttataataattaaccaacataatgaaatgtggtttttaaaggattgagaactaaattttgtaaagggaa

SEQ ID NO: 8094 - DNA, 238 bp, Homo sapiens
ccctttcgagcggccgcccgggcaggtacaaagctataaaggaacgtttttagagaaagcactgaagacacacattttgctgacctaaaagattttaaaatgaattagaataatttacatcatataaagaggtatttagtctttaagtggagaaagttgctagtcacatgtaagaaaaacaagtattatgggccttcctaagacaaatggaataaattccatcacttttggctttttt

SEQ ID NO: 8095 - DNA, 637 bp, Homo sapiens
  misc_feature 481, 501, 532, 554, 556, 603, 618: n = A,T,C or G
ccctttcgagcggccgcccgggcaggtacttttacaaatggagcccttgggaggtgggttaggtaaaagaagctttttacttaacgttgtcttatttccagtctaattttacgctgtagcagaaccagatggctgaggaaattctggaactatggatcttgaccccaaggatatattattttattccaagaaagatcaggtaggcgaaaagatgacaggatacagagtcaatccataaactaaatatttataactgttctgaattatacagagtctaaaaatatgtgtcagctacttcattcctgtaaacactcttgctgtgttataaatatggcaagaaataaacatgaccaatatcaatagacttcttgaggctactataagttttgagaaataaggttcaaaaaataagaatgctaacacttaagcacagactagagcttgcttgggtttcttcctgcattacaaggtaaaaatttgntaatgtttgtttttattcancttgggaaagctttgtgccatgaatacgtcncatttaataacaagcacccacngnttatagaaataactttaattaaaaaacttacatagaagattttaatntcagacgtgacaaanatttgagtttatttgcctg

SEQ ID NO: 8096 - DNA, 366 bp, Homo sapiens
  misc_feature 156, 161, 169, 171, 178, 184, 200, 208, 228, 229, 232, 238,244, 250, 253, 261, 267, 271, 276, 295, 298, 301, 311, 320,337, 348: n = A,T,C or G
ccctttcgagcggccgcccgggcaggtacgtctactgtaaaacccatccgaggcacaagcagagacagatgtagaccctttccctccagagtcacgcacatactcgtcatcgcatcacttgggagaatggttgtattcttatggaaaggaattatnacatnaaggagtnangggaaantgactngaagcaaacaccctcnaaaattanccacccacgtttttttttgnngangagtgnactatnttatanaanaacctggngggttntttnttttnttttaaaaaaaattttttnccnaanaaaaaaaaanctttttttnttttttaaaaaaaaaancctcttttccnaaaaaaaaaaaaaaaaaa

SEQ ID NO: 8097 - DNA, 361 bp, Homo sapiens
  misc_feature 146, 163, 167, 171, 173, 242, 259, 261, 263, 274, 275, 278,292, 295, 296, 303, 305, 306, 308, 315, 316, 317, 319, 321,322, 334, 338, 339, 351, 359: n = A,T,C or G
cccttagcgtggtcgcggccgaggtacttttttttttttttttttttttttttaaaagccaaattggacgagagttttattattccaaaatccagttaagtgtttaatcaaatacaattaaacatttaaaataaaaatcaactatngtagaaccagaggtggngaanggananatttattaatggggataaaaaatttttaaaagggggggaccttttttaaaaaagggggaaccacccccnaaaaaaaattttttttngngnttttttttttnnaanaaaaaaaaaaaacnttnnttttttncnntntcccacnnncntnntttttttttttntaanncccccccccccntttttttntt

SEQ ID NO: 8098 - DNA, 132 bp, Homo sapiens
  misc_feature 69, 98, 112: n = A,T,C or G
gccagtgtgatgggatatctgcagaattcgcccttagcgtggtcgcggccgaggtacattttgttctangaacataattttcactttcaatccagggntttagtgaacttangtcatatgagaatacaactt

SEQ ID NO: 8099 - DNA, 261 bp, Homo sapiens
  misc_feature 98, 140, 144, 145, 161, 175, 183, 187, 195, 201, 205, 207,217, 221, 224, 228, 233, 236, 245, 250, 253: n = A,T,C or G
cccttagcgtggtcgcggccgaggtactgaacccgggactagaaggaaaataaatgatctatatgttgtgtggaaaaaaaaaaaaaaaaaaaaaaaantaaaaaaaaaaaaaaaaaggaaaaaaaaaaaaaaaaaaaaancccnnaaaaaaaaaaaaaaanaaaaaaggcctccntccaaacntccnttttttgncctggncccntntaaaaccaancttnagngctnggttnagntgccttgancgganttnccgttttt

SEQ ID NO: 8100 - DNA, 183 bp, Homo sapiens
  misc_feature 31, 60, 73, 93, 96, 107, 169: n = A,T,C or G
cccttagcgtggtcgcggccgaggtacattnacctacgttaatgaaagttgacacactgntctgagagttttnacagcatatggaccctgtcnttnctatttaattntcttatcaaccctttaattaggcaaagatattattagtactcatttgtattcactgtcactntttctcatgttcta

SEQ ID NO: 8101 - DNA, 378 bp, Homo sapiens
  misc_feature 174, 350: n = A,T,C or G
cccttagcgtggtcgcggccgaggtactaatctgggcattgttctaggcacctgaaataaattatctcaattcatccttcaaataacccagtgaagtagatcatactatatcccactttatagaatcatactggtggtattcccatttttatggatggggaacctgaggctcanagatgaagaaatgatcatccaatcatccacattcactcaactagtaaacaattgggctaaacttcagctccagctccatgcaattccaagtcctcgtttgaaccactttgttattgagcttgctccaactgatctcctgtgtctctggccatcccatcgtttcagtagtgccccangtttggaaagtccactttcatcatcagg

SEQ ID NO: 8102 - DNA, 266 bp, Homo sapiens
  misc_feature 60, 125, 155, 205, 216, 229, 233, 248, 250, 251: n = A,T,C or G
ccctttcgagcggcccgcccgggcaggtactttttttttttttttttttttttttagtanagacggggtttcaccatcttggccaggctagtcttgaactcctgacctcgtgatccacccacctnggcctccccaaagtgcttggaattacaggntgtgagccactgcgcctggcctaggattttcaaatctaaaaaacggtcgnggaaggtgtcntggggaacttgtnatgntaacctccgccttgntnnaactaaaaaaggggt

SEQ ID NO: 8103 - DNA, 408 bp, Homo sapiens
  misc_feature 18: n = A,T,C or G
gtggatgggatatctgcngaattcgcccttagcgtggtcgcggccgaggtaccacattctctacaacatcaggatacatggaaggatattataccttccattttctttactttaaagacaagatctttaatgttgccattccccgattccatatggcatgtccaacattcagggtgtctatagcccgattgttttggtaatttgtgcctttcaaggaatttgtccattccatctaaatgttgaatttattggtataaagttattgacagtattcccttgatatccttttaatggctacaaaagccatagtcacttgtcctcttttgttcttaatattgggtaatttatatcttctcttttgttcattgctttagttaggggtttgtaatttttattgatcatttaaag

SEQ ID NO: 8104 - DNA, 387 bp, Homo sapiens
ccctttcgagcggccgcccgggcaggtacttatttagacccagagttctgctgccctaaacatcttcctactactatttctttttttccaccacacttgttttgaaagctgcttaaaaatcagaaatattaaacaggattaaaaacaagagaaaaacggtctatttcaaatagggttctttttcctactccaaaagaactctcaggagataaggtcttcaaataagacttcacggtttgccagatcctaaggattattcacagcctgtgaaattccaatccatttgccttcaccattccaacctatttgtcttcacttctctttttaaagttggaaacacttggaaaaagtaaaatttcacaaaattcagcaattaaaaaatcagct

SEQ ID NO: 8105 - DNA, 364 bp, Homo sapiens
  misc_feature 64, 100, 118, 125, 132, 140, 202, 212, 230, 260, 263, 301,323, 325, 342, 343, 344, 363: n = A,T,C or G
ccctttcgagcggccgcctgggcaggtactttttttttttttttttttttttttccgctttttnttaaattttactttacgttctgggatacatgtgcanaatgtgtaggtttgttanacaggtntacgtgngccatagnggtttgctgcacctatcaacccatcatctaggttttaagtcccacatgcattaggtatttgncctaatgctntccctcccctgttctccnaccccccgaatcacttattttaaaagtcancantaaaaataaattggaaactaaaatcaaataaaattggntactttaggagaacaaaaattntnaccaaccgtaatataannntaaaaagaaaatttattant

SEQ ID NO: 8106 - DNA, 301 bp, Homo sapiens
  misc_feature 56, 60, 88, 125, 136, 179, 181, 186, 205, 247, 266, 271,288, 294: n = A,T,C or G
attcgcccttttcgagcggcccgccccgggccagggtacctttttttttttttttntttnactagggtaaaatggtggtgggccaagntgaagcccccattgtgtttgtgggtaaaatatgttanaaggggagtantaggggcttgtggacttaggtatgttttgaggtccctgttaantnggganaaggttggatttattttgnattccagggaaaaaaccgttgggtttaccttaagccaccaanaagaaggtttcctccccangttangggtttaaaattagttngggggngggggta

SEQ ID NO: 8107 - DNA, 375 bp, Homo sapiens
cccttagcgtggtcgcggccgaggtacactgaggaaagagattaacaattttctccacatcaagatgcttgttttgaaggattgattccatctctctgaatagttctttctccagtttcctcatgttgtccaacattattttggctttttcctcattattatttactacttccaatgcctgctgatgtttttggtagagtgggtgtcttctgtcaggcttaaaatgtgatttctttttaactagatcttcaagttcaaatgttggtgaactggtatccaatagttgtgaaatatgtggcacaaatatgaaaggcttaaaaacagatctctcagggatcaggagtccctgtaaaggaagtgaatgcaaaggaaggc

SEQ ID NO: 8108 - DNA, 403 bp, Homo sapiens
  misc_feature 385: n = A,T,C or G
ccctttcgagcggccgcccgggcaggtacataatatttaaactatccaaatatccagcatacatttccatgtggctgccatcggctgttgatgccatgaatgaaatggctggttagaaagccaaaggtcttcttttttcaattcctaatgaataagtaaaatgccagatctctttggtctcaaagcaaattgctctgatcagatcaaatatctatgtaatgaaaagagacttacttaaatttgggattctgcttaaactttaagttgaatttgactgtagtcattcattctttttatatatctctgtcaggtatgacattaattaccaggtggtattatactctactttgagtttggacatcactttcagttaaatttctgttgntattggggcttttttttt

SEQ ID NO: 8109 - DNA, 194 bp, Homo sapiens
  misc_feature 124, 158, 173: n = A,T,C or G
cccttagcgtggtcgcggccgaggtactaacttgtagcaaccacgtgtccgtgcagtgccacaggagctagagcagtgacaatgctggtggcaacagggcaggtgtagcaggtgcttttaatgnttcaaccttttcaaacccttttttcatttttaantttgttcaccaaacntccgagaggggtggggaattt

SEQ ID NO: 8110 - DNA, 269 bp, Homo sapiens
  misc_feature 173, 181, 188, 192, 198, 203, 205, 211, 214, 220, 238, 245,250, 255, 265: n = A,T,C or G
ccctttcgagcggccgcccgggtaggtactcttcacattcacttactccttagcaaagattgctcttgaatggaaaggttgcagaaagagccaaagccaattttggaagaagtgagaagcttacaaggttttggaggaaatggttgaagttcagcagaaagggatctaagccntccttagnatggatngaancatggncaatngntcatgnagnaatggnaactcacagttgtagaangaaattnggcangatgnccccctaaantaaa

SEQ ID NO: 8111 - DNA, 281 bp, Homo sapiens
  misc_feature 145, 159, 164, 223, 255, 264: n = A,T,C or G
cccttagcgtggtcgcggccgaggtacatatatgtatattataccaatagctagtaatttcaaaaaaaacattgacttgagtgttagataaccattctctaaattcagtttttgatgttcaagaaacccaaaagcctgtcttttnacctacagaccctnttgtncacgtggcaaatcacctctgaaaggcaaaaactaactgggattcttcttcattttggtncaaaaaagagaagaaaggcttttaaaggatantgccctatnaatttaaaagaaaaatt

SEQ ID NO: 8112 - DNA, 369 bp, Homo sapiens
  misc_feature 43, 48, 86, 113, 116, 125, 179, 186, 263, 292, 358, 359, 363: n = A,T,C or G
cccttagcgtggtcgcggccgaggtactaatatataatctctncactntctctgatctacaaatggatagaatgcctagttatcgncatgcagataaattcttcacaattcanttnccaaagcangcaacaaacaaaaaaaaccttggcagtaatacacagatgaatctctttaacagnttctatnctttagcagtctttgatgatttcagaatttgcagctttagctcttttatcatcatttctaacttctgtcttgcttcncgttcctgtctgagttcatcttggagttnttgcctatcggcctcagcatggtccaatctttgcctcagttcttgccaactgtcctgcatattcanncctntttgtc

SEQ ID NO: 8113 - DNA, 346 bp, Homo sapiens
  misc_feature 142, 273, 341: n = A,T,C or G
cccttagcgtggtcgcggccgaggtacttcaaatttgtttatataaaagcatattaaagctcactttaaaatagtgtccatcttttcttttaaacgggcatagactcatttgcagtcatgtacaccagcatcattgtagtanagtgtaaaccttttcccatgcccagtcttcaaatttctaatgttttgcagtgttaaaatgttttgcaaatacatgccaataacacagatcaaataatatctcctcatgagaaatttatgatcttttaagtntctatacatgtattcttataagacgacccaggatctactatattagaatagatgaagcaggtagcttnttttt

SEQ ID NO: 8114 - DNA, 369 bp, Homo sapiens
ccctttcgagcggccgcccgggcaggtacgcggggctctcggccttagcgccattttttggaaacctctgcgccatgagagccaagtggaggaagaagcgaatgcgcaggctgaagcgcaaaaagaaagaaaagatgaggcagaggtccaagtaaaccgctagcttgttgcaccgtggaggccacaggagcagaaacatggaatgccagacgctggggatgctggtactcatttgtattcactgtcctttttctcatgttctaattataaatgaccaaaaccaagattgctcaaaagggtaaatgatagccacagtattgctccctaaaatatgcataaagtagaaattcactgccttcccctcctgtc

SEQ ID NO: 8115 - DNA, 347 bp, Homo sapiens
  misc_feature 207, 283, 297, 304, 307, 317: n = A,T,C or G
ccctttcgagcggccgcccgggcaggtaccagggcggcgcgtggtctacgccgagtgacagagacgctcaggctgtgttctcaggatgaccgagtgggagacagcaacaccagcggtggcagagaccccagacatcaagctctttgggaagtggagcaccgatgatgtgcagatcaatgacatttccctgcaggattacatttgcantgaaggagaagtatgccaagtacgcgggggggcatcacggacctaccaatatgtgatgtcacccctggtggcccanctgtgtcatggganaaaactncanctgggcccanagattcttgcagccggggaaaatccaaggc

SEQ ID NO: 8116 - DNA, 402 bp, Homo sapiens
  misc_feature 220, 302, 382: n = A,T,C or G
ccctttcgagcggccgcccgggcaggtactgttttgtccaaaaagagaaggttgaccaaatcgaaatggcggcttagatggaagtgttcctacattactagaagacgccgaaaaagcactaggctgctgcccactgaaaggattagttgggttcatcttctgctccaattattagaaggtaattaagtattatgtgtactttttttttttttttcttttngagatggtctggctctgtcacccaggctggagtgcagtggtgcaatcatagctcaccacagcctcaaactaggggtcacttntaagggatgctgggggttgggcggaaggggtgaggaggtaggattgagtaacttgctgtcactgcttgtacctcggccgngaccacgctaagggcgaatt

SEQ ID NO: 8117 - DNA, 478 bp, Homo sapiens
  misc_feature 22, 71, 99, 103, 131, 170, 175, 180, 182, 191, 193, 197,199, 202, 207, 220, 222, 226, 234, 239, 242, 259, 338, 354,364, 367, 406, 433: n = A,T,C or G
cccttagcgtggtcgcggcccnaggtacaacactctgagccccaggagaaattccccacgtccaacctcanggcacggtatttcttgttacctcccgcncacngactgtgtggatgcggcgggggccaatnttggtgttggcagctggtcgccccaactcatacttccgnttctngaggnanggctcactntngctncnggntctgnggcgcttgtgccnanagtnccgaaagntgccnatngctcggcggctggctgnaaagagccccgcgaacagcctttcaccgagtcttcaagcttttcaagcttattcttctaagtcaagattgagtggatangccaggactatgtcgngaagagggangangttttgacagggtcaaaaactgaagaaaactaatactgnagaaaaaaatactctttcctcaaaggnaaactatccagcaagagaaagagtgtggtcaaacattataaaatg

SEQ ID NO: 8118 - DNA, 269 bp, Homo sapiens
cccttagcgtggtcgcggccgaggtaccacgagtccacagtgaagtccactccaggttatctgcataggtagcccaggcacctttcctcttttcctttaggtgcctccccttacccacaacctcttatttcatctcaaacacaggctattacaacatgttttatttcactggaaaattctgtaaagaactaaatctggttcccttgaagaaaacatttagcacaagcttaaataaaagttgagaaggagggtaaagagtgcattgcccc

SEQ ID NO: 8119 - DNA, 315 bp, Homo sapiens
cccttagcgtggtcgcggccggggtaccccagctgatgatgttccacaaaagagcaaaacatacacaatctggttccactctacagaaatcctggaactggactacaaagggaatagacagggtgtggcaggagggggttcctcacggttggagtgcgaggttagggacaggaatagaaggtaggtaataaacattcatgtggtattaacttagggcagatgtgtcaatgtatttccaagtttagcataatataggtataaaaattaaataaaaagtttatatgtgtgtgtatatatgggttaatacacaacaca

SEQ ID NO: 8120 - DNA, 383 bp, Homo sapiens
cccttagcgtggtcgcggccgaggtacttgcttgtcacttggaggaaccacatccttgagacagcctgctgtcttgtatgtcttcagtaggaaacttctgacacacgcattcaagggagttcctgcccctgagaagtgttcccatagctttccagtcgcaggttactttcacactacgtcagcttctctggtgagatcagggatgttacatattacttgaaaatgatttcataggaagtgaggatggggcaagaaaggaggtagaagctgaattttgcttaacttcagaaggaaatctgatacttgccttggctagttctgatcaactaaagagcctgtgtctgtacctgcccgggccggcacgctcgaaagggcgaattcca

SEQ ID NO: 8121 - DNA, 173 bp, Homo sapiens
  misc_feature 125, 131, 144, 160: n = A,T,C or G
ccctttcgagcggccgcccgggcaggtaccaacggtggggataatttggggtcatcttagagttcttccatcacacgggaatttctcagctcaccaaatctgggattccgcattctggccattcncttaancttgaaggcctgngcaatatttttttgangttgtcccatttt

SEQ ID NO: 8122 - DNA, 340 bp, Homo sapiens
  misc_feature 1, 15, 33, 35, 39, 49, 52, 58, 61, 67, 91, 106, 181, 189,190, 191, 200, 209, 221, 255, 256, 259, 261, 263, 266, 267,304: n = A,T,C or G
ngtgtgatggatatntgcagaattcacccttancntggncgcggccgcnggnccatgntcnttctanctctccctttctttctacctggangttacagtaagtcanccatcatgtgactatgaagcagcaagcatttgccaaggcaggttaagcagaaagataaaaggaacctggggctcngatatgannnaggcaacancattattgncagctgtatgangagaaagataaagtcttccattgattcaagctanngtntngnccnntttattacaaaatagctaaatattatttctaactganataccatcaggaaacttacctgggacaactttttct

SEQ ID NO: 8123 - DNA, 401 bp, Homo sapiens
  misc_feature 165, 170, 216, 274, 317, 363, 377: n = A,T,C or G
cccttagcgtggtcgcggccgaggtactaaaagttgatggtttatgctaattttaagtgtaatatattttagaattttgtcacatgcattattaatatgatttcatattcatggccttaggaagattaatttaaacaataacaacaagaacaacaacaacaacanaaatncaacaaaaaatttcccccatgtgccaagagcaaattttgaggtccntttatccagataaagtgttttgttatcttgaaccaagaacatggaactttatctttanaggggaccaccagaactcccatctctagtatcattgatttttntaattttgaaatttaaaagcattttttttttttgctttgtttaaanatgaaggcagggcncttctttgcttgacattttttaaa

SEQ ID NO: 8124 - DNA, 586 bp, Homo sapiens
  misc_feature 222, 394, 413, 416, 496, 518, 534, 539, 555, 573, 579: n = A,T,C or G
ccctttcgagcggccgcccgggcaggtactttttttttttttttttttttttgagacggagtctcgctctgtcacccaggctggagtgcagtggcgtgatcttggctcactgcaacctctgcctcctgggttcacaccattctcctgcctcagcctcccaagtagctgggactacaggcacccgcaaccacacccggctaattttttttgtatttttagtanagatggggtttcaccatgttagccaggattgtctccatctcctgacctcgtgatccacccgccttggcctcccaaagagctgggattactggtgtgagccaccgtgcccggcctggacatttggttttaactagatggaagggaagaacattattaatctttaaaatacggntgttgccattttttttttnttnttaacatgcaacataagggtgaaaagcttttttgtcattattatggagcatttttgaatcattaaatttttgttttgaanaagtcatttttgaaattttaanttaaaaaattggttgnaactntttttcccaattcaanaatattttaaggcccttncctttnaaatttt

SEQ ID NO: 8125 - DNA, 583 bp, Homo sapiens
cgccagtgtgatgggatatctgcagaattcgcccttggcgtggtcgcggccgaggtacttggcattggggcaaaactcagttacccacctgaatgccataatggttttcaaggtcaggttattatatgtgtctaaaaaatcttgtcggattatgtcaccataaagaaggtgttcatcctctaaggacaatgccaacattttgtcttccttttcagcctcttggcctaataagaaaaatgtaagaacctcatatccccaccaagactttttttcaccccaagtaactctaatggcctgcctggctttcacatctgaagggtgggaggtcaccagaatgaccagaaatggattttgatgagagcagtttgaatgctctcgaagtgtgaagtgaaagtcttgtctgtaaatcggctcatactcatagaagtacaagtttctgtatgtataaagtcatgctcgatttcaggagagcagctgatcacaatttgcttcatgaatcaaggtgtggaaatggttatatatggattgatttagaaagtgggttaccagtacctgcccgggcggccgctcgaaagggcgaatt

SEQ ID NO: 8126 - DNA, 200 bp, Homo sapiens
  misc_feature 164: n = A,T,C or G
cccttagcgtggtcgcggccgaggtactttttgctttagcagatagatagggcatccaatacaactgaaacaacctgataacaaattaattttatttttcaataaaaaggaatgctctggtttttttaactggctccttgaggaagccagaagatggcatctgntctttaaacaggcttctcttatctgatttgagacac

SEQ ID NO: 8127 - DNA, 333 bp, Homo sapiens
  misc_feature 236, 302, 311: n = A,T,C or G
cccttagcgtggtcgcggccgaggtacagggatgtgatgactgtagctgagatgacaggcaggtgccaccacacctggctaatttttgtagtttagtagagaagggatttcaccctgttggtcaggctggtctcgaactcctgacctcaggtgatccacccgactcagactcccaaagtgctgggattacaggtgtgagccatcatggccgcctgactctttctgatgcctgaagnggctaccttgagtcctgcctggggacccatgcacctgctgttctctttccttcaaggcttctactnacaacttcntgttctactcttcaaaccttcc

SEQ ID NO: 8128 - DNA, 413 bp, Homo sapiens
cccttagcgtggtcgcggccgaggtactaactcatccagtatctgattctgtcttttcctctatccatctgtcttccatctttgcatccatcattcaacgaaatttacagcctatgcagatgttctgtggtcttaaacatgttgtattcagttcagcatggctggcgaggtctcaggaaacttacaatcatggaggaaggggaagcgaacacgtccttcttcatatggcggcagcaagaagcagttcttattaatgcccacctctttgccttggccatgcttcctcccctcccagccgttgttctcccccacgagaatatcttctcttttctgcttcttagtggttctattctcagtatctgaaactctcattttctgtgaagttttcccaggtggttaccccgcgtaccatg

SEQ ID NO: 8129 - DNA, 609 bp, Homo sapiens
  misc_feature 13, 33, 37, 78, 89, 95, 126, 128, 160, 173, 202, 224, 228,231, 232, 248, 254, 259, 290, 294, 299, 300, 307, 326, 329,334, 383, 391, 405, 419, 429, 430, 437, 438, 442, 448, 460,463, 466, 467, 469, 474, 484, 518, 537, 548, 588, 589: n = A,T,C or G
attcgccctttcnagccggctcgcccgggcagngtancaaacccttgcttgccctgtcaaaccctgtttcccttgacncgatgaggaanaaagcngtcttgcttgggggcaaggaaagggggtttncncctgccctctcacctgcccccttcaccaaggncataaggagaagnggttcctttaaataaggtcagggaggaanaatcccgttaacaaggcatgtnaagnttnnatgtaccagttccggntgggcnggtanaggaaagggaggttacccttctggcccggcngacncaccnnccttaanggggccggaaaattttccnatncctancaaccttggggccgggacccgatttaacttatgattggggaattccccnaaagtccnttcgggtttaaacnccaaaggccatttngggtccggtnnaaaatannaatngggganccaattaaggcnttngtnntnttccncttggtctgnttggaaaaaaaattttggttttaatttacccggnctttctaacaaaaattttnccccaaccaancaaaatccatttatcctgaagtcccccgggtaaaaagtcnnattaaaaaaggttgggttaa

SEQ ID NO: 8130 - DNA, 386 bp, Homo sapiens
  misc_feature 131, 141, 147, 156, 179, 272, 363: n = A,T,C or G
cccttagcgtggtcgcggccgaggtactttttttttttttttaaatgcttaagagttttaatcagtccgccataaaaagctcctccccattctccatcttgggggctcagatcttggcttcgggttgagantgagggacangggatntcaaggctngggagaggagagtaaaatatgantgccggctgagggaccagagctgggatcggaagaaaacacaggtgaaaaggagcagaaagagactgctaaccccagtccctgagccaagtcanaaatccaagtccttttatagcatccaggagccaaatgtagtgaaatccacacatcattatcgttcttatctgccaaaggtgcctgttcatntggccgcttgaaaggcaccaggg

SEQ ID NO: 8131 - DNA, 386 bp, Homo sapiens
  misc_feature 79, 141: n = A,T,C or G
ccctttcgagcggccgcccgggcaggtactggtctgtggcctgctaggatccagggtgcacagcaggaggtgaatgtangatgagcaaacattactgcctgagctcaactttctgtcagatcagcagtggcattagaattnttcaattaggagcatgaaacttttatttgtgaactgcacatgcaagggggatctagggttgcacactccttatgaagaatctaatgcctgatgatctgaactggaacagtttaatccccaactccagtccgtgggaaaaatgtcttccacgaaactggtccctggtgccaaaaagttaggggaccactgatttagattatgtcacatgtcccatccactcatttaacattaaggctttcatccct

SEQ ID NO: 8132 - DNA, 345 bp, Homo sapiens
ccctttcgagcggccgcccgggcaggtacagccaagggtctacggtattagcaaacacttttatgggtgcaagtgaacatatttttcagtaattggaaggatattttttgcaggtgtcttagtttgggttcccacagcagcagacttgagacaggattagattgcaagtagtttatttggaggtgatcccagaaaacacttgtagggagtagagaagtaagacagaagagggaaggaagccaatacaaggggatttcaaaaagttcatggagtcacaaccagttataaacaccactgcactcggaccagcccccgcgtacctcggccgcgaccacgctaagggcc

SEQ ID NO: 8133 - DNA, 554 bp, Homo sapiens
  misc_feature 517: n = A,T,C or G
cccttagcgtggtcgcggcccgaggtactcagaaagggattagaaaataattacaaaaatattttgccacatattaacatgaaactacaatcactggccgtaaaatatagtcaaatgcaatcaagctgaaaagaaaaggtggaaatctccaggttatctgcccaggtggcaggaaatcgacagccccgagaacgcaagtgctgctgtgccgccaggcccagggctatgatccaaagtgacgggcagactaccggcctgcaccaccccactcaggctgcacacaagacagccagcttaggatctccgtgggctgctacctatgtcacagagggctgattaagggcttgcagtgttccaaatagggccttcaatgagaggagtggaagctgcattacaagaaaattcactggggctgcacttgactcttcaacttggcgagtctcatgaggcactcgtccttcactggctcctggcagctaaatgctccgggtcatcaagggaccttcatgcacatgtnctggttaaccttctcagcagtgggccctggaaaactc

SEQ ID NO: 8134 - DNA, 364 bp, Homo sapiens
  misc_feature 3, 188, 264, 277, 311, 335: n = A,T,C or G
ccnttagcgtggtcgcggccgaggtacccaaggacattgcctcagggttgcaaactctttaaaggaaaatttatccatatatccatgtattatatagaagaataaaaattgagtttactccaaaaaaaaaaaaaaaaaaaaagtacgcggggggaatatcacttttgatgagattgtcaacattgctngacagatgcggcaccgatccttaaccagagaactctctggaaccattaaagagatcctggggactgcccagtcagngggctgtaatgtntgatggccgccatcctcatgacatcatcgatganatcaacagtggtgctgtggaaatntccagccaggtaagtacaaaggaaaacat

SEQ ID NO: 8135 - DNA, 591 bp, Homo sapiens
  misc_feature 5, 38, 43, 61, 64, 69, 76, 77, 160, 168, 180, 205, 215, 219,220, 239, 248, 276, 289, 298, 303, 305, 341, 344, 355, 385,390, 405, 419, 428, 436, 441, 447, 497, 504, 519, 553, 571,577: n = A,T,C or G
gcctnaacgtgggtcggcgggcccgaggtcccactggncctcnaccctgggtgacagagtngangactncgtcttnnaaaaaaaaacttttggctttggtattattaattttttggccctttaccaggtgggattcattttctagttagggaaaagggancaattaanggattttttttnattcaaaaaaatggtggttccattnggcccaagtnaaannagaaagggtaaataattcnttttttccntaaaatttttttttcccccccccccccnaaaaaaaattaangcctccctnttatnancctttaaaaaaaggtttcttcaaaaatttttttttnccnttttattaacntaaaaaaaatggttggaatttggtttttcnttgtnttcaaatttggtggnttattggccttttnaatcaaccntttatttnttttnaagggnaaaaaaatttccccatttttttttttcccccttttggttggccttaaagnggttaanaaagaattttttaanttttaaaaaattaaattttttttgggggcccttnttcaaattaagggttaanctttcnttttttctttttta

SEQ ID NO: 8136 - DNA, 547 bp, Homo sapiens
  misc_feature 33, 61, 227, 365, 456, 494: n = A,T,C or G
ccctttcgagcggccgcccgggcaggtactttnttttttttttttttttttttttgcccanaggtcctttatttttttttttaacacctattatgccatgaattcatagggaataggttccagcagctcaggctccttcccattggttctcacaaagtgtgcttctctgggtggagcaggctggcgctttagttgaacccaggtacgcggggcttgagcaggattanataaggctgttctttaaatgtctgaaatggaacagatttcaaaaaaaaaccccacaatctagggtgggaacaaggaaggaaagatgtgaataggctgatgggcaaaaaaccaatttacccatcagttccagccttctntcaaggagaggcaaagaaaggagatacagtggagacatctggaaagttttctccactggaaaactgctactatctgtttttatatttctgntaaaatatatgaggctcagaactaaaaattaaaacctntttgtgccccttggtcctggaacatttatgttccttttaaagaaacaaaaatc

SEQ ID NO: 8137 - DNA, 530 bp, Homo sapiens
  misc_feature 213, 371, 396, 416, 447, 448, 464, 489, 500, 503, 509, 516,517, 520: n = A,T,C or G
cccttagcgtggtcgcggccgaggtacagaactgaaattcaaatatcgaggatagcaagaaaagctggcaacttctatgtatctgcagaacccaagttggcgtttgtcatcaggatcggaggttatcaattgggtgagcccaaaggtctgaaaggtgttgcaacttctttgccttcatcaaatcttcaatagaaactttgtgaagctcagcanggcttcaataatgtgctgaggtttgtagaaccatatattgcatgggcatacccaaatctgaagtcagtaaataaactaatctacaaatgtgggttatagcaaaatgaataagaagctacttgctccaacagataataccttgattgctcgatctcttnggtaaaatatggcctaatctgcatnggaggatctgatcatgaganctatactgttggaaaaaatgcttaaaagaanncaaataaacttcctgntggcccttcaaaattaatccctctngaccagtttanaantggaanaaaaaannccnccaatttttg

SEQ ID NO: 8138 - DNA, 730 bp, Homo sapiens
  misc_feature 5, 7, 10, 21, 22, 38, 40, 41, 43, 44, 45, 57, 61, 84, 99,117, 173, 183, 206, 217, 218, 231, 252, 258, 268, 272, 295,298, 306, 311, 321, 330, 334, 339, 345, 346, 350, 366, 367,368, 374, 375, 378, 384, 390, 410, 411, 412, 422, 425: n = A,T,C or G
  misc_feature 437, 442, 458, 460, 462, 465, 466, 481, 496, 501, 505, 507,514, 515, 519, 522, 525, 526, 542, 547, 556, 557, 571, 572,587, 594, 596, 606, 619, 626, 627, 631, 636, 650, 653, 667,670, 673, 676, 677, 678, 680, 681, 684, 699, 705, 716: n = A,T,C or G
  misc_feature 718, 722: n = A,T,C or G
ccagngnganggatatctgtnnaatgcgcccttagcgngnntnnnggcccgaggtantatnaaccccccgactggcaggagatngggacttatttccgnggatctgaattacaaaantactttacaaagattctagaagatgacctaaaagccatcatcaaacctcaatatgnagaccagatncctaaggctgcaaaggggacagngggaactattnnggaccgaaaagangaaacaaagacacaggcaatnggatgncaagcagctngatntaacccacctaaaagaacgaaanggngaagaacnttcangaggagaggngcagagatngccngggcngccggnngcanacagaaagccgaaatnnncaaggnngangagccnctaggnacctagaaggcaagcagcgnnnaaaggccgcnaanaccaaacgaacnctaanaaaacccagaaaggananancanngggggggggaacaangaaccaaaggggaanagacnaacncnccgaccnnaacngcnggnnaaaaaggggggacccngcccnggcggccgnncgaaagggcgaaannccaagcacacaggcnggccggnanaagggggaanccgagcccggganccaagcnngggnggaancaagggcaaaagcnggnacccggggggaaanggnaanccnnnannaancccacaaaaaaccangccggnagcaaaaaggngnaaanccgggggg

SEQ ID NO: 8139 - DNA, 461 bp, Homo sapiens
  misc_feature 17, 141, 148, 157, 172, 176, 180, 249, 258, 272, 287, 301,378, 393, 452, 461: n = A,T,C or G
cccttagcgtggtcgtngccgaggtacatgggactacaggcacgccccaccatgcccagctcatttttgtatttttagtagagacagggtttcaccatgttggccaggatgatcttgatctctttgacctcatgatcccgnccctttnttggccctncccaaagtgcttggnaatnacanggccgtgaagccacccacaccttggcccctctaattttatttcttcttttaaaggagaagagaaaaacntattggagnaggcccaaaaattnttttaattaaaaatnctttacctttaagncaccaaggggaaaaaaaatggaaatttcgcctaattatagggtgatgaaagcatacacaaattggaacagaaaatcnatcacatttttagtnaaaaggcaaaaattttgagactttataaagcttatattggtagctttattttttgggtngggggaagn

SEQ ID NO: 8140 - DNA, 391 bp, Homo sapiens
  misc_feature 168, 186, 191, 202, 203, 208, 209, 218, 224, 233, 236, 238,239, 255, 257, 258, 268, 272, 278, 280, 281, 288, 291, 295,296, 299, 311, 314, 316, 339, 340, 342, 349, 360, 363, 367: n = A,T,C or G
ccctttcgagcggccgcccgggcaggtccgggcaggtacttttttttttttttttttttttttttatttttttttttttttttttttttttttttttttttttttttttttttttttttttttttttttttttttttttttttttttttttttttttttttttttttnataaaaaaaaaaaaaatnttttnttttttgaggnnttttnnaaaaaaaantaaaantatgggtgnttntnntaaaaaaaaaaaaaancnncccctaaaanaaanaattcntnnggggggnatnaaannttnttaaaaataaanaanancaaactaaaaaaaaaaaaaaacnncnttttttngtaaaataaanttntttnattattaataaaaatttataaaaa

SEQ ID NO: 8141 - DNA, 399 bp, Homo sapiens
  misc_feature 380: n = A,T,C or G
ccctttcgagcggccggcccgggcaggtacgagaactttcttctctcaaatggtttcggccataactccgggattcttctggatatgtatcctcctttcgatgagtatctcgaccttcacggtccctgtagtcatgggcatcacgagtggaccgagaatctctgggatcacggctctctttggtatctctgctataatctctcatctcccttgagtcccgcatgtctctggagtctcttagttcccttcggtccctagtatctctggcatctctccgatcccgaccatctcgaggttctctgtcatctctgtggtctctagaagagctctgatcctgttcatattctcgttcttctcttgagtccttttctctgtctcgnttgtccctagtatcttccc

SEQ ID NO: 8142 - DNA, 357 bp, Homo sapiens
  misc_feature 139: n = A,T,C or G
ccctttcgagcggccgcccgggcaggtactttaaacctatctggaagaagaaatcaataggctgcaatgtcatgttctacttttcccatagtgttactgaggtttccaggaagggagggagcacttttggtttcatttnagaaaaggaagatgaaagtgaaaacagaatagccagattactgaaaccaaatgtcatcttaagaagcgaccttgtcagcttagctaaatagtaattccttccagtcatattcctcaatccttatctgcttcataggttatattatcaatgacaaaaagggactgtaactcccgacatgggacaatggctacagaaaacactaaatttttgattattaa

SEQ ID NO: 8143 - DNA, 412 bp, Homo sapiens
  misc_feature 14, 376, 380: n = A,T,C or G
ccctttcgagcggncgcccgggcaggtacaccaaggtggtgcattaccggaagtggatcaaggacaccatcgtggccaacccctgagcacccctatcaactccctattgtagtaaacttggaaccttggaaatgacccagcccaagaacttcaaggcctccccaagttctacttgacctttgtccttaggtgtgaggtccagggttgctaggaaaagaaatcaagcagacacaggtgtagaccagagtgtttcttaaatggtgtaattttgtcctctctgtgtcctgggggaatactggccatgcctggagacatatcactcaaatttctctgagggacacagataggatggggggtggtcctggtgttattttgntggnggtaccattttaaaaaatgacagggggtttat

SEQ ID NO: 8144 - DNA, 545 bp, Homo sapiens
  misc_feature 118, 142, 143, 166, 174, 200, 212, 220, 236, 238, 241, 256,264, 267, 268, 276, 279, 292, 296, 302, 315, 316, 317, 319,323, 334, 335, 338, 340, 347, 359, 370, 376, 381, 382, 383,385, 388, 400, 403, 417, 422, 424, 428, 436, 437, 443: n = A,T,C or G
  misc_feature 444, 450, 462, 463, 465, 468, 470, 475, 482, 493, 496, 499,507, 514, 516: n = A,T,C or G
cccttagcgtggtcgcggccgacgtactatatgccatggatgatgaatttcccatagaagctggtgacatgtatcctggaagctctgggctacacactggcaatgacactttgctttngtaatgcttcagtggtgttttgtnnaaaaggtttttggtaatgggtcnaggacccnttttttttccttctccaatggaaagnggactaaaggcnccccttgnttgttaaaatgaaaanancanttggcttaccaattntccttggntgnnaaattttntanttggaatataagntttnaaaacnaagttttttcatnnngnaagnaatatggaagnnaanangggtaanatttttttggtnaagttaaaggnaattanaaaannngnaanatataaatattntanaaatacaagtatantgccntnatanatttttannaatttnntttttntaaggtaatttnncnaananttaanttttatnaattaattggnggnaangaatatantttaggngngtaaaaaaaattaaatatttaaagttttg

SEQ ID NO: 8145 - DNA, 353 bp, Homo sapiens
  misc_feature 274, 302: n = A,T,C or G
cccttagcgtggtcgcggccgaggtaccattagtaaagttgctgtgcagaattacctcagtcctattctaagcttacagttcagttgattttattgtcttcacctaagtatatacaattcacatatgggaagaaaaacactaaatcaagatggttattttcactgttttgcttaagattcatatttaaatataaatcaagaagttaatccacagtttgagagatacttatattagaaattttaaatgttaaatacataattgtaaatattggtngtatgtacctgcccgggccggccgctcnaaagggcgaaattccagcacactgggcggccgttactaggtgggatccgag

SEQ ID NO: 8146 - DNA, 339 bp, Homo sapiens
  misc_feature 248, 309, 313: n = A,T,C or G
ccctttcgagcggccgcccgggcaggtacctttaaaaatacataatttaagtttgcaagctatattatgctactttctattttccttgttactttatagcaattcattttaccctcacaaagtcaatttagaaccttatcattaactgggatgtgtaagcgatatttttgggcctctgggtttcatgtgtcaatacaaggaatatttatttaaaaataagatttatttagaggaggcacagtgttggntgatctggggtgacaccacccatatttttaaaaaacctttgtatggtttctctaaaatttngttngttgactggaatataattagaccccc

SEQ ID NO: 8147 - DNA, 396 bp, Homo sapiens
cccttagcgttttcgcggccgagatttcaatttaaagtgagagggagatatgcaactcttcctttcacttggacacttgcaacaagcttgatcaacgctcagcctgcagcccaggatatgccgttgacccaacacaaatttcggtaaactttcttaaaacattatgagtttttttctgattttgttttttagcttaacagctatcattagtgatagtatattttatatgtggcccaagacaattcttcttccaatgtggcctaaggaagtcaaaagattgaacacccatgacttagaggctattatagggttattaattggcctaatttcaatttttttctgaggaaatagagaagcccaaggagagtgagagagatgagagagcagttggcaaaa

SEQ ID NO: 8148 - DNA, 422 bp, Homo sapiens
  misc_feature 133, 245, 267, 295, 390, 399, 407: n = A,T,C or G
cccttagcgtggtcgcggccgaggtactgcacatgatcagaaaacagctctggaaaatgacagccttcatttctctgaacatactgccttatgggacagatcaatgaaagagtttctagccaaagccaaagangactttttgaaaaaatgggagaatccaactcagaaataatgcccggactttgaagattttgaaaggaaaaaaacccttggaacaggttcatttgggaagagtcatgttggtnaaaccacaaagccactgaacantattatgccatgaagatcttagtataangcagaaggttgttaaactgaagcaaatagagcatacttttgaatgagaaaaaggaatattaccagggccagttgaaattttttcctttttccttngttccgacntgggaagntattgccttttttaa

SEQ ID NO: 8149 - DNA, 235 bp, Homo sapiens
  misc_feature 6, 7, 11, 17, 24, 29, 55: n = A,T,C or G
cccttnncgtngtcgcnttcgatntacanaaacagctggattgggacagcttggngtttaccttacttgaacaaggttcgaacagttggctgcctttgatgggctgcaacacagtgattggtataagagtaggttacagcctgtttacacatgcagttaggttacaattcactgtgtgttgagaaacctttaggccaaacttaaaatttgtaaggaggcagctttaggcttaact

SEQ ID NO: 8150 - DNA, 415 bp, Homo sapiens
cccttagcgtggtcgcggccgaggtactactactccctaacccaaaccaggtgattctagtgaagactgtcaataaacggagcatgtgatcaagcagggcccatcagaatccttccctaagatttttataaaaagctggacctattcttttttccatttgagtgggcaaatatttgaagatatgaggtctaaagctgtgatggcttattctccatccctgtgtaaattctggtctatagtaagcgaaaacaaggccattaggcagagggcagcagagacataaggtgagaaagagtgtggtctctggttttctagaccctgattctggtttggaggcttggctgatcacctcttcctttgattctgatagaaagctcaatgtatctttctaataaaacccccctttgctttgctt

SEQ ID NO: 8151 - DNA, 290 bp, Homo sapiens
  misc_feature 188, 251, 269: n = A,T,C or G
cccttagcgtggtcgcggccgaggtacctctctgtctcagaaactgaacaactgggagaacagtcgacagggcctctccaaccatcttcaggtgactaaagcagcatatgaagtataggtttgtgtcacttcttctcttccacagaagaaacatctccagacactgatcacaggctacccagggttgncttctgggttgctagagcctggtaatatctctgccttgctgcaagtcacttatgctctcgtantcgttctcctttgggacnagaccgtggtggccattggtc

SEQ ID NO: 8152 - DNA, 419 bp, Homo sapiens
ccctttcgagcggccgcccgggcaggtacataaacagcgccagctgtggtttcttctggactggtgtggctgtcaaaaggaatctgaattcaaggcagttgtaaagtaagtaaataaataacatcagcaaaagcaaataaaaagcaacccctaaaaaaacagcgaccaaaaaatatttttgttaggacacgttaggtcttcattaagaggaacttgcaaaacttgattattcactttctgagtttgaacagagcctggtctctgggaaacaatccaaggataagatgaaacctgacgcttgccttatcagactttgctgggaacacagttttaaggaaaaagcaatgagaaaagtctacttaccaaagtcacaaacttcaactccttggctagtacctcggccgcgaccacgctaaggg

SEQ ID NO: 8153 - DNA, 166 bp, Homo sapiens
ccctttcgagcggcccgcccgggcaggtacaaagaaacagacctgctaatacttttcaaggacgattactttgccaaaaaaaatgaagaaagaaaacaaaataaagtggaagctaaattaagagctaaacagggagcaagaagcaaaacaaaagttagaaagaaga

SEQ ID NO: 8154 - DNA, 322 bp, Homo sapiens
  misc_feature 23, 188, 219, 235: n = A,T,C or G
cccttagcgtggtcgcggccgangtactctatttcagatttcctcaaagctgggcagttgttagcgagaatgaccaatttcgctttgccttgtctgatcatcttcagagtctgcttgtactgccttgccagcacaaatggaagatctaaccaaaacagttctgcctttgaatattgacagtggctcanatcctttccttcctttacctgcagaaagtanttcaatgtctctcttnccttcaccagcagatagtgggactaattctgttttttcccaactggaaaataatacaaatcattattcctcacagattgaaggaaac

SEQ ID NO: 8155 - DNA, 454 bp, Homo sapiens
  misc_feature 15, 22, 77, 103, 125, 128, 136, 145, 153, 154, 157, 178,179, 181, 197, 217, 235, 248, 255, 268, 295, 303, 304, 312,326, 335, 343, 365, 369, 384, 394, 399, 402, 404, 408, 427,429, 435, 446: n = A,T,C or G
cccttagccgtggtncgcggcncgaggtactaaaaccgctgtcaaaaacagcccgcctggaatgtgtggtgtctggnaataacaatttctgcaacatctgtantattgggtatcgagagagaccntgngtgaagtncataccagnttcctggnnggntccattttttcaatattgaanngngccacctggttccagnaaaaaggggaaatgccgggncaattttcccgttcaagngccaaaaaatttntcgaagnggttggggaattnaggggaaataacccttagaaaaaaccnggttcttnnaccaaatncaccaaacattccnttccatccncaaatttntccaaccaaatatggttatagnaagngaaaaaaaacaaggngggaaccaantaatngancnttanaccccttaaaccttaaacntngggtgnccccctattgngatggggg

SEQ ID NO: 8156 - DNA, 364 bp, Homo sapiens
  misc_feature 133: n = A,T,C or G
ccctttcgagcggccgcccgggcaggtactcctcacttggtatatagccaagctccacctccaccaatgacctctgctccaccaccaataacccctccccctggacatattattgcccagataccaccttatntgaatcatcctcctccaggacctcccccacctcaacatggtggtccacctgtaactgcaccccctcctcaccattataatcctaactcattaccccagttcactgaagatcaaggaactctgagccctccatttacacaaccagggggaatgagtcctggtatatggcctgcaccaagagggccaccaccaccttcacgattgccggggtccgccttctcaaaaccccact

SEQ ID NO: 8157 - DNA, 372 bp, Homo sapiens
  misc_feature 32, 127, 129, 134, 136, 142, 143, 147, 187, 194, 203, 230,255, 282, 285, 286, 290, 291, 300, 308, 310, 314, 332, 347,348, 349, 368: n = A,T,C or G
cccttagcgtggtcgcggccgaggtactcgtnaataggctcggtcatatataccacctcgaagccccgtttccgcactcgcatccacaaaagctgagttggccacctgctctttgctctcaccagtngntggtnanttatanngggnacctttctgttgtccttccttttcaattgccgaagaaaancaattancttctttgnaaccagaaaggattggttcattccttnattctttctccagtaccttgggggnaggggttatttggaaatacgcctggcnagnncaanncctttcaanggaaccangngtcnggtgtcgtgaccgcggtnttaagattgggggannntttcttttcccgttggggnaatt

SEQ ID NO: 8158 - DNA, 327 bp, Homo sapiens
  misc_feature 125, 132, 138, 143, 145, 150, 152, 156, 157, 165, 169, 180,181, 182, 183, 184, 185, 186, 188, 190, 192, 193, 196, 204,208, 212, 220, 223, 226, 228, 229, 232, 234, 239, 240, 244,246, 250, 251, 254, 261, 272, 274, 276, 277, 289, 293: n = A,T,C or G
  misc_feature 296, 304: n = A,T,C or G
cccttagcgtggtcgcggccgaggtacttttttttttttttttttttttttttttattttttttttttttttttttttttttttttttttttttttttttttttttttttttttttttttttttntaaaatntaaaanaatananatttntntatnncattactnaaanagaaaaaaaannnnnnnanantnnatntttatatnttanattnattataanccnctnannatncnaaaannatananaaanntantaacatntattatattanantnngtgttttttaanaaanaanataaaaanaaatgatgttttttttataaaaa

SEQ ID NO: 8159 - DNA, 226 bp, Homo sapiens
  misc_feature 43, 123, 128, 170, 181: n = A,T,C or G
cccttagcgtggtcgcggccgaggtacagcgtcatataggctntgcctttaatgatctcttacggttagaaaacacaataaaaacaaactgttcggctactggacaggttgtaatattaccanatcanttactagcagatgtcagtttgcacatttgagtccctttatgnaaatttcatanaatacaagtaacttgactcttttcatttgttgggcttttaaataa

SEQ ID NO: 8160 - DNA, 409 bp, Homo sapiens
  misc_feature 18, 149, 262, 314, 343, 354, 387: n = A,T,C or G
agaaattcgccctttcangcgggccgcccgggcaggtactgaggctgtaatacagccacagcctcttccccatcccctccagccttatctgtcatcaccatcaaaccccttcccatgcacctaaaacaaaaatctaaactttgtaattncttgaacatggtcaagggcataccattattcccttctggcctgagaagctcttccttgtctcttaaatctagaatgatgtaaagtttttgaataagattgactatcttacttnatgcaaaagaaagggacacatatgagattcaatcatcacatgagacagcaanatactaaaaagtgtaatttggattataanagtttagatanaaatatatgaaaatgccaaggagcccacaaganggggaatggttttaatgggggc

SEQ ID NO: 8161 - DNA, 447 bp, Homo sapiens
  misc_feature 99, 109, 110, 117, 123, 130, 131, 136, 138, 143, 150, 153,169, 170, 171, 175, 182, 184, 194, 197, 205, 206, 211, 214,232, 238, 243, 260, 263, 266, 294, 295, 297, 303, 309, 317,318, 321, 323, 352, 353, 358, 359, 360, 365, 367, 368: n = A,T,C or G
  misc_feature 369, 376, 383, 385, 390, 391, 395, 400, 412, 432, 433, 434: n = A,T,C or G
ccctttcgagcggccgcccgggcaggtactggagctatactgacatcagtaatagtgacacccctggatgttgttaaaattagactccaagcccaaaanaaaccccttnncccaaangaaaanggttttnnatatnangaaanggggctnttngggacttttttttttnnntaangggggcncngggaaaaagnggngggcccannaaaanttntgggttttaaaaaaaagnccaagnaaaantttttccagggggaaancanttnggggtttccttttttttttaaaaaaaanntnttttcnaaaaangggggggnncantnaaaaaattttttttttggggggggggggnngcccnnnccccncnnnccccccnaaggggngnggggnncccnccccnccccccccaaantttttttttttttccccccnnngaaaaaaaaaaaa

SEQ ID NO: 8162 - DNA, 676 bp, Homo sapiens
  misc_feature 26, 35, 126, 180, 190, 304, 330, 338, 357, 401, 407, 508,527, 547, 564: n = A,T,C or G
gccgggcccgccccgggccagggtancatcaatcnagtttttcaaccccacaggggccaagaaactttggcccttccatttcaaggccatcttctttttaacaaaccttgggcagccaaatggcangcaatttaaaagggggttttttttaaggcccagggaacccttggcttggttttngcaaagttcncttggccccccttttggtaaggtggttttaccttccttgggggttggtttggccaccaaccttcccaattggaatttaaccttaaggaaaaggaaacaaaaaccaaccccttgnaaggggccatttgccaaaatttcttnggcttttnggggaaggttggccaattncttaattttttaaccaattggaaaaggcctttggctttcaaccngggggnaaggcctttggggttggaaatttttctttttcccaaagaaattaattgggggggtttttttcccggttaaaggggtttttgggggccaaaaaaaaggaagntttttaatttcaaaccaanccccaatttcaaaggaaagnaattttttttaaccccnaaattgggggaaaaaaggaaggaaagtttaagcccttggaaaaggaaattttatttaattttggccaaaattggtttttattttgggtggaaaaaaccaattttttaaaacc

SEQ ID NO: 8163 - DNA, 708 bp, Homo sapiens
  misc_feature 483, 581, 588, 600, 665, 671: n = A,T,C or G
ccctttcgagcggccgcccgggcaggtaccaccggaactggtgcttggagcggaagggaagtgagatcagtcgattagtcaccaacaccatcatcagcattgccagagaggtcgagagcagacatcatggaatcagacagcttgctggcgattttatctgcacgtttctgcatcttcttcttatttttcagggcagatgccagagcctggccctgttgcagggggtccgtctccatgatcctctgcagcactgagcggcggtccactgagcagacatccaccatactgttgctcttagggcggtggtccgcattgcgtttagcccaccccatctgatgacggttcggattggtgcaatacccagtgagatctccaatcttatacacggtggttttattttcaatggcatctgctattttcgtcatcggagaatggagcaacttgatctccatttcaagtgggtccgtgtcacccaacaagctnatcagattctccggtggccaagcattccatggtgtcttcattggcctgctcagtatcctcgaaggtcaaagacctcggtcatttcttaacgatctcancactganatgggtgggcanaatgtgaatggctggtggtggtatatagaaactgatctttccgcttacccatcagctaggacagntttggnccgcctgttcttgactatataaaccctcctttttttt

SEQ ID NO: 8164 - DNA, 415 bp, Homo sapiens
  misc_feature 156, 399: n = A,T,C or G
ccctttcgagcggccgcccgggcaggtacccaaagttttataaatcaaaagccctaatgataaccattttttagaaattcatcatcactggtagaaatcagaagcctgtaattcttttctttgattagaagtgggtagggacactgtaatacctgnttccttccatgttttccatgcatacaaatggttatgtggttactctacactggtaaatgcaggtattcaaattccacttgaagccgtggggcctgggaagttagagactaagcttttaccttattactttcaatgattttactgaagttaaagctgataaatctcttcgcggctgaatccaaattcttcaagtatcttcctcagtgtggttctcctattgaaagggatcccttttgaaagaanggatggctgggggtgg

SEQ ID NO: 8165 - DNA, 386 bp, Homo sapiens
  misc_feature 283: n = A,T,C or G
ccctttcgagcggccgcccgggcaggtactcagaagtcagagttgagagacagaggcaccccggacagagacgtgaggcactgaataaatagatcagaatgactgaaaaagccccagagccacatgtggaggaggatgacgatgatgagctggacagcaagctcaattataagcctccaccacagaagtccctgaaagagctgcaggaaatggacaaaggtgatgagagtctaattaagtacgcggggcgtatgtgaagcagctatgagtgctgtgattttgnttttaaaaatttttacacttcttgttgaaatatatatgcatataaatatatctatatctatatctatatctaaaacacccctggaccattaaacgtaaattaa

SEQ ID NO: 8166 - DNA, 372 bp, Homo sapiens
  misc_feature 123, 209: n = A,T,C or G
ccctttcgagcggccgcccgggcaggtacagtgcatattggcggcgcacgcctcattacgattcgcctgcttgcttctcctgttcaatcgtttctttggaaggcagtggatttttctctcgcngtctctgtcttcttcagtttcgacttatcgaatttctcgatctcagccatatcgggtttgtcagacatggttgcggaggaaaagcnaagcgaggcgcacgagtacgcggggcttccttctcgcctaacgccgccaacatggtgttcaggcgcttcgtggaggttggccgggtggcctatgtctcctttggacctcatgccggaaaattggtcgcgattgtagatgttattgatcaggaacagggctttg

SEQ ID NO: 8167 - DNA, 335 bp, Homo sapiens
  misc_feature 3, 9, 80, 143, 179, 191, 235, 254, 280, 284, 301, 304: n = A,T,C or G
ccnttagcntggtcgcggccgaggtgctttttttttttttttttttatgtaacacacaacggcaagggagtttaattcanaatatacagttttccaactcagtaagaaaataaacaattccattttaaaatgggcaaaacatntgaatagacaatcattaaagaaggtatataaacagncataaacatttnttcatatgctcaatattattagttattaaacaaaaacccattanaatggctaaaattctaganttcaacaatgtcaaagaagtttattngcantgtgggaaataactggnaanatctcaccagaattacctggttgggggaaat

SEQ ID NO: 8168 - DNA, 379 bp, Homo sapiens
ccctttcgagcggccgcccgggcaggtactcctagaagaaataacaaatttgtcatcccaggtggaagaaaactggacccatttgcaatcactcttcaatcaaagcatgtgtattttaaattatctcaaaagtgctttgttgtaaaaataaatttgtgactaaacaaagactttcatattaaatgggttcaattgaactcatttcttattttccaagtgtcaatgtgaaaagaaaataaatgctagcatactgactagtcagtatatctccactttaaatgctaaatactttcttgaaataaaatcgcacctcccggccaggcatgatgggataatgcctgtaattccagcactttcagaggccaaagcgggagggatt

SEQ ID NO: 8169 - DNA, 417 bp, Homo sapiens
cccttagcgtggtcgcggccgaggtacatgctgtatgattccatttttataacatgctactaatgacaaaactaaagatgaaaagatttctgattgccaagggttagggctgaggagaggttgtgactataaacaaggagcatgaggggagttttgcattgatgcaacattctgaatctcgattacggtggtggtgacatgaatcaatatatgtgttaagatttcttaaagctacatataaaaaacaaacaaaaatgcatgcatgttaaaactggtgatttccaaataaattctgtagttaacagtattgtaacaatttcactttcctgtatttggtaatgaactatgcttatgtaagttgttatctttggaagaagctgggttaagggcaagaactctggaatattttggtaagat

SEQ ID NO: 8170 - DNA, 305 bp, Homo sapiens
  misc_feature 115, 131, 153, 168, 171, 177, 178, 191, 196, 205, 211, 217,234, 238, 239, 246, 248, 256, 301: n = A,T,C or G
cccttagcgtggtcgcggccgaggtactcccgattgaagcccccattcgtataataattacatcacaagacgtcttgcactcatgagctgtccccacattattgcttaaaaacangatgcaatttcccggnacgtcttaaaccaaaacccacntttcaaccgcctacncgnactcgnnggggtatacctancggancaaaatgcntcatgnaaaatnctgtgagtagtcaaaanccannatgtttntnaatgtcancattcggttcccttagtaattttaattttgcgcccccttaaaaanattc

SEQ ID NO: 8171 - DNA, 568 bp, Homo sapiens
cccttagcgtggtcgcggccgaggtacgattagctgtcaccaagatgtgatcctctccatgtccttcaacaccaacggcagcctgttggccccacctgcaaagaccgcaagattcgggttattgacccccgagcagggaccgtcctccaggaggccagctacaaagggcaccgggccagcaaagtgctgtttctggggaacctgaagaagctgatgtccacaggcacatcccgatggaacaaccggcaggtggccttgtgggaccaggataacctctctgtgcctctgatggagggggacctggacggctcctcgggcgtgctgtttcccttctatgacgcggacaccagcatgctctacgtggtggggaagggagatggcaacatccgctactacgaggtgagcgccgacaagcctcacctgagctacctgactgagtacccttatttgatttaaaagcatgaatatatgagatttactagcagtattaagtatttgatagagctacgtgattttttgggaagaaatttgttatatggtatgtaagggtaatttggatataattttt

SEQ ID NO: 8172 - DNA, 253 bp, Homo sapiens
  misc_feature 108, 114, 141, 143, 145, 152, 153, 156, 164, 175, 190, 196,206, 216: n = A,T,C or G
cccttagcgtggtcgcggccgaggtactttttttttttttttttttttttttttgtagagttggggatcttgccttgctaaccaggctggtctcaaacttgtggcttnacgcanttccccacaccttaaaccttttcaaanantnggcttgnngantttaccanggttgtttaangccccaccccattgncccctngaatttcttngtgaaaaatngccttatttttctaaaaataaaatgattgggccattt

SEQ ID NO: 8173 - DNA, 468 bp, Homo sapiens
  misc_feature 141, 197, 232, 255, 256, 257, 263, 268, 277, 286, 292, 296,300, 301, 303, 324, 334, 341, 344, 354, 356, 363, 385, 387,391, 405, 419, 427, 431, 446, 454: n = A,T,C or G
cccttagcgtggtcgcggccgaggtactatttgttttccctcatcatgaatttgagccgtgatgcttatgagattcgcctactgatggagcaagagtcttctgcttgtagccggcgactgaaagggttctggaggaagaantcccagggaggaaagtgaaactggggggacttgggggggaccaagggacctcccanggaaggaaggtcttgccccccaacttggcctttgnaaaacctttggggcttggcaaannnccctgnctccntgggcttcngaaggtccntttaanaagngtannantccccccccattttttttgtnttaaaaaacngttgggnttnaaaaaaaaangnccctggnagaattccttcttttcaatttncnctcnttggggaacaaaancttaagtggccccntctttggnccgnctttgtagggccccncttggggnaatttggtgggggg

SEQ ID NO: 8174 - DNA, 503 bp, Homo sapiens
  misc_feature 111, 113, 156, 180, 181, 182, 217, 221, 227, 229, 240, 242,260, 277, 279, 319, 328, 329, 364, 367, 374, 388, 390, 392,397, 439, 442, 460, 489, 490, 491: n = A,T,C or G
attcgccctttcgagcggccgcccgggccaggtacatattattagcatagaattcatcatttttcagcaagatagggaccacttctcttaaagtctttactgatttcccgngncacttctgggaaaaggaatcaaaatccccgatttggtttggtnttattgcccctaagataaagtttnnngttggggaccccattgggccccttggaataattgntccnccaccntngggttttttangnccaaaattggggggggtnggaattggggccaattncnattccaacccaaagtcccggaattcctaaaaaaaatttanaagtgggannggccaaattttggggaaggggaaaaaccccctttnttngtttccncggaaacccggggnananttttnaaaaaaccaaggtttttccaaattaattttccttttttaagnttntaatttcaaccttttggnctttttaaaaaccgcccaaccttcttggnnnaaagggttcctt

SEQ ID NO: 8175 - DNA, 416 bp, Homo sapiens
ccctttcgagcggccgcccgggcaggtacagtcaacatttatctggagttgtctgttcatgcttctcaatcttatcatttcctcaggcgtagggatcgcagtggtgcagctgactcttctgagccgtctctgcatcaggtcatgctccataccattaacttcagacttcaaccgctctagctcctctttctcaagtttcagttgctttgctaacctctccatccttgctcgttgatgtaacagcaaggcttgtgtgtaggcatagtcatctgatccagaactagaacttctctgatatttatggcttcccttttctcccccagagcctggtatcactgaaatgggctgaataggttctggtgctgcagagcgctcttcttggtccactaaatttaaaagattttcaagtcgttgct

SEQ ID NO: 8176 - DNA, 380 bp, Homo sapiens
  misc_feature 233: n = A,T,C or G
ccctttcgagcggccgcccgggcaggtactgcataattatagtcaatgcttgcaataattttcagtttgtctcatcacgttagcagagcctattcatgcaatttagaaaggatttcaatacagcccaaaccaaaaggcttacggtcaacagagggttagccttccataaatgagaaatccaaaaaagaataatgccacgtatttcaggaatgtcggttagaggtttggccttnttgggaagtgtcacaatgctgagtctaaaactgcaacagttacccgtgtccaagttcatgccaactctaaagggagggatgggaccggtccaccatttgtgtctttcaagtatcaaaagcacctttaaggggcttccattttgagaa

SEQ ID NO: 8177 - DNA, 514 bp, Homo sapiens
  misc_feature 25, 69, 179, 249, 254, 267, 270, 274, 307, 379, 392, 412,426, 481, 486, 501: n = A,T,C or G
cccttagcgtggtcgcgggcccgangtaccagggctaaagcattttaactttatactgggaaaaaaaantcaaaccaaagggggaggggataaaagggactttaagtcatctttgcactgggaaaaacaaaatatgtaaattaaaattcccatagccttgcatgttaacatttgaattntttcccaggttaaaaaaaaaagttaaatccctgtgaatatttaatgggaatggaccattttttgagggtncttgnaggaaatgggggncancaanaagtgggggaaaaatggaaatttttcaagttantggggccaaaaggaccaccttggaggggattgaatggtttggattttagaattaaattttcaaccttcccgntaaattggaattncaatggccttggttgttggncttaagttaaaggnttattaaacccccttggggaaaaaaggaattcttttggaggaatggccttttccncaagncccttggttttcaancaagaattccccc

SEQ ID NO: 8178 - DNA, 399 bp, Homo sapiens
  misc_feature 203, 293, 375: n = A,T,C or G
cccttagcgtggtcgcggccgaggtacatttatccctgacatccactagaacataatggtagctttacaaggggtgtcacaggagattaaggctattgaacaccttactgatgaccctctgcagagacagtgggtgcctctgggcactaccctatgctgggctctaataatcataggtaacgtaacaggaatatttatagtangttgttgttctctgtattgttgttgtgacctatgagttcagggtgctgccctatgtgcatggatccccactaaaaagaactccctcattncagggggtggaatgtaaggcctgtgtgccaaagcctgtttatcaaactcgtgtgcccaaaacttatgtataaaggccttgtngtgtgtatatcaagcctaatgtac

SEQ ID NO: 8179 - DNA, 406 bp, Homo sapiens
  misc_feature 197, 325: n = A,T,C or G
cccttagcgtggtcgcggccgaggtacgcggggaggggtagagtgagaagcaccagcaggcagtaacagccaacccttagccattgctaagggcagagaactggtggagccttttctcttactcccagggacttcagcacctaagacagctccaaaacaaaccagaacagtcagctccgggggagcacgactgggcnagaggcacagaaatggacaccagaaataaggcccagctccttgtgctcctgactcttctcagtgcgctcttctcacagacttcggcatggcctctttacagggcaccttctgctcttcaggttgggtngacagaataccctttgagggagcaaatgaacctgatcaagtttcattaaaagaaagacattgacatgctgcaaaatgcatt

SEQ ID NO: 8180 - DNA, 219 bp, Homo sapiens
  misc_feature 11, 13, 14, 41, 52, 113, 115, 117, 122, 136, 137, 139, 197: n = A,T,C or G
ccctttcgagntnncgcccgggcaggtactgtggagggctntgagcccgcanacaacaagtgtctgttaagagctaccgatgggaagaagaagatcagcactgtggtgagctncnanggaantggaattaagtttnnanatggctttattcaaacctcctttagagctaacattggatgggttgaggaagagagacnaaaagaacaaaactaagaagac

SEQ ID NO: 8181 - DNA, 604 bp, Homo sapiens
  misc_feature 585: n = A,T,C or G
cccttagcgtggtcgcggccgaggtactatcagcacagaaaaacagtgagaaccatcctaaatttcagcaaggatttgagaaagatccaaatttcacataatgatgaatcttcgcacctctctgccctatgattttccgtaattttcgatcatctatgcattgttcaaatttatacctgcagactattcatttaattttactccttacaattataatagactaagacagatatagaagctacttatttatactagaaattaatttaatagatgaaaaatattgagcaatatttggaatataaaatttacaaagcatattataatacctaaataatacttaacctaatatagtgcaattttacaatatttatttagcttgctgtctaaaattctggtttctttgaactttttgatcaagaacttttatcaacccttctttgcttattgcacaatgcgagtgaaatccaaggggatatccctccatttttattcagtctttcctatacctattctttatagaggaagaattacatgccagctctatagatacgttgtatccaagacatggatacttttaatcaatgnaaatttttcttgggtataa

SEQ ID NO: 8182 - DNA, 356 bp, Homo sapiens
ccctttcgagcggccgcccgggcaggtacgcgggggcccttgttcactagaaggagccccctgaccccttcttccaaaaatactttttgtctttgtcttcgtttctgcattcatcccccttcgttcactcccataacaaccaacagcgacaactggcacctaggacagggacgtgagtgaaggtctgctggagcagagaaactgacactgacaagaagaacgagaatgagaaaccctgcgacgagtctgctgacagctgatataagtctgcaaaatcagctggaccaccaaacggcaattgagagctgcacaacctgcaattacctttattcaattaatgcaaaaacaaaaatggg

SEQ ID NO: 8183 - DNA, 353 bp, Homo sapiens
  misc_feature 120, 149, 196, 209, 215, 250, 265, 276, 319, 326, 337, 339: n = A,T,C or G
ccctttcgagcggccgcccgggcaggtactttttttttttttttttttttttcgagatggagtctcgctctgtctcccaggcatgcccggctaatttttttttttttttttttttttggnatttttagtagaggcggggtttcaccatnttagccaggatggtctcgatctcctcacctcgtgatccacccgcctnggcctcccaaagngctganattacaggcgtgagccactgctaatgatctttttnttactgactccaaanagctctttatntgttaggataaatagcctttcaggctttttaagtcaaaagttntttccantgcttccacananatgatttcctgcta

SEQ ID NO: 8184 - DNA, 591 bp, Homo sapiens
  misc_feature 257, 415, 463, 554, 566, 587: n = A,T,C or G
cgccagtgtgatgggatatctgcagaattcgccctttcgagcggcccgcccgggcaggtacatgaaatttggagggacactattcactatatcacacaagcaacataatgcctcttttgacacagtaagattttaaaaaaaagactctcaaactttaattcagcttgataaaattagaattcttcttctggggaattttctttttgagacaggatctcattctgtcaggccggagtgcagtggcgtgatcacacctnactgcagcctcaagcaatactcccacctcacctactgactagctgggactacaggtgcactaccacacctggctaagttttaaaatttttgtagagatagggtcttgccatgttgccaggttggtctcaaactcctagcctcaagcaatacttctatntaagcttccaaagtgctgggattataggcatgaacccctgtacctggnctttggggaaaacttttaaaaatatacttttaatttttggaagaaaatttaacccaaccaaaaatcaaatcctaaaactgggtatttccanttactaactggnttaaactggtgatgaaagaanaaaa

SEQ ID NO: 8185 - DNA, 585 bp, Homo sapiens
  misc_feature 19, 31, 48, 49, 67, 102, 115, 126, 139, 150, 154, 170, 204,217, 229, 237, 268, 272, 299, 321, 325, 356, 370, 373, 392,397, 412, 420, 445, 471, 493, 521, 532, 536: n = A,T,C or G
ggggcccgcccaggtggtngaattgggggantatttttggccaggaanntttcgccccctttttcgnaggccgggcccggcccggggggccagggttaccantttaattttcaangggttaaggcntggaagggggaanggggggaacangggnaaacccttggaaattntttcaaaccaggaaaaggcccaaaaccaaaaacnttggggggaattnggggaagggggnccccaagnccctttaattggaaaagggttggaaccaagnaaanggggacccccgggttggctttgccaanggccttggtggttgggggttanggcntttggaagccaagaaaggcctttaaaagccnggggcttttggganccngggaaccccaaaccaattnttttntttcccaaggctttnggggtttnggaaaagaaaccaaaaagcctttcntttcaaggaaaaaggaaacaaaattnggcctttggcaatttggtttcnaaccaaaaggccccccaaagggccaaanccccaaaaccnaaanccaccccaaggcccctttggaacaaaacctttttgcttttggggggggg

SEQ ID NO: 8186 - DNA, 314 bp, Homo sapiens
  misc_feature 29, 55, 71, 82, 117, 123, 135, 144, 150, 169, 188, 195, 232,240, 260, 288, 295: n = A,T,C or G
cccttagcgtggtcgcggccgaggcactnttttttttttttttttttttttgagnggttaattacttgttnatttttaagtntttaaagagttgacattacatttaaacaacaattngaattnggacaaattttnaatttttgncatatnatcaaaaaacatattgccntttctaaaaagtctagatncatgagnaggatgccattttaggtgaacctatgtttttcacttnatgaaatnggacgcagagagaaaatacnatgttaattaagaactttttgcttaganaagacantttataaccatattttaaa

SEQ ID NO: 8187 - DNA, 406 bp, Homo sapiens
ccctttcgagcggccgcccgggcaggtaccgaggtgaatgtcttctcctcggctacagcctccaccccaaatacaacccaccagttaagagggataacactaaacaatgctgtttagtgtcatgtgcacccatctacatgaccagaaaaatactgttcatatgcaaaaaaatttactaattgttaatgcctggccagatgttcttgtgaagagcaaggcaggggaaaaacatgttatcaagtgaatactctatccaaactccaagagaaacatctccagtttttcttcagagtcaatttgatcttcaactgagggtccctccattcttggcagtgagaggaacagtgaataatgaaaacaggtgttcagaaacctatgcagtatactccctgggtaaggaaggtga

SEQ ID NO: 8188 - DNA, 368 bp, Homo sapiens
ccctttcgagcggccgcccgggcaggtactcttttgtgacactgtttggctccagtatagttcggaatctggagtttgctgttgaatgggaaagtgggattttgtgctgctgttttaagcagggtcgggccaggttaatatgtgatgatctcatgcggtgccgtttttgaccccagtgttttgggagtatagggagttttggcctttaaaaatcaaactgccacagaaactcattttatttaaaatttgtttcacagccttccctggattacctatcaaggctaacaaagttcagccatgtggacatgtttgcagacagttgagactgtattactatctcatggctagagttccaaggtaaaagcttt

SEQ ID NO: 8189 - DNA, 538 bp, Homo sapiens
  misc_feature 119, 123, 125, 150, 165, 166, 170, 182, 185, 186, 198, 200,204, 208, 209, 213, 233, 240, 244, 246, 274, 275, 282, 284,294, 300, 303, 307, 313, 333, 343, 345, 367, 374, 376, 377,378, 381, 390, 402, 410, 437, 440, 447, 459, 475, 476: n = A,T,C or G
  misc_feature 477, 485, 489, 494, 508, 509, 511, 514, 515, 520, 524, 529: n = A,T,C or G
cccttagcgtggtcgcggccgaggtacatgggactacaggcacgccccaccatgcccagctcatttttgtatttttagtagagacagggtttcaccatgtatggccaggatgatctctnatcntntttgacctcaatggactccgccacnttctattggcccttnnctcnaaagttggcttnggnnattcaccagcgncnttgnatgnncaancaaatactctagggcccccntcttatntttnantttcctcttttttaaacaggtaagtagnnagtaaananaaccttaacntaagtnagnggcncctaanaaaattataatttttttaanatttttaaananttcttttttaaccccttttaantctaacnannnggnggggaaaanaaaaaaaattgnggtaaaantattttgggccctttatatttaattanggngtttggnaatgggaaaaanccatttaactacccannntggaaaanccanggaanaaaccaggatttcnnancannttttnttangggtnaaaaaaaag

SEQ ID NO: 8190 - DNA, 457 bp, Homo sapiens
  misc_feature 151, 173, 276, 285, 293, 297, 312, 314, 319, 323, 336, 364,413, 428, 429, 435, 436: n = A,T,C or G
ggagctccccgcggtggcggccgcccgggcaggtactaaagatgatgatttgggggtgggatgcctggaggggctggcaccattcaaaaaagtattggaaaacattagccaagaaaaaggctccttgtccctcctaatccatatccagatncccccaaccagagatctttaanaagggattaggaccagccatatgccaacatgcccaggattccaaaggcatgcctcaactaattagggtattccctacagccatactggggtaagaggggctcnatcctggcnataaccanaganccttaccttcgcctnangccangggntgggaaatctaanatgaaagactgtccacaaacagtggctntcaagcctgggctaaataaataataatttttgctttcattacatggccnaaaagggagaggagnnagattnnaaaaaagatgatatttactac

SEQ ID NO: 8191 - DNA, 378 bp, Homo sapiens
  misc_feature 301, 304, 313, 321, 340, 351, 353, 361: n = A,T,C or G
ccctttcgagcggccgcccgggcaggtacaactccaaaaggagacattggagaagaaccaagctgggtctataaggaattgcacatgagatggcacacatatttatgctgtctgaaggtcacgatcatgttaccatatcaagctgaaaatgtcaccactatctggagatttcgacgtgttttcctctctgaatctgttatgaacacgttggttggctggattcagtaataaatatgtaaggcctttctttttaaaaaaaaaaaaaaaaaaagggaaaaaaaaaaaaaaaaaaaaaagggtnccnccggggggnttttcgcntaacgctgccaacatgggngtttcgggccncnttcgtggnaggttggcccgggtggc

SEQ ID NO: 8192 - DNA, 178 bp, Homo sapiens
  misc_feature 80, 118, 130: n = A,T,C or G
cccttagcgtggtcgcggccgaggtacttttttttttttttttttttttatgatgttagttctttatttcaataaaagtnggatagagatctttcattatcaggggacaggggcttanctgtaaggaccnaaagtaatcttccgggaattatgcatacaggcttgacatcatttttat

SEQ ID NO: 8193 - DNA, 526 bp, Homo sapiens
  misc_feature 24, 79, 105, 115, 119, 125, 133, 134, 135, 136, 137, 145,164, 172, 191, 213, 228, 239, 241, 243, 247, 248, 278, 291,293, 295, 299, 317, 327, 336, 350, 351, 357, 358, 360, 367,379, 389, 392, 405, 415, 416, 417, 418, 425, 428, 429: n = A,T,C or G
  misc_feature 442, 449, 456, 458, 461, 465, 473, 486, 488, 509: n = A,T,C or G
ccctttcgagcggccgcccgggcnggtacctgtgaaccaagtgtttgggcaggatgagatgatcgacgtcatcggggtngaccaagggcaaaggctacaataggnggtcacaatnttcnttggcnacacccannnnnaagcttgnccccctgcataggaacccnactctgangtggccttgccgaccaaanggttggccccttggtaatttgngggggccaattgtgncaattacccangncnttcnnttgattaagccactatactttctttgttgnagtcaaacagccnancntcgngtgtctaatgaaataagnggccttaacntcaaattcnatccccggctaacnntagganngnaattcanaatctaaaagtnaaatgtaatnttntaattaaaacgtnaattttgggnnnnccatganggnnctttaaccccttntcaattncaaaagngngancggngcctaaanggccttggtaatncnatagggaaaaccaataatggnccctttcccaaccttgg

SEQ ID NO: 8194 - DNA, 291 bp, Homo sapiens
ccctttcgagcggccgcccgggcaggtactcacaagatctggttgtgtggcacttcccttcccccctctctttgccctgcacctgccatgtgagatacttattcctcttttgccttccaccatggttggaaacttcctgatgcctccctacaagctgatcagatgttagcaccatgcttcctgtacgcgggcctcccctcagaacttcaaaagggcaagatcttttttccttcacttattgctgaaaccaagagcacaattcccattgagagaaagatctctgtgctgtaa

SEQ ID NO: 8195 - DNA, 462 bp, Homo sapiens
ctatagggcgaattggagctccccgcggtggcggccgcccgggcaggtacgcggggagatcagtgatagcactagatactcattggagcatgaaccctgttgtgaactgctcatctgagggatctaggttgtgtgcttcatatgagaatctaatgcctgatgatatgtcactgtctcactttgcccccagatgagaccatctagttgcaagaaaaataagctcagagtttccacggattctacattatgatttgatcttcaacaaagctgacactggggaaaggacacactcttcaataaatggtgctgggaaaattggatagccacatccagaaaaatgaaactgggccactatctcactatatacaagaatcaactcaaagtacgattaaaaacttaaacagaagacctgaaactataaaaatacttgaagaaaacctagggaaaaatttcctggccttt

SEQ ID NO: 8196 - DNA, 292 bp, Homo sapiens
  misc_feature 134, 172, 211, 261, 277: n = A,T,C or G
cccttagcctggtcgcggccgaggtaccttagtagaatacagagctttggtaattacatgaataaaattaagaaaatagccatatacaatcaaatcactatggcatttttatttgaatatgatgagtatatttntgcttcggaaataatataggaaggaaatgtaaaatagngagtagtatggtatcagttaattccagtctgagcttctntgtcaacttcagtttctctctcagtttaatgatttaataatagtccaggnttttgcgtgttcttcnttatactgcaaatta

SEQ ID NO: 8197 - DNA, 362 bp, Homo sapiens
cccttagcgtggtcgcggccgaggtacgcggggtaggctgtgggtcaaaagtgccggtcaaaatggaagtgaatccccctaaacaggagcacctgccggcgctaaaagggcctgtttccctctgatttggcaagagagacaatcttgcaataataaattaacattctagctctgaggagttcaactaagaaattttctcatcactaagagtaactggattactgcagaatgactacagaagtaatattacattatcgaccatgtgagagtgatcccacacaactgccaaaaattgcagaaaaagcaattcaaggactttcctactcgtcccgctatcaagatttataccttggtttccatat

SEQ ID NO: 8198 - DNA, 472 bp, Homo sapiens
cgccagtgtgatgggatatctgcagaattcgccctttcgagcggccgcccgggcaggtactgaacaatgtggcagaatttgtgtgcaaatataaactattataaaatctgtttcaagtatgcagttttcttttgttagaaattgtagagaatagagagtggtaattcagatttggtcaacgattctagtcacatattttcctccaaaagtattccttccaaaaataatctatacatgttcaaattaggtagcataaagataaaagtgaaatttagtagtataggcctgaacctttttttgtttaaaagagtgcttttgaaataagcatccccccaaatgttggttgtatttatactgtgataaaaataggtgagagatcatatggtctaatattgtattgatggaaagtataggtagtataagtaagtgattggtcttcaagcatgcagtaaaagatcactttttttttttt

SEQ ID NO: 8199 - DNA, 271 bp, Homo sapiens
  misc_feature 35, 80, 82, 86, 117, 120, 146, 154, 167, 178, 209, 225, 241,243, 268: n = A,T,C or G
ccctttcgagcggcacgcccgggcaggtacttttnttttttttttttttttttttgctttttttttttttttttttggcncnaaanggggtagagggggtgctatagggaaatgaancanaatgcaaaccaagggctggggatggntttctttnctttaccacattnttgcactgganaccaaggagtctaaaagtttaaaacctggtnttccaggaggacaganaatattttattgtaangntgttttgcctgatttaaaacctttnaat

SEQ ID NO: 8200 - DNA, 367 bp, Homo sapiens
  misc_feature 1, 3, 14: n = A,T,C or G
ntnttcgcccttantttggtcgcggccgaggtactatgcttattacctgggtgacaaaataatctgtatatcaaactcccttgacacaaaatttacttatagaacaaacctgcacatgtactgcactttcccctcaattgatatagagtaagtcaatgttctttctcaggcaccgacgatctgtgacctgtagccctttttactttgaacaacctaaataagcattcatgtaaagttttcattacattttgccactcattctcactcgcacccactcgccatcttgacctcatttgggcattttctgtgattccaaatgaaatcttcacattttctttcccgatttaatgcagcagcagatcccatg

SEQ ID NO: 8201 - DNA, 398 bp, Homo sapiens
  misc_feature 130, 132, 137, 260, 359, 360: n = A,T,C or G
ccctttcgagcggccgcccgggcaggtacaaatgcagaaatgcagtaactgcctttaaaagaaatgccaaagaaatgttatcttttaacaaaacatgtatttatattacagcagttttactacagggacncnaggtnttaaaaaaaagaaaaattagcacactacatataaatatgtataagaaaaatacctcttacttaaatttgtatgaaaacaggactgctccaaatatttttaaaaaaatttctccaataggtganttgttaaagtgtttaaaactcagctaagtgcttttgcttttatttaaaaaggttttatttctaaaaggggggagggaagtaaaataaaaatatttaaanntttagggttcttaatttagaagcattgggcggaggggg

SEQ ID NO: 8202 - DNA, 397 bp, Homo sapiens
ccctttcgagcggccgcccgggcaggtacccaccctcttcaggggtccgtgtggtcttctcaataatttcataggaatagtcaccatcttcaggggtcttggtagttttcccaatggtctcataggagtagccactgtcacttggagattttgtggttctctctatcttctcatagtaatagccacccacatctgaggtccgggtggtcttctcataagactcatagtcataatcttcttcatctggggacctggttgtttcctcaggcttttgataggcatagctaaagtcaccaggtgtcttccctccactgtccttctccaggccagctgtggacaaatctctattcaaggctagatggtgttgcattgtatcgaataacactgaggcacggaa

SEQ ID NO: 8203 - DNA, 384 bp, Homo sapiens
  misc_feature 137, 141, 143, 148, 150, 153, 163, 166, 171, 175, 191, 217,238, 244, 257, 258, 269, 275, 289, 310, 323, 342, 363: n = A,T,C or G
ccctttcgagcggccgcccgggcaggtacgcggggattccattctctgaacatcttctgacacactgacagtgctgagcagagcaagaaaacgggcaatgctgtgagagccattggaagactgtcctttatggcaangatntnagggntnagnggcagaaatnctnaacanggtnaccaaccaacccgctnaatgccgaaaaactataaatctgaanaagaatgtgtcccaagctttncttganggtgttgcttganngaaaagccctnatgttnaaaccctatttttntaaaaaccattcccgatttanaaggttgtggggngggaaaatggcttgcttanaatttgactggcagggatttnaaaggattaccccaaaccccc

SEQ ID NO: 8204 - DNA, 389 bp, Homo sapiens
ccctttcgagcggccgcccgggcaggtacattgtttattatggttctagccatggaggaacaactgaagccccttcctgtcaaagggggagagagaaataattagctgttttagtaacagtaccgaaagacttgaaacaaggggttataatgagaagaaactaacagacaatattcagtgtgagatttttcaagttctttatgaagaagccacagcatcctacaaggaagaaatcgtgcatcagctgcccagtaataaaccagaagagctagagaataatgtagatcagatcttgaaatggattgagcagtggatcaaagatcataactcttgacttataaggctagctacttaataatcactcttgttgatatctctgccgacatcat

SEQ ID NO: 8205 - DNA, 395 bp, Homo sapiens
  misc_feature 337: n = A,T,C or G
cccttagcgtggtcgcggccgaggtacattttagaaagtgaaatgctgtggacatttaaggtggagccactgtgagagtctagggggatagatggtagtcgtctcagaatgaaacgaatacacccctctcagagccctttccaaggatcccctccttctttcagctccttccctccacctcaatacacactcctgtcccaggaacctaacctcatctagaaataccagggccagcatgccttacacctagaggtttggttggcttcagagaaacttctggaggctaaaagcagccaagaagaatcagccactacatgcctgggcctggatgaacagnagcagtgagctgtggtgggggcttgggggcctgggggccccagggaggagcaggcagg

SEQ ID NO: 8206 - DNA, 331 bp, Homo sapiens
  misc_feature 75, 286, 316: n = A,T,C or G
gcccttagcgtggtcgcggccgaggtacaatgcctggaatgtagcagggactaaatacaagtgaacaaatgggcnaacctttaattcccaggggatctgctacatattgccttgactggtagatcattttctccaggagaaaggaagaaaccaaaagacaaaaacaattctttttaaacctcacaggattttcttagaaaaaagttttaatttatattatctagtgcaattctctttgtaaaatatatttcataaaaaatccaaaagcaaaaagccctgtcatttnatttattttcaaaagacaaaatcatttttnagttaccctgccccg

SEQ ID NO: 8207 - DNA, 298 bp, Homo sapiens
  misc_feature 214, 279: n = A,T,C or G
ccctttcgagcggccgcccgggcaggacttgggaggctgaggcaggaaaattcttgaacccaggagacggaagttgcggtgagctgagatcacaccactgcactccagtctggtgacagagcaagactccggctcttaaaaaaaaaaaaaaaaaaaaaaaaaaagagagggaataaacagaaaagaatgtgcgctgggaattgtgaatcagaanattataccccccaatttttttcaatccccttttctcaaataataaattagttaaatcagtttctnagttatgccactggctgat

SEQ ID NO: 8208 - DNA, 317 bp, Homo sapiens
ccctttcgagcggcccgcccgggcaggtacgcggggtcgccactagatttcagcgcctttggactctcctgttttcactttcccttgttgactcccgtgtggccctcgtgggagcctgttttggctgcagcggtgtctggggtgatgtggaccccggagctggcaattctgaggggattccccactgaggctgagcggcagcaatggaaacaggagggggtcgtcggttcaaaagagtggatctttctacaattgctgctggaagggaactatgaaccatattcttaaattcaatgactcaaaatatttttaattca

SEQ ID NO: 8209 - DNA, 253 bp, Homo sapiens
  misc_feature 1, 58, 76, 87, 134, 149, 151, 158, 177, 193, 204, 209, 226: n = A,T,C or G
nggccgccagtgtgatgggatatctgcagaattcgcccttagcgtggtcgcggccgangtacacgggacacatcantgcagagtccntctgtgaatttacaacacccaacacccatgagttcagtccttaaganggaaaattgagcaantntttaatnggttggacattgcataaangaggtccatatccaangctaactctanaaatnttattctcaaacttatntggcctctttttcttctgtcaagagga

SEQ ID NO: 8210 - DNA, 365 bp, Homo sapiens
  misc_feature 356: n = A,T,C or G
ccctttcgagcggccgcccgggcaggtactttttttgtattttttttttttttttttagtttgaaatgtgtaagctttgatttaaaccaagtttacttcagtatgttaatgatgtagttaaaaatatttattgaaaggtgaattcgagtattttaatgttatacctgccattttttttcttaaagcatattctttgcatctaactgccagtgccattgtcaaaacttattttttaaatcgttgtactgatttccgaaatcaaacacccatgcttgtcccctaggaaaaagaaaacaaaaaacaaaaacaaaaacaaaacaccgagtaatactgaatttaagtaaatggtatacctncaaaatact

SEQ ID NO: 8211 - DNA, 676 bp, Homo sapiens
  misc_feature 119, 596, 642, 654, 665: n = A,T,C or G
ccctttcgagcggccgcccgggcaggtacagagaattcctagatagccctcacccagtttcagtttctctaacgttatcatcttacattaccctgctatatttgtcaagattaagaaanacactactgttaaaaatactccagattctattcagacttcatcagttttttcattactgatctttttctgttccaggatctgatccaagaagcacattgcatttggctcacatgtctccttagtctcatgtggtctgtgattgtttctcaggattcccttattttccatgatttttacagttttgaggaatactctaaaataccccagggatattttgtagaatgccttcaacttgagtttgctggatgttttagctcataattaagattgggattatgaatttttagaaagattatctagaacaaatctgaatgacttatcactggtgacgttaattttgatcacttgggtgaagacgtcatttgtcatttttctcccctgtaaagttactatggttccctttccatctccactctttggaagtgagtcactgattttagtgaagactcacaagggagaggactgagttctacctncttgagtggaggggatttacctatattaacttggattctttttaangaaagtttggcnaagaaaaaaanggttaaaaaat

SEQ ID NO: 8212 - DNA, 284 bp, Homo sapiens
cccttagcgtggtcgcggccgaggtacagctgaggtctgccttgatggtaaagttaatacagaatttggaagctgactatttttaacttgcaatgatgtatgtggtataaagttttgtttttgaatggtagaatctggtaaaaagctttgtggtgagtaacggtatagctttggaggtggtctgtaatctgggtaagtcagtcccttagatatacactgttgtgtccaatcaacctgttgctctgaaaaagactggtttaaagtccctgatttccttggtaagc

SEQ ID NO: 8213 - DNA, 691 bp, Homo sapiens
  misc_feature 199, 335, 404, 414, 569, 574, 618, 640, 671, 676, 680, 682: n = A,T,C or G
ccctttcgagcggccgcccgggcaggtactttttttttttttttttttttttttttaacttaattagaaagtaggctgggcacggtggctcatgcctataatcccagcacttggggaggccgaggatctcctctctggtggatcacttgagggcaggagttaggagaccatcctggccaacatgatgaaaccctgtctntactaaaaatacaaaaagtagctgggcgtggtggcatactcttacaatcccagctacttgggaggctgaggcaggagaatcactttgaacctaggaagcagaggttgcagtgggccaagatcacaccactatactntagcctgggcgacagaggtggggaaaaaagtaggacccctgtcctatattcaggtttttctcacatatntgaacccatntaaattctacgttgttaaaaggtagcttaggttaattggtctatcttatttaagaccaatatggggtgagatggattttttttaaaaaaatcctcagtaaggctttctactttccctctaaatgagggaaaaggggggcaaaaaattcaagtgtnaaatngcccctttcctgggaaagagggtttagaaaaaaacaacaagctnaacctttttgaactttacccanttccttttgggaagttaaccgaaacatttanattcntatntnaaaaaaaga

SEQ ID NO: 8214 - DNA, 516 bp, Homo sapiens
cccttagcgtggtcgcggccgaggtactacaccacttttcctcaccaacccccatcctattcttgagttgctggatacacttgctctctggaagtgtgtccttacccttctgcagagtgaggagcaagctgttagagatgcagccacggaaaccgtggcaactgccatgtcacaagaaaatacctgccagtcaacagagtttgccttctgccaggtggatgcctccatcgctctggccctggccctggccgtcctgtgtgatctgctccagcagtgggaccagttggcccctggactgcccatcctgctgggatggctgttgggagagagtgatgacctcgtggcctgtgtggagagcatacatcaggtggaagaagactacctgtttgaaaaagcagaagtcaacttttgggccgagaccctgatctttgtgaaatacctctgcaagcacctcttctgtctcctctcaaagtccggctggcgtcccccaagccctgagatgctctgtcaccttca

SEQ ID NO: 8215 - DNA, 379 bp, Homo sapiens
  misc_feature 5, 28, 359, 362: n = A,T,C or G
tgcanaattcgccctttcgagcggccgnccgggcaggtactcttgaagtcacaacaaaataatgatgagcttttcacatcacctttatggtttcaatccctagctcaaagcttcctggaatcttttattttttgtaaactttttttttcttttgttaaaataaataaaacattcaatgtttttctccttttctctcttattacttctttcctttggcattttcaatttgaaatgctttcctttggttgttggttttattctccccctacccctccccttttcttattattcagaatataaacctgcaaagctctgctctgtttttggttttgaaaagtttaagcttttctgcttctggnganagcacaggcttctgtcc

SEQ ID NO: 8216 - DNA, 394 bp, Homo sapiens
  misc_feature 277, 297, 305, 347: n = A,T,C or G
cccttagcgtggtcgcggccgaggtactgttaatttttttttttttttttttgtaaataacaaacaccactttgttatgaagaccttacaaacctcttcttaagacattcttactctgatccaggcaaaaacacttcaaggtttgtaaaatgaccctttcctgacataaatccttttttattaaaatgcaaaatgttcttcagaataaaactgtgtaataatttttatacttgggagtgctccttgcacaaagctgtcatttgccagtgagagcctncgacagggcaggtacatttncacaaatntaagaattgccctataaacatagcagggattttgagggcttnaaaatttttcccatttatttctgggacatgaaattttctaaaaatgc

SEQ ID NO: 8217 - DNA, 211 bp, Homo sapiens
  misc_feature 43, 44, 50, 52, 53, 73, 81, 111, 121, 129, 163, 167, 185,195, 199: n = A,T,C or G
cccttagcgtggtcgcggccgaggtactttttttttttttttnntttttntnnaaaccacagtataacagctntttatttntgtgagttctactaggaaatcatcaaatcngagggttgtntggagganttaaaattaaacattcccccccatatttgaactnaccntaacaggggggggctcantcccttttanttanttaatccccatc

SEQ ID NO: 8218 - DNA, 417 bp, Homo sapiens
  misc_feature 7: n = A,T,C or G
tctgcanaattcgccctttcgagcggccgcccgggcaggtacaatgtaagggttttagggagcaacagtatttaactggaagaaagaattgcatatttaatgtagtctaatatatacacatttgtttaacatgtaaacaaaagtgttaaattcacatatacaacattatacaatttaatcactcttggaataaaatttttatagccttttttctattgggaaaatttgtttagatgtgtgccactccataggtttatttccaaaatgaatgagcccaactccatttgtaaaaacttgtcagttagaattcctttttttagtggattagggctgaattcttagatccttatttcttttcactttaaatgctgccaaagatcactactcatcattcaggaattcgctgtctagcctatc

SEQ ID NO: 8219 - DNA, 296 bp, Homo sapiens
  misc_feature 11, 12, 22, 24, 34, 103, 113, 130, 134, 203, 205, 211, 217,218, 228, 235, 249, 250, 252: n = A,T,C or G
accttaccctnntcagcggccncncgggcaggtncagcattaaaaaagatttaatatgatgggttcaaaagccaaaggcatgtatctcttgaacctaccctantaaccatacntttacaagatacattanaaantccactaacacctaacctaacgcacacaaaaacccacgcctgtttaccttcttgcaagtcgcatcggtncncaatcncacatnnttaaagcaangtttttnccttttatacgcgnnangttcttagcccaggtaaagcctattgtattgattaaaagcaaac

SEQ ID NO: 8220 - DNA, 394 bp, Homo sapiens
  misc_feature 80, 304, 328: n = A,T,C or G
cccttagcgtggtcgcggccgaggtactttttttttttttttttttttcaggtatcttaactttatttagctctctgtanaattaacatctttgcaaatatattattcaaccaagcatttgccataaagataagcatcaactttcccattggacaagtgatagtgttcaagctactcgacttgtgaaaaacaaaaaaccaccatgacttctcaacaaatacattttaaaatgaaatatgctcaggctgataaacaaacaagatattaaaatgggagactgacattgaacctacatagtccgacnttgaaaaacacaagaaaggacaantgctccctataaaaatgattatattattgggcttttacaaaaggacatacctgggtttatgtttac

SEQ ID NO: 8221 - DNA, 380 bp, Homo sapiens
  misc_feature 53, 99, 245, 273: n = A,T,C or G
ccctttagagcggccgcccgggcaggtactttttttttttttttttttttttnggttctggtctacgtaaacacccccatcttctcaagctttaccttntaacttctgcaccaccagaaattaaatttgatgggcttttaaaataaattggttaccaataatttcctcattttttcagtgctattttatccaatttttggctttatatttttctatcttctatacttctccaatacttgtcttancttgtttttcattttctatctgaaactnttgacaatcccgcgtacattatatgtatactcagataattattgagctgttgaaaaatcaaagtatcagagaaatttgagaagatgagactaagggatcattcatct

SEQ ID NO: 8222 - DNA, 353 bp, Homo sapiens
  misc_feature 29, 81, 111, 130, 187, 188, 203, 228, 250, 255, 256, 257,259, 261, 263, 271, 278, 280, 303, 304, 307, 315, 317, 318,321, 324, 325, 328, 329, 341: n = A,T,C or G
ccctttgcggccgcccgggcaggtacagnattggaaatggatctgtctttggtaaagatcagcctataattcttgtgctgntggatatcacccccatgatgggtgtcctgnacggtgtcctaatggaacntgcaaagaactgtgcccttcccctcctgaaagatgtcatcgcaaaccagaataaaannaagacgtttgccttnataaagaccctgggatgttggccantttctttgttggggcctccatngcccnnnanantnggtgtaanggcattngnttacaaggaaaaaaaattatttnnacnttggaaancnngcnacnnatnngtcgaaaaaaanttctttttcaaa

SEQ ID NO: 8223 - DNA, 370 bp, Homo sapiens
  misc_feature 224: n = A,T,C or G
ccgggcaggtacctatatacatagattcaaacatcatttcctagatctgtccactaagagaatgtagaagcaatgacattcaaaaaccaagaagcacacctcacatccagatcttggtttctaaaaaccatatccaccaagcaaaccagggcttcttggaaaaatggctaatttcagggctgggataaggaagtgtaagaaaagtcaaaaacatcttgtttcanaaagtaagaaaagtattataaacttatgggcatttgtcccataatccatgtgaagggtcctactggccaaatctcgagcatcaaaataatgatccacccaggagacagataaccacagcccttaggactaaaccaatcaggccact

SEQ ID NO: 8224 - DNA, 335 bp, Homo sapiens
  misc_feature 330: n = A,T,C or G
ccctttcgagcggccgcccgggcaggtacttttttttttttttttttttttgggttataaaagcccttttataaagccatttttaaacaaaacaaaaaaaaagtttacaaaagaaaaaaagatacagaaaaaggaataccttgcttcatatgtcccaaaaagagaaaaaaataaaggggacaatgccaacatgctcaacaataaaggcttctttttcttatttttttaatacaaaatacaagcaaaggatacacatacttaaaacagagctcaggagcagacaccgcagtcctggaaacccttcaataaaagcaaagcaggaggttttgnttttt

SEQ ID NO: 8225 - DNA, 368 bp, Homo sapiens
  misc_feature 212, 220, 223, 228, 230: n = A,T,C or G
cccttagcgtggtcgcggccgaggtactccagcctatgcaacagagcaagaccctgtctctaaaaaggttgtatttttttttaattaaaattttaaaaaatcaagcctagacaaaggaaacagcaaaggaaaggaacctgtggagcagacaggagtttggcatattccagggggaaaaagaaggccaggagtgtgaatggagcatagtgaanaaaaaaanaanaaatntnaaagtacgcggggggttggacattgcataaaagaggccatatccaggctaactctagaaattttattctcaaacttagttggcctctttttcttctgtcagaggaccattcttagtggcactggggaaatcttggccc

SEQ ID NO: 8226 - DNA, 284 bp, Homo sapiens
  misc_feature 266: n = A,T,C or G
ccctttcgagcggcccgcccgggcaggtacattccgtttcctgtgacttaacgaaggaacattccacaacaccttcctttccattcattgcatccacaagggagaagacaaagcgggcgcccggcatacgccatggagagggtggcaagagcctgctccggctttagccttgaccacctccgtgccggcctcctggatcccgcccagttgagttgctgccagctgggtcctggggaaaagtccaacctttggggggtgcacttgangaagaatcggggggggga

SEQ ID NO: 8227 - DNA, 476 bp, Homo sapiens
  misc_feature 19, 20, 144, 146, 156, 165, 167, 168, 170, 172, 191, 192,198, 213, 219, 236, 240, 254, 274, 280, 307, 331, 337, 340,347, 356, 361, 364, 368, 396, 424, 434, 441, 445, 446, 458,464: n = A,T,C or G
tggtatatctgcagaattnngccctattcgagcggccgcccgggcaggtactttgatgggctggagagcagggtggcagcctgttctgcacagaaccaagcaattacacgaaaaaagtccagggagctggagagggcacaacantnttccttgggnaagcttcangnntncngctcagcctgctagaacgnnttaatntgcctcaaaaccttnccaacnaaaagtcttgtccccantacncaaggcactttggnggtttatcggattactttcntttttntatacccctgggccttcttcaattcantcccttggcccccaggcctttcanggttcncantttcccnaatgaagtnttcgnaancccnagagaaaggccttgggggtcctggaagnggaatttaaccccaagccccttcaaacngtggagggtngaacctnttcnncacggaaaaaantaatcntccttggacccc

SEQ ID NO: 8228 - DNA, 259 bp, Homo sapiens
  misc_feature 115, 119, 153, 168, 186, 209, 239, 240, 249: n = A,T,C or G
cccttagcgtggtcgcggccgaggtacagggaaggcctttcgggcagggcacatggttcactgccccatgacgtgataccttgaagcacaccattacagacaagtgggcccccanaatnacccgtaaccagggtgcctttttgcccccctgtnccagcgttacccagncacacaagcattgaaacntttggtcaccttttcatgaaggngtggaaacctttgcgccaacaacatcggtnnaatttgggnaaaaattaac

SEQ ID NO: 8229 - DNA, 284 bp, Homo sapiens
  misc_feature 1, 8, 12, 25, 38, 117, 128, 131, 140, 149, 152, 153, 164,165, 167, 171, 180, 195, 196, 207, 210, 234: n = A,T,C or G
ncccttanccgnggtcgcgggcgangtacatgccaaantgtgcctctctctctttgacccattatttcagacttaaaaacaagcatgttttcaaatggcactatgagctggcaatgntgtatcaccancgnaaattaatnagtttttcnagnnaactggggatnntnttgncattctggntaacataaaaaaagnntgacttcacanaancagctggaaatggacaaccacaanatcgcataaatttaactcctaccatcagctacacactgcttgacatatat

SEQ ID NO: 8230 - DNA, 433 bp, Homo sapiens
  misc_feature 23, 49, 74, 84, 131, 151, 157, 181, 235, 242, 259, 321, 324: n = A,T,C or G
cccttagcgtggtcgcggccgangtactgacttcctatcttatcctggnactaaaaaaatggtttaaccctctngggattgganccctagtagggtcttcaagtttcatttttacacaagcccctatttcnaagaatgaaagttgcttctnggttcnaaaaagccccttggatacaaaganccttgtcagctttacaataccctttttttttttttttttttttgggaaaacaanggtcttnaccattgttcaccccanttttgggaagccgccaagttgggtaccaaataagttgggtccctggagggggggacccgtantanttccctcaagcttttaccaaaaggaattaaccaggggatttaaagaagaattaaaaggtaaggacagggtggttaagaaaatttattaaaaagtttttaaattttttgg

SEQ ID NO: 8231 - DNA, 120 bp, Homo sapiens
  misc_feature 44, 49, 57, 103: n = A,T,C or G
tgatggatatctgcagaattcgccctttcgagcggccgcccggncaggnaccctaanctgacaggaattaactacttgattttttgtggggcagaaagcaaancctggagttgtgacttt

SEQ ID NO: 8232 - DNA, 384 bp, Homo sapiens
  misc_feature 344, 368: n = A,T,C or G
cccttagcgtggtcgcggccgaggtacaaatctaggcaataaaccgttcacctgggatcagttcagatgagacagtaaacagataatccaaaagacaaaaaattataagaattaatacctgcaaagaggattttccctggaaattcttttcttggtgtttccttctacaatataattttaattctgctttgtaattccagtgaaaatgtcttctattgtagttcctgctacattactatgcttactttatctgacattggctctcatcttggggttctgaaaagaaagctcctctagcctatttcaacttaattgtccccttaacattttaaaaacataaaagnatagggtttggagggtttggaagntcttggcttttacttc

SEQ ID NO: 8233 - DNA, 200 bp, Homo sapiens
  misc_feature 8, 117, 134, 146, 159, 162, 166, 186: n = A,T,C or G
ccctttcnagcggccgcccgggcaggtacgcgggggggccgcgctggtcccgccccactgtgatcgtgagactgcatacccgctaataaaatccaccccaacaatcgctgtgtgccnttttagtgctgctccgncgtcggctctanctgcgtgctttanctncttntcgcctgatccttctgtctntcccaaccccggac

SEQ ID NO: 8234 - DNA, 306 bp, Homo sapiens
  misc_feature 21, 22, 131, 132, 178, 200, 219, 281, 300: n = A,T,C or G
cccttagcgtggtcgcggccnnggtaccgctgtaagactgccaagaagtcagaggaggagattgactttcttcgttccaatcccaaaatctggaatgttcatagtgtcctcaatgtccttcatttcctggnnagaacaaattccaacatcaaaccggacagttggaaggttatacacnaagccggaggtgaccctgaagnagtgtggctgggggagtantgggccggcactccctctacaaaatgcttggtttacttcagccttggtcgggctttcaccgncttgcactccctgtttagngaagat

SEQ ID NO: 8235 - DNA, 381 bp, Homo sapiens
  misc_feature 229, 314: n = A,T,C or G
cccttagcgtggtcgcggccgacgtactgtgggagactgagcaaacactcttttggcaacttagtagaacagcttcttaaaggctttgcatgcttgctgctttaagctgctttttttttttcttttcttccctttagtgatttcagtagtttatattggaaagaaaaacaattacaacatgtgcccttacaaataccaaaagcactgtaaggatatttgtcttgacagngtttattgatttgaagtcatattaggaaatatttagacaatgaaaattatcaagagataatttacctttcaattatgataaatanatgtgattggttgccatttgtgttcttttgcagaactctgataagaaaagtgttcaatttgtattta

SEQ ID NO: 8236 - DNA, 391 bp, Homo sapiens
ccctttcgagcggccgcccgggcaggtacctagggagggcatggaagctcagtgttcttcccacacaccttgccttatgcatctctttcatctggctgatccttagttgtgttcttttacaagaatctagttaaataaactttttcctacattctatgagtcattctagctaatgctgaaactcaaagaggggattgtaggaaccttggatttatagccagttggtcagaagcaccagtgaaaacatggacatgagattggtgtccaaaactgacacaattggtgtcagttgtagaactgagcccttaacctgaagcatctatgttggatctgattccaggtagatagcttcaaaatttaattacaggcacttagtggggtgtccacagaa

SEQ ID NO: 8237 - DNA, 394 bp, Homo sapiens
  misc_feature 14, 330, 345, 348, 352, 354: n = A,T,C or G
ccctttcgagcggncgcccgggcaggtactggagagctgttcacacagatgtttagacctttctctctctctctcttttcttctttctcaacaactctgtcacagaggcagtcattttgaaaggttgaaatattttggccctttaccaaagaagcttttttttccttaagcaaaatcctttcagaaaagaaacaaatgggggaagggcagattaagaatgcatatgtcccaatccacttctataggagttttaatcatattcacatgagtaataatgatggaagaactctttaaggtaatccttttggggataaaaggatcctggggaangttcttcttccaggntanaagnanaagcttaccagccaggatttggtaataatatgtcttggga

SEQ ID NO: 8238 - DNA, 104 bp, Homo sapiens
tgactgccacggacgccgatatcgatggcgagatcagcaacgccttttgcgcgatccgaccgccaggccaccatgcgcggcccagcgagcccatgggtttctgc

SEQ ID NO: 8239 - DNA, 459 bp, Homo sapiens
  misc_feature 449: n = A,T,C or G
cgccagtgtgatgggatatctgcagaattcgcccttagcgtggtcgcggccgaggtactaggccatgaactggggcactggaagttgggacatacagtcaaaaatatcattattagccagatgaattctttcctgtgtttttttttatttgctgtattaattggtccgaaaggagctttttgctgcatttgggtttttatgatagccaacccactcttattgggactattgatcatcttccagtttatttttttcaccttacaatgaggtttctttcttttttgcctaacagtccctaaagcccgcagattttgagttttcagggctgaatgccattttgcccaaaggaaaactttgggggaaagggcttaaaaggacctttaatattcctggcttttaaattcaaaactttaaaccaaaaggaataaaccttgggggaattccccctngtttttcctt

SEQ ID NO: 8240 - DNA, 400 bp, Homo sapiens
ccctttcgagcggccgcccgggcaggtacaggacatctgcagtttataaagaattctgtttctgccaccagcagtttgacctgtagtcacacaggattttatgataataacagagatgaaaatggacttttattttctctctgtttgggtgctctaaagtgggttatgtaagccacttttctgttactttatgattctcatttcaacaggaatggccagtaaaagttgttttatttttcctgttaaggtttataacctttttacatttttgacctgtattagattaagaatttcattatgcattccttttagtcgaggcgcttcatagttttctggagaataagtcaatttttaagttttttattatacattttgaatgggcccgtttttcctgctttgg

SEQ ID NO: 8241 - DNA, 241 bp, Homo sapiens
  misc_feature 59, 139, 156, 197, 221, 226, 230: n = A,T,C or G
cccttagcgtggtcgcggccgaggtacttttttttttttttttttttttttaggttcantctaatcctttttgtagtcactcataggccagacttagggctaggatgatgattaataagagggatgacataactattantggcaggttagtttgtnttgtagggctcatggaaaggggtaaaaggagggcaattttntagattcaaatttataaggaaggncccgnagtncacgaaccaat

SEQ ID NO: 8242 - DNA, 305 bp, Homo sapiens
  misc_feature 217, 281: n = A,T,C or G
cccttagcgtggtcgcggccgaggtacattacaccatgttgtccaacaagcatagctctcagggttacatggtttgttaaagtggttaaaaaccccaatcaaaggcccgtggaagttcttaagcaggggtaggttatgccagaaaaaaagtagtggctattcagctaattttctcacatttactcagtctttcccgtctgtaaaataaaaatgaatntaagttccagagaaaacaaatgggggcagtgtgagccaaggaagtgaataataataagcagaanagaaaggcagcctctgctcattgg

SEQ ID NO: 8243 - DNA, 371 bp, Homo sapiens
cccttagcgtggtcgcggccgaggtacgcgggctttcagttctgcttgctgtccgcaccgctgcgttacccggaaccgccgggccgaacagcatgacgtccgctttggagaactgcatcaaccgaactgttgccgttattacatcagatgggagaatgattgtgggaacactgaaaggttttgaccagaccattaatttgattttggatgaaagccatgaacgagtattcagctcttcacagggggtagaacaagtggtaccagattaaataaactctggggattcatcccaattcgaactctgtaattctctgaatgaactctctcttcaattaaagccaaattattaacattttaactcaagtttaaat

SEQ ID NO: 8244 - DNA, 424 bp, Homo sapiens
  misc_feature 200, 256, 265, 315, 328, 396: n = A,T,C or G
ccctttcgagcggccgcccgggcaggtacgatcttggctcactgcaacctctccctcccgggttcaagtgattctcgtgcctcagcctcttgagtagctgggattacaggcgcgtgccactgcgtccggctaatttttgtatttttagtagagatggggtttcaccgtgttggccaggctgatctcaaactcctgacctnatgtggtccacccaccttggcctcccaaagtgctgggattacaaggcgtgagccancgcgctcancctacaagcaattttttaaaaactgacaccttattacttgataaaattcntctgtttaaaatnctattttactatttttaaaagaataaagtatttagttttttttttttaaaatacaaataatttttctngtatatgtggattaaaaaatttttaaag

SEQ ID NO: 8245 - DNA, 533 bp, Homo sapiens
  misc_feature 6, 27, 59, 61, 71, 110, 124, 147, 150, 168, 199, 203, 224,227, 234, 239, 242, 243, 275, 286, 300, 314, 331, 352, 357,359, 360, 368, 377, 379, 390, 411, 412, 414, 416, 420, 431,450, 451, 458, 480, 481, 494, 498, 504, 519: n = A,T,C or G
cccttncgagcggccgcccgggcaggnactttttttttttttttttttttttttttagnanagacagggtntcaccatgttggccaggatgatcttgatctcttgacctnatgaaccgcccgtntttggccttcccaaaggtgctgnggnatcacaaggcgtgaagcncaccacacctgggccctctattttattctcntttnaaggagagtagaaaccacttnttntagaagngcccnaanntttattttaaatatagaattctttttaccctntaacacaacanagggggaaaaaaanaattgggaaatttntggccctaaataattanggggtggaatcgaaaagcctnttttncnncaaagtgnaaaattaangnaaaaaccaaanttccaccaattttttttaacnntnanaaanagggggcaaantaaaaaatttttttggaannaaccgtntaaattaaatggccttaattanntgggggtgaaggncctnttaatnttttttttggggggngtggggggggggaa

SEQ ID NO: 8246 - DNA, 321 bp, Homo sapiens
  misc_feature 158, 159, 164, 165, 166, 172, 173, 175, 180, 185, 195, 199,207, 220, 221, 224, 225, 230, 238, 244, 247, 250, 253, 254,255, 265, 269, 270, 276, 277, 278, 282, 283, 285, 293, 306: n = A,T,C or G
cccttagcgtggtcgcggccgaggtacgctaaaaggtataaataaaaattccagttcatcctcctttataaagactggtaagccgctctaattctttacagttgtccatgctcaaggcatctggccttctttcccggcgttccactggacttcaaccnnggggnnnaaatgnnanttccncttcnaaaaaaaacnttgnttggatantatttttggcctnncannggatnattttagnaggaanggncantannnattttttttnaaanngggtcnnnccannangagatgtnatattcttttctnatttcttccccaccc

SEQ ID NO: 8247 - DNA, 366 bp, Homo sapiens
  misc_feature 189, 344, 349, 364: n = A,T,C or G
ccctttcgagcggccgcccgggcaggtacatgttcccactcgagtgggctactaggaaaaggctttccgaaccgggaacccatttgacacaggtaactcgtgacttgtctattagtctttcctcattaaaaagtttgctagtttcttttttgattgggtctataagctggacttggcctgcggaaaagnccactaggagagagacactttctgctgtggctgttaggtggttgaagtcatgacaagtaggctgtgttcctttgtatatccttttatctattggtttacctcaagtcagcaagccttgccggacccccttgtagatataggaagtaccctcgggncgcgnaccacgctaaggggncg

SEQ ID NO: 8248 - DNA, 315 bp, Homo sapiens
  misc_feature 262, 264, 265: n = A,T,C or G
cccttagcgtggtcgcggccgaggtacctgctgctcaagcctctcgcgggcccagtccagcttctcggccacagtgcctccgttcacctggatctccatcaggtgggccttcttctggcgcaagaggaaacaaggcgccatctgggtgtgggcaattgacacggatgacttggcagtactctcagaggagcagtggaaccagacagatatgtcattctgggaggtcaccgggactcatgggtgtttggtggtattggccctnannagtggagcagctgtttgttcatgaaattgtgagggagctttggaacactg

SEQ ID NO: 8249 - DNA, 388 bp, Homo sapiens
ccctttcgagcggccgcccgggcaggtactgcttccaactgtctacgttccagtgcagaatctttgctaaaaaaaaatttggcaatagtgtgcacaggaaaactgaatcaaacctggaacatcactgctttcttgaaatggaactgacaagcaattaactggagaataagcgaggggaatggagcagtagtattctttaacttaatttgccatttaagagagcacttggaatctgaagaaagtctatccctaccaaggaaacggagtcaaattgcaattaagattaactttggttatggaagcaagaatcatgcttctcatcatcaattgcatctctttggtagccaataattccatctgtaatcatggcagcaacttaagtattgcc

SEQ ID NO: 8250 - DNA, 395 bp, Homo sapiens
  misc_feature 155, 156, 179, 187, 188: n = A,T,C or G
cccttagcgtggtcgcggccgaggtacgcgggaccctgggaggaagccgactaggcgaattcacttactgaccggcctgggctgctctgagacatggaggaagccagtgaaggtggaggaaatgatcgtgtgccggaaccttgcaaaagtgaggnnggaggggaagttaagaatattantgacccannaatgtggagcgggatcctggcccggggggaaaacttggaacatctccgcaataagacagaggatctggaagccacatctgagcactttcaagacgacatcgcagaaggtggctcggaaattctggtggaaggaacgtgaagatgattgtccttatctgcgtgatttgtttttatcatcatcctcttcattgtgctctttgccactgg

SEQ ID NO: 8251 - DNA, 313 bp, Homo sapiens
  misc_feature 7, 8, 310: n = A,T,C or G
cccttannttggtcgcggccgaggtacacaataactattcaataaatattagctctataataaacaagggattaaaataataaaaaaaaaacaaacaggagaacccaaaatgaagggaaaaacttagagctaatttcctagagtatgtatttaaatggaaagtcggagctcacagagagcagtcaggaattctgcattttctggatctatcttttgtgccttctcatagtacgcgggcaggattattggaaatttgttataatgaatgaaacattttgtcatataagattcatatttacttcttatacanttg

SEQ ID NO: 8252 - DNA, 445 bp, Homo sapiens
  misc_feature 13, 19, 23, 26, 28, 32, 48, 51, 55, 59, 82, 168, 223, 372,374, 420: n = A,T,C or G
agggcgaattggncccttncttncangntcgnccgggtgatggatatntgnatanttcncccttagcgtggtcgcggccgangtactttttaactctctcgttaagagatgaccagagctggggatgcgggcacctgtcttccaggccctcttgctgtgtggccgcangctggtggttcaagccctcttaactcggacatgaggaaactgaaaaacagagtancagctcagactgccagagatcgaaagaaggctcgaatgagtgagctggaacagcaagtggtatgatttaagaagaagagaaccaaaaacttttgctagaaaatcagcttttacgagagaaaactcatggccttgtattttgagaaccangnagttaaagacagcgcttgggggatggatgccctgggttgctgaaanaggaggcggaagccaagggggaatg

SEQ ID NO: 8253 - DNA, 394 bp, Homo sapiens
cccttagcgtggtcgcggccgaggtacatcataaataatacattaaagtaggtcagcctcttacaatgtgtataccttcagacttctaccaaaatcgtaaaactgattttttgactaaatatcaaaggtaagagaatgaaggcttcatttattcagtcatgagacggaatcatatgtgcagtcttagaggtttctaggtatttgtcttatgtctcagttttcatatctcttcgtccccatttaaaaaaaaaataggtgaagagtcatgaaacatttaaaaagaaagtttaaaagcaactgttaaaggctttaaaagattagtatgcagttgtttctctctttctagtcaactctgttatattctataagcaaaacacattttcagaaatgaaaa

SEQ ID NO: 8254 - DNA, 128 bp, Homo sapiens
  misc_feature 55: n = A,T,C or G
tcgccagtgtggatggatatctgcagaattcgcccttagcgtggtcgcggccgangtactacccattttaattacacagttaacagaagcacgggtaagtgacatactcatacttttaagcaataaga

SEQ ID NO: 8255 - DNA, 603 bp, Homo sapiens
  misc_feature 9, 11, 26, 45, 103, 148, 151, 167, 184, 205, 231, 236, 249,278, 283, 300, 302, 324, 336, 352, 364, 371, 373, 381, 383,386, 406, 412, 423, 426, 429, 437, 463, 464, 477, 485, 506,521, 539, 543, 546, 551, 552, 556, 571, 581: n = A,T,C or G
cggcccgcncngtgtggatggatatntggcagaattcgccctttngagcggcccgcccgggcaggtactgaacaatgccaagcacatgaggagaaaggcatanaaggaactgagtgatccctctgggcccaaatcctatagttataancangaggaaacactatgcnacagggagggatcccangggaatgtttattttgtaagncagccttgtttggatccattagtagnttcangggagaatatgtnctttgtttacccccagcttcaagaatccntaagntttcaaggggaccttcngngaaggtgggtttggaagttcangctaggtaaacnttggccaaaaccatancaaccagtaaantaaaagncntttatttncncgnttaattttggttatggttcncaaccntctttcaatgnttngcnttaaattngaaattaattaattttgccaaaggcnnccatgtaaccacnttttttanaaaaaaccacggaaaagaaanaggtatttttgcctngtttttaaccaggtattncatnaancttgnnatgnatttttggggcctanaaagggaggnggaaaccccaaaacttttcttt

SEQ ID NO: 8256 - DNA, 382 bp, Homo sapiens
  misc_feature 345: n = A,T,C or G
ccctttcgagcggccgcccgggcaggtacaaatctttggcctttctcttgacattttcgtatgtcaaaaagcaaaaaaccttcatgtatttcaatctagtgattactttttgcaccataatttgttttttacaccacaaaaggaggcactttcagtatctgtaaaaggtatttaatcctaaaacatacttacctagagaataattaaaacagaattcaatacaatctagtatctattaggaaattaagagttatcacttctaaaagtcatttgaaagtcaatgatgttatctggtcaatggcaggaaatgggaactggaacaaatataagaacttatgggatttnctacacggagacaaaaaaagatattcctttatggttg

SEQ ID NO: 8257 - DNA, 461 bp, Homo sapiens
  misc_feature 124, 125, 128, 134, 142, 144, 145, 149, 152, 153, 157, 158,162, 164, 167, 168, 173, 178, 180, 183, 184, 185, 187, 188,189, 191, 194, 195, 196, 197, 199, 201, 202, 205, 214, 215,216, 223, 224, 225, 226, 232, 233, 236, 245, 249, 253: n = A,T,C or G
  misc_feature 254, 255, 258, 260, 261, 262, 263, 270, 271, 272, 274, 279,281, 282, 291, 292, 293, 307, 312, 313, 325, 326, 340, 346,348, 349, 351, 355, 362, 364, 365, 369, 370, 372, 373, 386,388, 389, 395, 406, 418, 434, 438, 447, 450, 451: n = A,T,C or G
cccttagcgtggtcgcggccgaggtactctttttttttttttttttttttcttttttttttttttttttttttttttttttttttttttttttttttttttttttttttttttttttttttttnnaantttttnaaaaattnannttancgnngggnnaaananggnnaaaanggggngnttnnnannnanggnnnncngnnccnaaaggggtnnnggccccnnnnaacccnnttntttgggttnaaancccnnnacncnnnnggttttnnncnaaaancnnccccccccnnnttcccccccccccnaaatnntttttttaaaanncccccaaaaaaaanaattgnanncnaaanaaaaaantnngttnntnnaaaaaaaaaaatntnncccccntttttttttgnaaaaaaaaaatnttttttttaaaaaaantaanccccctttnggnnaaaaaaaaaa

SEQ ID NO: 8258 - DNA, 313 bp, Homo sapiens
cccttagcgtggtcgcggccgaggtactatacccttcccctaaacttctttcattgatgatacacagaattcctctatttttgcttgaaaatagtcctttagattggagtagccttttcttagatccctctatggttccatgagatgaggtgatacctgcaaagcacttttaaagatatttttttaggctaatgtccaagatacagcattgaggaggcagctatgtctaatgagggctctcttgtttgctagagatgagagaaatgtatactaatcattttaatttgtacctgcccgggcggccgctcgaaag

SEQ ID NO: 8259 - DNA, 396 bp, Homo sapiens
  misc_feature 7, 315, 363, 372, 373, 375, 376, 396: n = A,T,C or G
cccttantttggtcgcggccgaggtaccaagcttatgagtggatgggagtgttacttttctttaaatgaaaaatgctgaccaaagcctaatcggaaaaaaaggaaaaattaaaaataaaaacaaactgaaggatatatgccaagataaaccaaaattaatgcagtgatcacagcacagttcttaaacaaaagtggcatacaatctaaaaatatctctttttctagaaatactattatgtaatctagttcaattatggaagcttttctgtcctgactctaaactgtctcctttattgggatacttcctaattgcantggcataccattcattttttttttttgagaatggggacttcccctttnccttcttgnnanncttcctttttaaaataattn

SEQ ID NO: 8260 - DNA, 369 bp, Homo sapiens
cccttagcgtggtcgcggccgaggtacatttttattttgtttagaagacaactttgattcaatctttcaagaactgttccattcttggtttcttcttagggggataaaaagttaccagttaatttgttttgagatatttaagcattctttgagttatagaattgtgatgcagggatttgtgaatgagacatttacatgtgaaaggtgacttcactagttacctgcttgagcagagtaaagtgtgtatatgtacacctcattgggatcaatgaaaagcttcaagaaatcttcaggctcactctcttgaaggccacaagccaccggtccccaccggacttcccagcccttgcagttccctgttcctgtagc

SEQ ID NO: 8261 - DNA, 329 bp, Homo sapiens
ccctttcgagcggccgcccgggcaggacgcgggggatcgaaggggacttgagactcaccggccgcacgccatgagggccctgtgggtgctgggcctctgctgcgtcctgctgaccttcgggtcggtcagagctgacgatgaagttgatgtggatggtacccgatagaacatggcatcatcaccaactgggacgacatggaaaagatctggcaccactctttctacaatgagcttcgtgttgcccctgaagagcatcccaccctgctcgcggaggcacccctgaaccccagggccaaccgggagaaaatgactcaaattatgtttgagac

SEQ ID NO: 8262 - DNA, 351 bp, Homo sapiens
  misc_feature 8, 96, 294: n = A,T,C or G
ccctttcnagcggccgcccgggcaggtacatttaatatgattcaatataatctgcagtctcatgtatggcttatcaataatgccatcatcactgtntgtcaaacaacctcactgcttactagaaatgctaaacactggaaaaaatggaattttatacatttgttttcttaaattttgacagatattcttcagaaagttaaaactgccttccacaaaattttgtgtgtatatggcacaaggtgacagccaaaaagtgtgattccatccgaaaaggcactgttaacaatactcaanaataatctgacaagtctacatcaatgtctgagtaaagaaatagggtaaatagacaaa

SEQ ID NO: 8263 - DNA, 470 bp, Homo sapiens
  misc_feature 55, 56, 67, 90, 104, 120, 123, 125, 128, 132, 133, 134, 139,142, 147, 148, 149, 150, 153, 157, 158, 168, 171, 174, 175,176, 178, 180, 187, 188, 189, 190, 195, 197, 200, 202, 211,215, 247, 258, 264, 268, 272, 275, 276, 281, 291: n = A,T,C or G
  misc_feature 294, 305, 308, 318, 336, 372, 382, 384, 389, 406, 407, 410,411, 423, 424, 426, 427, 428, 430, 437, 438, 439, 442, 443,447, 455, 465, 467: n = A,T,C or G
ccctttcgagcggccgcccgggcaggtactttttttttttttttttttttttttnngcctttataanaaaatttttattgttaattattnaccttaatagtttncaaaaaagagggaaanaantnacntcannncaccntgnttggnnnnttnggcnnttttttttantgnaannnangnttttttnnnncttgntnaangntttataaantttngggagaataatttttataaattcttttgcccnttttaaaaacnttttgnaggntttntcnncccanaaaaaaaaanggnccccccccccntcntttttttatnattttaaaaaaacccccncccccccccccttttttttttttataaaaaaaaaantttttccatnanaaaantgtttccccaaaaagannggnngttttttttttnngnnnanaaaaaannnccnngggnggggggcngccccccccnanaaa

SEQ ID NO: 8264 - DNA, 338 bp, Homo sapiens
  misc_feature 8, 13, 35, 57, 262: n = A,T,C or G
cccttttnttggncgcggccgaggtacacataggnataaacaacataaaactgactnggaagcgattcctcagcagtgccccattgatctgccctgccaagtgactggctgccagtgcagggcttacctttatgtccccttgaatggtagccagcccattcgctgcaggtgcaaacactttgctgatcagcacagtgctgcgcctggctttacatgcaatacatgttccaagtgttcaggattccatagctgcttcacttgngcttgtggtcagcctgcatatgcccatgacacagtagtggaaactaagcaagaaagattggctcagggaaaaacca

SEQ ID NO: 8265 - DNA, 394 bp, Homo sapiens
cccttagcgtggtcgcggccgaggtacatagtgtcgcgaactcaaatcggcatttagatagatccagtggtttaaacggcacgtttttgcttataaaaaaagtgcaaaaaagatgtggtttacaagttaaagctacagaatccctttttgctgtaattgcaccagttttaaagcctctggacagagcagtatttcgtttaaaactttgtttttcttaaaagcttacagtgtttggctaattctcctcccctttttacaagacgggggccggagggtggacactggtggcaggttaagggatactgtcactttaagaagcctgcagattgaagtgtaaacatggagaaattaggggctgattttttaaactgtgtgagatattaaccagccgccc

SEQ ID NO: 8266 - DNA, 358 bp, Homo sapiens
cccttagcgtggtcgcggccgaggtactagaaattataaatagtagttatagagactttaaattctgttgtattcctttgaagagcattgttacttgaagaggggttaatctgactggattcaaacagcaatacctacctcccctacagtggacacagttgaaatcctcattcggtgaacacacacacgcatgtattgtatatagttgtgcatttctgtgtaactatatatattttatccagattttctcgttacctgtgagagtgttcaacaaagctactctagcattactgaaagtcagaacctcagtttttgttttgcttattgggatttttgaataccataatgccctttgttt

SEQ ID NO: 8267 - DNA, 584 bp, Homo sapiens
  misc_feature 10, 14, 41, 78, 81, 108, 111, 118, 145, 172, 175, 176, 178,190, 195, 198, 203, 205, 217, 218, 226, 229, 240, 242, 266,273, 322, 330, 342, 350, 360, 379, 381, 387, 405, 407, 410,412, 413, 417, 421, 429, 433, 435, 441, 450, 454, 465: n = A,T,C or G
  misc_feature 480, 488, 507, 515, 528, 532, 541, 543, 545, 554, 564, 568,570, 581: n = A,T,C or G
cgagccggcncgcncagtgtgaatggatatctgcagaaatncgccctttcgagcggcccgcccgggcagggacactgntcncaatcttttacaggtcttgtatgtttntangaatacnaaaattaagcttggatgggttttggtnttgggtggatgaggcctattttggttntgnnantggttttcagtnttttngcnctatnantagggttaatanntgcccaangantaagtttattntngaactacagttcaaattgaaccantttttgngaattgttttattcttttcataaagaaaaatttttttaatttttgtgancccccaangaattttgtacntttattanaaaaggattnaatttcttataaccaattntnaaaagnggaattggttaccaattntnttntnnaatncaangaaccccntttncntttttnctgaaccanttanttttaattttnctaattggaaaaggnccatttanaattggttttggctaattntttccttncccaaaaaattantttnaatttgccncntnggaaaaaangggggtaaangatngntttggcctttnccc

SEQ ID NO: 8268 - DNA, 228 bp, Homo sapiens
  misc_feature 63, 69, 71, 74, 75, 81, 87, 88, 147, 153, 168, 173, 174,190, 193, 206, 215, 216: n = A,T,C or G
cgcagaattcgcccttagcgtggtcgccggccgaggtacctcattagtaattgttttgtcgtnctcatnanatnnaataangtcttnnttttaccagctcacctgagataacagaatgaaaatggaaggacagcccagaatttcctnctttgncttcttcttgcctcnatttnntcttcttgaaagatcntangggtataccccantttttttgnngggaacccccat

SEQ ID NO: 8269 - DNA, 391 bp, Homo sapiens
cccttagcgtggtcgcggccgaggtaccacaatttataaagaaaccaatgatctcaggagatatttttggtctgtcttccctgaaataagaattgtgttttggaaatctaaagggtgttctgttccaaaatcttaagtttattaagttattttccacatcaaatagcaaacactacaatacagccagggaaagaggatcttccaaacaaacaaaaaaggtatgttttctagattgctccactactaaatgagaactttttttttgaggcataattataaatcaagttcttgatcaattttacaaatctttcccggtgacaaggctcatatttccaataaaaaagtgctcttttgctttcctaaggcccacacctaaatctccctgggggtc

SEQ ID NO: 8270 - DNA, 273 bp, Homo sapiens
  misc_feature 2, 8, 15, 30, 32, 33, 47, 61, 75, 85, 93, 120, 140, 154,155, 159, 183, 192, 206, 217, 259, 262: n = A,T,C or G
gnaacccntagcggnggccgggccgacggncnnatgtgcaaaatttnagcatggtaaacangataaatacccaangaacaaaccnacaatcantttatgcaatgacaatgaccttctaanataagccacgagcggaaccnagaaggttttttcnncaanggagagggaaggcagaggcaaaanaccgacacnataaaatgacacanatcataggctntacctgcttgaccacgagcctaaaatgtgtgagatgggattntangataagcagac

SEQ ID NO: 8271 - DNA, 359 bp, Homo sapiens
ccctttcgagcggccgccccgggcaggtacttttttttttcttttttttttaaaaacagctttattgaaatataatttacatgatttattggagtaaatttacatataatttacatacacataattcactcaattcaataatgtttagtacaggttcaaatattatcttttttttcccaccaacctcttttccaggaaaatgcaaagctactctttagccaaattttaaaacaggggatatttattttgggaatcattaatacccatctgccccttttttggtccattggacatattgaaatgaatgattaatacttatcacttcatggtgtacctcggccgcgaccacgctaagggcg

SEQ ID NO: 8272 - DNA, 478 bp, Homo sapiens
  misc_feature 123, 124, 125, 126, 127, 128, 132, 133, 137, 141, 143, 153,155, 156, 157, 158, 159, 160, 161, 163, 169, 176, 182, 186,191, 200, 202, 203, 204, 205, 206, 207, 214, 215, 216, 218,222, 227, 228, 230, 232, 233, 234, 237, 238, 243, 246: n = A,T,C or G
  misc_feature 248, 253, 254, 256, 257, 258, 259, 261, 262, 265, 274, 293,294, 296, 297, 299, 304, 305, 306, 307, 309, 314, 315, 316,317, 318, 321, 327, 330, 360, 363, 370, 373, 378, 386, 388,391, 392, 393, 399, 401, 404, 411, 428, 429, 431, 432: n = A,T,C or G
  misc_feature 433, 436, 437, 440, 444, 448, 451, 454, 456, 458, 459: n = A,T,C or G
ccctttcgagcggccgcccgggcaggtacttttttttttttttttttttttttttcctttttttttttttttttttttttttttttttttttttttttttttttttttttttttttttttttnnnnnntttnnattnattntnttttatatanannnnnnnanaacccnggggaantaaaantttnattanaaaaagaantnnnnnnaaaaaannntnaatnttttnntnannnaannttttnggnanttccnntnnnntnnaanaaaaaaaanaaatgaatttttttaaaanncnncnttaannnntnaaaannnnnggntaaaanaanaaaaaaatgggggaaaaattttttttttanaanagaaaanatnatatnttttttancnagnnngagacncnccnctacttnttatttaaaaaaaggtnncnnnaannaanacanaacncancanangnngggataaaaaaaaaaaaaa

SEQ ID NO: 8273 - DNA, 325 bp, Homo sapiens
  misc_feature 140, 198, 254, 281, 295, 302: n = A,T,C or G
cccttagcgtggtcgcggccgaggtactgtatttctcatgctggatttcaaaaaaaaaaaaaagtatcaaaaacaaaaaaaactaaagggtggtgttttattggattgtgacaggttgagtaataaggaattaagtcgtngccatttcattaaaactgagagatgatgtaatgcatatataagagttttctgaagggntttttttgggcttttaaacagcttatttttgtttattgtttagtattttttatttnattttattttggaaagatatgattgtnttatgtgcaacttnaaattgnttacattataactacaaaatatt

SEQ ID NO: 8274 - DNA, 129 bp, Homo sapiens
  misc_feature 109: n = A,T,C or G
ccctttcgagcggccgcccgggcaggtacatacaaaatctgaaactgacactgtcagttctatactttgcacacgtgaagtgtcagaatattttcctcagtagtacctnggccgcgaccacgctaaggg

SEQ ID NO: 8275 - DNA, 420 bp, Homo sapiens
ccctttcgagcggcccgcccgggcaggtacagacataaaacaggaagggttctaaatatatttgctggtcatttgaaactcaatggcacttgtttatatgagcaaaagccttcaacaccagttttctggccaagtttccctagaattttgccagccaaattaacttcctgatgttaactatttgattacaatatctcagttcccgacctaaactaatattgtctgttttcacatagctcttaaaaacatttctaaatctgacagcaaaggacagcacagtgatacctgggtgtgatatatatcagtccactcaatttataaagcactttgggataaaaggtgctcccattaaaaatgtagctactattgacagataaaactgaaaaagagtgaatggatgactcaattatttttaaagga

SEQ ID NO: 8276 - DNA, 373 bp, Homo sapiens
ccctttcttgcggccgcccgggcagatacaaagaactctcaaaccggatagtaagaaaacaaacagcccaagtgaaaagcaggcaaaagacttgaatagacgcttcaccaaagagcatacacgcgtggcaaacaagcacacgaaaagacgttcagccgccgatggcttggttataatttataacttacttatttttatctaataattgtagattcagtgtatttcttcaaaaaatgtttaattaaatggcatgttaatgggtgagtgaatccctttggggtgactttcgtgttttaggggtcgtattagggcattttgtttgggatcaacgggattcatttttaaaccctggacttccccttattcccataaa

SEQ ID NO: 8277 - DNA, 246 bp, Homo sapiens
  misc_feature 127, 136, 137, 164, 173, 176, 177, 178, 183, 186, 198, 209,215, 217, 224, 227, 240: n = A,T,C or G
aggtacgcgggggagagtagtggttctcccagcacccagcacgcagctggagatctgagaacggacagactgcctcctcaagtgggtcccagaccctcgagtagcctaactgggaggcacccccaantaggggcannctgacaccttaacactccccggggttnccttgcccnggnnnggcgngcntctagaaactanttgggattccncccggngnctgtcantgnaattttcgaatantcaaaa

SEQ ID NO: 8278 - DNA, 382 bp, Homo sapiens
ccctttcgagcggccgcccgggcaggtacttccccctcatctccttgggtaatggcaccgggctggggcagggcacctgcccttccacttcacagatgcactcccgcaggcagtacgcgggatctgtaaaaggtttctccctactgtcaaaaaaatatgcatgtatagtaattaggacttcattcctccatgttttcttcccttatcttactgtcattgtcctaaaaccttattttagaaaattgatcaagtaacatgttgcatgtggcttactctggatatatctaagcccttctgcacatctaaatttagatggagttggtcaaatgagggaacatctgggttatgcctttttttaaagtaagttttctttaggaactgt

SEQ ID NO: 8279 - DNA, 133 bp, Homo sapiens
  misc_feature 79, 126: n = A,T,C or G
tgcagaattccgccctttcgaggcggcccgccccgggcaggtacaggtcatgggatggggcacactgtggggggtggtnctgggtgcacccccagtgggggtgctcacaagcctggcccccattgncctaaaa

SEQ ID NO: 8280 - DNA, 380 bp, Homo sapiens
cccttagctggtcgcggccgaggtaccttctctccttccctggctctgaacatcattcagaacaggaacatggggaagccagcccagcctgccctgagccgggaggagctggaagcactcttcctcccctatgacctgaagcggctggagatgtattcacggaatatggtggactatcacctcatcatggacatgatcccggccacctctcgcatctatttcctgaaccagctgggggacctggccctgtctgcggctcagtcggctcttctcttggggattggcctgcagcataagtctgtggaccagctggaaaagggagattgagctgccctcgggccaagttgatggggacttttcaacccgggatcatccgcaaa

SEQ ID NO: 8281 - DNA, 390 bp, Homo sapiens
  misc_feature 73, 121, 192, 197, 241, 286, 305: n = A,T,C or G
ccctttcgagcggccgcccgggcaggtacgcggggagagcacatccggtgttagaagcgctggtaggccttgnagaggcgggttaggaagagtggagactgctgcacggactctggaaccntggaacaatattttgatcgaaagatcaactttgatgcgcttttaaaattttctcatataaccccgtcaacngcagnagcacctgaagaaggtctatgcaagttattgccctttgtatgtnttgtggcggctgcaggggcctatgttccatatggtcactcatttnattcaggctggcctgctgnctgccttgggctccctgatattgatgatttggctgatgggcaacacctcataagccattgaaaactgaacaagaaaaggactggg

SEQ ID NO: 8282 - DNA, 313 bp, Homo sapiens
  misc_feature 78, 86, 112, 210, 298: n = A,T,C or G
cgagcggccgccagtgtgatttgatatctgcagaattcgcccttagcgttttcgcggccgaggtacggtagcagcctncagctgtntggaagccctcccaagtcaggccctnttggatcatggtagctgccagcccgtatgaccacacccacccagacttcatcagactgcacacttggatttaatcaagggacaccatggggctgcatnccattcacagcccccatggcccctcctgcaaaggcctggacgttcagctcaaagaatagttttggagagcactgggaccacatgttgnggttaggaaacacct

SEQ ID NO: 8283 - DNA, 513 bp, Homo sapiens
  misc_feature 91, 115, 136, 151, 156, 161, 165, 172, 174, 175, 178, 185,186, 189, 190, 191, 195, 199, 203, 204, 206, 208, 212, 216,225, 228, 236, 244, 248, 250, 267, 276, 277, 280, 287, 288,291, 294, 295, 297, 298, 300, 304, 309, 310, 314, 315: n = A,T,C or G
  misc_feature 316, 319, 320, 322, 323, 324, 326, 327, 329, 330, 332, 336,337, 338, 342, 344, 345, 354, 355, 357, 361, 365, 367, 369,372, 373, 374, 375, 383, 384, 387, 389, 390, 391, 393, 396,397, 401, 408, 412, 413, 414, 418, 420, 421, 422, 423: n = A,T,C or G
  misc_feature 424, 425, 431, 432, 433, 438, 439, 440, 443, 445, 446, 448,449, 451, 452, 456, 457, 458, 459, 460, 464, 466, 467, 469,473, 477, 478, 479, 480, 481, 482, 483, 485, 486, 487, 489,490, 492, 493, 494, 497, 501, 502, 503, 504: n = A,T,C or G
ccctttcgagcggccgcccgggcaggtacttttttttttttttttttttttcttttttttttttttttttttttttttttttttttttttnttttttttttttgttttttttttnttttttttttttcatttactnaaactctcactgtanttttngactnaaancaatttntnnttnaaaaaannatnnntatntttnttanngntnaaanaaanaaaaaaatnttnttacctanaaacagtnattntnatgggggaagctttttnttaaatttnngancaatgcnntgnggnncnntntttncaaanncttnnnaannannnannannanaaannntaantnnttttttttnntnaaantttntnanaannnnggtttttnntgnannnanccnnattnaaaaaantttnnncccntnnnnnntttttnnnaaaannnttntnntnnannaaannnnntttnanngntaanatannnnnnntnnntnnannnttnttannnntttttttaa

SEQ ID NO: 8284 - DNA, 385 bp, Homo sapiens
ccctttcagcggccgcccgggcaggtacacttaaaaatggttaaaatggtaaatgtttaaaatggcaaatatgtatttatatattttaccacaatagagaaaatcaagtctttaaaaatgatagcccctatgtttttatgcttacctaaataaaccatatttaatatttggcatataagctaatttgatagagcacgaattgctatgtttataataagcatgttggactgaatttcatcatttattagaatgtgcatataagaaagatacttgtatttgtaggcctctgaaaaacatctaggtaggtagagagccttgactcaccttgccggaaggtcctggaagaatggaaaaaaagaaaaaatgaatcttcatattcgggttt

SEQ ID NO: 8285 - DNA, 384 bp, Homo sapiens
  misc_feature 279, 291: n = A,T,C or G
ccctttcgagcggccgcccgggcaggtaccacaaggagccactgggtttctcatttgcatggctacattggggaccatgctgttcagtgcaatcagtaatatagggagaggagcagggaggtgaaagaaagagaagataatgagttggattttgaacctcttgagctttaaatatctaacgttcatctaaagcaatatagcccataggcagcatctattggaaattaataaaaataagggtctaggcattcagggttagtgggtgggggattgggaagnaaaaggacttgnagaagttcgtttgaaatttcttgtggggaaaagtccaaagccaacagtagcagagaggaggatttgggtaagccgaatgttgttggaagaaaa

SEQ ID NO: 8286 - DNA, 376 bp, Homo sapiens
  misc_feature 302: n = A,T,C or G
ccctttcgagcggccgcccgggcaggtactttaaagaaaaactatttttactagtttatctgaatggtctgtggactttatttagaaactgtttttcagtttagttttttggacatatcctttgctcagtgtattttgttacttctctagtaaaggtagaagtgaagcagatgccattgtaggttttaccagcatttaaatatattatgaattgcttagcaatgaaatgcaagtatgcatcttttacttaaagatactatttatgtattcagctgcagagatgaaatagcattttatgtgtnaatttgtttctggctataaaatttaagtccttacagcatttggggattatacacttggatttcaaaatttgata

SEQ ID NO: 8287 - DNA, 322 bp, Homo sapiens
  misc_feature 262, 279: n = A,T,C or G
ccctttcgagcggccgcccgggcaggtacgcgggggatcctgaactgggttaggtgccgctgttgctgctcgtgttgaatctagaaccgtagccagacatgggactggaggacgagcaaaagatgcttaccgaatccggagatcctgaggaggaggaagaggaagaggaggaattagtggatcccctaacaacagtgagagagcaatgcgagcagttggagagatgtgtaaaggcccgggagcggctagagctctgtgatgnagacgtgtatcctcttngatcacatacagaagagggattgcaccgggagggagctctttg

SEQ ID NO: 8288 - DNA, 326 bp, Homo sapiens
cccttagcgtggtcgcggccgaggtacaccaaaaagagaactttgtgatccgttggtaagatagtatccacaagtaagcacttgtgttcactgttttttgttccacactagaatacacccagttggataccagagttatttacagacatctgaggaagatcctagttttcaagtctgtcaggaaaatattccatattgttttaagccagatcatacccatggaaaaatagagaatggttttctttctttttctttctgaccaatacatgctcaagaaatcaaatatctgagatacacaaattgaacgcggtagggtgggggaggaa

SEQ ID NO: 8289 - DNA, 610 bp, Homo sapiens
  misc_feature 300, 303, 307, 308, 311, 312, 313, 317, 431, 517, 542, 550,557, 583, 588, 594, 602: n = A,T,C or G
ccctttcgagcggccgcccgggcaggtacatgaacctccaaggaagatagagcgatttactcttctccaatcagtgcatatttacaagaagcacagagttcagtatgaaatgagaacactttacagatgtttagagttagaacatctaactggaagcacagcagatgtctacttggaatatattcagcgaaacttacctgaaggggttgccatggaagtaacaaagacacaattagaacagttaccagaacacatcaaggagccaatctgggaaacactatcagaagaaaaaaaaaaaanaanaaannaannnggtncgtggggacaaccttagccaaaccatttacccaaataaagtataggcgatagaaattgaaacctggcgcaatagatatagtacttttttttttttttttttgctcatagataangacaaggggttgggttaaatctttactcacagtaatttaccaagaacttcaaatactgggtgtccacgctaaaaaatttttccagngggggtttgatcaaaaaatttttanacctttgntctaaanaaattcagtttcaagggggttatganatggntcatcnggtaattngggttttg

SEQ ID NO: 8290 - DNA, 402 bp, Homo sapiens
  misc_feature 56, 59, 61, 64, 65, 67, 73, 89, 97, 100, 147, 155, 163, 168,176, 197, 199, 202, 205, 223, 232, 239, 244, 247, 249, 252,253, 269, 303, 308, 320, 322, 341, 349, 352, 353, 359, 364,366: n = A,T,C or G
ccctttcgagcggccgcccgggcaggtacttttttttttttttttttttttttttnttngntgnngntttttnacatacattttaaagngagagatnttnttttaaaattttagagggtgagcatcaaatatcattggggtttctgnaatcagtntaaattangcagnagggcacnttaaatgggatcatttacaangngcncanattaaatttggggttaanataaacaangctaaanttaanccnangannattcaattcctcaaanaacccggggattaatggaacaaaaattgaaagtntttantttttataccananaattattttttttaaaaanacttaaangcnntttcanctttntntttttttaacaaaaaaagggcctttttttttttttt

SEQ ID NO: 8291 - DNA, 422 bp, Homo sapiens
cccttagcgtggtcgcggccgaggtactaatgtgaggaaacaaacatgttcaggccccgaacatttccggtgctgactcggccttaaacgtttgtgccataatggaaaatatctatctatctgttctcaaatcctgtttttctcatagtgtaaactcacatttgatgtgtttttatgaaggaaagtaaccaagaaacctctaggaattagtgaaaaaagaacttttttgaggtgtgttactatactgctgtaagttatttattatataaagtattgtaaatagaataagtgttgaagatatgaaatatggctatttttaatggtgacaattatgacttttagtcactattaaattggggttacctatatcaagtacctgcccgggcggccgctcgaaagggcgaatttccagcacactggcg

SEQ ID NO: 8292 - DNA, 308 bp, Homo sapiens
  misc_feature 50, 63, 161: n = A,T,C or G
cccttagcgtggtcgcggcccgaggaactttttttttttttttttttttnttatattctcgangtctgatatattatttttattataaaaacatagaataatttttcatacataattcagacatgatcttagccaggaaaaattaaatacacagcacagcntggatgagggaaagtatgcacagtccgtgtcagggttagaaaaccctgaaagaggtaccttgctggctcagctacatacataaggccttaagccttgcttgccagtttttaaagggaacttgggttcttctttttcactttttcctg

SEQ ID NO: 8293 - DNA, 344 bp, Homo sapiens
  misc_feature 47, 61, 101, 103, 210, 310, 325: n = A,T,C or G
cccttagcgtggtcgcggccgaggtaccagagatggcaccttttttntaggtaaggtgtangaattcctcaatggtcttgcttcgtaaaatttaacatatnanaactggggaaagagaaaggagggggttatttttttgcagcattttccagtcacatatcagggttatactgaactgcaacaaagatcaacttttaaaaattagccttnttaaaatacaaaatgatttaagtattttaaagataatttatttgccttgctcttgccttctaacattagccatttcatggataggctaaaacttatactncaaaaaatgtggaancacattttaatgggagtaa

SEQ ID NO: 8294 - DNA, 388 bp, Homo sapiens
ccctttcgagcggccgcccgggcaggtactcaggatagatttggttggcatcaaaaaccacaaagatctttgggttccaggtatcatccacacagctgtcatataaattcacatagctcccgtctttggaaggaggtcgcatgtatttggagtctccgtttatgtaatctccaattagcactcgagcaagaaacatagatttatatgttctaaacagatgccgctgttgcaagctgacaccatgaatttggaatgtgttcccatgctttatgtcatctttgcagaaacgactggaataagcagcatctctagcaaaataggttccttttccaaagacagcaccatgtataccatttattctccaatcaaagttatgaatgcagattgc

SEQ ID NO: 8295 - DNA, 390 bp, Homo sapiens
ccctttcgagcggccgcccgggcaggtacagagggacagattctgatggtgctgggaatcatccaaggttttaaagaccattgctaccatcccatgtgctctcaggtgcattcgaaaactgggcatggcacatttagtagccaagctaataacactaaggcaacgtgtgtttagaggctgagtgctctttaagccacttaacaagtacatttttgttgtagattattttaaacataatgctatagtaatattttgaagatttgagctgttatttccatttgtttttacactgtgactaaatgattaggttttagttttagactctaaatggaacctgaattaataggaaataaacacggtacctcggccgcgaccacgcttaagggcgaa

SEQ ID NO: 8296 - DNA, 364 bp, Homo sapiens
cccttagcgtggtcgcggccgaggtaccctgcgctggctccgtgaaccttagggacaacaccgggacacccgcgaggccggaaaatggactcagtggcttttgaggatgtgtctgtgagcttcagccaggaggagtgggctctgctggctccttcacagaagaaactctacagagatgtgatgcaggaaacattcaagaacctggcatctataggggaaaaatgggaagacccgaatgttgaagatcaacacaaaaaccaaggaccgaaatctaagaaaccatacgggagagagacctctgtgtaaggtaaagaagggtagttcaatggtgcagaaaactttcagtcccatcttcaagtgtgac

SEQ ID NO: 8297 - DNA, 359 bp, Homo sapiens
ccctttcgagcggccgcccgggcaggtaccagagtcaaggtgccagggtcctgggagcaacaaatgcattcccattgatttattgttgaaaaaccctctgatcagcctacccaaaaggccctgccctaccctgccttgcctcacctacatacgttcagtttgtaattctttttccttttgctgcacaataactgcttccgtttacctttttcacgggagactctggcttggaaatctccaaaatgcatactttatctgtgttgtgggtttgtttaagtatctcttcaagactcactttgctgacttcctaacccctcagtttctcacaagtggtgactgtattttgggagggtaggggg

SEQ ID NO: 8298 - DNA, 256 bp, Homo sapiens
ccctttcgagcggccgcccgggcaggtacagattatggaaaatatgaaggactaacaaagaattacacggattatttatcccgactatatgaaagagaaatcaaagatttctttgaagttgcaaagatcaagatgactggcacaactaaagaaagcaagaagtttgctacactgcctcgaaaagaaagtgctgtcaaacaggaaccagagagtcttctgggaagttcggggaaattaactgggatctacttctagt

SEQ ID NO: 8299 - DNA, 457 bp, Homo sapiens
  misc_feature 425: n = A,T,C or G
ccctttcgagcggcccgcccgggcaggtacactggaggctggagcctgcagatggcatggctctgcggctcaccttgctgcagttggtggtggtgacagagactgcagcctgactgagtgaatttggaaattatctgtctggaagctctgagtttatcttgggacctcaagaggagaggatcacccaactcacagcaatcaaactccaaatggtgctataaactgaaccacacatggacacgtcagtcttccgaggacccttagatcaaccccaggaggagccctagctgctgttccccattcgacgcccctttccagcaggaagtagccagaagacatcgtcgcccaaacctctaacagcagttagtgcggcatctccacagggggggatgttgtaggagttattgataaattattttaggcanatagagaggaaaaggggtccttaggaagtttt

SEQ ID NO: 8300 - DNA, 408 bp, Homo sapiens
ccctttcgagcggccgcccgggcaggtacgcggggaatacagcaatgaagaattacaggaccaaattaagaatgcaaccaggttgccaagaactgagtgatgtgtccacatcccgggagagagaagccaccagaagctggaagagctaaatcagactgctccctagagcttcagaaggagccagaactgatgactccaagatcttagcccagtgaaactgatctggacttctgaactatgagagattccattcctgttgtttgaagctaccacattattgagaacttgttacagtagcccgaggacactaacacaaatggggctccgggaaaatccagactaaaggtgttgtgttggtttgcaatctccttgcttaactttctgatactagacataaatagattggtg

SEQ ID NO: 8301 - DNA, 458 bp, Homo sapiens
  misc_feature 53, 149, 159, 161, 199, 201, 203, 207, 213, 217, 226, 233,242, 246, 249, 251, 255, 285, 287, 313, 332, 333, 334, 335,336, 338, 345, 346, 348, 365, 366, 367, 368, 369, 370, 376,382, 397, 402, 404, 405, 406, 420, 427, 433, 436, 437: n = A,T,C or G
  misc_feature 450: n = A,T,C or G
ccctttcgagcggccgcccgggcaggtactttttttttttttttttttttttngctctttgtaaattctttattgccaggagtgaaccctaaagtggctcacaagagtgccctatttctttcaattaactacaaggacaaacacatttnaaaagttganantaagtgaccagtttgatttgccaaaattttaaagcccncntnccantaaaangggnaaaaggttnccttttnggggatttncccnccnanaaanttttttaaaaaaacttttttggtatttttngnaaaaaaaaaaaaaaaaaaaaaaaaantttttttttaaaaaaaaannnnnanggggggnncnctttttttttttttttnnnnnngtttanaaaaanaccccccaaaaaaanaaaancnnngggggggggggggngggttanaaaaanaannccccccccccccncccccccc

SEQ ID NO: 8302 - DNA, 386 bp, Homo sapiens
ccctttcgagcggccgcccgggcaggtactcttagtctgctctgaaagggctaatgtctagtgtaatggcaaaattaccaatctgttctccaaagtgttccagcagatatatttctactaagacaaacataattgtgaattgactgttaagtgaggctgtttcttctctaatgatcacataatatccaaattatatcaacttcattatttccctctttccttttcctaacccattccctttatttcttgtttctcttgaagactacttcaaattacctatttgtcttcattactgcccccaaaactctaataattgtgacccctaactgttcatttctcttcctttctccaccccattctgaacatccttcttttaaggttttaat

SEQ ID NO: 8303 - DNA, 396 bp, Homo sapiens
  misc_feature 297, 312, 325, 345, 378, 392: n = A,T,C or G
cccttagcgtggtcgcggccgaggtaccagtgtataaaatgaaacttttcaagccatcttaacaacagttaagtgagcaaaccaccaactctgaactctcaagctgtgttttaaaatacaaagcagcccgcagcaagttctctcttgtccaggcattctgtatgtaaggccaggaggcttctgcttctttcctgggttttgcttgctaggcacagctggaagggcagagggccacagccgagctgaactcgctgtcaaatttgaacttcctagaaaaatcacttgcagagggaaacncacatcaaacctacntgaagattttcangatctttcaagaaaatgttnaacgggaaaaggtcccggcttggagggcctgangccaagggcccatngggg

SEQ ID NO: 8304 - DNA, 208 bp, Homo sapiens
  misc_feature 7: n = A,T,C or G
cccttancgtggtcgcggccgaggtacaaaagttctaagattcaaatacaatgcaaagtttataataatcacacaaaaagtgttccttttagccaccatttagcttcacacaacgaagactggaaaatacgtggtttatttagatcttcaatataaatttgtacctgcccgggcggccgctcgaaagggcgaattccagcacactggc

SEQ ID NO: 8305 - DNA, 374 bp, Homo sapiens
cccttagcgtggtcgcggccgaggtacagtccactggagtcttcataacatcaaccctctaggtgagatctgtaatagctagttaattatctgggaatttttaaacatttggatattgcaaataaatgtgaataaaatacttgaattttaaataattaaattgtttcttcaaatgttttagcgtttatgaagaaataatgcaccaagattttggatttctaacatttctggctgtatgagagagtaaagggttggcactttattaacttgggggcaatgtagacatatgttgaagctggttctggaagtgcaccctggaaatttttatctgagttccttgtcaatcctacacaattgcatgccaatggagaacc

SEQ ID NO: 8306 - DNA, 386 bp, Homo sapiens
cccttagcgtggtcgcggccgaggtacatactgttaactagaatagttactactaagcatgatttcattcactgcagcaggcatacttgcctgttcctaaattcattctgggttgcgggcatgaggacaatcacagtggtttgctctgtgatgcctatttctttccaatgtttttagttttgttgcttaaaaattctggctcacacaaataagttgctgtgaatgctattaataacaacagtgaactctgtttagcaatggaaagtcttctttaatcttaatctaaaatggctataaacttataatcattcttcaatgtattaaagtattaagagattagctttcttctttgagtatcaactttaatatgggattcaggattttgg

SEQ ID NO: 8307 - DNA, 368 bp, Homo sapiens
  misc_feature 358: n = A,T,C or G
ccctttcgagcggccgcccgggcaggtacagcggagaagaggaattcatgaagcataatagtccacagcagaataagaattgcttgaacaattttgacctttcagaatacagacagattctcagtgatgtggctatacgaatatatcatcaatttattatcataatggaaaagaatatccaaccgataatagttccgggaatgctggagtatgagagcctgcagggcatttccggcctgaagcccacaggcttccggaagcgctcctctagcatagacgacaccggacggctacaccatgacctccgtcctgcaacagctgagctacttttacaccaccatgtgccagaacggcctgnaccccgagct

SEQ ID NO: 8308 - DNA, 146 bp, Homo sapiens
  misc_feature 9: n = A,T,C or G
aatacactnctatagggcgaattggagctccccgcggtggcggccgaggtactgcattcttgcttaatagtattaaccataaaggaggtcatggtttatagggtttggtttacctattaaaccatcattgactatggaaatactta

SEQ ID NO: 8309 - DNA, 184 bp, Homo sapiens
tatagggcgaattggagctccccgcggtggcggccgaggtacacgaaaatgaggatgtatccaccccctcccaaaccagtgatttggaagtttctttacagtatcagtagtaacatggacaaacttgttattttttccctgctatacttaaaaataagggaaataaaactgtacctgcccgggc

SEQ ID NO: 8310 - DNA, 325 bp, Homo sapiens
actacttagggcgaattggagctccccgcggtggcggccgaggtacatcttaaatgatatcttatttctacatggaaagaagttatagaatcttcatagagttctatgagaaaaaatatacttgctatctataaaaaagagaaaaaagaaaaaaaatgagaaaaaagtaagaaaaaaaaaaatcctgtcctaggcttttactcttgatcttcaaaggcaccgcagggtttaatggttccttgggttattattttgcagttttgttttttattttgccttaagtaatgatagaagatatatatggccggacagctctagaactagt

SEQ ID NO: 8311 - DNA, 399 bp, Homo sapiens
  misc_feature 1, 170, 277, 333, 343, 379: n = A,T,C or G
ngcggtgggcggcccgaggtacttttcattttggctcaccgtggattttctcataggaaagtttggtcaagaagtgaaattgaaatattggtaaagtcaagcccactggggacccgagggatttctggggaccccgcagttgggaggaggaagtagtccagcccttccangtgggcgtgagaaggcaatgactcgttacctgcccgcccatcaccttggaggccttccctggccttgagtagaaaaagtcgggggatcggggcaagagaggctgaantacctgcccgggccgggcccgctctaaaactaagttggatcccccgggcctgcaanggaaatttcnatattcaaaccttattcgatacccgtccgaccctcnaggggggggggccccggtac

SEQ ID NO: 8312 - DNA, 457 bp, Homo sapiens
  misc_feature 3: n = A,T,C or G
ctnctatagggcgaattggagctccccgcggtggcggccgaggtacagatgaggaagactgaggcctgcatcagtgaagcaacctatccaagactacatagagaaggcagtaaatggcagggttagtctcagaacaggggagggtctgttccccccgcagtgggcagtcctaattctgaacttcacctatctgggggtgatagaggggaacaagaggaagcctgctgaagagaaaacctaaacatctgttttgtctacgtatgacttcctctgcttgtgggagagaaggaaggaaaggaacacattgttgtcagccccacaaccccaacagaattaaaccctggagcaggttgaacagcagaggcttccctcagatcaaggagccaggagcagatgatctatctctgtggccacacagagagatgtcaccttatgcaatttgcatatcatattcaat

SEQ ID NO: 8313 - DNA, 334 bp, Homo sapiens
aggtacctggaaaacaagcaggcgctaagtttgaatcttgaaacttcctagctttcagccacttcctcagctctataaattcagacttgtggctctcattcactcctcttgattcagaacttccgcagagttttcgtcttctgatccggcttgttctcccttttcctttctgcatgctaaaactgtagtttcttttttctgaaatacagttctaggcgccggcggccgcttccaagatggaggctgcagtgggcgggcccaaggcacgtggaaataccaaacagccccagatgaaggcaagttaaaggaaccggccaaaactgcagagggagag

SEQ ID NO: 8314 - DNA, 349 bp, Homo sapiens
  misc_feature 148, 174, 177, 186, 194, 229, 249: n = A,T,C or G
cttagggcgaattggagctccccgcggtggcggccgcccgggcaggtacgcgggggggtccttccggcgtcgccggagtgaattgatccgggagttgaagagggctgcaaggtgggaagtgaagtcagtgcctcagttgctgatcagngtgttttttgggtccaaatctttttntcnccaacaaanaagaaganatattgcagtgaatgaagattcctctgcattttancactgctttttcaactgtanttggcttttgaatgagcgatgacaatggaagagatgaagaatgaagctgagaccacatccatggtttctatgcccctctattgccagtacatgtatccat

SEQ ID NO: 8315 - DNA, 386 bp, Homo sapiens
ccgcggtggcggccgaggtacagtagtgcactcttggctcactgtagcctcgacctccggggctcaagtgatcctcctgccttagccccacaagtagtgggactataggcacacagcaccatgcccatctaagtttttgtattttatgtagagacaaggtttcaccatgttgcccaggctgatcttgaactcctgagctcaagtgatctgcccaccttggactcccaaaatgctgggattataggcgtaaaccaccatgcctggccttaaatcaactttagagtcaacatctcttatcactggagcttctggagaaactccatcacggtggtgctctctttcctgatgtgttgtgcccaaataggcttgttctcatcagaatgact

SEQ ID NO: 8316 - DNA, 396 bp, Homo sapiens
  misc_feature 316: n = A,T,C or G
ccgcggtggcggccgaggtaccagtggaggaaggccttccggcgggacatggcagtgaactgctccgagatgcgcttgaagagctcctggatggctgtgctattgccaatgaaggtgactgccatcttgaggccacgaggtgggatgtcacagacggctgtcttgacattgttggggatccattccacaaagtagctgctgttcttgttctgcacgttaagcatctgctcatcgacctccttcatggacatccgaccaccgggaagacaaggcaagccaccggtggaggttatcggcccgctctaagaaacctagntgggatccccccggggccttgcagggaatttccgattatcaaagccttatcgattacccgttcgaccttcgagggggggg

SEQ ID NO: 8317 - DNA, 431 bp, Homo sapiens
  misc_feature 1: n = A,T,C or G
ncttagggcgaattggagctccccgcggtggcggccgaggtacaaagagtagctgccccttctcagggcagatgatgctttgagaacatactttggccattacccccagctttgaggaaaatgggctttggatgattattttatgttttagggacccccaacctcaggcaattcctacctcttcacctgaccctgcccccacttgccataaaacttagctaagttttgttttgtttttcagcgttaatgtaaaggggcagcagtgccaaaatataatcagagataaagcttaggtcaaagttcatagagttcccatgaactatatgactggccacacaggatcttttgtatttaagggattctgaagattttgcttgaagcagggattaggataagggctggttctttaaaatgtctggaaaatgggaaca

SEQ ID NO: 8318 - DNA, 486 bp, Homo sapiens
  misc_feature 17, 80, 81, 84, 289, 314, 321, 332, 333, 368, 394, 403, 462,465, 468, 469, 470: n = A,T,C or G
cgaattggagtttcccncggtggccgccgaggtaccttttagctatatttgcagattctctgggattttaaggaactgannttncagcaaagttgactaaattttatatttcttgtcctctaaatattttgataatttctggattgatgcagtgatgtttttgtccttccgatttataaatgaaacacctttttttagtgtttctaaacctaaaatctacttggtttgaaatcaagtgggttggaacactgtttgacttttatttgaagcatgttgttgattgaaaatntcattgaggaagttttaatcagggngatcagntttgattctgnnatgagcaccagcacctaatattttgaggagctctngttttgaggaccaatgcttaaagggnggactttgntccgtaaaccaatatccccaaatagaatttgttgaccttgggggctgggtttgggtttnggnttnnnggttatgggtatggtt

SEQ ID NO: 8319 - DNA, 154 bp, Homo sapiens
ccgcggtggcggcccgcccgggcaggtacgatatgcctttatcctacactgtatatatactctttatgcagaagtatatctaactgaaaagtataaaaatataatggtggaaaacaaatgaattaaaaaatgtatcacggccgctctagaacta

SEQ ID NO: 8320 - DNA, 202 bp, Homo sapiens
agggcgaattggagctccccgcggtggcggccgcccgggcaggtacctctggaagggtaacatcttaaagctgaatcaactttaacctggagggctaacatatttagcaatacttgcatcccagacatacaacattaaaagatacactaaattctgaaggtagctatgctgcaaaatagtttaaaattaaacaattgtacct

SEQ ID NO: 8321 - DNA, 445 bp, Homo sapiens
ccgcggtggcggccgaggtacgcttaaaactggtgaaaatgtttagggatttaattttgagattggtaatgtgctcaaagttaagtcacttgactttggtatacacttgggtgggctgaggggcaagagccttctttgctgtttaagtcattacaagttaggatcctgggtaaatggcaaactttctgaagctcgaatttaaagtctgttgggaggcccgaggcgggccggatcaccgaggtcaagacatgttgaccaagctggtctcaaactcctggcctcaagtgatccgcccaccttgacctctcaaagtgctgggattacaggcatgagccatcacgcccggccacgctgttggttcttaatgacacagcttaactttattgtgaaaagattgcagcaacaaatgagattttacctgtatttgttaaaaatgcttatcctt

SEQ ID NO: 8322 - DNA, 343 bp, Homo sapiens
aggtactcttcatacctcgttggatgtggaaatgcctactgtcccaatcaaaaagttctaaaatactactatgtttgccaatattgtcctgctggtaattgggctaatagactatatgtcccttatgaacaaggagcaccttgtgccagttgcccagataactgtgacgatggactatgcaccaatggttgcaagtacatggctctcttctaccccgagagagtgagggcggtggccagtttgaatactcccttcataccagcaaatcccaacatgtcccctttggagagtatcaaagccaacccagtatttgattaccagccctacttccaagaaccaggag

SEQ ID NO: 8323 - DNA, 377 bp, Homo sapiens
  misc_feature 75, 96, 116, 126, 151, 153, 172, 175, 186, 192, 194, 202,208, 211, 213, 228, 236, 249, 256, 303, 309, 326, 332, 333,342, 350, 355: n = A,T,C or G
actacttagggcgaattggagctccccgcggtgggcgggcccgaggtactttttttttttttttttttttttttncacaaaaggaaattttatttnttgcctttaaacaaaataanatgctctcanagctttttttttttttttttttttncnccctggaaaggaagtttcnttntgttgcccagncaggtntnaaactccnggcctnaantnatcctcccacctaancctcccanggggctgggattncaggggngagccaccacccccggcccaaaaaacttttttttactgcaaaaaacntttttntaactttaaaacttttntaaaannctactttgngagctgancaatntagaaaagtgcaaaggcaagtg

SEQ ID NO: 8324 - DNA, 385 bp, Homo sapiens
  misc_feature 4, 267, 305, 373: n = A,T,C or G
actnctatagggcgaattggagctccccgcggtggcggccgaggtactttttttttttttttttttttccgtctccccaaagctttatctgtcttgactttttaaaaaagtttgggggcagattctgaattggctaaaagacatgcatttttaaaactagcaactcttatttctttcctttaaaaatacatagcattaaatcccaaatcctatttaaagacctgacagcttgagaaggtcactactgcatttataggaccttctggnggttctgctgttacgtttgaagtctgacaatccttganaatctttgcatgcagaggaggtaagaggtattgggattttcacaggagggaaggaacacagccgccanaaatggaagggg

SEQ ID NO: 8325 - DNA, 134 bp, Homo sapiens
  misc_feature 18, 21, 39, 74, 77, 134: n = A,T,C or G
ccgggcaggtactttatnttntttttttttttttttttnggggggggagttgaaacctaattttgtggcagtancanctatgcagcttgaaatccaagtagcactaaattttattatttcgtatttgtacctcn

SEQ ID NO: 8326 - DNA, 452 bp, Homo sapiens
  misc_feature 307, 311, 358, 373, 374, 382, 389, 416, 418, 419, 429: n = A,T,C or G
tacttagggcgaattggagctccccgcggtggcggctctcccaccctagccttttaatatgcaaatgcagggcaccatgatcttctacacaggtggggatacttcggggtgtccatgtatccaggaatgtggggaaagggcaagaagtccacaggaatcgccatgtttgggtggacccactttctagtggctggcatttggatatcgggtaactgggcctggctttaagagctggagctttacaagaaacttttccagacgtgctttaaaaaacaaaaaacttcctaaaggaccccttttcctcttntatntgcctaaaataatttattcaataactcctacaacattccccccttgngggaaatgccccacnnaaaactgntgttaanggttgggggcaacaatgtttttggggntnnttcctgctgnaaaggggcttcaaatggggaaca

SEQ ID NO: 8327 - DNA, 346 bp, Homo sapiens
ccgggcaggtactcatgaggtagtcccggaaatccttgcttcggacatagtccgccgctttccgcaccaacgcgcccgccatggctgtgccgacaccagaccccgagtggtccctgcctctgctgccgcttcccagagccaatgacacccccgcgtacttccctgcagtctccagaatccaggcttcattcctatcagctatcaggaaactgttgtgatagctaaataccattctaccctctgtgcaatttccaccctggccatatttttctagtaagtcaacaatgacattgagggctttttcagctgtatcagctctttcaaggccaagtctgacaaggtccat

SEQ ID NO: 8328 - DNA, 404 bp, Homo sapiens
  misc_feature 289, 296, 343: n = A,T,C or G
cactacttagggcaattggagctccccgcggtggcggccgcccgggcagtactgtcctgactcaattctttcattctttcctctactttgttcaaaatactgtcgatctcttctttgccttgcgcatcaccatcataactctgaaggtccagcaacaccaatccatgtgggtaaaatctcaaaatttggcaaaagcttgccgttcttgtttggtgtaaggtttgcctaaaatagcccatgggtccctgccagggtgtgccaccgactcccgcccatcccctgctcctgnaaaaatnggactggaggccttttagaaatgggtctcaccccgcgtaccttgggnccgctttagaactagttggatcccccgggctgcaaggaaattcgataatcaaagctttatc

SEQ ID NO: 8329 - DNA, 267 bp, Homo sapiens
  misc_feature 216: n = A,T,C or G
ccgggcacggtacgcgggggactccaggagctgcagcagagcaggtaacagctcttgcacctgtttctcttgcacctgacgtgtagctgctcctacccacctctcctggctgagccttgcctgatacagcagcccggaggcaccacttgcttcccgagtctcaccctcccaggcagcttctacactcaactgcttctctaggaaaggtctcacctncagcctggagcagtcgggattacaaggtacctcggccgctctagaactagt

SEQ ID NO: 8330 - DNA, 399 bp, Homo sapiens
  misc_feature 265, 280, 318, 343, 362: n = A,T,C or G
ccgcggtggcggccgaggtacaccaaggtggtgcattaccggaagtggatcaaggacaccatcgtggccaacccctgagcacccctatcaaccccctattgtagtaaacttggaaccttggaaatgaccaggccaagactcaagcctccccagttctactgacctttgtccttaggtgtgaggtccagggttgctaggaaaagaaatcagcagacacaggtgtagaccagagtgtttcttaaatggtgtaattttgtccctctcntgtggtcctgggggnaatacctgggcccatgccctgggagaccatatcactcnaatttttctctggagggacaccagnatagggatggggggtgtcntgtgttaatttgtggggggtaccctgccccggggcgg

SEQ ID NO: 8331 - DNA, 430 bp, Homo sapiens
  misc_feature 46, 50, 134, 137, 162, 172, 185, 193, 195, 204, 221, 269,276, 293, 309, 326, 361, 372, 376, 397, 414, 419: n = A,T,C or G
ccgcggtggcggccgaggtacttttttttttttttttttttttttngatnggtttaaaaattatcctggatccaggaaagtgatgccttttcttattctccttttatcatcaaaacaaacagccaatatgtctntanaaacattgcgttctaaactggaagngctgacaaanccttcattcccanaaccctgnantgggcaagnattttcatgaaaatcancttctgggccaagttaaagccttcatgaaagttatcttttcataactnagccctnattcccctctgggtcantagcagtggaaccagntaaacccaagggcccanatttccttcctcaatgaaggcactcccagggaaanaaggggggagnttcncttggcacctggccccttgcncaaactttctggccttnttacntttgcccgaaa

SEQ ID NO: 8332 - DNA, 211 bp, Homo sapiens
  misc_feature 57, 58, 81: n = A,T,C or G
ctactataggggcgaattggagctccccgcggtggcggccgcccgggcaggtacttnnttttttttttttttttttttttnttttagcagtaaaaactgaattatgatttattaattagtaaaacactacacagcatcaaaaataaactcagccacatgcaacaatacagagaatcttaaagaatagtattgagcaaaataatcagtacct

SEQ ID NO: 8333 - DNA, 200 bp, Homo sapiens
  misc_feature 151: n = A,T,C or G
aggtaccatttgtgtctctttattataagtgagagaaatgaagtttatattatcaaggggactaaagtcacacggcttgtgggcactgtgccaagatttaaaattaaatttgatggttgaatacagttacttaaatgaccattgttatatngcttcctgtgtaacatctgcccatttatttcctcagctgtacctgcccg

SEQ ID NO: 8334 - DNA, 119 bp, Homo sapiens
  misc_feature 103: n = A,T,C or G
agggcgaattggagctccccgcggtggcggccgaggtactggaaatttgaggttgctctaggtgacctgcaccatatacacacagagccccaaggactgccancgttgatgtgtggagc

SEQ ID NO: 8335 - DNA, 422 bp, Homo sapiens
cttagggcgaattggagctccccgcggtggcggccgaggtacattagggtcaaaaggtaaaagtaacaaattctgccatattgtaaatttccagtgcaggctttaatttttttttttcattagtagcactgaaaaaatattactgcatgggtatgttctagttcagtttataaagttttaaaggcttatttgaggcatacctcactgttacgcacactggtaatttaaccatgcccctaagtattccttttctcctgcatttgatgcagcccaacaaagcttttgttttgaaataaatttgactaccctgtccatagctacagtagattatttgtggtttaaggctcctggtgtctcaggttccaaaggaaaagcttacatatttttcccttagtttgaatatatgattggtttggggttaa

SEQ ID NO: 8336 - DNA, 240 bp, Homo sapiens
aggtacacttcggtctagccagaaaaaaagcagaaacaagaagccaaggctaaggcttgctgccctggccaggaggaggggtgcagctctcatgttgaggagagctgtttctggcaggagttaggaggaactgctaccacttcaaaagcctgtagaggggaagctatttaattaagggattgaaagggaaggaggagccacactcataagtagtaaagtttccccccgcgtacctgcccg

SEQ ID NO: 8337 - DNA, 457 bp, Homo sapiens
  misc_feature 4, 202: n = A,T,C or G
actncttagggcgaattggagctccccgcggtggcggccgaggtactacactattatttaaaaaaaaaaatcacaaaaagaaaaatgttatcactacaagtaggaattagaagagagaaattctggcagtctgtctagaggttaaaacatttcatgcatttgtgagttgctgttggagagttgttttttatttgtccccccnaatctgggcaacatccgggggctacctttcagctcttcgcactgtggcgtgagatccgggtgaggcagttataagtgagagcatgctggacaccttgactttacagtgacgtggaacagaaaaagcattcacctcatcattgaaagagttggagccgagaataaaaggtagttagaaggctagtgggaaggggagcggaggcaaggaaatagcaactaacaggccctagacagcatccggcaacagaagaggaaa

SEQ ID NO: 8338 - DNA, 428 bp, Homo sapiens
  misc_feature 9, 73, 364, 369, 414: n = A,T,C or G
ttagggcgntttggagctccccgcggtggcggccgcccgggcaggtacttcccggttcccttgcgtctgaggntcttatgccagaggggatagaaagcccaacagaaactcaagatagaagaaggagaatctgcgagtgtctgtctcctgtcaagcttccctaatacagccctggtagaacttcatcaacagtggaaggcattttgcaaagccaccagacattacattccagagccttgagaaaaactgatgaaaaaaaagtcatgaaaaaaagtcattcgcacaagtgacaccatggtgtgaagtcaaggagcacagactctggagtcagagggcttgagtcaaccctgagccatcttcagcntttgnactgtgaaagaccacagctttgactctctgtgttgcagagaatgngtagttgcccactt

SEQ ID NO: 8339 - DNA, 81 bp, Homo sapiens
  misc_feature 2, 38, 41, 45, 48, 56, 58, 62, 65, 68, 77: n = A,T,C or G
gntatatagggcgaattggagctccccgcggtggcggntgnaggnganccggtttnanctcnctnaanggcggtaantcct

SEQ ID NO: 8340 - DNA, 612 bp, Homo sapiens
  misc_feature 2, 12, 18, 30, 34, 42, 50, 65, 67, 87, 96, 101, 107, 114,125, 135, 140, 150, 161, 171, 201, 206, 233, 240, 253, 263,269, 273, 279, 293, 325, 327, 330, 341, 345, 366, 379, 385,390, 394, 397, 401, 405, 424, 427, 430, 436, 454, 455: n = A,T,C or G
  misc_feature 467, 470, 471, 477, 482, 485, 488, 503, 506, 510, 512, 518,521, 524, 526, 529, 532, 539, 557, 559, 566, 586, 593, 597,601: n = A,T,C or G
tnttggggccanggctanataactaaccantttngtgtaagngtgaaacnccagcattggcgagntnaggaccactacttattgtanaaaattttntttanaaccanttttttnctttttacccncaaggggtantttcnttggttattnccaaaaaaaanccccttttgnggggttaaaaaaatttttccccaatttttngggtntaaatttttcccaacccttaacccccnaaaaccnaagttttattttnggaaaatttngggggnccgnaaaggntttttgggtttaancacctttcggggggcacccggtctttcctttnanganaaaaacccttnaagngttgggggggaattacccccntcccagtggtggncccttngtccnaagnggntaanaaanttttccggaaaattaattntcnaanatgggnccttttttaatttccggnnaattaacccccnggnntaccgntaacnccnttncggtaaaggaggtgnggngggngnggtccnccnccngnggngtntaatccncccccaagggcccttttntntttgggnttttacccccccttttattnaaggatngggnaagngggggggggtt

SEQ ID NO: 8341 - DNA, 316 bp, Homo sapiens
aggtactcacagtctttcccttgaagagaagattgaaaaagtctactgttcataaaccatgctaacattttccttttagctagttttgaaagtaaggaacaatacctgggaaataataaaacagaaggttaccattgtcagccagttggctatactgtggttagttctttcagaaattgtaaatatcttgtagcatattctgaaataatagagtaagttcttctcagagatgttaatatcatgtttttcatgttctaattagaatactttattacttacaaactcagaaatacgaacagaaatacggcagacgaac

SEQ ID NO: 8342 - DNA, 523 bp, Homo sapiens
  misc_feature 4, 328, 442: n = A,T,C or G
actnctatagggcgaattggagctccccgcggtggcggccgaggtaccattggtggccaattgatttgatggtaagggagggatcgttgacctcgtctgttatgtaaaggatgccgtagggatgggagggccgatgaggactaggatgatggcgggcaggatagttcagacggtttctatttcctgagcgtctgagatgttagtattagtttagttttgttgtgagtgttaggaaaaagggcataccagggactaggaagccagataaagggaaaaatgattatgaggggcgttgatccatgaaaagggtgaataagcctctttctantgaatagggggaaagtaagccgttctttgtaagaccctacctttgccgcctgcaatggtgccatccccgcggttacccttgcccccgggccgggcccgctctaagaaactagtngggaatccccccggggcctgcaagggaaattccgattttcaaagctttatccgataccccgtcgacctccgaagggggggg

SEQ ID NO: 8343 - DNA, 399 bp, Homo sapiens
  misc_feature 356: n = A,T,C or G
actcctatagggcgaattggagctccccgcggtggcggccgaggtacaaaatttagctttaggtcactaaagcatgtttacccttttgaaaaaacatgtattgctaggtcagccatcctacttcactggaaataacgttaaacttgtagactgttcaaatggccaatcaaaatgactaagaaacattatcgtgtgtttttttgtttgtttgttttttcatcctttctctttccttttcgttcaaaaattcagttccccatcctagaccagactcctctgtcctctgccagggtataagaaaagttagcattctgtcactatagaacatagaagaggaattagcatgttattgaatnaagaatcaggaagataattctaattgggtatagaaaaatttat

SEQ ID NO: 8344 - DNA, 290 bp, Homo sapiens
  misc_feature 76, 77, 78: n = A,T,C or G
actcctatagggcgttttggagctccccgcggtggcggccgaaaggccccgcgtacaggtgttttctgtggctctnnncttcattgcagcttgaagatagacggcagtgtctgtttgaactgagacacatgagacccgggacaggagtatgatagggaaacgttcctgcctatccaggatgtgaagctggcgcaaccgcctaccacctctggagagacctcggcacatttcaccagttttccctgctaccctcatcagtactggtgctgctgcttgtcactggagtacct

SEQ ID NO: 8345 - DNA, 123 bp, Homo sapiens
  misc_feature 1, 67, 107: n = A,T,C or G
ncgcggtggcggccgaggtactgtcaccagctggaggctctctgccacctttaaaataaaggtgccnaagtaaagagaggctcttggtcttgaacttggaatagctnatctccagtttgcctg

SEQ ID NO: 8346 - DNA, 341 bp, Homo sapiens
aggtacacatcagaattacttaagagagtttgttaaaaatggagattctggagccccactctgtgagtcgagcggccgcccgggcaggtacatgggactacaggcacgccccaccatgcccagctcatttttgtatttttagtagagacagggtttcaccatgttggccaggatgatcttgatctcttgacctcatgatccgcccctcttggcctcccaaagtgctgggatcacaggcgtgagccaccacacctggccctctatttattctctttaaagagagagaaaactatgagaggccaaaattatttaattaaatctttaccttagcacaagggaaa

SEQ ID NO: 8347 - DNA, 227 bp, Homo sapiens
  misc_feature 3: n = A,T,C or G
ctnctatagggcgaattggagctccccgcggtggcggccgaggtacgcggggattaatggaagcccaggagttttacaaggacacctacaacaagctgaaaaccaaggatgagccccagcgggaaacgctgaaagccatccactatgcgttgaactgctgtggtttggctgggggccgtggaacagtttatctcagacatctgccccaagaaggacgtaccagcccg

SEQ ID NO: 8348 - DNA, 388 bp, Homo sapiens
  misc_feature 121, 249: n = A,T,C or G
aggtacgcgggatggcacatgcagcgcaagtaggtctacaagacgctacttcccctatcatagaagagcttatcacctttcatgatcacgccctcataatcattttcctttatctggcttnctagtcctggtatgccccttttcctaacactcacaacaaaaactaactaaatactaacatcttcagacgctcaggaaatagaaaaccgtctgaactatcctggcccggccatcatcctagtcctcatngccctccccattccctacgcatcctttacataaccagacgaggtcaacgatccctccctttaccatcaaatcaattgaccaccaatggtacctgcccgggcggccggttcttagaactagtgggatccccccgggctgg

SEQ ID NO: 8349 - DNA, 149 bp, Homo sapiens
  misc_feature 19, 20, 58, 70: n = A,T,C or G
cgaattggagtttcccgcnntggcggccgcccgggcaggtactcggggagtgtcattnccgaaggctgantgaaaaagagcaacagatccagggagcattcacctgccctgtctccaaacagagccaccaaggaggagcaggggagcga

SEQ ID NO: 8350 - DNA, 328 bp, Homo sapiens
  misc_feature 39, 46, 52, 75, 94, 102, 111, 116, 119, 121, 124, 150, 181,251, 258, 261, 262, 264, 277, 289, 298, 306: n = A,T,C or G
aattggttctccccgcggtggcggccgaggtactccatnctgggcnacaaanggagacctatctcaaattataangaagggggaagggatgaanagaggganaaagggaantttgnaananaangaaagaaaaaaatgtggaaaaaatcnatccaacaaaaaggtattaacgactcataanagactgtcttatgtaagcattgaacatttgtcttatgatttgttaatggagagtccaccaatctttcaantactacnttnnanaccatgtcatttntaagttgaaagnggagttganacaacagnagtgattaaaatgattagtacc

SEQ ID NO: 8351 - DNA, 384 bp, Homo sapiens
  misc_feature 75: n = A,T,C or G
cactacttagggcgaattggagctccccgcggtggcggccgcccgggcaggtacaatagtggtcctgaggtgacngtatatcctcagcttacaaagataacaggattaagagattaaagtaagacaggtgtaagaaattataaaggtattaattttggaaactgataaatgtccaagaaatcttcacaatttatgtttcctgatgcagcaccagctggtccctccattcggggtccctggacttcccacaacagccaggctttcttgggcagaggttcctgtggctttccacagtgcattgagcccctggttaatcgagaatggagaatggcgatgacttttaccaaacatactgcctgcaaacatattgttaacaaggtacct

SEQ ID NO: 8352 - DNA, 201 bp, Homo sapiens
  misc_feature 16, 18, 87: n = A,T,C or G
tatagggcgaattggntntccacccgcggtggcggcccgcccgggcaggtacgcgggggcgcgacggttcgtgcgtgcgtgcgggcngctgcgtcgggctgcaggagaagatggcggtctccacaggagttaaagttcctcgtaattttcgcttgttggaagaacttgaagaaggacaaaaaggagtaggcgacggtacct

SEQ ID NO: 8353 - DNA, 879 bp, Homo sapiens
  misc_feature 4, 12, 14, 22, 32, 44, 74, 104, 106, 128, 130, 137, 147,193, 197, 230, 278, 280, 282, 287, 293, 304, 331, 345, 356,360, 364, 369, 419, 448, 484, 486, 506, 509, 515, 534, 540,541, 544, 546, 555, 558, 577, 580, 606, 611, 618, 663: n = A,T,C or G
  misc_feature 686, 706, 715, 739, 757, 763, 785, 809, 818, 841, 843, 844,868: n = A,T,C or G
cccngttttggncngccttacnaccttggtcncccgggcttttntcctcaaaggttccggggggaaaaaaaccnctttggtcccgtttggccccaaaagtcttngncaattttaaaatttgggaaaantncgggggncccaaaaccngccggcccggggggggggtaaggaaaggggccggggtttttttggncggnttaattttggggggggcccggccttccttttcncccggcctttttccccttccgggctttcaaacctttgggaaccttccngncntttgncggccnttcgggggttnccggttttccggggggcctttggccgngggcccggaaaggnccggggggttnattncaanggccnttccaaaccttccaaaaaaaaaggggggcccgggggtttaaaaatttaanccggggggttttaatttccccccaacccnaagggaaaaatttccaaaggggggggggggaatttnanaaacccggcccaaagggggnaanaaaaangtaaaaacccaaatttggntttggnnaangncccaaaaanaanaaggggggcccccaaaggnccnaaaaaaaaaaaggggggccccccaanggggnaaaaaanccccccggtttaaaaaaaaaaaaaaagggggggccccccggcccnggttttttgggcctttggggggnccggggttttttttttttcncccaatttnaaaggggggcctttcccccggtcncccccccccccccttggnaaaccnggaaaagggccaattttccaanccaaaaaaaaaaaaaaatttccgngaacccggncctttccaaaaagggtttccaangnnaaaagggggtttggggggcccggnaaaaaaaaccc

SEQ ID NO: 8354 - DNA, 323 bp, Homo sapiens
ccgcggtggcggccgaggtaccaccagaggacacggataatcttcatatctgattctcctgcggtgcgtgtgccctgacagaagaagttgtatttgccttcccatactcctgttactaactcacagaacatatacagagacagcagtgtgagtccaaggttatacaccactaaaatcccctggcaagagaatggctgtttattcctcatgtattttggtcccagccatacaattagtaaatatatgacagagcagataaatgtgggtatataattgtccagaagaaaccatccttttactctagtatctcgagggcctagccc

SEQ ID NO: 8355 - DNA, 125 bp, Homo sapiens
ccgcggtggcggccgaggtactttttttttttttttttttttggttaaattgtccaccaggtagctgatttgagacaaggccggcgagagcgagtcaagattcattgctggttggggcggaagca

SEQ ID NO: 8356 - DNA, 432 bp, Homo sapiens
  misc_feature 374: n = A,T,C or G
tcatacttagggcgaattggagctccccgcggtggcggccgcccgggcaggtccgggcaggtactccaaagattcaggtttactcacgtcatccagcagagaatggaaagtcaaatttcctgaattgctatgtgtctgggtttcatccatccgacattgaagttgacttactgaagaatggagagagaattgaaaaagtggagcattcagacttgtctttcagtaaggactggtctttctatctcttgtacgcgggggcttttgcaaggctgtggtcggtggtcatcagtgctcttgacccaggtccagcgagccttttccctggtgttgcagctgttgttgtactttttttttttttttttttttttttttanatacaatgtttttaaaacaagcaaattttattaaaggaaaattttgcaggtttaaggt

SEQ ID NO: 8357 - DNA, 359 bp, Homo sapiens
  misc_feature 15: n = A,T,C or G
aggtacacatactcnataaataaatgactgcattgttgtaattgagctctcctttttgttgttgttggttggcgagtggtttccatcaagtcatcatgggaaaataatcaagttccatattcacaggttaggataggatgtaataattctcagaagaacccttctagtatgatatttgcttatcaaaatgtctcagaaacaaaatatttgaaaatactgtcacatttattgtatttctctctgttcttatgccgtgcatgtagaatgtacctgcccgggcggccgctcgatcaagttatcagatctctatacctaggtcatactcatgaagcaaaaatgctgcacaccactgaaaataa

SEQ ID NO: 8358 - DNA, 447 bp, Homo sapiens
  misc_feature 15, 18: n = A,T,C or G
cggcgaatttttctnccngcggcggcggccgaggtacgcgggatctacttgatatcttgttctttaaatttttttcacatatggtttgcctgatacaactgatttttataactgaaatttaaggaatctaacagctaaaactcagtaagtgcatatatctccttataaccatagacccgtggctactctcaagcaccctctcctcaattttttttcctgtagcatgtgatgcctgattaaactcattttcattttgcttttatttctaataatggggaacaattgagaagtgaactctaaatatagggttgtagtaataaaacatcattagcctaattattagaaaatgctaattaagtacctgcccgggcggccgctcgagcaggtacttttttctttctttttttttattatggttagctgtcacatacaacttttttttttttt

SEQ ID NO: 8359 - DNA, 365 bp, Homo sapiens
ccgcggtggcggccgaggtacaacaccgaacacataacatcatagccatctgcaaagatttcttttaaaaactgctcccgtaactcactctcataatttgctacaaggagcaccttgtaatcaggatggaggatggtatggctcacgcatgctgaatgccttcctgaaagagacacaggatggaaggcaacacccacagatggctttgatgtgtctgcgatgcccctgtatttcaaggagggtatcactgttcattgggattgcacaaaagcaggccagaaaaacctgggtcaccaaatagacttccttctgacccactgacccactcttctcctaggcctgataaaagggagaagaggagagaa

SEQ ID NO: 8360 - DNA, 289 bp, Homo sapiens
  misc_feature 14, 15, 43, 45, 47, 61, 68, 69, 113, 117, 132, 133, 141,151, 157, 158, 166, 168, 170, 178, 201, 205, 215, 220, 237,242, 243, 246, 255, 275, 278: n = A,T,C or G
ggcggccgggcatnnctttcagggatcgctgtgcaacccaccngngntaaaccgcgcgcgnggatatnnaaaggggcgggaaatgtgcaaaaacaggccactacttagacaanaaanagccaaccggccgannccagggangagaaacaancccagnncagcagangngnggccacanaaggcaaaggcagcagcccggcnaaangcacaccccngccanagagaagacggaagacnaaccnngcngcacggagnaccacggccgctcaagaacnagnggaacccccgg

SEQ ID NO: 8361 - DNA, 274 bp, Homo sapiens
  misc_feature 31: n = A,T,C or G
atacgactactatagggcgaattggagctcnccgcggtggcggccgaggtacatatcggccatcatctccacctccagctccgcagccagctgttgggccctgagaggatccatctcagcctagcaccgtggaagggatctccttctggcctcctaatccgctgcctgggacggatcacaatgcccacggagaccccaacttctgacaaatactataacgttacccgcctcccgagaggctccagcggaagcccccgcgtacctgcccgggcgg

SEQ ID NO: 8362 - DNA, 616 bp, Homo sapiens
  misc_feature 130, 140, 147, 149, 153, 154, 185, 197, 201, 202, 252, 258,264, 270, 279, 283, 299, 305, 314, 317, 322, 330, 336, 340,354, 356, 376, 380, 382, 393, 402, 403, 406, 418, 427, 440,442, 444, 451, 455, 464, 466, 471, 478, 484, 491, 494: n = A,T,C or G
  misc_feature 499, 524, 539, 543, 559, 563, 569, 576, 591, 592, 593, 594,602, 612: n = A,T,C or G
aggtactagaaaaaattgtaatcctcttactataactgtccatgacgctaattcagctcaatggtattatggcatgtcatggggattaagactttatatcccaggagctctagaactagtggattccccnggcctggcanggaattncnatanncaatgcttatcggataacccgtgcgaccttntgagggtggggncccnngttaccccagcctttttgttttcacctttctagttggagggggtttaaantttgtngtcagnttttgngacttttanaatncaattgtggtacaatnaaggcnttgattttntcncctgnttggtagnaaaaantatnggatctaatatccngncgttctaaccatatttttcntctncnaacaaaatccnattaatctnnaangtccccgggggntaagaccanttaaaaatgtttngntnataatangacnccttggggngngggtnggccccnttaaanttggtanggnttgtnagccccttaaaccctctcaaccaanttttataattttggncggnttttggccggccttcntacnttggtncctccgnctttttttttctcannnnttccgggnggaaaaaaanccct

SEQ ID NO: 8363 - DNA, 513 bp, Homo sapiens
  misc_feature 14, 280, 281, 297, 337, 343, 354, 367, 390, 394, 401, 452,455, 486: n = A,T,C or G
acctccaccgcggnggcggccgaggtacagagacacactttaactggggaatggggtccccacacagtgatcgccccacgggagggtgacagaatatgccaggaattgtcttggacatgggccccagtcaccacaatcaggatggcttattttgaaacaaaacaaacaaaaaaaaaacccttgtattaccgacaccaccaaaaagcctgttccaatttttgtaaaaaaactggtaggttatttaccattgcaaattgaaaatcttctttttacccaaaannctttggggcccacgtngtttttaaccttgcccccgcagttaccctggccccggggncgggcncgcttcttagnaacctaagtgggnattcccccccggggccttggcangggnaaatttncgaattattcaaaaggcctttaattcggattaccccgttcggacccctttnganggggggggggggccccggggttaccccaagnctttttggtttcccctttttaagtgga

SEQ ID NO: 8364 - DNA, 294 bp, Homo sapiens
  misc_feature 1, 2: n = A,T,C or G
nnggcgaattggagctccccgcggtggcggccgtctctagcagtatttaaaggacaaggaaccaaagaatatgaaattcatcatggaaagaagattctatatgatatacttgcctttgccaaagaaagtgtgaattctcatgttaccacgcttggacctcaaaattttcctgcaatgacaaagaaccatggcttgttgatttctttgccccctggtgtccaccatgtcgagctttactaccagagttacgaagagcatcaaatcttctttatggtcagcttaagtttggtacct

SEQ ID NO: 8365 - DNA, 301 bp, Homo sapiens
tagggcgaattggagctccccgcggtggcggccgaggtacaaaaaatatgtcctgctcctataacttacaatgcacagaaaaatatctacaaaaagggaagtatttatccatttagctttctaataaattggtgagaaagtttagcccattccacatttctttctaaataaaggctaaagagttaagggtaatttacttttatgcctgtcaccctgacatacattttttaaaatatttgcttgattatatgtaacttaagataaagttaatgtcttatttttacatcacagtacctgcccg

SEQ ID NO: 8366 - DNA, 292 bp, Homo sapiens
  misc_feature 284: n = A,T,C or G
ccgcggtggcggccgaggtaccaacactttttcttaattggctccttcccctacagaaacacttaggtagcgagctgcaggaaacctgcctttgtccctgtgttgtgcactatgtcttgccacactttagacaaaacaaagctcctttagagaaaccctggctggagggaagaaaagtgtcccggctgtcattgccatgggagtctggagtttctgagagggcagcccaggtcaccagagtttccagatttagtacctgcccgggcggccgcactagaactagntggatccc

SEQ ID NO: 8367 - DNA, 441 bp, Homo sapiens
  misc_feature 366, 371, 382, 383, 423: n = A,T,C or G
ttagggcgaattggagctccccgcggtggcggccgaggtacggccaacgccaagtaggggattgcgttccctccagtcgcagagtttccctcttgtcgcccaggctggagtgaagtggcacgatctcggcttactgcaagctccgcctcccgggttcacgccattctcctgcctcagcctcccgagtagctggggactacagaccctatcagatttggatatgtccttcatatttgattggatttacagtggtttcagcagttgtgctacagtttttaggattatataagaaaactggtaaaactggtattttcttggattggataatgcagggaaaaaacaacattgcttacacatgcctaaaangatgnacaggacttgnnacaacaatgtcccaacattacattcccacttttccgaagnaactgacccattgcttgg

SEQ ID NO: 8368 - DNA, 453 bp, Homo sapiens
  misc_feature 6, 17, 439: n = A,T,C or G
cgactnctatagggctnattggagctccccgcggtggcggccgaggtaccctttaaacagcccaagaattgttataaatgacagctgctatcagttttcaaattttacaatattagggttgttaactatttcattctgaattaagctaacatttgttaccaagcaatgcatttatttggaaggataccagttaccagtcatcaaaagcttttgtatgttgaaaatgtaattttaatagttaattcttcatcttacataggagcacaataaaatacaccacaatctgaagaaactccagaattaccgagaataagagtgaagaaaattcaaatgggctacaatatccattaccttaaactgcaagagacaaggttgcaacccgaaggttaacatttatgtattttatgactggctacatttatgacttaaaaataacaangaatcagggaatta

SEQ ID NO: 8369 - DNA, 385 bp, Homo sapiens
  misc_feature 45, 48, 284, 285, 357: n = A,T,C or G
tggcggccgaggtacatccttatctctgaaaactaagtgttgcanttnagaacctgaataaacaggccttcctaagtttctcccagtttattgccattagacgatacctttttcaccccctagtatttctctacaactccctgttcttcatcagacctactataaaaaaactaagattaaactgtttcttcaggtgttcatttcctaatgaaggctctcatgtcacaaagaacttaaatatgtttgtttgtatacttttcttttgttactctgtcttttgttgnnggggcttaatccatgaacctaggatacatgaggaaatatttttcctcctctacaaatagtatctatgattgnagtttaatatctgattattttaatttac

SEQ ID NO: 8370 - DNA, 141 bp, Homo sapiens
  misc_feature 45, 111: n = A,T,C or G
aggtaccctgaggcctgccagttcctgccttaatgcatatgtagncgtaattgagttctgacacggccttgggtgtttcttgtcctaaatagctgacattgcatcttcaanactgtgtgagtaatcctgatattttttttt

SEQ ID NO: 8371 - DNA, 466 bp, Homo sapiens
tcctatagggcgaattggagctccccgcggtggcggccgaggtactgcaactgtaggtaaactgaaaaaaaataagaaagaaagagttggatgaaaatgtgaaagcccaagtttagatgtgcattaagtattaaatagcacagtatcttcttcatggagccttttttcctcccccatcccctgcagctgcctttttttttgggggcagggtggggggttgatgttgaactttaagagtttaaaagtttagcttattgagtagttgtcatttaaaatataattgcgaatatcagaaaactcatactggaaaactaaattttttttttctcttgagacgggagtctcgctctgttgcccaggctggagtgcagtggccgccgatctcggctcactgcaaagctccacctcccgggtttcaccgccatcctcctgcctcaagcctcctggagtagcttggggactacag

SEQ ID NO: 8372 - DNA, 272 bp, Homo sapiens
  misc_feature 68, 74, 87, 89, 111, 117, 138, 143, 144, 169, 177, 183, 192,197, 201, 202, 223, 224, 231, 243, 250, 252, 255, 260: n = A,T,C or G
ccgcggtggcggccgaggtactttttttttttttttttttttttttctttttttttttttttttttgntgtttnaaaaattattttnantgttacattccaaagaggacanaggaanaaaaaagccagttatccaatnatggnnagaccttacaagaaaaggcacccanaaccccanccctanttcaaagcngcaanacannggaagctcaaacaggtgcctnnaaccacnaccggaaatgcngacaaangngtntatantatcaatccagg

SEQ ID NO: 8373 - DNA, 413 bp, Homo sapiens
  misc_feature 413: n = A,T,C or G
aggtacagagaatgacccaagaagggtaggagttcattccttaccttcataaagtaggctatccgccaagaatgaaaatgtcaactcaaagctatgggctgttttaagcaaggtggaagataatataagaagcatggtcctttcttcagacttactgccttgacagcacagaattcatcttatttccctcatctcccaagttatttgtatttccctgagatcagctcagaaacaactctctttaggctctctacaatgcggtagagcatgattagaagagataaaccttcaaacaatagtgttgtccaagacactaccctcacttatcccaggggaacccacggaatttcttcatttgtattaactcctgacatggcatggaagaagaatttttatcaaatacccttggcatn

SEQ ID NO: 8374 - DNA, 368 bp, Homo sapiens
ccgcggtggcggccgaggtacgcgggggcccacagctgtgtccggaagcagcaagcgtgcctgggcagagacccccagagtgtaaagaggtcctgggacgggctttgcacgttccacaagagtgtctcgctgtgtcgtctagactggagtgcagtggtgtgatcatggctcaactcctaggctcaagcgatcctcctgcctcagcctccggagtagctgctgggactgcaggaacgtgccaccatgcctggctcaaacacaaagttttttcataaaactcacttggcggcaaaattctaccttacctgaagttatttacggggtttttaatttccactttgaataaatattcacatcaaaaaaaaaaa

SEQ ID NO: 8375 - DNA, 584 bp, Homo sapiens
  misc_feature 21, 101, 114, 161, 176, 179, 181, 188, 198, 229, 238, 247,255, 263, 272, 289, 300, 305, 311, 313, 315, 318, 320, 322,324, 333, 340, 342, 344, 347, 350, 354, 355, 373, 374, 375,380, 384, 389, 391, 398, 400, 409, 413, 431, 436, 439: n = A,T,C or G
  misc_feature 443, 446, 447, 448, 452, 467, 469, 481, 483, 487, 501, 529,562, 567, 568, 576: n = A,T,C or G
aattgttgctccacacgcggnggcggccgaggtactttctatgagaagcgtatggccacagtaagttgctgctgacgctctgggtgaagaatggaagggtnatgtggtccgaancagtggtgggaacgacaaacaaggtatccccatgaagcagggtgtanttgacccccacgggnccngnttcttanaaacctaggngggatccccccgaggtcctggcagggaaatntccgactantcaaatgcnttaatacngtataacnccgttctgnactcttcagaaaggtgngggggggcccnccggntaaacncncnagncntntntatgatatnccccctntntnaanatngaannggggttttaaaatattgnnnggccngtcntttgngncccgctnanaatccaatngggntgccaattaagaccttgnttgtntcncctnggnnngttnggaaaaaattttcgngntaattcaccagncntccnaaccaaaatttttnccaaccaaccaaaaccaattaaaccggnaggtccccggggggaagccaattaaaatacggngggtnnaaaaaagnccccctgg

SEQ ID NO: 8376 - DNA, 975 bp, Homo sapiens
  misc_feature 13, 33, 95, 99, 118, 124, 146, 184, 193, 254, 291, 361, 438,461, 463, 466, 503, 576, 632, 633, 659, 669, 707, 711, 713,717, 746, 779, 786, 801, 826, 838, 862, 865, 906, 913, 932,935, 948: n = A,T,C or G
ttgggggaagccntccccacccccgccggggtnggggccggggcccccgcccccccgggggcccaggggtttacccgccgggggggggggaaaantaanggaaccccaacccggaatngttttnaccaattcccccgccaaaaaanggggaatgggggttggaaattttaaccctgggggaagnaaatttggncttttaattaaccccctgggggaaaaaacccttatttaaaaaaccctttaaccaaaggccncttccaaggccttccccaaggggcccttaatttcttnggacccaaattaaaacccaaaaaagggaaaaaaaggttggggggccaaaggttttcccctttttacccangccccccttgggcctttgggccttggggggggggggttttggggaatttttttttttggaaaaaccccttggggggnaagggttcccaattttttttttncnttnggaaaaaaaaggggggaaaaaaaagggaaaaaaaggnaaaggggggtaaagggaaaaagggggggaaaaagggaaaaaaatttttgggaaatttgggggggaaaaaattngggggggttgggggggaaaaaaaaaaaatttggggaaatttgggtttcccaaaggnnaaaaaaaaaccctttttttttaaaanaaaaaatttnttttttttttttaaaaaaaaaaaaaaaagggggggttntttntntccntttaaaggggttttttaaaaggggccccntttgggccccttttttttttaaaaaaaaaattnccctttnaaatttccctttaantttaaatttaaaaaatttggggttnaaagggtttaanttggggaaattgggtttaaaaaanttnggggttggggggggttccccttttttttttttttttttttnaaagggnaaatttttttttggggttnggncccagggtttttnaaaaatttaacccttttaaaaacccaa

SEQ ID NO: 8377 - DNA, 139 bp, Homo sapiens
cgaggtacagcgaacccaaagaggacctgctcgtagcaaccagcgaccagctccattcagcagcgcacgtgcctcttccgccagcccggctcagcttggggagcttggttgttggagacgtgagccttgccgaagatcc

SEQ ID NO: 8378 - DNA, 257 bp, Homo sapiens
  misc_feature 162: n = A,T,C or G
ggcgaattggagctccccgcggtggcggccgcccgggcaaggtacgcggggtttctgtcataatgcaggcatgaagggtggagtgaagtcaggtcataagtttcatgtttgcttttgttttgttttgttttgtttttaatgtatgtacgcagatgttacagncttagggatccgggatgggagaccccactttagaaagggtcgtcactcctttaatcctctactcaacaatgtacctcggccgctctagaactagt

SEQ ID NO: 8379 - DNA, 171 bp, Homo sapiens
  misc_feature 69, 70: n = A,T,C or G
ggcgaattgttctccccgcggtggcggccgcactgaagggaaggaagcaggtgcagtgcatcaccctanngactatcctaagcattaggcaccttccaaaaaatatgcccaaatcctcagaggggcagtttacatgaaataaaagtacctcggcccgctctagaactagtg

SEQ ID NO: 8380 - DNA, 197 bp, Homo sapiens
  misc_feature 5, 74: n = A,T,C or G
attgnagctccccgcggtggcggccgcccgggcaggtacttttttttttttttttttttaaccctttaggtatntgatcgctttgccaattttgcgttactgggcaggctaagagatcttcttttaattcagcctgcttaagacgggaactgataactgtagtgtatcctctgccttctttcttatctattggagga

SEQ ID NO: 8381 - DNA, 164 bp, Homo sapiens
  misc_feature 33, 39, 45, 66, 70, 80, 93, 98, 104, 108, 113, 125, 138,143, 155, 162: n = A,T,C or G
acgggatacctggtccgcctttctcccttcggngaaagncgtggncagctttttctacatagtctncacngcctgttagngttatccttcagntttcnggttgntagngatcngtttttcgactnccataagacctgngagcnttgattgtaggncaaccgnaa

SEQ ID NO: 8382 - DNA, 368 bp, Homo sapiens
  misc_feature 368: n = A,T,C or G
aggtacagatacatggccccatcaatccactgccactgctgcctcttctgtgggtcgtgcaggccaatccatatcggctggcttctctgatagccacttatgtaagcagtggtaacaacgcagaggacttttcttttggttttgttttgttttgttttgttttgtttttggttttacagagaagagatttttattacaaagaaaaaaattccagtgaattgtgcagaaatgctggtttttacaccatcctaaagaaaaactttacaagggtgttttggagtagaaaaaaggttataaagttggaatcttaaattgtaaaattaaccattgagtgtcaaagttctaaaagcagaactcattttgtgcan

SEQ ID NO: 8383 - DNA, 402 bp, Homo sapiens
ggagctccccgcggtggcggccgaggtactgggcagggcttgggagataagacaggacatctgaagctaaacatggatcccctctgaaagctacaatcaaagtgtcatccacaaaatcttatctcaagccttgactagagaaggacccacttccaagaccacagagttgaatgaattcagtccttgcagcccgttgaactgagggcctccccaacatgctcacctgcttcatcgaagcctgcgagagagagagtccactagcaagaggacattgcagtcttatctaatgcaatcactgaagtgacatcctgtcaccttggtcaccttttctattctattcattataaatgagtcccaagtcctgccacactcaagtggaggggattacacagggctggagta

SEQ ID NO: 8384 - DNA, 434 bp, Homo sapiens
  misc_feature 12: n = A,T,C or G
agggcgaattgnagctccccgcggtggcggccgaggtaccttgcagcaaaagacaaaaagcaaaaagccagtagacctgcaattcacagctattcctgaggggtgcacattgcagcccactcttgagctccccagtgttctgagcaggggacagggcatacttctagtgatttgctcagtttaatcccttcatccaagaaaacagaccttccccaaccacacctgcagggttacttcagacaaccagcttctcattttagagccccagttcctagaattggagaaaggaagttcccctttaagccctaggtcctgcccactagagcagatacgcaacattaaagagtgcaaattcaaggtcagtttttcatatttagcaaacatccattgcacccttataaggtcctcgactttaagaaatttatatgaaatcg

SEQ ID NO: 8385 - DNA, 234 bp, Homo sapiens
ccgggcaggtacaaaacagccagagacaatatataaactacagtatctgaaccttggcactgccaatattttggaccggataatactttgctataggaagctgcccagtgcatcctgggatgtttaggggaatccttggcttctacccacaagatgccagcattcaatactgatagctgcccctcccccagttgtgacagtcaaaaatgtctccagacatggccaggtgtacct

SEQ ID NO: 8386 - DNA, 124 bp, Homo sapiens
  misc_feature 44, 47, 50: n = A,T,C or G
ggcggccgaggtacatatctcagatttcatttttttgtataacnttnatngcaagccagacttaaaaaaaaaattattgctatattttccccacatccaatctgggaacatttgctttcatcca

SEQ ID NO: 8387 - DNA, 158 bp, Homo sapiens
cactacttagggcgaattggagctccccgcggtggcggccgcccgggcaggtacctatatttttaaactggtgaaactgacccaaatatgtaataaataccatagtagctcagacccaaggagatatttttctaaaatcagttttcgttaaagtacct

SEQ ID NO: 8388 - DNA, 390 bp, Homo sapiens
ctacttagggcgaattggagctccccgcggtggcggccgcccgggcaggtactctgacaagttttaacagagaaaaacacattttcatttgtcaaaatctttacagaacatatccaaaaccagaattacagcacacagacacccagtaacaagagcacctcaatctcaggtgagggaatttgtgtgaaagatagagcgcttgctccaggttccaatgcaggaaactgcccttctctcacaaggatggtgaagaccaaggaacagttctcttcttccaacagctcaggtcccattagggggccactggtcaatcacttgggtaggcttttggccccaagtttgggccttccctgtggtaaatctcagtcagttccattgagtttttatgct

SEQ ID NO: 8389 - DNA, 348 bp, Homo sapiens
ctatagggcgaattggagctccccgcggtggcggccgaggtacccacgtaaagacgttaggtcaaggtgtagcccatgaggtggcaagaaatgggctacattttctaccccagaaaactacgatagcccttatgaaacttaagggtcgaaggtggatttagcagtaaactgagaagtagagtgcttagttgaacagggccctgaagcgcgtacacttaaacatggcccaatgacacagcctttaaacttgtcaatattttcctcttggtggtattgaaaaccagtgagcagagagcataagaacagaacttcaagaccgtggcaggagcttgtatttgtacctgcccg

SEQ ID NO: 8390 - DNA, 278 bp, Homo sapiens
  misc_feature 278: n = A,T,C or G
ccgcggtggcggccgcccgggcaggtacgcggggtggagtctcatgacctctcagaataaggtgtcacctccctgaaattgcatatatgtatatagacatgcacacgtgtgcatttgtttgtatacatatatttgtccttcgtatagcaagttttttgctcatcagcagagagcaacagatgttttattgagtgaagccttaaaaagcacacaccacacacagctaactgccaaaatacattgaccgtagtagctgttcaactcctagtacctcggcn

SEQ ID NO: 8391 - DNA, 354 bp, Homo sapiens
  misc_feature 17, 82, 305, 323: n = A,T,C or G
gaattggagctccccgnggtggcggccgcccgggcaggtacatattcaaatgtattcagaaagtcaaaagattacctatcgntctacaataaaatacatggaaatagcttgctatttttatatacatttccaaaatattaagataactttctgtaagagtcaatgattctgttcgactaaatagctgtcctttccaacacattgctacttttttaaatactgtatcataagttcagcctgtcatactttttgcattgatcgttatgaataccagaccatttgtaagtcgtggttgaagagcaaanatgctaattgacatctcntagtaaatactgttaccagggatttcatgaa

SEQ ID NO: 8392 - DNA, 373 bp, Homo sapiens
  misc_feature 1, 90, 105, 144, 156, 161, 178, 193, 202, 210, 225, 244,251, 265, 278, 296, 298, 300, 306, 315, 321, 335, 337, 347,349, 351, 362, 369, 371: n = A,T,C or G
ntaattgcagcgcttggcgtaatcatggtcaatagcatgttatcctgtgtgaaaatttgttatccgctcacaagtttccacacaacatancgaagctcgggaagncatacaagctgttaacagtcctcggaggctgctctaaantgtaggtgtagncatanaccttcatcatttaatnttgccggttttgcgnccttcaacntggctccngcctttatctcagtnttccggagtataaaccacntggtacngtttgccacaaggncttgtctaatttnaaaattggaatattccgngncnccaaanctgtccggncggggngggtaagaaagggncngtggtttttngncnggtttattttnggggggncngc

SEQ ID NO: 8393 - DNA, 244 bp, Homo sapiens
ccgggcaggtacgcgggggcactcactgaaaataacttcgatgacaccattgcagaaggaataaccttcatcaagttttatgctccatggtgtggtcattgtaagactctggctcctacttgggaggaactctctaaaaaggaattccctggtctggcgggggtcaagatcgccgaagtagactgcactgctgaacggaatatctgcagcaagtattcggtacctcggccgctctagaactagt

SEQ ID NO: 8394 - DNA, 394 bp, Homo sapiens
ccgggcaggtactctgatgtggctgctctgaattctcacattcaaggttctcactgtgaagtcttctacaagtgtcctatttgtccaatggcgtttaagtctgccccaagcacacattcccacgcctacacacagcatcctggcatcaagataggagaaccaaaaataatatataagtgttccatgtgcgacactgtgttcaccctgcaaaccttgctgtatcgccactttgaccaacacattgaaaaccagaaggtgtctgttttcaagtgtccagactgttctcttttatatgcacagaagcaacttatggatggaccatatcaagtctatgcatggaacattgaaaagtattggaagggccctccaaactttggggtataaactttgcctt

SEQ ID NO: 8395 - DNA, 408 bp, Homo sapiens
  misc_feature 261, 271, 280, 288, 311, 329, 391, 396, 399: n = A,T,C or G
ccgcggtggcggccgcccgggcaggtactttttgctttagcagatagatagggcatccaatacaactgaaacaacctgataacaaattaattttatttttcaataaaaaggaatgctctggttttttaactggctccttgaggaagccagaagatggcatctgctctttaaacaggcttctcttatctgatttgagacacaaatccaccaagattctttcttacagttggaagtaggcaccacccctcagatcacggaggnccccctaggnaaggaagcnctgtgggnaaatcagccctgtggatgttgtnggttgggtggggcccagncacccttagtaatgaccacattgggtggtttgtgccaccataaaaatcccttcagccggacntcagntgngaaagggaa

SEQ ID NO: 8396 - DNA, 427 bp, Homo sapiens
  misc_feature 6, 18, 189, 239, 329, 344, 358, 379, 415: n = A,T,C or G
cgactnctatagggcganttggagctccccgcggtggcggccgcgaacaagtgctccagaactcagagagttttccagacgggtggagatcgcgttccctgcccgccgaggtcccatcgcttccctgctgggaagacaaatgaggcgctttagccgtctccacggccagcccctccctcataacccganattcttttgtggggcttcttagtccataagctgcctttgaggtggtgtanaccttgctaaccaggacggcccagtaggcagagctcatttttattcctgtctgcaatcgttgcaaaaaccgcctcttatggaaaagccanagcgccaggagtcangcaaaacacactanaagattgggcaagtcactggnggagaaacactcaagcccgcctgcacccagggtganaatattaccagc

SEQ ID NO: 8397 - DNA, 962 bp, Homo sapiens
  misc_feature 10, 12, 22, 24, 36, 48, 50, 54, 80, 105, 110, 127, 151, 158,160, 285, 352, 367, 403, 473, 518, 556, 577, 631, 673, 694,699, 708, 719, 724, 733, 742, 760, 807, 827, 832, 838, 891,902, 904, 922, 960: n = A,T,C or G
ccggccgggntngaggtcggtngntggaaaaaactntggttctaaatncnccgncctccaaaccaaaagtgtcccccaanccaaccaaaaaccaattaaaccggnaaggncccccgggggggaaggnccaattaaaaataaggtttggttnaaaaaangnccccctggggggggggttgggccccttaaaaatgggaaaggttaggaaaggccttaaaaaccttccaaccaaattttaaaaatttttggccgggtttttggccgggccttccaaacctttgggcnccccggcctttttttccccaagggttcccgggggggaaaaaaaaaccccccttgggtttccgggttngggccccccaaaggncctttgggccaaatttttaaaaaatttgggaaaaanttccggggggcccccaaaaacccggccccgccccgggggggggggaaagggaaaggggggcccggggggnttttttttggggcccgggttaaattttttggggggggggcccggnccctttcccttttttccccccgggccctttttcccccnttccgggccctttccaaaccntttgggaaaccctttcccgggccctttgggcccgggccctttccgggggggttncccggtttttccggggggcccttttggcccggggggcccggnaaaaggcccggggggtttaantttcnaaagggccntttccaaaccntttcnaaaaaaaangggggcccngggggttaaaaaattaancccgggggtttttaaatttccccaacccaaaggaaaaaatttccaanggggggggggaattaaaaancccgncccaangggggaaaaaaaggaaaaacccatttgggttgggaaaagccccaaaaaaaaanggggcccccangnccaaaaaaaaaagggggnccccaaaggggaaaaacccccggtttaaaaaaaaaaangg

SEQ ID NO: 8398 - DNA, 373 bp, Homo sapiens
  misc_feature 9: n = A,T,C or G
cttagggcnattggagctccccgcggtggcggccgcccgggcaggtacatggtaaagattcttcagacttctattgatgctaaaactggacaagagcaatctttcccatccttagggtcttgtaatagcaggggggctctgggagctttgatggcatgtctgcgaatagctagagctcatggacatcttcagtctgcaactgatacctgggagaacctcgtgtctgatgcaagaataaagcaaggcttaattcatcagcattgccaagtaaggatagatacattaggcttgctttgtgaaagtaatcggagcacagaaattgtttccatggaagaaatgcagtggaattcagttctttattacatacaatctt

SEQ ID NO: 8399 - DNA, 208 bp, Homo sapiens
aggtacagtcctttaaggctgcccagttcattctattagatgactaaggaaaactagaaaaagaatacagttcacccttgtcaaggtcaaatgtgaaagacagaagtttatttaatgtagaggtaaatgaaggtgagctgttttcagcatcttagtttgaccatgaaaatgtctatagaattatgtgtagttgttccgtacctgcccg

SEQ ID NO: 8400 - DNA, 366 bp, Homo sapiens
  misc_feature 366: n = A,T,C or G
ccgcggtggcggccgaggtaccactgccacccagggctacaaacatgtcccttttcacaaagcggaccaagttttcaagcgggcacatgggcttgggagaacgcttgtggtggtcttgacagaaagaggtgtggaatgtgacatcgacgccattgtaaagaatccggacggaatgttcactgggcttttctctgtcttgccaaagctcaaagatcaacctggctgcaaaccttgggaacctggcttctgaaaggcccaaggcactgagaactggtgacagagtgacatcatgagcagagtagagggcaaagagctcttctttcctgccctcggtggcacgctgcatccggccgctctagaactagn

SEQ ID NO: 8401 - DNA, 636 bp, Homo sapiens
  misc_feature 6, 19, 178, 180, 189, 190, 194, 215, 237, 238, 267, 270,272, 281, 283, 288, 290, 295, 297, 300, 302, 309, 314, 326,328, 329, 330, 333, 337, 343, 351, 353, 362, 366, 367, 372,379, 390, 391, 402, 412, 413, 429, 457, 460, 462, 464: n = A,T,C or G
  misc_feature 465, 469, 479, 489, 502, 521, 532, 538, 569, 572, 581, 586,588, 589, 605: n = A,T,C or G
attggntctccaccgcggnggcggccgcccgggcaggtacagcctccctcctggctgctttcacggctgttgttcagtgcctgcggcttttccaggtgcacggtgcaagctgttggtggatctaccattctggggtctggaggacggtggccctcctctcacagctccactaaggcangngcccccaannaaanggaactcttgtgttggggggnctccccacaacccacaattttnncccttttcttggcacctggcacccttaanacnanaaaggggtntncttcntnccccncntgncncggcttngaagnaagggggcctcntnnntcncccnccttgncgaaggcnanaaaaccttntttnnggcancttgggngggccaatttnngaagggggccnaatttttttnnccaaataaccaaattnatttttcgttcgggaaaaaaaaactttnatngngnnccgnggaaaggggnttttttgctncaaaaaaaattcnttccaaaatttttgctttntggaaacattntccttnggtggtcccaacccccttggccaaagggggnccntttaaaaanccaangnnccaaccaaattaaggnaaaaggtccttgggccccaaaagggggcctt

SEQ ID NO: 8402 - DNA, 480 bp, Homo sapiens
  misc_feature 32, 48, 61, 78, 280, 375, 396, 411: n = A,T,C or G
agggcgaattggagctccccgcggtggcagcnggccgcccggccgggnccacagggccggncccaggggttcacaccngtaatcccaacactttgggaggctgaggcgggtggatcacaaggtcaggagatcgagaccatcctggccaacatggtgaaactctgtctctactaaaaaatacagaaaattagccagtcatggtggcacgttcctctagtcccagctactcgggaggctgaggcagaagaattacttcaacatgggatgtggaggttgcagntgagcccgagatcgcgccactgcactccagcctggtgacagagcgagaccccatctcaaaaaaaaaaaaaagttgtatgtgacagctaaccatantaacaaaaaaaagaaagaaanaagagagagaaagtngggacaacactaaatcattagtaaatttgagcacatttcctccaaggcatatgctatttttcaacttgg

SEQ ID NO: 8403 - DNA, 381 bp, Homo sapiens
  misc_feature 321, 375: n = A,T,C or G
ccgcggtggcggccgcccgggcaggtactggatttaactacctttggcttaattccaatcattgttaaagtaaaaacaattcaaagaatcacctaattaatttcagtaagatcaagctccatcttatttgtcagtgtagatcaactcatgttaattgatagaataaagccttgtggtcactttctgaaattcacaaagttaaacgtgatgtgctcatcagaaacaatttctgtgtcctgtttttattcccttcaatgcaaaatacatgatgatttcagaaacaaagcatttgactttctgtctgtggaggtggagtaggtngaaggcccagcctgtaactgtcctttttcttcccttaggcaaatgggtggaacntgtcat

SEQ ID NO: 8404 - DNA, 424 bp, Homo sapiens
  misc_feature 27, 297: n = A,T,C or G
cactactatagggcgaattggagctcnccgcggtggcggccgcccgggcaggtacagctttgccactcaaatataccttattgtggcattcagggagccagggtccagagctgcagggctgcggtccctggctcacttccacataggccatcacataacctgtcataaaggcatcaaaaccagcccggtgcaatccatccccaggcactgggttaggactggcttggctccctggcacttctgaggtagctctatcagctatttcaggccttgctgccttaatccccatctctaagntcattttttttgtttgcccttgcttgggagtgagggcagggttcctaagttttcattcgggcaggccaccctcctgccttcgggtttcttcaggccttggatgcctatcccccacaggaccctgctt

SEQ ID NO: 8405 - DNA, 341 bp, Homo sapiens
cttagggcgaattggagctccccgcggtggcggccgaggtactaatttttttttttttttttgtatttttggtggagacgggggtttcgccaggttggccgggatggtctcgatctcctgacctcgtgatctgccctcctcggcctcccagagtgctgggattacgggcatgagccactgcacccggccccaagctgagtaagctcttactcagctgagggtatcgagcggccgcccgggcaggtacatttatgttttattcagtaagagaatagaattttcatttgtttttctttaaatcctttactaattatataatttgaaagcaaaaagaagggcct

SEQ ID NO: 8406 - DNA, 53 bp, Homo sapiens
ccgcggtggctgcagcccacaaatctcccctctgtttttctccccgcgtacct

SEQ ID NO: 8407 - DNA, 397 bp, Homo sapiens
ccgggcaggtactattaactttaaggaaaaggacatgagattttaagtcagaaaggaaaaatgctgactaaggcccaaatgctcaactccaagctttcattcacctaaaaaaatgcaatcaaatctcctcatttgaaagagttcttttttttttcctttttctccagttttggaggagaactggaagggagtaaaaagacctgtccacagcacaaacttccactctggctgtgaaggactagccaattgctaaatgtttcatcacggaggtgctcgatcatattatataaaacactgcaacctccttttcattacatccttcatatattatggatccatcatacattttaaacaaattagatgaaaacagctagaaaaagtaaacagaagtttttga

SEQ ID NO: 8408 - DNA, 109 bp, Homo sapiens
  misc_feature 51, 95: n = A,T,C or G
aggcccgcgttgcttggcgttttttccataaggctccgcccccccctgacngagccattcaacaaaaaatttgaccgcttcaagtcaagaaggtnggccgaaaacccgg

SEQ ID NO: 8409 - DNA, 828 bp, Homo sapiens
  misc_feature 20, 60, 97, 100, 173, 285, 286, 294, 297, 299, 301, 305,380, 403, 417, 455, 522, 555, 560, 614, 641, 689, 702, 712,736, 786, 795: n = A,T,C or G
agggggcggaattggggagnctccacccgcgggtggggcgggcccgagggttactaatantacctaagggaattggaaaaaattcctggtggtaaanctngcttataaaaacggttttttaattaaaaagtttaattttaacatttttaaaatggggccaaaattaatttttnacaggaagaaaaaaccaatttggtggttaaaaaattctttaaaaaaaattttttttttaaaaaaaaaccaaattttcttttaaaaaataaccaaaaattcttggttttaaanngggaaaanaanananaaanaaggaatggggttaaaggccaattaaaaaaaaaaaaggttttccttttttttaattggccccccaaaaaaggttncccaaaattttttgggaaggggnccaagttttttaanccattttaattgggggctttaaaaaatttctttttttncaaggttccttcaaaaggaaactttcaaagcccccaaaagggggtttgggttgggaagggggttttnggcaatttttttttgggaaattccaaatttggnccaanttttttttggaaaaaaaaacccaaaaagggttttttccaaatttaaaggggggnttggggaaattttttggggcctttccnaaaggggggaaaccaaattttttttttccctttgggtttttaaagggnaaaaaaggggggnaaaaaatttncccgggttttttttttttcccccnttttttaaacccttttttttttttttcccccccttttttaaaacccgggncccaacccnaaaaaaaggggaaaagggtttttttccccccgg

SEQ ID NO: 8410 - DNA, 454 bp, Homo sapiens
  misc_feature 3: n = A,T,C or G
atnctatagggcgaattggagctccccgcggtggcggccgaggtacagggtattaaacaaataccaaggggaacagttaacttcaatacaaggccaaaatcagcaacaagttctacaatccagtgctgatatcagatacaagcttcaaggacaatttcttttcgaaggcttattccagtttcgtgaggctagcatgaggtgtgtgcatttgccaggggcaaatttctattctcaattaacccatgcagcaaatgctacgcatctgcccgcgtacatagagacttatgtccacaagccactaggtttacattatcttgctacacagcaatagaaaactagtatagtgtcttctctggtaatgtcagtttctaaagtaacaaacctgatgcagtttgacttttcaggcagtcattatccctgctaaatactagttttatgtttactcaaacatgta

SEQ ID NO: 8411 - DNA, 364 bp, Homo sapiens
  misc_feature 142, 169, 244, 336, 349: n = A,T,C or G
tagggcgttttggagctccccgcggtggcggccgaggtactatttatggtggtggggctttcttactaattcacaaataaatttaatcatttcaaaggcattctatttggtttagaagttgattcccaggagtgccatattncagctactgtatttccttttttcttgnaaatgtaagcagctcagatacccatgtgctatcattttttgtatcaagttttttgcacagggatgtgaccactgncagatcactgttcttttctttctttttgtgaattggaaaagcctatactacaatttgaaagttaaatttttgtttttcttaagccgtaaaanataaaaataaaanaaatgtacctgcccg

SEQ ID NO: 8412 - DNA, 310 bp, Homo sapiens
  misc_feature 4, 24, 45, 51, 220, 299: n = A,T,C or G
ggcngccgaggtactgaagagtancaaaaatgatagatgcttttnccgttntctcaaacatgagccccagcaggaagaccatcgccacacaggagacgatgtccgcgtgattctgcaggacgaattcgtggctcagcactggggggctcttggtgcttttcttgcgaatcgccatggtggggccgccgcccgcgcctccccgcgtacctgcccgggcggncgctcgagcatctctataacatgatcatccgacgctactcagatgaaagtgggaacatggattttgacaacttcatcanctgcttggtca

SEQ ID NO: 8413 - DNA, 235 bp, Homo sapiens
  misc_feature 18, 43: n = A,T,C or G
atagggctttttggagcncaccgcggtggcggccgtcaggttnttgattggcacctttctgatccccctttctgggcctgtatggctaggcagactcctcatcttggagaacagagaaggacgacagcttctttgttgcgcaaactgactgcagcctccaatggaggggtcattgaggagttatcttgtgttagatccaataactatgtgcaggaaccagagtgcaggaggaatc

SEQ ID NO: 8414 - DNA, 336 bp, Homo sapiens
  misc_feature 16, 19, 20, 21, 25, 50, 69, 80: n = A,T,C or G
ccaattggagcttttngtnnnggcngccgaggtacatctacctaaaggantattatgtggaataatacntactaatgaanttttgcatgatttaaagactacaataaaaccaaacatgcttataacattaagaaaaacaataaagatacatgattgaaaccaagttgaaaaatagcatatgccttggaggaaatgtgctcaaattactaatgatttagtgttgtccctactttctctctcttttttctttcttttttttttattatggttagctgtcacatacaacttttttttttttgagatggggtctcgctctgtcaccaggctggagtgcag

SEQ ID NO: 8415 - DNA, 427 bp, Homo sapiens
ccgcggtggcggccgaggtacgcggggatgttggatcaggacatcccgatggcgcagccgctattaaaggttcgtttgttcaacgattagagtcctacgtgatctgagttcagaccggagtaatccaggtcggtttctatctacttcaaattcctccctgtacggtcctatacgaagttgttctgtctctgcatcataaatgctaatcattggtcctcctgctaaagttcgcgcagcacgaagctgctcctccggaccccgatcttgaaaggaggctctgtaaatctctgcagtcttaatgttgacagcaatgccatatattactggaaagtggtttttcgttttcttcccggtcatttaattctgtcacacataatgtcactaagtgaatgtcatctttcttgcctgtcaaattcactaagaagtt

SEQ ID NO: 8416 - DNA, 307 bp, Homo sapiens
ccgcggtggcggccgcccgggcaggtactccaaaataattttgcacctggctgttttacacttcaagaatagctttcttggctgggcatggtgacttacgcccgtaatttcttaaagggatcagaagccctgctctgaagttaggcagtcacctctgtgacctcaacaacatctctacattttgctttctttatctgtaaacctaggtttatcagatcttcttcctggcgacgctgtgacaattaaatgaactgctgctcatgggaatggctgggtgacttcggtagctggcatgctgtcagtacct

SEQ ID NO: 8417 - DNA, 144 bp, Homo sapiens
  misc_feature 88, 104: n = A,T,C or G
ctaatgagtgaagcctaacctcacaattaatttgccgttggcgcctcactgccccgctttccaagttccggggaaaacccttgttccnttgcccaagcctgcanttaaatggaaattcggcccaacgcgccggggggagaaggc

SEQ ID NO: 8418 - DNA, 280 bp, Homo sapiens
  misc_feature 38, 40, 41, 46, 49, 53, 66, 71, 82, 83, 85, 86, 89, 92, 94,108, 114, 115, 116, 139, 141, 144, 148, 149, 154, 158, 164,176, 177, 180, 183, 187, 188, 196, 199, 200, 204, 210, 214,215, 216, 218, 224, 227, 230, 233, 238, 240, 242, 246: n = A,T,C or G
  misc_feature 247, 249, 253, 254, 257, 267, 269: n = A,T,C or G
aggtacttttttttttttttttttttttttttttttancnnttcanganttantgggtcaaggaanggccnggccaaaaaanntnnccngangngtccctggtacccnggggcnnnaatggcttcctcttcgggttttntnttncttnnctaancccncccggnttttgtaaaccnnccnccngccnntttaaaantannggancccccnggcnnnangaattncanatnaancttantnanaccnncnaccnnganggggggcccngnacccaactttt

SEQ ID NO: 8419 - DNA, 420 bp, Homo sapiens
  misc_feature 357, 367, 384, 401: n = A,T,C or G
cttagggcgaattggagctccccgcggtggcggccgaggtacagagataagatacaaagataaaaatgttggtatcagttgattttgaagcaggtaattactgtgccacctcacagtgctcaaaaatagttcagtcctgaatagtttattcagcccatcaaataagcattgggttgttctaacttcctcacattcctcccccctccttacttctttgaaccaacccccatctcactggagataaattatctgcttggtaatcaaaaacgggtttctccccaaccccagtacctgcccgggcggctcgctcttagaactaagtggaatcccccgggctgcaggaatttcgatatcaantcttattcgnatacccgtcgaccttcnagggggggggcccggtnaccccaagctttttggttc

SEQ ID NO: 8420 - DNA, 423 bp, Homo sapiens
  misc_feature 347: n = A,T,C or G
tagggcgaattggagctccccgcggtggcgggcaggacccggtgaatgtaaagcccttctcctcccacacacaatggactcacccagtattaccctccactaccacttttgaccctcataacagcaccctggcgggggggcagattgatgttatcaccatttaccagatgaggaaactgaggcctgatgggcagtgatttgtacactgcgacataggactcagtgaagagcctagccagctgacggtcagctgactggtgcactctttccctcaccttctctctcaagggcacagctacactctttctccaccattattaacactcacagggcacaggtagagcgtncccagacctgtgcaatattctacacgaaaacatttggaatgtgagcaatgttctgaacaggggcttgccaggcaca

SEQ ID NO: 8421 - DNA, 443 bp, Homo sapiens
  misc_feature 68, 141, 159, 185, 192, 196, 216, 229, 254, 266, 268, 297,313, 329, 334, 340, 354, 357, 368, 375, 381, 394, 397, 426,436, 438: n = A,T,C or G
aggtactttttttttttttttttttttttttttcgtgttgctgaccttcacttttatttaaatatagngatcttttaagagaataaacaaaaaatactttacacagtcaaatattttacataaatggtaaacatggcatgntctaccttcagtaattanagccaaaaaataactttttaggggcnccatagnattntttaaaaaaatagaagcatnttgaagaaccaanttgaaaaacccagagtacttggganatatacgaggananttaaacagaaaacacctccaccatgtttncccttaaacttctttncaatttgggggtactntgttnctttcncaaccccttatttnggntttaaaagggnccctggnagtttntcaagaaaaaatnccntaacctttccctttgccccaaaaaccagngaaaaaccantncccac

SEQ ID NO: 8422 - DNA, 384 bp, Homo sapiens
  misc_feature 7, 21, 140, 343: n = A,T,C or G
ccgggtnggtactggttgttntggaggaaccttttgcttgctcattaagtcctactgattttcactatcccctgaatttccccacttatttttgtctttcactatcgcaggccttagaagaggtctacctgcctccagtnttacctagtccagtctaccccctggagttagaatggccatcctgaagtgaaaagtaatgtcacattactcccttcagtgatttcttgtagaagtgccaatccctgaatgtcaccaagatcttaatcttcacatctttaatcttatctctttgactcctctttacaccggagaacggctccagctgttctagctctctttcagntctttgaaccttcccaccttagggtctataaggttccctct

SEQ ID NO: 8423 - DNA, 228 bp, Homo sapiens
  misc_feature 4, 33, 46, 55, 74, 76, 89, 104, 119, 124, 132, 169, 171: n = A,T,C or G
accnctatagggttttgggaaaactcccgcggnggcggccgaggtnttttttttntgggttttaacccccgggntngagaacgggaccnttattcgttaagacntcaggctccagatangaacnggcagcanaagcgcttgccgggagcaaagggacagaaaagctganangaacagtgcctggcagcaatcacagccgggcaagggggctccgagcctcgcatcccc

SEQ ID NO: 8424 - DNA, 217 bp, Homo sapiens
ccgcggtggcggccgcccgggcatggtacgcgggaggcccaggtgtgtaggccacagcagccgcagtcctgaaaggctgcaacacccagacctccaggagagaccaggcccaggatgcctcgcctgttcttgttccacctgctagaattctgtttactactgaaccaattttccagagcagtcgcggccaaatggaaggacgatgttattaaattat

SEQ ID NO: 8425 - DNA, 174 bp, Homo sapiens
ccgcggtggcggccgaggtacataatccatgtaatatgggcttgtcaaaacctgctagactagcaaagttaggatcaatgtgtaagggattccagtctccactgaggcggtacaccaaggtggtgcattaccggaagtggatcaaggacaccatcgcagccaacccctgagtgc

SEQ ID NO: 8426 - DNA, 304 bp, Homo sapiens
ctatagggcgaattggagctccccgcggtggcggccgaggtactttttacaatgaagggatatggcagcatggatactgggtagctggctaggctctaaatacctgatgactcaacgctttgcacaaaccagtcttgctgattattaaaatttgtccctgggcaaaattaaagcaatgcatgttagggcttcaaatgcaaaggattcactgtagttgattctttcaagaatagaaatcgaccataactttgctttataatccatgtgatacaccacattataacagatcccgcgtacctgcccg

SEQ ID NO: 8427 - DNA, 400 bp, Homo sapiens
ccgcggtggcggccgcccgggcaggtactgacttcaagcaatttgagaccaatgatcaatgcagaccttatcataggatccttattgagcgtcaagagaaatcagatacaaacttcaaggagtttgttattaaaaagctgcagaagaattgccagtgcagtccagccaaagccaaaaatatgattttaggtttccttcctgttttgcagtggctcccaaaatacgacctaaagaaaaacattttagggggatgtggatgtcaggccttggattgtggggccatattaattgggtgcccccagtccattgctttatttccctgcctggcctgggcccaaggaaccctggtcttattgggtctggcaccctcggcccgctctagaaactaggtgggatcccc

SEQ ID NO: 8428 - DNA, 401 bp, Homo sapiens
gaattggagctccccgcggtggcggccggcgggaggctgacgagagccgggaggcgttagcgaaggaagagaaaaaccgaagacgaagccactacagcccccgcgtacaggtgaaacaaattctcatcttgaatgatcagatgcaaaatcatttctgaaccctagagcagaagttagaaataacaaaatggccgtttcaaccttgactggccaaaaataactaataaacttttttgttttaagtcaggcaagtgattttctacatttagcagtttgaaagtccagtgttaatgcaatatttctagtgagaaatgcttgttattaaaagcatgggagtgatagtgtgaaatggtggtgagtgcttctatcatattactgtaggtacctcggccgctctagaa

SEQ ID NO: 8429 - DNA, 410 bp, Homo sapiens
  misc_feature 24: n = A,T,C or G
ccgcggtggcggccgaggtaccangatggaaaatgtttttggtgatctggctgctgcttaaagccagttttccctaagaactccaaaggctaaagtctactaggggcagagtgtgaggatagatttctaatcagagaaaagtggcctccaggagctttcatttatgtcttctccagaccaggttttcctgttatcttcctttaatcccctttcaaccaacaggtgaagttcttccagcccacagaggtagtaatatcatcttttctatctcctcctctcctttggccatgtaatgaagcaaaatattatttatttagcccaggcttgagagccactgtttgtggacagtcttcatctagattccataccctggcctaggcgaggtaaggctctctggttattgccaggat

SEQ ID NO: 8430 - DNA, 435 bp, Homo sapiens
  misc_feature 18: n = A,T,C or G
ctatagggcgaattgganctccccgcggtggcgcgtggtcgcggccgaggtacagtagtgcactcttggctcactgtagcctcgacctccggggctcaagtgatcctcctgccttagccccacaagtagtgggactataggcacacagcaccatgcccatctaagtttttgtattttatgtagagacaaggtttcaccatgttgcccaggctgatcttgagctcctgagctcaagtgatctgcccaccttggactcccaaaatgctgggattataggcgtaaaccaccatgcctggccttaaatcaactttagagtcaacatctcttatcactggagcttctggagaaaactccatcaccgtggtggctcttctttcctgatgtggttgtgccccaaaataggcttgttctcaatcagatgactttatttgctta

SEQ ID NO: 8431 - DNA, 361 bp, Homo sapiens
  misc_feature 338, 360: n = A,T,C or G
ccgggcaggtacatcagttgctttcaacattttcagattgttacatgttttcatatttttattccagatttatcctttgttgtgactgtagtggaaactaatttaattcttcactgtgatatcttttttgtttttgaaaatatagccagtttttctaattatacaaaaaaaagaaaataaataatacagaagaaaatatatatttatggcccaaaccccaagaataattactgatacgattttggcatgttttcttccagtgtttctcattgcatacatatataaaaatatttaaacttcttaattataaaaaaaaaaaaaaaaaaaaaaaaaaggtncctcggccgctctagaactagng

SEQ ID NO: 8432 - DNA, 440 bp, Homo sapiens
  misc_feature 28: n = A,T,C or G
ctactactatagggcgaattggagctcnccgcggtggcggccgcccgggcaggtaccctggaatatgacggtgatcacaagcctgcaacaggaactctgccccagtttcctcctcccctctgctccagctctggggcgctgctttccatggaccaacgttactccaccggcgctcccagggatcaccaatgacaccaccatacagcaggggatcagcggtcttattgacagcctcaatgcctgagacatcagtgttaagatctttgaagattttgcccagtcccggtattggattcttgttgccctgggggtggctctggtcttgagcctactgtttatcttgcttctgcgcctggtggctgggcccctggtgctggtgctgatcctggggagtgctggggcgtgctggcataccggcatctactactgctgggaaggga

SEQ ID NO: 8433 - DNA, 131 bp, Homo sapiens
  misc_feature 44: n = A,T,C or G
ccgcggtggcggccgccggggcaggtacataatgtggctatcangagaagccagccgatatggattggcctgcacgacccacagaagaggcagcagtggcagtggattgatggggccatgtatctgtacct

SEQ ID NO: 8434 - DNA, 819 bp, Homo sapiens
  misc_feature 131, 249, 256, 275, 465, 524, 533, 554, 594, 608, 648, 689,694, 734, 741, 802, 819: n = A,T,C or G
ggcgaaattgggagcctccacccgcgggtggggcggggcccgccccggggcaggggttaccaaaaggaagggggcataaataaatcaagttcctccacaagttaggggggtttcaaccaatccctcccaangtggaaaaaaaaacaatttggttcccgaaaatgggggcttttcccacaagggccttaccaaccaccaccaaaaaaacaaggggaaaaaccaatggccccaaaggtttttggtttttcnaaaccgncaattttggaatggaaccntttccttccaaaggggaatccttttcccttttgggcaattccgacccaccattttcaaggggggggccaaaaaaggaaaatttttcttcaaataaggcaaccaagccttcaaaccaaaattaccaaggggggccttcccttttctttcccttcttaccaaaaaatcccaaaattggttaaggggcccaanttttggttaatttttttttggccaaggttggaaggccggccaaggttttggaaaatttncttttcctnggggggttggcccaaaaaggnaaatttttcccccccaggttggccccaaccttaaaaaagnaaaaattgggggtnccccttcttggaacccagggaaaagggaaaaaaaaaaggnaaggggccccaaaacccttaaaaagggttttttgggaaggnaaaanttaaaaaaaaattttttctttaagggaaaggttttaaggnccccttnggggaaataatttgggggaacccccttccttttttttaattggcccaaaattgggttcccnaaacccccaaaattttn

SEQ ID NO: 8435 - DNA, 367 bp, Homo sapiens
  misc_feature 117: n = A,T,C or G
ctatagggcgaattggagctccccgcggtggcggccgaggtacacaagtaactctgattatttgcaaatactaattaaaatatatcacaccaaagaactgccaagtttttatattgnggtctgtggtcctgtcataatctgttttcccagtgcaaaattaataatgctatgtgttcatccaactcagccactgcttttcacagggcatagagctctttgagagctcagctgagaagtgtaatgcatggttgtagctcaacaagtgaaggatagaccaaacgctttttgtcagaagtcattcagtccttggtcctatctgctaagttaatgtccttttctgtgggttaagttacaaaaagtgaaatca

SEQ ID NO: 8436 - DNA, 401 bp, Homo sapiens
  misc_feature 270: n = A,T,C or G
ccgcggtggcggccgcccgggcaggtacgcggggaaaaaattcatactggagagaaaccctatgagaaccctaaccctaacgcttcagttgtcccagttctttcatgagcatgaaaggagtcacatagagaaaccccatgaaagtaagaaatttgggaaagccttcagtcctttctgtttctttcaactacgtgaaaggattcacagtggagaaagaccctgtaagataattggctttaaattaccgagagacttgtggatagggacagntaaaaacccttagaagttgggagtttgggatctctggattgtgttatggtcaggtggttgggtagggtttaagggaacctaggatttcccaagaaatccatttcccattttgtggattcccatggatacca

SEQ ID NO: 8437 - DNA, 207 bp, Homo sapiens
  misc_feature 25, 38, 51, 58: n = A,T,C or G
ctccaccgcggtggcggccgcatantttaataacatcntccttccatttgntcgcgantgctctggaaaattggttcagtagtaaacagaattctagcaggtggaacaagaacaggcgaggcatcctgggcctggtctctcctggaggtctgggtgttgcagcctttcaggactgcggctgctgtggcctacacaccccgcgtacct

SEQ ID NO: 8438 - DNA, 251 bp, Homo sapiens
ccgcggtggcggccgcacgtggaatgacccgtctgtgcagcaggacatcaagttcttgccgttcaaggtggttgaaaagaaaactaaaccatacattcaagttgatattggaggtgggcaaacaaagacatttgctcctgaagaaatttctgccatggttctcactaaaatgaaagaaaccgctgaggcttatttgggaaagaaggttacccatgcagttgttactgtacctcggccgctctagaactagt

SEQ ID NO: 8439 - DNA, 458 bp, Homo sapiens
  misc_feature 220, 336, 344, 438: n = A,T,C or G
actacttagggcgaattggagctccccgcggtggcggcccaaattctttcagtggctacctacatacaattccaaacacatacaggaaggtagaaatatctgaaaatgtatgtgtaagtattcttatttaatgaaagactgtacttttttttttttttttttttttttttattaagcactacataacacattgcatgctacataatacactgtaaccttntagcaggggtagatggccataactgagttatttttttcatcaatcaggaaaatgcttccttaatcaatgttctccaaaccctttgacacatagtaacgatcaactccagagatgcncctatctntttccatcaaactccagtgatacccaaaatgagcaacccttttttccttgcccccgttagtgaacctgtgggatggtaccttcggccgctctanaactaggtgggatcccccgg

SEQ ID NO: 8440 - DNA, 305 bp, Homo sapiens
  misc_feature 152, 293: n = A,T,C or G
gctcaccgcggtggcggccgaggtactggaggtaacacggcccacggttgaataccatggatccctccggtctcccgttccatggtcacacacacctggagggcacccacacggtttgtccatctccttatcgagcggccgcccgggcaggnactttgtttttttttttttttttttttgggacggagtcttgctctgtcacccaggctggagtgcagtggcacaatctcagctcactgcaagctctgcctcccaggttcaggtcattctcctgcctcagcctcccgagtagntgcccgccacca

SEQ ID NO: 8441 - DNA, 248 bp, Homo sapiens
  misc_feature 29, 41, 48, 54, 58, 64, 65, 69, 71, 87, 93, 99, 126, 134,153, 161, 169, 170, 171, 201, 245: n = A,T,C or G
aatcccggccgaggtacaaaagaaggttnactacggagagntttaacnaaggcngttnacaaannccancngaggccacacatctgnggaaanggaganaatcaacatcactagaaacagcaagangacaatanaatgactaagaagtgacangttttgcngcaacaannnccagccccctctaaaaataccacacacacnagggaagcacaaaaagggaagcacagcagatccctgggagaaangcc

SEQ ID NO: 8442 - DNA, 291 bp, Homo sapiens
ccgcggtggcggccgcccgggcaggtacctgatttttcatgagccttacagacacacagagacacatacacattgatcttaaaatttttctcagtcactgatatgcaaaggaccacactgtctctgcttccaggagtattttagaaatgttccacaatttactggaagacatagagatggatgctgctgcttaggtgccttttaagcaagctatgcaaacaatcctgataaaacaagatacatagagagtcgatctggcttctgagaatttaccaagtgaacagagtacct

SEQ ID NO: 8443 - DNA, 260 bp, Homo sapiens
ccgggcaggtactctatacccaggcaaaggcaagcaagcagccttgaacaagtcattcaactcattgaagctgatgtatccattgccatcagtatcaactttggcaaaagcttctctgagctccatcatttcctcatcggacactgatcctctggccattttttattgctttaggtaacaggtctcagcagcacagaaaagctctgtctagatgcattctcctcactggccccaggcagatgcgctctccccgcgtacct

SEQ ID NO: 8444 - DNA, 324 bp, Homo sapiens
  misc_feature 1, 16: n = A,T,C or G
natttggagctccacncgcggtggcggccgcccgggcaggtacagataaagatgatgtctttttgttattgtctgtctgttttgtatgtgtctgagataagggatagagaggaaacatccgtcaggctaatttaactacattttattttaaaaatagagaaacataacctctagatgggacagcagaggacagttagtagaggccacaaactgttatgggctgctgtgtttttgttctaaaatcaatatggttggagcatgtatatctttaggtggatcatttcacatctttaggaattgccctacctcatttttatttttatt

SEQ ID NO: 8445 - DNA, 386 bp, Homo sapiens
  misc_feature 1: n = A,T,C or G
nctatagggcgaattggagctccccgcggtggcggccgcccgggcaggtactggagcccccgcgaaaattcggccagggttctcgctcttgtcgtgtctgttcaaaccggcacggtctgatccggaaatatggtctcaatatgtgccgccagtgtttccgtcagtacagttatggctatcctagcactgacctctaaaacaattggaatcacgcttaagtaatttggaggatgtgaagaaattggaaccctgtgcactgttggtgggaatgtaaaatggtgcagccactttggaaaacactgtagagattcctcaaaaaatgagagctaaccgtgatccagcagttccacttccagaaaggaattaaaagcggggatctcagagtt

SEQ ID NO: 8446 - DNA, 404 bp, Homo sapiens
caattggagctccccgcggtggcggccgaggtacatattgtcaacaaggctgatatcgccatggtgatctgtgacacaccccaaaaggcattggtgctgatagggaatgtagagaaaggcttcaccccgagcctgaaggtgatcatccttatggacccctttgatgatgacctgaagcaaagaggggagaagagtggaattgagatcttatccctatatgatgctgagaacctaggcaaagagcacttcagaaaacctgtgcctcctagcccagaagacctgagcgtcatctgcttcaccagtgggaccacaggtgaccccaaaggagccatgataacccatcaaaatattgtttcaaatgctgctgcctttctcaaatgttgtggagcatgctttatgagccc

SEQ ID NO: 8447 - DNA, 148 bp, Homo sapiens
  misc_feature 114: n = A,T,C or G
agctaacttcacatttaatttggcgtttgcgctcacctgccccgctttccaagtcggggaaaccttggtcgtgcccaagcctgccatttaatggaatcggcccaacgccgcggngggagagggcggtttggcgttattggggccgcct

SEQ ID NO: 8448 - DNA, 390 bp, Homo sapiens
  misc_feature 346: n = A,T,C or G
actacttagggcgaattggagctccccgcggtggcggccgcccgggcaggtactggaaatcagtttgctgaaattaatcaacgattcttgaagttgaagaaaaggaggttccagccttggcaagaggagtgtggcccttcctggaatccctctggacacaccctctagcatccttctaggaaagatgcggcagctcaaagggaagcccaagaaggagacctccaaggacaagaaggagcggaagcaagccatgctggaggcccggcagcagatcactacagtggtacctcggccgctctagaactaggtgggatcccccgggctgcagggaatttcgatatcaaangcttattcgatacccgttccgaccttttaggggggggggccccg

SEQ ID NO: 8449 - DNA, 277 bp, Homo sapiens
aggtactcttgatgaaaagaccgtgaaaccaacaaatcaagaggatttgcttttgtcacctttgaaagcccagcagacgctaaggatgcagccagagacatgaatggaaagtcattagatggaaaagccatcaaggtggaacaagccaccaaaccatcatttgaaagtggtagacgtggaccgcctccacctccaagaagtagaggccctccaagaggtcttagaggtggaagaggagggaagtgctctagaactaggtggatcccccgggctgcag

SEQ ID NO: 8450 - DNA, 300 bp, Homo sapiens
  misc_feature 55: n = A,T,C or G
tccccgcggtggcggccgcccgggcaggtacacttctagcaactggttcctatgntgggtttgccagaatatggactaaagatggtaaccttgctagcaccttagggcagcataaaggccctatatttgcattaaaatggaataagaaaggaaatttcatcctaagtgctggagtagacaagactacaattatttgggacgcacatactggtgaagccaagcaacagtttccttttcattcagcaccagcattggatgttgattggcagagcaacaacacctttgcttcttgtagtacct

SEQ ID NO: 8451 - DNA, 406 bp, Homo sapiens
  misc_feature 38, 42, 43, 45, 160, 190, 329, 385: n = A,T,C or G
aggcccgagcggccgcccgggcagttacaatggcgcantttnnanctcacttttttctaccgcctcccaggttcaagcgatgggttctgcctcagcctcccgagtagctgggattacaggcacccactaccatgcccagctaatctttgtattttttagnagaagacggggtttcaccatgttggtcagnccggtctcgaacttctgacctgaggtgatctgcccaccttggcctcacaaagtgctgagattacaggcttgagccaccacgcctggcctagttagcattttaaaagaaacacaaagccataacaaaaaaccatcattgntttgtatttccacactggttaatggaatgtaaaaggaggttagaaaatgtagtggnttgattaatggatgggttatt

SEQ ID NO: 8452 - DNA, 428 bp, Homo sapiens
attggagctccccgcggtggcggccgaggtacttattcttcagggttactgagtcggcacctatgacagctaagagagctttcttaaagactgcctcagtgtcttcttggcttttggcaccttcactccactctgcccaggaaatccacaatggcagacaaacctggggtttcaggtgcacaaaggcttcttcaaaaagcatggctatgtcagggctctttgactcgatcagcacctgcagcttcagctgccacattgtcccagagtctctaaacaattcagttccagctactgccacttccagagcttccctcaggaagttataacacagcaacgaaacactcaactgcttgtattggcattctgacagaagcttcagttcatgtgccttcctgaatacagtcatggttctttccaacctcttccct

SEQ ID NO: 8453 - DNA, 202 bp, Homo sapiens
  misc_feature 7: n = A,T,C or G
actatanggcgaattggtctccccgcggtggcggccgaggtactgttcatccagcttctttaatactgtatctgcagtctcattcccaggctgtttcatgaaggaatctacatcttccacaaacacggcctcaggaatccccaggtggagccgccgcccattccctgtggccatttctccttttgccacaaactgtccttaa

SEQ ID NO: 8454 - DNA, 392 bp, Homo sapiens
acttagggcgaattggagctccccgcggtggcggcccgaggtactaggaaggcagacggctcgggacttgcccagcatcctcaagctggcaccataccagcgtgactagagccacctcccttggctccttgtccactgccctttgcatctcatgcgggtctccagaagaccccgctcctgctgtgcaggctcccacgccataccttaaacactgctgtggtgttgggtggccacgtgacccacacaggccttttctagttcaccagttttctgcaaggatgctggttagggagtgtctgcaggaggagcaagtctgaaaccaaatctaggaaacataggaaacgagccaggcacagggcttggtggggccatcaggggaccacccttttggg

SEQ ID NO: 8455 - DNA, 244 bp, Homo sapiens
cactacttagggcgaattggagctccccgcggtggcggccgaggtacttcccacttttcataacgagttggagcctagagttgatcgactccagcgactttttcgtcttctttgcggccaccatcttcctgccttaggagcgggacggcccccaaccaacagcagccgctaagatggccggggaacgagaaaggaaagacttcccacaatgcaaagctcttcacggcccccgcgtacctgcccg

SEQ ID NO: 8456 - DNA, 372 bp, Homo sapiens
  misc_feature 371: n = A,T,C or G
cttagggcgaattggagctccccgcggtggcggccgaggtactctgctctcattaggatcaatagtgcagaacgggaagttttctgctgaagcctgactattggttaacacattgaagaaagtagatttcccaacatttggcaatccaacaataccaattttcaagtgaggttccaaatcttccaatgattgggggtggtttaattccatcacctccctttttagggggcatcgtgctcggcctgggcgatgacaccggggtcccagcggcagcgagagaaaggtcctgccggcagctcccccgcgtacctgcccggggccggccgctctagaactaggttgggatcccccggggctgcagggaattccgna

SEQ ID NO: 8457 - DNA, 129 bp, Homo sapiens
cactcctatagggcgaattggagctccccgcggtggcggccgaggtacttttttttttttttttttttttttttaagaggaaaacccggtaatgatgtcggggttgagggataggaggagaatggggga

SEQ ID NO: 8458 - DNA, 148 bp, Homo sapiens
  misc_feature 1, 116: n = A,T,C or G
nctaactcacatttaatttgcggttggcgcctcacttgccccgctttccagtcggggaaacctgttcgtgcccaagcctgccatttaaatgaaatcgggccaaacgccgcgggggnagagggccggtttggcggtatttgggggcgcc

SEQ ID NO: 8459 - DNA, 219 bp, Homo sapiens
ctatagggcgaattggagctccccgcggtggcggccgaggtactggctgacaaagtgagacccctgtctaaaaaaaagataaagagagttacctgaatctggaatccttaatcttggttttccttaaactttctataagtccagcatctgaaatattttgtcaattatcacattaatgtgttcattttgtaagtaagagtacctgcccggacctgcccg

SEQ ID NO: 8460 - DNA, 189 bp, Homo sapiens
ccgcggtggcggccgaggtaccttgatggctgtttgtggtcatacactccgtggaccagtcttgagggatcacagggccaaccagctcagcaaacctctccagaggacagctggggctgcagccaggtagcatgaggggatacggctcgtgctgcgtctcattccgataggtacctgcccgggcggccg

SEQ ID NO: 8461 - DNA, 844 bp, Homo sapiens
  misc_feature 3, 8, 12, 30, 32, 40, 42, 45, 49, 68, 70, 75, 78, 87, 95,109, 111, 116, 118, 122, 124, 128, 134, 139, 144, 155, 168,176, 178, 186, 198, 257, 261, 275, 293, 296, 305, 317, 323,339, 344, 355, 371, 383, 393, 405, 408, 410, 423, 429: n = A,T,C or G
  misc_feature 431, 432, 437, 440, 449, 472, 473, 474, 479, 482, 496, 497,502, 515, 518, 526, 535, 548, 560, 574, 577, 579, 583, 586,605, 614, 636, 650, 655, 672, 678, 706, 713, 714, 726, 729,734, 740, 752, 754, 758, 775, 813, 815, 817, 822: n = A,T,C or G
ctnccacnccgncggaggtagcggcagagncnccgcaagngntanccantgtatatattatgttaatncnctgtnatnaccccaagntgtattanaacctctacgaatntnccatngnggtncncgtnggaatncactngggcnattctcagttnggaaaaaggtgtnggccaagntnttattacntacccttcaagntggattggaggaaaccaaaaccttttcccccaaaaaaaccaagccttttttggccaaangggnggcaaaggggaagnaaaattgggaatttttanggnaaaaccctnggcccgggcttnccttanggaaaaaacctttaanggttngggggaaattncccccgccccgggggnggtcccttgggncaaagggggnaaaaattttttnccngnaaatttaatttcnaaaaangnnccttnttnaaatttccngggaaatttaaaccccccgggtnnnctggnaancccccctttccttnnaaggngggtggggggggnggngggccccnccccccggnggggtttaacccnccccccaaaggncccttttttttttnggntngttnccnccccctttttttttaaagntttttgggnaaaggggggggggttatttaanaaaattttttgggncccgntcccgggcccctttttngggggncccgggtttaaaaaaattcccaaaattnggggggnnttcccaaatttnaanggggncccttnggtctttttttncncccnttgggttggggtttggnaaaaaaaaatttttggggtttttaaatttcccccgggngngnttggnaaaccaaaaaaatttttttccc

SEQ ID NO: 8462 - DNA, 396 bp, Homo sapiens
  misc_feature 24, 25, 29, 65, 328, 331, 339, 346, 371, 394: n = A,T,C or G
ctctcctatagggcgtttggagcnncccncggtggcccgcccgggcaggtacagggtccttttgnaataaaactggttttgacttgatccaagtgtttaacaattggggctgttaagtctgaccatacatcactgtgatagaatgtgggcttttttcaagggtgaagatacaagtcttaaccacaagtgtaaccttacagttttctttaaaaaaaaaaaagtaaaacctggcagctatagaatacactatgtgcatttataatagctattttatatattgtaagtatcaacatttttaaattaaatgttttacattcgaaaaaaaaanacnataaaaanaaaaaangtccctcggccgctctagaactagnggggatcccccgggcttgcaggnaa

SEQ ID NO: 8463 - DNA, 137 bp, Homo sapiens
ctatagggcgaattggagctccccgcggtggcggccgaggtacataatggttcaaagtttcctttcctttttttatttattttatattttgcaatgttttttttccataatatttaagtttttcgatgtttagatat

SEQ ID NO: 8464 - DNA, 438 bp, Homo sapiens
  misc_feature 3, 415: n = A,T,C or G
ctnctatagggcgaattggagctccccgcggtggcggccgaggtacatcagaaagaattcctgaaaatttataatagaatgaattttattaatgcagaaaaataccccagggtgttaaaatatatgaagtgtgggatatattcttatagtttgtaaaatgtagtcaaccaatactgtcttctaatttggataatttaatttataaaattaccttaaacattagggtaattatatttgttaggatttgaaattatttgtagttaaattgtcatgctgtttgaaataattgatacttgtctacgtaatacattttactgtatgttttgaagatggttataatttcactttcaaaatttaaaaaatcaattttaaatgtttttaaaaacatatagcttagggatttttttaaaaaggnttttcttagtaaaaaacctaaat

SEQ ID NO: 8465 - DNA, 126 bp, Homo sapiens
ttagggcgaattggagctccccgcggtggcggccgaggtacctcgtaactctcgattctgttcctttattacatcatccacggttttcttcttgaagagggacgccatggttaaagactgcgcccg

SEQ ID NO: 8466 - DNA, 418 bp, Homo sapiens
tatcactacttagggcgaattggagctccccgcggtggcggccgaggtacatttcttcaatcacaaaatttttcaccaatctatttatgtctagtatcagaaagttaagcaaggagattgcaaaccaacacaacacctttagtctggattttcccggagccccatttgtgttagtgtcctcgggctactgtaacaagttctcaataatgtggtagcttcaaacaacaggaatggaatctctcatagttcagaagtccagatcagtttcactgggctaagatcttggagtcatcagttctggctccttctgaagctctagggagcagtctgatttagctcttccagcttctggtggcttctctctcccgggatgtggacacatcactcagttcttggcaacctggttgcattcttaatt

SEQ ID NO: 8467 - DNA, 366 bp, Homo sapiens
  misc_feature 1, 124, 130, 134, 172, 282, 284, 295, 315, 317, 331: n = A,T,C or G
ncttagggcaattggagctccccgcggtggcggccgaggtaccaagtatttcctgcattgttgctaaaattgttttattgtagctccacattctggtgtagtttaaaatgcctttgggggcagnttgaancagntcttcatgccacttagtttgaaaataaaattctagatnttgccaaatgattttcttagaaaacttcacaaaataaaagatcttgttttttttccatagcacaagtaatgaatgtgggttatcaatcacatacttttttggattatatngnagcaaaaagtntgattaccttaccaagattntnaatagcaatgtatngtgttataataccaactttagttacctgcccgggg

SEQ ID NO: 8468 - DNA, 375 bp, Homo sapiens
  misc_feature 268, 363: n = A,T,C or G
ccgcggtggcggccgaggtacaggtctacaaaatgttttcaaggagaaaagcagcatatccttaagtgaagtattatatttttcaataaccctgtagtggcttgatgcagggaaccctgggggactttcagcgaagagctgtgctcttttctgactagattagagcgtttggagtggaagacgtcaaatgtgtagtgagatggaggttttacattgttcttctactggctgtgatgaagtgccagcaatgttctctttagaaacaagnagttaggattcccccttttcttcttattgcccctttccgtttttgaccttccccttttatttatttttgcttgtcctaattaagggggcccaagntctgttaaaagt

SEQ ID NO: 8469 - DNA, 347 bp, Homo sapiens
ccgcggtggcggccgaggtacccaagcacacatgtgtgaagggctatagccaaagtatttttactagcctgtatgaaatcactagtccttatttttaaaggtctatggtttcttggaagtagtttgattgttgagagagacctttgatctgcagtgtaaatctaccagtcatgggccagaagggcaaaagcccagctttctctttggaaagactcaggctgtggtttgttgatggccaggttttcctcaggctccaacaactgtgcttataccaagcagatcctcatcctccatataatcatctttgttattcgtggggggtttaattacattacaagtggccaaaa

SEQ ID NO: 8470 - DNA, 188 bp, Homo sapiens
  misc_feature 3, 79: n = A,T,C or G
ctnctatagggcgatttggagctccccgcggtggcggccgaggtaccgtgatgtaatgctggacaccttcaggcttctngtctctgtgggacattggttaccgaagccgaatgtcatctccctgctggagcaagaggcagagctgtgggcggtggagtctagacttccccaaggcgtgtacctgcccg

SEQ ID NO: 8471 - DNA, 884 bp, Homo sapiens
  misc_feature 18, 28, 32, 34, 44, 49, 67, 73, 77, 81, 85, 91, 93, 95, 99,103, 107, 112, 116, 120, 129, 131, 135, 142, 144, 146, 148,150, 156, 164, 174, 184, 199, 203, 222, 228, 232, 233, 265,269, 291, 302, 303, 305, 330, 369, 383, 385, 388, 393: n = A,T,C or G
  misc_feature 400, 422, 431, 435, 438, 454, 459, 491, 492, 499, 525, 538,556, 557, 573, 581, 597, 606, 611, 622, 625, 628, 642, 674,675, 677, 680, 685, 688, 694, 697, 702, 739, 741, 758, 793,810, 815, 840, 847, 853, 855, 858, 861, 878: n = A,T,C or G
caacttaattaagagagnccgaaaaatntagngnaagtccttcncaacnccggccgaggtagagtcngagtcnccgnaagnttangtccangncnccangagnaaangaggnaagnaagnaccttgggngnaatngaggttntntntntnttaatncctaggtntaggcctttnttccttttanaaaatttccaaaagngggnccccgtctccgagtggccnccgagnaagnnaattgaggggttagggggaagagggggaaccnccgnggagcggaatttttttgtgggnaaaaaccttcnngnaaaaaaaacccggaaggcccttggnaaggggggggaaaagggggggaaagcccccttggttggnggaaaaaaattaangnaanccttnggggaangtttcctttgggggggttaagntttgggttnccgnttntttttccccttaaagnaaagnaaaaaattgggggttcccttcccgtaaaaagnnttaaaancctttttcctttcccgggggtttaanaaaaaaggattcnttttttccaacccggggnnaaaaatttttttttcncccaaggnaaaccccccaacctanccctttttngggcnccccccaaccnttnggngggggttagggggncccttttttttttaaagggggaaacccccccnngnaanataanccnggtttnggnttggncccaaagtggggccctttttttttttcccccaaaggncncccaaaaaaaaaattgngaaaaaagggttttttttaaaaaatttcccccccntttttttgggtttgggnaaacntttttttcccccggaaaccccccgntaaaaanggcccnanaanggnaaaaatttcccggcccnaaaaaa

SEQ ID NO: 8472 - DNA, 933 bp, Homo sapiens
  misc_feature 13, 195, 226, 324, 335, 372, 404, 412, 424, 428, 471, 476,506, 518, 527, 540, 554, 596, 613, 648, 658, 674, 678, 696,721, 732, 791, 869, 910, 923, 930: n = A,T,C or G
tactcactatagngggcgaaattgttagcttcccacccgcggggtggggcaaagaacaaggggaaagccaggggaactggtggaagccgccgggggccaaggtccggggggggggaaaagaatagggaaaccccaaacggggcccggcttctaagaaactaaggttgggggaatcccccggggggccttggcaangggaaatttcgaataattccaaaggcctttnatccggaataacccggtcccgaacccttcgaaagggggggggggggcccccggggttaccccccaagcctttttttgggttttccccctttttaaagntggaagggggntttaaaatttggccggccggcctttttggggccggtnaaattcaattgggggttccaattaaggccttngttttttncccttggttggntggnaaaaaaaatttttggttttaatttcccccggcctttccaaccnaaaantttttccccaacccaacccaaaaacccaantttaaccccggnaaaggcccncccgggggggggnaagggcccaatttnaaaaaaaaagggttggggttttaaaaaaaaagggcccccttnggggggggggggggttngggccccccttaaaaaaatttgggaaaagggtttngggaaaaggnccctttaaaaaaaccntttnccaaaccaaaattttttnaaaatttttttttggggccccgggnttttttggggncccgggcccttttccaaaacccttttggggccccccccccgggcctttttttttttttncccccaaagggttttcccggggggggggaaaaaaaaaacccccttttggggtttcccgggtttggggcccccccaaanggcccctttggggcccaaatttttttaaaaaaaatttgggnaaaaaattttccnggggggnccc

SEQ ID NO: 8473 - DNA, 414 bp, Homo sapiens
  misc_feature 38, 43, 50, 79, 82, 127, 135, 142, 147, 148, 153, 169, 211,216, 222, 255, 260, 270, 277, 314, 322, 364, 373: n = A,T,C or G
gggcgaattggaggctcccccgcgggggcggccgaggnactcngctcctncgatctggaggattccatgggaagggagncgntggtcttttcaaatctcagaactcccctcaggccgctcctacctnctctttanaatcttncagtnncatanaacaagagaaatactngcaagccttactgaatgctgtttctgtccatcagaaactcanaggcnacagcnctcttactgtcaggccagcctttgctctatctncaggngtgtgggcangtcttcnctctagcactcgcttgatcagctctccaacatccttnattgatgntggcgcccggctggcaggcaaggatcactcggactccttcantaacagcanctacctacaaaaccagctcttgaaacggcaagcagcccttt

SEQ ID NO: 8474 - DNA, 306 bp, Homo sapiens
cactacttagggcgaattggagctccccgcggtggcggccgcccgggcaggtacccagctgacctatgaacccacaatctgtagtatccatgctacagatgaagaccacaaagccatgaagtcgtccactggaggccttgggcagctatgcaaataggccacaagtgaagaaagctatattctgcattcatgctgtcccttgggccacgcagtttagctatgctgtccttcaaggtagcaggacccaggctggagtgcagtgaaactttgtctccaaaaaaaaaaaaaacaaaaaaaaaagtacct

SEQ ID NO: 8475 - DNA, 351 bp, Homo sapiens
  misc_feature 143: n = A,T,C or G
ccgcggtggcggccgcccgggcaggtacagttaaaaagttatacatagaaacttataatacagttctgtaaagctgaaagaactgtcaggaaaaagggagggtgttactttttttgattgatcattaaggaagttagaggaantaaaaaccacagtaaaaagggtttaaaacattaaggaacatttttcaggtataaattttataaatacaaaacaaattcacaaattactctcaatactaaataaatatctagttaataaacttggacttaatacctgcagtcagcactggtacctcggccgctctagaactagtgggatccccccgggctgcagggaatttccgaatat

SEQ ID NO: 8476 - DNA, 176 bp, Homo sapiens
ggcggccgcccgggcaggtacgcgggattgaaaatttatttcagagcggagaaacttaagctaaagtctgttatacagaattgaaagccttcgtatcttgaacctcccaacatttttcttatggctgttgaaaagtatagagctaaattgatttaattacactttcctttgtacct

SEQ ID NO: 8477 - DNA, 166 bp, Homo sapiens
  misc_feature 150, 154: n = A,T,C or G
ggcgaattggagctccccgcggtggcggccgaggtacttttttttttttttttttttttttttgggagaaggggtcacgggagcaccttacctctagtggacaagggccctgagctttacacagccctccgtatttattaggcaaaaganatangagggtgggggg

SEQ ID NO: 8478 - DNA, 364 bp, Homo sapiens
  misc_feature 2, 25, 60, 61: n = A,T,C or G
cngccgaggtacaataaattctatnattccattaaaatcctacatttattcccaggattnntaatttcacctccctacatctatactccactccctcagtaaataagtgaaaattgttaacccatgtgcccattcctgagtagggagctcttcacaagaggcccatgacaagaattctagggtccagattgaactttaatataggcctttgtctgtgtagaccagtttgtcttgtaaactgtcttacttatgtgtgtaaacattttacattcacatgaaaagttattttcctttatataattggattcagaatcataagggacaggactgaaattattctacagtaaccagtaagaataagatt

SEQ ID NO: 8479 - DNA, 222 bp, Homo sapiens
ccgcggtggcggccgaggtactttccaagaatgtcaccatctctaaataggaaataatccttgtcatctagaactactttggtgcctccatattctgggagaagaactttatctccaactttcacgctaactggttgaatctctccacccttttcctttagaacccgatccaacagcgactactgttgcttgcaatacttttccttcccgcgtacctgcccg

SEQ ID NO: 8480 - DNA, 440 bp, Homo sapiens
actatagggcgaattgtagctccccgcggtggcggccgaggtactaaatcttaagcaaattaaattcatgatattactaaaactttttaaatagtgcaatgacttatcaagttatagtggctgcattaagaacaaattattgtgtgaaatacctgtataaacacaaaatacaattaaatatttctttacaaaaagctgagcattacgcataatagtggaatgtctttcattaggtgtattttttaaagattaacaaaagtaacatttcctaaaatgtatacatgtgccatatttttgcaaacatgcctgagaatgtatttaaaacattttctgtagtaaagagtttgcaaggaacttcacaaacctgcaaataaaatgcatctttttaaaaaagggtggaaaatggcatctccaacactgcaacaattcaaaaaagtacc

SEQ ID NO: 8481 - DNA, 111 bp, Homo sapiens
  misc_feature 3, 6, 38, 63, 100: n = A,T,C or G
agngtncaaattaatataacacatcttatgataatctnatccttggtagttggaaaagacggntaaaatccaaaagtgtctattttgtgcccaaatgctnaagttaatact

SEQ ID NO: 8482 - DNA, 332 bp, Homo sapiens
  misc_feature 196, 266: n = A,T,C or G
cggccgcccgggcaggtacctgtgcacatttcaagatagcagcactcagtccatgccctattatccatcttaaaagttcacacattattgtttactgaataatatttctactgtctttacccccaaacattgcaaaacctgcaatggaacaatgctgtgagttataatgtagaaatttttttttttttttttttanaaaatcagttacttcattttcttaatattctgaattcaagttatcagatctctatacctaggtcatactnatgaagcaaaaatgctgcacaccactgaaaataataacgttatagatgtctatcaagattcatgaa

SEQ ID NO: 8483 - DNA, 178 bp, Homo sapiens
  misc_feature 84, 111, 128, 163: n = A,T,C or G
cactacttagggcgaattggagctccccgcggtggcggccgcccgggcaggtactttttttttttttttttttttttttttcgnaagggctatcgtagttttctggggtanaaaatgtagcccatttnttgccacctcatgggctacaccttgacctaacgtntttacgtgggtacct

SEQ ID NO: 8484 - DNA, 787 bp, Homo sapiens
  misc_feature 22, 29, 31, 38, 104, 129, 130, 144, 178, 220, 251, 275, 277,283, 320, 337, 356, 375, 380, 382, 383, 389, 390, 391, 414,415, 419, 423, 434, 443, 446, 466, 478, 479, 480, 487, 491,493, 497, 506, 526, 553, 563, 587, 593, 597, 614: n = A,T,C or G
  misc_feature 616, 622, 628, 649, 662, 678, 684, 690, 702, 768, 773, 787: n = A,T,C or G
gaaaaatcccgggccgaaattntttttcngncacaaancgccccgggccgggcccgaagggtaacaagaatcttgggggaaactaaaaaataatttaaaaaaanatggaaagtggtgtgtctggggaannataatgggggaagnaaatggttggggggcccaagaaagggaaacccgnaagaagaatccagaataatttaccaaaccaagcctttttggnttttggaaggggggttaaaggaaaaataatnggaaaaaatgggaattttgggggntnaatggnaaaaccgcccaccaaggttttaaagggccaagccaangggggccccaggaaaanccccggaaccccccccccnggccccccccggggggggntaaantnnttcccnnncccccccaaaacctttggggccnngggncccnccaaaaggggncaaaatccnacnaaaggaaatttcccccaaanttttttgggggnnntgggggngggncnaaanggggccccntgggggggggggaagggggnccccaccccaaaaaaaaaaattttttncccccccggnccccggggggatttttcccccccncccccnaaanggggggggaaaaaaaangngccccnaccaanccttttgggggcaaaaaaccntttcccaaatttntcccaaaaaaaatccntggggnaaaaantccccccccggntttccccaaaaaaataaaaaaaaattaaaattcccccaacccaaaacccaaagggggaaatccccnggggntttttttccccctn

SEQ ID NO: 8485 - DNA, 210 bp, Homo sapiens
  misc_feature 5, 16, 17: n = A,T,C or G
cttanggcgaattggnnctccccgcggtggcggccgaggtacagaccttttgcatgggtgagtggatgaaatggagaacagagtgagtgctgtgaacggtgtgaaatagaagccaacttctagtatgctgtcttcatctctgcaataaactaaacgtaaataatgtaactttgtataatttagtagtatgtacctgcccggacctgcccg

SEQ ID NO: 8486 - DNA, 254 bp, Homo sapiens
  misc_feature 200, 248: n = A,T,C or G
ccgcggtggcggccgcccgggcaggtacattgaccatctctggtgacacagttgaaggtgaacaaaagaaagaatcttcagttagatcagtttcttcagattctcatcaagatgatgaaataagctcaatggaacaaagcacagaagacagcatgcaagatgatacaaaacctaaaccaaaaaaaaccaaaaagaaaacntaagcagttgcagataataattgaaaaaaaaaaaaaaaaaaaaaaaangtacct

SEQ ID NO: 8487 - DNA, 354 bp, Homo sapiens
gtatcagttatcttagaaatgctatctaaactagaatgacatttgttcagtatgatatgttctttccctaactccattctaattgcttaaaaactatcaagtgaagttacaaaagttaaaccactaaatgtggcatcttttcttacacaaagtatcttctcttagaaatgcggtatttaattaagtaaaccttcttggtgaccccagttataatcaaaagaggccacgaaactacagactactgacgaaaagtgtcagtgcagacactttccatcaatcaacaggcagtccaagggacgcaagagaacacaagtctgggtaacatgaatttggtaagaaagcaggctaaacctc

SEQ ID NO: 8488 - DNA, 352 bp, Homo sapiens
  misc_feature 7, 169: n = A,T,C or G
tagggcnattggagctccccgcggtggcggccgaggtacttaatatggtgtcttgttcactatacttaaaaatgcaccactcataaatatttaattcagcaagccacaaccaagacttgattttatcaacaaaaacccctaaatataaacggcaaaaaagatagatttnatttattccagtttttttaaaacttaaaagatattccattgccgaattaagaagaagataagtgttatatggaaagaagggcattcaagcacactaaagaaacctgaggtaagcataatctgtacctgcccgggccggcccgctctagaactagtggggatccccccggggctgcaagggaat

SEQ ID NO: 8489 - DNA, 441 bp, Homo sapiens
  misc_feature 331: n = A,T,C or G
ctatagggcgaattggagctccccgcggtggagcggccgcccgggcaggtacgccatatatggtgccacctatatgcacagctttgtggtaaacgcgctgagggaactgaaaataataataaaaaataccctgctgtgtatggccatttaccaacacacacatatatattgagggtctactacggaacaaaaaggaatggggcagtggccggacgtgggaatgataaaggaaaaagaaatggccacaatgtgtctggtttgagtaacatgacagaaattagggggatacactgatgttcttcaggcatctttaaacacacctaaaacaacntgcatgccttagcccttctctactccttctccccacccctcccacatatccttcaaacccagacattctcccgtcttttcttacagtcacaataagcttatgcaggcatt

SEQ ID NO: 8490 - DNA, 140 bp, Homo sapiens
  misc_feature 43, 52, 61, 71, 136: n = A,T,C or G
tgagctaactcacatttaatttgcgtttgccgcttcacttgcnccgctttcnagttcgggnaaacctggtncgtgcccagcctgcatttaatggaattcgggccaaaccgccgccggggggagagggcgggtttgncgta

SEQ ID NO: 8491 - DNA, 407 bp, Homo sapiens
  misc_feature 1, 22, 38, 51, 398: n = A,T,C or G
nccggccgcccgggcaggtacnttgtcagtgtttactntgtcaaggatgantttggaaagtgtccctatctctgataccatcatcccagctgttcctcctcccactgacctgcgattcaccaacattggtccagacaccatgcgtgtcacctgggctccacccccatccattgatttaaccaacttcctggtgcgttactcacctgtgaaaaatgaggaagatgttgcagagttgtcaatttctccttcagacaatgcagtgggtcttaacaaatctcctgcctggtacctcggccgctctagaactagtgggatcccccgggctgcagggaattcgatatcaaagccttatccgattaccggtccgaccctcgagggggggggccccggtaccccanctttttgtt

SEQ ID NO: 8492 - DNA, 486 bp, Homo sapiens
  misc_feature 56, 58, 145, 464: n = A,T,C or G
gccgaggtactttccaaatagctggaggttcttttcctgtttttaaagcctccttntnagtctctatgtcttctatctttaccacaaattcatcacgctctctgtattggccttctcctccgctttctgtgtcctcctcatctgnaaaccttctatggcaacagtgtcctgtccttttgcaaactggtctgaaggaagaccatcaagttcaatgggctttgaggattctgaagagtttatattttccagaatatttactgcatatgaagtagagtggagaggttcttgcttaactgcacccacagtggttgaggaagtagtagcagtacaaaagagttatcaaaaacagaccttactgttatgctttgaaagaccagcttaaaaagtctgcccttttgctggagtctgggaacttagatttcaagagagttcctaccacctaactggtaagaggagctcactgngcctaaactgtttatgtacctt

SEQ ID NO: 8493 - DNA, 429 bp, Homo sapiens
  misc_feature 161, 234, 290, 291, 292, 306, 307: n = A,T,C or G
agctccccgcggtggcggccgggggcattcgtattgcgccgctagaggtgaaattcttggaccggcgcaagacggaccagagcgaaagcatttgccaagaatgttttcattaatcaagaacgaaagtcggaggttcgaagacgatcagatacccgtcgtangtttccgaccataaaacgatgcccgacccggcgatgccggcggcgtttatttcccatgacccgccgggcaagnttccgggaaaccaaagtcttttgggttccgggggggagtattggttggcaaagctnnnaaaaaaaaaaaaannaggtacctcggccgctctagaactagttgggatcccccgggctgcagggaattccgatatcaagcttatcgattacccgtcgaccttcgaggggggggccccgggtacccagctttttgttc

SEQ ID NO: 8494 - DNA, 271 bp, Homo sapiens
atgcaaatgtgggtgaccttcgtctcgggcttcctgcttttccgaagccttccccgacataccttcggactagtgcagagcaaactcttccccttctacttccacatctccatggactgtgccttcatcaacctctgcattcgagcggccgcccgggcaggtactttttttttttttttttttttttttttttttgggctttggtgagggaggtaggtggtagtttgtgttaaatatttttagttgggtgatgaggaatagtgtaaggagt

SEQ ID NO: 8495 - DNA, 381 bp, Homo sapiens
aggtacttggatcaaatggctacattaattggtcagggaagattatgaataataacattgtgtggaaatgacccagataaaatcactgttcctttcaacaagcaacaggttagacaagcctttatcaattctggtgcatggcaagattggtcttgccgattttgtgggaattattgacaatcgttaccccaaaacaaaaatcttccagtttttaaaattgactacttggattttacctaaagttaccaaacataagcctttaaaaaatgctctggcagtgtttactgatggttccagcaatggaaaagtggcttacaccgggccaaaagaatgagtcatcaaaactcagtatcacttgactcaaagagcagagttggtttg

SEQ ID NO: 8496 - DNA, 418 bp, Homo sapiens
cgcgcgtaataccgactcacctatagggcgaattggagctccccgcggtggcggccgaggtacacaaagctgaaataaacaaacattttttcataaagctgactcaaagaccctaggagacttttgtagaaagtgaaatagtaaaggcactacataattctttctcctaactctacttactaaaaaaatccaccaattaaacttggcacaaaagagtttaattatcataaagtgcatcacttggctaaatatattaaaaagaaaatcagccataatacagtataacaacatcttcacacaaatagaaataaaaatgcaatgtcaggagtcaagccagttaggaactttgcagtatatatggctttttattttcttttttgtataagcccctatttatttcgaatctatattttcgaaa

SEQ ID NO: 8497 - DNA, 819 bp, Homo sapiens
  misc_feature 12, 21, 48, 63, 84, 111, 121, 135, 138, 141, 147, 151, 166,173, 293, 304, 355, 359, 368, 423, 453, 460, 505, 528, 578,618, 649, 654, 656, 733, 740, 783, 793: n = A,T,C or G
tcacttattagngggccgganattggggaagcctccaccgcgggtggngccggggccccgagngttaacttccaggttaaaggntggtttttaaaatgggaaagaaaaggnagaaccaggnatgggggaaaaggnagnatngggggnccgnagggggaagggggcntgggatnggtttaaccaaaattaattaaaaaccttttgggtccaaggccacctttttcaaaaaaaaccaaaattatggccaaaaattaaccaacctttaaaaaaattaaccaattaacccaaaaaanggttttttaanttttaaaaaaaaaattaagggggtttgggccaaaaccttggaaaaaattanccanggttaaggnaaaaaattggggaaaaaaaaccttaccaaggcccaaggttttttttggggaattngggttttttttccttccaatttaagggttnaaaattngggcccaaggggtttttcctttgggaaaaaaaaaaagggcccaancccttttttttttttaacccaancccaatttaaattttttcccaaacccaatttttttttggggaaccccccntttccaaccctttggggccccccccaaaaaaaaaaggggnaaatttgggggggcccccaaaaaaaaatttnccccnancctttttttggggttgggtttaaattttggggggggggggggttttttttttcccaaacccaaaaaacccccccaancccaaancccaattttaaccccaaaaaaaatttaatttcccccccccttnggggtttaantttggggttaaaggggaaattttaat

SEQ ID NO: 8498 - DNA, 201 bp, Homo sapiens
  misc_feature 25: n = A,T,C or G
actacttagggcgaattggagctcnccgcggtggcggccgtcgctcccctgctcctccttggtggctctgtttggagacagggcaggtgaatgctccctggatctgttgctctttttccttcagccttcgggctgacactgactccagctttaattcataaagtaaatatccccgcgttctgcccgggcggccgctttaaa

SEQ ID NO: 8499 - DNA, 577 bp, Homo sapiens
  misc_feature 1, 4, 14, 15, 17, 18, 22, 26, 28, 36, 44, 46, 54, 60, 63,65, 131, 172, 209, 212, 220, 224, 226, 234, 257, 272, 278,286, 295, 314, 323, 324, 331, 338, 345, 347, 358, 364, 384,385, 391, 408, 423, 425, 433, 447, 448, 459, 460, 479: n = A,T,C or G
  misc_feature 505, 518, 528, 532, 536, 559: n = A,T,C or G
ncgnggtaccaacnngnntgtncccntnaacttttnggacaccngngatttgcntactgngcntntaaagccatctttacgcacgtccatcggtgaaagaaaacggtctctttcaccactaattaagtttnctccagtgggaacaaagattgagaaccacaataggcatgtnagtcttggaagaactaccctaaattgaaaagggaagntcnaagccggnccgncncggggcangggtacaacaggtctggcaggcncactggaaaatcaanggaaantccgtagnatggtacantaaagggtaaaaatggccntctttttannaaaaccntaaaaantttgccntntcactttttgnaagggnaaaaaaaaaaattggccacnncgctgntttttgaagattttctnttaaattattttacntntcaattcntcttaaaagtttanntaaccccaatnntttgaattgggtgatttcncctttttaattataaggggtatagtnggttggcctttcncttaaggccnaccntggnggctttgctttctcctttttgcnccagggggccaatttgga

SEQ ID NO: 8500 - DNA, 218 bp, Homo sapiens
  misc_feature 6, 73, 93, 120, 143, 174, 178, 182, 196, 207, 208, 217: n = A,T,C or G
ctatanggcgaattggagctccccgcggtggcggccgaggtactttttttttttttttttttttttttttttngcagctgggccaccgggggngacatcacgtattggtaggtccatgangcccccctgagccacaaaaccancaagtttttattagggattttaaaaggggangggntgtntgaacagggagtangtcacaaaaannacatgcttna

SEQ ID NO: 8501 - DNA, 288 bp, Homo sapiens
  misc_feature 50, 277: n = A,T,C or G
gactacttagggcgaattggagctccccgcggtggcggccgaggtactangggtgtgtaaacaagtccacctgaatagagacttctcccacaggatcgtccacaccagacccttgggtggtctgcgagcgcacaaaggtcttgatgagagtgtcagtagtctgtgtgtacaaatacgaaataataaaatttagtgctacttggatttcaagctgcatagttgctacgccacaaaattaggtttcaactcccccaccaaaaaaaaaaaaaaaaaaaangtacctgcccg

SEQ ID NO: 8502 - DNA, 404 bp, Homo sapiens
  misc_feature 323, 330: n = A,T,C or G
ccgcggtggcggccgaggtaccagctgagttcagatgtttcacatcaagaatacccaagatcatcttggaaccaaaatacctcagacataccagaaactacttaccgtgaaaatgaggtggactggctaacagaattggcaaatatcgcgaccagtccacaaagtccactgatgcagtgctcattttacaatagatcatctcctgtacctgcccgggcggccgctctagaactagttggatcccccgggcctgcaggcaattccgatatcaagccttatcgatacccgtcgacctcgagggggggggccccgggtaccccagnctttttngtttcccttttaagtggaggggttaaattggcgccgccttgggcgttaatcaatgggtcataagcctggtttcc

SEQ ID NO: 8503 - DNA, 141 bp, Homo sapiens
  misc_feature 134, 136, 139: n = A,T,C or G
gctccccgcggtggcggccgaggtacgcgggggcgtttgagtcgcttcggcacccgtagttgtgaactttgacagcggctggtccccggaagttggacgcatgcgccgtttctctgcatggtgtgcgttctcgntntanct

SEQ ID NO: 8504 - DNA, 201 bp, Homo sapiens
ccgcggtggcggccgtcgccaccaacgcgctctcccaaccctcggagtcatgttccaaaaccaaaccaaaaaggaggagagcagacaaggcttcagcctgcgactgagaacagggaggcggcgcgccttggggaacgagggcccgaggccatacgcgctaatacaggccagtgtcggcgtaaactttctccgttaccggcc

SEQ ID NO: 8505 - DNA, 317 bp, Homo sapiens
  misc_feature 77, 78, 275, 288, 289, 290, 295, 297, 299, 300: n = A,T,C or G
tatagggcgaattgttagctccaccgcggtggcggccgaggtacatgtttataggtgggaccaattttgcctattgnnatggggccaactcaccctatgcagcacagcccaccagctacgactatgatgccccactgagtgaggctggggacctcacttgagaagtattttgctctgcgaaacatcatcccagaaagttttggaaaaagttacctgcccgggccgggcccgcctccgacagggaaatttccgaatattaaagccttttaatcccnaatacccggttcnnnaaccntntnnaaggggggggggggccc

SEQ ID NO: 8506 - DNA, 273 bp, Homo sapiens
  misc_feature 11, 12, 13, 21, 29, 33, 37, 43, 54, 63, 67, 71, 79, 86, 92,98, 100, 106, 116, 129, 133, 149, 152, 155, 160, 161, 165,169, 177, 182, 185, 194, 198, 199, 204: n = A,T,C or G
aggtacattgnnncttatgtnactgaatngtcnactnacaacncttaaggtacngtgtctctngacncttnacttcttngctggantgttcncagtgntnatacanaagttccatnttccactactggntctncatcactttctggatnctnttntttanngaanactncagcctgnggttncanctgaggaantggnnacagnacctgcccgggcgtctggggttttaccccactcatcttcagctggcttcttgatgtcctggaagagagc

SEQ ID NO: 8507 - DNA, 328 bp, Homo sapiens
  misc_feature 255, 275: n = A,T,C or G
ccgggcaggtacgtagttgtctttcgtaagttaaaatgataattgggccgaaacttactgccttacctaaaaggcagcgcagtcaggatattggtaggtcgggggcggctttggaaacccttaagtttacaaagcatgccccggacttgagtgctcattaaggtcgcccgggccgtccacgtgcagccctggaccctgaacccccggccgtgcgtgggcccgtgggcccctcggggggaaaagggttcccgtgcnactcgggggactcccgggtnaaagcctgtttcaagcccgttcttgttgtcattggttgggcccattctttgga

SEQ ID NO: 8508 - DNA, 239 bp, Homo sapiens
ctacttagggcgaattggagctccccgcggtggcggccgcccgggcaggtacctacatattaagttgaatggactgttctatttaaaaaataaacaactagacaattaactagtttattaacctatcacaattgaatttttttttaattttcagtcttaacacattttttaaaatgtattaaagtaatacattgtagtagtaggattatatactccttggctgagaattccaagtacct

SEQ ID NO: 8509 - DNA, 416 bp, Homo sapiens
  misc_feature 22, 49, 50, 275, 384: n = A,T,C or G
gccccgggcaggtactattatncagtagtagactgtgattctccggaanntgctagtaaaatttatgaggattgtgatggcctggaatttgaaagtagttgttctttcatagatctaaggtttataccagatgatattacttttgatgatgagcctaaggatgtagccctcagaaagtgaatttaacagcatataaacccaaaaatatttcacttctgctgcaaatgggaacatcaacggttggaaaatcacttgggtattgagactgatcatgnaaagaattacaatgctcaaacagggaaagtttaaaaaaagggaagagcttttgggacatgggatttttcaaggcctaccttaggctttcctctagttgaaagattgaangagggagaccagtaagtagggagcctaccaag

SEQ ID NO: 8510 - DNA, 277 bp, Homo sapiens
  misc_feature 213, 214, 216, 218, 220, 224, 225, 233, 260, 265, 269: n = A,T,C or G
gggcgaattggagctccccgcggtggcggccgaggtaccggttggtaatgctgtagttgtctgacggctcatttctgaaataaatacataaggaggcaggagaaaaataattataaccatgacttactttataaataatgtttacatgccataagtccttttaaagtttcatacaaaatttactgagcaaaagaggaagaaaaataggattannanancnaaannaaaacacnaaatttgtgcctgcccgggccggccgntctanaacnagtggatc

SEQ ID NO: 8511 - DNA, 350 bp, Homo sapiens
  misc_feature 172, 205: n = A,T,C or G
cttagggcgaattggagctccccgcggtggcggccgaggtactttattttggagccaaaaaattgattctggggggtgggggcagcgtagaagtggtatatccaagtatatcagctactgtagttgtcacagtcttgtgaactttgaatgaaattccactttgtcccaaatngggaaaaagtgggaaattttattttggatttanagcaggtctttttttttcttcattgtaatctgcaaaatgtagaaataaattacttaaggcagtatcctttatacagttgtataaactgtattttgaaccaaaacatataggttactacttaatgcttacctaatttcatttctag

SEQ ID NO: 8512 - DNA, 401 bp, Homo sapiens
  misc_feature 3: n = A,T,C or G
ctncttagggcgaattggagctccccgcggtggcggccgcccgggcaggtacagctggtgtttagtttttttttaatctaaatttaattaccttattggatatttgatatttggttatttaatcacagtcatctttaacagcttacactgattggtgttttatctcctgtgatcctttgatggctttttttgcctaccatttcacagaggtttagacagcagtagtagctccctaggagagtttactgatgaaacagcctctgcaagattttaaaagttttgttcttttatagactgatttagaaaaacaaatgattagttaaaaaaagaaaatatacatttgttggtaactaatgttattttttaaaacctggacctttctggaagggcagcatataaaa

SEQ ID NO: 8513 - DNA, 363 bp, Homo sapiens
ccgcggtggcggccgaggtacacatgtataccacgcacccactcacacatacacacacgcactttggaccaacatcatttccaggttcaggaaatagaggatcataatttctgtgacaactcatttttgcaggtacgttagtgttcgcgattttaaaggcaaagtgctaattgatattagagaatattggatggatcctgaaggtgaaatgaaaccaggaagaaaaggtatttctttaaatccagaacaatggagccagctgaaggaacagatttctgacattgatgatgcagtaagaaaactgtaaaattcgagccatataaataaaacctgtcctgcccgggcggcccgctctagaactag

SEQ ID NO: 8514 - DNA, 569 bp, Homo sapiens
  misc_feature 41, 44, 45, 108, 388, 486: n = A,T,C or G
cgagggtactactcaaaccactttctaagggtatggccaangcnnagtttgaatgttttggaacacaccaggtaatgttaaagattcaccagttttccccttggaatnaattctaataaaatcttccacagggtaaataaaaataaatttctctccccttttactcttcattatttttagtctcaaaagcctcatatactgttccaatgaaacaagaattgactctgaaccaaaaccaaaaagaagggaagaaaatccagagtattctatgatgccctgttaagtattagcgtgtggcttccacaaagaaagttgtcaaactgtgcaaattcaaaggagtgagttcccaattgcaagcccagcccatttcttttgggaaaattcacangggatggtctgtccacaagagaccttggcatttcagcatgccagaggcgaaaatgacccttaatagttaaccgtggagtgtataccattttttgctgnaacttcaacacgtcctaaagcatatataatccatccagctaaatcacctggaaccctgtaagaaccattttgcaaaaatccaa

SEQ ID NO: 8515 - DNA, 275 bp, Homo sapiens
aggtactaactcatccagtatctgattctgtcttttcctctatccatctgtcttccatctttgcatccatcattcaacgaaatttacagcctatgcagatgttctgtggtcttaaacatgttgtattccttattaatgcccacctctttgccttggccatgcttcctcccctcccagccgttgttctcccccacgagaatatcttctcttttctgcttcttagtggttctattctcagtatctgaaactctcattttcccccgcgtacctgcccg

SEQ ID NO: 8516 - DNA, 202 bp, Homo sapiens
  misc_feature 10, 196: n = A,T,C or G
gtatacactnctatagggcgaattggagctccccgcggtggcggccgcccgggcaggtacaattgtgggcataaactgtttcagattttttatttgaaggttttaagtggtttgatcatttcttgtgatgttttgagagtaatgcatacagaaatataataaaatgtgttgaaacaaaaaaaaaaaaaaaaaaaangtccct

SEQ ID NO: 8517 - DNA, 414 bp, Homo sapiens
ctatagggcgaattggagctccccgcggtggcggccgaggtaccctaaaacttaaatgtataataaaaaaaaaaaaagaaaaaaaaagattttcaacctgaatatacccagccaactaataggtaagtgtgagggcacactgtagacatgtttagatgttaggatcagaatgcttactgttcatgcatcttttaaaaaaattgcttcagggaaataaaaaaagaatacaagaaagaggacaccatgggttgtaaaagaagggaaagatgtgaaaatttcagaaaataaaagtatgttttataaaattaatgcctctcctttgaagaaataaaaccaggtattgttgacaggattgccactagtgattgaaactggttaggaagacctttcactttgcattttatactcttctgt

SEQ ID NO: 8518 - DNA, 338 bp, Homo sapiens
gagctcccgcggtggcggccgcccgggcaggtaccttgtgatgaatgttaataggtgtttttattatacaaagctgaatgtcatttctcgtttgtggctttctgtcactcattccatcttccttcagacatcaccacagtttctctaaagtcagaaaacattccgttttggtctttttcaaaaaggtcccaaatgctgcactctacacatgaaggccctctcacacagacgtgacgtcctgccagaaagagaatgaatgacagaaaaaaaaagagagacaaactctaggaacaatgccgattcattccacgcagcagtattgggggtggttcggggga

SEQ ID NO: 8519 - DNA, 429 bp, Homo sapiens
cttagggcgaattggagctccccgcggtggcggccgaggtacacagtatttttttatatctatgttttctgttctctggcgcaagatattctgcacctgggtgctttcaggccttgaccaaatagcatgaatagtaggaaatgagaactttccctctgtcagatctcccgcgtacaattaagtatattataaaaattgtaaaactactactttgttttagttagaacaaagctcaaaactactttagttaacttggtcatctgattttatattgccttatccaaagatggggaaagtaagtcctgaccaggtgttcccacatatgcctgttacagataactacattaggaattcattcttagcttcttcatctttgtgtggatgtgtatactttacgcatctttccttttgagtagagaaattatgtgt

SEQ ID NO: 8520 - DNA, 185 bp, Homo sapiens
  misc_feature 74, 76, 81, 120: n = A,T,C or G
tacttagggcgaattggagctccccgcggtggcggccgaggtactttttttttttttttttttttttttttcananaaacnaatgcattttattttaggtaacaaaagtagagtcaagtnttttttcaaagttcatatacaggcacagtctcagtgaactggcgtcagggcctcgtacctgcccg

SEQ ID NO: 8521 - DNA, 457 bp, Homo sapiens
  misc_feature 14, 15, 21, 47, 49, 50, 62, 65, 76, 101, 102, 131, 181, 190,191, 303, 331, 420, 421, 427: n = A,T,C or G
ccggcgaaattttnnggaaanatcccggcggccgcccgggcaggttntnngggccgggtttnggngaaaccttttnaaaccgagaggagaagatgactacnncatggatgaaaatgaagcacgaatctganacagacaagcaagcagccctggcagggaaatgacagaaaacatagaatgnttttaatgnngaagatcagaaaagagacaccataaatttacttgatcagcgtgaaaagcggaatcatacactctgaattgaactggaatcacatatttcacaacagggccgaagagatgacnataaaatgttcatgagggaccgaatacngaaaactgtgaaatgtacctcggcccgctctagaacctagtgggatcccccgggcctgcaggaaattccgatatcaaggcttatccgannacccgncggaccctccgaaggggggggggccccccg

SEQ ID NO: 8522 - DNA, 413 bp, Homo sapiens
ctacttaggggcgaattggagctccccgcggtggcggccgcccgggcaggtactccagcttgtatgacagaatgtgaccttagttttatctaagcatgaatatatatgccaccataagttgaccccttgtcgacttcacacctacacatctccttacgccatactttatctctaaagacaatagcaaagtaataattttgcctaatgtgataaaactcttctgcatacaaccaaaaaatgcactaagcccttccccagaagtggatgtaaaattctccagtgtttacacttctccttggtattccataacttaaataccataatgtaaaattaacaatacttaatacaatgatataaagtcaatatgccttaagttatgtaataaaggaatatgagagaaaaggcaaaaaaaa

SEQ ID NO: 8523 - DNA, 440 bp, Homo sapiens
  misc_feature 124, 171, 173, 184, 187, 207, 208, 209, 210, 213, 214, 216,221, 226, 228: n = A,T,C or G
aggtactcacgcagcattcgtgccagctcctccttggcctgctgcagggcagcctccagctctacgcgcttgctgtgggcatctttaagggcattctcacctcgctgctctgcatcagcccacnggatacctgaaagaagtcttggcacctgcttctttgaatgtttctcnancctcttgcccncancctcttgaataatccctgtnnnnctnngnaattncactntngggtggttcttcaggttgtcaccatgttggtcaaccgagatctggagctgctggaccttggtctggtacgcggggcctctttccctaagcagcctgaggtgatctgtgaaaatggttcgctattcacttgacccggagaaccccacgaaatcatgcaaatcaagaggttccaatcttcgtgttcactttaagaacacttgtgaaactgctca

SEQ ID NO: 8524 - DNA, 109 bp, Homo sapiens
  misc_feature 44: n = A,T,C or G
tgtcgtgccagcttgcattaatggaatcggccaaccgcgccggnggagagggcggtttgccgtattggggcgcctcttccgctttcctcgctcacttgactccgctgcg

SEQ ID NO: 8525 - DNA, 223 bp, Homo sapiens
aggtactggtatctatccaggtgtcggacccgtagatcatagtgataggcacatcttttcgaatcaagtgaattcgctccagcatagggcgccgggcccagccaaaggactccatcatggctttgaatgctgtctcaccactgggattctgtgcgttgcagtggtaaatatactctgatatggtatcatcttcaaagaagtctgcaaacttgcgtttgaagtc

SEQ ID NO: 8526 - DNA, 159 bp, Homo sapiens
  misc_feature 154: n = A,T,C or G
ccgcggtggcggccgaggtacacatgagcaaaggagctgagggccagctcacaaagggatatttgatcctcagtcaagagagaagctaaaagcgcatgctgcaggagtaacctaatggatttatttggacgctcttagaactagtggatccccngggct

SEQ ID NO: 8527 - DNA, 383 bp, Homo sapiens
ccgggcaggtactccatgttggttggtagtattttaaatctgaagcattttcagagtctaaggcaattcagactgcacagctgtcaactcaggagtcccattaaactgactctaaaaattcctaaaagaaggcatgatttattataagcaaatggctaacctggcttttttggtaatagaattttaaatgaaaataaaattatacaagatacacattgtttggatttttaaaaactctattaaatgtttaagtggttgtgaatatgaggaataattaaatgttaaccccagctgattagtgaacatataagaaaatggggggaactgatcccaaaagatcttctcttctaaggagaacttcacttgaggggcaaacactagaa

SEQ ID NO: 8528 - DNA, 404 bp, Homo sapiens
  misc_feature 263, 291, 305, 318, 349, 382, 392: n = A,T,C or G
ctatagggcgaattggagctccccgcggtggcggccgaggtactatttcacaggcatctaaaattatgctaactttcaaaaacaaggaggtcatttttcagaaattctgagcctgtcagagaaactaaatggtatttcatcagttgtctctactggcacattacttctactaaaatgacatgaagcatggtgagcgaaacttgaaataaatgcatctggagtccggccgaggtacttttttttttttttttttttttttttgnatcattctagatttaagagacaaggaanagcttctcaggcanaaggaataatgtntgcctgacatgttcaaggaattacaagttanattttgtttaggtgcatgggaggggttgatggntgattgacanataaggctggag

SEQ ID NO: 8529 - DNA, 266 bp, Homo sapiens
  misc_feature 45: n = A,T,C or G
gcggccggtggccgcgcttaggtagcgcaactttcgcagaagtcntttaaaagtgtgcgacggggaccctaaggccgccattgtcctgtccttttcccccgcgtacaaggtgctgaaacaggtccatcccgacactggcatctcttccaaggccatgggcatcatgaattctttcgttaacgacatatttgagcgcatcgcgggcgaggcttcccgcctggcgcattacaacaagcgctcgaccatcacctccagggagatccaga

SEQ ID NO: 8530 - DNA, 202 bp, Homo sapiens
cactacttagggcgaattggagctccccgcggtggcggccgaggtaccactaaacttagatctatggacagctttataaattatccaggtgcacctattacccaagtcaagaattaaattagcataaaaggggtttgttatcggtcccaaaatacttgtgatggttcaaatagaccaagaagtggaggattagaagtaaagc

SEQ ID NO: 8531 - DNA, 423 bp, Homo sapiens
  misc_feature 296, 364, 365: n = A,T,C or G
ccgcggtggcggccgcccgggcaggtactactgcttattttcctcctggagccactttaaataacaaagagaaaaacagtattttgtttctcaactcattggatgctaaagaaatatatttggaagtaatacataatcttccagattttgaactactttcggcaaacacactagaggatcgtttggctcatcatcggtggctgttattttttcattttggaaaaaatgaaaattcaaatgatcctgagctgaaaaaactaaaaactctacttaaaaatgatcatattcaagttggnaggtttgactgttcctctgcaccagacatctgtagtaatctgtatgtttttcagccgtctctagccanntatttaaaggacaaggaaccaaaagaatattgaaaattcatcatgggaaaggaaagaa

SEQ ID NO: 8532 - DNA, 938 bp, Homo sapiens
  misc_feature 27, 36, 39, 53, 115, 152, 319, 335, 364, 409, 411, 416, 421,423, 424, 427, 432, 433, 435, 439, 449, 474, 483, 504, 512,514, 590, 611, 651, 668, 710, 713, 733, 775, 809, 824, 860,872, 883, 890, 923, 929: n = A,T,C or G
tggggggccggggcccccggccccccngggggccanggngttacccccttttnaaacccattccttggttttgggagggaaaaaaaattttacccaaaaaattaaaaaaattaanttgggaattggcctttaaaattaaaaaaattgggggncccaacccttgggaatttaaaacctttccaaaggttaagggccccaatttcctttgggaaaaattaaaggttccaatttggccggggggttttttaaaagggaaaaattaacccaaatttcccccttttgggttaatttaaaaaatttccttgggaacccaattaanccaaaaaaattttttngggttccaaatttttttcccccttggccnaacaaattggccaacccaaccccaatttttgggtttttaaaaaananaaaanaacantnnaanatatnnanatanaatataaaanaggggttaaccccctttcggggggnccccgggcntttcttaaagggaaaaaaccnttaagggntnggggggaaattccccccccccccgggggggggccctttggccaaagggggggaaaaattttttcccgggaaatttnaatttccaaaaaaagggcccntttttaaatttcccgggaaatttaacccccccgggttccnggaaaccccctttcccnggaaagggggggggggggggggggggcccccccccggggggnttnaacccccccccaaagggccnttttttttttggggtttttccccccctttttttaaagggttngggaaaggggggggggttttttaaaaaatttttngggcccggccccggncccttttttggggggcccgggtttaaaaaatttccnaatttggggggnttccaaatttnaaagggncccttggggggtttttttccccccttgggggtnggggtngggaaaaaa

SEQ ID NO: 8533 - DNA, 551 bp, Homo sapiens
  misc_feature 534, 535, 539, 540, 542: n = A,T,C or G
tggcgaattggagctccccgcggtgggcggcccgcccgggcaggtacgcggggcttgaaggaatcccttaagtgcacgtctcccgttttcttttcacatcaatgcagagtccctctgtgaatttacaacacccaacacccatgagccactgcgcctggcctcagaatgcattcttcacatctatcctagacatttataagcactctaatggataacaatccaagaataaatgattgtaaaagatgatgccgaagagttgatgtcaatctttttttcctaagaaaaaaagtccgcgagtattaaatatttagatcaatgtttataaaatgattactttgtatatctcattattcctattttggaataaaaactgaccttctttaatcatatacttgtcttttgtaaatagcagcttttgtgtcattctccccactttattaagttaatttaaattggaaaaaaccctcaaactaatattcttgtctgttccagtcttataaataaaacttataatgcatgtaaaaaaaaaaaaannggannanaaagtacct

SEQ ID NO: 8534 - DNA, 404 bp, Homo sapiens
  misc_feature 393: n = A,T,C or G
ggagctccccgcggtggcggccgcccgtgcaggtactggtccctcataatgcagctggaagggttacgtgttatatgtgtgttccagttgcttctttcctttgaagaaactgagagacaaagtttacatcatactgattttgcaccacaccaagtagagaatttgtgggtagatgtctgtaatctctttgagactactcaatctgaaactgaggcgataacttctgaatgtttccaagtttgaaaatcacctattcttgctggacgcggtggctcatgcctgtaatcccagcactttgggaggctgaggcgggcggatcacctgaggtcgggagttcgagaccagcctgaccaacatggagaaaccccgtctctagtgaaaatacaaaattanacgggcgtggt

SEQ ID NO: 8535 - DNA, 107 bp, Homo sapiens
ccgggcaggtacgcgggggacatgcagcccgcactcgcagccctggcaggcggcactggtcatggaaaacgaattgtttctgctcgggcgtcctggtgcatccgcag

SEQ ID NO: 8536 - DNA, 197 bp, Homo sapiens
cttagggcgaattggagctccccgcggtggcggccgcccgggcaggtacgcgggattctagaagaaaattttcatagaagaaaatgatttatggccaaagttacagaacattcatcttttagacttagccttagaatatcattggaaattacttggcttgaatttggttcgtttttatctttatggattatgtacct

SEQ ID NO: 8537 - DNA, 154 bp, Homo sapiens
gggcgaattggagctccccgcggtggcggccgaggtactttactccctatagagaaaccattgccatcattgtatgcaagtgctggaatgtcccttttttcctatgcaactttttttaaccctttaatgaacttatctgttgagtacctgcccg

SEQ ID NO: 8538 - DNA, 304 bp, Homo sapiens
  misc_feature 123, 194, 240, 253, 256, 276, 287, 289, 291: n = A,T,C or G
gccttcatgctcccggtctcaacgccccccaactccatcgccttcgcctctggacacttgctggtcaaagacatggtgcggacaggcctcctgatgaacctgatgggtgtcctgcttgctcantttggctatgaatacctgggcacaagaccatcttcccagctgggcaccctttcccggactgggcttgatantgtaccttggcccgtctaagaaactaagtggaatccccccggcctngaaggaatttccnatnttcaaagctttattcgaatncccggtccgancntngaagggggggggc

SEQ ID NO: 8539 - DNA, 375 bp, Homo sapiens
aggtacatggagaataggcatatagccactaggctacatgaacacgtcacgtttgtattttgtgttggcctatgtataagccaatctagcatgtttgagggcatgtgtgagagtaggtaagggagctgtaagttacattcaggtgggaatttagggctttctgcacaaaaaattctaatttctctgtccttttgctatgttgcatctcccagtgttgacaggttagtctgcatgattaataactgagcagctgtagagccatgccagtaagtctccaattcctgaacgtggccacatttgtcttttgatgtgactttcaaccacaagccacaaagtaagtctttcactaggctccgttgacttcagtctttatat

SEQ ID NO: 8540 - DNA, 384 bp, Homo sapiens
  misc_feature 46, 129, 205, 268: n = A,T,C or G
gcgcccgggcaggtacagtagtgcactcttggctcactgtagcctntacctccggggctcaagtgatcctcctgccttagccccacaagtagtgggactataggcacacagcaccatgcccatctaagnttttgtattttatgtacgtcgagcggccgcccgggcaggtaccttctctccttccctggctctgaacatcattcanaacaggaacatggggaagccagcccagcctgccctgagccgggaggagctggaagcactcttnctcccctatgacctgaagcggctggagatgtattcacggaatatggtggactatcacctcatcatggacatgatcccggccatctctcgcatctatttcctgaaccagctggggga

SEQ ID NO: 8541 - DNA, 136 bp, Homo sapiens
  misc_feature 7, 39, 54, 66, 69, 98, 118: n = A,T,C or G
taggttnaattggagctccccgcggtggcggccgaggtnctcgggaaccaaatngctctgcacaanttnatattgttatctccaacaaagccgcaggngctgggttagataaagcggnaagagctggtattcccac

SEQ ID NO: 8542 - DNA, 948 bp, Homo sapiens
  misc_feature 3, 29, 30, 37, 41, 46, 54, 66, 70, 78, 86, 112, 120, 164,176, 181, 201, 213, 241, 243, 245, 271, 295, 410, 446, 454,457, 495, 551, 557, 560, 563, 587, 610, 612, 619, 621, 629,641, 655, 656, 662, 672, 688, 697, 698, 722, 729, 734: n = A,T,C or G
  misc_feature 738, 743, 796, 829, 833, 841, 849, 863, 870, 875, 884, 888,900, 908, 934: n = A,T,C or G
gtntggggccggggcccccgtaagggttnnccccccntttnggganagtggttncccctgggtggncttntccccttncaaaaatnaatcccgttggggtttggaagggggntggccaangggcccaccttaaaaagggggaaagttggggggggggttggaancctttttttaanggggncccccttaaccaatttgggnggaaaggcccanggaaagggggaaccaaaaaacctttggnangnccaaggcccaacccggaaaggtaagngggggaaaggggggggaaaaaggnaaaacctttggaaacccaagggttggccccccccttggggggggaaattcccccaaggttcccccttgggttaatttggcccaatttcctttggcccttaaaaaaaattaaattnccaatttttaacccaacccaaaaaggggttgggttnaagggttnaangcccacctttttttggcccaaccctttgggggtttttngggccccctttttcccaaaaaaagggaaaaaattttttaaagggggggaaaaattngggttnttnggntttttccctttggggttcccaaangaaaaggggggggccccgggggngngggcaananatttgggnaaaaaaaaaaancccaaccctttttnngggttnccaaaaaaangggttggggttttggncccaaaggnntggggttttttttggggaaatttnatttaanaggtncccnaaggncccaaaaaccctttaagggggggggggaaaggggggttttttcctttaaaaanccaaatttcaacccaaacccaacccttttttgncctnccggcccnggttaaancccccctttgggcnccccggnggggncccgggggngccncccggcctttcnttaaaggnaaaaacccttaagggtttgggggggnaattcccccccccc

SEQ ID NO: 8543 - DNA, 191 bp, Homo sapiens
  misc_feature 18, 30: n = A,T,C or G
ggccgtggaggcctaggntggccctaggantttcttggtttgctccttggattccccttcccactccagcaccccagccagcctggtacaccgactacggcggactaatcttcaactcctacatacttcccccattattcctagaaccaggcgacctgcgactccttgacgttgacaatcgagtagtacct

SEQ ID NO: 8544 - DNA, 128 bp, Homo sapiens
  misc_feature 26, 48, 68, 93: n = A,T,C or G
accgcggtggcggccgaggtacttantatactggagttcagaagatgnagatttttgttgcttttcanaaaaaggaacgtggtagggagtgtntttttcccacgcttttccagtaactttgcaaaagc

SEQ ID NO: 8545 - DNA, 444 bp, Homo sapiens
  misc_feature 297, 303, 330, 380, 417, 421: n = A,T,C or G
ctacttagggcgaattggagctccccgcggtggcggccgaggtacctcctcctgctcctcaagagtgtggtctattttgccatcatcacctgctgtctgcttagaagaacggctttctgctgcaatggagagaaatcataacagacggtggcacaaggaggccatcttttcctcatcggttattgtccctagaagcgtcttctgaggatctagttgggctttctttctgggtttgggccatttcagttctcatgtgtgtacctgcccgggcggccgctcgatggtcgcggccgaggnactttnttttttttttttttctttttttttttngtaacactcaccagtctgttctgtagtcaatcattgattgacttgtctgngaacttgcaggaactgtttcataagtttcattagccncagnagtaaacatgtttgccatgcaag

SEQ ID NO: 8546 - DNA, 374 bp, Homo sapiens
ccgggcaggtactgctgactggctacctgctggacgccagtgcattgaacactaccgccggccccggcgctattgtgtcttctcccacgaggagctcatctgcaagatggctgccttcccagagacgttggatctcaatctagcagtagctgtgcacaaggagatgttcattatggttcaggaggagcgacgtctacgaaaggcccttttggagaagctttccttacaaggttgagtccacatcagggctcagtgttggctgaggtggggtgtccacaaccctactcctagtctttacagtatatgtgggttgaacacccccagggcgtcacggaggctgagcgagaggcttttgagctgctcccagatgatga

SEQ ID NO: 8547 - DNA, 207 bp, Homo sapiens
  misc_feature 48, 51: n = A,T,C or G
cggccgaggtactaccagctttcacatcaaattttgaacgtggacgtnttngaaaagctattggacttaagttggacagagtcatgtaaaccaacagcaactgaaccactatttaagaaagtcagtccatgggaaacatctacttctagcttttttcctattttggctccggccgctctagaactaagtggatcccccgggctgcag

SEQ ID NO: 8548 - DNA, 119 bp, Homo sapiens
  misc_feature 3, 19: n = A,T,C or G
atnggagctccaccgcggnggcggccgtcgctcccctgctcctccttggtggctctctcagaggactccagagttgtatccccaggccgtcttgtttgttctccccgcgtacctgcccg

SEQ ID NO: 8549 - DNA, 391 bp, Homo sapiens
  misc_feature 19, 32, 38, 44: n = A,T,C or G
ggcggccgaggtacgcgtnggcaatgctaatngctcangcaatntttggggttcactctaggaggacaagttagaacatttgggaaaaaatgttataattgtggtcaaatcggtcatctgaaaaggagttgcccaggcttaaataaacagaatataataaatcaagctattacagcaaaaaataaaaagccatctggcctgtgtccaaaatgtggaaaagcaaaacattgggccaatcaatgtcattctaaatttgataaagatgggcaaccatttgtctgggaacaggaagaggggccagcctcaggccccccaacaaactggggcattcccagttaaactgttttgttcctcagggttttcaagggacaacaacccctacagaaaatac

SEQ ID NO: 8550 - DNA, 385 bp, Homo sapiens
ccgcggtggcggccgaggtactacaataatcctcaagatactgaaagtaatgccaagtgaaagaccaagggggtgggtggagggctaatgggctggacgaaatagccacttgattgctagttcatacaagatgtggcagcaactccttttctggctggagatcttggatgtcacatcttagaatcaggtggcaaagcatctgtgaagggcaatgtggcatcccagacagtgggtggtgagatcaggaagaaaaaatggaaatcaacagatggtggatcctacagctgagaactgattcttcaatttgacatggttggcataaacattttaaatggagcttggtaaagatcaggttattttaccattgaccaagctcttggcttct

SEQ ID NO: 8551 - DNA, 120 bp, Homo sapiens
  misc_feature 23: n = A,T,C or G
actatagggcgaattggagctcnccgcggtggcggccgtcgctcccctgctcctccttggtggctctctcagaggactccagagttgtatccccaggccgtcttcccgcgtacctgcccg

SEQ ID NO: 8552 - DNA, 401 bp, Homo sapiens
gggcgaattggagctccccgcggtggccggccgcccgggcaggtacatattattttgcagtatagatgaatattactaatcagtctgattattctcagagggtgctgctctttaatgaaaatgaaaattatagctaatgttttttcctcaaactctgctttctgtaaccaatcagtgttttaatgtttgtgtgttcttcataaaattttaaatacaattcgttattctgtttccaatgttagtatgtatgtaaacatgatagtacctcattagtaattgttttgttgtttcatttttttctaatgtctcccctctaccagctcacctgagataacagaatgaaaatggaaggacagccagatttctcctttgctctctgctcattctctctgaagtctagg

SEQ ID NO: 8553 - DNA, 432 bp, Homo sapiens
  misc_feature 9, 72, 73: n = A,T,C or G
atagggcgntttggagctccccgcggtggcggccgaggtactttttctttccttagactttggcttactggnngatttaattaaaaggtagaggagaagtaaatttgctgtaataattttgctgtaaataaaacaaagagtttattttattagataaagaatgtgaagtaagcatgaagagacaggctttgggagaaataccagaaagggatttttcaaagatggcattgtttaatctccgtgtggccctcggttgtgcaatcacagatgagccagaagagggccagccccctacttgtttgggctccgaaactcttaccaaacatcaatttttattcttgggataggaaaaataggtatgtgcctatcctctaataccgcttaccttcgatattttattaaaagaaggtatttttttaatggtaagtggtc

SEQ ID NO: 8554 - DNA, 161 bp, Homo sapiens
cactacttagggcgaattggagctccccgcggtggcggccgaggtactttcaacgaaggagctgctaggcttacagcaggctgaggggagactgaagagagactgcattgacaggctaaaaaggcgaccacgaaactaccctacagcaaagtacctgcccg

SEQ ID NO: 8555 - DNA, 557 bp, Homo sapiens
  misc_feature 6, 17, 21, 90, 101, 125, 146, 169, 171, 174, 195, 200, 201,223, 238, 242, 261, 263, 267, 278, 284, 288, 297, 304, 312,320, 321, 327, 329, 334, 347, 352, 383, 398, 400, 402, 403,405, 408, 417, 429, 436, 445, 446, 450, 452, 456, 458: n = A,T,C or G
  misc_feature 468, 473, 484, 490, 495, 511, 514, 524, 526, 527, 529, 532,534, 540: n = A,T,C or G
cgaatntttagctccancgcngtggcgggcaggtaccactgcactccagcctgggtgacagagtgagactctgtctccaaaaaaaaactnagcttgtatantatttttgccttacagaggatcantctagtaaggaaagggacaanaaagattttttatcaaaaattgngncantgcacagtactgagatgttanattcnnttctcatgtatcttccccaccncaaaaaataaaggcntacncaataatacgtcctctagnanaggngcatcgaaaantttttntgcncttttttanctataanatagtcgnaattcggnntatgcntnaatancaatattggtgcntaatngccctttccaattccaaccccttattaattnaaggggccccaaaantntnncncanttttgttantcattccccccnttggatngcctaaaanngggntnagananggaatttttnaaaantttaacaaaanaaaaanttgtnctaggggcccctaccnttncaaataaagngnntnttncntacctncccttccttttttaaaa

SEQ ID NO: 8556 - DNA, 144 bp, Homo sapiens
  misc_feature 3: n = A,T,C or G
ctnctatagggcgaattggagctccccgcggtggcggccgaggtacgcggggtgaagctggatgattgcccagagtgtgacggcagtcgcagggctggtgtcctacccctttgacactgttcgtcgtagaatgatgatgcagtc

SEQ ID NO: 8557 - DNA, 198 bp, Homo sapiens
  misc_feature 58, 97, 191: n = A,T,C or G
gaggtacaggaaagcccaaaatgttgacaaagcctccagggcaataatggttgttaanaactttcaaagcaaacaaaactcctgagaaacctacagnacagctccttttgaagtcaggttcatccataaattcggcaacagcaaattgcaggagcaggtataccactccagtaagtacctgcccgggcggncgctcga

SEQ ID NO: 8558 - DNA, 326 bp, Homo sapiens
ccgcggtggcggccgaggtacaaattaagagttatatggttttacaagtatatgttaaccccttggcgctggcggtcacggtgcgtctcattgccggcaatggaagtgtgccgggaaatcccaactcccggcgtcaagggattaaaagcaataaaaacaataatttcactaaaattcttttgtgtaacacttggtcttttttcccccctcccaatgttttagtcattgagaaggtcaaaacgaaattcagactctacggagttggcagcacagatgaatgaaagtgttgacgtcatggatgtcatcgctatttgctgtccaaagta

SEQ ID NO: 8559 - DNA, 426 bp, Homo sapiens
cactactatagggcgaattggagctcaccgcggtggcggccgaggtacagcctgctgtattatctccaaactcatgaacatggaatccatgcaggccttcagtcagtcctttaatgcttccccacaccttcactggtccattactttccttctgctcgaaattgatgatgccctgcactgggccgtcgcccttcagcacgcacacggccttcgtcgccataactcgctaggccacgccgaggtcctggttccgaggacttgcaacggaaaccccaccccgcggtaccttgccccggggccggccgctctagaaactaggtgggaatcccccgggcctgcagggaatttcggatatcaaagccttatcggatacccgttcgaccctccgagggggggggccccgggtaccccaagctttttgttccc

SEQ ID NO: 8560 - DNA, 245 bp, Homo sapiens
aggtacaagtttatcagtaacataccaatgagggagccttctctaccaatgctcattctgttctgcctggtggcaaataaaacattgtcttttcaagaaacactctctctagtttattgcttctatttaaatacatatagtgatatttaaaaagactaaaagaaaataatctcatctgaaacttttcacaatagattgacttctcagaaactaattcactctcttcaatcccgcgtacctgcccg

SEQ ID NO: 8561 - DNA, 398 bp, Homo sapiens
  misc_feature 33, 160, 397: n = A,T,C or G
ccgggcaggtacacagggaaaagagcacaaaanttcaactgatacagaacaacaactgaaagtcacaattatccaatgtagtttgcaattacttttcagtttcttaaacagctcccctcaactttttttttttaacaagtcttgctaattttttcaagcntgaaacagcatcaagttttcaaagaattaagagcctcggggaggggacccgctttcaagatactgaaggtgacatcaagagtctcctcctaacaggaccaactctatctaaaagttgcttaccgagtcccgcgtacctcggccgctctagaactagtgggatcccccgggctgcagggaattcgatatcaaggcttattcgattacccgtccgaccctcgagggggggggccccggnt

SEQ ID NO: 8562 - DNA, 433 bp, Homo sapiens
tcgactcctatagggcgaattggagctccccgcggtggcggccgaggtacctgaatggggtttgattctgaaatctttctacctgttgcaccgatattcaaataaaaatgatagacacagaaaggtttggtaactttgggttttgtaaaatcagcaaaggcagtgtttcaaaaagtgcaaaaaaaaagattctgttataaagtgattttctaagtatttcctaactttatttttcaaaatgatgttatgaacaccaaatttaaagatttttaacatgtcagagagaagagagttaaaatttaaaaatgcatcttgggagagaaatttgtctatgtttctagtgcctttcttgtctttgattgtatgggtcagtagggcaatccttaaaatgttttttatttaaaaataaaagttatttccttggaaaaattat

SEQ ID NO: 8563 - DNA, 278 bp, Homo sapiens
  misc_feature 159, 168, 226, 227, 231, 232, 233, 252, 255, 270, 277: n = A,T,C or G
gggcgaattggagctccccgcggtggcggccggcggccccgcgactgcccccgcgtacgcgggggccgaaagagccgtggccttggaaagggccacaagttccaccacactattggtggctctcgccgggcagcttggagaaggcgcaatactctccanctccaccgntaccgctaatataagtaaagtttgtaaaattcatacttaataaacaatttaggaccanngaannnaaaaaaatattaaaaaaangtncctcggccgctctanaactagng

SEQ ID NO: 8564 - DNA, 169 bp, Homo sapiens
  misc_feature 14, 21, 23, 24, 51, 65, 76, 79, 82, 153: n = A,T,C or G
ggaaaccggcgaanattttcngnnaactccggcggccgcccgggcaggttntggaaacgtaactnaacagcgaacnttntancttcacctgactcagtgctgggggcctctaccatctactgtgcttgtgtcatgatgctttttctctgaagnggtgtgggaagtacct

SEQ ID NO: 8565 - DNA, 343 bp, Homo sapiens
  misc_feature 296: n = A,T,C or G
ccgcggtggcggccgaggtactaactcatccagtatctgattctgtcttttcctctatccatctgtcttccatctttgcatccatcattcaacgaaatttacagcctatgcagatgttctgtggtcttaaacatgttgtattcagttcagcatggctggcgaggtctcaggaaacttacaatcatggaggaaggggaagcgaacacgtccttcttcatatggcggcagcaagaagcagttcttattaatgcccacctctttgccttggccatgcttcctcccctcccagccgttgntctcccccacgagaatatcttctcttttctccccgcgtacctgcccg

SEQ ID NO: 8566 - DNA, 163 bp, Homo sapiens
cttagggcgaattggagctccccgcggtggcggccgtccctcttaatcatggcctcagttccgaaaaccaacaaaatagaaccgcggtcctattccattattcctagctgcggtatccaggcggctcgggcccactttgaacactctaatttcccgcgtacct

SEQ ID NO: 8567 - DNA, 403 bp, Homo sapiens
  misc_feature 332, 375, 390: n = A,T,C or G
ccgcggtggcggccgaggtaccatgttatggaaagccaagtttcaagaattaaaaatgcagagtcagtcacaatcctgggtgctgtggggaaggctataaggcattcgaacaaatttttttttttttttgagacagggtcttgctctgtcacacaggctagagtgcaatggcgcaatctcggctcacttgcaacctctgcctcccaggcttaagcaatccctcccacctcagcctcccaagtagccggaatcacaggcagaagccaccgcgaccgctctagaactagttggatcccccgggctgcaggaaattcgatatcaagccttatcgnataccgttcgaccctcgtaggggggggggcccgggtacccagncttttgtttcccttntagtgagggggtt

SEQ ID NO: 8568 - DNA, 172 bp, Homo sapiens
ccgcggtggcggccgaggtactcatcttcaattttctgatctttccatttttttcctacagaagccaggttcctgaaggtttcctgcatcacatctctgtagagattcttctgggaaggatccagcaaagcccactcctcctgggtgaagttcacatctacatcctcaaaga

SEQ ID NO: 8569 - DNA, 332 bp, Homo sapiens
  misc_feature 250, 307, 318: n = A,T,C or G
ccgcggtggcggccgaggtacctgctctcaaattgaaaaaaacaaaaaaccaaaaagtattattaagattaatgtagtctgtttctttttcctctttgactgtggctactaggaaatttaaaatggcataggtagcttgcattcatagtccacattccatttccactggacagtgctggcctggagctggagccaagtccgggagacataatgaccatcaggccaggagcaaagtgccaccctttcgagnaaaggtggtggagaattctcctcattaataaagccttgtggccttaaaatggctggncgggtgttacnctgccccggggccg

SEQ ID NO: 8570 - DNA, 214 bp, Homo sapiens
tcgactacttagggcgaattggagctccccgcggtggcggccggaaccgccatcttccagtaattcgccaaaatgacgaacacaaagggaaagaggagaggcacccgatatatgttctctaggccttttagaaaacatggagttgttcctttggccacatatatgcgaatctataagaaaggtgatattgtagacatcaagggaatgggtacct

SEQ ID NO: 8571 - DNA, 213 bp, Homo sapiens
  misc_feature 27, 47, 61: n = A,T,C or G
aaccgcgaattgttttccccaaggtcncggccgcccgggcaggtacntatttcgaagattnttaaaggcagcatttttacaaggtggagctgcaggaagcttcggggacttgacagactgagtccagagcaagccctcgcccgtgggatcttagcaggaacctgggggtgaagaggaacagtgcagtccctgagaggcaagctgagagtacct

SEQ ID NO: 8572 - DNA, 397 bp, Homo sapiens
aggtacagaaggtgaaacagaacagaagaagatcataaagaaaagggaaaacaggaagagagatgtgatggcttcagcggccttggcagcagagccatctcccctacctggttctctcataagaggccagaggaagagcgcttcgagcttcttcaaggaacttagagaagagcggcattgtgctccttctgggacccccacaggaccagagatccttgctgctgcagttcctccctcttccctaaagaacaatagggaacaagtagaagtggtagaatttcacagcaataaaaaaagaaaattgacgccagatcataacaagaacacaaagcaggctaatcctagtgttttggagagagatgtggatacacaagaatttaacctagaaaaagctcgt

SEQ ID NO: 8573 - DNA, 430 bp, Homo sapiens
  misc_feature 5, 110, 121, 182, 268, 300, 335, 372, 381, 388, 404, 417: n = A,T,C or G
gactnctatagggcgaattggagctccccgcggtggcggccgaggtacttttttttttttttttttttttttttttttgtataatatgttatttatttgatattctgganaaatccaaacncacaaagtgattctgtatttgcgagaaatttaaggagatgatgaaaatgggtaaaaaatanatttaaaaggggtgatgaaagtattatgtataatattataatggtaaatatgtgatatgaatttgttgaaatcaacagaatatacngcataaagggttaattccaattcacaaaaatntaaataggagattaggaattccaggatagaatgcncacaatatagaaaatatctaatgtcattacaaatgtntgaaatcanaagaggngcccaagtgacctcanaaatagtgtagtncaattaaaagaat

SEQ ID NO: 8574 - DNA, 124 bp, Homo sapiens
ggcgaattggagctccccgcggtggcggccgaggtacgcgggggaagaaggaagcggagcaggtgctgcagaagtttgttcaaaacaagtggctgattgagaaggaaggggagttcaccctgca

SEQ ID NO: 8575 - DNA, 983 bp, Homo sapiens
  misc_feature 1, 16, 32, 67, 74, 97, 102, 105, 134, 140, 148, 163, 175,185, 187, 189, 191, 193, 202, 204, 211, 213, 222, 349, 355,408, 460, 467, 473, 502, 525, 527, 534, 544, 551, 554, 561,576, 582, 628, 642, 659, 688, 707, 725, 733, 745, 763: n = A,T,C or G
  misc_feature 765, 810, 824, 841, 978: n = A,T,C or G
ncccccccccccccgncgctttttttcggganaaccgcccccccgtttttttgggccggaaaacctnccccccnttaatttaagggggggggcccgnttttnttntggggggaaggaccataccccaccccggncggggntggggccnggggaaaaaaaaccntggcctttaccntaatcctggntntntntntaataattntntcctggntntaaaaaaantttattaattggaaggggccttaccaaggaaaaccttaaaaaaaaatttaaaaaaaaccccttctttttggtggtccccttgggggtccctggggaaacaattttaattggcttcctttttaaaaangaaaancaaaaaaaattcaaaaaactttttaaccaaggaaaaaggaattttttggaatnggttaattggttaaaattaaccaattaaattaaggccaaaggccttcctttnggaaaangttaantaatttaatttaattccaattaaaggccnaaaaaaattaaaagggttccaantnccttggnaattgggaangaaaaanccnaaaaggncccttaaattttttngggggnaacccaacccaaaaacccaaccaaatttccaaggggggaaaaaaanggaaagggaaaggncccacccccaacccggnttggaaattgggggggaagggtttttttnccttccccaagggaaaaanggcccttccccaaggttngggaattnaaaaggaaaggnaattgggttttggaaccntnctttaaaaaaagggtttgggaattttttaaaaggggggccccaangggccatttggggntggggtttttaacccgncccctaataaaaaatccccccaagccaattttttgggggggagggtcccaaaaggggtggggggccaagaaatccaacttttggaagcctcaagggaagcctcaaagggaatccaagccctggggggccaaaccatnggggt

SEQ ID NO: 8576 - DNA, 432 bp, Homo sapiens
  misc_feature 44, 53, 56, 96, 134, 150, 154, 156, 182, 192, 208, 215, 221,224, 229, 241, 257, 268, 269, 270, 280, 289, 300, 303, 308,310, 311, 319, 327, 329, 341, 342, 348, 358, 361, 366, 379,381, 392, 395, 397, 399, 411, 413, 415, 419, 423: n = A,T,C or G
ccccgcggtggcggccgaggtacttttttttttttttttttttntttttgatnganaacattcttaattttattttctttaattttataaaatacnctttgtaagataagtttctaaaagtttatcctttatgngtgttaaaattgcaantctntntcaaaaatgaaggaaacccctttcangtgattaacnctctttgggtgggtanatatggngtatgnatncatgngaggtttttcangggaagggtttggttnttttgtttatnnntttttttaantcaaaaacncaaaacccccnggntcccntnncccgggcngggccacntntaaaaaaataannggggantccccccccnggncctgngagggaaattttngnatattttaaanctntntnttttattccccngngngacncctngaggggggg

SEQ ID NO: 8577 - DNA, 307 bp, Homo sapiens
  misc_feature 39, 45, 51, 76, 122, 130, 196, 210, 252, 277, 283, 287, 299,307: n = A,T,C or G
agggcgaattggagctccccgcggtggcggccgcccggncaggtncgcggnggattttaaaaagttatccagattnccagaaaatctaagctggcagttcataggaatatcatgagacgacnaaggcttnattatcaggcattttgcgggggcagtgtgctatgaaacaacccagtttgtggagaaaaataatgangctttacatatgtntcttgaatccttaatatgtgaatccagagataagtttatacnggaattatttgaatcatccacactntaaaanaaanaaaaaaaaaaanagttcctn

SEQ ID NO: 8578 - DNA, 429 bp, Homo sapiens
  misc_feature 294, 364, 370, 395, 402: n = A,T,C or G
attggagctccccgcggtggcggccgaggtacatttggtggaactgagaaatggcataacaccaaatttaatatatgtcagatgttactatgattatcattcaatctcatagttttgtcatggcccaatttatcctcacttgtgcctcaacaaattgaactgttaacaaaggaatctctggtcctgggtaatggctgagcaccactgagcatttccattccagttggcttcttgggtttgctagctgcatcactagtcatcttaaataaatgaagttttaacatttctccagtngattttttttatctcacctttgaagatactatgttatgtgattaaaataaagaacttgagaaagaacagngttttnaatttaaaaccataaaaaattcaantggttanaccgccaaaattttttttcttgggaat

SEQ ID NO: 8579 - DNA, 379 bp, Homo sapiens
  misc_feature 253, 259, 282, 301: n = A,T,C or G
ccgcggtggcggccgaggtactgattttaaaaactaataacttaaaactgccacacgcaaaaaagaaaaccaaagtggtccacaaaacattctcctttccttctgaaggttttacgatgcattgttatcattaaccagtcttttactactaaacttaaatggccaattgaaacaaacagttctgagaccgttcttccaccactgattaagagtggggtggcaggtattagggataatattcatttagcccttnctgagnctttcctggggcaaaaccttggntggacccttggccagtctncagccagccctttcttggtaccacctggcttttttaatgaacacccccacccgtaaacctggtctgtctcattatcac

SEQ ID NO: 8580 - DNA, 168 bp, Homo sapiens
  misc_feature 31, 51, 74, 81, 98, 101, 105, 110, 115, 118, 119, 120, 123,136, 158: n = A,T,C or G
tgaattgtgttgaactaacctggcggtatanacaaaatttggaagtttggntttcagaaagtcttgacttcctnttatctntaactaattggcatgcnccnctanttcanatttnccnnnccncctctgttgggtngaaatactgttttatcctttantacctgcccg

SEQ ID NO: 8581 - DNA, 429 bp, Homo sapiens
  misc_feature 223: n = A,T,C or G
ctacttagggcgaattggagctccccgcggtggcggccgaggtaccagagtttccttccttgaaacaatgccatggtagctacctccagccctgcacagcaactcgtgctagcgaagggggcagtgaacaggggccaggtcacaaggaccatgaccctcggggaccacagggccaggatgtcattcttcaaaaaccatgaaaaatccatgccaaatataacangcagattataaggccaacaaagacttctatgtactgtgaagtcaaaggcccaacattacagagcgcacctctgccttgaaatacaaaactaagttaactagcaagttacaggaaaatagccttcagtaaattccacaagccaagtggctactgcattgtccgctctaagaactagttgggatcccccggggctgcagggaatttcg

SEQ ID NO: 8582 - DNA, 411 bp, Homo sapiens
  misc_feature 47, 52, 77, 207, 270: n = A,T,C or G
ccgcggtggcggccgaggtacttttttttttttttttttttttttgnggaanaagggatcaggggacaccttgcctntagtggacaagggccctgagctttacacaaccctccatatttattaggcaaaagagatagtgagaaggcgggtggaagaaggggtcagctactcagtccagagtagggtttgcaagatggcattctctanatgtcccagtagataacctcaaggagctcagcaccaggaagcgattgccctcagcaaaccttntggcagcggaagcagtcatgagtttgcccacatcgtgcattcatgataaagtttgctgtttgatcatatagcctccagtggaatgcctgagttggtcacatcccatgggccttcgactcccaacagcccagcaccataccc

SEQ ID NO: 8583 - DNA, 258 bp, Homo sapiens
ccgcggtggcggccgaggtacattctggctcggatacagaatcactgctgcagggctcactatttggagatgcatttctttgagaggtagtgtcaactgctataggtgttagctcaccctcaccgaatgcatcacttataaacatgccttcatggattaaataagccacctctgtgtccagtgaattatcttttgcagcattcttctgttgtgaaatctcttccaattctctagtcctttggtttttgtcaagaactg

SEQ ID NO: 8584 - DNA, 295 bp, Homo sapiens
  misc_feature 74, 126, 136, 264: n = A,T,C or G
actacttagggcgaattggagctccccgcggtggcggccgaggtactttttttttttttttttttttttttttngaatgtttttctcatcctttaatttctggttttatgatcaaatgttccgaanacactgcttntttttgctcaaaatagttgacattgtcattgcttctagtttttcagctcctactatgcttactatgtccatgggtgccattgacgtctttggctatttatcatctctgggtggcgcaggccaaggacncccatggacagcgcccccgcgtacctgcccg

SEQ ID NO: 8585 - DNA, 328 bp, Homo sapiens
ccgggcaggtacaccaaaaagagaactttgtgatccgttggtaaggtagtatccacaagtaagcacttgtgttcactgttttttgttccacactagaatacacccagttggataccagagttattttacagaccatctgaggaagatcctagttttcaagtctgtcaggaaaatattccatattgttttaagccagatcatacccatggaaaaatagagaatggttttctttctttttctttctgaccaatacatgctcaagaaatcaaatatctgagatacacaaattgaaccgcggtagggtggggaagggaagtaggggaagata

SEQ ID NO: 8586 - DNA, 128 bp, Homo sapiens
tatcactacttagggcgaattggagctccccgcggtggctgatccagttcaccagtaggttggacagcatataatttgcatcattttgtcccttgtaaatcaagatgttctgcagattattcctttaa

SEQ ID NO: 8587 - DNA, 125 bp, Homo sapiens
aggtacacaagtaactctgattatttgcaaatactaattaaaatattattcaacaccaaagaactgccaagtttttatattgtggtctgtggtcctgtcataatctgttttcccagtggcaaaaa

SEQ ID NO: 8588 - DNA, 344 bp, Homo sapiens
ccgcggtggcggccgcccgggcaggtaccattaaaatttctaacccatattagccctttatcttccatccatgaaggcataagtttgcccatgtataaggttggcagcaaaatcctccacaaataaaagtataccctatgggtgcaccgcgggaccaccccttttccaattctattgttcacagaagcataagcaagaaaaaattaagaggttatgagtctcatgacggcagagaagtcttgatctgtgatcttgggaaagctgtccatgactatggtgctgtctgcttctggagaaaaacgtctctctgttcagctttaccttaaagtctccaatagatatac

SEQ ID NO: 8589 - DNA, 426 bp, Homo sapiens
cactacttagggcgaattggagctccccgcggtggcggccggggtctctctttgatgaagtaagaaagacagcacgcttaaaccgtagaccaagaaatcaggagagttcaagtgatgagcagacgcctagtcgggatgatgatagccagtccaggagtccaagtagatctcgaagtaaatctgaaaccaaatcaagacacagaacaaggtctgtctcctatagtcactcaagaagtcgatcgagaagttccacatcatcttatcgatcaagaaagcctactctaggaaagtcgggagccagaagggatgggtaccctcggcccgctctagaacctaggtgggatcccccggggctgcagggaattccgattatcaaagccttattcggatacccgtccgacctcgagggggggggcccccgggtac

SEQ ID NO: 8590 - DNA, 316 bp, Homo sapiens
  misc_feature 156, 159, 293: n = A,T,C or G
ggcgattggagctccccgcggtggcggccgcccgggcaggtactttttttttttttttttttttttttattcatccagcttttcatatttattggcataaagctatttacagtattggtattctcttaaaattaaataactatatcttctttttgngcncactcttaacaatccaggaatagagacatccttaaactgacatgcagaatagacgaaagaaatctccaacagacgtgacactaaatggtaaagacataaaaacctttgcaattaaaaataggaacaaacattgnaatcctagacaatgtaattagac

SEQ ID NO: 8591 - DNA, 949 bp, Homo sapiens
  misc_feature 4, 8, 13, 15, 21, 23, 27, 29, 31, 35, 37, 39, 47, 53, 60,62, 64, 74, 81, 83, 85, 103, 108, 126, 154, 164, 182, 200,204, 214, 225, 237, 246, 249, 267, 279, 282, 292, 303, 357,380, 409, 412, 429, 444, 450, 474, 477, 479, 493, 497: n = A,T,C or G
  misc_feature 509, 520, 526, 536, 567, 570, 573, 577, 578, 599, 628, 643,650, 656, 658, 673, 735, 756, 757, 773, 825, 831, 850, 856,864, 881, 891, 904, 922: n = A,T,C or G
aagncttncccancnccgtcngngttngngnccgngncncggccccnccgggnggcccangngnttaccttaanttaaggntntnggttcccctttaattggnggttnggccccccctttaatagngggggttgggaaattgggggggtttttnccccaaaagnaaaaaccccccccccttnaaggaggaaattaacccntaanaaaaaggttncccaatttggnaatggggttttnccaaaaggnttncccccccttattaattangggaaaaaaaanaantggggggttngggttaaaggnttaaatttttttttgggccaaatttaatttaaaaacccccttgggtttgggccnaacccaaatttcccccttaaccnccaatttaaacccaacccttttttttaanaanaattttccaaatttccnttccttttaaggggnaaattntttaacccccccttaaatttaaanaantntaaggggccccttnatanattaaacccaanaaattgggggnttaaanaaaaaaattnggtccctttttctttgggtttaaaaaaaaanttnaangggnntttttggggttctttaaattnaacccctttaaatttaattttttggggtnttttttaaaaaattnggggaancccatnanaaaaaaaataataanaaggggttttttttgggtttaaaccccctttccgggggggccccccgggccctttcctttangggaaaaaaaccctttaaagnnttggggggggaaattnccccccccccccggggggggccctttgggccaaagggggggaaaaatttttnccgggnaatttaatttcccaaaaanggcccnttttaaanttcccgggaattttaanccccccgggnttcccgggaaaancccccttttcccggaaanggggggggggggggggggggggccccc

SEQ ID NO: 8592 - DNA, 235 bp, Homo sapiens
  misc_feature 22: n = A,T,C or G
ttaaacatgtgtcactgggcanggcggtgcctctaatactggtgatgctagaggtgatgtttttggtaaacagcccgcgtacattgcacatacccttggatccccacagtttggtcctcctcccagctacccctttatagtatgacgagttaacaagttggtgacctgcacaaagcgagacacagctatttaatctcttgccagatatcgcccctcttggtgcgatgctgtacct

SEQ ID NO: 8593 - DNA, 388 bp, Homo sapiens
aggtactcattcttcttcagagggccttcaaagaattcaaaggggactgagtgctgagttccctaagctgtggtcactgcagccatttcagcactagagggtgccataatcccaagtatgcaataaatcttgcagactcctagatacccagcctagatagatgtgggaaagagaagacaatgttctgggttcccaggcaaagtcccttactctcttctctctcattccccgaagtataagaagtccctctatatataccaggctgcctgtaattgggggagacgtgacacagggactcctgtgtccatcacagctggcatcacagtaatgctagtctaaacccatggactctatgaccagcacagtaccgtggtgacgtggttcccaa

SEQ ID NO: 8594 - DNA, 206 bp, Homo sapiens
  misc_feature 5, 48, 106, 140, 144, 153, 158, 159, 168: n = A,T,C or G
gcggncggcgcgcagctcgctggccggtggtgaccatgcgagccgtcntccagccgctcgatgcggcccgagactcgcccagcgccacaggtcggcattcggcagnccggtgagctcgctctggacgaagggctggcggnggtncaatcttgnatgcnngttcaccgngcgccagcccaggccgggcacgcggttgtggatgtagt

SEQ ID NO: 8595 - DNA, 388 bp, Homo sapiens
aggtacacaagcccaggtaagcataccaagcaagccccctcacaccttttgtctgaaaaaaagcttgacttctttgcagcaatgtctcgcccattccagcagcagtatctcagttaacttggttccttttcctccaggctcaaaacaaaatcaaactcttcctgggtcaggggctggattgataatctctggcgagtgaagagaaccatattttttaaggggccaccagtagctttgtgagcccgcgtaccactggcatcgtgatggactccggtgaccggggtcacccacactgtgcccatctacgaggggtatgccctcccccatgccatcctgcgtctggacctgggctggccggggacctgactgactacctcatggaaagatc

SEQ ID NO: 8596 - DNA, 429 bp, Homo sapiens
  misc_feature 37, 43, 78, 157, 172, 414: n = A,T,C or G
ttagggcgaattggagctccccgcggtggcggccgangtacanttgctgttgtgtgatcaaacatgtctctgtgtagntccagcaaatcaagctgagctttgaaaaagtttgtcttagttttgtgaaggtgatttattcttaaaaaaaaaaagaacngaaaaagaaaaaaanataagaagaaggagtaaagggactactcctccttgccaaatgtgctaaatatcattttaggagaagaaagcgggtttattgtatttcccttaagattgtgagggggtgtggatacagtagaatgagccaacagcttctttataataaatatggtctgcaataaattatttcactagctctaaaacctttccctagattttagtagggagttggtttctgctaatatctttgggtgctgtggnggtaaatgctatatt

SEQ ID NO: 8597 - DNA, 370 bp, Homo sapiens
  misc_feature 356: n = A,T,C or G
aggtactgtggcatggcgcagtgggtgacagatggccacatagcggtcaaaagccatggccagcagcactgtggattccatgccagataaggagtggatggcaaacatctgtagcagacaagcatcaaactggatggtagtggaattgaaccagaagatggccagcattttgggcatggatgaggtggagatgaggatgccaatgcctgaaagcatgcaaagaaatatatacattgggctcatgcaggctgtgctcagtccgcacaatgtagatgattgtcaagttacctagcacagcaataaggtagagggagcacaatgggaaggccaaccagaactgagcctcttctaaaccngggaggcctattag

SEQ ID NO: 8598 - DNA, 317 bp, Homo sapiens
  misc_feature 18, 78, 106, 108, 128, 129, 163, 176, 178, 192, 210, 218,219, 252, 255, 261, 272, 279, 281, 286, 287, 288, 297, 302,308: n = A,T,C or G
cggccgcccgggcaggtncatataccaactgtcagtctgtggtaacgtaaccttagacgctgcctgaccacaaagttnggaaattatatttaaccaaaataaaatnantaaatacagcaggttacctnntgaagaaaattgccaatgtgtttctataacaaanttaaaacccacgngnttctgatcatttgntattcccaatccttattngccttttnngaacttttggaggggggtaattttccctttttnagnttttanttaaaattggnttgaccncnaaaannnttggcaagngaatntttaangtttaaaac

SEQ ID NO: 8599 - DNA, 237 bp, Homo sapiens
  misc_feature 60, 68, 101, 169, 185, 190: n = A,T,C or G
gaattggagctccccgcggtggcggccgaggtactttttttttttttttttttttggggngggtcctngttttgtatttactgaagaaaccggattattgntttgtagagtttacccaagtccaaattttgctgattatgccatgacatggcttaatattttcttctcntcatttcctataaacnggtancgagagctggaagcttgccttgatgaggttagggttggttattcttg

SEQ ID NO: 8600 - DNA, 200 bp, Homo sapiens
tatagggcgaattggagctccccgcggtggcggccgaggtactaactattctttattgctgtaactgttaaaagtttaattcctgagatttttggagtcggtaaaagttcttaaagtgagcagaggaaagaaatgtctttcccagataggaggctgaactgtgaatcaacagtgtcaatcagttcccgcgtacctgcccg

SEQ ID NO: 8601 - DNA, 885 bp, Homo sapiens
  misc_feature 4, 72, 77, 85, 86, 91, 97, 110, 124, 139, 152, 202, 223,238, 254, 271, 279, 281, 295, 296, 335, 338, 347, 356, 358,359, 382, 385, 393, 405, 415, 420, 421, 466, 507, 520, 569,611, 622, 635, 647, 666, 720, 743, 766, 775, 795, 804: n = A,T,C or G
  misc_feature 860, 874: n = A,T,C or G
ccgnccccccgggggggcccaagggggtttacccctttggaaaagggaaccccaaagggctttagggaaggnaaaanccccatannaaaanaacccntttttttaaccanaattttgggggaanttgggttaaaaattnttaattgggggtnaaaaaaaaaaccccctttttaattttaaaaaaaccctttcctttgggttnaaaacccaaaaatttcccaanaaggggaaaaaaggnaaaaaaaaaacccggnaatttgggcccaaaggntggggttncntttttcctttgggnntttttagggaaaaaaacccccccaaaaagggccttttgnggncccccttgnggggaaaanannaaattttcggggggaaaaaaaanaancttgggcnccttttttaccnttaaaaaccntgggnngggaactttctttttttcttttttcaaagaaaaaagggggaaccntttggggggaaaaaaaaaaaggggggaaccaacccaaaggncccaaaacccaancccaaagggaaagggaaaaaagggtttggggaaccccccaaggggaaancctttttggggcccccttttaagggaaaaaacccccaatttnccaaattgggnttttttcccaaanttggggtttttncccttttttccttttgggnaaaaaaaaaattccaaagggggggaaaaaccgggcccccaaaggaaaacctttngggctttggggcccccaaagggnccccccctttggggggggggggnaaaaaaaanttttttcttttggggggggnaaaaaaaanttttttttttgggaaaaaagggaaaaaaaagggggggggaaaaaaggggggcccanttttttttgggggntttttttttta

SEQ ID NO: 8602 - DNA, 450 bp, Homo sapiens
  misc_feature 145, 199, 214, 308, 316, 327, 350, 359, 366, 378, 379, 382,384, 397, 430: n = A,T,C or G
aggtacgcggggcatcaggaacaaaagcgtgatcttgctgggtcggcacagcctgtttcatcctgaagacacaggccaggtatttcaggtcagccacagcttcccacacccgctctacgatatgagcctcctgaagaatcgattnctcaggccaggtgatgactccagccacgacctcatgctgctccgccttgtcagnagcccttgcccgagnctcacgggatgcttgttgaaaggttcatgggaccctgcccaccccagggaagcccagccaccttggggggaccaccctggcttacggcctcaangcttgggngccagccattntggaacccaggagggaagtttcnttttgaacnccccaanaggaaaaccttnnagntngtggtggggaccnttcccattgtttatttttcccaaatgaaccgtngttgttgccgccaaaggttt

SEQ ID NO: 8603 - DNA, 201 bp, Homo sapiens
  misc_feature 20, 29, 35, 39, 40, 41, 47, 50, 53, 56, 86, 100, 119, 124,152, 175, 188: n = A,T,C or G
gccgcccgggcaggcacttngactgaaanaagttnaatnnngaaatnttnttnacncgacgctgcccattccactgaagttctganatctttcgtcatgnaaataatttccatattccnctttnataataaactaatgataactaatgacantcagcagtcttcaaaaaattagnttccttgtacctnggcccgctctaga

SEQ ID NO: 8604 - DNA, 379 bp, Homo sapiens
  misc_feature 312, 314, 320, 322, 347, 350, 357: n = A,T,C or G
ccgcggtggcggccgaggtacatatagggctgttctagccacagtggtagatttatgattcacatccgaaagtgtgccttagttatcaatttaacatttctctagtattcatatcccttttcttaccatatacctcagtgtatccttcctgtgtcaagccttataaatcatgtaatttaagtgccacttcatgtaaatcagtaaaatcacaaaggtctattttaatgaaaacgatttaccaatgttgttttttttttaacaagcaaaaaaaataaaagcacattgtcattttttttcctcggaaaaaaaaananttaaananaaagtacctgcccgggcggccgctntanaactagngggatcccccgggctgcaggga

SEQ ID NO: 8605 - DNA, 135 bp, Homo sapiens
  misc_feature 94, 135: n = A,T,C or G
tcactttcttgcgcccgctctcctgcgccagcttgaaggcatactcggcaatgcgcagggacttggccttggtgatgatcttcaggctctccancactcccgccacactcttcatgctccaggctgctgtacctn

SEQ ID NO: 8606 - DNA, 419 bp, Homo sapiens
actacttagggcgaattggagctccccgcggtggcggccggatagggacccagaactccatttgacagatgaggaaacggcgaggcagacaggtgacctgacttccccacaatcgctgcaggacaggaagaaactgatgttctaatcatgtcagataaagatgatattgagactccactgctaactgaagcagcccccatccttgaagatggaaactgtgagccagccaagaattctgagtctgttgaccaaggtgccaaaccagagagtaaatcagaacctgtagtttccactcggaaaagaccagagaccaaaccttccagtgaccttgagacttcaaaagttctccctattcaggataatgtttccaaaggatgtacctcggccgctctagaactaggtgggatcccccgggctgc

SEQ ID NO: 8607 - DNA, 445 bp, Homo sapiens
gctacttagggcgaattggagctccccgcggtggcggccgaggtaccgaggtcattttgcttcctatagactgccaccttttggcaaaagctgttctaactccatctcagcatttacaattccatacctggtggtcagaggaggcccgcctgcaggctcagctaaatcgggctgatggcattccaattactcaggctcagctcacaggctccgataattactctgatactactgctcatttaggctttgatgctctcaccacggaacaagtaacaaaggtgtgtatgagagcttgggataaattacgcaccccaggccaagcttctgtttcttttactattgttaaacagggtcacaatgaattatatcttgattttttagctaaattacaagatgctgttgaaaaatctgtctctgatgagcacactcaagggtattcttcttc

SEQ ID NO: 8608 - DNA, 399 bp, Homo sapiens
  misc_feature 4, 290: n = A,T,C or G
atanggcgaattggagctccccgcggtggcggccgaggtacaggagtgacactgaacagatcacaaagcacgagaaacattagttctctccctccccagcgtctccttcgtctccctggttttccgatgtccacagagtgagattgtccctaagtaactgcatgatcagagtgctgtctttataagactcttcattcagcgtatccaattcagcaattgcttcatcaaatgcctaaaacaaagagccgtttttgccaggctacaggcccttttcagggaggagttttaanaaatctcataggtaaaaaggactggaggaaatttagtgcccagaccaaagaccgaaattgggggtggtgttagggcttgcattttacttttctttacctaattttcaaa

SEQ ID NO: 8609 - DNA, 408 bp, Homo sapiens
  misc_feature 23, 37, 38, 42, 50, 405: n = A,T,C or G
ccaccgcggtggcggccgaggtnctaaattaacagtnntgtngttaacanttagaactaaaatttaaccgcattatatcactgtatatatttctcatgatttttgctaattagagcatttacttaaccagtaataaactacacacacacacacacacacacacgtatacgtgtgtgtgtgtatatacttggctctgacacaactctggtgcttaattaggatatgttctattatgtattttgaatgtttatcctgctagtgcgatgaacttttgttggaaaagcagaattagaaggaacagtttttcaatcagtttcatttggtaattacaggaaaaccttgagttgccctaatttaatttttccaattaatacatttagactttaaattgcatccgtaattctnttg

SEQ ID NO: 8610 - DNA, 223 bp, Homo sapiens
ctatagggcgaattggagctccccgcggtggcggccgggctgaacttctcgtagagcatcgcctcggtcacgtcggggtggagtaggcaacatattcattaaaaatctggacaaatccattgataataaagcactgtatgatacattttctgcttttggtaacaccctttcatgtaaggtggtttgtgatgaaaatggttccaagggctatggatttgtacct

SEQ ID NO: 8611 - DNA, 237 bp, Homo sapiens
  misc_feature 237: n = A,T,C or G
ccgcggtggcggccgaggtacccttcataaaggaaaaatgaagtaatgcctataagtagcaggcctttgtgcctcagtgtgaagagaaatcaagagatgctaaaagctttacaatggaagtggcctcatggatgaatccgggggtatgagcccaggagaacgtgctgcttttggtaacttatccctttttctcttaagaaagcaggtacctgcccgggcggccgctctagaactagn

SEQ ID NO: 8612 - DNA, 887 bp, Homo sapiens
  misc_feature 4, 22, 26, 30, 34, 44, 46, 50, 64, 68, 74, 101, 123, 174,178, 180, 188, 219, 228, 230, 232, 241, 245, 251, 259, 276,282, 297, 302, 328, 330, 333, 334, 337, 338, 362, 375, 378,387, 411, 422, 431, 435, 466, 485, 491, 514, 526, 535: n = A,T,C or G
  misc_feature 550, 556, 562, 563, 583, 588, 589, 603, 642, 654, 662, 671,685, 690, 702, 703, 711, 722, 723, 726, 752, 753, 760, 795,796, 808, 811, 826, 837, 884: n = A,T,C or G
tttnggggaagccttcccaccnccgncagngttnggggccgagncnccgnaagaggtaaccaancctnggggtntgggaattaattgggaaaaggaatttnggaaaaattttttgggggtcgntttgggaaattggttaaaccccaaccccaaaaaagggaaaaaattttggtntccntntggccttnggaaattggttttaattttgggaaccaaaantaggaaatntncnccttggggnaaangaaccnttccttgngggccccaattccatgntggtanggtaattcccgtaanaaggnccccataacccatgtaaaaaaagggnanccnnaannacccagggttcctttttggttccnggggggggaaacnccnttccaatanaaggggaaaaaggttaataaaccnttcccccttgngaaaaaggngggngggccctttctcccacaaaaatttggggggntttaaaagaagggaaaaanaagaanaacccttttttttggggaagggntttggggggggntttttgggncccaacgcaaaaggnaaaggnaaaagnntttatgggaaaggctccttnggccnntctttttttttggnaaaaaaaaatttcccaaagggaaaaaaaaaagggatttnccaaagggtttngggcccanggggggggnttttttgggttaangggtntgggggttattnnggaaattnggggggggggnnccnttccccttaaacccttttttcctttnnggaattnccctttttggggggttcccaaccctttggtttggnnaaaaaaaaaaanaanaattcccaaaaaggnaaaaatggggncccccccttggttggggggaaaaaaaattttttttttttgggggggnccc

SEQ ID NO: 8613 - DNA, 400 bp, Homo sapiens
aattggagctccccgcggtggcggccgcccgggcaggtacgcggggaggtagagtgagaagcaccagcaggcagtaacagccaacccttagccattgctaagggcagagaactggtggagcctttctcttactcccaggacttcagcacctaagacagctccaaaacaaaccagaacagtcagctccgggggagcacgactgggcgagaggcacagaaatggacaccagaaataaggcccagctccttgtgctcctgactcttctcagtgtgctcttctcacagacttcggcatggcctctttacagggcaccttctgctctcaggttgggtgacagaataccctttgagggagcaaatgaacctgatcaagtttcattaaaagaagacattgacatgtt

SEQ ID NO: 8614 - DNA, 230 bp, Homo sapiens
  misc_feature 12, 24, 30, 73, 74, 87, 96, 116, 148, 175, 227: n = A,T,C or G
acccggcgaatnggtaattgaaangcggtnccggccgaggtactttttattgtttgtcggcttgttactagcnntaacaggggggtnttagcctcnatcacactcacacagttganttctgcaggagtcctgttttgcacaggtgatnctgctccccgagttgctaaacttgtanctcagaaatttggcgccacatccacgtttctccagacgtttgtagcaacagncat

SEQ ID NO: 8615 - DNA, 263 bp, Homo sapiens
  misc_feature 221: n = A,T,C or G
atagggcgaattggatctccccgcggtggcggccgggccatcctggagatggaacaatacatccgggagacgtacagcatggatgtggacagggaaaacagcaagtgcacacagtgggacaggccacaggacaggctgggagtgaataaagagttcacactgcttccctgctttccccagtgactggaagggctctaggccacctcctcctcagcctcctnctcgaactcgccctcctcctcggctgtggcatcctggtacct

SEQ ID NO: 8616 - DNA, 667 bp, Homo sapiens
  misc_feature 14, 64, 72, 74, 75, 78, 81, 88, 120, 126, 141, 209, 211,213, 221, 226, 229, 251, 253, 254, 262, 267, 291, 309, 311,313, 315, 318, 320, 322, 344, 347, 349, 353, 357, 360, 364,375, 380, 385, 394, 395, 403, 409, 424, 465, 469, 475: n = A,T,C or G
  misc_feature 481, 493, 497, 500, 502, 512, 534, 536, 547, 554, 559, 592,617, 625, 629, 631, 658: n = A,T,C or G
agggcgatttgganctaaaccccggtggcggccgcccgggcaggtacttttttttttttttttntttttttntnntanccnatttcanatttattaaaaaacacataggtaacgagtcanagcttnggctaggaatgattnggaaaagaactgaaggcataattccacagggacattcacaggtgtggtgttgccttagaagaccaggnananggaagccnggganaanggggtttttaaaaaagccaatntnnggcggggngggancaaattgagaaaagggcccccggnctttccattccggaaatncncncntgntntnagcatggaatccccaacaaatnctngncctngagnaangggnagcgcaccagnaaggnagggnccccatgannaatagggnatgtcnccaccccggatttcncaagaaaccaaggaagttaattttttaaccggccttcacgnggangggganccaaancggaatcctttngaantcntnacaataggcngcctagggagatagccttaagngngccccgggaanaatcctnccctntttttggccattttcgggggtccggggacaaanttggccccagggggataacccctgnggggccgnggcntnctttagaaaaaccttagggtggggaanccccccccc

SEQ ID NO: 8617 - DNA, 191 bp, Homo sapiens
ccgcggtggcggccggagcaggtccctttctagagataggagaagagagagatcgctgtctcgggagagaaatcacaagccgtcccgatccttctctaggtctcgtagtcgatctaggtcaaatgaaaggaaatagaagacagtttgcaagagaagtgggtgtaccctcgggccgcttctagaactaagtg

SEQ ID NO: 8618 - DNA, 343 bp, Homo sapiens
  misc_feature 315: n = A,T,C or G
ttagggcgaattggagctccccgcggtggcggccgaggtacagatgaggaagactgaggcctgcatcagtgaagcaacctatccaagactacatagagaaggcagtaaatggcagggttagtctcagaacaggggagggtctgttccccccgcagtgggcagtcctaattctgaacttcacctatctgggggtgataagaggggaacaagaggaagcctgcggaagagaaaacctaaacatctgttttgtctacgtatgacttcctctgcttgtgggagagaaggaaggaaaggaacacattgtttgtcagcccnacaaccccaacagaattaaaccctggag

SEQ ID NO: 8619 - DNA, 359 bp, Homo sapiens
  misc_feature 49: n = A,T,C or G
cactacttagggcgaattggagctccccgcggtggcggccgaggtacanggttcttctgagcagtgtccaggagctgccactcctcccagctgaattccacagccacatcctccagggtcagtgattcctgggtcttgatcattttcttctgtgctcagaaaatagtggataacatggactatacgtctttgtctcttctgcatttgccatgaagtttttgaagttttcctagtcagaaatattagtgtccacttaaagttgtccccagaaattatgatatccaaggccagcaacctccttcttcttccttcattgcttcacttgagttattttgcttctgggagccaggacctgagga

SEQ ID NO: 8620 - DNA, 835 bp, Homo sapiens
  misc_feature 24, 38, 59, 61, 75, 79, 100, 104, 107, 117, 122, 125, 149,158, 163, 175, 176, 188, 194, 213, 214, 216, 220, 224, 230,242, 254, 272, 275, 276, 279, 288, 299, 313, 314, 337, 343,347, 349, 404, 409, 425, 439, 441, 460, 469, 470, 485: n = A,T,C or G
  misc_feature 493, 495, 503, 505, 514, 526, 535, 547, 548, 558, 578, 583,591, 593, 603, 612, 619, 628, 660, 663, 668, 669, 670, 673,674, 680, 684, 703, 706, 715, 730, 736, 756, 782: n = A,T,C or G
agcctcccacccgccgggtggggncgggggcccgaagngttaacctttttttttttttntntttttttttttttntttncttataacaaaaaaaccaaanggtnttnctttttaatntgggngtntcccaccaaccatttccattaaantaaaccctntttanggaaaaccaagnnaaaaagggaatntgggtntttttaaaaatttttgggnntnggtncccntaaacntttttcgggggnggggaacccctnggaattggaaaaaataanccnnccntgggggggnaaaaccaaggnttcccccccccaannttttttggggagggtttaaaaanaaattncaangngtttttgggaaaaagggcccccccttattaaccgttggggtgtaatttaaaaaangggtnccccaaaaaaaaaaanttttttttaataangngaaaaaaaaaaaaaaaaanttggggaannaattttctttttccnaaccccgngnaaattggngnaaagggccnctttttttcctnccttttatnaaagggggggcnnttttttttcnggggggggccccccgggccnttttnttttttangnaaaaaaaaanccttttaanggggggnggggggggnaattttccccccccccccccccgggggggggnccnttttnnngcnnaaaggngggngaaaaaaattttttcccgnggnaaattttanttttcccaaaaaagnggcccnttttttaaattttccggggnaatttaaaccccccggggtttcgggnaaaaccccccttttttgaaaaagggggggggggggggggggggggcccccccc

SEQ ID NO: 8621 - DNA, 410 bp, Homo sapiens
  misc_feature 362, 378: n = A,T,C or G
ccgcggtggcggccgagctgcacgatgatcagcatcacggaccgatttcttctcactgtggttcttcctaagttttacccacttaggacaaatttcttttaggtatgaggaaagactgtgagtcaaatcattggccttgaggaaacaggagtctggcaggttcagttcttctaattcaatcaccaagcgtctgctgctataatagtccttcatcagcttctgtaggtcttcaggcaaccctggttttggttctgattttgcaagaacatcagtaattttcttctttcttcttttcctggtcttggtggtattctcttttctttcctttgggtttgtatcaaaaaaacattctttagggctgnattgggtttttttctngaggcctctaagaaacctaggtgggatccccc

SEQ ID NO: 8622 - DNA, 378 bp, Homo sapiens
  misc_feature 211, 302, 303, 317, 334, 352: n = A,T,C or G
ccgcggtggcggccgaggtacaaaaggtcccaggaagtactgtggtttgttgattcattcaacagaaagcccaaatgacaatgctattagtggtcaggagtaaactaacctggacaggctcatgaaaatgaacccctggatgcatcctgagaacgtaccaggtccccaggatgatcgtcccggtgcggacatggcaacagctcgcagcacncgggtgctgtagaaccggtcactgcggttccgcttgaaactcatgggacacccatcgttaacaagggcggggcctccttcttgggccgggnnccctgtacaaaacntttctccaccccacagnccaaacttcaaacgggcntgttttcaacggccctccaaaacccc

SEQ ID NO: 8623 - DNA, 365 bp, Homo sapiens
  misc_feature 156: n = A,T,C or G
ttagggcgaattggagctccccgcggtggcgggccgcccgggcaggtaccaatggacactgacaaaacaataaacaaatctccaacaaaagcctgttctctctagccaaaaatccaagacagtcttgagaagactagtaagacagaaaacttttanacaataacagctctactccagccagccacaacaacaataacaaaaaaactgtggctctaccccacccatggcaaaagccaagtggggaagccaagctttccactcatgcctgactgtgacaaggcactcacccttccttccagggtaacgtctgggaaagctgagtaaggaattggttgtttcattctcactgggtggtaaggagtcca

SEQ ID NO: 8624 - DNA, 730 bp, Homo sapiens
  misc_feature 23, 29, 61, 76, 86, 104, 112, 114, 128, 185, 221, 232, 239,241, 252, 263, 271, 276, 290, 313, 314, 316, 325, 349, 368,369, 377, 415, 417, 441, 448, 449, 452, 453, 469, 473, 482,501, 509, 525, 526, 528, 529, 530, 537, 569, 582, 585: n = A,T,C or G
  misc_feature 586, 589, 606, 611, 613, 614, 615, 633, 640, 641, 649, 660,661, 670, 671, 672, 682, 689, 691, 709, 730: n = A,T,C or G
tcactattaagcgtgaccggagnttcggnaagtctgccaccctgccgagctcgggcggggnccgccatcctatggngtgttccatnccgcatagaaagccactncgcccctngnttgcccttggggtnccccgcctttggtggagggggggaaagggggaccattttaagaaaaaaaaattgganattttggaattggttgttttcccttttaaaaaaagnggaattggggncccaggngnaaaaaaaccanggaatcccttngttttcgntaggngaattgattttttnaatttttttggaaaacccggggnnanttttaaacnaaggaatttttttggaaaaaattnggaaaaggttccacccaannaagggttnggaaggccctttttttaacccccaaaaatttggaaaangnaaggggggaaaaaaaaacccatgntaaccgnnatnnaaaaaaaaaaatttcntttngggaaattngggggcctttttccaaccnaaaaaggnaaacccaattttggcnnannncccaaanaaaccccaaaaaaaaaatttggggggaaaaanttaacccccccgnttnnggnaaaatttggaacccccnttttngnnngggggcccaaatttcccntaaaaanncctttggngggggggtaanngggggaatnnnaattttaaanccccccntnccgggggggggcccaaanaaaaaagggggggggttttcn

SEQ ID NO: 8625 - DNA, 141 bp, Homo sapiens
  misc_feature 5: n = A,T,C or G
tactnctatagggcgaattggagctccccgcggtggcggccgaggtactgcattcttgcttaatagtattaaccataaaggaggtcaggtttatagggtttggtttacctattaaaccatcattgactatggaaatactta

SEQ ID NO: 8626 - DNA, 437 bp, Homo sapiens
  misc_feature 2, 358, 365, 405: n = A,T,C or G
tnctatagggcgaattggagctccccgcggtggcggccgcccgggcaggtacgcggggacctccttatggaagaagatgacatggccttggcaaatgtagtcatgcaggaagctcagaagaagctcatctcacaagttcagaagaggaatttcatagaaaatattattccaattatcatctccctgaaagactgtgcttggagaaaaataagatcccagctttgcgggaactcatgcactatctcagggaggtgatgcaggattaccgagatgagctcaaggacttctttgcagttgacaaacagctggcatcagagcttgagtatgacatgaaagaagtacctcggcccgctctagnaactagntgggatcccccggggctgcagggaattccgaatatcaagncttattcgattaccggttcgaccttcgagggg

SEQ ID NO: 8627 - DNA, 391 bp, Homo sapiens
  misc_feature 15, 76, 77, 365: n = A,T,C or G
tatagggcgaattgnagctccccgcggtggcggccgcccgggcaggtacgcgggggggtaaagctcctcggcctcnncgtgctgcgcctccgcggctgccctgcgccagaattcggttccctcaaaattataaaagcaggaaagctcaagacaaagaaatccaacaaggctagtgatttcagtgatatggagaattggccaacaccaagtgaattagcgaacactggatttcagagcgtcctcagccaaggaaataaaaagccacaaaatagaaaagaaaaagaagagaaggttgaaaagagaagtaacagtgacagcaaggaaaaccgggaaacaaaaattaaatggtcctggtgaaagcgtcngtgaggatgaggctcaagtcaagtaa

SEQ ID NO: 8628 - DNA, 422 bp, Homo sapiens
ccgcggtggcggccgcctgggcaggtacttaagcaaatactgagtagtgttttaaattcagaaatagagcttctattatgaacacatgagaatgatttttttctcttaatcattattaaggaaatattttaatttcatggtcatataatggtgataaagtaataccctgattggtttccttttctgttctaggtaactcagaggagatacgtgttttatttgtgatagtaaaattcctaaatgaacattaaggcaagtggtatcattatcaggccaagctgcagcctcttgccttgacctggcattcctagaaatttctttgttgctgtaaattcttgattaaagtggacccttgactttcattttgtaaatttttgctaatcatcaagcaaaattcacttgcatgacgtttactgcccaaa

SEQ ID NO: 8629 - DNA, 304 bp, Homo sapiens
ccgcggtggcggccgaggtacacaaaaagttttcttgtatataagtgaatttctagcaacacctgcttacacacacacacacacacaaatgaacatccgttttctgaaatgcttgggatcagaagtgtttcagatttctttttttttttgtattttggattatttgcattatatacttactggttgagcactccaaatctgaaaatctgaaatcttccagtggccatttcctttgagcatcagtcatgttggtgggtcagaaagttttggactttggagcatttgaatttctggattagggata

SEQ ID NO: 8630 - DNA, 150 bp, Homo sapiens
aggtacccaggaatctgcattctcgacaagcgtccgcgccgacggggctagtgaagtttgagaacaattgcttcctacccagccgctccgctatcacctaggtagcacggccgctgcggctgaggctgtgactccccgcgtacctgcccg

SEQ ID NO: 8631 - DNA, 373 bp, Homo sapiens
  misc_feature 2, 167, 185, 359, 361, 364: n = A,T,C or G
tncttagggcgattggagctccccgcggtggcggccgcccgggcaggtactttaaaaatatagactttctagcaacttataaatttctattataataataaattgatactttgagccaagaaaacaatataaccaaaaattcatttgttccctttgtttaggggtgntttacctttaatgcatanttttgcttttataaaagatgattgttacaatcaggtatacaactacttggttatgtctaagttctgtctcttaaaatatgttcttttagagaattcatttaatcatcttattcttttcttcaattttctccaaacaagtggtgaggaagtacctttggccgctctagaactagntnggnatcccccgg

SEQ ID NO: 8632 - DNA, 358 bp, Homo sapiens
aggtacacgagactgattaactgggtgagaaaggcaagtaacaatttagttaaaaacctgctggcccaaggtcagttgattcattccttattccagaatagttaagttcctgaaagtccttaaccactctgctcccttactgttctccatgtttgagggtatcagaagccccctgtgaggttcaccgctgtgtatagactaggtagcagatttcccttctgttcctcttaaaacagccttatttttaaaaaggaaatatccctggagggcaaattaaacaaaagcaaacacaaggcaggctttctttcccaaccgccatttaaattaccattaagaccactgcttcaaggtttttttt

SEQ ID NO: 8633 - DNA, 315 bp, Homo sapiens
  misc_feature 97, 156, 249: n = A,T,C or G
caggtacacactgggtctccaggcagcagccgtcgccgcatccccggcagcagctccaggcaaagtgacaggaaaagacgatttctctctgattcanaatcctgaaaatgtgatctcccttaaaaagaggacagtgctgctgtgagtttgacgaantggacatcacctgcagtcagtccagagctgcccagtcttgaatataatcatggccaaaccttatgaatttaactggcagaaggaagttccctnctttttgcaagaaggaacagtttttgacagataccgaggaggaatccttttgtgtttgaacccaac

SEQ ID NO: 8634 - DNA, 491 bp, Homo sapiens
  misc_feature 18, 21, 29, 72, 342: n = A,T,C or G
ccggcgaattggagtttnccncggtggcngccgaggacgtgtaatatgcataggtgtttgtgagctgcagcnttagtgtatcatttgcatcttttgaacaattgtctttgggatccattgtgatgacatctgtctttattggaggaaagataatttcttgatcaactccgtttattattctcatgtcccgcgtacctgcccgggcggccgcccgggcaggtactgtttattaactggctagattacaaaaaataattgtggtaggcatgtttattcttctaataagcctgttgatctggtcttccctgttgcagcatctccaccttctacaaaattggtggnctttttcttcattctaacttgcgagaggataatttgaagggccacaggaagttatttgcttctttaagcattttccaacagtatagatctcatgaatcagaacctccatgcagatgaggccatatttaccaaggagatcgagcaatcaa

SEQ ID NO: 8635 - DNA, 435 bp, Homo sapiens
cttagggcgaattggagctccccgcggtggcggccgcccgggcaggtactgcagcccgcctcaatatccccttccccttcatcgtcttcgcttacttctacatggtggtgaagaagtgcttcaagtgttgctgcaaggagaaaaacatggagtcttctgtctgctgtttcaaaaatgaagacaatgagactctggcatgggagggtgtcatgaaggaaaactaccttgtcaagatcaacacaaaagccaacgacacctcagaggaaatgaggcatcgatttagacaactggatacaaagcttaaatgatctcaaggggtcttctgaaaggagattacctaataaaatcaaataaaaactgtatggaactctaatgggagaaaaaatctaaattatagccaaggatcatatttaagggaatgcctgatgaacaatt

SEQ ID NO: 8636 - DNA, 399 bp, Homo sapiens
  misc_feature 7: n = A,T,C or G
cgaattntagctccccgcggtggcggccgaggtactggcacatattcttagacgaccaattatagtttatggagtaaaatattacaagagtttccggggagaaactttaggatatactcggtttcaaggtgtttatctgcctttgttgtgggaacagagtttttgttggaaaagtccgattgctctgggttatacgaggggccacttctctgctttggttgccatggaaaatgatggctatggcaaccgaggtgctggtgctaatctcaataccgatgatgatgtcaccatcacatttttgcctctggttgacagtgaaaggaagctactccatgtgcacttcctttctgctcaggagctaggtaatgaggaacagcaagaaaaactgctcaagggagt

SEQ ID NO: 8637 - DNA, 427 bp, Homo sapiens
  misc_feature 246, 287: n = A,T,C or G
atcgactactataggggcgaattggagctccccgcggtggcggcccgaggtactttttttttctttttctttttttttttttagtttttgagatcgtgtctcactcctgttgcgcatgcctgtaatcccagctactcaggaggctggggcaggataattgcttgaacccgggaggtggaggttgcagtgagccgagatcatgccactgcgctccagcctgggcaacagagtgagactttgtctcanaaaaaaagaaaaaaaaagatctggcggatgaaaataaccanaatgaaaatagctagaaaactcagcaaggcaggaagctccctttctcacccttttgttcccttgccgatagaatcaagtcactattagaaaaaatgaaagacgctctgtttaaaacaatgatgacagcagtacctgcccg

SEQ ID NO: 8638 - DNA, 527 bp, Homo sapiens
cccttagcgtggtcgcggccgaggtacattacaatggagaaagcactaggccactgttagaaagttttaatctgtcactgaaataccagcagactttagcctgattcctctcctgcaacacaacagggctgtgctagaagatgattagtttatcctccaactctgagagtcaatcattcatatttttatcaaaggccaccgaggaaaaaagcattccttttttcttcataacagcatttttataactacatcatgtatcaagttttatctgacattttcaatttaattcagcaatacttcacagtgaacatgcagcatctctttatatgaaacagatactcaaaaaatataagcaggtaataattttttaaaaatcatataaaagttaatgtgaagagactcagaaaataaatcatttgagcagattctttaagtcctcaaaacaaaaggcaggtgtaatttatttttttaactttttgtagagaagggatcttgcttggctatgttgcccaggctgggctcaaatt

SEQ ID NO: 8639 - DNA, 297 bp, Homo sapiens
  misc_feature 28, 31, 37, 39, 212, 222: n = A,T,C or G
cgcccgggcaggtactttattttttttnttntttttntntttggaaacattcaaagagcttattttatttatttcaaagatgtatacatgttgaaattaaaatttaaattaagaaaatttataaactgagtcaaaagaaaagtaagtgaggcagttggttaatgtgtcggttaatgccaccatagttctgcatgccctggaagtgtcaggcntaaacaactntaaagtattcggcatgcagccaggtgtggcaactcatgctgtcattccaggacgttgagaggctaaggcaggtgg

SEQ ID NO: 8640 - DNA, 643 bp, Homo sapiens
  misc_feature 2, 21, 149, 211, 212, 214, 220, 223, 227, 277, 292, 316,409, 421, 433, 461, 467, 502, 579, 586, 617, 643: n = A,T,C or G
anggcgaattggagctccacncgcggtggcgggcccgcccgggcaggtaccacagtatgctttattttgcaggtattaattggttctctaaatcgatacatccaaaacttcagttagcagcaagcatcagttcttccaaagcagcttangtgaaaaacaattgtttacattcaccagttcaaagtcgtactttattttttttttttctttnntnttaagnganactncattggcaaatgggaaaatgacaccaatcatttgattacagaaaatggtnttataaatcctcctnttgaaattatgttcaggcccagcntggtagcttatgcctgcaatcccagcacttcgggaggccaaggcagaaggatcgcttgagcccaggagttcgacaccagcctgggcaacatantaagaccccatntctgtttttttntaaaaaaaagaaattctgttcaaaagtntttcanaccaaaaggaggtcccaaaaactgttcatataatnactctatgagaaaaaaatccctgtatggaaaggggcactgaagatctggcacaaaaaaacaaggggagacagggcantgataanatccaccctatttttttagcatgcatttacnaccttgggggatatgtctgtacctcn

SEQ ID NO: 8641 - DNA, 381 bp, Homo sapiens
  misc_feature 348, 350, 351, 356, 357, 359, 360, 361, 362, 363, 366: n = A,T,C or G
aggtacactcggcctggctgttggagttgcttgtggcatgtgcctgggctggagccttcgagtatgctttgggatgctccccaaaagcaagacgagcaagacacacacagatactgaaagtgaagcaagcatcttgggagacagcggggagtaccaggcagtgacagccaccctggaggagaagaggaaagagaaagccaagatccactaccggaagaagaaacagctcatgaggctacggaaacaggccgagaagaacgtggagaagaaaattgacaaatacacagaggtcctcaagacccacggactcctggtctgagcccaataaagactgttaattcctcacanannaaaannannnnnaanaaaagtacctgcccg

SEQ ID NO: 8642 - DNA, 433 bp, Homo sapiens
  misc_feature 376, 377, 394, 396, 400, 402, 422: n = A,T,C or G
ccgcggtggcggccgaggtaccttttcttcccatcaaaaatgcattaacaagatcatgcttatagttagtcagcacaagaaaaaaacgacaatttatactgaactatttaagtcttgcagtagagtgctcacaactccgagctgtatctgttaaccttttcaatagcattcattatgtgacattgtcaccaattcccgcgtacgcgggatttatggcagtattcataattagcctgaaatgcattctgtaggtaatctctgagtttctggaatattttcttagactttttggatgtgcagcagcttacatgtctgaagttacttgaaggcatcacttttaagaaagcttacagttgggcccgccttttgccccggnnaaaccttaaaaacaaancnggtngnaatatcttgatctttacggntccttctgggc

SEQ ID NO: 8643 - DNA, 369 bp, Homo sapiens
  misc_feature 111, 114, 134, 165, 234, 273, 314, 366: n = A,T,C or G
ccgcggtggcggccgaggtacgcgggctatcaaagtatactgtgatttctctactggcgaaacctgtatccgggcccaacctgaaaacatcccacccaagaactggtatanganctccaaggacaagaaacacntctggctaggagaaactatcaatgctggcanccagttttgaatataatgtacaaaggagttgacttccaagggaaaatgggctaccccaactttggcccnttcaatggcgccctgcttgggccaaacttattgcccttntccagaaacaatcacccttaccacgtggcaaggaaaccagncaatttgcataacattgggaattgaaggaagaaacttgggccaacccttggnaaa

SEQ ID NO: 8644 - DNA, 118 bp, Homo sapiens
tacttagggcgaattggagctccccgcggtggcggccgtattgcctgccctccttaaagcctgcgtcccagtctgtgcgaatgattcggtcatccagacgcgtcccatttatgtacct

SEQ ID NO: 8645 - DNA, 637 bp, Homo sapiens
  misc_feature 221, 235, 238, 242, 309, 318, 327, 348, 351, 356, 372, 379,382, 413, 421, 440, 442, 447, 464, 473, 485, 492, 495, 502,505, 512, 519, 532, 538, 544, 546, 557, 583, 590, 594, 611,619, 628, 635: n = A,T,C or G
tacttagggcgaattggagctccccgcggtggcggccgaggtaccactgcactccagcctgggtgacagagtgagactctgtctccaaaaaaaactttgcttgtatattatttttgccttacagtggatcattctagtaggaaaggacaataaggattttttatcaaaatgtgttcatgcccagtaaagaagatggttatatttcttttctcaatttcttncccccaccccaaanaantaangcttacccattattaagcctttattaaagttctcaaaaattttttttttggccctttttttttaacntaaaaaaantgggttggnattttgggttttttttccttnggnttttncaatttttgggttggnttaattnggnccctttttccaaatttcccaacccccttaanttaatttntaaagggggggccaaaaananttttngcccccaatcttgtttntttttttgncccccctttttngggttgnccntttatanggngggttanaaataanggaatttttgttnaaaaanttcttnanaaaaaataaanaatttttgttttggggggcccccctnttttaanaatntaaaagattttttttcntttccttntcatttccnttttttnaa

SEQ ID NO: 8646 - DNA, 474 bp, Homo sapiens
cgcccgggcaggtacagttgtttggcctacctgatgctatctctaaactacttttaaaatgaagacatttgggtgtttcatgtcagtgaattatcttttctcttggacttaacaaacatactgttcccatacatagtactgtagggccagcatcatcaggaaagctccaggcttcacatctgatacagtattgtcaggagcccacttaaaaaataaattacaaaaaggctgttttgggagtaagcagttgaactgttttttccccctcaggtgcaacagagattgagcagactacaaatcggtccgtgcactggctgccttgggggcatatttaggcatcagttcatttatcttccggatgtagtcagacttttctgcacagcctttgcatgtctccccccagtcatccagaatcttcttcagctctttaactcggagcttcttcaggtccactgtgctcaggtccccgtacct

SEQ ID NO: 8647 - DNA, 474 bp, Homo sapiens
  misc_feature 366, 382: n = A,T,C or G
aggtacataaaagattttggaaatcgtgggaaaaaattataccagctataagctatttaaatactgttgatagttatcagagggaaatcaaaatcatataaacagcatactcaaaaaaatgagacaaaagttcaagagtatcatttttttgttcactgataaactaaaagccaatttctcggtatttctcatgtatacttcatttattttattaataagcaaagccctgtaaggggagcctttgcctagtcctccgactctgattcatcttcatcttgactaatctggaagtaacgaaagttcgtaggtctccttgtcagatgcaaccactcgaagccaatcaccgaagaatggtcttcttaaggnatttcttgggtaaggnatttcaaataccttttagagaactgtttctcagaaacaactgtgattttattcttgaagcgttcaatgtgaacaacattcccgagatttcca

SEQ ID NO: 8648 - DNA, 522 bp, Homo sapiens
aggtactacttcagccaatctgtgaatgtaaaaactacactgttgccttgctaggatccaccctcctataatatggaacaaatatctggatgaaatccaccctaggagacggagtcaaactaaacttgtggtttttcatttaacttttgactacagcatggccccatggcatccacaccaagagggtgttgtgatgaggtgccggtgtgcaaagggaactttagtttttccactggttcttatctgctagccttttacatacatgtgtaccacagtgtgtgagaggggaacccccatcaagtgtggccagcccatccggctgacacatgccaacactggccgaaacctccatagtcaccacttcacttcacctctttctggaaaccaggaagtgagtgcttttggtgaggaaggtgaaggtgattatctggatgactggacagtgctctgtaatggaccctactgggtgagagatggtgaggtgcggttcaaacactcttccactgaggtacctgcccgggc

SEQ ID NO: 8649 - DNA, 578 bp, Homo sapiens
  misc_feature 151, 230, 530, 533: n = A,T,C or G
ccgcggtggcggccgcccgggcaggtacttggagggttagacctacttctgtgtcaggtagcacccaaatcctaacatctattttggagacctgtctgtgcctcttcatgctcacaccattgttctgatagatgatgccagtggaacttcnaagaagcattccacctgatcttcaccaccctctttgatcctctttttaaatctgtgtgtggaaggcaactgcaatatanaggatttggaaggttgctgtttctgttgctggggaaatgataaaaaaaaaaaaaaagagagagatgtgaaaaggaaaaagatggccaggtgattttccaatcttcaaaatttaaatttcttggttctcataacataggaagagtcctgaaaggtggcaccaatggatattttgtaaaataaccccaactttagagctggaaaggacttgaagaaacaattaatccaacttcctcacttttttgtcttaagaaactgaagcccaattgggaaaacagcaacttacttaacatagtgattgnctncatggctatgtcctgtaaagattcacagaaaccccaatttccctt

SEQ ID NO: 8650 - DNA, 402 bp, Homo sapiens
ccgcggtggcggccgcccgggcaggtacccacaaaaaaataagaaaagaatttaaatatcaaaaaaaggataaatatttaacctatgggaacaatattaacttatctgccggttaaagctactggcaaaagagattactagagatgctattccactatgttactaaatagcatactgctaccttcatttagctacacccttgagtaacatgggataggttaaagttgatagcataataatgcttcattaaatgcacaatagtcttaacatggtaacaaataaaatcaaatttacacataatttaaaaattttgaaatatactgcattttataacataaaagctcaatcactaaaatgatttacaattttattataaattcacttttaactaaaaaatatttt

SEQ ID NO: 8651 - DNA, 402 bp, Homo sapiens
cggccgcccgggcaggtacagagcgttcagtttactcaggctgaatgttttctgacatatatctccagtatgaatttgtttatgtaaggaagagtttttcaggaagagaaagtagagaagaaaagaatgatgtaactaaatcaaaaaagaaggaaaagagaggaagtgagaaaaggggtgaggaaagagaaaggagtaagaatggggatggcaaagggcagagtaagagaaaagatggaatgagtgtatggaaaattgagaagtagagatggagagaaatggtgtggaaacatttactttttgagttgtagccctcacactacatcagtttgcttgcctgggctctctggggtcaggaaaggttgcttgacttccatggaatggggcagcagggcctgctgt

SEQ ID NO: 8652 - DNA, 199 bp, Homo sapiens
  misc_feature 3: n = A,T,C or G
ctnctatagggcgaattggagctccccgcggtggcggccgaggtacattgtctgaatccatgtagcaaccctgtaaggtgggtgttttatgcccattttacagatgaggaaactgaggctcacaaaagtttagcagagtgaggatttggaaccagtttttgctggacccaaaatccatgtacctgcccggacctgcccg

SEQ ID NO: 8653 - DNA, 506 bp, Homo sapiens
ccgcggtggcggcccgagatccaaggacgtaaggataagcatctaagcccaagtcacttgagtgtattttatcaaaggttatgctaaaaactgtcacccataaaagtgcaaaataaaagattaatgcatgtcaaaaatagagttcttgcaacattgtccaaaagcagcaaacatagttgaacaaggctgtgcatgcactgtcactagctataaagtaatgcttatgacagattttgagtaaatgacatatacttgagatcagttatttgcaaaaatttttttaaaaaaggaaatgtcttacaaaagatatatagcatgaagtcacattacactgaagaacacttatctgtattaaatgtaaattttatgtcatctagaaaactatcattttgcttttactgaacactaccagttacagcagtgcatagtgttcattcaaataaaactttatagtttcttttaagcccctaccatacacttttgcaaaacaagctctagaactagtg

SEQ ID NO: 8654 - DNA, 423 bp, Homo sapiens
  misc_feature 1: n = A,T,C or G
nctatagggcgaattggagctccccgcggtggcggccgaggtacactgagttttaactggacaccaagcaggcaaggctggaaggttttgctctctttgtgctaaaggttttgaaaaccttgaaggagaatcattttgacaagaagtacttttaagcattaggttcactaaataccacatctgcctatttactcaaattatttcctttacttatggctttttgcattatccagttttcctgacagcttgtatagattattgcctgaatttctctaaaacaaccaagctttcatttaagtgtcaaaaattattttatttctttacagtaattttaatttggatttcagtccttgcttatgttttgggagacccagccatctaccaaagcctaaaggcacagaatgcttattctcgtcactgtcc

SEQ ID NO: 8655 - DNA, 535 bp, Homo sapiens
  misc_feature 187, 246, 487: n = A,T,C or G
ccgcggtgggcggcccgcccgggcaggtacactatctggcctttgtcagggatgttttcagtttattcattttttttcccctttgaatgggtcatattttcctcattctttgtatgccttatgatttttgtcaaaaactggacatttaaatcttataaagcagcaactctgttagagtctccctttngtttttttgttttgttttgttttgtttttaatattgatgtagggtgtctccatgctaanaatcagcctgaggtgtaagcttaaggtcttctcaggtgttttctgagcctgtgcctttccatgggtataccttctacattcccccatatgcagttgcttttcaatatactagtcctcaaatatttccctctcaaaggggaaaaagagaacttcagtgggggaaaacagactctggctccttaaatcccctaaaagccactttagccagtggggggttgcaattggctgaagtagctttcangggatttaaagtggaccacctctgtgatcaagaaaaccccgcgtacct

SEQ ID NO: 8656 - DNA, 360 bp, Homo sapiens
  misc_feature 106, 108, 109, 119, 121, 123, 136, 145, 151, 158, 163, 166,168, 171, 174, 183, 185, 191, 203, 209, 212, 217, 226, 234,236, 242, 246, 260, 261, 263, 270, 271, 281, 283, 286, 290,306, 309, 313, 321, 324, 326, 354: n = A,T,C or G
ccgcggtggcggccgcccgggcaggtacttttttttttttttttttttttttttcttttttttttttttttttttttttttttttttttttttttttttttttttngnnaaaaaaaatntnanctttttatttggnggaaaaaanaaacanatttccntcccnaananggngtnaaaaaaaangnggcaanaaagggaaaaangcaaanccnaaagncatttaggncctttttnanaatttnaaanaaaaaaaaagggcnntnaggtttnnaaattttcananacnctanaaaggggcaaaaaagntanaaanattttaanttnanaagtttaaagtttttaaaaaaaaaaccncccaaa

SEQ ID NO: 8657 - DNA, 609 bp, Homo sapiens
  misc_feature 431, 441, 500, 516, 540, 563: n = A,T,C or G
aggtacgcggggagaaagaggaagatttctgaagagtgcagctgcctgaaccgagccctgtcgaacagctgagaattgcactgcaaccatgagtgagaacaataagaattccttggagagcagcctacggcaactaaaatgccatttcacctggaacttgatggagggagaaaactccttggatgattttgtagacaaagtattttaccggactgagtttcagaattgtgaattcaaagccacaatgtgcaacctactggcctatctaaagcacctcaaagggcaaaacgaggcagccctggaatgcttacgtaaagctgaagagttaatccagcaagagcatgctgaccaggcagaaatcaaaagtctggtcacctggggaaactatgcctgggtctactatcacatgggcccgactctcaaacgttcanatttatgtanacaaggtgaaacatgtctgtgagaagttttccagtccctataaaattgaaagtccaaancttgactgtgaggaanggtggacaccgttaaagtgtggangaaaccaaaatgaaagaaccaangtgtgctttgaaaaagctcttgaaaaaaaaccaaaaaacccaaaat

SEQ ID NO: 8658 - DNA, 203 bp, Homo sapiens
agggcgaattggagctccccgcggtggcggtgttcttctcctgcgtctccgttttcttcagcttggccttatcgaagctggcgatttcccccatgtctggtttgtctgccattttcttaaaacaatccgtgcagtctcgttccgagcccgagatcctggtgctcccactcgcgttgctgcagcaagaaaacccccgcgtacct

SEQ ID NO: 8659 - DNA, 237 bp, Homo sapiens
ccgcggtggcgtttccattaaaattttaagtttgccttaaaacaaaaaaaaacttggaaagcaaagctcccaaaccagctaagttagaaactgctcagtttctgaatgaaaatgacactgctttttatttttactctactgaattgaaagaacagaaaaagaactacagttggtatagagaactattaggccatctatacagacacctgagaaccaattcttctctcccgcgtacct

SEQ ID NO: 8660 - DNA, 486 bp, Homo sapiens
  misc_feature 12, 83, 87, 125, 137, 148, 149, 158, 161, 168, 170, 174,176, 207, 210, 220, 229, 242, 244, 254, 270, 278, 297, 313,319, 321, 322, 330, 334, 355, 358, 364, 379, 380, 402, 410,427, 450, 454, 462, 466, 471: n = A,T,C or G
tttttcttcttncactaatttggaagagtctgatttattggataggatcgattttaaccacctataaatgttttcttttttcnggtntaaagtaacataataattgcaatacatttttcctgtantaaatttaagtnaatcctttttnnccagtggcntcnaaagatntnttantntgtcggttttttactaagaagataatgtgcnganatcgtaactnactggcaangctatttctaggngnatgcctaacntctatatttctctctnaactgaanaatgctggcactggaaganttggtgataccctganggaatntnnacattaantgcngtcaccaccgcgaaacctttnccnttttcnctgctctcactatanngcaggcgctggtctaagtaccnacggccgnttctagaccttgtggancccccgggctggggggaaatcantatnaagcttangatnaccgngagcctcaagggggg

SEQ ID NO: 8661 - DNA, 621 bp, Homo sapiens
cccttagcgtggtcgcggcccgaggtacctccttctatcaaaagtagacattcatttgaaagcgggagaataccatcatttttcacaaaatgaactgctacttttcgcctttttgatttttagtggtccagatttttgaatcatataatgatgtattttgtagcttgacatctggggttttagttgcaccatcctgaaaaattatatccaaatcgccctcatgtggaacttcttgcagcaaatgacatttagggcaatgaagtttaacagactgaaatagtcttctgggcttatatgacctcaattttgctcggatgcggtattgttgaggagctttttgtttcaaaatggcacatagtggtgtcctctccaaatactgatgatctgtaagtattgtagcagatagctgttgacatctttctacctcgtataatgatactgatccagagcttggaaagctgtcgtcaggttctgattgacagataacatctgaatgctgattggctgtcaaatttgcagattctaaatcctttttcaagttgatccacatcaagagttactttctggtaagaccctgattccccgaccgtaactggtacctgcccgggccggccgctcgaa

SEQ ID NO: 8662 - DNA, 395 bp, Homo sapiens
ctcactataggggcgaattggagctccccgcggtggcggccgcccggggcaggtaccgtgttttaagcttagttcagtctcaagtgtttgcagccacatctgaagaccaataaagcaactgctggtttatcctttgggagctgacagaatttcttctcccaaatacatacacagtaaaatcataagcctgaattacctgtgaagttgctttcagatcatatcgttggtccactcttacagaaggatcactttaaaatatctctgcatttgtatccttgcaatgccacaactaaaagacagttatctcataggtccttgattaaattaggaggctttttattgaacacaagaaaatgatacttttcaggcactggggcagaataacttgctagaaa

SEQ ID NO: 8663 - DNA, 441 bp, Homo sapiens
cgaggtaccgtggtgacgtggttcccaaagatgtcaatgctgccattgccaccatcaaaaccaagcgcagcatccagtttgtggattggtgccccactggcttcaaggttggcatcaactaccagcctcccactgtggtgcctggtggagacctggccaaggtacatgtaggtaaaataaaaacagaacaaaaacccctttccactcagggtcagagtatattacatgagcgagagagacagacgtggagaactcacaaatgctataaccaacaggatctagtttttccacgtgatggagttccaagcttttttttgttttgttttgtttcgcaaaataaaaacaatacacattccaagagaaatgaatgcatctgttgacacgtctctatttcttcatttacatatgtacctgcccgggcggccgcttctagaactagtg

SEQ ID NO: 8664 - DNA, 358 bp, Homo sapiens
tcactatagggcgaattgggagctccccgcggtggcggcccgaggtacatgtgggttagcaggagtttaggatgagagaaatttagtggaccgagaaatagtctaaatatcagttttaatttgtgaaagaaaaataaaaacctgggaccccaattcactatgcctaaaggaaaaaaattaagctaaaagctgaatcatgcaagaagctgttttttcctttgttcttaagcagagcactacagataaaaaggtgaaatatctccccaggtagctactctatgttcacctgaacttatgtaaagttctgatttactgagcatgagaagaacacataattgactattcctgtacctgcccg

SEQ ID NO: 8665 - DNA, 407 bp, Homo sapiens
ccgcggtggcggccgcccgggctggtacatagtttgtatctttaccttacggagtctatgagatttgagaatttgatttcactttttgtaacttaacccacagaaaaggacattaacttagcagataggaccaaggactgaatgacttctgacaaaaagcgtttggtctatccttcacttgttgagctacaaccatgcattacacttctcagctgagctctcaaagagctctatgccctgtgaaaagcagtggctgagttggatgaacacatagcattattaattttgcactgggaaaacagattatgacaggaccacagaccacaatataaaaacttggcagttctttggtgtgatatattttaattagtatttgcaaataatcagagttacttgtgtacctcggc

SEQ ID NO: 8666 - DNA, 468 bp, Homo sapiens
  misc_feature 248, 395, 405, 433, 440: n = A,T,C or G
cgccagtgtgatgggatatctgcagaattcgcccttagcgtggtcgcggccgaggtactttcttttttttttttttttttgaggtggagtctccctctgttgcccaggctggagtgcagtggcatgatctcggctcactgcaaccctccacctcctgaattaaagtgattctcctgcctcagcctcccgagtagctgggattacaggcacgcaccactacacccagataatttttgtatttttagtanagacgtgatttcaccatgttggccaggctggtctcgaactcctgacctcagctgatctgcccgcttggctccaaagtgctgggattacaggcgtgatccactgcacctggcctcaggtatgtttttctatctacacacaaaaagttnattttccttnctcttatttgatatcagaagaatgacangaatcangtttttaacaagaagataggttttcccg

SEQ ID NO: 8667 - DNA, 522 bp, Homo sapiens
ccgggcaggactgttcaaaaaggaatgccccacaagtgttaccatggcaaaactggaagagtctacaatgttacccagcatgctgttggcattgttgtaaacaaacaagttaagggcaagattcttgccaagagaattaatgtgcgtattgagcacattaagcactctaagagccgagatagcttcctgaaacgtgtgaaggaaaatgatcagaaaaagaaagaagccaaagagaaaggtactgttgttgagaagcttacattttagggagaggctggtcaaatctctactctctggtaacagcattaacaagagtctttcttttggaaacagactcagaagttatggacatcagccacttcagacttctttaggccagtatccttgaggtgactgaccagcctcctcatggattggagtttcccatcattgttttaattgctggaaatgttggcctaattctgcttccttgtaactttctgctttttagtacctcggccgctctaaaactaagtggatccc

SEQ ID NO: 8668 - DNA, 621 bp, Homo sapiens
  misc_feature 188, 189, 191, 196, 198, 204, 209, 210, 213, 214, 218, 224,228, 232, 233, 237, 239, 242, 244, 250, 252, 253, 255, 259,261, 268, 269, 270, 272, 274, 277, 278, 280, 281, 285, 288,289, 292, 295, 297, 298, 300, 303, 305, 307, 312, 314: n = A,T,C or G
  misc_feature 318, 324, 325, 331, 332, 334, 339, 342, 343, 347, 348, 349,350, 353, 356, 359, 364, 370, 371, 372, 373, 374, 376, 377,383, 384, 385, 386, 387, 393, 394, 396, 400, 402, 404, 405,413, 420, 421, 422, 426, 435, 439, 440, 441, 449, 455: n = A,T,C or G
  misc_feature 460, 465, 474, 475, 477, 485, 486, 490, 495, 500, 501, 503,504, 505, 509, 510, 511, 518, 520, 524, 527, 528, 533, 539,542, 543, 544, 547, 548, 549, 550, 554, 555, 557, 558, 559,560, 564, 565, 566, 569, 575, 576, 577, 578, 583, 585: n = A,T,C or G
  misc_feature 587, 588, 589, 591, 592, 593, 594, 595, 597, 598, 599, 601,619, 620, 621: n = A,T,C or G
aggtacctgtgcacatttcaagatagcagcactcagtccatgccctattatccatcttaaaagttcacacattattgtttactgaataatatttctactgtctttacccccaaacattgcaaaacctgcaatggaacaatgctgtgagttataatgtagaaatttttttttttttttttttaaaaaannangtacntnattttnttaannttnngaantcaagntatnaaanntttntnccnanggcatncnnangaancnaaaatgnnngncnccnntnnaaanaannacngtntnnanggntntnaagantnatgnaaaccnncccggnncnagggnttnnaccnnnnatnccnacnctttngggggnnnnngnnggtggnnnnnaagggnnanaaantnannccattccnaccaacnnngggnaaccctggntttnnntaaaaaanaaaaantaacntggcntgggggggnncnccccgaannccancttcntaggnngnnngggnnnggaaatncnttgnacnnggggngggggnggnnnaannnncccnnannnncttnnnggntttcannnngggancnannnannnnncnnntnaaaaaaaaaaaaaaaaannn

SEQ ID NO: 8669 - DNA, 223 bp, Homo sapiens
  misc_feature 17, 50, 53, 56, 62, 64, 91, 128, 130, 134, 140, 199, 205: n = A,T,C or G
actatagggcgaattgnagctccccgcggtgggcggcccgaggacttggnttncgnatgttntntcccctgaaatctgcctagaggaattntattctaattaaacatacacacatacgtttttctaantncatnataaangcaatgcttttgaacttcctaataatgactttattcactatttacatttggctcactgntagaanacagttacaagcataaaa

SEQ ID NO: 8670 - DNA, 228 bp, Homo sapiens
aggtaccaactgggtttggcaggaagcacttttgactccttagttttagttgttaaatgatgtggaactttaaacagttcaggaggtggagttagtgtggttggaaaggcaggcagtgaggtgtggaataaagaacaagggctttgataacttcattcctcatgttgttcctggataagtcatttcatctttcttagtcttaaatttcccaactgtaaatgtggaaat

SEQ ID NO: 8671 - DNA, 183 bp, Homo sapiens
agggaccaatttctaatcattgcttcattttcttcataccacggaaaaagacccaacaaatggtgcccatctggaaggatgaaggcctcctggcaatgttctcttcaacctatgatgtaggttaacaagagtggaccagtgttctgtttctgaatgattatggagaaacaaaggtacctcggc

SEQ ID NO: 8672 - DNA, 440 bp, Homo sapiens
  misc_feature 332, 433: n = A,T,C or G
cttagggcgaattggagctccccgcggtggcggccgaggtacatttgtaaaccatttactgtctgggcaatagtgactccgtttaataaaagcttccgtagtacattggtatggattaaatgcataaaatattcttagactcgatgctgtataaaatattatgggaaaaaaagaaaataccgttattttgcctctaaacttttattgaagttttatttggcaggaaaaaaattgaatcttggtcaacatttaaaccaaagtaaaaggggaaaaaccaaagttatttgttttgcatggctaagccattctgttatctctggtaaaatactggngatttctttttttattttctctttagaattttgttaaaggaaaaatttctaaaattttttaaaacaccctgcttctcccccaattaaaattcaccaaaccnctaaaaa

SEQ ID NO: 8673 - DNA, 502 bp, Homo sapiens
  misc_feature 395, 455, 457, 460, 470: n = A,T,C or G
cgagggtactccttgactgcaggaggctggaagacatcctagtagctccactcagaacatttacttcaagaagcctttttccagtttccaactcatgaataaagataatattttgttaattctattccagaaaacttttttgcaagttgttttatttacaatgccaacttttaaaaggtcactaaagttaactggacaataaactaggcagacattgctttacaaaaaaagagggaaagtcatttttgatattgaaggtcttgcgaatctcctcaggagttttccccttgatcatattggcaacagtcctgcatgtaacatcaagcaaacctttgatgtctaagtaagtttgcagccagaatgagttcaaaaagtgttccttggtcaactttcangaattcttggtcccaaacagggatatcatctgttcgcttttctttggtctcatcatcttnangangaggaagggncatcctgtggtggggtgcaccactgaatgacc

SEQ ID NO: 8674 - DNA, 475 bp, Homo sapiens
  misc_feature 257, 287, 390, 433, 434, 459: n = A,T,C or G
ccgcggtggcggccgaggtacttttttttttttttttttttgctttagattttgttttcttacattctggagaaccgaagctcagctcagccctcttccttattttgctcccaaagcctcccccaaatcatcactccctgccccccttaaggctagaggtgagcatgtccctcacaattgcacatgtcaagccatcagcaaggcgcatcacacaaaaggcaccaagacgtgaaactttttaaaccaaaaggacgaanaaaaaacactttcaaaaaaaaaaaaaaaangtactaaaagaaacaaattatttataattggggtgacaatataaaggaacaaaagatggggcaatagttgctttctagctggagctgtaagtccatgttacanaaactcactatttaaaaagttttaaaagatttatgaaccttgnnctacaattcgctgaatacttatttnggcttttaaacccccc

SEQ ID NO: 8675 - DNA, 283 bp, Homo sapiens
  misc_feature 52, 56, 63, 65, 67, 74, 75, 76, 79, 80, 94, 96, 104, 105,115, 118, 122, 125, 127, 128, 129, 131, 133, 134, 135, 138,140, 141, 142, 145, 151, 153, 162, 165, 168, 170, 172, 178,184, 185, 209, 214, 223, 238, 239, 246, 248, 249, 256: n = A,T,C or G
  misc_feature 258, 259, 261, 263, 267: n = A,T,C or G
tttttttttttttttttttttttttttttttttttttttttttttttttttncctnggaaaancntnaatgccnnnaannaaccccaaaagggncnaaaaaaannccccaatttnttnaaanaancnnnangnnnaancnnnttnaaaagngnaaaaaaggnccnaantnanttcccnaaaatnnaaaacccccccccccaaaaaaggnaaaanggtcccctnggggaattcccccgnnaaaaatncnnaaaaaancnngngnaaantgggaaaaaaaaaaaa

SEQ ID NO: 8676 - DNA, 574 bp, Homo sapiens
  misc_feature 25, 274, 298, 350, 378, 404, 463, 490, 496, 520, 564: n = A,T,C or G
agctccccgcggtggcggccgaggncagtgtggcagtggaggcccgtcagattactgatacttatccttaagtgagtcctgggaagaggggaggccagtgtctcagacctttgcccttccagggtcatctccctccacctgtcacagctgactcttccatctgtgcaggtgactgaggtcattcctgagttgcaagtatgttgagagggtaatatttctgtcttctctaactccccatactcccttgtcttccactctccacttaggagttttntgtgagttatgtccttgttgcttntgcctctttttctttctagccttgattgtgccagaagacaatgtccctattnacacactctttctgcttttctgtggcangaacatggaaggggtgctgatggacnccggactgtgagagcgtctaccccattgtgtaggcctctaaattgaggcctggccttcngctgtgggtgaatttctgtcctgcccnggcggncgtctagaactagtggatcccccngggctgcaggaattctatattcaagcttattgaacccgtcaaanctcagggggg

SEQ ID NO: 8677 - DNA, 196 bp, Homo sapiens
  misc_feature 47, 55, 58, 83, 117, 119, 121, 135, 145, 184: n = A,T,C or G
atagggcgaattggagctccccgcggtggcggccgcccggccaggtncaaatcanccnaccccactaggaactatgttaaaanaaaattcaagaaagaatttaagggagattacagngntnctgcgtacaccacngaaaacttanaactttgtgtgaaatagactggccagcattagaggtggnttggccatcaag

SEQ ID NO: 8678 - DNA, 338 bp, Homo sapiens
  misc_feature 4, 41, 56, 198, 199, 323: n = A,T,C or G
gganctccaccgcggtggcggccgcccgggcaggtactttngattgtaagcacagngtggggatgcatcaccttcactgagtttgctttgatgatgctttgcatgttggcctttggacgacagttttatagtatggtcgattataatgccagtgctatttaggctggtgcaaaagtaattgcagtggcaaaaaccacnnttacttttgcaccaacctaatatgttttaagatagtatattatgagcaaaggagaaaacgtttaaaatcatgtttattttgtaaactccaaaatgcatgttacatgtgaagtgactcactggangaaggtgagtacctc

SEQ ID NO: 8679 - DNA, 646 bp, Homo sapiens
  misc_feature 17, 167, 240, 317, 327, 335, 373, 377, 421, 427, 432, 458,469, 484, 539, 552, 556, 557, 559, 578, 589, 592, 604, 612: n = A,T,C or G
ccgcggtggcggcccgnccggccaggtacagccagtgtggggatgtgatgagggccctgggccagaaccctaccaacgccgaggtgctcaaggtcctggggaaccccaagagtgatgagatgaatgtgaaggtgctggactttgagcactttctgcccatgctgcanacagtggccaagaacaaggaccagggcacctatgaggattatgtcgaaggacttcgggtgtttgacaaggaangaaatggcaccgtcatgggtgctgaaatccggcatgttcttgtcacactgggtgagaagatgacagaggaagaattncagatgctgntggcaggncatgagggacagcaatggtttgtatcaactatgaaagncgtntgtgaaggcatatcctgtccgggtgacgggccccattggggccngagctngtccngcattggttgcctgaaatggcttgangacctttccangtcttccccagaagnccggggcttttcccttgtggggaaattttggatttttccctaaaggttccccttnggctttttttggnttannanacttttcccatctttgttntttttggattnaangtttccctttcncatttacnaataaacttgcttttttggggccttaaaaaaaaa

SEQ ID NO: 8680 - DNA, 293 bp, Homo sapiens
actacttagggcgaattggagctccccgcggtggcggccgaggtacattattggaggactcaaatctgtatgtgacatgtcccaactactgtccgctaactagttatccaaattgtaaagctacagaagcccagttgaggggtaagtgtgcctggctcacacagcctgcaccctgtcacctcggcaatgagccagtgtggggcactggggacttctaacccttggattgctcttttagacctgtgcataccttctaattgtaaaatatatttcagaccgtgagtacctgcccg

SEQ ID NO: 8681 - DNA, 440 bp, Homo sapiens
  misc_feature 54, 69, 76, 99, 132, 147, 180, 294, 389, 432, 440: n = A,T,C or G
tcactataggggcgaattggagctccccgcggtggcggccgaggtacacattgntttgtttcttatatncagagtntagtcctcaactctaaccaaagnaaaggaaactggaaagacacacgctttttcagncattaatagaaagtngtccaggtaagtttctgatggtatatcagttanaaataatatttagctatttgtaataaaaagctgaaaacagtagcttgaatcaatggaagactttatctttctcctcatacagctgacaataatgttgttgcctttatgatatcnaagccccaggttccttttatctttctgcttaacctgccttggcaaatgcttgctgcttcatagtcacatgatggctgacttactgtaaccttcangtagaaagaaaggaagaggtaaagagataaaggtacctgcccnggccggcn

SEQ ID NO: 8682 - DNA, 290 bp, Homo sapiens
  misc_feature 9, 71, 123, 137, 277, 278: n = A,T,C or G
ccccgcggnggcggccgaggtactcagctgccctttccttttttgtcactcatttaacttttttaatgggnctcaaaattctgtgacaaatttttggtcaagttgtttccattaaaaagtacncgggatacccacanaagccagtgccagttgacgctgaaagaatcaggcaaaaaagtgagaatgaccttcaaactaaatatttaaaatagaacatactccccaatttagtctagacacaatttcatttccagcatttttataaactaccaaattnntgaaccaaaaat

SEQ ID NO: 8683 - DNA, 577 bp, Homo sapiens
  misc_feature 499, 514, 549, 556: n = A,T,C or G
aggtacttgaatgtttataaagtttacgaggtctactatgcaatttccgatcccaattctctggatcactggagttaccatcatagggatgaggccgtcctgccatcccactccaagcttcctcacactactgctctgaaagcacgcatgtagcacccataactctcgaacctgtagtcccccttcagtgcccacacaagattggggcaaaggccggggccagtgacacctccacttcctcctcagccagatccctccccccgcgtacagctatctgaggcagcccttcagaagaaaacctgtggtgccgagtgcagtcaattgatggcctcagctgcagcatctctgggacctgcctcaagatgagagctaaaaacgtggctcccagtcagtgcctgagcgtggcaggggtcctagggcctggccatttctatgcaatgtgagactcctccaactgtccatctgtccttgggagctcctgttgggctagctgcaactntcagggctgctcatnacccgaggctggctcttcttttcctccatcctctnacactgncagagttacaccatgggctga

SEQ ID NO: 8684 - DNA, 158 bp, Homo sapiens
tatcactacttagggcgaattggagctccccgcggtggcggccggcgcgcgggccccgcgtactcagtagggactgagcactaaatgcttattttaaaagaaatgtaaagagcagaaagcaattcaggctaccctgccttttgtgctggctagtacct

SEQ ID NO: 8685 - DNA, 795 bp, Homo sapiens
  misc_feature 555, 662, 720, 741, 761, 766, 770, 782, 785, 787: n = A,T,C or G
tagggcgaattggagctccccgcggtgggcggccgaggtcttgcggcccggcagctctctgaactgatgtaagacacggtcagtctgatgagctccaatggtgacttccgggagaaagataggaatgcttgtgtaattcagcacctcaaacttatcctgaaccagtaatcgcaggtggttaaagtgcgattgtcctgcttgagccacggccctttatcgaacttcaggtattcaatgtcctctaccaccttttttgaatcttgagcttcccttgcagaatattgtaaaacctcacatttttcactcatctcagggagaaaggttttcttataggcattctcaatgtcctgtagatatcgagcggccgccggcaggtctgcataattatagtcaatgcttgcaataattttcagtttgtctcatcacgttagcagagcctattcatgcaatttagaaaggatttcaatacagcccaaaccaaaaggcttacggtcaacagagggttagccttccataaatgagaaatccaaaaaagaataatgccacgtatttcangaatgtcggttagaggtttggccttcttgggaagtgtcacaatgctgagtctaaaactgcaacagttaccgtgtccaagtcatgcaactctaaaggaggatggccgncacatttgtgtctttcagtatcaaagacctttaaggctttcattttgagaaaagtagnatttctcttccttctctttanaacatataataaaatattgnccttntatnctttaaccatgnatncntttttttt

SEQ ID NO: 8686 - DNA, 253 bp, Homo sapiens
  misc_feature 182, 253: n = A,T,C or G
ctatagggcgaattggagctccccgcggtggcggccgaggtacaggctcactgaacacgagagagctcgcaaaggagagaaaccatacgggtgcagtgaatgtgggaaagccttccccaggaaatctgagcttactgaacatcaaaggattcacacgggaattaagccccatcaatgcagcnaatgtgggagagctttctccagaaaatcactactcggtgtacctgcccgggcggccgctctagaactagtn

SEQ ID NO: 8687 - DNA, 363 bp, Homo sapiens
cgaggtactcattttatgtatgttacccttcagtaagttctccccattttagttttctaggactgaaaggattcttttctacattatacatgtgtgttgtcatatttggcttttgctatatactttaacttcattgtaaatttttgtattgtatagtttctttggtgtatcttaaaacctatttttgaaaaacaaacttggcttgataatcatttgggcagcttgggtaagtactttttgttgttgtttcttttttttgtttttgtttttgttttttttttgcgttcgtggggttgtaaaagaaaagaaagcagaatgttttatcatggtttttgctccagcggctttaggacaaattaaaag

SEQ ID NO: 8688 - DNA, 373 bp, Homo sapiens
  misc_feature 99, 145, 150, 180, 191, 199, 217, 218, 220, 232, 242, 277,305, 315, 320, 341, 346, 349, 354, 358, 367: n = A,T,C or G
ccgggcaggtacacttctgtttctttcagctgtattatttatacacccaggttttctgttaaggatgtaatcattcattcaagaaagaacaattggcangaaataatcaaattaccttaaaaagaattatagaggcacttccagnccagnataaacaccttcccaacaacatgaaatttnagttaagtgcnttaagtgnaaattccttaaaatatannancgtattagtggntttgcttcanacagtttattttaaagtaataaaccttaacctgtnttatctattattcttttttcaaatgggntggttttgtnaaacnccacccctggttaccccttcnggacncgnctttnttangtaaacctnaggttg

SEQ ID NO: 8689 - DNA, 447 bp, Homo sapiens
  misc_feature 4, 47, 89, 399: n = A,T,C or G
actnctatagggcgaattggagctccccgcggtggcggccgcccggncaggtactccagccagggcaagagagcgagaccctgtctcantaaataaataaataaataaataaataaataaataaaaacaaagttgattaagaaaggaagtataggccaggcacagtggctcacaccttgtaattccttgcattttggaaggctgaggcaggaggatcactttaggcctggtgtgttcaagaccagcctggtcaacatagtgagacactgtctctaccaaaaaaaggaaggaagggacacatatcaaactgaaacaaaattagaaatgtaattatgttctaagtgcctccaagttcaaaacttattggtaatgtttgagagttgtgggttacgaaaatancgttagggagggaccaataagggaatgttgtaaaagtcttttaaatgc

SEQ ID NO: 8690 - DNA, 126 bp, Homo sapiens
  misc_feature 23, 32, 68, 71, 72: n = A,T,C or G
aggtacccacagctttttgctgntcttcatangacactcagcagaagacttcataggagactcattantgnntactggacatcaccgtgctatattgtatagcatgtcacattccacaggagagga

SEQ ID NO: 8691 - DNA, 351 bp, Homo sapiens
aggtacaagcatggcgctggtatctgcttggcttcctggtgaggcctcaggtaggattcagtcatggtgaaaggtgcagcagtggcaggcacatcacatggtgaaagtgggaacaagagagggtggaggtgccacacacttttaaacaaccaggtcaggtgtgaactcactcatcgccaagaagacggcactaagccattcatgagggatccgtcctgtccccatgatcaaaacacctcccaccaggccccacctctgacactggggatcacatttcaacatgagatttggaggggacaaatatccaaaacatatcaatatgtttcactatggaaactttacaagttcagt

SEQ ID NO: 8692 - DNA, 302 bp, Homo sapiens
  misc_feature 5: n = A,T,C or G
gactncttagggcgaattggagctccccgcggtggcggccgaggtacctaaaaaaaaaaaaaagtttaaaagttttgctttagagattccaaagaatatatttagacttataaaagcacttatctgataagattctatttgcttttctttattcatagagaccacaaacagatcgcagatccaggtttctcaaactgggagcatctgcttaattttcccataaaatcagtcttattctttctgacagctctgagactcctccggccacgactaggtgctgtcctggaggaaacggtggagga

SEQ ID NO: 8693 - DNA, 769 bp, Homo sapiens
  misc_feature 9, 97, 105, 109, 143, 212, 226, 235, 256, 295, 323, 329,337, 348, 356, 357, 385, 413, 424, 430, 450, 457, 466, 468,476, 488, 490, 492, 506, 507, 509, 531, 543, 571, 576, 588,612, 613, 615, 619, 637, 650, 654, 671, 679, 687, 688: n = A,T,C or G
  misc_feature 689, 691, 692, 694, 704, 728, 740, 745, 748, 753: n = A,T,C or G
gcgaatggnctccccgcggtggcggccgaggtacttgtgagcttctttccttccattcatgactgaagatctgctcaaatgcaccaacactgccaantgactaangtanaaaagaaaaatgacatgtatcagtcatctaaaanacatattaatctttttcttccccttcttcacaataaaaatataaagaacaattataaatatatcatcanaataaataccatanaacctacancctccctttctctttattatnattatactttaaatatcacattctcttttatataatatncttcctatattttcaatatatctttttncttcantaaacctnatattcaaaancacaaaanntaaaatccatagaaaaaaagtcctaccnaaatccaaccactctaaaactaaaaaanatccccccganctaccnaaaaatttcaatattcaaancttatcnaaataccancncacctcanaaaaaaaacccnantncccccaaccttttnntntcccttttactaaaaaatcttnaaatttaccccncctttaacattaaatcattaagtgcatnacctngttttcccttantaaaaaaaaatttctttatttccnncntcancaatttcccaccaccagncaattcccgaacncccnactacccattaaaattntcgaaaanccctatannnanntncccctaaaantaaaataaaaccttaaactcccantttaaattttgncgctnaanccccntcaccttaccccccct

SEQ ID NO: 8694 - DNA, 543 bp, Homo sapiens
  misc_feature 14, 318: n = A,T,C or G
ccgcggtggcggcncgccgggcaggtacgcggggaatgccagatgatctatcattgtctcactttgcccccagataagaccatctagttgcagaaaaataagctcagagcttccactgattctacattatggatatgtgccgccgaagcaagcacaaagccctacttttacacatgcctagtgatgcttcatagacaaggcttggctctgttgagtccaactaacctacctgagattctgagatttctcttcaatggcttcctgtgagctagagtttgaaaatatcttaaaatcttgagctagagatggaagtagctnggacgattttcattatcatgtaaatcgggtcactcaaggggccaaccacagctgggagccactgctcaggggaaggttcatatgggactttctactgcccaaggttctatacaggatataaaggtgcctcacagtatagatctggtagcaaagaagaagaaacaaacactgatctctttctgccacccctctgaccctttggaactcctctgaccctaaaagacc

SEQ ID NO: 8695 - DNA, 379 bp, Homo sapiens
tacttagggcgaattggagctccccgcggtggcggccgaggtacccatgtccataaaggcagcaacaaagctgcttgtctattgaagattactactgcaaattggactgcattcaatgctagttgtaaaaacaccagcttttcagaagttggtatctgtacagtggcgtgatctctgctcactgcaacctccgcctcctgggttcaaacaattctgcctcagcctccggagtagctgggattacaggcgcgcgccactatgcccggctaatttttgtgtttttagtaaagacggggtttcaccatgtcggccaggctgttctcgaactcctgacctcgggatccctccgtctcggcttcccaaagtgctgggattacgg

SEQ ID NO: 8696 - DNA, 366 bp, Homo sapiens
  misc_feature 74, 134, 155, 162, 170, 186, 196, 324, 332, 355: n = A,T,C or G
tagggcgaattggagctccccgcggtggcggccgcccgggcaggtacatgacgtaaaccttgtccccttctcancgggtggacttaaaaattaaaaatagttaagtgttccttttaaagaacaaaataaggcanatgaggttttggaatagaatnttttctntttctttntttttttttgatggtntcttccagantacatacaaaaaaatacccattctcttccgaatggtatacaccttaaaaaataattgcatgtttgaaaatcaagaagcttgacaaaatgtgtggacattttttttttcatttttttttgtgaacaaancatgcatngtaaattttgtggtttcaatcanacattaaatta

SEQ ID NO: 8697 - DNA, 313 bp, Homo sapiens
  misc_feature 116, 154, 236, 245: n = A,T,C or G
ctatcactacttagggcgaattggagctccccgcggtggcggccgaggtactttgttatatgctgaaatggttttaaatgaagcaaatggttgtaaataatgaatgacagaacatntattttgggacattatggcttaaaatgctatttacttntaacttcacaaataaacacagctgtattgttttgaaaagcaaatgaaaggcatgcacctctactagcaagatttagcacttntgaccaagntaatacaccaacttctttaaaaaatatgccttcatgcactgtacctgcccgggcggccgctctagaac

SEQ ID NO: 8698 - DNA, 443 bp, Homo sapiens
ttagggcgaattggagctccccgcggtggcggccggcagccggcagctttgcagcggtgtgttctaggtcagtggcttcaaagactccagttggattcattggactgggcaacatggggaatccaatggcaaaaaatctcatgaaacatggctatccacttattatttatgatgtgttccctgatgcctgcaaagagtttcaagatgcaggtgaacaggtagtatcttccccagcagatgttgctgaaaaagctgacagaattattacaatgctgcccaccagtatcaatgcaatagaagcttattccggagcaaatgggattctaaaaaaagtgaagaagggctcattattaatagattccagcactattgatccttgcagtttcaaaagaattggccaaagaagttgagaaaatggggagcagttttcatggatgcccctg

SEQ ID NO: 8699 - DNA, 315 bp, Homo sapiens
aggtactctggcaattcacctttcaattcaaatatcctgtggagaacgcttcctctgagaagccactggatgtctgtatggtgcaggaggtttatgtgctgtctgtccaggtttttgttttgggtgtttttttttttttaacatttttgcataaatgggtctttgatacaggtaaccagttttgtaacattattcagaacttcactgtatcttcaagtttttgatatcagcatctctgtggagaaagcagtgtgctataatgtcaacatcaggatttctttttttttttaataacgcaaaatgacttatggagac

SEQ ID NO: 8700 - DNA, 355 bp, Homo sapiens
ccgggcaggtacacagagttgtggcttttattttcaattaatttttttccttgtgggcagtgtgcatggtataataagcctgagcagaggcttaagttgtatgtgtgcagagtttgtaaaggaatcaattggaagatgcagaagaccgaggtttgctttcaaggtatttttcaggctgtgtgggtaaaatttgcctcaaatttctatcaaacaggaatgtaaaatagataaaatcctatgtatttgaattgtcagagctagggagtgcaaatgttttggcaatgtattcaaaatgctggcctgggcaccaaagagaaaatagccttttacagttacatagtaagatgcgattagt

SEQ ID NO: 8701 - DNA, 134 bp, Homo sapiens
ccgcggtggcggccgaggtacttttatttcatgtaaactgcccctctgaggatttgggcatattttttggaaggtgcctaatgcttaggatagtctctagggtgatgcactacacctgcttccttcccttcagt

SEQ ID NO: 8702 - DNA, 616 bp, Homo sapiens
  misc_feature 54, 113, 122, 126, 128, 129, 132, 136, 148, 154, 162, 163,183, 192, 196, 202, 218, 223, 229, 234, 235, 240, 256, 259,273, 278, 283, 284, 294, 295, 299, 308, 314, 320, 322, 324,328, 346, 353, 354, 362, 369, 381, 385, 392, 402, 404: n = A,T,C or G
  misc_feature 405, 407, 411, 412, 414, 420, 422, 424, 429, 439, 445, 460,464, 468, 471, 473, 474, 478, 494, 497, 500, 515, 519, 528,531, 539, 548, 549, 576, 583, 585, 591, 598, 600, 602, 606: n = A,T,C or G
cactataggggcgaattgggagctccaccgcggtgggcggccgagggtactttnttttttttttttttttttttttttttttctttttttttttttttttaaaattttaaaantattttttnttcnannttnaaanttaaaaaatacnccatantttaaccnncaaaatataaaaaaaaacanacacccctncccntccatnaaaaaaaaaaaatccnacccngacccnccctnnaaaanttaataaacccccccnctncaaaaatttaaaantaaantttannaaaacccatnnaccntttaagggngacccntacccnancntttnttcccttaaaaaaagacntaaaaannctctttanccccccntaaaaaaaaaanaatnttccaantataaaaatnanntncccnnanaatatntncncacanaaaaaaacanccttanccccaaaaattttanaaantccnaananncccnacaaaaaataaaatanccncanactttaatttttttntcanctaaaaaanccncttttccnaaattaaannaaaacctaatctatatactatcccacntatttananaaaaanaaaaacnancntccncacaaaaaaa

SEQ ID NO: 8703 - DNA, 234 bp, Homo sapiens
cgcggtggcggcccgaggtacttttttttttttttttttttgacgtatgtggtcccactatcaaaattataggaagcagttaatggggctttgagaaaagcatagtcccatgtacagtctacaatactcttcagtctccctaactcatgccctgccctataaaggaaatatgttcacaattttacttgagaaaaaaaaacaaagccacttaaaaaaaaaaaaagtacctgcccg

SEQ ID NO: 8704 - DNA, 703 bp, Homo sapiens
  misc_feature 17, 68, 351, 596, 603, 621, 676: n = A,T,C or G
gcgatggatatctgcanaattcgcccttagcgtggtcgcggcccgaggtaccaaatataaaatgctgnaagattttgaatgaatggtgagagtgtaagaaaatgggctgtatttcaatgctcctgtggcaggatgtcaatcaagaacttggagccaaagaaaaagaaatcccttcctagcacaaagcttggctgttcagtgaatagcgtttaaataaccgtaaaataaaaatcctgtttatgatttttattgattaggggcctacttaattaaggttaccaagtggaatgcaaatgttatctgccatattttaaaaatatcagcggaaatacaagtgggaaccgtttgaanggagagagagaaaggtaaatggaatggtgatagtgtccttataaaagtggacagttgagccaggcacagtggctcacacctgtaatcccagcactttggtaggccgaggcggggggatcacctgaggtcaggagttcaagaccagcctggccaacttggtgaaacttccgtctctaccaaaatacaaaaatcagcccgggtgtgatggcggcccctgaaatccaactactcgggaggctgagcangaaaatntcttgaacctgggagatngagtttgcagtgggccgagatcccgcctttcacttcacctgggcaacaagaagtnaaacttcgtttcaaaaaaaaaaaaaaa

SEQ ID NO: 8705 - DNA, 592 bp, Homo sapiens
  misc_feature 517, 548, 562, 563, 564, 573, 574, 581, 583, 590: n = A,T,C or G
cgcccgggcaggtaccccagctgatgatgttccacaaaagagcaaaacatacacaatctggttccactctacagaaatcctggaactggactacaaagggaatagacagggtgtggcaggagggggttcctccggttggagtgccgaggttagggacaggaatagaaggtaggtaataaacattcatgtggtattaacttagggcagatgtgtcaatatatttccaagtttagcataatataggtataaaaattaaataaaaagtttatatgtgtgtgtatatatgggttaatacacaacacatacctcctagagtcattacctgagaggttctacaagaaaagacagcaaattaacaaaaaatacacccagaatcaagatttgagttttggttcctttcatagcagaatggtatgcaacatttcttggaaaaatggcttatcctagggcttggaaagagaatataggagtaaagtcttccaatttctcatggtaccttcggcccgcttctagaaantaggtggatccccccggctgcaaggaatttnatattaaacttatnnnatacccgtnnaccttcnanggggggncc

SEQ ID NO: 8706 - DNA, 424 bp, Homo sapiens
  misc_feature 4: n = A,T,C or G
actnctatagggcgaattggagctccccgcggtggcggccgaggtactgttcctgttggccgagtggagactggtgttctcaaacccggtatggtggtcacctttgctccagtcaacgttacaacggaagtaaaatctgtcgaaatgcaccatgaagctttgagtgaagctcttcctggggacaatgtgggcttcaatgtcaagaatgtgtctgtcaaggatgttcgtcgtggcaacgttgctggtgacagcaaaaatgatcgagcggccgcccgggcaggtaccagctttggaacgagatgctatactaataagcaagtgtaaaaaaaaaaaaaagaggaagaaaatcttaagtgattgatgctgttttcttttaaaaaaaaaaataaaattcattttctttggggttagagctagagaagaa

SEQ ID NO: 8707 - DNA, 228 bp, Homo sapiens
  misc_feature 9: n = A,T,C or G
tatagggcnaattggagctccccgcggtggcggccgaggtacctgacagttccaaaacagctttattcatgcttagaagagacacatgaagatctgaatacagagtagcaataatctgagcctgcttctcacacgcagggcattttactcgcccacactgaggagcctcttggaagcgtctccctctcagcgtcccaggaagtgcgttcccagcgaggtacctgcccg

SEQ ID NO: 8708 - DNA, 241 bp, Homo sapiens
ggagctccccgcggtggcggcccgcccggcaggtacgcggggtgctaaggcttgagtgcgttgagcccaactgcagatctaagagaatgctggctattaaaagatgcaagcattttgaactgggaggagataagaagagaaagggccaagtgatccagttctaagtgtcatttttattatgaagacaataaaatcttgagtttatgtccaaaaaaaaaaaaaaaaaaaaaaaaaaggtcct

SEQ ID NO: 8709 - DNA, 119 bp, Homo sapiens
cgactacttagggcgaattggagctccccgcggtggcggccgaggtacgcgggaagacggcctggggatacaactctggagtcctctgagagagccaccaaggaggagcaggggagcga

SEQ ID NO: 8710 - DNA, 203 bp, Homo sapiens
  misc_feature 4: n = A,T,C or G
actnctatagggcgaattggagctccccgcggtggcggccgggggcattcgtattgcgccgctagaggtgaaattcttggaccggcgcaagacggaccagagcgaaagcatttgccaagaatgttttcattaatcaagaacgaaagtcggaggaaaaaagaaccaaaacttccaaggccctgctttttttcttaaaagtacct

SEQ ID NO: 8711 - DNA, 132 bp, Homo sapiens
  misc_feature 46, 101, 107: n = A,T,C or G
tagggcgaattggagctccccgcggtggcggccgaggtacaattangagctgacttatggcagaaagcttttccacactcattacattcatagggtttctnccctanacttcactcaccatgctcacactgc

SEQ ID NO: 8712 - DNA, 408 bp, Homo sapiens
agggcgaattggagctccccgcggtggcggccgaggtacattattgcattagggagcccaaaattatgtagcatcattacaaatgaaaacaggttaaaaatgaagaagatacttatatagaaatacatggattcattgtcttcttgcagaatgcacaagaggtgcaaaaatgtgcaatttaggaagctctttttctgtttgtatacgtttgcttagcaacacaaaccagtgaggaagctacaaaataagttaaacaaaaatagcaaacaggtagtaattatagccatgttatatggctttctatttcatttaaatatctccaaataaaatgtgaaataaagaaaatacattattttatcttttattctcttacagtgaaaattcaaagctactttgcttcctaacatt

SEQ ID NO: 8713 - DNA, 536 bp, Homo sapiens
gaattggagctccccgcggtggcggcccgggtccccttttgttatttaaaaaagttaagggagagaaatgttcataaatccctaattggtagaattagagagagctaaaaacagtgctaattatcaggcgacgtggaaacaactttgtgggcaagagagcattccttttttttttaactgtttacaaagagttcaattaaacttgttttaaattaaacacactaaacaaaattataagttttgtgattatgaaaatactgtttatcactacataaaatactgtttatggcactttatagattcaaaaaacctattaatgatacttcttttctggattaaagatagtggatgtttatatatatgtatgtgtatatacatacaccccccacatatatatgtaaatgtatcatacagaaaataacataggcatatgatttggagaaacagggaaaaaaagttcaaagtgggagaagtccatcccactatacaactcattcccagatatagcaatagtctcttattcacctcctcaaaaa

SEQ ID NO: 8714 - DNA, 492 bp, Homo sapiens
  misc_feature 348, 392, 413, 422: n = A,T,C or G
ccgggcaggtacttttttttttttgagacggagtttcactcttgtcacccaggctggagtgcaatggcgcaattagggttcactgcaacctctgcctcccgggttcaagcagttctcctgcctcagcctcctgagtagctgggattacaggcatccaccaccgtgcccagctaatttttgtatttttagtagagacggggttttgccatgttggacaggttgatctcaaactcctgacctcaggtgatctaccctcctcggcctcccagagtgttgggattacaggcatgagccaccatgccaggctgctaattctcctttttagtgagttagggaactgagcctcanaaaacttaaacgatttctcagaaaacactcaagtgataaagtgngccacattggaaaggagtttntatcttctnattgtcaagccagtgttcattgcacaatatcatgctacctcttgaatctttaaaatattcaattggcaaa

SEQ ID NO: 8715 - DNA, 393 bp, Homo sapiens
cttagggcgaattggagctccccgcggtggcggccgcccgggcaggtacaaacggagagttgtttatctttcagatgtttcacagaatccagtgtccccgggttggataagaaagatatgggaaaaattattttagttttggaaagatcctcttcagaaataccactatcttcctgaagtttgatggagaaccttgtgacctgtctttgaatataacctggtatctgaaaagcgctgattgttacaatgaaatctataacttcaaggcagaagaagtagagttgtatttggaaaaacttaaggaaaaaagaggcttgtctgggaaatatcaaacatcatcaaaattgttccagaactgcagtgaactctttaaaacacagaccttttctggag

SEQ ID NO: 8716 - DNA, 407 bp, Homo sapiens
  misc_feature 289, 326: n = A,T,C or G
cggtggcggccgaggtaccacaacctctgcctcctgggttcaagtgatcctcctacctcagcctcctgagtagctgggattacaggcacctgccaccacacctggttaattttttgtattgttagtagagatggggtttcactatgttggtcagggtggtctcgaactcctgattacaagtgattcacctgccttggcctcccgagccttagcccttttgattccctgacatcaaatgctacttctcttggatagttatactgtgagaaagttggtgacgggcaaaacnggagcccaggccagtgtcagaaactcacccagagtcncatgggacaaaagttgttgtgtgggttcttccctgtgaaaatcttaagggatggaaaatggtgagcacaaaccttggcatt

SEQ ID NO: 8717 - DNA, 338 bp, Homo sapiens
aggtacaacaaagactgatttctttttgaagcctctcccacatttattatatttatgtgttttctttccattgtgaattttcttatgaagtaaaagggatgacatctgattgaaggcttttccgcactttctgcactggcagacattcccaacaacatgaattttctgatgtatattgaaagactgacattgactcaaggccttcccacagtcaagaatttcctttccatcatgaattctcatatgtagaataagggttgttctttgattgaagctttccccacatttattgcattcatggcttttctttccactgtgaattctctgatgaagtagga

SEQ ID NO: 8718 - DNA, 277 bp, Homo sapiens
  misc_feature 28: n = A,T,C or G
ccgcggtggcggccgggaaagggccagnaaagggagtcaagcaggagcgtctgtccgaacggaggctaggtaagaatatttcaccatgaaaatgttaaaagacataaaggaaggagctaaaccatatggacccaactctccttatatgagaacgttattagattccattgctcatggaaatagacttattccttatgattgggaaattttacctaaatcttccctttcaccctctcagtatctacagtttaaaacctggtggattgatggggtaccc

SEQ ID NO: 8719 - DNA, 241 bp, Homo sapiens
  misc_feature 235: n = A,T,C or G
ccgcggtgggcggccgcacatggttcgaggcccgaggctgcaatgagagctttagagcagccattgacaaatcctacgatggacctgaagaaatagaagctgacggtctgtctgataagagctctcactctggccaaggagctctgaattgtgagtctgccctcaggggaattcggagctagaggacatggaaaataaagccaggaaagtcaaaaaaaaaaaaaaaaaaaaaaangtacct

SEQ ID NO: 8720 - DNA, 464 bp, Homo sapiens
  misc_feature 85, 205, 240, 384, 414, 441, 451: n = A,T,C or G
acttagggcgaattggagctccccgcggtggcggccgaggtacttttttttttttttttttttttttctggtgagatggagtctnactctgtcacccaggctggagtgcagtgtcgcgaccttggctcactgcaacctccacctcccaggttcaagcaattctccccacctcagcctccaaagtagctgggattacaggcatgcncaaccatgcccagctaatttttgtaattttagtanagatgggttttcgcttagtagagatggggtgtttgtcaggctggtcccgaactcctgacctcaggtgatccgcccacctcggcctcccaaagtgcttggggttacaggcttaagccaccaagcccggccgctctagaactagtnggatccccccgggctgcaggaaatttcganttttcaaagcttattcgaattacccgnccgaccttcnaaagggggggggg

SEQ ID NO: 8721 - DNA, 185 bp, Homo sapiens
ccgcggtggcggccgctcttttttctgacgggacgacacatctgaggaagacagcggcgagttttctgaagagatgagtgctcagagccctcatgctgttgaggctaaagggaggcctggaacggtggggcgtttgactggaatggaccccagggactgtccaggtgcagcccctcctagtacct

SEQ ID NO: 8722 - DNA, 416 bp, Homo sapiens
gactcctatagggcgaattggagctccccgcggtggcggccgccatgtttcttcacagtcccccccgcgtactgtgtgataggtaatgcccataaggtttttatcatgttttaaggtaacttgtgcatggaataggaaaagttaatcaaatgtaatcaattcgcttttgctttttaacaaaacttaaataaatgagctatttgaggacagttctggaaattcttgccttgatttttctccaagattttagatatgtagttcacatgtgaacattaatatatgaacaattattttatttattggcctctagttctctttcctctcatgatctgttctcttagtgaattgactttctgattcattgaaagcaaaatgctaaggaagatttttgtgcaagtgcaaaatgtttaatcttt

SEQ ID NO: 8723 - DNA, 155 bp, Homo sapiens
  misc_feature 29, 31, 38, 39, 55, 69, 101, 107, 127, 141: n = A,T,C or G
cgtaagacgtgttttgcgacccggcaccncnggggggnngccgcccgggcaggtnccactgcaccccancctgggtgacagagatgagactccgtctccanaaaaanaactttgcttgtatattatntctgccttacaganggatcattctagaa

SEQ ID NO: 8724 - DNA, 321 bp, Homo sapiens
  misc_feature 33, 144, 162, 236, 248, 272, 286, 321: n = A,T,C or G
aggggcgaattgggagctccacccgcggtggcngcccgaggtacacccgacggtgccggatgaaagacaccattgctgaagctgcagcagcatcatacaggtcctcctcagcatcagattcttctagagaggcctgaggttggnccttcacttccaggtttntgcttagccagctggttgctccaaggaagagccggcaatgttccccacagcttctaggattttctgagtgattncctgcaggtctntttggtccttcttgttttcaggtngggagttcttgttncaaagtcattcaccatgctgagaagcaaaaaaatn

SEQ ID NO: 8725 - DNA, 202 bp, Homo sapiens
ccgcggtggcggccgaggtacgcgggggagaaaaactggtgacagagagaaacaaaaagcgcctggaaaaagagaagcatgaaaaaggtgctcagaaaacagattgtcaaaaaaacttgggaaccgtgggtgctgttgccttggactgcaaagggaatgtagcctacgcaacctccacaggcggtatcgttaataaaatggt

SEQ ID NO: 8726 - DNA, 374 bp, Homo sapiens
ccgcggtggcggccgcccgggcaggtactggcaaagggggccggcccaccagacggagcttgcaggccagctgcttttcaaaccttggagaaacaaacgaccacggacccatgttctgaggttcctcctgactccaaatatgatctttaacatgtttgtatttgctcatctcttgctgtaaagaatccaacgggaaggggcagagttcctctactcggatgatggcaaagtcatgcttcttggcccccagagattctctttgtttcaccagggagtagaaatgtttgccggagcagaacacgagggtcttaaccttttttggatccacagatgaatcaccaatgacccgggttaaaatgttgtttcctggtgcc

SEQ ID NO: 8727 - DNA, 350 bp, Homo sapiens
aggtacagtatgtatcatgatttttcacacatcatgaatatttaccaattcaaaatcccaaagctatatgagtattctgataaccaagaatacactacaccaactcaaactgctaaaaaaaaaaaaaaaaagaaagtacagctgtctccagctctgtcaggcgcttttcaagtcctgcgactttggcagcttgagagaacttgtcctgctcaggccgagaatgtagttcataagtgacaaggctgctatctgggggggtcccagtggtttttccccctgatccccctttgctgttctttgttacttccagctgcagtagtaggcgcttagccagggcgccatcggggtcg

SEQ ID NO: 8728 - DNA, 164 bp, Homo sapiens
  misc_feature 20, 24, 25, 26, 27, 28, 29, 30, 31, 32, 40, 41, 47, 66, 67,73, 74, 75, 77, 86, 100, 108, 123, 136, 146, 147: n = A,T,C or G
cccgcgggggcggccgaggnaccnnnnnnnnnttttttgnnagggcngaaaacccccccgccccanncacccnnnangggaaaacngggggacagaactnggcaaggngggggccacaaaaanaaaggggaggggnggcaggggcnngaccagagcagaagggg

SEQ ID NO: 8729 - DNA, 392 bp, Homo sapiens
ccgcggtggcggccgaggtactttttttttttttttttttttacttattttctgcagctgctttcacactacaactgcaaagttgagtagttgctacagaggctgcatggtccagaaagcctaaaatagttactatccggcccactccagaaaacttgccaacacctgttctgtaacaatgtattttaatttttttcctttgtaatgttaaagggaaccttcctttcaattgtgcacagaatgccaatatatgaaagtgtagcaccttctccttagtcaccctgttttcagattaaaaatatctctcttaccataatatcttagggcgcctcacttaggacttcatgatcaggcctaaatatcctagcaagaagtagtgatggtacctcggc

SEQ ID NO: 8730 - DNA, 410 bp, Homo sapiens
  misc_feature 394: n = A,T,C or G
cgaggtctgttttttaaaacagttttaacagaaaattaaactgtatgtttgaaatcataagtaaaagtttgttgcgtgcataagagtagcctcttgattctcatagtggtaattttgtgtcatatcatttagatgttggcctttcatttgtgcatgtgtatatgtgcccaaattcatcctctttgtttagaatctgcttacaaataaaactaatacgaatctgaatacatttatcatatattcttccagggtttttcttaactgactatagagagtggctgtaagttctggggcaaagcttgattgtattttcagtgatgtatagttacattgtttcatgttaaaatcatcggtgcatggaaagtgaaatgtgcgtatgattttaaattattgnaatatgtacctgcccg

SEQ ID NO: 8731 - DNA, 414 bp, Homo sapiens
ggcgaattggagctccccgcggtggcggccgaggtctgctcctcgaaggccacattcatcttccgcaagcgccgaagccccgcctcacgcgctttgttttggtccaagaactcttcagtgaagatgggaacatcgaaggtggagaagccatcgcagtccccacccttgtgtcttcaggagaagtgttcatgagcccagagctcgagtcttctttcttgatcttcttctcctggatcttctccgtgcacatcttataggcttcagactgctggtacaggggctcaggtccaggtggcaggggatatgctacccaactcaactgagcgggccatcactattgctggcattccacaatccatcattgagtgtgtcaaacagatctgcgtggtcatgttggagtcccccccgaagggc

SEQ ID NO: 8732 - DNA, 229 bp, Homo sapiens
gcgaattggagctccccgcggtggcctgacctcgtgatccgcccgctttggcctcccaaagtgctgggattacaggcgtgagccaccgcacccggcctattgacattttttaaggtttcagattttcttttgtgtgtctagtaattcgtcttttattgtcaaagataatttgctaattttgacttaagaaaaaatgatttgtgggcatacaatattgtatgtggtacct

SEQ ID NO: 8733 - DNA, 587 bp, Homo sapiens
  misc_feature 558, 562: n = A,T,C or G
ccgcggtggcggcccgaggtacacttggaagagggccaagtgggcaacttgagaggttaaactgcatggtttgagttttgatttgaggttttacgtgttggcatgcattcaggggcttgtgtcccttctcccctgattcttccctccgggtaggagggaagaatccacctgagcagtggcctgccagcacttgagaggctccgcaagcacaagtgtgtttatgggagttgtgcacatgctcagttgaggcattcttcccttaccagtcgagtgtttctagaggaaggtcatagactaatggtctaatagtctatgacctttagtcatactagtgcacatgcctgagcccactcacctgtgaacccccaaaatttgagacaggtctcaattaatttaaaaagtttattttgccaaggttgaagacatgcccagtgacatagcctcaagaagtcctgatgacatgtgcccaaggtggtcccggccacagcttggttttatacattttaagggagacatgagacatcaatcactatgtaagaagtacctgcccgggccggnccgntctagaactaagtggatccccccgg

SEQ ID NO: 8734 - DNA, 298 bp, Homo sapiens
ccgcggtggcggccgaggtaccaaataagcaacagggagaaaattaggtaagaagtaagatacgaacgagaaacctgatttattgctcatccttcccttgcctccctaatggcaagcaaaactctgaacatctgaaaaggatgtagttctggacaaatcctgactacccagaggaaactcactgtgagattgctgttgatttgaagggtgctttcactaaggttatattttaaagtagaataacacatgctgagtgtaaactggctttggattggtcagctgcagtagtacctgcccg

SEQ ID NO: 8735 - DNA, 242 bp, Homo sapiens
tcactacttagggcgaattggagctccccgcggtggcggccggtatcggttgtaacattaccggatactgccatgcctcaagatctccctgttttctggctgtatcaacggtctcatgcagtgcactatcttgtccactagctggtacagtgagctgagatctcgccactgcactcaagcctgggctacagagcgagactccctctccaaaaacctcacaaaaaaaaaaaaaaaaagtacct

SEQ ID NO: 8736 - DNA, 262 bp, Homo sapiens
  misc_feature 34, 41, 237, 256: n = A,T,C or G
aggtactttttttttttttttttttttcttattnagtgganaacttttaccttttcacttaatgcacttctctttggtgtatctgtattgccagcaacactactcttgctcttcagggccattaagtaaaataagagttactcaggctgggtgcagtggctcatgcctgtaatcccagcactctgggaggccgaggcgggcggatcatgaggtcaggagttcaaggccagcctggcnaacatggtgaaaccccatntttact

SEQ ID NO: 8737 - DNA, 581 bp, Homo sapiens
  misc_feature 475, 505, 529, 540, 555, 576: n = A,T,C or G
ccgcggtggcggcccgaggtacagaaagactgtatgtgtgtgccttgcacacacacccatacctctcagaaaaagtgtttgggtatcttaaaaactcgaaaaacaatgataaatttctcagcttgtccagacctggaacaaaatttctggaataagaaatttgtattaaagtccttttttgcactaacaagttggctcttgtagcctgcaggctgaggaagtctcttctctgtgcatcagcagagttactgaaagcctctgattgagaaaaaacctccgtctgcctaaatcacttttctcgcagaagccatgcgactcccacacgacacgggcaagcttcacaagccatctctttcatttctgcttgaagcccccttggctgcagcaatcctgtctgccataggtttctttcttccttacctactcaagggctttttctaaggcatgcacacatatctcctgttcttctgagagncctcggccgctctagaactaggtggatccnccgggctgcaggaaatttgatatnaaagcttatcnattccgttgaccttnaggggggggcccggttcccanctttt

SEQ ID NO: 8738 - DNA, 357 bp, Homo sapiens
cgaggtacaccatcccttccattggactggctttgttggaagaaaagctcagatatagcaatgagaaataccaaaagtttaaggcagtggaagaaagcctgcgtaaagagctggtggatatgctaggtgatgatggtgtgttcttatatccctcacatcccacagtggcacctaagcatcatgtccctctaacacggcctttcaactttgcttacacaggtgtcttcagtgccctgggtttgcctgtgacccaatgcccactgggactgaatgccaaaggactccctttaggcatccaggttgtggctggaccctttaatgatcatctgaccctggctgtggcccagtacctgcccg

SEQ ID NO: 8739 - DNA, 368 bp, Homo sapiens
  misc_feature 355: n = A,T,C or G
cgcccgggcaggtactggaacagggataagttcttggataaggtgccaacatacctataaaagctgatttttgagtaaattattgattctaacatatgtaatggatttggtgtgataattttctgatctttaactataagtgactttttattctccaccagaaaagataaatgactgagaatgtaagtctgcgctctgattaacacaatggagaaacggaaaaactatctctgttaaaaactgattcctgtcattcttctgatatcaaataagaggaaggaaaataaactttttgtgtgtagatagaaaaacatacctgaggccaggtgcagtggatcacgcctgtaatccccancacttttgggagg

SEQ ID NO: 8740 - DNA, 420 bp, Homo sapiens
  misc_feature 408: n = A,T,C or G
ccgcggtggcggcccgaggtactaattcccaaaatgccacaactacatggtgttcggatctttggaattaataagtattgaaatgttttgaaactgaaaaaaaattttacagctactgaatttcttataaggaaggagtggttagtaaactgcactgtttctctgataatgtgaaatgagaagtatttacattggagggccaatggctggtccttcaagtgctgttttgaagtgcagatttccattaaatggtgcctctgtttaatacacctggtaccagatctctatgccagttaggcacattcttgtaagtaactctcgatgttacatcaaacattatgatggcacactgggcttggatataatagccatctctcagtccacccgaatttctcctggcccggctgngtcccatacatt

SEQ ID NO: 8741 - DNA, 589 bp, Homo sapiens
  misc_feature 589: n = A,T,C or G
ccgtaatacgactcctatagggcgaattggagctccccgcggtggcggcccgcccgggcaggtactatattcgtaaggattttttattaaccattacagattttacaaacagctagttatatggtaaacagattattatgcctttttgcaattctgaatatgattctagtatttgtgtagatgtatttggtacatttggtaataagaaaacagtctccaaatgattaacattttcccctgattcacaatgaaacaacggcattctgacgaagatgatccatacaccgaggggagtttaaaagacaaataagtattcagcgaattgtaggacaaggttcataaatcttttaaaactttttaaatagtgagtttctgtaacatggacttacagctccagctaggaagcaactattgccccatcttttgttcctttatattgtcaccccaattataaataatttgtttcttttagtacaaggaaggggtaggctatgtgttttgtcagggggttgagaatgagtgtgaggcgtattataccatagccacctagttttaagagtacctcggcccgctctagaactagtggatn

SEQ ID NO: 8742 - DNA, 461 bp, Homo sapiens
  misc_feature 92, 95, 101, 111, 112, 133, 137, 147, 148, 149, 170, 177,179, 193, 199, 209, 210, 211, 218, 223, 256, 260, 266, 283,285, 287, 290, 294, 305, 324, 339, 348, 351, 358, 365, 368,371, 372, 388, 407, 415, 444, 447, 459: n = A,T,C or G
cgagcccgggagcataaagtagtaaagccctggggtgcctaaatgaagtgaagctaaactcaccattaaatttgcgttttgccgcttcactngcncccgcntttttccaanntccgggggaaaaaaccctggntgcnttggccccannncttgggcaattttaaatgggnaaatttncngggggccccaaaanccggcnttcccgggtnnngtaaagnaaggngtcccggggtttttttggtccgtttaatttttngggngggccngtccctttcttttttcncngnccntttntccccttttcnggtccttttccaaaccttngggaaccctttccgncctttgganccngtccttnccggggnttnccnnttttttccggggtctnttgtccggggggtccaganaaggcccngggggttaatttttcaaaaggcttttccnaancttttccaaaanaa

SEQ ID NO: 8743 - DNA, 152 bp, Homo sapiens
ccgcggtggcggccgggatcttcggcaagactcacgtctccaacaaccaagctccccaagctgggccgggctggcggaagaggcacgtgcgctgctgaatggagctggtcgctggttgctacgagcaggtcctctttgggttcgctgtacct

SEQ ID NO: 8744 - DNA, 530 bp, Homo sapiens
  misc_feature 3, 227, 340, 374, 419, 451, 475, 480, 499: n = A,T,C or G
tanggcgaattggagctccccgcggtggcggccgcccggcaggtacttttttttttttttttttttggtgaataggattacataataataaagaaatgacaaaagaagaggacaaccaggtatttaaaaatcaggaacaggtcaggcacagtggctcacacctgtaatcctagcattttggaaggccaaggcaggcagatcacttgagcccaggagttagagaccancctgagaaacagggcaaaaccctgtctctactaaaaatacacacatgaaaaaattatccgggagtggtggtgcatgcctgtagtcccagctatctgggaggctgaaatggaangatcacctgagcctggggaggtcgaggctgccangagctgtgattgctccactgcactttcagcctgggcgacagacanaagtgagaccctggctccaaaagaaaaaaaangtcttggaataagtgagggaagcngctcnagacccaagaaaaaatacngagtttaattttgagaaaaataggggaaatg

SEQ ID NO: 8745 - DNA, 654 bp, Homo sapiens
  misc_feature 608, 643, 645: n = A,T,C or G
tagggcgaattggagctccccgcggtggcggcccgccgggcaggtacaaaggtcaagccaattttatgaaacagtcctacagagtaatatatgtgatgcagtgtaagaaggaaaatactcatctctaacattatggtaataacatttagcctcttaggagttggagcagggggatgggaatacagatttgcagactatagaaagagtttcatttttttgtgaccccacagagtctcaaatttttatttcactacctgctagagcctactgtgaaatcactgctccatatttgccagtggaggaaatgggcatagagtagagaatagcttcatatgtttacacgtttgcatagactacacacatgtcatgcgtttatggcaggtagctggtatttattccccaaagtaataatgttgaagtatgggtctcatcattcccatacacagaaacacaaaacactttgatcataaacttttttcttcagaagccaaactaacttgcagaataatagagccactggtttaatgtttcctcaagataggttttagtgtaagctagtattctgtgtgttcgtagaaatgattcaatacctgcagctggtgaattangaattggatttggtgccttttttatattagatgangngcaaaaatt

SEQ ID NO: 8746 - DNA, 346 bp, Homo sapiens
  misc_feature 1, 346: n = A,T,C or G
ncactacttagggcgaattggagctccccgcggtggcggccgcccgggcaggtacactttgccaggttttatccctttgttaaagcaaatagaacagagagggaatatagctgccagtaaaaatcgtttcccccctcttaatctcccatccttcatctccatgaaaccgactattaagataacctttctctctctgtgcactagtggaaaaagtaaagttctatagaaactcacagttaagagggactctgaatacagcaggttaaggcttttagtgcaaatagaatgaattcccactaaggtcaaaaggtttcaatttgggtacctcggccgctctagaactagn

SEQ ID NO: 8747 - DNA, 538 bp, Homo sapiens
  misc_feature 1, 46: n = A,T,C or G
nagctccaccgcggtggcggcccgaggtactcgatcataaagagtntaaagctcgagtgaaggagtatgcacgaaacaaaaacatccattactatttcatggccctgaagaatgatgagataatagatgccactcaaaaaggaaattgctctcgtttcatgaatcacagctgtgaaccaaattgtgaaacccaaaaatggactgtgaacggacaactgagggttgggttttttaccaccaaactggttccttcaggctcagagttaaccgtttgactatcagttccagagatatggaaaagaagcccagaaatgtttctgcggatcagccaattgccggggttacctgggaggagaaaacagagtcagcatcagagcagcaggagggaaaatgaagaaggaacgatctcgtaagaaggattcagtggatggagagctagaagctctgatggaaaatggtgagggtctctctgataaaaaccaggtgctcagcttatcccggctaatggttagaattgaaactttgggagcagaaactt

SEQ ID NO: 8748 - DNA, 289 bp, Homo sapiens
ccgcggtggcggcccgcccgggcaggtacagcagtctttggctgcctataatcagaggaaagccgatttggttaacagatcaattgctcagatgagagaagccaccactttggcaaatggggtgctagcttcccttaatcttccagcagcaattgagatgtgtctggagacactgtacgcgggggtgttgaatgtaactttgaagtagggaatggccttttaaatctgagagagaacatttgaatccttttcagggatttgtgtaggggtgtgtttgtgtgtgtgtgtg

SEQ ID NO: 8749 - DNA, 441 bp, Homo sapiens
  misc_feature 57, 91, 100, 103, 124, 126, 160, 172, 187, 188, 203, 205,206, 210, 214, 215, 219, 220, 232, 255, 264, 267, 269, 292,299, 301, 322, 336, 337, 367, 374, 377, 385, 396, 397, 408,409, 427, 433: n = A,T,C or G
tacccgtccgacctcgaagggggggggcccccggttccccaagctttttgtttcccnttttagttgaaggggtttaaattttgccgccgcnttgggccgntanattcaatggggtttcataagncntggtttttccctgttgttggaaaaatttggtttnattccccggctncaaccaaaatttttnnccaaccaaccaaaancnntttnccgnnaagnncccccggggggnagggccaattaaaaaagggtggnttaaaatanggncnccttggggggggggggtgggccncctttanantttggtaaggtttgggaaggnccttaaaacccttnnaaaccaatttttaaaattttttgggcccgntttttgnccnggcccttntcaacctttgnnttccccccggnntttttttttcccccaaanttttcnggggggga

SEQ ID NO: 8750 - DNA, 888 bp, Homo sapiens
  misc_feature 593, 598, 616, 648, 669, 684, 690, 704, 714, 718, 754, 756,764, 788, 791, 792, 796, 802, 803, 811, 828, 850, 854, 855,862, 874, 881: n = A,T,C or G
ccgcggtggcggcccgaggtaccaagggcatcaccatgtctcctttaatagaaagataatgaagaaggaaaccttctccaaacaactttgttcacttcactccttttaaaaatggggtgattgccgggcgcggtggcccacgcctgtaatcccagcactttgggaggctgaggacagcagatcacctgaggtcaggagttcaagaccagcctagccaacatggtgaaaccccatctctactaaaaatacaaaaattagccgggcgtggtggtgggcgcctgtaatcccagctacctgagaggctgaggtaggagaatcgcttgaacctgggaggtggagtgagccgagatcgtgccattgcactccagcccaggcaacgagagtgaaactctgtttcaaaataaataagtaaataaatgccattgcactccagcccaggcaacaagagcaaaaccctgtttctaaataaataaaataaaataaaaatgaggtgattgcaggctgaaggtcttgggtcactactgagttctaagttctctcaagacaaatattcatatggtcaaaacagaattataatctaaccgagtcattcntatanaagtggggattccggganggaaaacagatagctagtaatttaaatgatcntaatggtaatttgggggaganggtgatcagattgcnttttanacttggatataagnttctggcttnaaanccacccttgggtgtgtctggttgccttactctctananaaaggaanttggaaaaaaaaaaaaaaaaaaanccnncctntttttnnccttgttnttaacccttcatttaanccctccaacttaacccttcctnaagnnggaaaantcctttattggntaaaatnaaaaaaa

SEQ ID NO: 8751 - DNA, 401 bp, Homo sapiens
ccgcggtggcggccgaggtacgtatgtttatcttactcttcctataaactaaaataacattacagtttccgaatttagcatgggacatagtcagtgtttgaagtgccaacttcatcaagtaatgcatgctttattataaataaaattctagctttgaaaggcgttatgtgttgaacagtatgcttcaggggtaaatttaaaatagtctcttgaagccctagtcatggaagtaacttttattttaattgacattctcttattaaatgccctatccatcattaaaaggattattatcagtgggcaaaacatgaaataatatgatcgaatggcaatcttgctagttgcgctacctaacagtacctgcccgggcggccgctctagaactagttggatcccccggg

SEQ ID NO: 8752 - DNA, 427 bp, Homo sapiens
  misc_feature 286, 339, 342, 378: n = A,T,C or G
ctatagggcgaattggagctccccgcggtggcggccgaggtacatatggtatagaaaccatggagttaggcacttcctggattttttttttatgagaaaaatactgtatttaaaatgtaaaataaacttttaaaaagcaggcactaatatatatttcttccagcctttgattacaaatttgtccttgcacatgttaagatgaattatctcctaaaaatatcattgttcttgggagcagtgtatgttactttacatagcagcggttcctgtcatgtgttcatgtcanaatatttttggttttaaactttcttattgcctttggctgttgattagtacctnggncgctctagaactagtgggatcccccgggctgcaggnaattcgatatcaagccttatcgatacccgtcgaccctcgaggggggggg

SEQ ID NO: 8753 - DNA, 628 bp, Homo sapiens
  misc_feature 5, 28: n = A,T,C or G
tatanggcgaattggagctccccgcggnggcggccgaggtacctgaagatccagctagaagacattaagaattatcaggaagcccttcgatacatcggcaagctgccttttgagcaggcagagagcaacatgaagcgctacggcaagatcctcatgcaccacataccagagcagacaactcagttgctgaagggactttgtacccaggctgaccaggagagactggcaacctgcaccccttctgacagaacccactgtgctgccacaccctccagtagtgaggatactgaaaccgtatcaaacagcagtgagggacgggcctcccctcacgatgtcttggagaccatctttgtccgaaaagtgggggcttttgtcaacaaacccattaaccaggtgaccctgacgagtttggatataccctttgccatgtttgctcccaagaatttggagctggaggataccgatccaatggtgaatcctccagattccccagagactgaatctcctctccagggcaagcctgcactcagatggctccagcgggggcagcagtggcaatacccatgatgactttgttatgatagactttaaaccagctttttctaaagatgacattctttccgatgga

SEQ ID NO: 8754 - DNA, 310 bp, Homo sapiens
cgcccgggcaggtaccttcagcaaatgtatgcagcccaacaacagcacttgatgctgcatactgcagctcttcagcagcagcatttaagcagctcccagcttcagagccttgctgctgttcaggcaagtttgtccagtggaagaccatctacatctcccacaggaagtgtcacacagcagtcaagtatgtcccaaacgtctatcaacctctccacttctcctacacctgcacagttaataagccgttcccaggcttccagttctaccagcggcagtattacccaacagactatgttactagggagtacct

SEQ ID NO: 8755 - DNA, 185 bp, Homo sapiens
ccgcggtggcggccgaaatacaatttaattaaaatacttattttcttattagaaagctgcctctcaatggcacctactgctacatttacatagtaacccaaaattgcagttgcttagcagggagagaatcacagtgctggatattatttatactttttcttccaaaacgatttgaggaagtacct

SEQ ID NO: 8756 - DNA, 459 bp, Homo sapiens
  misc_feature 374, 434: n = A,T,C or G
ggagctccccgcggtggcggccgccgggcaggtacatactatcagtgtgacttattactgttagtgttaatcttgataacctagcccgagatagtgtttatcagatttctccactacaaagttattttccccctttccatatgtaatttttggaaggaagtcactatcagctcacactagagaagtaggaagttctgctccatatccttgagggcagagttcataaattatttggaattcttcttcatgggagattcatctattctaccccatttattaatgtattcaattttctggcactacaagaatatatatatatttttgtaatccgactttaaaataattaggaaaatgatagaacattttaatataangaacaagatatgggtaaattgatgaatattattagacattatcagtaacaagagctttgnatcttaagatgttttgagttcaatt

SEQ ID NO: 8757 - DNA, 436 bp, Homo sapiens
  misc_feature 29: n = A,T,C or G
ctatagggcgaattggagctccccgcggnggcggccgcccgggcaggtaccatgtatagggtggctgtcaaagcagaaagatacataaaagtatccagtagcacatactatactgcattgctaggtaaggttcttttcctgacatcctatgcaactatcaaaaatcatatgtctgcaaactgaaaatattagcagaaagaattaaagatgttacagtttcagtattgaaagttttggtcccaaaaggtgctttcgtaaagttatttctctttcatgcattgattgttgcttagctaatcttcatcttggtccagatcagggtcaacatccgtggtgagtctttatgcctattgctgttttctttgcttctgcttttaatttggttgctcgtaaaataggtttagtttttttataatcctgtttaccttgcgttgtg

SEQ ID NO: 8758 - DNA, 213 bp, Homo sapiens
ccgcggtggcggccgaggtacaccaaggagtctagtgatctacatgactacatgaaaagcttgaattatacctgtgatccaatctccagctcactgaatcagtggcggggaagggaaaaagagaaaggagggaaaagaaagatttcattaatagtcccttttcaaactccaaaataatctgcatttaagtgcatgcaatcaggtacctgcccg

SEQ ID NO: 8759 - DNA, 255 bp, Homo sapiens
ccgggcaggtacagatcccattacttctgctttcgtatctcctcaggcaaaagtggagggtgccttatgggccctcctcataggttgtctctgcatacaccgaacctaacccaaatttgctttggtgcccagaaaaactgagctatgtttgaacaaagatgtcgtgcaaactgtacatacaaaatctgaaactgacactgtcagttctatactttgcacacgtgaagtgtcagaatattttcctcagtagtacct

SEQ ID NO: 8760 - DNA, 590 bp, Homo sapiens
  misc_feature 576: n = A,T,C or G
atagggcgaattggagctccccgcggtggcggccgaggtctcatctgttttaaacaaaagtcaaaccgaaactattcttatctgtcaggtttacagttatgtagaaactacaatatagatgacaaaagatgcatctaaccatgtaactgtaatttatctttgatttatccaagcagaacatcattgtctaacaataaaccattattctactgaaatcagagacaatgataaagcttgtctcttaaaaaacatcaacttttcaactttgatcagatggagcaccaaagggattatatctgtcaaagcatctttgcaattttttccacataactagcataatttagttacctgatataaaataggaaaatatactcaatttttatttaaaagaaagctgaaaatatgacatccctcaatcttatataatatacaatatgctaataaatgccatacatgttaacaatacgtgaaatgctgctgagagttccacaatcagctaattcatgtcaccaggctaagtaaatctgacaatttcacctcaatatgtcaccctttgtacctgcccgggcgggccgntctagaactaggtg

SEQ ID NO: 8761 - DNA, 301 bp, Homo sapiens
  misc_feature 177: n = A,T,C or G
cgaggtacttgtggaaactaatccctaaatatgaataggtttatattgattcatgggtaacaggtccataataaattattggaaactaggatgtctgaatatcaaggaagacagccatagtctcttacagtgcccctgttggctgctcaaactgaattgggtgggaaaaggtatggnccaatataaaagttccatttttgccattattggcaaatcttgcctttgtttattttggtgccagtgttttctgcttaatcatttgctttgttggcatctgtgtttatttacttgtacctgcccg

SEQ ID NO: 8762 - DNA, 407 bp, Homo sapiens
  misc_feature 177, 198, 329, 395: n = A,T,C or G
cgaggtaccacaatagcagggggatgccgatggagggaagggtcatgaccccaaaggctgcccagtccagaaaatgaggggagaatcgcctgtcaaactcccgctgagccaggattcctccctgtccaggtgcactggtagagccaatcacaaacgggcccatcctcctggggccanggtaagtaattgttggccganggtgaaagttgaaaataaccagccttgagaggggcgcaggaccacagtggtgggagacattgctagcagggggcaatcccggtcccattttgacattgagcattcagacacaatgccaaagtcttctggangggaaggaatcatcagatagttccacgtctaatgcaacactttgagccaacatttgtaaatgttgnacctgcccgggc

SEQ ID NO: 8763 - DNA, 533 bp, Homo sapiens
ccgcggtggcggccgaggtctcggcgagtaaccatcattgaacatgctgtgtgccaaatcaaaacataacttcagcatatgtcagatcttgctagagatggtgaacgtagtagaaattggaaattttccagcagtatttttctttaaataagcctgtcaaagctgcagctcttcttttaaatcacaggttatttcattacacctagtcagtccttgttttatttgggctgtgctctttcaagcaactgactagatttcccttcaacagaatgtttgtgactcacttgtcttccccataaaaattaaccggaagaagtgcatttaaactgaaacatactttgtgctttacatgcaaaagagcattctaaagaaaatcctcctagcttcaacctacctaaatgcacaggctttataaaaaggcattcttattaggcctctataaagaagccttcataatgaacagcaccctaaaaaaaaactaggagcatattcaaaataaagactgtggcaaataaactattagagaaaataag

SEQ ID NO: 8764 - DNA, 332 bp, Homo sapiens
  misc_feature 24: n = A,T,C or G
atacttagggcgaattggagctcnccgcggtggcggccgaggtacagtggtgcaaactcagccctctgcaacatccacctcccgggttcaagcgattcccctgcctcagtctcctaagtagctggggctataggtgggtgccaccacacccggctaatttttttgtattttgctagagacggcgtttcaccatgttggccaggatggtctcgatcccctgacatgatccccccgcctcggcctcccaaagtgctgagattacagtcatgagccaccatgcccagccccaaaagacattttttaaagcaagtccttatttctgtacctgcccg

SEQ ID NO: 8765 - DNA, 433 bp, Homo sapiens
  misc_feature 3, 404, 410: n = A,T,C or G
ctnctatagggcgaattggagctccccgcggtggcggccgaggtacagaatttatcatggattattgactgctgagaaagggacagtggaatttagccataccaaggactatactggaaacagacttctgctgctgaatgtgccctgatgtgaccaggttgcacttggaagagatcctcgcgtcttcatgaggcacttaaagcttataaaagaactgcggctggaactcatctggtgctccccatgagagtgctctgcttgtagactggccagtgtccatgaaacaactgtaaatacctcgagcggccgcccgggcaggtacctccctctgcaggatatcatgtgtatggaatgtctttcccggaagctaaagggaagccagtgaccccttatatctggcgagnttgtgnagaagttgtaggatctctgtgca

SEQ ID NO: 8766 - DNA, 384 bp, Homo sapiens
  misc_feature 382: n = A,T,C or G
tagggcgattggagctccccgcggtggcggccgcccgggcaggtacaagcagactctgaagatgatcagacaaggcaaagcgaaattggtcattctcgctaacaactgcccagctttgaggaaatctgaaatagagtacttaatatggtgtcttgttcactatacttaaaaatgcaccactcataaatatttaattcagcaagccacaaccaagacttgattttatcaacaaaaacccctaaatataaacggcaaaaaagatagatataattattccagtttttttaaaacttaaaagatattccattgcccgaattaaagaaaggaaggataaggtggttatatgggaaaaggaaggggcatttcaaggcacacttaaagnaa

SEQ ID NO: 8767 - DNA, 435 bp, Homo sapiens
cactacttagggcgaattggagctccccgcggtggcggccgcccgggcaggtacttctttagacgggggaataagacagccaggtgggagggggtctctggaaaactccatctggcctgtgcactagggtggaacctcaggaagttgatgacatttgtagctgggagcagcctggcccctcctcttcctgtgtggaacctgaaattccactggcttggcaggaagcgctctagcagggactccggctttgcagagcatccctgtttccccgtttttcccttttcacccaataaaaccctgcttcactcacccttcaaaccatctgcaagcctaaatttttgtggctgtgggacggacaaagatgcctttagctgactgaggaaaagtcctgcaacacaggtatcactgcacatttataatattgtttctctgttt

SEQ ID NO: 8768 - DNA, 483 bp, Homo sapiens
aggtactacatatgcagaatctgatacaatgttaatagactgattaaaatcttgttaacactgtaatgacggcaaccaactctgctctttgagtcaagtgatactgagttttgatgactcattcttttggcccggtgaagccacttttccattgctggaaccatcagtaaacactgccagagcattttttaaaggcttatgtttggtaactttaggtaaaatccaagtagtcaattttaaaaactggaagatttttgttttggggtaaccgattgtcaataattcccacaaaatcggcaagaccaatctgccatgcaccagaattgataaaggcttgtctaacctgttgcttgttgaaaggaacagtgattttatctgggtcatttccacacaatgttattattcataatcttccctgaccaattaatgtagccatttgatccaagtacctgcccgggcgggccgtctagaactaagtggatc

SEQ ID NO: 8769 - DNA, 419 bp, Homo sapiens
  misc_feature 100, 101, 112, 113, 119, 121, 134, 148, 149, 156, 158, 180,184, 195, 198, 210, 216, 219, 235, 240, 247, 260, 271, 283,293, 310, 327, 331, 350, 353, 357, 362, 379, 384, 388, 389,393, 404: n = A,T,C or G
tgaggatcctgtgcgcgattgcaattgatacggtaccagacaactagggagcacccctataccttattcaaggtagccaatcctaaactgtttcactcannccttgcatttnncttttncncaaaagaaaaacntcaaagttaaacgnncaggtgngnctataaaaccctttccccctcntttnagtccttcctngcntgaacttgtccncctacntantaaatttcgtaattcnccganattttcncaagtctactacntgggcccggtntccgatcttacnttaagattgnggaattaccccgtaagnccttccgtggtacaccnccanaagtccttttggggcccgnttnaaantccanattggggctccaattanaggcnttgnntttnttccccttggntgggttggaaaaaaa

SEQ ID NO: 8770 - DNA, 237 bp, Homo sapiens
  misc_feature 176, 196, 225: n = A,T,C or G
ccctttcgagcggcccgcccgggcaggtacaagttaaaatgcacgggcccaagggggatttttttttcacctccttgagaatttttttttttaagcttatagtaaggatcattcaagcttggttaaaaaaataataataaaacatgcatcatttttcatttgccaaccaagcacanagttattttatactgactgnatattttaaagtatactctcagatatggnctcttacagtat

SEQ ID NO: 8771 - DNA, 407 bp, Homo sapiens
ccgcggtggcggccgagttacttggataaagaccactataccctgattgatcaatctccagtagcagccatcttgccaaaagaaggtaaatttgatgaagtctatgaagcactaactcacgctcatcctaatcttactgtttacaaaaaagaagacgttccagaaaggtggcattacaaatacaacagtcgaattcaaccaatcatagcagtggctgatgaagggtggcacattttacagaataagtcagatgactttctgttaggcaaccacggttacgataatgcgttagcagatatgcatccaatatttttagcccatggtcctgccttcagaaagaatttctcaaaagaagccatgaacctccacagatttgtaccctgcccgggccggccgcttctagaaac

SEQ ID NO: 8772 - DNA, 501 bp, Homo sapiens
  misc_feature 15, 366, 388, 462, 482: n = A,T,C or G
actatagggcgaatnggagctccccgcggtggcggccgaggtacatgttttcattggtgtagattaccacaaatgcaaggcaacatgtgtagatctcttgtcttattcctttgtctataatactgtattgtgtagtccaagctctcggtagtccagccactgtgaaacatgctccctttagattaacctcgtggacgctcttgttgtattgtctgaactgtagtgccctgtattttgcttctgtctgtgaattctgttgcttctggggcatttccttgtgatgcggaggaccaccacacagatgacagcaatctgaattgttccaatcacagctgcgattaagacatactgaaatcgtaccgcggnagcttctccttgccagtttctnccagcaggaccctcttcttgttttgaaagatggtcggctgcttttggtaggcacgctcagtctgaatgtcccgncatcttcccgggcgctctanaactagtggatccccccgg

SEQ ID NO: 8773 - DNA, 189 bp, Homo sapiens
  misc_feature 32, 42, 74, 81, 100, 115, 119, 122, 143, 154, 167, 187, 188,189: n = A,T,C or G
ctatagggcgaattgggagctccacccgcggnggcggcccgngcagggtgaactccccttccttctcaatcatncacttgntttgaacaaacttctgcancacctgctccgcttncttnttnctcatcttcttgcctttaagntgatcaaccangttcaatatgttngtggaaccccgcgtacctannn

SEQ ID NO: 8774 - DNA, 230 bp, Homo sapiens
ccgcggtggcggccgcccgggcaggtaccatagagtaggttgaactggccagacctagacaatgaagaaaacacatactgtttacttaggagacattttcttagtcgtgtgtatagtcctaaatttccccaaactatgtgttcatttggattgtgtatataataacagtcgaatgatgaagaataaaagatgctgaaagatgcaaaaaaaaaaaaaaaaaaaaagtacct

SEQ ID NO: 8775 - DNA, 232 bp, Homo sapiens
  misc_feature 5, 215: n = A,T,C or G
cactncttagggcgaattggagctccccgcggtggcggccgcccgggcaggtacgcgggggcggcggaaaatagcctttgccatcactgccattaagggtgtgggccgaagatatgctcatgtggtgttgaggaaagcagacattgacctcaccaagagggcgggagaactcactgaggattgagggtgggaacgttgtgatcaccattatgcanaatccacgccagtacct

SEQ ID NO: 8776 - DNA, 425 bp, Homo sapiens
acactcctatagggcgaattggagctccccgcggtggcggccgcccgggcaggtactttatgctttgtttgccctctacacattaatggtaaaacacttatttttagaagcaccatggcaaccatttataatgatagagggcaaggtataattaacataataacgctgatgtttgtagctagggaataaatgtcattttagttttaggccggtcagtttgctcttttagtcctgtaacttcgaagcatacatgacccctagcaatcaaagtgaattagaaaaaaaggtgagaaaataacaaatgttttaaagtttcttacacaacaggtatagatataaaaagaatttcttcaaataatttcctaggtgtcactcagaagcatccttgctgtctgtaaaaataaatgttctgcagtccttcaaat

SEQ ID NO: 8777 - DNA, 364 bp, Homo sapiens
ccgggcaggtaccccgacgcggtgaagatctgcaatatctgtcacagcctcctcatccagggtcaaagctgcgaaacctgtgggatcaggatgcacttaccctgcgtggccaagtactggagagctgttcacacagatgtttagacctttctctctctctcttttcttctttctcaacaactctttcacagaggcagtcatttttgaaaggtttgaaatatttggcctttaccaaagagcttttttttttccttaagcaaaatcctttcagaaagaaacaaatgggggaagggcaggattaagaatgcatatgtcccaatccacttctataggagtttaatcattatttcacatgagtaaaatg

SEQ ID NO: 8778 - DNA, 202 bp, Homo sapiens
  misc_feature 32, 35, 84, 162: n = A,T,C or G
aggtactttttttttttttttttttttttttngcnaaaacttcatttatttaagatgactagtgatgcagctagcaaacccaanaagccaactggaatggaaatgctcagtggtgctcagccattacccaggaccagagattcctttgttaacagttcaatntgttgaggcacaagtgaggataaattgggccatgacaaaa

SEQ ID NO: 8779 - DNA, 436 bp, Homo sapiens
cactacttagggcgaattggagctccccgcggtggcggccgaggtacatgctgaaggcccatttcggcttctgctccagcttccccctcgaagttacactcaaggcgatgatgaattctctaaagtctattgtcccatctccatttgcatcgaaggtgcggaagacatgctctgcaaatttggaagcatccccataagggaaaaagttcccatatattttcttaaactcttccattgacaaatgtccactggggcagtctctcaagaagcctttataccattcctggacctcatgctctgtaaagtctgtgctttccagcaagtcctgcatgacctccgggcgcagcttgctgttctgtttccccatcctggcggcaagaattcagtttctgactgtcagcaacgagtggtcccaggagaccaaagttgagataat

SEQ ID NO: 8780 - DNA, 400 bp, Homo sapiens
aggtacagagtcttttgcttcctcccacccctagggggaaaaactgctttgtgctttgggaagttgtctctgaaacccggggacagaggacgcaggacagactaggagggagccgggaggatgtcgagcggccgcccgggcaggtacccccactgggcagggtgaggaccaaaaatctgaaactcttatgaatctgacatattatatggaaattatatcttgtgaccgtcttcaagtgcatggacttaaaattcatgagagactaaatgtgagggaagaagtggatttaaagaggccagaccttaaccaaagatgctgagatacagcattctgtcccccctgccctagaaactccataaatgctgtcacaaccctatcattgctgatgctttctgcatgt

SEQ ID NO: 8781 - DNA, 373 bp, Homo sapiens
  misc_feature 317, 320, 329: n = A,T,C or G
ccgcggtggcggccgcccggcaggtacttttttttttttttttttttctgctacagcaggagaagcgtgcgtgctacaggcatctgtcaccaaggccagagcaacttcccagtgtggcaactgcacagacagcttcaaaatgacattttagaaagtataaaattcttcaagaagaaaagaagtcttcatataagaaaaggcaagagaagcctacaaaagtaatataaagcattactctttgcaccccataaaattccattccctgatccctcttggtagataggaagagggaaatttaattgctgaaaaaaaaaaanacnaactttctngaccaaggaatattttttaattttgggccttaaccctttttccc

SEQ ID NO: 8782 - DNA, 444 bp, Homo sapiens
  misc_feature 133, 179, 205, 209, 214, 219, 229, 232, 243, 247, 249, 255,264, 267, 282, 284, 285, 290, 293, 315, 330, 351, 362, 374,414: n = A,T,C or G
ccgcggtggcggccgaggtactttttttttttttttttttttcttaaataatcccaagattcaaccagaggcccaacacagtactgccacggctcatgctgtaatgaagaacacatggtctttgccgcctganaagggccaacacttccacccgttccctgcgcagcccctcccacaanattcaagttgggggaagcttttcacncagncaagnacacncttccagggntgnaccccctgganatgncncagtanacaacaaantgntgaatgcacctgggncnnttcanatnttaaaaaaccccaaaacccccnaggtggagaaaaaancaaaacctgggcttcctttcntttttggtggnaaattttattgnaaaaaaaattggaaggaaaccaaccacctttgggcaaagnttcctttcccccccaatttttttggggggc

SEQ ID NO: 8783 - DNA, 354 bp, Homo sapiens
  misc_feature 234: n = A,T,C or G
aggtactctgggggctgctacacggcctacttccctcctgggatcatgactcaatatggaagggtgattcgtcaacccgtgggcaggattttctttgcgggcacagagactgccacaaagtggagcggctacatggaaggggcagttgaggctggagaacgagcagctagggaggtcttaaatggtctcgggaaggtgaccgagaaagacatctgggtacttctgagagctacngtttgctaggtgacattaaatcagatgtatcctgggcgccttgatgctgattttctatttgagtagacctagtgacataattgatataaaattcagctgctttgttcaagtacctgcccg

SEQ ID NO: 8784 - DNA, 248 bp, Homo sapiens
gatatctgcagaattcgccctttcgagcggcccgcccgggcaggtacacctgcagactctgtgatgttttaattgaatccattgcatttgcccataagcatatcaaggaaaagaggcacaagaaaaacattaaggagaagcaagaggaagagttgctcactacgttacccccaccaacaccctcccagataaatgcagttggcattgccattgacaaagtggtacctcggccgcgaccacgctaaggg

SEQ ID NO: 8785 - DNA, 339 bp, Homo sapiens
  misc_feature 6, 72: n = A,T,C or G
tcactnctatagggcgaattggagctccccgcggtggcggccgaggtactttttttttttttttttggccanagtcttgctttgtcgccaggctggagtgcagtggcgcaatctcagcttactgcaacctctgcctcgcaggttcaagtgattctcctgcgtcagcctcccgagcagctgggactacaggcatgtgccaccacgcccagctaatttttgtatttttagtagagacaggatttcaccatattggccaggctggtcttgaagtcctgaccttgtgatccaccagcctcagcctcccaaagtgctgggattatgggcgtgagtcacgacgcc

SEQ ID NO: 8786 - DNA, 715 bp, Homo sapiens
  misc_feature 593, 610, 629, 648, 688, 694: n = A,T,C or G
cgcccgggcaggtacgtaacaggacatcaataaatattagttgaatggaagattaaatcaacaaaatgggtgatggatctctgcagtaagtggaagagttcttcatggcccccaaggttatatccatctagaacttcagcacgtaatttcatctggaaatagtgcctttgcggatataagttaggtaaaactgaagatgagatcatactggattaggatgggatctaagtccaatgaaaatgtcttcataaaaaacaggaaagaacccatagaaacacaaggaagaaggtcatgtgaagatggaggcagagattggagggatgcagccaccggcccaggaatgccagcagccacccagaagctggaaggaaatgagggattctctcctagaacctttagagagaacatggtcctgtgaacagcttgattttggacttgcccatagcttggtatactcttactttggatacaattttatccaaacttggctaaacagtttctcagcctatgggaaaatttaaaatgggagaagattcaactcgatttcttaccaggattcaaagcaaggaaaaatgaatgggaacaataggganggagacccaaggaaagncctattaaaaagcaaaaantttgaaagtggaacattgnggtagcttttaaaaatgttttagtgtagcttgccaggccnccctantacacattgaaaaacccccaa

SEQ ID NO: 8787 - DNA, 440 bp, Homo sapiens
  misc_feature 5: n = A,T,C or G
gactnctatagggcgaattggagctccccgcggtggcggccgaggtacttaagcactgcagatgctccagtaatatgcccataagttcctttccaatttcaattaccgggaaaatatacatatggacaatagatggatgccacaataaaaggctggcagcctaaccctcacatgaatttttccctacctctatttagggtgacagtggagggcctctggtttgctttgagaaggacaaatacattttacaaggagtcacttcttggggtcttggctgtgcacgccccaataagcctggtgtctatgttcgtgtttcaaggtttgttacttggattgagggagtgatgagaaataattaattggacgggagacaagagtgacgcacctgactcacctagaggctgggaacgtggggtaggggatttagcatgctgggaaat

SEQ ID NO: 8788 - DNA, 344 bp, Homo sapiens
  misc_feature 18, 33, 48, 63, 102, 115, 116, 240, 290, 299, 314, 327: n = A,T,C or G
cgaattggactccccgcngtggcggccgccggncaggtacaaccatancaacaattgtatttntctatagttattttaaaatagtaatcaatgctatgtatntgatgtatatgtnnctaaattagaaatttcttttggctttgtgttttttttatgtgcgttaaatatgtaaactgaacctgttcctaaaatgcattaaactatgaatgctgtgtctatccaatgccaaaatgctcagangaaaagtgaataattcagtcattcatctgggatgtagttgtcttgtgtantctcaaatntttggaatatctganaaaactaggttgntaactttcttcattcct

SEQ ID NO: 8789 - DNA, 123 bp, Homo sapiens
ccgcggtggcggccgaggtacaaatggtcatgtggatcatgtgatgatcatccatcttatttgattgtattaatgcatcatgctaaacatgtagtacgcggggtcttccggtctttctggtct

SEQ ID NO: 8790 - DNA, 393 bp, Homo sapiens
  misc_feature 5, 280: n = A,T,C or G
gactnctatagggcgaattggagctccccgcggtggcggccgaggtacccaacacaaactttttttaaattagtaatacttttgtttaaagttttaagtttgcattttgacttttttgtaaggatgtatgttgtgtgtttaacctttattaactaacgttaaaagctgtgatgtgtgcgtagaatattaccgtatgcatgttcatgtctaaagaatggctgttgatgatataataaaaatcagctttcatttttccaaaaaaaaaaaaaaaaaaaaaaantacttacccaggggccttcagtgagacccagtgcttgtgaagggcttcagtgggttgacccaacaccatttcctagctgtggtggccattgggggagaatactcctactgctt

SEQ ID NO: 8791 - DNA, 428 bp, Homo sapiens
actacttagggcgaattggagctccccgcggtggcggccgaggtactagagcggtgggtaaatgaccctcagcgtatggacaagcgaacactagcactcctggtgctagcccactcctctgatgtgctagagaatgtcttctcctctctgacagatgacaagtatgatgtggcaatgaatcgagccaaggacttagtagaactggaccctgaagtggaagggacaaagcctagtgccacagaaatgatctgggctgtgctgacagccttcaataaatcttaaagccggcaggtggatttctccttttcccctgctggctggtgactgtcagagaccccatcactgagttttgtgtgatgagatgttttcatcattttttgtttccttttcttgaatcagacttgtgatttgggggaggaggcaacttc

SEQ ID NO: 8792 - DNA, 206 bp, Homo sapiens
  misc_feature 45, 179: n = A,T,C or G
ctacttagggcgaattggagctcaccgcgggggcggccgcccggncaggtactaccggaatgagacgcagcacgagccgtatcccctcatgctacctggctgcagccccagctgtcctctggagaggtttgctgagctggttggccctgtgatccctcaagactggtccacggagtgtntgaccacaaacagccatcaaggtacct

SEQ ID NO: 8793 - DNA, 433 bp, Homo sapiens
  misc_feature 9: n = A,T,C or G
taatcactnctatagggcgaattggagctccccgcggtggcggccgaggtacaatagtgcactcttggctcactgtagcctcgacctccggggctcaagtgatcctcctgccttagccccacaagtagtgggactataggcacacagcaccatgcccatctaagtttttgtattttatgtagagacaaggtttcaccatgttgcccaggctgatcttgagctcctgagctcaagtgatctgcccaccttggactcccaaaatgctgggattataggcgtaaaccaccatgcctggccttaaatcaactttagagtcaacatctcttatcacttggagcttctggagaaactccatcacgtgggtgctctctttcctgatgtgttgtgcccaaatagccttgttctcatcaagatgacttatttgctatgatat

SEQ ID NO: 8794 - DNA, 408 bp, Homo sapiens
  misc_feature 194, 205, 226, 232, 239, 249, 250, 252, 254, 263, 268, 275,288, 289, 290, 293, 294, 304, 305, 310, 314, 320, 321, 336,345, 349, 361, 372, 380, 386, 392: n = A,T,C or G
cttagggcaattggagctccccgcggtggcggccgcccggcaggtacagctctaaaaaatgttggcaccgaatgcacttaagaaaagtgttaaggcttaatacaaatacagagacgagtcatttctcaatgcagcttagagggtgagaacaggatgctaggtttttaaatcttccaaatacaggcaagtccccnatgttaccctnggccgctcttagtaactaagntggggntcccccngggtctggcnngngnaaattttcngattnttccaanggctttatttcgnnnttnnccccggttcnnaaccncttntgttannggggggggggggtcncccccgggntttncccccccaaggnctttttttttnggtttttncccccntttttntaagtttgggaagggg

SEQ ID NO: 8795 - DNA, 232 bp, Homo sapiens
  misc_feature 24, 30, 33, 40, 42, 46, 50, 52, 53, 65, 70, 83, 84, 86, 88,89, 92, 93, 94, 99, 100, 107, 111, 112, 114, 115, 116, 118,120, 124, 132, 141, 142, 151, 154, 165, 174, 181, 184, 186,189, 193, 202, 208, 217, 223: n = A,T,C or G
ccgcggtggcggccgagcttgatnagcggnganacctgcncnggcngcancnntttgtgcgtganctganaaccaaaggcccnngngnnctnnntaacnnacaaagnactnntnnntncnttanacttcttnctgtcaaannagatgtaanganagagcacctcnggcccgatntagaacnagngnatncccngggctgcangaattntatatcaancttatngataccggg

SEQ ID NO: 8796 - DNA, 362 bp, Homo sapiens
  misc_feature 83, 132, 172, 184, 192, 205, 222, 265, 346, 351: n = A,T,C or G
actacttagggcgaattggagctccccgcggtggcggccgaggtactttttttttttttttttttttttttttgctgtaatancttgatttattatattctgtttatttaagcctgggcaactccttttcanatgaccgatttgaccacaattataacattttttcccaaangttctaacttgncctcctanagggagccccctnattgcttgagccattancattgccttatgcatagctcctccaatcccatcacaagccttnacatattctgtaattacatcaactcctcctcccgcggttcaaatgcctgtgaacattacaacctcaaacgcaggttaaganaagcncaaaccccagg

SEQ ID NO: 8797 - DNA, 254 bp, Homo sapiens
ccgcggtggcggccgggaggctccatgcgcggcgcggaagacgctgttatttctccggaggaaagcagagaaacatgtccatatatacgggatcctttaaatggccaagcagtccctgcaaatgggacttacgagtttggttatcagatgcactttatttgtaatgagggttattacttaattggtgaagaaattctatattgtgaacttaaaggatcagtagcaatttggagcggtaagcccccaatatgtga

SEQ ID NO: 8798 - DNA, 480 bp, Homo sapiens
agctccccgcggtggcggcccgaggtactgcataattatagtcaatgctcgcaataattttcagtttgtctcatcacgttagcagagcctattcatgcaatttagaaaggatttcaatacagcccaaaccaaaaggcttacagtcaacagagggttagccttccataaatgagaaatccaaaaaagaataatgccacgtatttcaggaatgtcggttagaggtttggccttcttgggaagtgtcacaatgctgagtctaaaactgcaacagttaccgtgtccaagtcatgcaactctaaaggaggatggacggccacatttgtgtccttcagtatcaaagcacctttaagggcttccattttgagaaagtagtattttctcttccttctcttttagaacatatgataaaatattgcccttctatcctttaaccatgtatccatttttttttgatggggagtaaggggtacctgcccgggc

SEQ ID NO: 8799 - DNA, 136 bp, Homo sapiens
tgaaagccaagttaccttcggaaaaagaagttgggtagctcttgatcccggcaaaacaaaccaccgctggtagccggtgggtttttttgtttgcaagcaagcagattaccgcgccagaaaaaaaaggatctcaaga

SEQ ID NO: 8800 - DNA, 436 bp, Homo sapiens
  misc_feature 3, 402: n = A,T,C or G
ctnctatagggcgaattggagctccccgcggtggcggccgaggtaccttgggcgagtttctagaagaccattttcctctgcctgataaaagtgttaaaaagaaaaagaaaaacattcaagaatcatctgtaaacctgataacactgcatgaaatgttagagattcttataaatagattatttgatgttccacatgatccatatgtcaaaattagtgattccttttggccaccttatgttgagctgctgctgcgtaatggaattgccttgagacatccagaagatccaacccgaataagattagaagctttccatcagtaaaaggatgttttcttttttcacacagtaaaaattcttatcattcaaggatattggaaccacaggactatttggataaaaaacnttatttgcaaattaatgcgcatagtacctgcccg

SEQ ID NO: 8801 - DNA, 465 bp, Homo sapiens
  misc_feature 454: n = A,T,C or G
aggtacccttttttctattttttatgctaaaaaataatcataataaatttttgagtctgcaaagtttatcatacagtatactctctcattggaattattattttcatcttctgtttgctgtttgtaattccttctggctgtgatttgaataataagactttgtattaataagagagatatggaaggcagaagtgaagaaagcattagtcaggttttatagccaccatatgtggagacagatggatgcataggagcttcagggacacctgcttccaccacattgtcctgatcctttgctctgccaattgagagtattcttagaaccaccactaactgcttgactgccatattttccttccttccttccttctttctttccctttccctttcttttctttctttactttctttttccgagatggagtcttgctctgtcgcccaggctggagtgcantggtcctgccc

SEQ ID NO: 8802 - DNA, 688 bp, Homo sapiens
  misc_feature 635: n = A,T,C or G
gactcctataggggcgaattggagctccccgcggtggcggccgaggtacaacaaagatgtgccttatcctcccccgctatcccctgctatagaggcaatccagaaagaaagaaacatcacaagggaaagatttctggtattaaattataaagacaaatttgagcctggcattctacagctgagcagtggtttaaagaaggaaagctaaagattaaagagacggtaataaatgggttggaaaacatgggagctgcattccagtccatgatgacaggaggtaacattggaaagcagatagtttgcatttcagaagaaatctctttgtaattgctgtaaatgtcatcaaggcaatcatagatttcttttccattttgcatattttcaaagatatgttaaaaaatccttagactatacatagctcttgatttaaatgtgatcataggtgttatttttagttgcatagggtatttgatacaatcattaatggatcatacacaaataggtttttaaaaattaataacttttagtaattacttttattaatttaaaatagaacacttgagaggcactttgtaaagatttgttaaactggaaacgttttacatgatctgatcaacccattaatgaatcatacncaatagggtttttaaaattaatattaataacttttattaatttaaaaatagaa

SEQ ID NO: 8803 - DNA, 408 bp, Homo sapiens
  misc_feature 322: n = A,T,C or G
ccgcggtggcggccgaggtacttgcttttaccagtgagttttatacatttagatgttttcttgttgcatgttaggatccttttctttcagaatgaagagctccctctagcgtttcttataggatagatccgctgatgatcaaccttgtcagtttcatttgtctgggaaagtctttatctctttcatgtttcatggatagtttcttggatatagtattcatgactgaaagtttttttcctgccagttgtggtggctcacacctgcaatcccagcaccttggaaagccaaggcaggaggaaaacttcagttcaggagttcaagnaccagcctgggcaacactgggagaccttgtctctataaaaattgaaaattaaccaggcttggtagctcataccccgcaggtcccaa

SEQ ID NO: 8804 - DNA, 250 bp, Homo sapiens
  misc_feature 27, 31, 33, 34, 37, 42: n = A,T,C or G
ccgcggtggcggccgcccgggcaggtnctgncnngtnccaanaaaaataaagaagaggctgcagaatatgctaaacttttggccaagagaatgaaggaggctaatagagaagcgccaggaacaaattgcgaagagacgcagactttcctctctgcgagcttctacttctaagtcttgaatccagtcagaaataagattttttgagtaacaaataaataagatcagactctcaaaaaaaaaaaaagtacct

SEQ ID NO: 8805 - DNA, 490 bp, Homo sapiens
ccgcggtggcggccgaggtactgcataattatagtcaatgcttgcaataattttcagtttgtctcatcacgttagcagagcctattcatgcaatttagaaaggatttcaatacagcccaaaccaaaaggcttacagtcaacagagggttagccttccataaatgagaaatccaaaaaagaataatgccacgtatttcaggaatgtcggttagaggtttggccttcttgggaagtgtcacaatgctgagtctaaaactgcaacagttaccgtgtccaagtcatgcaactctaaaggaggatggacggtcacatttgtgtccttcagtatcaaagcacctttaagggcttccattttgagaaagtagtattttctcttccttctcttttagaacatatgatgaaatattgcccttctatcctttaaccatgtatccattttttttttgatggggagtaaggggtacctgcccgggcggccgctctagaacta

SEQ ID NO: 8806 - DNA, 400 bp, Homo sapiens
cgcccgggcaggtaccagcattcataccaccagctttcagcttgtagaggtggccgccaaggggaactcgtagttggcagtgccaactacaactactacaccaaccagctggaaactatacaaagagtatgaacaaagttcacaggagaaacaaggctctgcaacatatgaaaatatattctacttcattcataatgagacgcatgaaaattgtaactgtatcaataccatttctcacctagtagatgggcaaaaatccaaatgtttgagcacacattctgtgggtgaggctgtggaaacctaggttcacatacattgctcttggatatgcagattaagacccgctccttgtggagagccagttaggggaatatcttcaaaaattaaaaaatgcagagtt

SEQ ID NO: 8807 - DNA, 201 bp, Homo sapiens
cgcataatttaataacatcgtccttccatttggcccgcgactgctctggaaaattggttcagtagtaaacagaattctagcaggtggaacaagaacaggcgaggcatcctgggcctggtctctcctggaggtctgggtgttgcacctttcaggactgcggctgctgtggcctacacacctgggcctgtgtcccgcgtacct

SEQ ID NO: 8808 - DNA, 326 bp, Homo sapiens
  misc_feature 102, 186, 299, 315: n = A,T,C or G
cgactactatagggcgaattggagctcaccgcggtggcggccggcttcttcgctttcttcggtgttttcttagcgctcttcttcggagttgcgccgccagcncgccttcttgggcttcttggctgccccaactggcttcttaggtttggttccgcccgcctttttaaccttgggcttgcttccccngaggctgccttcttgttgagtttaaaggagccagaagcaccggtgcctttcgtttgcaccagagtgcccttgctcaccaggctcttgagaccaagtttgatcccgcgtacctnggccgaggtacgcggngaaaaaattag

SEQ ID NO: 8809 - DNA, 337 bp, Homo sapiens
  misc_feature 50, 61, 63, 82, 100, 102, 164, 184, 197, 203, 232, 248, 257: n = A,T,C or G
aggtacttcagagtgaggaagtgtttcagttcctcagtgacagaacctgncatgcattaananacataattgttcctgtaanaaaatcaacaccaagagnanacctgcccaaatccaataactcttccacttccatctcataccttcataaaaccaccttatanatatacctacccactataancttatactaaatnttaaantttaaattttttattttttttttttacantcaaaactctcactantccctccanactaagaatacaaataaccccaatcttaccctcactacaacctccacctcccaaatttccaaatcaatttcttcctaccc

SEQ ID NO: 8810 - DNA, 392 bp, Homo sapiens
  misc_feature 1, 373, 381: n = A,T,C or G
ncttagggcgaattggagctccccgcggtggcggccgcccgggcaggtacaaaaactgtcagtgataattcccataaatgtttcacaaaacagaattttagcatttatttaattataaaaatttcccatgattcttcaaaaagttctgtatcttttccattatttgctttacaaagtctagtagggtttccctgttgagaatgtttccatagtctccaaaaaaagaattttgtttcaaatcgtatagttcaaaacaaactcttctatagaagaggtgaatttccaagatcagcatatttcttacagagagcctgcccagccttctcctctggggagatcgaaaggagtgtttaggggctttgccatcaataantaaaaacnttcttttccta

SEQ ID NO: 8811 - DNA, 436 bp, Homo sapiens
  misc_feature 5: n = A,T,C or G
cactnctatagggcgaattggagctccccgcggtggcggccgaggtacgcggggggatttccgctgagtgacccttacaagtccttcttgatcctgaactgggttaggtgccgctgttgctgctcgtgttgaatctagaaccgtagccagacatgggactggaggacgagcaaaagatgcttaccgaatccggagatcctgaggaggaggaagaggaagaggaggaattagtgataggactgaggctttcagtgcatactggcaaccttggaaggcaggaatgtgaaacttttccctactacttatgcatcagaattgaatgggagaccgcattctgccatttctggcggcagtgtggctctgccagctggccttctgcacggatcccctaacaacagtgagagagcaatgcgagcagttggagaaatgttgtaaa

SEQ ID NO: 8812 - DNA, 397 bp, Homo sapiens
ccgcggtggcggccgcccgggcaggtacagaattcttctttgcactcacgctcaatgttgccctgtcttatttcttcaaaaaacccattagctcttgggtagcgttttaatatggaattggctttttctcccgtgaggaaaaccctccccatgttttcttgtggtttctggcacgtccctggatgatgattccagcgggtcccgctccgctactcgccgttctgccccgcgtacctgcattaaattttcattttagaagagaatcttggttttggtaattcattttttttttaagatcattatgtgcaaaacaccaagtttttaaaataactcacagaatggccttagttttcaatgtctggatggtatatttgtgagttgtgttatctgtaatata

SEQ ID NO: 8813 - DNA, 465 bp, Homo sapiens
cccttagcgtggtcgcggcccgaggtacagaatttattatgaaatagcttaatggcaagtggtaatttagaagaattaagttatcagataggagatatattaaaatttaaaaattggatatattcttgaagcccttttacacaagtaatttctataatttgattgtaatgaaagtataatataccttgttactattatcagattaatttttgaaagtagaattccttaatcaagccaaggttatgctgctttataagaaattaatcaggtagtttaacactagagctcattagccaacctgtatgtagcacaaaataatcatctctgataaatcctataaatatattttattcatacttttaaatattttacaattcaaataaaaaccttatatgtagacaatctgggctaaatttccatgtatgttttgaaaaataatggtagcatgaatagattcatatttaa

SEQ ID NO: 8814 - DNA, 408 bp, Homo sapiens
ccgcggtggcggccgaggtacagtagtgcactcttggctcactgtagcctcgacctccggggctcaagtgatcctcctgccttagccccacaagtagtgggactataggcacacagcaccatgcccatctaagtttttgtattttatgtagagacaaggtttcaccatgttgcccaggctgatcttgagctcctgagctcaagtgatctgcccaccttggactcccaaaatgctgggattataggcgtaaaccaccatgcctggccttaaatcaactttagagtcaacatctcttatcactggagcttctggagaaaactccatcacggtggtgctctctttccttgatgtggttgtgcccaaatagccttgttctcatcaagatgacttatttgctatgaatatata

SEQ ID NO: 8815 - DNA, 416 bp, Homo sapiens
gcggcccgccgggcaggtaccacatatctctatacagcctttctacttcctttcccagacggcctctggcagtggagggaggccagtcgctggaggacataggaataactgtggacactgtacattgatgggctggagagcagggtggcagcctgttctgcacagaaccaagaattacagaaaaaagtccaggagctggagaggcacaacatctccttggtagctcagctccgccagctgcagacgctaattgctcaaacttccaacaaagctgcccagaccagcacttgtgttttgattcttcttttttccctggctctcatcatcctgcccagcttcagtccattccagagtcgaccagaagctgggtctgaggattaccagcctcacggagtgactttcagaaatatcctgac

SEQ ID NO: 8816 - DNA, 755 bp, Homo sapiens
  misc_feature 424, 449, 459, 597, 609, 630, 639, 642, 646, 660, 666, 675,678, 690, 691, 692, 709, 718, 720, 739, 741, 748, 749: n = A,T,C or G
ccgcggtggcggccgcccgggcaggtacaaggttctgaagcaggtccaccctgacaccggcatttcgtccaaggccatgggcatcatgaattcgtttgtaaacgacattttcgagcgcatcgcaggtggagtggctgaaactttcagcaggcgcatctacactagtgacctgaggagagaaaccctaaccccacaatggctgcatcttctctgaagacgagactgatgctcatctttgaaatgaagggcagtgtgtgcatttctccatgaaggtatccagaaacagccatgccagagctgctgtggggtggctgaactgctattccttttctagggtgggatccccactctttgtaaggaaggatattggggtcctgacactgggaactcatcttgtcagtgagggccttcttttaactgctgncttgcaattgagccaccccatctgnggttcctgtncaatttaaggacttttttttttattataatataaaagaactgaaaatgctatgttttccttaatcatttggcttattaacttttactatgccattcctccacacttaaaaagtttttttcgagctggaatttggggantttgtggggtanggtatattttgaacacttggnatttcccanctntttnaaacaggggccaancaaaanacccttggncgnttttaaaattannnggatcccccggcctgcngggaattcnanattaagcttattgaaaccngncgccctnnaggggg

SEQ ID NO: 8817 - DNA, 423 bp, Homo sapiens
ccgcggtggcggccgaggtactgtaattctttcattgaggggctatgtgatggagacagactaactcattttgttatttgcattaaaattattttgggtctctgttcaaatgagtttggagaatgcttgacttgttggtctgtgtaaatgtgtatatatatatacctgaatacaggaacatcggagacctattcactcccacacactctgctatagtttgcgtgcttttgtggacacccctcatgaacaggctggcgctctaggacgctctgtgttcactgattcgagcggccgcccgggcaggtacactctagcattgtaactttttccccctgagaagtaattttaagatctatcagtctcaatttaaatgatctgttaatcagccagtagttttagtttcataatatcgttccattgcct

SEQ ID NO: 8818 - DNA, 323 bp, Homo sapiens
cgaggtactcttgtttgttattacacttctatgtagattatataatattgcttgtggacataatttgatcaataatatataatgtcagtcactacagtgatccagaatcttattctggctatggaggaagcttaattattaagcaacatcttcctaaaaagcttctgaatttctgattcataagaaaaacaaaacaaatgaaaagagtatctctaactgaaataacactgaagttcgagcttgggccccctcctttgtgttcaacataattaactcttcaagatgaaacatttagtcacattaataagttaaacttggtacct

SEQ ID NO: 8819 - DNA, 766 bp, Homo sapiens
  misc_feature 658, 677, 681, 695, 709, 730, 750, 752: n = A,T,C or G
ctgcaccgcggtggcggccgaggtaccaaagcagcttcttgtgcttgtcgacaggtttcttcctaaatgatacaaagccacagcccaccaagggtataataaacagacacaggataatcttccagttcttggtgtctcgggaaatctctccataccattgttacaaagaaaattctggaccccaggctgggcgatgaaatgctggtctgtggcctccaccgccagctccagacagttgcttccaccccaagcttcacaggaatagaccagcagctgttctgccaagtcttcatcgctgctgtaacactcagtgaacagctcaacagcccgggtctcgtacctgcccgggcggccgcccgggcaggtacccctccaagccgggcaacccgggcggggacgcaccagcggaggacatggccagatactactcaacgctgcgacactacatcaacctcatcaccaggcagaagatatggaaaacgatctagcccagagacactgatttcaaacctcttgatgagagaaagcacagaaaatgttccaagaactcggcttgaaaaccctgcaatgtggtgatgggaaaatgagacttgctctctggccttttcctattttcaagcccatatttcatcgtgttaaaacgagaattccccccatnctaccaatgcatgcagccnctgngctgaaattctgcnatggttttctttgncaatcaatggatatatggggnggttaaataaagtttctgcntnccaaaaaaaaaaaa

SEQ ID NO: 8820 - DNA, 460 bp, Homo sapiens
ctatagggcgaattggagctccccgcggtggcggccgaggtacttagggtaagcattaacaatattattcaaaatgttatatagagttcaactgtatacaatagagcatttattaaagtgtgtccaaagcgcttataaataaagcatcttcgaggcaggcggctcacttgaggttagaaggaaagcagactggccaacatggtgaaaccccgtctctactgtggtcccagctacttaggaggctaaggtgggaggatcacttgaggacaagaagttgaggctgcagtgagccaagtgtttgtgcaattgctctccagcctgggtgacagagtgagactctcaggaagccgcagtgttagttgcctctgatttttgacaagcatgggaagatgggggctgttcatacagggcaagcttcaagtgtccagtcaaataaaaacatccttgcacgtcctttagg

SEQ ID NO: 8821 - DNA, 420 bp, Homo sapiens
  misc_feature 31, 102, 161, 167, 172, 185, 186, 187, 188, 189, 190, 196,199, 204, 207, 212, 217, 218, 220, 227, 229, 235, 239, 240,241, 243, 265, 270, 275, 276, 278, 280, 282, 283, 285, 286,294, 296, 297, 301, 308, 317, 326, 327, 332, 335, 339: n = A,T,C or G
  misc_feature 342, 350, 355, 357, 362, 364, 365, 369, 380, 390, 398, 400,402, 409: n = A,T,C or G
cccttagcgtggtcgcggccgaggtactttntttttttttttttttttttttcttttttttttttttttttttttttttttttttttttttttttttttttntttttttttttttttttttttttttttttttttttttttttttttttttttttttttantttttntattnttttttttacgcnnnnnnaaaatnatntattnaanaaaanaaaanncnttttttntnaaaaanctcnnnantttattttttttttaaaaaaanaaaanaaccnntnantnntnnaaaatatntnnccancctttcnataaaaaanaaaaaaaannccctncanaaanaanaaaaaaantgatnantttcntnnaaanagatgattttntttttataanagaaaaanananaagatanttttttttttt

SEQ ID NO: 8822 - DNA, 365 bp, Homo sapiens
cgagggtaccaataaaagtaaaatatgaaattcttgttgtttcctcttcaccttgattcgactgaacaaatatagttacactgttaacattctgaaacttaacataacgaagtggaacaatgccatcttctttaatatcatcctctgtcagttccagagcttgagttggttcacttctttcccgcgtaccgtgtgactgtgccgctgatgggggctgtgtccgacctgtgcgaggctctctccaggctgtctggcattgctgcagaaaatatggtggtcgcagatgtgtataatcaccgattccacaaaattttccaaatggatgaaggtttaaaccacatcatgcctcgggatgacattttcgt

SEQ ID NO: 8823 - DNA, 353 bp, Homo sapiens
  misc_feature 42, 57, 61, 69, 72, 83, 88, 146, 149, 154, 155, 156, 173,176, 177, 184, 186, 189, 191, 192, 197, 205, 214, 222, 228,231, 233, 238, 240, 249, 252, 254, 256, 257, 266, 268, 269,273, 275, 278, 284, 295, 305, 309, 314, 323, 324: n = A,T,C or G
aggtactttttttttttttttttttttttttttttttttaantttataattttaaantgtntaaaccanaanctttacatacncttantttaaaaaaaatcaaaacaaaaaaaaatcaaaacaaaaacagtgaaaccaaaaccctnttncaaannncgggcccttccagcctngcnnatacaanangcncnnaaagnagaagatnccaatgggnagaacacnaccaanatnanaacananccatgacantcnantnnacaaaatgnanntaancnaangatccnttactgggacnagcccattgncttnacccncgaaaactnnccaaacaaaaaaaacaaaagcacctgccc

SEQ ID NO: 8824 - DNA, 350 bp, Homo sapiens
ccgcggtggcggccgccgggcaggtaccgcgggtggtaaagagaggaatgaattcctgaggaagcataatatcgaaacttacttaattaagcagcctgaggacagtctgctgtccttgcctgaagatatcgtcaaggagtcagtgagctcctcagaccggagaaacagtggggccacattcactgaaggatcctggagccctgaactgccctttgataatatcgtggggaaacagaatgtaagtcctctcttcctccttctgcttggccgtgaatgcatgctcgtgtgcatctccaatccagacacctcagagaaaactgattcatctttaaccttttctccaatgaaca

SEQ ID NO: 8825 - DNA, 838 bp, Homo sapiens
  misc_feature 657, 714, 722, 724, 754, 775, 778, 783, 788, 801, 810, 812,817, 821: n = A,T,C or G
ccgcggtggcggcccgcccgggcaggtacccaaacctaagagctattatccctaaatttcaaaatctaaaaaaaaaccttagaacctcagatgatataattaacataaaagcccaggtttttgtataaatgaaaagggataaaaattcatacaaaatcattagtaacattcataagcacccgaaataaattatttagatgtttgcaagtcagctgcaaggtgttcttcctcctcaaatatcctctaaggatgagcttatagacagattaacttaacaacgaaacctaacattccaccagtaagaatcttgtttgtgtgtgaagctgctttttactaagttggaggtaagagcccaaagtagagttttacttaagaaaattggggcaaacattgattttagttctacagctataaaatgatgccattcaaaaagtgaacagtgggccgggcacagtggctcacgcctgtaatcccagcacactttgggaggccaaggcaggcgtatcacctgtggtcaggagttcaagaccagcctggccaaatgacgaaaccccgtctctctaaaaatgcaaaaattaggcaggtgcggtgaccgggcgcctgtaatccaagctactcaggaggctggagacagggagaactgcttgaacccaagangcagaagttgcagtgagccgagatcgcaccactgcacttcagcctgggtgaccaganactccgtntnaaggggcaaaaaaaaaaaaaaaaaaaaggnccttggccgtttaaaactagnggnccccnggctncggaattgatatnagcttatcntnccgcncctngaggggggcccgggccc

SEQ ID NO: 8826 - DNA, 864 bp, Homo sapiens
  misc_feature 14, 665, 669, 683, 687, 694, 721, 736, 760, 782, 828, 839,841, 847, 849, 850, 854: n = A,T,C or G
cgaattggaattgnagctccccgcggtggcggccgccgggcaggtacatggagaataggcatatagccactaggctacatgaacacgtcacgtttgtattttgtgttggcctatgtataagccaatctagcatgtttgagggcatgtgtgagagtaggtaagggagctgtaagttcattcaggtgggaatttagggctttctgcacaaaaaattctaatttctctgtccttttgctatgttgcatctcccagtgttgacaggttagtctgcatgattaataactgagcagctgtagagccatgccagtaagtctccaattcctgaacgtggccacatttgtcttttgatgtgactttcaaccacaagccacaaagtaagtctttcactaggctccgttgacttcagtctttatataagggtttcaaggtattttgcagtcaagaatcaatggcacctcgcaactgtcttatgaagtaggtaaaacagctccatcttaaatacgggacaaaagttcgaggacttgaccaaggtcacacagggagggtcccaccaaggcagggagagagaaaggggatgctgtcagctaattctcatggtccactcttaaccaaaacatcatttaaaaaatggggctggctcggcacggtggctcacacctgtaatnccancaattttgcaaggnccangtggacngatcacttgagggcaggagttcgagancaccctggccacatngggaaacccggcttcttcttatantccaaaaaaaaaaaaaattagncccttggccgttttaaaactaatggaacccccggctggaggaattnatttaaacttntnatcccncnncctnagggggggcc

SEQ ID NO: 8827 - DNA, 448 bp, Homo sapiens
ctacttagggcgaattggagctccccgcggtggcggccgaggtactctatttcagatttcctcaaagctgggcagttgttagcgagaatgaccaatttcgctttgccttgtctgatcatcttcagagtctgcttgtacccttggtaatgatcctacagatctccctcctcaccactctgtcatacttggatatatgtgccatctttctacatcgtgcctccatcatttctggagtctcagtctgttccactcgtgctactttatagcccttctgcaccagggaatctgaataacggccaaatgcaatttcaggaaagccagaatgggcccagttgcctttcatgaataccagccccagttcactgactccaataaggagcatccatggtggtacctgcccggggcggcccgctctagaactaggtgggatcccccggggctgcaggga

SEQ ID NO: 8828 - DNA, 419 bp, Homo sapiens
acttagggcgaattggagctccccgcggtggcggccgaggtacattttcactcctgctctaaaacttgcctcagtctctcactgtgccttatgcccctcagctgaattctttcttctgagcaggcaggaattgaggttgctgcagacgtgtatgcatttgccaccagtaacatactttggtgccacatgactaggatatgttctctagtgctaacatgttcgtttacagttcttaggactccctgatagaaaaaaacacaaaaaaaaacacaaaaaaacccaaccaaccaaacaaacaaacaaaaaaaaacacaggagtttctcccaaaaagaagtctgcagtgtcttttctgttttctctggaaggtatcccagggtgttagatttctgttgtttttcccttatgtggcacccgaagt

SEQ ID NO: 8829 - DNA, 370 bp, Homo sapiens
ccgggcaggtactttttttttttttttgtatttttctgatctctggaatcaggatgtgccttacaatgcatggcatctttttatttaatgaaatatgggatagctattctgtcaaaacccagattgagctgtagcaggttttcactgatcaaaatttcaggtggctttatcagactagaaatgagaactttttttggctgttaaatacagaagccatttctgtctctggatgtaaacatcccggctgcgtggaggaaagataacctgaaaactgctgcagttttttcccgtttgttttttggtaacgggagactagctaaaataggaatgttgttataatgctcttcctttccaaatgtcccgcgtacct

SEQ ID NO: 8830 - DNA, 372 bp, Homo sapiens
actatgggcgaattggagctccccgcggtggcggccgaggtcacttacccccgagtttacctaggagaagagcaagaggtgatggggtgggaaaggcaaatctgtttagatgaatacacagaagagaccacacaggaatccttctcctgcagcctctcacagggtctctgagctggcaggaaagagggctcctttccaaccctcacccagaacaggaaactcttgcatagttctttaagagaaagagatggtaaggaagggatgggccaatcccagggccaaaatccaccacgaagaagtgggaaacgatgcaaagcagggccacagaaggatacatccttcccagatttgggaagcagcaagtacctgccg

SEQ ID NO: 8831 - DNA, 147 bp, Homo sapiens
  misc_feature 31, 35, 40, 48, 58, 60: n = A,T,C or G
ccgcggtggcggccgaggtacctaggttctncctnccttnaccacatnctggaaactntntcaaagcaacaagctggggaagcaataagactcacctcatttgttactagttaattaatgtaaaagtcactgtcctttattccctga

SEQ ID NO: 8832 - DNA, 433 bp, Homo sapiens
  misc_feature 86, 110, 185, 399, 417: n = A,T,C or G
cgaggtacgcgggtggccagggggaaggaaaggtgagtgggaaggagcagaaagctgggaaaggggatgggtagaacaagactganaaatccacatgcttcagaattcanagggttcagggaatggtttcggatagtaggctctccctgctcccttctctacaggaatctctggaaaactatcanaagacaaagtttgacaccttgatacccactctctgtgaatacctacccccttctggccacggtgccatacctgtttcttcctgtgactgtagagacaggttctagaccttttgtgatagaactaaaaatgctctcttgtacctgcccggcggccgctctagaactaagtggatccccccggcttgcaggaaattcgatatcaagccttatcganaccccgtccaccttcgangggggggccccggtcc

SEQ ID NO: 8833 - DNA, 713 bp, Homo sapiens
  misc_feature 520, 521, 547, 548, 557, 595, 644, 676, 680, 682, 685, 688,689: n = A,T,C or G
cccttagcgtggtcgcggccgaggtacctcattagtaattgttttgttgtttcatttttttctaatgtctcccctctaccagctcacctgagataacagaatgaaaatggaaggacagccagatttctcctttgctctctgctcattctctctgaagtctaggttacccattttggggacccattataggcaataaacacagttcccaaagcatttggacagtttcttgttgtgttttagaatggttttcctttttcttagccttttcctgcaaaaggctcactcagtcccttgcttgctcagtggactgggctccccagggcctaggctgccttcttttccatgtcccacccatgagccctccactggacagctcaagtaagcctggcccttcattctgcgctgtgttcttcctctgtgaaaatccaatacctcttaccttctctgcatgcaaagattcttaaggattgtcagacttcaaacgtaacagcagaaccaccaaaaggtcctataaatgcannagtgaccttcttaagctggcaaggtnntttaaatangatttggggatttaatgctatgtatttttaaaggaaanaaataagaattgctagttttaaaaaatgcctggctttaaccaatttaanaaacttcccccaaactttttttaaaaagtcanggananatnaannctttggggagacggaaaaaaaaaa

SEQ ID NO: 8834 - DNA, 272 bp, Homo sapiens
  misc_feature 89: n = A,T,C or G
atacggcgaattggagtttcccgcggtggcggcccgaggtacaagttatggctatcctagcactgacctctaaaacaattggaatcacncttaagtaatttggaggatgtgaagaaattggaaccctgtgcactgttggtgggaatgtaaaatggtgcagccactttggaaaacactgtagagattcctcaaaaaatgagagctaacgtgatccagcagttccacttccagaaagaattaaaagcgggatctcagagttttgtacctgcccg

SEQ ID NO: 8835 - DNA, 254 bp, Homo sapiens
tcctatagggcgaattggagctccccgcggtggcggccgaggtacattttaatgttgcttcagtgattgtataatgtaaaattgtttctttttaataagaaactttgctattatttcttcaattgttgatcagaattttttaaagcagaatttgtcaaaagggtcatttttttgtctaccccttttacacttttcaggattctcaaagtgtctcatctcaacttttaaaagaataaagaatatcttgctgggca

SEQ ID NO: 8836 - DNA, 529 bp, Homo sapiens
  misc_feature 209, 336, 381: n = A,T,C or G
ccgcggtggcggccgaggtacatctacctaaaggactattatgtggaataatacatactaatgaagtattacatgatttaaagactacaataaaaccaaacatgcttataacattaagaaaaacaataaagatacatgattgaaaccaagttgaaaatagcatatgccttggaggaaatgtgctcaaattactaatgatttagtgttgnccctactttctctctcttttttctttctttttttttattatggttagctgtcacatacaactttttttttttttgagatggggtctcgctctgtcaccaggctggagtgcagtggcgcgatctcggntcactgcaacctccacatcccatgttgaagtaattcttctgcctnagcctcccgagtagctgggactagaggaacgtgccaccatgactggctaattttctgtattttttagtagagacagagtttcaccatgttggccaggatggtctcgatctcctgaccttgggatccacccgccttagcctcccaaagg

SEQ ID NO: 8837 - DNA, 345 bp, Homo sapiens
aggtactcttaaaactaggcggctatggtataatacgcctcacactcattctcaaccccctgacaaaacacatagcctaccccttccttgtaccaatgccaatcagaggaaggcagtttggttcaggctttggagttagaaacacctgaagttgaatctgggctctgttgcttccttctttcatgggctagagcacgactctttacctctctcttggcctcaatttcctcacctgtaaaatagatgaggaagctgctcacttattattgtctcgttctgaaagcttggaaagctacatcgaagatgagctcttcattcagctttgatttgacccgtacctgcccg

SEQ ID NO: 8838 - DNA, 428 bp, Homo sapiens
  misc_feature 308: n = A,T,C or G
tatcgactacttagggcgaattggagctccccgcggtggcggccgaggtacgcggggggaagaagaggaagaagaagaagcagaaggaatggagagcctggagaaagaggatgaaatgacggatgaagcagttggagactctgctgagaagcctccttctacttttgcctcacctgagactgctccagaagtggagaccagcagaactccaccagcctgtgaaaccacgaacccttcaatcaagaaaagaccttttgatcagggagaaagacttctcgtctcatttctggggacacattcaggatttntccaaagcagtgagtaacattgaacccctcttgcttgctattctgttctatcttctcattagaaattggaagaaaacaccaggcacctgtcagccatttaaatgtgacaagcggccgctc

SEQ ID NO: 8839 - DNA, 464 bp, Homo sapiens
  misc_feature 10: n = A,T,C or G
agggcgaatnggagctccccgcggtggcggcccgcccgggcaggtactttttttttttttttttggaaagtcatgtcagtggtagtaatataattgttgggacgattagttttagcattggagtaggtttaggttatgtacgcggggcttttttccgtgctacctgcagaggggccatacggcgttgttctggattcccgtcgtaacttaaagggaaactttcacaatgtccggagcccttgatgtcctgcaaatgaaggaggaggatgtccttaagttccttgcagcaggaacccacttaggtggcaccaatcttgacttccagatggaacagtactgcggcgggtaggcctaggattgtgggggcaatgaatgaacgaacagattttcgttcattttggttctcaagggtttgttataattttttatttttatgggctttggtgagggaggtaggtggtagt

SEQ ID NO: 8840 - DNA, 408 bp, Homo sapiens
aggtacagaggcctggaagatgagggagctgggtttaagccccatcaaccggcatcaactagccatgctaccttgggcaaaataaccgtagctaacacttagtgaccacttactgttgtgcgttctcatgttatcctgacagtaacacttatagggtaggtctgtcagaattttctgtccacaagcaacagaagcttacactgagaatttattggagggctttgagacagctcatgtaatggaaagctcttaagaactaggtttagaaggtgcagagaccagggcaacttcagggatccaggtagcaggaaggaatcggtagcctctttggtatggccactatggtggtagacactgtctaccttgtttgctgagtcttctggctttcttccactcttcctgctcttg

SEQ ID NO: 8841 - DNA, 171 bp, Homo sapiens
  misc_feature 37: n = A,T,C or G
tgggcgaattggagctccccgcggtggcggccgaggncgcggggtccgcggagcggacccagcaatgacggatgatatcacctcttcttctctggtgagagtctgaggatggagacttttttctcaccatgaatgtcaccccagaggtcaagagtcgtgggatgaagttgc

SEQ ID NO: 8842 - DNA, 349 bp, Homo sapiens
  misc_feature 15, 17, 22, 30, 35, 38, 48, 52, 59, 62, 63, 64, 69, 72, 75,77, 80, 84, 91, 94, 96, 99, 102, 103, 106, 111, 120, 123,129, 132, 133, 137, 138, 139, 142, 144, 146, 149, 150, 155,156, 157, 158, 161, 162, 164, 165, 170, 171, 174, 175: n = A,T,C or G
  misc_feature 187, 188, 209, 245, 263, 274, 307: n = A,T,C or G
ccgggcaggtactcngnatatnaggaattnttatnctngaaagttatngctnttaactngannngatantgngananatnctgncataaancantnatnttnnaanttgtnatttataanacnttactntcnnacannnacnancnaanncttannnngtnncnnacttnnttnnacattaggaaanntagactttgtaacaataatanctttggtcctaaaaagacacggttgtcctgggagtntgtagtgttaagttgcancaacaactacnaaaagcaacaaaaccagcttaggataacacttntttgaatgcttgttcttaaagatgtctcactatgattaaaaa

SEQ ID NO: 8843 - DNA, 286 bp, Homo sapiens
  misc_feature 224, 269, 274: n = A,T,C or G
aggtacttagggtgtcgatccagctgtagatggagtgaatgaagagaggcagacctcgaaaagggccacagtcagctgaaggcttcaatctccagatggtgatggccagggtgcacaagaccccggtgaaggatgggaaaaagagcaagaagatgaagaaagtcatcatctgtgaggcccgccaggctttgctcggaggctggaaattcatcatcaggctgatntttttggagtagaacatgatgaaaagcataatcatttggataaanggcancagggggcagaa

SEQ ID NO: 8844 - DNA, 200 bp, Homo sapiens
aggtacgagtcttagcagtagcctgggtagccacctgctgggcagaaaagcctgagcgggtagtaggggtccaagttggggttgctccttgggtggggttggagtggcagggaaatctgggccaacatctgtcctgcagaagctgatggctggacaatggttacaggaggggctaggccactattcctgaaattctctgc

SEQ ID NO: 8845 - DNA, 152 bp, Homo sapiens
actacttagggcgaattggagctccccgcggtggcggccgcacaaaaaccaatctacctgatgaaaactccgttcccttctcgccagaaacataaaatgcgatggagctacggccaccgctgccgagacaaaatggcgccccccgcgtacct

SEQ ID NO: 8846 - DNA, 710 bp, Homo sapiens
  misc_feature 263, 271, 326, 392, 413, 420, 426, 427, 438, 483, 507, 512,517, 533, 545, 546, 560, 572, 611, 630, 643, 697, 698: n = A,T,C or G
ccgggcaggtacccacaaagaagtgaagtctcatcttaaagaaattcaaagtgcatttgtttcagttctatcagaaaatgatgaacttagccaagatgttgcatcaaagggccttgggttggtttatgaactaggcaatgaacaagatcaacaggaattggtttctacacttgtggaaacacttatgactggcaaaagagttaaacatgaagtttctggagagacagtggtatttcaagggggagctcttggcaaaacaccanatggtcanggcctttctacttacaaggaactttgttctctggcaagtgatcttaaccagccanatctggtgtataaatttatgaatttaaccaaccatcatgcaatgtggaactctaagaagggtgctncttttggttttaatgtaattnctaccanaacttnnaaaacaactgnctccttttctacctcaactaattccttcactttatcatttaccantttaaatcccaaccttaacattcnacaanccctnacaaatatttaaaatncattaatcactnnacaaatcccttttnaataaatatttnaaaaaaattcttcaaaatttaattaaaaaccttaccaanccatattttaccaaattcnaaaatccaacttntttaacttttaaaataatttatttaaaaaaaaaacccttaaaaaacattatttnntaaaacttccaa

SEQ ID NO: 8847 - DNA, 332 bp, Homo sapiens
cgaggtacacaatgtcctcagcagcatgtgtcttggagttactgtctccccattttagcttcaggctctgaggaccagcagcagcacattctagcctaggaggcaagggtggtaatggccgagtttttgctttaatgaactgactaaatggtccagctccaatttcatttatagcctgaattctgatccggtaggtggtttctggaaggagatctttcataacatgcatggtggtgttgcccacggtaatgctagtgtctcctagatcaatggtgtaagcaaggatttcagatccgttattgcacggctcttcccagttcagtacctgcccg

SEQ ID NO: 8848 - DNA, 579 bp, Homo sapiens
  misc_feature 532, 549, 568: n = A,T,C or G
ccgggcaggtaccagaacaatggaaaaagtgaattaaggtaatgaacaaaacctttcacccacttaaacattttccagttttgagattcctcttcgtgtttgtggtgtcttccccttgttaccccttctgccctttttctctgactatggtaatttggtctttaggctcatatcagtctccccgagacattctgcagtcattatcacctttttgggtggattttattttgttttattttgtttttttttttaaaaaaataactttttaacattggtgcatatttgcttgggatagagcttgtgtaatttaccaatcgtattgattgtaagtgattgtgccctgcagaggtatatttaacaagacaaaaataatcttggttaataaaggagcccatgagatttgagtcaggttgtaagtgaaatcacttacacttttggatagaatttatactcctgctcttataaatcagtggtagacttaccatttttttaaagttttcttgcattttttttggttttttattgccacagntccctattgtttcttgnctgcctccaccccctggtnaggaaaaaaaa

SEQ ID NO: 8849 - DNA, 357 bp, Homo sapiens
ccgggcaggtaccacccctgcagactccctgagatgccaaaaactgtgaatctgcttgctttctcaactgggaggctcatggtctggggctccccagtgaggattgtcaggcctctgagcccaagctaagccatcatatcccctgtgacctgcacgtatacatccagatggcctgaagcaactgaagatccacagaagaagtgaaaatagccagttcctgccttaactaatgacattccaccattgtaatttgttcctgccccaccctaactgatcaattgactttgtgacaatacaccctccctacccttgcgataatgtaatttgtgatattccctcacccttgtgaaggtacct

SEQ ID NO: 8850 - DNA, 419 bp, Homo sapiens
  misc_feature 3: n = A,T,C or G
tgnagctccccgcggtggcggccgcccgggcaggtacaaaccattccttccctatgtctcaatgcctgacattcagtgcctgacagaatcagcatttggcatgtccttggatatggcatcaatttgatgctttgaactgaaagttctcataatgcatctcaaagtatcttcttaaaaaatataaaaatgtaggccaacttgtgctctcttgtaaggcttgcaaagtggtaattaaataagcagactataactcacaagggaaaaaaagtgcatttttaaataaaagaaaaaaacggagacagttaaaaggacaaccaaaaagataagcagattatttttggttaatcttggggaaaatatgacacgatatttatggtttcttttcttttctggtccattttattttacttaatgtacct

SEQ ID NO: 8851 - DNA, 401 bp, Homo sapiens
  misc_feature 363, 374, 377: n = A,T,C or G
ggcgaattggagctccccgcggtggcggccgcccgggcaggtactccagccagggcaagagagcgagaccctgtctcaataaataaataaataaataaataaataaataaataaaaacaaagttgattaagaaaggaagtataggccaggcacagtggctcacacctgtaatccttgcattttggaaggcttgaggcaggaggatcactttaggcctggtgtgttcaagaccagcctggtcaacatagtgagacactgtctctaccaaaaaaaggaaggaagggacacatatcaaactgaaacaaaattagaaatgtaattatgttctaagtgcctccaagttcaaaacttattggaatgttngagagtgtggnttncgaaattaccgtttagggagggac

SEQ ID NO: 8852 - DNA, 277 bp, Homo sapiens
acacatttatcacaaaaattatgcttttaggacttcacatcatgtatttctgatcaggcatgatcctaacagcaattgtttaataaaaattttaaaaaccaaaaaccaaaaatgttttgaaagaaataagtaattagtatcccttccctaccctaaaactaatgaagtccattatggctttgatatcccttgtaaagaattaagtgaaagagtattgccacactttaagtatttctattttttccgttgcttttgattttgtgtctttgcagtacct

SEQ ID NO: 8853 - DNA, 357 bp, Homo sapiens
ccgcggtggcggccgaggtactgatagtctgtctcgtttacgaagcccatctgttttggaagttagagaaaagggctatgaacgattaaaagaagaactcgcaaaagctcagagggaactgaagttaaaagatgaagaatgtgagaggctttcaaaagtgcgagatcaacttggacaggaattggaagaactcacagctagtctatttgaggaagctcataaaatggtgagagaagcaaatatcaagcaggccaacagccagaaacaaccagctaaaaagaaagccccaaagggaaaaaaattggattgttaccttgccccggggcgggcccgcttctaagaaactaggtgggatcc

SEQ ID NO: 8854 - DNA, 314 bp, Homo sapiens
cgggcaggtacagcttcagggctgtccctttcagttcgattttaagcaatgcctcacttcatagcttagggggtaaggattccattcaggtaggttgtctaaaggaactaatgggacctctcagtgaattagctgaccagattttaggaaatctttttaatttctatgattttccttctcacattttgaaatggtaaaattgactggaaataatttttcttggtgccttattggttttccttgcaaacctttctcatattttctcatgaccattgccagtgaccaaggcccatgtgtgtgttgtgtgtaattgt

SEQ ID NO: 8855 - DNA, 365 bp, Homo sapiens
ccgcggtggcggccgaggtacaattagtaaaatgatataccaaaaaaatttttttctcaatataacacaggatatttatctgaactcctacctcatgcatcagtcaatattataaattaaccagaaagagcctctccacttacattttcatcttgcatcttacattttaatgtccttaactctttcactaaaaaaggtcgtaaataatgcacacctaataacaaagaatctctcatctttgatgcagcaacaattagtcacacgctttcacatgtgaatacaataggaatgaagagcataacttgagttaaatgacattattcacttttcataaaacctaatttttttcaaaggatagtttgaat

SEQ ID NO: 8856 - DNA, 430 bp, Homo sapiens
  misc_feature 388: n = A,T,C or G
ccgcggtggcggccgaggtacttgcaaccattggtgcatagtccatcgtcacagttatctgggcaactggcacaaggtgctccttgttcataagggacatatagtctattagcccaattaccagcaggacaatattggcaaacatagtagtattttagaactttttgattgggacagtaggcatttccacatccaacgaggtatgaagagtactggatactatttccttctccatttcaagttgtttactcaattctgtggctctgagctctaaatctgtgttcagctgtctttgctgttgtagatcttgcaaagcctgctccttgcttgctttaacttcaagactatcagcttctagtttcttaatttgaccttctagctcttcggntttctgttctaaagagaggtatttctctttatattctttaag

SEQ ID NO: 8857 - DNA, 566 bp, Homo sapiens
  misc_feature 199, 223, 226, 300, 302, 315, 341, 349, 362, 398, 400, 410,436, 457, 459, 477, 484, 486, 490, 493, 494, 498, 510, 511,513, 516, 526, 541, 548, 559: n = A,T,C or G
tagggcgaattggagctccccgcggtggcggccgaggtactcaacaacaggatacgtcccatggtgatgaaaataaaatgaatcttgtgttcaccgttgtattcctcacgacttaagttaaaaacctgatgaaaagtggttaatctccataatgggtgttagctccatcgttttccaacgttagagataaccgaatgtnacctcaccccgtttaattccagangcngcggacccccacatactttttttttttttttttgctctttataaattctttattgccaataataaaccctaaantngctcacaaaaatnccctatttctttcaattaactacaangacaaacncatctcaaaattnaaataagtaaccatattatttaccaaaattctaaancnccctcccatnaaataaataaaagttacccttaaaanatttacacttcataaaattcntngaaaaaaacctttttaanatttttntnatancannatangacaaaattaanntnttnttatataaanatacctatttaaatntccctancctttaccttnacatccc

SEQ ID NO: 8858 - DNA, 479 bp, Homo sapiens
  misc_feature 14, 121, 237, 308: n = A,T,C or G
ctatagggcgaatnggatctccccgcggtggcggcccgcccgggcaggtacctaacaaacccacaggtcctaaactaccaaacctgcattaaaaatttcggttggggcgacctcggagcanaacccaacctccgagcagtacgcgggatcgcttcctggtctcgcctcctccgctgtctccctggagttcttgcaagtcggccaggatgtctcaggctgagtttgagaaagctgcanaggaggttaggcaccttaagaccaagccatcggatgaggagatgctgttcatctatggccactacaaacangcaactgtgggccgacataaatcagaacggcccgggatgttggacttcacgggcaaggccaagtgggatgcctggaatgagctgaaagggacttccaaggaagatgccatgaaagcttacatcaacaaagtagaagagctaaagaaaaaatacgggatatgagaagactgg

SEQ ID NO: 8859 - DNA, 161 bp, Homo sapiens
  misc_feature 84, 101: n = A,T,C or G
ttagggcgaattggagctccccgcggtggcggccgaggtacttacgttgcctcgtgtcaccaaaattggtgtggctgccgtggngcggggggctgcactgntggcaccccttcctgtcttcatcaagcagctgcccttttgccgctccaatatcctttccc

SEQ ID NO: 8860 - DNA, 212 bp, Homo sapiens
  misc_feature 5: n = A,T,C or G
gactncttagggcgaattggagctccccgcggtggcggccgcgctgccacctcagtgctgttgcaaatattctggtgaatgaacacagaatcagcatggctttcctttgctgagaaatcactgatgggaagtgagacttgttaaacttgaaagtgaatggacctgagtggaccctttgatcacatcaagtaaacatgagccggtacctcggc

SEQ ID NO: 8861 - DNA, 314 bp, Homo sapiens
  misc_feature 220, 246, 272, 275, 293: n = A,T,C or G
tagggcgaattggagctccccgcggtggcggccgcccgggcaggtacaactaaggggaatgagaaggaggacgctgcaggaacaagtgggcttggggaattgaatagcagagagcaaaccaatcagtccctcaggaaagggaagaaaaagaagaggtggcaccatgaagaggagaagatgggggtcttggaggaaggaggaaaaggcaaggaggctgcangcagtgtcaggacagaggaggtaganagcagggcatatgctgacccatgcanccnaagaaagaagaggcagcnacaggaggaggaggacttgaa

SEQ ID NO: 8862 - DNA, 427 bp, Homo sapiens
  misc_feature 269, 274: n = A,T,C or G
ccgcggtggcggccgaggtactgcatgaagagacttcattaaaactaagaaaacatttatttggggagaaattttaggcatttaagaacttgtatttttctattttaaaaagttaaattattccgtaatttggaagaagtttcgttgaatgtaggacataaccgtttgaagggttttcatttgaaaaattgatgtattttgtgccttaatattttgttcttttaataaaaatgctctgaatttgaaaaaaaaaaaaaaaaaaaaaaaangtccnccaaggtggtgcattaccggaagtggatcaaggacaccatcgtggccaacccctgagcacccctatcaaccccctattgtagtaaacttggaaccttggaaatgaccaggccaagactcaagcctccccagttctactgacctttgtccttag

SEQ ID NO: 8863 - DNA, 316 bp, Homo sapiens
aggtacgatacattttcttttttttagttagccataacaggctggaattgctggttagaatactgcatgttatttaagctaaaattcaagccatctacaaaagacttctcattgaggcttccataggctgcaaacacatcaaaggcattactgtacctgtgtcgttttgttatacgtcagtataccagaatagacttaattcagaactgcctttgccaaacaaaatgaaggattatttacaggagaagcactactgaaagattgagaaccctgcatcttgcactttgggaataagaacaagagattgaaatacagt

SEQ ID NO: 8864 - DNA, 345 bp, Homo sapiens
aggtactccggtccgcgccccaaactcttggaggacccgtcgaccacaccggatgtgctgtttgcgcatgcgcaccctcgtgacctccccgcgtacagaaagctttaatgtctccccatgacctttatggcaaaaaccaaattccctcgaccagtctttggattactacacaatacattgtcaaagaaaatagcctggaatggtgaacagagcctgaggctcagttgggagtcctgacttctcatcagctgtgcatgagcaaatttggaggtgttccttaacttgtaaaatcgatttggatttttggtattttaagcatgatttcctttagttcttttttttttt

SEQ ID NO: 8865 - DNA, 503 bp, Homo sapiens
  misc_feature 480: n = A,T,C or G
ccgcggtggcggcccgaggtcccccattcacccacaaaatgcagcccaccacccagtcccccaattccagagagaaacacatcactagattgacgagggcttttagagactgctcctataattgaggaatcagcagcataggctttatctccctacttcctcccccaccctaccgcgttcaatttgtgtatctcagatatttgatttcttgagcatgtattggtcagaaagaaaaagaaagaaaaccattctctatttttccatgggtatgatctggcttaaaacaatatggaatattttcctgacagacttgaaaactaggatcttcctcagatgtctgtaaataactctggtatccaactgggtgtattctagtgtgggaacaaaaaacagtgaacacaagtgcttacttgtggatactatcttaccaacggatcacaaagttctctttttggtgtacctgcccgcggcccgctctanaactagtggatccccccgggctg

SEQ ID NO: 8866 - DNA, 213 bp, Homo sapiens
cgcggtggcggccgcccgggcaggtactcataagcatcatttttgaaagaataattgttgcataggatgcaaaagccatgaatacttcatcatccattacctgggtgaggtcaaccattttttcaattttggtctggaatggtgaggcccgaggaggaggaagcagcaagcctgtcccgcccgccgggtcgcgcgcaatgcccccgcgtacct

SEQ ID NO: 8867 - DNA, 391 bp, Homo sapiens
  misc_feature 225, 286, 312, 344: n = A,T,C or G
cttagggcgaattggagctccccgcggtggcggccgccgggcaggtacttttaaagttattaaaactgctcttttgaccataagtcacatagaattgtgattaggaaatcaatttacttattactctgtgcagggcacttgctagggtggtgagtgtaaaggaactaaaaatggaagtctctactttctaaaactggacactggagttcttaaaattaaaaatantaaaaaaaaaaaggggaagaagaggtgcctactggccacatttaatactagacccccagancaagacagtgaaccgggttggtcaanaacttgagggacacccttttccttgaaaggcntaaaaatactaaccaaccctgccttaagtccagtgagtcctcggccg

SEQ ID NO: 8868 - DNA, 439 bp, Homo sapiens
  misc_feature 358, 359, 373, 376, 377, 384, 386, 390, 399, 408, 413: n = A,T,C or G
gggcgaattggagctccccgcggtggcggccgaggtacaatgataatatggccgggcgcggtagctcacacctgtaatcccagcactttggaggccaaggcgggcggatcacgaggtcaggagatcgagaccatcctggctaacacggtgaaactccgtctctactaaaaatacaaaaaggaaatcagcccgggcatgggtgggcgggcaccttgtagtcccagctactccgggaggctgaggcaggaagaatggcgtgaacccgggaggcagagcttgcaagtgaagccgagatcgggccactgcactccagcctgggtgacagagcaagactctgtcttttaaaaaaaataaatannttcggagtccttcnctnnttttttngntccngttgggganaaaaacatnaacancccccccaaaaaacattttatttttt

SEQ ID NO: 8869 - DNA, 701 bp, Homo sapiens
  misc_feature 663: n = A,T,C or G
agggcgaattggagctccccgcggtggcggccggattgcctgaagtcagaagttcgagaccagcctgaccaacatggtgaaaccctgtccctacttaaaatacacaagagctgggcatggaggtggtgcgcgcctgtaatcctagctactcgggaggctgaggcctaagaatctcttgacccaggaggcagaggttgtagtgagccgggatcacgccactgcactctagcctgggcgacagagagagagactgtctaaaaaaggaaaagaaaaaaatttatacgccaaaaaagatattctgagataacctgtagttaccactaactttgtgacaaaattataaaaatccacagccatctatgaatctgtaggcagacctgaagtttgaacgactggtgaagacatctgattttctttatagccaagttaggataacaaaatgcaaacaagtcattaatatttactatatgcaagatacagaaagatgaaggaaggagtaagaagttatccttcgtggaactattcaaagcaaaaatgcaaaataccagggaaagctttgaagaaccaagatttgagcaggttcttagaatatagattggattggatttgatttcaagaaagatgaacgtgtaaagcagaagtgggaagccaaaaacttttttncaaattagaattaagcattctttcaatgaacatttgga

SEQ ID NO: 8870 - DNA, 422 bp, Homo sapiens
cactacttagggcgaattggagctccccgcggtggcggccgaggtacaattagcttcagagttgatattaatagaaattattccaaaattattcttgtcacaagtaactactatatcccacataaaaagggaaaaaatcccacccaatcacagaaaaggcatcctctgtatgtttccgcgtacccctgccaatggggctcaccatggtcagcacgcacagtgaaggaacctccagcagaagactcccaagcatactgttcatcatcgttatgctttgtgatcacaaccactttctctgccaccaagtaggcagaataaaagccaacaccaaactgcccaatcatgggagatgtctgcaccagcctgaagagcctccatgaatgctttagtacctgcccgggcggccgctctagaactaggtg

SEQ ID NO: 8871 - DNA, 450 bp, Homo sapiens
  misc_feature 3, 360, 375, 379, 388, 406: n = A,T,C or G
ctnctatagggcgaattggagctccccgcggtggcggccgaggtactataatggtccccatcttaatttgaaagcgtttgagaatcttttaggacaagcactgacgaaggcactcgaagactccagcttcctgaaaagaagtggcatggacagtggctacggtgacatctggtgtcctgaacgtggagaatttcttgctcctccaaggcaccataagagagaagattcctttgaaagcttggactctttgggctcgaggtcattgacaagctgctcctctgatatcacgttgagagggggggcgtgaaggttttgaaagtgacacagattcggaatttacattcaagatgcaggattatnataaaagatgatatngtcntattcgaanggatttccggcttgttgnagcccaaagtacctgcggttacccttcaattcgttttttaccca

SEQ ID NO: 8872 - DNA, 283 bp, Homo sapiens
  misc_feature 239: n = A,T,C or G
gcataagccaggcagacatcagggaaagggcattccaagcagagggagaaagtgcacaggccctgagaggagatgagcctgaagtaagccagtgtcactagggccaacaaggcagcgagaaatgggagccggggcaaagcccctaaagggtgctgagcagagaagtggcataacctaaggtgcattccaaaagagctgccatggcgggaatcatctgtaaggagtaagatcagaagcanggagaccagtttggaggcaactgcatttaatccagggggacagg

SEQ ID NO: 8873 - DNA, 300 bp, Homo sapiens
ccgggcaggtacgcggggataagagagctttgaagctttgctcgaaatgaacttggctctcaatttcctccttgagagttcaataaaataaaaactacaagtatgattatgattattataaaaaccagcaaacatttatcaaatacttactatgtgtcatgcttttccaagcattttacaggcatcatttcattgttgtctttcgacaacacttttcatgtcatctctactttatagatgaggaaactgaggtcctgagaagttaaataacttgtccaaacttgccccattaggaaaatg

SEQ ID NO: 8874 - DNA, 134 bp, Homo sapiens
ggagctccccgcggtggcgctcattcttctctctatgcacacaaggggcaaacttccttgataacatgcttttgcgaagtgcaggaaaattaaatgtgggcaccaagaaagaggatggtgagagtacctgcccg

SEQ ID NO: 8875 - DNA, 402 bp, Homo sapiens
  misc_feature 146, 155, 222, 359: n = A,T,C or G
ccgcggtggcggccgaggtacttttttttttttttttttttttggagacgggctcactctgtcagccacgccggagtgcagtgacatgatcttgactcatggcaggcttgacctcctgggctcaaggaccacctcccaagtagctnagaccacangttttgccccatcacacctggccgatttttatttttttgtaaagatggggttgtccaggctggtctnaaactcctgagctcaagcaatgtgcccgccttggcttcccaaagtgctgggattataggcgttaaaccactgcacgcagcctaccctctgcctttttaagatggattgtatttattttaattttttgccaatcattnggtgctttcaccttcctggcgaaagggaaaatttccagaggcc

SEQ ID NO: 8876 - DNA, 389 bp, Homo sapiens
  misc_feature 2, 7: n = A,T,C or G
tngggcnattggagcctccccgcggtggcggccgaggtactccaccaccagcttatccatccatgtcaggggctcggggaacagcacagagccctcaaagaagcccaagtggcccccatgcagaggcagcacaaacatgacgttctctcgtttctctgaaagagattttggaatggttagaagactttcatgcaccaacggatcgtcagctgcattaaccagcatgagaggaacataaatcctgtgcaggtacgcgggtctgcatagattatttagtataatggtaagttaaaaaatgttaaaggaagattttattaagaatctgaatgtttattcattatattgttacaatttaacattaacatttatttgtggtatttgtgatttgg

SEQ ID NO: 8877 - DNA, 337 bp, Homo sapiens
  misc_feature 337: n = A,T,C or G
aggtactaagacttttcagaaataactaaatctaactctaaaccacattatattattattgtattatatttcattctcttaacagattggttcagaatcacctgcagggcttattaaaacacagattgctggggtctcacctccagaatttctgattcagtagggcctgagaatttacatttctaacaggttttccagtaatgctgacactgttgggtccagacaccacacattgaaatccactactctaagatatggctaaattttggagaagcactacataaacatgtaactggtcccacccctgggaatcttttatatgaagctaaaacactgn

SEQ ID NO: 8878 - DNA, 364 bp, Homo sapiens
  misc_feature 23, 85, 115, 151, 162, 177, 187, 247, 251, 259, 321, 340,347: n = A,T,C or G
ccgcggtggcggcccgaggtccngtttttcaaagcctcacaaattaatgaagggagcacagggaaaaaccttctaaagactccanagaacataaaagtgccttcaaagaaccttncagggatcacaacaaatctttcaaagaatcctctangaaacccaagnaataaaccactgaangaagagaaantagttcctaagatggccttcaaggaacctaaacccatgtcataagagccaaaaccagatngtancttactcnccatcccagtggacaagataagaaaggtcctagtaaagggccgcccatttaacatttctgangaactctcatccaaaaaanggaaaangagtgctcagaggctta

SEQ ID NO: 8879 - DNA, 524 bp, Homo sapiens
ctcctatagggcgaattggagctccccgcggtggcggccgcccgggcaggtactttttgctctaggaacataattttcactttcaatccagggttttagtgaacttagtcatatgagaatacaactttcaaaattttcaccctaattaaattcagtaaatttaaatcacaaagtttatataaaaatccaaagttgttgttatagattttgtttctttttaaccatttgtatgaaaaatatttttgtaaaataaaaagcagatccagaagaaaaacatttgaaatcaaatgtgtatcaaacatgcctacaatttctcagctagtatatgttaaatctaagtagatgccaaatctaagtagataatctgactcctctctacatagccctactcggtgtgtaatgcgtatttaataaatgctgtttgaacaattgcaggaggccttgcaactgtccctgaccaactgatgtttacaggttaatgtgagcttcaaacttttgcagttactatagagatcttcgtacct

SEQ ID NO: 8880 - DNA, 402 bp, Homo sapiens
  misc_feature 100, 239, 312, 327, 346, 355: n = A,T,C or G
ccgcggtggcggccgcccgggcaggtacttttttttttttttttttttttttaattaaaaacagaaaaatgtgttagaaaacacagcacagagaaactgnggcttcagctcaacctgaccatgtcacagagtccatcactgtcagtcttgcattcatcctgctgggtcaggctaattatcaagacagtcaacttctccctctgatgtttccttattccagaccagggtgtgaaagcggnggctgtcaagagtccctgaagatgtcccatcaatggaacgcatacagcagcaacaggatggtacctcggccgntctagaactagtggnatcccccgggcctgcaggnaattcgatntcaagcttatcgattacccgtccgaccttcgagggggggggccccgg

SEQ ID NO: 8881 - DNA, 413 bp, Homo sapiens
ccgcggtggcggccgaggtaccttaatagctacccaacaaagtcattaacatacagaaacatgcatcatgagaagcaagaagtatcacccatcccttctgcatattagcaacttgtcactcctgagcaacagtgctcacatcactgaggtctgtgaacagtcacttttcgcattcatcctgagtgaaagatggaatgacttaagtacggatgctacttgtccaatgatggtaaaagggtagcttactggttgtcctccgattcaggttagaatgaaggaggtctgcggctaggagtcaataaagtgattggcttagtgggcgaaatattatgctttgtttgtttggatatattggaggatggggggatttatttgctagggatgagggatgggatagtaataggggcaaggga

SEQ ID NO: 8882 - DNA, 372 bp, Homo sapiens
  misc_feature 196: n = A,T,C or G
agcggccgcccgggcaggtactagtccagactggttggtggaaaaacaatcttcccctaaaaaggtgcatagcccacctttttcgacagttaggaggtctaagccacggtggttctgcagagttactgctgctaaggagtctatttgggattggagagtaagggtggattttgctatgtcttgtaggctgtctganagatcctttgagagtgtatgatagtaggacagggaaggggacaaacctgctattccagttcctgtggcattggtaactcctagtcctataagcaagggtattatctgcacagccctatgcctgatggacttgggctctgacagggactggtaaggtttggtttccaggggcaatgt

SEQ ID NO: 8883 - DNA, 297 bp, Homo sapiens
gggcttacagtggcgggagttggaggcgataacgatttgtgttgtgagaggcgcaagctgcgatttctgctgaacttggaggcatttctacgacttttctctcagctgaggcttttcctccgaccctgatgctcttcaattcggtgctccgccagccccagcttggcgtcctgagaaatggatggtcttcacaataccctcttcaatcccttctgactggttatcagtgcagtggtaatgatgaacacacttcttatggagaaacaggagtcccagttcctccttttggatgtacct

SEQ ID NO: 8884 - DNA, 432 bp, Homo sapiens
aggtacaagaccttctgagactggtccaaaaactgccactcctccctggtgaagcccacagccacatcttcgaatgacaatgacccctcccctgaagaactgccttgctctctcctcacagacattacaatcgtggcattttcatgtgtttcctgttatttcagctgggccttgcccatttcgttcaactcttaggggctagcaactctagtatgttctctctcttctgtctattctgggccttcccagaagtggtggtcaggtatcatctcaggtcaagctaccactggaaatgatgatcttccccagcctggaagctccttcttccattactgaaaatgtcttgttcctataggccagaacactcatcacagccatagggtctctctcccgtgtgagttctgtgatgtacctgcccgggcggccgctcga

SEQ ID NO: 8885 - DNA, 353 bp, Homo sapiens
ccgggcaggtactaccagggagtgttcatagagagtagtgtattttaagttcttagcattaaagaatgaattccaaaatatatgtagtcttggacacaaagggaaatctttagaaatttttatttaaccataaactataaaatggggagaatgatactcagcttacagtatcactatgagattatattagcaagatttcttagataactgtcattgtaaaccagccatgtgttttgattaacaggtagcagcatgtctaccagaaaaatggtttgaaaattctgccatgaggacatctattccacagctagaaaacttcattcagtttttattgcagtctgcacataaattat

SEQ ID NO: 8886 - DNA, 528 bp, Homo sapiens
  misc_feature 493: n = A,T,C or G
tgggcgaattggagctccccgcggtggcggccgaggtcagggtaaacaggaggatccttgctctcacggagcttacattctagcaggaggacaatattaatgtttataggaaaatgatgagtttatgacaaaggaagtagatagtgttttacaagagcatagagtagggaagctatccagcacagggaggtcacagagacatccctaaggaagtggagtttaaactgagagaagcaagtgcttaaactgaaggatgtgttgaagaagaagggagagtagaacaatttgggcagagggaaccttatagaccctaaggtgggaaggttcaaagaactgaaagagagctagaacagctggagccgttctccggtgtaaagaggagtcaaagagataagattaaagatgtgaagattaagatcttggtggcattcagggattggcacttctacaagaaaatcactgaagggagtaatgtgacattacttttcacttnaggatggccattctaacttcagggggtagactgga

SEQ ID NO: 8887 - DNA, 488 bp, Homo sapiens
cgcgtatacgactcactataggggcgaattggagctccccgcggtggcggccggggatgtgagtcatcccttggtccagcacatccacgctgtatacgccacccaccctgctagtgacttagtagccgtcttggtgatcagatcaactatcccagcatcacagtgcctgtgcccaagcagtcctcactttgtaacagtggccccagagagcaggagtagtgatgctggtgattcggatatgccaaagagaagccacaaagtgcttccttttaaatgaaaaggtgaaagttctcaacttaaaaaagaaaagaaaaaaatcatatactgaggttgctaagatctacatgacaataagatattttgggagagagatacgttcacataattttattacatatattgttacaattgttctattttgttagttactgttggtaatctcttactgtgcctaatttataaattaaactttagatatgcttgtacct

SEQ ID NO: 8888 - DNA, 236 bp, Homo sapiens
cgaattggagctccacccgcggtggcggccgcccgggcaggtactacttttgtggctgtgaatggtatcttttattgaactgaggcagcttttaaaagacttgcctgatcatttagagcactcccattgaggttaaattagacttgaatctgtaatgattctcgaactgttcctggtgtgtgtccagcacaatgttgctgggcagagcagaggggcagaggctcaggtatgtacct

SEQ ID NO: 8889 - DNA, 298 bp, Homo sapiens
ccgggcaggtaccgggatgtgatgctggagacctacagccacctgctctcagtaggatatcaagttcctgaagcagaggtggtcatgttggagcaaggaaaggaaccatgggcactgcagggtgagaggcgctcagagctgcccaggagagaaattatgggaccataatcaatgtagaaaaatcctcagttataaacaagtatcctctcaacctcaaaaaatgtatcctggggagaaagcttatgaatgcgccaaatttgaaaagatattcacccagaagtcacagctcaaagtacct

SEQ ID NO: 8890 - DNA, 468 bp, Homo sapiens
  misc_feature 125, 135, 136, 161, 177, 191, 198, 223, 227, 242, 267, 304,322, 332, 343, 360, 368, 372, 384, 396, 411, 417, 442, 455: n = A,T,C or G
aggtacagggtaaacaggaggatccttgctctcacggagcttacattctagcaggaggacaatattaatgtttataggaaaatgatgagtttatgacaaaggaagtagatagtgttttacaagancataagagtnngggaaagcttaatccagccacatgnggagggtcacagtagnacatccctaaaggnaagtggnagttttaaacctggaggagcaagcnaagntgcttttaaacctgnaagggatgttgtttggatagtaaantaaaggggtagtaggttaggaaaccaaattttgggtnccaaggaaggggtaaacnctttattagnaccccctaaangggtggggggatagggntttcaaanaagnaaaccttgtaanagggaggaaggncttaaggtaaaccangacttngggtagcccccgtttcttccccggnttgttataaaggnaagggggatggtt

SEQ ID NO: 8891 - DNA, 167 bp, Homo sapiens
  misc_feature 74, 87, 101, 131, 134, 138, 152: n = A,T,C or G
aggtacaactatctggcccaaaggggtggtcaatcctgagtggataaataataggaatttaagtcctatgatgngtctcggattttntcttttcttttctnaccttcctatttttattaacccgggccttntgngccnaaagactcagcctnattcaggaccatatt

SEQ ID NO: 8892 - DNA, 169 bp, Homo sapiens
aattggagctccacccgcggtggcggcccgaggtactttttttttttttttgctagaagagatttttttattgaagggcgagtctccggcatctgatggcagctacaactggatctcacggaacgcccgcttctccaccagcttcaccttgtacctgcccgggcggcgt

SEQ ID NO: 8893 - DNA, 423 bp, Homo sapiens
ccgcggtggcggccgaggtacaccaaaaagagaactttgtgatccgttggtaagatagtatccacaagtaagcacttgtgttcactgttttttgttccacactagaatacacccagttggataccagagttatttacagacatctgaggaagatcctagttttcaagtctgtcaggaaaatattccatattgttttaagccagatcatacccatggaaaaatagagaatggttttctttctttttctttctgaccaatacatgctcaagaaatcaaatatctgagatacacaaattgaacgcggtagggtgggggaggaagtatgggagataaagcctatgctgcttgattcctcaattataggagcagtctctaaaagccctccgcaatctagtgatgtgtttctctctggaattgggggac

SEQ ID NO: 8894 - DNA, 175 bp, Homo sapiens
  misc_feature 11: n = A,T,C or G
tagggcgaatnggagctccccgcggtggcggccgaggtacgcgggagagtgttcaaagcaggcccgagccgcctggataccgcagctaggaataatggaataggaccgcggttctattttgttggttttcggaactgaggccatgattaagagggacggccgctctagaactagt

SEQ ID NO: 8895 - DNA, 456 bp, Homo sapiens
  misc_feature 143: n = A,T,C or G
ccgggcaggtacttttctttcttttttttttttttttttgagacggagtcttgctctgtcacccaggctggagtgcagtggcgcaatctcagctcactgtaagctccacctcccgggttcacgccattctcctgctcagcctnttgagtagctgggactacaggtgcccaccaccacgcctggctacttttttttgtatttttattagagacggggtttcactgtgttggccaggatggtctcgatctcctgaccttgtgatctgcccgccttggcctcgtagctctttttgaccctcagggacagtcactgaattatgtcttgggagcccatgcttctgaggcaggcttagggagcaggagagcatacaggtgtagcagcctttccagctgatccccatgccctgctggcacctggagggctggaacaaagctattctcatattggggaaaaggg

SEQ ID NO: 8896 - DNA, 607 bp, Homo sapiens
  misc_feature 404, 576: n = A,T,C or G
ccgcggtggcggcccgaggtactttttttttttttggttatgaaaacttagggactaaaattaatataaaaattggcataatgttggattgaatctacattttggcagaagttaaacattcccacataatgtcaaaattatacatcatgcagttctgttttttgtttgttttattttgttttgtttttgagtctggctctgtcacccaggctggagtgcagtggcgtgatctgcaacctctgccccccgggttcgagcgattctcctgcctcagcctcccgagtagctgggattacaggtgcgcgccaccacacttggctaatttttgtgttattaagtagagacggggtttcggcatgttggctaggccggtctctcctgacctcagggtgatcagccccctnggcctacaaagtgctgggattacagggcgtgagccaccttgcccagcccacatcatacagtttgaaatgaaactttgccacaacccagcccttgcttggacacacacatatatacttgaacctgttgaaataaaagttttttctttttcatgattcgcttttgagcacctgnccgggcggccgttctagaactagtggaatcc

SEQ ID NO: 8897 - DNA, 540 bp, Homo sapiens
ccgcggtggcggccgcccgggcaggtacttgcaaccattggtgcatagtccatcgtcacagttatctgggcaactggcacaaggtgctccttgttcataagggacatatagtctattagcccaattaccagcaggacaatattggcaaacatagtagtattttagaactttttgattgggacagtaggcatttccacatccaacgaggtatgaagagtacatgagaatccttttttgacaagccttggaaagctgacactgtctctttttcctccctctatacgaaggatgtatttaaatgaatgctggtcaagtgggacattttgtcaactatgggtattgggtgcttaactgtctaatattgccatgtgaatgttgtatacgattgtaaggcttatgtcactaaagatttttattctgattttttcataatcaaaggtcatatgatactgtatagacaagctttgtagtgaagtatagtagcaataatttctgtacctcggccgctctaagaactagtggatccccgggctgcaggga

SEQ ID NO: 8898 - DNA, 457 bp, Homo sapiens
  misc_feature 7, 191, 202, 240, 248, 250, 267, 283, 298, 307, 331, 334,362, 372, 375, 377, 391, 393, 396, 428, 429, 432, 433, 437,438, 439, 442, 448, 457: n = A,T,C or G
tagggcnattggagctccccgcggtggcggccgaggtactgtctgtatcaatactaacggggcatgataagcaaaattttaaactttggtagttaaacctttatgttgcctcccctctgggctgccagctgtggggatgtgcttctcccttaaggactttggcaagaataacaagttcattggaaatttgnactttttctgnacattagtaggcaggacagcctttggcccttgtcatgncccaaggncncttttcatgttgtaaanggtttaccccaatttntattttaagtcctgncctttcttngtttcttcctttccccaagggggnganaatgggtatttttttttccccccctttntttttaattnaanangtcccccttggggngnccncctaaggggggggggggtatttagggaatttnnggnnttannnagntaattnttccccccn

SEQ ID NO: 8899 - DNA, 440 bp, Homo sapiens
tagggcgaattggagctccccgcggtggcggccgccgggcaggtactttgcctacggcagcaacctgctgacagagaggatccacctccgaaacccctcggcggcgttcttctgtgtggcccgcctgcaggattttaagcttgactttggcaattcccaaggcaaaacaagtcaaacttggcatggagggatagccaccatttttcagagtcctggcgatgaagtgtggggagtagtatggaaaatgaacaaaagcaatttaaattctctggatgagcaagaaggggttaaaagtggaatgtatgttgtaatagaagttaaagttgcaactcaagaagggaaaagaaataacctgtcgaagttacctgatgacaaattaccgaaagtgctcccccatccccacagtataaaaaggattatttgcatgggtgcaaaagaaa

SEQ ID NO: 8900 - DNA, 219 bp, Homo sapiens
  misc_feature 182, 206, 219: n = A,T,C or G
atagggcgaattggagctccccgcggtggcggcccgaggtacttgaagatactccagtcagcagagggtcatgttgagcattctgcagacagaactgtttcaagtctgcagcttgcctgggaaactttacgccggttgagtccggcctccagccggagctgtgaaccactttcttatagcgngacgcttggagggagccagacatnggtgcacgcgacn

SEQ ID NO: 8901 - DNA, 294 bp, Homo sapiens
  misc_feature 186, 192: n = A,T,C or G
ttagggcgaattggagctccccgcggtggcggccgaggtactttttttttttttttttgttgcaactcttctttaataactgattgatgcaaagaatcaacagatgttaaagccattgggttagattgttgaggaataggatatttgcatagtctcaacaggttccttcttaaagtgaaaaaagtntcttanaatggaaagaaaaggcaaatatcactttaaccaaatgtcaccaataataggacaaactgacatgtgccttctgatgccatacaaatggaaagtacctgcccg

SEQ ID NO: 8902 - DNA, 794 bp, Homo sapiens
  misc_feature 539, 584, 698, 714, 732, 742, 754, 772, 776, 782: n = A,T,C or G
ccgggcaggtacagtatgatgtaggccaggaagatcttcaaaaccttaacgttaagctaaagatttttacaaatgtctattaaaaaaacatagtaacagtattttctctgtaatcctcaaggattacactcacctcaccttattctggggattgacactgaactgatacacattggtagagccagatacattttttaaatactgtaatattgacagcaacaggagtcagagaaaccccatctccatgttgaagacagtttaaaacctgaaagccaagctacaagttaaatccttggaccagattgagaacttgtcctcctgtttggtgtgctttcctctgattgatccccactcttcacctattttatgtatatctaccctttcctaattggttttctacactgtcatgcccatctttgagtagtgtcttcacttcaaccttttttgcttactcataagctaattcagcacattctcctcatcctgtgcctataaagaccccagactcagtaagtagaggaagagacaacctgacttcngggaagacgacttgctctttctgtcccctcttcagctcccctctntgctaagagctggtttcatcgctcaataaaattatcacccttcgccatcttttaaccattccctgggacctcattcttcttggatgccaaacaagagcttgggacccaccaagngtgggtccttggccgntctaaaactaagtggatnccccggctgnaggaaatcgatncaagcttattgatcccgncgancttgangggggggcccgg

SEQ ID NO: 8903 - DNA, 245 bp, Homo sapiens
  misc_feature 39, 47, 73, 85, 91, 103, 108, 140, 170: n = A,T,C or G
ccgcggtggcggccgagtttgatttcttgcagtcctgancgatggancccgggggtgcctggttattgtccgntttctctctcanatgctnggcttgtttttnaaganaacctttttcgatattcattgctccatcgatnggatccagtccttgttcaaaaaattgtttnaaggcacttaaggctgcctgaaagccttgaatccttgctaaatattccagttgttttgaaggttgtacctgcccg

SEQ ID NO: 8904 - DNA, 681 bp, Homo sapiens
  misc_feature 7, 22, 90, 203, 230, 237, 243, 271, 277, 304, 311, 322, 324,346, 355, 358, 372, 378, 382, 385, 399, 417, 423, 425, 448,457, 460, 470, 477, 478, 484, 507, 529, 542, 550, 555, 572,575, 578, 585, 606, 609, 646, 650, 661: n = A,T,C or G
gagctcnccgcggtggcggccncccgggcaggtacagtagtgcactcttggctcactgtagcctcgacctccggggctcaagtgatcctnctgccttagccccacaagtagtgggactataggcacacagcaccatgcccatctaagtttttgtaattttatgtagaagacaaagggtttcaccatggttgcccaagggcttnatcttgaagcctcccctggaggcctcnaaagtgnatttcntggccccaaccctttggggaacctttcnctcaanaaaaatggccttgggggggaattttanttaaagnggcccgtttananaaccacaaactcctatttgggnccccttggnggncccccttttaaaanaatttncaanaancctttttttaaagnaaaggtttccaaaaaccnaatttncnttggttttaaaattgccaaaccnttggggggnaangccctttttnttggggnnaaaggnaaaaaaacccttttcccaaattncaaacccgggtttggggggttnggcctttcctttncatttttntttcncctttgggaaatttggnttnggntttttgntttgggccccccccaaaaaanatnaaggtgcccttttggggtttttcccttttcaaatttncaanggaaatttggnaaccctttttaatttttttt

SEQ ID NO: 8905 - DNA, 440 bp, Homo sapiens
cgactcctatagggcgaattggagctccccgcggtggcggccgaggtacccttctgcatgcagtcagaaatgttcttttcaagaggacatttcctttaaaaagttcaagtttcttatcttacgataaagagatatttcctatacttattgtcctaaaattctatttggtcactcttacctcttttgtgaaaggccacatcttgctaaagtagcagctactgaactgaccagaaacaaactcaaacactgaatttgacaaaccaacctgctgaatataagcaactttttctaagatgaaatgtaaaaaagaaaaagaaaaaacaaaaagcaacaccttctagaaagccattcatcttatctcataaaattaattccccagagttatctcatgtagtagcagcattatcaaatagtgcaattcttcaaaattgatttcaaat

SEQ ID NO: 8906 - DNA, 371 bp, Homo sapiens
tcttgtgtcttctttactgtgactgggtcgtttttaagaaaggttatcagctttgtgtttggtttcccacagttgataaaaatctatcaaaaacattataatttgcaaggaaaaaggtttttcaatggctgcaggaaccagaaagaaatagcatttcttatctgtataaacacaaacatttaaagctagtcacactgcaggtaaatccaatatagtatgcaaaagttctataaaaatgaacaagagatacacgtttactttcattgctccaacagtcaaatgtaaatctgcatgagagttgcgctgcagcagtttgctggtccaatttaagagttcaaggtcctttttgtacctcggccgctctagaacta

SEQ ID NO: 8907 - DNA, 440 bp, Homo sapiens
tacttagggcgaattggagctccccgcggtggcggccgaggtacaccaaatgagatactatttggaaaggcaataaagggagtgtaaaagcctaggtagcttaaatacaggctctggaatttccttcgcaggaaggtgaagcaccaatgatggcaaaaattaaataaatacatcatcttaaaaggcagagggtaggctgcgtgcagtggtttacgcctataatcccagcactttgggaagccaaggcgggcacattgcttgagctcaggagtttgagaccagcctggacaaccccatctctacaaaaaaataaaaatcggccaggtgtgatggggcaaacctgtggtctcagctacttgggaggtggtccttgagcccagggaggtcaagcctgccatgagtcaaggatcatggtcactgcactccaagcgtgggctgac

SEQ ID NO: 8908 - DNA, 266 bp, Homo sapiens
cgaggtactcactttcatcctgggcgactgtcgtaagcgttcagtctgtcattgaattattccatcagcttctttgctagagtgggttttctggaatggttctgttttagagaactagttacagtgactccatgagcctgctcaaaagagttggccaaaatgttttctctccttcatcactgtctagtggtgctgtccctcgagtgagcattcacctgcctcgtgtcagagttcacacacgtgtgtgtcccccgcgtacctgcccg

SEQ ID NO: 8909 - DNA, 368 bp, Homo sapiens
  misc_feature 353: n = A,T,C or G
cgcggtgggcggcccgcccgggcagggtacgaagtttgcgttcatcgtccacttcaatgagtttctggcagccagtggctgggaaggagatgttcagcttcatcttgaagcagctgaacgcctccgaggcgccacggaaaagagccccgcgtacagcccaatgagatctgcgtcattcagagaggaatgcggttcagcatagatgtctttgaggagaccaggggctacatcttggaggtctatggtgtccactttgagttacctgaccttggaccaattggggccaatggcttggccaatcctcgtgatttcttgatacccattgcctggtatgaggatcgccaagtacctcngccgctctagaacta

SEQ ID NO: 8910 - DNA, 173 bp, Homo sapiens
acactacttagggcaattggagctccccgcggtggcggccgaggtacgcggggtgcccatctacgaggggtatgccctcccccatgccatcctgcgtctggacctggctggccgggacctgactgactacctcatgaagatcctcaccgagcgcggctacagcttcaccacca

SEQ ID NO: 8911 - DNA, 586 bp, Homo sapiens
  misc_feature 487, 537: n = A,T,C or G
cgaggtactgttctcatcctcatccttgcccgtcgtctccatgctttcatcttcctgttcatccaggtcggtcatggtgccgcctttgactggggccgactctgagtctttctttgtgttgactgttttgggaagtgtcacctcttctacattggggactggtgagggctcgtccatgtcctttgtcaggtcttcttgctcctcttctctgtggccacgctttgacttagtgtaaggtgttgagggacctttcttagcatttttcttctttgcttctggggttggtgaaggagagggggagcgcttcctcttcttatagtttccccccttcttgtcccgtcgatctgaatctgggctgttccccgcgtactctcagaggagcaagtggaaccagacagatatgtcattctgggaggtcaccgggactcatgggtgtttgggtggtattgaccctcagagtggaacaactgttggtcatgaaaattgngaggagcctttggaaacactgaaaaaaggaagggtgggagacctaaaaanaacaattttgtttgcaagctgggaatgcaaaaaaaaatttgggccttct

SEQ ID NO: 8912 - DNA, 426 bp, Homo sapiens
  misc_feature 4, 50: n = A,T,C or G
actncttagggcgaattggagctccccgcggtggcggccgcccgggcagngtacgagagcgcatcgcaaagaacctagtagagaaaggtattctaaccactgagaagcagaatttcctgctatttgacatgactactcatccagtgaccaatacaacagagaaacagcgactagtgaaaaaacttcaagatagtgtacatttaacaattggacatacagcactgtaaacaattcaaagtccattgagcttaccatgaaagaactgaaacgtatgtaggaactgtgtcctgctgcagacaagcagctgctctggctctggtgcggtgcggtgcggtgaggttgaggtgaggttgaaggtgggcaaggtgtggaaggggagaattcctgaggccagtcacaattattgaagctaaattaatttcttac

SEQ ID NO: 8913 - DNA, 517 bp, Homo sapiens
  misc_feature 513: n = A,T,C or G
ccgcggtggcggccgaggtcccccccgcagtgggcagtcctaattctgaacttcacctatctgggggtgatagaggggaacaagaggaagcctgctgaagagaaaacctaaacatctgttttgtctacgtatgacttcctctgcttgtgggagagaaggaaggaaaggaacacattgttgtcagccccacaacccaacagaattaaaccctggagcaggttgaacagcagaggcttccctcagatcaaggagccaggagcagatgatctatctctgtggccacacagagagatgtcaccttatgcaatttgcatatcatattcaattcccccaactgctctttctaatttattcaactggggaccaggctggtctcatgccaacctaggagatgtacctgcccgggcggccgctcgaggaagggacagatgtagttggcaaccatggttagcatcggatgcccatcccaatggccatgaatgtgccaaaggtgccgccactctgcatcatggntttc

SEQ ID NO: 8914 - DNA, 434 bp, Homo sapiens
  misc_feature 305, 390: n = A,T,C or G
ccgcggtggcggccgcccggcaggtacgcggggagggtatgagtgagaagcaccagcaggcagtaacagccaacccttagccattgctaagggcagagaactggtggagcctttctcttactcccaggacttcagcacctaagacagctccaaaacaaaccagaacagtcagctccgggggagcacgactgggcgagaggcacagaaatggacaccagaaataaggcccagctccttgtgctcctgactcttctcagtgtgctcttctcacagacttcggcatggcctctttacagggcaccttntgctctcaggttgggtgacagaataccctttgagggagcaaatgaacctgatcaagtttcattaaaggaagacattgacatgttncaaaatgcattatctgaaaatgacgcaccctattatgatgtatc

SEQ ID NO: 8915 - DNA, 213 bp, Homo sapiens
ccgcggtggcggccgaggtacacttcggtctagccagaaaaaaagcagaaacaagaagccaaggctaaggcttgctgccctggccaggaggaggggtgcagctctcatgttgaggagagctgtttctggcaggagttaggaggaactgctaccacttcaaaagcctgtagaggggaagctatttaattaagggattccccgcgtacctgcccg

SEQ ID NO: 8916 - DNA, 320 bp, Homo sapiens
  misc_feature 6, 15, 22, 49, 66, 69, 76, 77, 88, 106, 109, 171, 199, 207,216, 217, 232, 266, 286, 312: n = A,T,C or G
tctacngcatgctcnacggccnccatgtgatggatatctgcacaattcncccttaccagcggccgnccnggcaggnncgctgcatttnctattcgcctacacaatnctncgatccttccctaacaaactaggaggcgtcttgccctattactatccatcctcatcccagcngataatccccatcctccatatatccaancaacaaangcataatannttagcccactacgcnaatcactttattgactcctagccgcagaccttgntcattctaacctgaaatcgncaggacaaccagtaatgctacccttntaccatca

SEQ ID NO: 8917 - DNA, 202 bp, Homo sapiens
  misc_feature 79: n = A,T,C or G
gccgaggtacgcgggacacaggcccaggtgtgtaggccacagcagccgcagtcctgaaaggctgcaacacccagacctncaggagagaccaggcccaggatgcctcgcctgttcttgttccacctgctagaattctgtttactactgaaccaattttccagagcagtcgcggccaaatggaaggacgatgttattaaattat

SEQ ID NO: 8918 - DNA, 646 bp, Homo sapiens
tccccgcggtggcggccgcccgggcaggtaccttggcctccaactggacacaactgcatttatagtttagcgaaaatacaaagttctgaaagtagccttaaaagaagtgccctttgctttgacatagcaatatcaaaagcaagtgggactgtgcaatcagagccatgagttttatgaaaactactttcctttcacatcatgttagagaatgccacacccatgatcatgtaacattattacaatcatgaaatattactacattcgtgattaacattacccaaaaggcacatcttcaaatgttgaattaagaaaatccaaaaatcaaaacagtagagaatacattaaaaatcaagcatttaatttgtaaaccttaatgaaataacagcctactccagtttcttcaaaggtttgtgagctttttataagagtggtcaggaagtgcagaaaaacaacatggaagacaggatttggaaacaaggccaaaatttaaaagacttaaccttttttttcttttaaatgagccacagaaggtgcttttttataatgttgacgcaaatcaacatttatattatagaaatgcctcaggaagtaacagaccccacaaggttaaaacctgattctttcccacttaaggttctggaaattt

SEQ ID NO: 8919 - DNA, 327 bp, Homo sapiens
  misc_feature 291, 308, 311, 319: n = A,T,C or G
ccgcggtggcggcccgaggtcgcgggatcgtaaaaccttcagaaggaaaggagaatgttttgtggaccactttggttttcttttttgcgtgtggcagttttaagttattagtttttaaaatcagtacagaaaggagggcagtaggccatcccccaggagaatgacagaagcaaaggacttgttactaagcagatttaagggtcagtgggggaaggctatcaacccattgtcagatcagcatcaggctgttatcaagtctgttggtgctaaaaagtaaaagatgaaatgttnaaaaaaaaaaaaaaaanaanaaaaagtncctgcccg

SEQ ID NO: 8920 - DNA, 737 bp, Homo sapiens
  misc_feature 9, 663: n = A,T,C or G
gggcgaatnggagctccccgcggtggcggcccgaggtactgctgacttaaatagaggtttttttaaggtattgggtcagctaacagagactggagttgtcagccctgaacaatttatgaaatcttttgagcatatgaagaaatctggggattattatgttacagttgtagaagatgtgactctaggacagattgttgctacggcaactctgattatagaacataaattcatccattcctgtgctaagagaggaagagtagaagatgttgttgttagtgatgaatgcagaggaaagcagcttggcaaattgttattatcaacccttactttgctaagcaagaaactgaactgttcaagattacccttgaatgtctaccacaaaatgttggtttctataaaaagtttggatatactgtatctgaagaaaactacatgtgtcggaggtttctaaagtaaaaatcttgtaagaaaattgtcaaaggggctaatgctacaaggctacactcttcctagagttgaaatattttgttgctgcaccgagtgacctccataaatactggactgaaaaaacattgtaatactacaagtataatgacatttagaagattactttgggctggtgggacatgcctgtgaatttagattaccaatgaatattataangggatgattttttaaccaaaggaatatatttttacttggaatcttttcttgctttggatttttctaaaagtttg

SEQ ID NO: 8921 - DNA, 277 bp, Homo sapiens
  misc_feature 2, 178, 181, 198, 202, 205, 215, 216, 218, 220, 266: n = A,T,C or G
tnctatagggcgaattggagctccccgcggtggcggccgaggtacagagacagaggaaggggggctccaaagccaagagagggaaccccacctgccacagataccagctaggtatatatacagaggctggaggaggcagtgtctgatttgcacaggctcaggggattggttttgactnagncatgtcatttcacttancccncangaaaagctgnntntnccaccctagccttttaatattgcaaatgcagggcaccatgatcttntacacaggtgg

SEQ ID NO: 8922 - DNA, 205 bp, Homo sapiens
aggtaccccagccacatggccttcatccttatgacctagcaggcagaacagggaccaagcagcttctattttgtcaaactcctttggacaaatattcaacattcaacaacaagctttgtaaacctaacgctaaacaagtcatggcaagcaaactggattttcttaagaaatgaggaaaagtgcaagtgatctcagtacctgcccg

SEQ ID NO: 8923 - DNA, 599 bp, Homo sapiens
  misc_feature 507, 512, 587: n = A,T,C or G
ctcctatagggcgaattggagctccccgcggtggcggcccgaggtctatacatgaaatattcttgttgacctagtaatttatattattccatttaattcttaaacctatggcctttttattgagcacactcttaaatcattatttggcttgtaaacattcatctgaattgtggctcaatcctctttaaataatctaggaaaaaagaaagataaagcttacattttcacagttttggctcttaaacacattccacaaatgccattaagaatttattttgttttaggccagtcatggtggctcatgcctgtaatcccagcaatttgggaggctgaggcaagaactgcttgagcccaggagtttgagactagcctgggcaacatagcaagaccctgtctctaccaaaaaaaaaaaaaagtttattttgttttagagtcatttaatgtgtttttatgcacaataatagtgggaggttgttttggtgcatttgtttgtttgttttgttttgntttgntttgctttccatgtgggaaaaagttaacattggaactgtttctagtaaaaagatttttttcaggctgggcacggngggctcatgcct

SEQ ID NO: 8924 - DNA, 399 bp, Homo sapiens
  misc_feature 391: n = A,T,C or G
tacttagggcgaattggagctccccgcggtggcggccgaggtaccccagttgttgttagtggggactatgatactgtaataatatttttaaaaatttacatcaagagaggcagtcattcacgatggttttgtgccagctctttttagggttttggatcacattagagatatttagaacatattaccctgtgacttacgtaggaaacctaatatgctgagtatctggcacttgaattcctgcttttattgctggaggtccacatctgtggttgacctctgttattgtttaaaaaaaataaataaaaattaaaaaaatctgtgcaataatttttaaaatgtgctcccaggtaatagtacacaaaatgttttgagtatctttttaagctgcatntttccttt

SEQ ID NO: 8925 - DNA, 403 bp, Homo sapiens
  misc_feature 129, 136, 152, 167, 183, 185, 203, 217, 221, 227, 247, 253,265, 268, 269, 273, 277, 311, 315, 329, 332, 346, 372, 378,383: n = A,T,C or G
aggtactcatgtatttttttttccagatctctttccccaagttgctattgtaagagtattctgctgcgtgtggatgcagttatacacattaaagcagatctggagtctgaagtagcctataaagcagcntataaanacaggaaaatacatgncataagcctgccagnaaacccatgataggtnangaaggacctttttttttnggttttgtttttgnactntgcttnttggtgctatggtatttttnggcttntttacaagtagnaannaagnattntttttattttaccagaaaggaacaaaaaacattncccnagttgtatatttgntgncaagaaaaatggcntgggttttttttaccaccccaattcnccttanagagnaaaaaaaaaccttttttacc

SEQ ID NO: 8926 - DNA, 182 bp, Homo sapiens
  misc_feature 34, 35, 36, 38, 40, 41, 50, 67, 74, 80, 81, 98, 105, 150,160, 162, 166: n = A,T,C or G
tttttttttttttttttttttttttttttaaaannntntnnattaatatntttatttaaaccattcnaaagcangaaacnnaattaaaacacacatanatacaangatgacaaaggaaaacattgcaaaattcaacacaggggctgcatncattggaagnangggnggatacacaaaaaaca

SEQ ID NO: 8927 - DNA, 276 bp, Homo sapiens
ccgcggtggcggccgtcgctcccctgctcctccttggtggctctctcagaggactccagagttgtatccccaggccgtcttccccgcgtacgcgggggcttggccaaatcgtcttcagagtcctccagtgaggaaagtagcagtgagagctcctctgaggaagaggaggaggaagatgaggaggacgaggaggaagaagagagtgaaagctcagactcagaggaagaaagggctcatcgcttagcagaactacaggaacagcttcgggcagtacct

SEQ ID NO: 8928 - DNA, 500 bp, Homo sapiens
  misc_feature 139, 274, 294, 350, 372, 450, 462, 470, 472, 474, 483, 497: n = A,T,C or G
ccgggcaggtactgtggcctgttaggaacccggctacacagcaggaggtgaggagcaggcaaacattactgcctgagctccacctcctgtcagatcagcggtggcatcagattctcatcggaacttgaaccttattttnaaactgcgcatgttgaggataggttgcatgctccctatgagaatctaactaatgcctgatgatttgaggtgaagaagtttcatcctgaaaccaccccccaacctgtctgtggaaaaataggtctttccatgaaancggtccctggtgccaaaatnggttgggggacctacttggtctaaaggggacatttccccttacctaccaaaatcantttccttgaatgcacaagggcngggttgccaggggaacccttttcttaaagaaatttaaccctccccaaaattgttttgggccttttttggcccttcaancccttttcccanggcaaaangngngggcctttncaacttttttcttnttt

SEQ ID NO: 8929 - DNA, 370 bp, Homo sapiens
ccgcggtggcggccgcccgggcaggtacgcggggcttccggtggcggagcggcggattagccttcgcggggcaaaatggagctcgaggccatgagcagatataccagcccagtgaacccagctgtcttcccccatctgaccgtggtgcttttggccattggcatgttcttcaccgcctggttcttcgtttacgaggtcacctctaccaagtacaagtcagacatcttttgaaacatcaaacagagaagcagcaaagagccagaacttgcctaaacctttaactgaatttccgtctcctgctgaacagcccacatgcaaggagattcctgatttacctgaagaaccttctcaaacagcagaagaagtagtt

SEQ ID NO: 8930 - DNA, 462 bp, Homo sapiens
cccttagcgtggtcgcggccgaggtactatctggatactaaaatgttacggaagtagctctttgttctccctcactctgcccttagttaatagaaattcagactcgccaagtaaggcttcgtgcatagtgtcttcatgtcgcgtatagttgagcgcgttcttagcagttggcttcatggacaactcattagtgttttgacttttcttacccagcgttaattgaattcttgcttttagacaacttcctttttgtagtggtgaaccttgccctttagtacgcggggtctctgtcagtcgcgagcgaacgaccaagagggtgttcgactgctagagcccgagcgaagcgatgcctaaatcaaaggaacttgtttcttcaagctcttctggcagtgattctgacagtgaggttgacaaaaagttaaagaggaaaaagcaagttgctccagaaaaacctgtaaagaa

SEQ ID NO: 8931 - DNA, 139 bp, Homo sapiens
cactacttagggcgaattggagctccccgcggtggcggccgaggtactctcagcttgttggtggaagcccctcatctgccttcattctgaaggcagggcccggcagaggaaggatcagagggtcgcggccggagggtcc

SEQ ID NO: 8932 - DNA, 396 bp, Homo sapiens
  misc_feature 112, 135, 144, 147, 152, 160, 161, 165, 175, 176, 184, 186,190, 195, 196, 198, 206, 225, 255, 256, 258, 264, 274, 284,293, 302, 311, 312, 314, 317, 325, 338, 343, 345, 349, 354,367, 385: n = A,T,C or G
ggagctcccccgcggtggccggcccgaggtaccttttttttttttttttttttttttcggcaagattattagtataaaaggggagataggtaggagtagcgtggtaagggcnatgagtgtggggaggaatggggnggttttttnttnatcantccacacnncctnttcacactcnncctccctncncctnaactnnancgcccctncccccacccccttctctcnccccatctgacccatcttatcatctacccnncnccctcnacttcatccncccttccctnccttcttcncccgccccnctcaccccnncnttnttcccccntggtccctcctcnctctncncccnttttnccctccgccctcnccatcccccccctcttcntcaccacccat

SEQ ID NO: 8933 - DNA, 222 bp, Homo sapiens
  misc_feature 3, 84, 149: n = A,T,C or G
canaaaacattttgccccaaaataaacttatactaacttgttccataacatgtgtaaacaggatctagtttgagacagtaaganggataagatattagtttgaaaggagcccttatcagagcaacacaaattccgctgaattgaagcangaacaaacatcaagtttataatgaaccttgggtgggagaatggtgaaatcattggtgctttacaaaaagttga

SEQ ID NO: 8934 - DNA, 445 bp, Homo sapiens
atagggcgaattggagctccccgcggtggcggccgcccgggcaggtactttttttttttttttttttgcacaaatggcattttattaaagaaaatctaatttacaaagctttgtaaattttaagaaaaacattcatagatcataaacaaaaatttcaatatgcaatattcaaatttacaagaaaataagcacaaacttttagacagtgcagttattgctgcactcctttaattccttatccagagcccaaaaaatgtagacaaaccctaaaaatgtagcagaagcatttccgcacactggtgtccagaatctagtttgtgcagaaatgtttccactagatttatagagtacatttgaaaatgccctttggatacttggaactgctaaattattttattttttacataaggtcacttaaatgaaaagcgattaaaagacatctttc

SEQ ID NO: 8935 - DNA, 461 bp, Homo sapiens
ccgggcaggtactttatagtaataaatctgaccagcagagggagggatcaggcagcagtgtttagagcacaccacactggccactgtaaactgagaagctaagttaactggtattttatgattttgagtatagtctttttataagttgtatacactttacaatgtaaaagaaacaaactttgtataatagcaaatcgggaaggggactgcttaaaatgttaatgcagtgtttttctttttttctctgcataaatggcttgagcatactggcatttacacagaaatgatatatgctgcttttatcatataacaaatattttcccactattacagcctgagtaatacccgtattaaaagagcctcattttagaaagacatttaaaatttttggaacataccacatgtagaaaggttgaactggtttttcagctataatgcatatacaactatagtgtgtatct

SEQ ID NO: 8936 - DNA, 368 bp, Homo sapiens
  misc_feature 306: n = A,T,C or G
ggcgaattggagctccccgcggtggcggccgtcaggtccttgattggcaccgcctgatccccctcacctgggcctgtatggctaggcagactcctcatcttggagaacagagaaggacgacagcttctttgttgcgcaaactgactacagcctccaatggaggggtcattgaggagttatcttgtgttagatccaataactatgtgcaggaaccagagtgcaggaggaatcttgttcagtgcctccttgagaagcaggggactcctgtggtactcagaccgggtaagaaacatggcgagggtagtnaggaggcagcggctaccgccggggggattctgagggaccaacaccgactccaccgggcaccc

SEQ ID NO: 8937 - DNA, 385 bp, Homo sapiens
  misc_feature 3: n = A,T,C or G
gcnaattggagctccccgcggtggcggccgaggtactgtttcactgaagagatggaatataagaagccaagtaatttatggaattctcttctttgtttttcttttttttttttggcagtggagtcttgctctttaaatagagcaaggctagtctggaactcctgggctcatgtggtcctcccgccttagctttcagtgtagctgggactacaggtgtgaacacagcttggaaatctcttaaccatgggagttaagtctcaaaattctggtgatacaagtggttgaaacttaaaactgtatttaaaaaataggattcgtgaatttgagatagttcataagtctgcaaaaggctgtataaatacatattttacatttactattatta

SEQ ID NO: 8938 - DNA, 370 bp, Homo sapiens
  misc_feature 45, 66, 68, 69, 75, 123, 195, 257, 311, 342, 345: n = A,T,C or G
tagggcgaattggagctccccgcggtggcggccgaggtacaatanagtaagaaattatgacaaagntnncatgtncagtaacagaataaaaggcctttcattaacctatctagaagtccccantgcagtaggaaaacatgttcattcccctaacattgcagtatatactaggcattaagctttctttttaaaatnttttttctctataagcagttgttaaaaggcatacccaaaagaggtgtttaatcaccatcccnaccaaaatatagtttattatactctctccctcttttttaatgatagtgtaaacntgaatccaattcctggccccgccagcaaatnaanctactgttcagcaggccaagaaaca

SEQ ID NO: 8939 - DNA, 288 bp, Homo sapiens
acactacttagggcgaattggagctccccgcggtggcggccgaggtacaggtgttttctgtggctcccagcttcattgcagcttgaagatagacggcagtgtctgtttgaactgagacacatgagacccgggacaggagtatgatagggagacgttcctgcctatccaggatgtgaagctggcgcaaccgcctaccacctctggagagacctcggcacatttcaccagttttccctgctaccctcatcagcactggtgctgctgcttgtcactggagtacctgccccg

SEQ ID NO: 8940 - DNA, 438 bp, Homo sapiens
  misc_feature 391, 395: n = A,T,C or G
tatacactacttagggcgaattggagctccccgcggtggcggccgcccgggcaggtactgttaggagtatactgcttacaggtttagatatagtctgttagaattaaaaccaagtttagtgttcatatttacctcatgggctttatcaagcccatattacctcagcttatatatagttaccatttttgtgtttttaaatgttttgacgatttcaatacaagataaaaaggatagtgaatcattctttacatgcaaacattttccagttacttaactgatcagtttattattgatacatcactccattaatgtaaagtcataggtcattatttgcatatcagtaatctcttgggactttgttaaaatattttactgtggtaatattaggagnaagnaattaaagcaaggaaaaatctggaagtaattgtcttgttttta

SEQ ID NO: 8941 - DNA, 567 bp, Homo sapiens
  misc_feature 271, 279, 294, 296, 309, 311, 313, 326, 336, 341, 362, 367,371, 377, 388, 389, 391, 394, 405, 406, 410, 412, 420, 424,431, 445, 447, 454, 460, 461, 464, 471, 480, 495, 500, 504,506, 507, 520, 526, 539, 562: n = A,T,C or G
ccgcggtggcggccgaggtacttctgttgctgtgttctgtcatgagttgcctcatgaattaggtgactttgctgttctactaaaggctggcatgaccgttaagcaggccgtcctttataatgcattgtcagccatgctggcgtatcttggaatggcaacagggaattttcatttgggttcatttatgcctgaaaaatgtttttctatggtgggataattttggcaacctttaaccttgtctgggcctttattttcaatggttattgtttgncttcctgnggtttggattaatgngnttaacccctggcncncngggggccgggtcncgggctttcntaagnaaaacctaagggttgggggantttcncccnccccgnggggcccttgnncnatnggaaatatttnntccngnaatttaanttcnaaaaagnccttttatttgccngnaattaanccccgnnttncagtaanctccctttngtgtatgtggggggnggggngggngnnccccccccggggnttttanccccccccaatgnccttttttttttggttttttccnccccc

SEQ ID NO: 8942 - DNA, 498 bp, Homo sapiens
  misc_feature 267, 357, 450, 454, 456, 457, 463, 464, 466, 468, 469, 472,473, 474, 476, 478, 482, 491: n = A,T,C or G
tatagggcgaattgggagctccacccgcggtggcggcccgaggtacctgtcagaatgagattaccctccaggttccaaatccctcagaattaagagccaagccaccttcttcttcctccacctgcaccgactcggccacccgggacatcagtgagggtggggagtcccccgttgttcagtcccgatgaggaggaagttcaggtggacactgccctgccacatcacacactgacagagaggccactccggatggtggtgaggacagcnactcttaaaattgggacatgggcgtttgtctggccacactggaattcaattttggcttgtatgccgaattccacctggaaagccaggttnttttatagaggttcttgattttacataaattgccaataatggtgtggagaaactttaaagaacaagcttacaaataaagtgtgagggacggtnaaanannaccctnncntnngcnnnananggtnccttgcccngggcggg

SEQ ID NO: 8943 - DNA, 483 bp, Homo sapiens
  misc_feature 1, 157, 160: n = A,T,C or G
ngggccctttcgagcggccgcccgggcaggtacttgtatgtatctggaaatgggaaaagaattgtgctcataacaccttctggatgcatatttctttgggaatatttggaattaaagaatatcttatcttctaaaagcctttcattggcgggtcggnggngccaggtcatacctgaagaagcagttctcttgccttccaccgaagataaagaagctgtagtgaatgctgtttttataaaaaatgagttatttggagactgctgcctgtgttcatttactttttattctggggaatgcctgaagttaacatttctagcaattcggtggcatgagaatgtatttacatctgtaagatcattgccataccatgttcattgggctcaacaagactgtcatctctgtagtttaattcctaaatgtgaatcagtaaagtcaagaggagctctaatttctgccttttcaagagatggccttaccctggca

SEQ ID NO: 8944 - DNA, 692 bp, Homo sapiens
  misc_feature 504, 564, 612: n = A,T,C or G
ccctttcgagcggccgcccgggcaggtaccttacaatgttagtaactgtcttttattaaggaagaaaaagttaaaatggcatgtaacttaagaaggtgggagaataataaaggaaaaaattaagaacaaaacgaaaagaatcatgaaatagtaaaacagtaaaattaagatataaatctcagagttggttatttgaaaagatcaatgaaacagagtaattctggaaaaaccaatgagaacaaaaagggaaagcacacgcaacatgggaatgaggaagcagaatactacaactccaggccaacaaatctgaaaatagaacagaatcactatttaggaaaattcacttaattaaaaaaaatttttttttgagaaagggtcttgctctgtgtcccaggcatgctcacggctcactgcagcttcggcccccagggctcaagtgatcctactgcttcagcctctgagtagctgggactacaggcacacaccaccatgcctagctaattnggagtggcggctatgttgcccagctgattgtgaactcctgggctcaagcaatctttctgncttcgccttcagaagtgctggggctacaagcatgaccactgtgcttancccgggaaaattaaattggccaaaacttaccgaattgaaattaagtttggaagaaaatatgagcctgaaaaaaattaaaa

SEQ ID NO: 8945 - DNA, 561 bp, Homo sapiens
  misc_feature 446, 453, 546: n = A,T,C or G
gatatctgcagaattcgccctttcgagcggcccgcccgggcaggtacccgaaaagaaaggaagctttagtaatgaaaggattgctgccaaaatcctgtttcccccttgcagatcttacagaaaacagccacagaatcccaaggcatcagcaccaagagagcctgtagaaactatctggtctaagctcctgaagcccagagataagaatgacttaacccaagctgcacagcctcttaacagtccactgttaaccccagaaacagatgcatttgaatctgaaaggagacaggaatcctaatcctactgctcagggacttgctgatttactttgctgtctattagcctttctgtgacatgattttctaccaagcaaagtcttttattcaagtctcccagagatttcctatttaagcgtttgctatttggccacttaaaaaagacagaanagaagtnaacagaagcatataccacacaactcagttccagtcagtagttgactcttcaagatggcggatgtcactgagatggctgagaaataggaaccgnatgtgggggaaaagg

SEQ ID NO: 8946 - DNA, 197 bp, Homo sapiens
ccctttcgagcggccgcccgggcaggtaccctcaataaggtaagagtccagcttgggggttggaggaagctgtctgatccaactggaggtgtgtcctagcctctgacctggctgggaaggataatagccctggtcacagttagtttcttctagatggtgagatgatctcatccaaaggacttctgactgggccaaac

SEQ ID NO: 8947 - DNA, 531 bp, Homo sapiens
  misc_feature 473, 525: n = A,T,C or G
cgtccgaggcatcaaaggctgcataatgtctcctcccacaggtattggtggttacttaggaccattgcctactagtgaaacaatcaacctcaacccagctttgcccttctgagcccctgaaagatcagctcgaatggggctgggaacatggaggggcgtgctgctgcacatggacctgtgaagtagtcagggcttctgtcccacgtggctgccccaaaacctttgtgaggtactgccctctgtacagtaagccatcatagtgtacatccgtttacttttatagtaagagacagaagaagagggcacagttttaaaacaatgatatgtaaaacagtgcgaaggtatgatttcctctctgaactaagtgtgaccgtgggtaactcttggtgtgttggacacccacttgaacagccactaccctggcccagatcagaatacggcaatggcatcccgaaccactgtatggcactcancctgcggaaggggaaagtcacagagcattccccaagagctttgaagtctganaagtct

SEQ ID NO: 8948 - DNA, 314 bp, Homo sapiens
ccctttcgagcggcccgcccgggcaggacgcggggagttgtgagggggaaggtagactctttccagacctttgataaaggggctgctcaaaaagccacgaccctgggcctctgctaaaaccatggctttaagtaaggagggagcagatatataaaaaaccttatccccctttctaatctcttatgtcctgtgagtgtcacccattgagtaaacccaggtggaagtcagcaggaaagtagctgggatgatgcagtctttacaggttatatgctgaaatgattttggatgtacctcggccgcgaccacgctaaggg

SEQ ID NO: 8949 - DNA, 399 bp, Homo sapiens
  misc_feature 180, 394: n = A,T,C or G
ccctttcgagcggccgcccgggcaggtaccaagccaatgagttggagtttgccagggaggcttctaaatttattctgctgtgaattctaagtggggcattggaaacttcatatcctggacattttcttaggtgattagtaattaaatgtgcatccaaaaaaaaaaaaaaaaaacctgcanatttgcgctcaaccccaatttggttcatctgaacacaggagcacttgagaaatgcaaaattctttaatcactccaaattgcccaagcacaaaccaggccaagagcgtcaattgcttctaaaataagatgcaggtgttctgaaaaatctacaagcagtctgctcattttaaattactcttcactccatgtgcccatagggaagggaggattgaanaaggc

SEQ ID NO: 8950 - DNA, 398 bp, Homo sapiens
cgccagtgtgatgggatatctgcagaattcgccctttcgagcggcccgcccgggcaggtaccattcttatctcagaatgctgtaaaccatcagtagaagcagtttagatttggactgcatggtaaaatgaaaagtaataaccctccaaccacaacctagtcagggtattaataattatatgtagcaagaaaacaaagaagaaaataatattgaaaaaatggagattccccaaccagtttcatatttgaaggatctgagttgtatttttattaaggaaattttttttctgaatactgtcttccaaaatgttaacattaaaatctgaatcagaggactctgaatggaaaagaagtttgatcactgacacctagggctctgaagcgtgtgtggccacatgg

SEQ ID NO: 8951 - DNA, 443 bp, Homo sapiens
  misc_feature 409, 432: n = A,T,C or G
ccctttcgagcggccgcccgggcaggtacatattatatgcaaggttacaaaaaaaaatcaatggttaatgattttttagctcaaccaagctaaaagatgtgaacaagaaattgaactcaaaacaacttaagatacaaagctcttgttactgataatgtctaataatattcatcaatttaccatatcttgttcttatattaaaatgttctatcattttcctaattattttaaagtcgattacaaaaatatatatatattcttgtagtgccagaaaattgaatacattaataaatggggtagaatagaatgaatctcccatgaagaagaattccaaataattttatgaactctgccctcagggatatggagcacaactttcctacttctctagtggtgagctgaatagtgncttccttccaaaaattacatatngaaagggggaa

SEQ ID NO: 8952 - DNA, 331 bp, Homo sapiens
  misc_feature 32, 294: n = A,T,C or G
ccctttcgagcggccgcccgggcaggtacccnaaaagaaaggaagctttagtaatgaaaggattgctgccaaaatcctgtttcccccttgcagatcttacagaaaacagccacagaatcccaaggcatcagcaccaagagagcctgtagaaactatctggtctaagctcctgaagcccagagataagaatgacttaacccaagctgcacagcctcttaacagtccactgttaaccccagaaacagatgcattttgaatctgaaaggagacaggaatcctaatcctactgctcanggacttgctgatttactttgctgtctattagcctttc

SEQ ID NO: 8953 - DNA, 301 bp, Homo sapiens
ccctttcgagcggccgcccgggcaggtccgggcaggtacaggtgttactatattacctgtaagaccacactcggtgtcatctcctgcaaactagtcctctcctgactcctctgtttctgtgagtgattctgcgatggcttgaggtcatccgtttgctttgaaagatcacacaccaggatacatacagagatgtgacccggatggatggacccttgcctcacaatcagggtagaagcctctggttttcttatttctttgtcctcctctgtggtgtgacacaggttcaggaggaggtacctcg

SEQ ID NO: 8954 - DNA, 492 bp, Homo sapiens
  misc_feature 224, 232, 460, 469: n = A,T,C or G
cccttagcgtggtcgcggccgaggtactggaacatttgcagctgaaggaaaatctccaaaaaagatttcaaagagactaaagtaggaatgggtgctggaaatgagcaagaagggtgagagtcccacgggtgaagggagaaagcagcagagaatgaatataagcccggagaatgaacataaatgtgaggggaagaggccagaggccaacactggaaggacagtgngggccaanaaaggaactactaatgtttctgagacctgcagggaaccatggtattaagctctcattaccagcacctaattttttagaggctggttttccaacttaagtgaaagaaattcaccctgtttttagcaattatgacgcactatatttacttctgtcacattagctgattctgtggtggactgggtaatttgaaaagctcctttgaacatgaattgtttttaaacttacagnctagcaatnaagccctaatttttaaaaccaga

SEQ ID NO: 8955 - DNA, 406 bp, Homo sapiens
  misc_feature 38, 40, 119, 130, 139, 148, 154, 207, 213, 233, 261, 262,269, 342, 391: n = A,T,C or G
ccctttcgagcggccgcccgggcaggtacttttctttntntttttttttgagacggagtctcgctctatcccccatgctggagtgcagtggcgcgatctcagctcactgcaagctccgnctaccaggttnacgccattntcttgcctnaacctnccgagtagctgggactacaggcacccgctaacatgcccactaattttttgtgnatatantaaaatggggtttcaccatnttagccaggaaggtctattttcttctgnnggccagncactaatttagtctctgcgaaagactgtagctcagaacaaaaggataagcacaaaaaaagtcttcaagggtgngggactgcccaccatataggacattttaaatgcccatcttctttatatntctggggacattaaa

SEQ ID NO: 8956 - DNA, 515 bp, Homo sapiens
  misc_feature 440: n = A,T,C or G
cccttagcgtggtcgcggccgaggtaccattcttatctcagaatgctgtaaaccatcagtagaagcagtttagatttggactgcatggtaaaatgaaaagaataaccctccaaccacaacctagtcagggtattaataattatatgtagcaagaaaacaaagaagaaaataatattgaaaaaatggagattccccaaccagtttcatatttgaaggatctgagttgtatttttattaaggaaattttttttctgaatactgtcttccaaaatgttaacattaaaatctgaatcagaggactctgaatggaaaagaagtttgatcactgacgcctagggctctgaagcgtgtgtggccacatggaaaagtcgaaggatgcgctgtcgaatctcctttgtcttcactccatagacaattgggttgagcacaggaggaaccancagatagatattggcccaagatgacggggcagcggagagtcacgccgcttgctaaagcgatcaccatggacaatc

SEQ ID NO: 8957 - DNA, 367 bp, Homo sapiens
ccctttcgagcggccgcccgggcaggtactattctcctcacctatagtattggactccttgaaaccaatgtgaatttacctggtattctgtgaggtgacctactgttgtttttctagaatagggagtagcaatagatgactgttcatggtgaactctaccttgtaaaacagaattatgtatttgcctgacttgcttgatcaaatggctactgtctgcaccctgagaagaatattgaaacatagatgttcactgctacttcacttcactggctaagattcctgggtagacttcactgggctcctggtctctatttccattaagactcctttgctttgctatagcagcctgaaaaattccaagaatttt

SEQ ID NO: 8958 - DNA, 325 bp, Homo sapiens
cccttagcgtggtcgcggccgaggtactactaaagaagagattactatttctggaagaaacaaggagagaggtgacagctgcttattacaggaaatgatttaccagagatcctatagcaagttaggagcggactcagggctagaaacagaatcaataaaataggtattaataataatggaagtctctgaattctcttcatttctttccttttctccttttttttctctcttcctttcttttttttttgagagggggacagggtcttgctctgtcacccaagctggagtggcacagtgtacctgcccgggcggccgctcgaaaggg

SEQ ID NO: 8959 - DNA, 564 bp, Homo sapiens
  misc_feature 533, 538: n = A,T,C or G
cccttagcgtggtcgcggccgaggtacctggaggtgcaaggtgtgcgccgaggaaatagagttgaagaaagcaactggggactagttttatgaccagaaagtgaatcgctttgcttaccgcacaggtagtgagataatcaggatgtccctgcgccacaaacctgcagtgagtaaaagagagacagcgggacagtccctccttcatcagacacagatgggtgacatctggccaggaagaaagatcattcaggagcggcagaaggagcccagtgtgctatttgaagtgccaaagctgaaaagtggaaagagtgcattggaagctgaagagtgagagtctggatagcttcacagctgactcggatagcacctccaggaaaagactctctggataaatctggcctctttccagaatggaagaagatgtctgctcccaaatctcaagtggaaaaggaaactcagcctggaggtcaaaatgtggtatttgtggatgaagggtgaagatgatatttaagaaagaaccacccagaaaaatnctcangccttcaagaagtaccttgccccggc

SEQ ID NO: 8960 - DNA, 402 bp, Homo sapiens
  misc_feature 69, 80: n = A,T,C or G
cccttagcgtggtcgcggcccgaggtacgcggggagggtagagtgagaagcaccagcaggcagtaacanccaacccttanccattgctaagggcagagaactggtggagcctttctcttactcccaggacttcagcacctaagacagctccaaaacaaaccagaacagtcagctccgggggagcacgactgggcgagaggcacagaaatggacaccagaaataaggcccagctccttgtgctcctgactcttctcagtgtgctcttctcacagacttcggcatggcctctttacagggcaccttctgctctcaggttgggtgacagaataccctttgagggagcaaatgaacctgatcaagtttcattaaaagaagacattgacatgttgcaaaatgcatta

SEQ ID NO: 8961 - DNA, 407 bp, Homo sapiens
  misc_feature 80, 382, 386: n = A,T,C or G
cccttagccgtggtcgcggccgaggtaccattcttatctcagaatgctgtaaaccatcagtagaagcagtttatatttgnactgcatggtaaaatgaaaagtaataaccctccaaccacaacctagtcagggtattaataattatatgtagcaagaaaacaaagaagaaaataatattgaaaaaatgggggttccccaaccagtttcatatttgaaggatctgagttgtatttttattaaggaaattttttttctgaatactgtcttccaaaatgttaacattaaaatctgaatcagaggactctgaatggaaaataagtttgatcactgacacctaaggctctgaagcgtgtgtggccacatggaaaaatctaaggatgcnctgncaaatctcctttgtctttcac

SEQ ID NO: 8962 - DNA, 669 bp, Homo sapiens
  misc_feature 138, 622, 627, 662: n = A,T,C or G
cgtccgaggcatcaaaggctgcataatgtctcctcccacaggtattggtggttacttaggaccattgcctactagtgaaacaatcaacctcaacccagctttgcccttctgagcccctgaaagatcagctcgaatggngctgggaacatggaggggcgtgctgcctgcacatggacctgtgaagtagtcagggcttctgtcccacgtggctgccccaaaacctttgtgaggtactgccctctgtacagtaagccatcatagtgtacatccgtttacttttatagtaagagacagaagaagagggcacagttttaaaacaatgatatgtaaaacaagtgcgaaggtatgatttcctctctgaactaagtgtgaccgtgggtaactcttggtgtgttggacacccacttgaacagccactaccctggcccagatcagaatacggcaatggcatcccgaaccactgtatggcactcaagcctgcggaaggggaaagtcacagagcaatccccaagagctttgaagtctgagaagtctgaggcaaacaaactcacacagggatcaatttaagtaacaagagaacactgacaggggagctgttcctagacagcaatggctaccggtnctaanaacaaaccactgtacaaagccaggcttttgttcancttccct

SEQ ID NO: 8963 - DNA, 318 bp, Homo sapiens
  misc_feature 70, 80, 85, 125, 205, 246, 248, 267, 288: n = A,T,C or G
ccctttcgagcggccgcccgggcaggtccattcttatctcagaatgctgtaaaccatcagtagaagcagnttagatttgnactgnatggtaaaatgaaaagaataaccctccaaccacaacctantcagggtattaataattatatgtagcaagaaaacaaataagaaaataatattgaaaaaatggagattcccaaccagtttnatatttgaaggatctgagttgtatttttattaaggaaattntnttttctgaatactgtcttncaaaatgttaacattaaaatnttgaatcaagaggactctgaatggaaaaag

SEQ ID NO: 8964 - DNA, 442 bp, Homo sapiens
  misc_feature 313, 345, 380, 395, 423, 427: n = A,T,C or G
ccctttcgagcggccgcccgggcaggtaccacttaatagtattgagttcatccgaactggtgaggtcgagacaggctgatctgttggcctgttggttgatgtgatcaagagggtcatcggaatgacagctaccagtgaaatgatccacaccacagcacaggctacaactgcacatcgagttttgtgaatggaaaagcactcattgggtgaatgatcacacagtaaccggaagatgctgaaacaggtgaggaagaggatgctgctatacaggttgaaatggaagctgaagcggataaacttaccatgaaatctncaaagatccagttttcgccactggcatagtantgaatcaaggaaggggaggctggtcagatcagcanatctgtgcaggccangttcagcataatgatggtgctgctcttncaanggctcattttgaaaa

SEQ ID NO: 8965 - DNA, 259 bp, Homo sapiens
  misc_feature 236, 239: n = A,T,C or G
ccctttcgagcggccgcccgggcagatacctcttattccagagaagtggggagcagagaggaagatggagtggaaaggggcgaggcaaggcctcctgaaatacctcacccaaatcttcaagaaatcccaagtcctcacagtgctttttgtggatttttgtggaaaccggtaaaaggggctgatttgctgaccccagtgggtagaaaacagagactgtccagagaacagaaaaaaangcngaaaggggatggggaaagtg

SEQ ID NO: 8966 - DNA, 656 bp, Homo sapiens
  misc_feature 153, 409, 450, 456, 520, 529, 572, 602, 625, 626, 645: n = A,T,C or G
cccttagcgtggtcgcggccgaggtacctgaaggaacgaagaagagggatttctcaaggtgagaagcagttctccatggaccctgatgacagcacaggcaaagtttcctatgactagggatcactgtccacacagagtctggcttcccaggtntccagcaggtagacaaaacagctaactccactgccactcctttctccacatccgttcctatttctcagccatctcagtgacatccgccatcttgagagtcaactactgactggactgagttgtgtggtatatgcttctgtttacttctcttctgtcttttttaagtggccaaatagcaaacgcttaaataggaaatctctgggagacttgaataaaagactttgcttggtagaaaatcatgtcacaagaaaggctnatatacagcaaaagtaaatcagcaagtccctgaagcagtangattangattcctgtctcctttcagattcaaatgcatctgtttctggggttaacagtggactgttaagangctgtgcancttgggttaaagtcattcttatctttgggcttcaggagcttanacccagatagtctctacaggctctcttggngcttgatgccttggggaatctgnnggctgttttcttgtaaganctgcaaggggg

SEQ ID NO: 8967 - DNA, 387 bp, Homo sapiens
  misc_feature 18: n = A,T,C or G
cccttagcgtggtcgcgnccgaggtacagtgaaaagagccaaggctgtgtgaccccctcatcacttagccaggcgtatggtcctggtttctgaggctgcagaaagcatcttagcaatttgtgtttggatggtccatgcctgactattctaggctggaggttcctaaagagtaacaagaggaagagaaacaagaatctctgacacttgttgagaatagagcacagtcccatttgtttgaaaagagacaccaggcagccatgtttatgtgccagaaatgcattccacctcaaggaggacttaatttatggacccgtgtgtgccaggctgagctgggcaagatctttctcaggacaaactctgccatgcagctaaaagcctggaaactaa

SEQ ID NO: 8968 - DNA, 311 bp, Homo sapiens
  misc_feature 15, 17, 23, 29, 31, 35, 37, 39, 40, 47, 48, 54, 57, 65, 120,130, 168, 259, 276: n = A,T,C or G
acggccgacagggtnanggatanctgcananttcncncnnagcgtgnncgcggncgnggtacaangctcaggattctccgaatgaagttaaggtcccttgcccatccggagaggcctcanctgtgtcggnatgatcttgtcctgatggaaaacgttgaaacaggactnccaacctattctttgcccagagatgcagaagtaactgttgccaggacacatggccataaataatagaaagaaagctacaaccacaggctgnttggaaagcttcacctnaccctttctggcaaagcaataaaaaagtatgaaaa

SEQ ID NO: 8969 - DNA, 516 bp, Homo sapiens
  misc_feature 491: n = A,T,C or G
cccttagcgtggtcgcggccgaggtacatcccagctgattcagtatttccttctctttgaaaactctcacagaaactgccctataacttctactgacatctcatctcaatggctagatcagtgctatataacaaaactttctgcagtgatagaaatgttctatatctgaactatccaagatgttagctactagccacttatgactgtttagcatttaaaatgtcacttgtggaactgacaaaatcaacttttaattttacttgattttaataaatttaaatttaaatagatacatgtgtctagtggctaccacaataaatagtgcagggctagaccttaatcacatcactaccccatctgcaagaaaagctggaaaatgaaggtttggagctaaacacgttgctaccctccacaaaattatgtttttcttagtaaggaaaaacaaacaaaaatgaatataggctgggcagataacagcctctgcaaccaanggatatttgcttgctaatattcctt

SEQ ID NO: 8970 - DNA, 278 bp, Homo sapiens
  misc_feature 207, 223, 235, 244: n = A,T,C or G
cccttagcgtggtcgcggccgaggtactacagagatgccttgattccaagtatcccacttactttccacaaccaaaagttttgttccagttttcataaagctctaaatcttttggagaaacactaggtcgcacagttctaaaagcattttcaaaatcaatgtaagctatgggtcgaacttgatccggtgttatggtagcaatgtcancagtttgtaagctgcnaataggaccaanagaagcctncctgcaaagctgtgtcatgtctgctcctgaaaac

SEQ ID NO: 8971 - DNA, 312 bp, Homo sapiens
  misc_feature 239, 293: n = A,T,C or G
cccttagcgtggtcgcggccgaggtacccgaaaagaaaggaagctttagtaatgaaaggattgctgccaaaatcctgtttcccccttgcagatcttacagaaaacagccacagaatcccaaggcatcagcaccaagagagcctgtagaaactatctggtctaagctcctgaagcccagagataagaatgacttaaccccaagctgcacagcctcttaacagtccacttgttacccccanaaccagatgcatttgaatctgaaaggagacaggaatcctaatcctactgctcanggacttgctgatttacttt

SEQ ID NO: 8972 - DNA, 342 bp, Homo sapiens
ccctttcgagcggccgcccgggcaggtaccattagctacagtgatcttagcttccttgcttacaattgttcagtgggtcatctaaattcttccatgtcctgagcatgatctacaaacattgtctagcttctgtctctccgtcttcccgccatcattgtgctgtagccatatggaactcctttcagttctctgaccatgccctttcctgcctcagatttcagcttaaattttgcctcctcagagagatgccttcccaaactccccatctgaagctggcctctgccttttactccctatcatgtcactctctgctcaccatccttatcacaatgtctatttgat

SEQ ID NO: 8973 - DNA, 404 bp, Homo sapiens
ccctttcgagcggccgcccgggcaggtacccgaaaatagtgtttctgtcattcaggcaagattctagctttgccttttccctacttcccattttctacctcagaaacagaaattggaatatgagagggtggagaatcgctttagaggaactgaaacggagtttgtaagttgaatggtttctagcccatgtgtaaacctgggtgcggtgtgagaggagctctgcacgactccacggaagggaacccagtgagttgtagctatagtttcctaattgatttagaggtgacagcgtaaacaatggctctaaaaaaaggtgaaactccatttaccaaaaccaaatttgacactagctcccaaagctaacttgttaatacagatttatcttaggctagtgaagtggcact

SEQ ID NO: 8974 - DNA, 386 bp, Homo sapiens
ccctttcgagcggccgcccgggcaggtacagtgaaaagagccaaggctgtgtgaccccctcatcacttagccaggcgtatggtcctggtttctgaggctgccagaaagcatcttagcaatttgtgtttggatggtccatgcctgactattctaggctggaggttcctaaagagtaacaagaggaagagaaacaagaatctctgacacttgttgagaatagagcacagtcccatttgtttgaaaagagacaccaggtagccatgtttatgtgccagaaatgcattccacctcaaggaggacttaatttatggacccgtgtgtgccaggctgagctgggcaagatctttctcaggacaaactctgccatgcagctaaaagcctggaaa

SEQ ID NO: 8975 - DNA, 317 bp, Homo sapiens
  misc_feature 19, 27, 32, 50, 53, 84, 132, 159, 164, 172, 177, 295: n = A,T,C or G
cactactatagggcgaatnggagctcnccgcngaggcggagctccccgcngtngcggccgaggtacaattgggtcattccccantttcaactaactggagctcctaaaagcagcagacaggaactgaatcanaacccctgcgctgactgacttgtatantctantggcctancctgnaagcctcatttttgtcacctgtaaaaggagattgtaagaggatgggtataaggagcttcataaacctggatgagatatttgagggggagggaacaatacttaccctcaaagctattangaggcaggagatgggaatattc

SEQ ID NO: 8976 - DNA, 232 bp, Homo sapiens
  misc_feature 59, 66, 67, 72, 75, 76, 91, 92, 96, 123, 144, 177, 204: n = A,T,C or G
ccgcggtggcggcccgaggtactgcatacattattgcttgtgcattagcttatgtattngaatcanngaaantgnnatcactgaatattgnnatanaacatttaaatgggccacttgcagtgnctcatgcctgtaatacattgngaggctgaggcacgaggacagtttgaggccacnaggttgagactagcctggacaacatanggagatgcctgtctctacaaaaacataa

SEQ ID NO: 8977 - DNA, 265 bp, Homo sapiens
ccgcggtggcggccgcctgggcaggtacgcgggggccgcgggacgccaggaggcggaggcggagtggagttagattaaatgccttaatggataaagaaaaattggatgttaagattgaatattgtaactatgcaatggattcctcagtggaaaacatgtatgtaaacaaagtgtgggttcaatgtgagaatgaaaattgtttgaaatggagattgttatcaagtgaggattcagccaaggttgatcatgatgaaccatggtacct

SEQ ID NO: 8978 - DNA, 401 bp, Homo sapiens
  misc_feature 285, 318, 319, 338: n = A,T,C or G
ccgcggtggcggccgggatcttcggcaagactcacgtctccaacaaccaagctccccaaagtcctgacctcaagcaatccgcctgcctaggcctcgcaaagtgctgggattacaggagtgagccaccgtgcccagccaagaaagattttggaagagtgaatgaatacaaggatttccactagactgagaattaagtttgtcaacagcatttcagtgtcttgagaagtgtttacatttggcgtggacaaagctggcagatgaccgtagaaagtaaaaagttgcctnttcaaagtttcccttctttgttaaagaataaannataaatgttagaaacaatngtttctttttaaaggactaacttaacttcaagcctccttgctttgtgctaaataactctgtta

SEQ ID NO: 8979 - DNA, 675 bp, Homo sapiens
  misc_feature 599, 602: n = A,T,C or G
ccgcggtgggcggcccgcccgggcaggtacttttatttctaaaaacatctgccaaataaaaccaaccaaaactcattattttcaccattaccaagagctagctctattaaatttatatcaacaagttaatctgtctctatatagggaaggtttccgcaaactaaaatctaaacctaacttttgtagacagggattatggtaggaatttggtattacaactaaaccagccagctaaggagtgaacctaagaaaaaatatattgcatatccttattgacagaatcacagttagatgctgcactaaaaccctaaatggtatatctctcagcccacgtaaaatttcagctcaagaagttcacaaatagaaacagataataatgttcaaatattacttaagagtgattacacttaagtcaaacatgggaaagaatagcaaatacaaaccccagggaaaaatgagattatggtgatttccaaatgcagtttctatagattaggcagaggtaatcattttaaagtgattcattcagctacccagactctggaaaacagggcggggatgaggcaaagctcttaatctggaaaaaataaagaaattgnggnctttggtgacaaggatgggcatttcaagtaaatttttttaatgactttaatgattcttatttaagaaaaagcc

SEQ ID NO: 8980 - DNA, 308 bp, Homo sapiens
aggtacatggttaacaggcagcttgtgcccaatcccaaagcgggaagaaaggcctggctttggctcactgatgataaagtctcctcccactgcctttcagcagctctgccgaagagctgatcaagatgctgcaaacccagcttccccagaccggccaagagggaagaatgatgagcgtgttttaaattacaaagagggagcagcgcaggcagtttctggtctgggtgataaattgaaatccataaatatagcaagtgctaatttgaagttctgtaattgttttgtgccatgagaatgtgtcctgcccg

SEQ ID NO: 8981 - DNA, 511 bp, Homo sapiens
  misc_feature 7, 465: n = A,T,C or G
ccgcggnggcggccgaggtacttgacaggaaatctcacacttgtgaattcagagctcgtgagcataaaattgctcttctaatcacttgcttttatttgctgatctttattggtgcattttattggtcaggatgtgattgagattatgtaataaacccaactgactgcttcttttaacttctgctattgaagtaatccctcagattactgtcttgagagacggagagtgcacacagtccaacagtgtgcactcttcctctttaaagacagtagaaaggtatccatcttgttttaaatagtagcagggaggtttatcaatggcttaacatggtaggctgggcctggagagctctcaatgtaacagagctcaaatgtggcatttacatgaattctaagttgattaagcgacacaatttgttcaactataaaacataatacattcttaatagattttacctattattgnatatgtaagttcctagtacctgcccgggcggcccgctctagaacta

SEQ ID NO: 8982 - DNA, 265 bp, Homo sapiens
aggtacatttcctaagccggaacactcaagcttttttcagggtgtttggctcttgcagcaaaacaattgagatgctaacagggaggattacagtgtttacagaacaaccttcagcgccgacctggaatggtaactttttccctcctcagatgaccttacttccactgcctccacaaagaccttcttaccatgacctggctttccagtgtggttctgacagcactactgataaccaaactggagtcaggtattttgtacctgcccg

SEQ ID NO: 8983 - DNA, 427 bp, Homo sapiens
  misc_feature 7, 23, 32, 43, 50, 52, 55, 79, 80, 309, 337, 371, 391, 394,395, 401, 402, 408, 409, 410, 413, 418: n = A,T,C or G
gaaagcntcagattgcgctattnttaactatntatctggatgntatcttnanatntgcttgaataacttataagcaatnngaaactttcaattacagtatactattgaagcaaatcaactaatatatacacatatccattagcaatagtagataatttttgtaaatgtccagcacagttcttcatatgtagaggatgttcaaattggctaagttccttttctctcttaattattagtatttttcctactgctctttgtataattattccttcctctttagctccaatccttacaatctattcttaacanagcaactggaagaaagtttttaaacatnaaccagatgatgtcactccaccccacaaaacttncactattctctgtcaccccntannaaaaannttcaannnaangaccnggggtccct

SEQ ID NO: 8984 - DNA, 201 bp, Homo sapiens
ccgcggtggcggcccgaggtacctagaagagctccctgcaagtgtaaatattaaggatgacctgtgcaaaattatacccacaccagcactagtggtaattattctaaattattgtcaaaaagttttttttaatctgtctttcaagtttacagaaaagaaagcagtaaatgcattgatgtcattttattatgtacctgcccg

SEQ ID NO: 8985 - DNA, 484 bp, Homo sapiens
  misc_feature 288: n = A,T,C or G
cgaggtacttgacaggaaatctcacacttgtgaattcagagctcgtgagcataaaattgctcttctaatcacttgcttttatttgctgatctttattggtgcattttattggtcaggatgtgattgagattatgtaataaacccaactgactgcttcttttaacttctgctattgaagtaatccctcagattactgtcttgagagacggagagtgcacacagtccaacagtgtgcactcttcctctttaaagacagtagaaaggtatccatcttgttttaaatagtancagggaggtttatcaatggcttaacatggtaggctgggcctggagagctctcaatgtaacagagctcaaatgtggcatttacatgaattctaagttgattaagcgacacaatttgttcaactataaaacataatacattcttaatagattttacctattattgtatatgtaagttcctagtacctgcccgggcggc

SEQ ID NO: 8986 - DNA, 499 bp, Homo sapiens
  misc_feature 47, 262, 276, 334, 435: n = A,T,C or G
ccgcggtggcggccgaggtactgatgggatttatgctcaatagaatnaaccaggaagcaacccctggagatatagttgaaaaattgggagctgatgcaaaaattctttcaaatgttatctcaaaaagcacgagaccaaatactcttgatattgggaagccacctttaagatcaaaaagagacagtctagaaaaggaatctagtgatgatgatacaccttttgatggttctaactatttggcagataaagtggattctcctgntatttttgacttanaagacttagacagtgaaacagatgtatcaaaaagcaggatgtgttgctacacaaaatnccaagagggattcaaccgtattgaacagcagctttttcagtaaaaaccttttgaaaaaactgatgtcgcaaccaggaattgatccccttctctcttttggntgctgagactgaacagcagcaaaaaagaaagaagaggaggaaggatgaagatgatagcaaaagc

SEQ ID NO: 8987 - DNA, 498 bp, Homo sapiens; identical to SEQ ID NO: 6570
  misc_feature 153, 154, 456, 489, 491: n = A,T,C or G

SEQ ID NO: 8988 - DNA, 431 bp, Homo sapiens; identical to SEQ ID NO: 6694
  misc_feature 161, 163, 164, 165: n = A,T,C or G

SEQ ID NO: 8989 - DNA, 680 bp, Homo sapiens
  misc_feature 432, 499, 503, 505, 522, 589, 601, 643, 654, 671: n = A,T,C or G
ccctttcgagcggccgcccgggcaggtactcacaagatctggttgtgtggcacttcccttcccccctctctttgccctgcacctgccatgtgagatcttattcctcttttgccttccaccatggttggaaacttcctgatgcctccctacaagctgatcagatgttagcaccatgcttcctgtacgcgggcctcccctcagaacttcaaaagggcaagatcttttttccttcacttattgctgaaaccaagagcacaattcccattgagagaaagatctctgtgctgtaaactaaaacaaattgtgcattccttccggggccatcgtctttgttttcttttttgtcttgaatgaattttaaaaggaaatatataataaaaatgttaaccagaaggtaaacttgagtgtaattgtcagacagacacacttttncaccagtgtatttgaattttaagaccagtgaccctgttttgtggcattcatgccaaaacatgctganggcngnggtcatctggtcatcgnggtccaaaatttcaatcatgtttggtagcaagaattttggaagcattcatatttcctttttaaaaangtattccttcgngtcaacagttaatcaaaaccagagagtctagggcagcccttntggatgttgcnaatgatgtaaattcagnccctgggtt

SEQ ID NO: 8990 - DNA, 701 bp, Homo sapiens
  misc_feature 277, 546, 585, 589, 607, 650, 674: n = A,T,C or G
cccttagcgtggtcgcggccgaggtaccagccagttactgagcccctgtcacccttgaagtgagttccacctgaccagtcttgagcagccaacaggctcaattaagcccgcctggtttttccatatggctcatgatctaatttaaggaacaagtaactaaaaatgttaagccagtgcaaaataatctgcttacctactcacattggaaaagccctctgagctgaataattctggccattcctgctgtcaacaatactgctgcccaaatgtggcttangaggctgcttctgccacaaaacccgtcatactcttgtgcgtgccttgttctttgttcattcatctagcaaggtgttcccagacctcgtgtatgacaggtagctagggagctcttggagatgtagcaattgggattgtgggagattactgggcttcctcatctttagaatggtaactctccttttgctttctgaacacctaggaatttcctgaggtttggtttggttggattccaactttttggtggttctaagccgcagctgagctctngtgcccggtctttggtccccccctaatcctaactctttncctnaagcattacaagggcttnacttgcaccccacctgggttcaagggccaagaatttcatcaanttacctggactggcattacctccnaaatggttgggtttttgggaaccttta

SEQ ID NO: 8991 - DNA, 336 bp, Homo sapiens
  misc_feature 257, 280: n = A,T,C or G
cccttagcgtggtcgcggccgaggtactcctaggtagatcggatattgacttggagaggtcttggagaaaggctgatgaaggtgatcgacagcctaaatctctgaagccgtctcttgatgcaacctctgacccaacaatctctgggtcttgctgttatcagctccatcagttttactggatggaataaaaaggcctacctcattgggctcgtgtgggtgaggagaactgaagagtctgagagcgcggcacgagccanaggctacggaaaacactgccctnctacactccaccttggagagacccagaaaagaacaagcttatttgtaaaaaaggaa

SEQ ID NO: 8992 - DNA, 555 bp, Homo sapiens
  misc_feature 432, 471, 509: n = A,T,C or G
ccctttcgagcggccgcccgggcaggtacacggggaaactcattggagcacgaaccctgttgtgaacggcctatccgaaggatctaggttgtgtgcttcgtatgagaatctaatgccagatgatctatcattgtctcactttgcccccagataagaccatctagttgcagaaaaataagctcagagcttccactgattctacattatggatatgtgccgccgaagcaagcacaaagccctacttttacacatgcctagtgatgcttcatggacaaggcttggctctgttgagtccaactaacctacctgagattctgagatttctcttcaatggcttcctgtgagctagagtttgaaaatatcttaaaatcttgagctagagatggaagtagcttgggcgatttcattatcatgtaaatcgggtcactcaangggccaaccacagctggaaaccactgctcaagggaaggntcatattgggactttctactgcccaaggttctatacangatataaagggtgcctcacagtattaaatctggtagccaagaagaa

SEQ ID NO: 8993 - DNA, 422 bp, Homo sapiens
cccttagcgttggtcgcggccgaggtacactattttaatatgtaacagtctttttaaaaaaggatgccacaggcagcaaacacacaaaaggcagtgtctgtcatttttgtttcaaaataaaaggaatatacttatttatatgctattaaaatatctgtcttattttttgaggttaaaatattcggaaactacttttatgcattgtagcagtaatcatttatggaatgcttttgacatgttttaacagggtaaccaaaacttttaggcctgttttttttggttgtccttgttgttatatttttaatggaaatctgttactcaggctggtagcattaaattagctttttaccctcaactcaagtagcaaatatcatggagaacttcagtgtttagcaggctgttaatttcccatctatgaatag

SEQ ID NO: 8994 - DNA, 524 bp, Homo sapiens
  misc_feature 9, 475: n = A,T,C or G
agaattcgncctttcgagcggcccgcccgggcaggtacttgcccaatgtttacccttacgacaacgcaggcaaacagtagcaggagcatttggccgtgtttgttgagccggttggccgcttttaagtttttaacagtgtagtttttttgggtatgaccaagttggccacaattatagcaggctccaagaaaagaatcagtcgagccagtttggttgccgtgcttcatggccggtgcccacagaatagctctgtgggtctccgatccaacgccttcacaagctttaatatatgcaggcaacacctcatgatcaggtaaattttgacgtaggatggaatgcacggccattttacactcatggttcgcattttgaaaagctaacatatgaagaagaataccttgagtgtgctcatcagagacagatttttcaacagcatcttgtaatttagctaaaaaatcaagatataattcattgngaccctgtttaacaatagttaaaagaaacagaaagcttggcctggggtg

SEQ ID NO: 8995 - DNA, 344 bp, Homo sapiens
  misc_feature 193, 296, 317, 323, 333, 335: n = A,T,C or G
cccttagcgtggtcgcggccgaggtacgcggggagcaagtatttaattggttggacattgcataaaagaggtccatatccaggctaactctagaaattttattctcaaacttagttggcctctttttcttctgtcagaggaccattcttagtggcactggggaaatcttggcacccagaagaattcaactgcnctcactgcaaaaatacaatggcctacattggatttgtagaggagaaaggagccctgtattgtgagctgtgctatgagaaattctttgcccctgaatgtggtcnatgccaaaggaagatccttgnagaaantcatcaaatncnttgaaacaa

SEQ ID NO: 8996 - DNA, 424 bp, Homo sapiens
ccctttcgagcggcccgcccgggcaggtacgcgggacatcaatgcagagtccctctgtgaatttacaacacccaacacccatgagttcagtccttaagaaggaaaattgagcaagtatttaattggttggacattgcataaaagaggtccatatccaggctaactctagaaattttattctcaaacttagttggcctctttttcttctgtcagaggaccattcttagtggcactggggaaatcttggcacccagaagaattcaactgcgctcacagcaaaaatacaatggcctacattggatttgtagaggagaaaggagccctgtattgcgagctgtgctatgagaaattctttgcccctgaatgtggtcgatgccaaaggaagatccttggagaagtcatcaatgcgttgaaacaaacttgg

SEQ ID NO: 8997 - DNA, 825 bp, Homo sapiens
  misc_feature 547, 555, 576, 601, 607, 610, 621, 630, 654, 665, 689, 710,728, 730, 732, 750, 752, 753, 765, 769, 797, 806: n = A,T,C or G
gtccgtgctgattgctttgagcataacgaaggtgtattggatatggtcattatagctccatacatctgatagatgagagaaaacttgtatgctgtgctaataattgcaatagaaatatataccgttttggatttgtaaacatcttagaaaaaatcctagaaaaaaactcttaatgagcaaatggattaacatgtctgctttccatttttaagtatcaggtatccaaccatattattaaaataaaaaccaccagagtacagtctccatagttagatttgtataagcaaccgcaaaacgatatagtccagtatctagcacagcatagtcaaacacatagtattatgcatatggtaaatgttaataaatgtttgtggaataactgcctatgaaaacttctttttgaggcttgtattagtaatgtaatttaccatagatactttcctcatgttttcaaactgctgggccattacccaattaagggggttgaggaaaaccactttagatctcatacagcatggtaaaaaagtagaaatagaatggaagcttntgagagtngtatcaccatgtaagttaganggatggtttttatgacattttaagntggtgnatnaaatggtgganataaaatgnatgttattgggaggattatgcttngggtcccctangggggggatataaaaaaatgtttnaattggggcccgggcgccggnggcttacgccttgtaatncnancactttgggaaggcccangnngggtggatcacnaagnccaggagaatcgaaacccccggtgaaanccccgtctntcctaaaattaaaaaaaaa

SEQ ID NO: 8998 - DNA, 331 bp, Homo sapiens
ccctttcgagcggccgcccgggcaggtactgctgaggacccagtggcatgtgggcaccgcataccccttagtcgcacccaactttcctctgccacactgctgaggatcagcctctctggcactctccacgcttcaggcccatagaaagatcatcagcaagactgagaaagcacaaaaattctcagcgtgtttcattgtattctttttcagttgaggaagccggtaaaagtgacatatcagatcttcatttcccaggcttttcaacaagatcaattattacagttatcagtgacaaatgcaaacttctaaaaaaaggggcaattgtttgcct

SEQ ID NO: 8999 - DNA, 742 bp, Homo sapiens
  misc_feature 373, 526, 604, 608, 638, 653, 695, 711: n = A,T,C or G
cccttagcgtggtcgcggccgaggtactgacttaaatttggaatttactaattactggggatactttagtgagtctgcatatgtgtattattaatacatgttaaaccatactgcagataacaaaaaatatacttacatttctcttccagagagtaatgactgtattcaaagtctgagggaatgacaaaacgggatgcgcatctaacactgatacacggttcttcagaaaagactagtttcagctgtttccaggtttacataagatgatggaagcagtctctaatatgttaatcaagaaaatatatgcaattgccagctactacatatacagaaaataaagatggtgagtcaaacaaaacatacaaacttggtnacttctcaccctccagatattttgaacatatttaaaaaatttgaagataggatatcactgtgatcttaaaaagagaactttaaaaataacacattatggaatagtaaaactgagctgctaaaaccaaagtagtgaacaggttttcctgatgtnctcacactcttaactaaaacccaaattaaaactaccagctaaatttaatctaagggtgactttttaaatgtcaatacnttcnaacctcctttaataatattttaaaattacnttaaccttatacctnacttaagaagtaatcctcatttcttttgaatgggggcctttnggcccaaacttgcaanaatgcttggggaaaccttaaaaaaaaaaaaa

SEQ ID NO: 9000 - DNA, 530 bp, Homo sapiens
  misc_feature 496: n = A,T,C or G
cccttagcgtggtcgcggccgaggtacatctacctaaaggactattatgtggaataatacatactaatgaagtattacatgatttaaagactacaataaaccaaacatgcttataacattaagaaaatcaataaagatacatgattgaaaccaagttgaaaaatagcatatgccttggaggaaatgtgctcaaattactaatgatttagtgttgtccctactttctctctcttttttctttctttttttttattatggttagctgtctcaaaacataaaatggaataacatatcaaatgaaacagggaaaatgaagctgacaatttatggaagccagggcttgtcacagtctctactgttattatgcattacctgggaatttatataagcccttaataataatgccaatgaacatctcacgtgtgctcacaatgttctggcactattataaagtgcttcacaggttttatgtgttcttcgtaactttatggagtanggtacatgccccgggccggccgctcgaaagggcc

SEQ ID NO: 9001 - DNA, 528 bp, Homo sapiens
  misc_feature 496, 527: n = A,T,C or G
ccctttcgagcggccgcccgggcaggtactaaatctctttttccccttctatcttttctccatctctctcacatttactttatttttcctctttattttctgagtcattgactcctttatttagaagtaaaggatattatgtgccatatttcttctagaatcactggaagaatgaatgggcctctcttagtagttatattaagttatgctttctcagttataaggaaggacaaaatgttgaacaattgtcataatcataatctgaaagacttaatttaaatttcatatgctaaactttcaggcggtagctgaagtttgacttaataaatacttatatatttttattattttataacaggtatggtaacacagtaatataacttttgaaaatgtggtgtttgcatatccaaacgaatattgttcttcgaagcatcacttaagtgaaaataccccctcattccaaaatatgttggtcattgttcagaacattttcagnaaacatcttgggaattattaaatttttaatnc

SEQ ID NO: 9002 - DNA, 504 bp, Homo sapiens
gatatctgcagaattcgccctttcgagcggccgcccgggcaggtacacaagaagtatctaaacctcttccttcagaagggagcctagctgaggctgatcacacagctcatgaagagatggaagctcataccgactgtgaaagaagctgaggatgacaacatctcggtcacaatccaggctgaagatgccatcactctggattttgatggtgatgacctcctagaaacaggtaaaaatgtgaaaattacagattctgaagcaagtaagccaaaagatgggcaggacgccattgcacagagcccggagaaggaaagcaaggattatgagatgaatgcgaaccataaagatggtaagaaggaagactgcgtgaagggtgaccctgtcgagaaggaagccagagaaagttctaagaaagcagaatctggagacaaagaaaaggatactttgaagaaagggccctcgtctactggggcctctggtcaagcaaagagctcttcaaaggaa

SEQ ID NO: 9003 - DNA, 357 bp, Homo sapiens
  misc_feature 246, 292: n = A,T,C or G
ccctttcgagcggccgcccgggcaggtacacatcagcatcacctggagggcctttttttaaaataagacacagattgctgggctcatggtcagagttcccagttaagtaaatcaggaaatttgtatttctagcaagtttataggtgaggccaatactgctgttttgggaactatgctttgagaaccactgccttgaaaaaatttccaacttctacctttaagatcagcctgacttatcaaacgctngagaaaaactgaatctacccttgggcagatgacttgggattggatnctatacagcagtcttgctcaatctttccagtttccaagttttattataccaacaattggtttttt

SEQ ID NO: 9004 - DNA, 404 bp, Homo sapiens
ccctttcgagcggccgcccgggcaggtacatctacctaaaggactattatgtggaataatacatactaatgaagtattacatgatttaaagactacaataaaccaaacatgcttataacattaagaaaaacaataaagatacatgattgaaaccaagttgaaaaatagcatatgccttggaggaaatgtgctcaaattactaatgatttagtgttgtccctactttctctctcttttttctttctttttttttattatggttagctgtctcaaagcataaaatggaataacatatcaaatgaaacagggaaaatgaagctgacaatttatggaagccagggcttgtcacagtctctactgttattatgcattacctgggaatttatataagcccttaataataa

SEQ ID NO: 9005 - DNA, 439 bp, Homo sapiens
ccctttcgagcggcccgcccgggcaggtaccctcaataaggtaagagtccagcttgggggttggaggaagctgtctgatccaactggaggtgtgtcctacctctgacctggctgggaaggataatagccctggtcacagttagtttcttctagatggtgagatgatctcatccaaaggacttctgactgggccaaaccatcaaatgtagtgacagcattgggttcctgccctctctgtcactgtcctcccaaaacaggttgccatgaagcatccgtcagctgtgacagcttgtaatctggatctggagaacctggtcacagattcaaacccgcagcattgccacgctggccatcaccacccttcttaagacgggcagcgagagcaagcatcgaccgcctcatgaagcagatctcctccttcatgtcagaaatctcggat

SEQ ID NO: 9006 - DNA, 577 bp, Homo sapiens
  misc_feature 382, 392, 514, 574: n = A,T,C or G
cgccagtgtgatgggatatctgcagaattcgccctttcgagcggcccgcccgggcaggtacaagtgtagagtttgtataaataatcaaagttaaattgtcagtagcttaaagtagccatttatatgatgttttatataagtttcagggtaactacaaagcaaaaacttacaatagatacaaaagagataaaaagaaaagacccaaagcataccactacagaaaaccatcaaaccacaaaggaagaaagcaatagaggaagaaaggaacaaagcatctacaaaacaataagaaagcaatgatcaagatggtggtgggtaaattcctacctagtaaagttatgttgaatataaatggattaaattatccaatcaaaaggcatanagtgtctgantggattttaaaaaacaaaaaaccaagacccactatatgcagcctatgagagattcatatcaccttaaaggacattcatagatggaaagtgaagacatgggaaaaatattctatgccaatggnaaccaaaagaaagcaggggtagctacacttatttcagataaaatataccttttttttggnttg

SEQ ID NO: 9007 - DNA, 417 bp, Homo sapiens
ccctttcgagcggccgcccgggcaggtacctcctcctgctcctcaagagtgtggtctattttgccatcatcacctgctgtctgcttagaagaacggctttctgctgcaatggagagaaatcataacagacggtggcacaaggaggccatcttttcctcatcggttattgtccctagaagcgtcttctgaggatctagttgggctttctttctgggtttgggccatttcaagttcttatgtgtgtacccgaaaagaaaggaagctttagtaatgaaaggattgctgccaaaatcctgtttcccccttgcagatcttacagaaaacagccacagaatcccaaggcatcagcaccaagagagcctgtagaaactatctggtctaagctcctgaagcccagagataagaatgacttaaccc

SEQ ID NO: 9008 - DNA, 480 bp, Homo sapiens
  misc_feature 13, 216, 274: n = A,T,C or G
cccttagcgtggncgcggccgaggtacaatcatttcttcgtattgtttttaaagtagagcaatgatatgactagtctgaagtgaacatagtctagaagtcacttgcttggtttggggattagaagtatttgcaaggtgaaccacccattctcttctgcttatttacactacactgcttttatccataacttggagccatcattaagatagactgtnttttctatctctgtccttggaacctgttcaggtatttaaagctgttttcctctgctangctttgagtttcttaagggttggagccatatcattatgtcccttgcacctggttgtggtatacaatatcattctttcagcaaatacttttatttatttatttatttgaggcagaatctcgctctgttgctcaagctggagtgcagaggcacgatctggctcactgcaacctctgcctccaggtacctgcccgggcgggccgtcgaa

SEQ ID NO: 9009 - DNA, 378 bp, Homo sapiens
ccctttcgagcggccgcccgggcaggtcgcgggggcccttgctcactagaaggagccccctgaccccttcttccaaaaatactttttgtctttgtcttcgttctgcattcatcccccttcgttcactcccataacaaccaacagcgacaactggcacctaggacagggacgtgagtgaaggtctgctggagcagagaaactgacactgacaagaagaacgagaatgagaaaccctgcgacgagtctgctgacagctgatataagtctgcaaaatcagctgggccaccaaacggcaattgagagctgcacaacctgcaattacctttattcaattaatgcaaaaacaaaaatggggagatgttacaggccgaaagaatg

SEQ ID NO: 9010 - DNA, 411 bp, Homo sapiens
ccctttcgagcggcccgcccgggcaggtacgcggggtgacacacacacacacacagcacctgcacgcagatgcacacatctctagtcaaatgaggctctcagctttttgataggggctttttgatacgtgtataaccaatactttattctcactgtagtcaaggactcattgcaattcagaaatgagaagctgatccggaactccactacagctcaaagaaattctcgaatgttctcacctattaacagttattaaaatggaagaagctggggatgaaattgtgagcaatgccatctcctacgctctatacaaagccttcagcaccagtgagcaagacaaggataactggaatgggcagctgaagcttctgctggagtggaaccagctggacttagccaatgatgagattt

SEQ ID NO: 9011 - DNA, 366 bp, Homo sapiens
cccttagcgtggtcgcggccgaggtacgcgggggaaaaagggtggggagtgccctttcttgaaggaatcccttaagtgcacgtctcccgttttcttttcacatcaatgcagagtccctctgtgaatttacaacacccaacacccatgagttcagtccttaagaaggaaaattgagcaagtatttaattggttggacattgcataaaagaggtccatatccaggctaactctagaaattttattctcaaacttagttagcctccttttcttctgtcagaggaccattcttagtggcactggggaaatcttggcacccagaagaattcaactgcgctcactgcaaaaatacaatggcctacattggat

SEQ ID NO: 9012 - DNA, 550 bp, Homo sapiens
  misc_feature 406, 497: n = A,T,C or G
ccctttcgagcggccgcccgggcaggtacctcgaaaataaccaagcagtcttttaaagaaatagaaaaagttgccttgccaactaatacgacctcatcgagacctcggactgagtgttgtagtgatgcaggtgactctcctttgaaacctgtcagctgtccaaaatctaaagcatcagacaagcggagtttacttccacatcagatcaggtcagatatatgacgaattatttcagatacatctgaaattgcagtgtgaaactgcagcacaacagaaatttgctgaagaacttcaaaagcgagaacgttttttcttgaaagagaacaactgcttttcagacatgaaaatgccttgagtaaaattaaaggtgttgaagaagaggttcttacaagatttcaaattattnaaaagagcagccatgatgcagaaagttgaacaccttaacccgaaggttcttaagggaaaagaataaagaaaccaagagactggaggtcctnttttgatgcatttgaaaggaattgaatggataccttaaaaaaaacagttaaaa

SEQ ID NO: 9013 - DNA, 538 bp, Homo sapiens
  misc_feature 504: n = A,T,C or G
ccctttgagcggccgcccgggcaggtacatacatgtagaatgccattttctcatatttaagtgattttttcatgtgtagaagaatatccttaatactaactgtaaattccacaataataaaattggagttaagatttcaaatatcaggtcaggtagcaggtgtagaaagaatatgtccttattttagacgaaccaattcttactcttagaacagctaccacaaaaagatattaggtaataaagctcccaaggtatataaataaaaatgtctacattaaatttatgctaaatattcaacagagtaaatttataggcagaaataactaagtcttaaactagccccaatctgggaacttaaaaaaattaaaataaataaaatttcaattcattagttatgaattgcaactggaatttcaatcttatcatagctcacggaaaccatcttatcaatgtgctgcagatttaaaagcatttaaataatctttcacattggaaatattaaanggcccactgacatgaatccgctttggattatcaa

SEQ ID NO: 9014 - DNA, 374 bp, Homo sapiens
  misc_feature 23, 328: n = A,T,C or G
cccttagcgtggtcgcggccgangtactcttaaaaatctgttaagagagtggatctcattttaagggttcttaccacaataaaattaaatttttgaaataaatcagtcatatttgagtgaaatgaaacctttccgagtagtttcagacaattgataatacctagtttacagttcctgtagtcattttggagggtgaggacttgatgtgtttagtaaagttgagaaataaatacatgaaagaatgcgtggggaagagaaagtgtggggaagagaaattgtctcagaggaccattcttagtggcactggggaaatcttggcacccaaaanaattcaactgcgctcactgcaaaaatacaatggcctacattggatt

SEQ ID NO: 9015 - DNA, 343 bp, Homo sapiens
  misc_feature 309, 335: n = A,T,C or G
ccctttcgagcggccgcccgggcaggtacctgccaggaaaaatagcagcccagccaccaggtggcaacctgcactattgaccagacacttggccagtttgatgttgggcaccgaggacctgaaggcagtgttgcacattccaatcaggcagagcagcagggcacccatggcgatcagcatgctgaggggtagggcaaactggaggacacgcaggtccagctggtcaactgatgagtaccagttggagtaaccaaggttatttttgtccacaaatattgctgaaacaagcattaccataaacgatgttgnttatgtcatttgactcctgcaagcanaaagtgaa

SEQ ID NO: 9016 - DNA, 561 bp, Homo sapiens
  misc_feature 455, 516: n = A,T,C or G
cccttagcgtggtcgcggccgaggtaccagttgtaaaattaccaggaaccgccatgcctcaagatcgccctgttttctggcttcatcaatgactgcatgcagtgcaccaccctgtccactacgtgatgctgtaggattaagtctcacagtgggcggctgaggatacagcgccgcgtcctgtgttgctggtgaattagacgccatcgctgtgggttgctggtatggtgccgtgctatttggcacaggacacaccgcttgaggtctgtattgaacctctgaaggaggccgatactgaagctcggttggcagccggtattgataaactaccagcggttgggtcttattttctaccggctgatattgtggatactgtatctgagttggcattgccgggatagagactctgtccctttctacttgattttctcttggggtttgtgcttgtctaacctgcntttgaggttgtaatgttacaggcatctgaaccccgggaggaggaattgatggcgatccgtnggttaagctctgatggccccaatgaattcttggaccttctttccc

SEQ ID NO: 9017 - DNA, 566 bp, Homo sapiens
  misc_feature 474, 475, 486, 502, 544: n = A,T,C or G
cccttagcgtggtcgcggccgaggtacatttttgttgtggattattttaaacataatgctatagtaatattttgaagatttgagctgttatttccatttgtttttacactgtgactaaatgattaggttttagttttagactctaaacggaacctgaattaataggaaataaacacggtgcaaatagcctcccctaaagtgatcccaattattacatagccatcttgctgtggctaatgtaagaatgtttttgcagtatcacatgcacaaagggcatacccaaaaaacatttgagtgaagataatactagattctagaaagtatctagacacttaagagcaggtggtgatgatgttaattaataataacaatgttgaggggctggcttctgcccttccctaataagcattaaagagcattttaaactcagcaaatttgctctcattttcttcattatttgggtttttgaatcanntaaatgctttncacaaggggtcatttngtagtcatccttggcatttttgcctgtgtcccaatcttcggnccttggcaattttttccttttt

SEQ ID NO: 9018 - DNA, 558 bp, Homo sapiens
  misc_feature 435, 535: n = A,T,C or G
ccctttcgagcggccgcccgggcaggtacaatgtaagggttttagggagcaacagtatttaactggaagaaagaattgcatatttaatgtagtctaatatatacacatttgtttaacatgtaaacaaaagtgttaaattcacatatacaacattatacaatttaatcactcttggaataaaatttttatagccttttttctattgggaaaatttgtttagatgtgtgccactccataggtttatttccaaaatgaatgagcccaactccatttgtaaaaacttgtcagttagaattcctttttttagtggattagggctgaattcttagatccttatttcttttcactttaaatgctgccaaagatcactactcatcattcaggaattcgctgtctagcctatctgtagtttcctgaagattgaaaattatgtanactgctatttaaaaatatatttttctaaagtgtgagggttaagatgctgtattgaccctatgagtttttaatggggtaaattatctttatagcataatanaacgctttaaggtcctggaatcc

SEQ ID NO: 9019 - DNA, 421 bp, Homo sapiens
ccctttcgagcggcccgcccgggcaggtactggaggatctggggagagagcttgatgaacctggaaagcaggtcccaggcaattcagaaagacgggacatctcatggacaagttggcccccttgggaaggccatatgaatcactgactgtccagctccatcccaaaaagacccagctggagcaggaagcagggaaaccacaaaggaatggtgataaaactaggactaagaatgaagagttgttccagaaggaagatatgcccaaagacaaggaattccttggggagataaatgacagactgaacaaagatactcctcagcatcctaagtccaaagatattattgaaaatgaaaagcagatcagaatggcaacagaggggaaagaaagaccatataaatgtgatggatgtgggaaaagtttc

SEQ ID NO: 9020 - DNA, 475 bp, Homo sapiens
cccttagcgtggtcgcggcccgaggtactacatatgcagaatctgatacaatgttaatagactgattaaaatcttgttaacactgtaatgacggcaaccaactctgctctttgagtcaagtgatactgagttttgatgactcattcttttggcccggtgtaagccacttttccattgctggaaccatcagtaaacactgccagagcattttttaaaggcttatgtttggtaactttaggtaaaatccaagtagtcaattttaaaaactggaagatttttgttttggggtaacgattgccaataattcccacaaaatcggcaagaccaatctgccatgcaccagaattgataaaggcttgtctaacctgttgcttgttgaaaggaacagtgattttatctgggtcatttccacacaatgttattattcataatcttccctgaccaattaatgtagccatttgatccaagtacctgc

SEQ ID NO: 9021 - DNA, 439 bp, Homo sapiens
  misc_feature 73, 80, 245, 410: n = A,T,C or G
cccttagcgtggtcgcggccgaggtaccagttgtaaaattaccaggaaccgccatgcctcaagatcgccctgntttctgncttcatcaatgactgcatgcagtgcaccaccctgtccactacgtgatgctgtaggattaagtctcacagtgggcggctgaggatacagcgccgcgtcctgtgttgctggtgaattagacgccatcgctgtgggttgctggtatggtgccgtgctatttggcacangacacaccgcttgaggtctgtattgaacctctgaaggaggccgatactgaagctcggttggcagccggtattgataaactaccagccggttggggtcttattttctaccggctgatattgtggatactgtatctgagttggcattgccgggatagaaactctgtncctttctacttgatttttctcttgggggt

SEQ ID NO: 9022 - DNA, 326 bp, Homo sapiens
cccttagcgtggtcgcggccgccggggcaggtaccagttgtaaaattaccaggaaccgccatgcctcaagatcgccctgttttctggcttcatcaatgactgcatgcagtgcaccaccctgtccactacgtgatgctgtaggattaagtctcacagtgggcggctgaggatacagcgccgcgtcctgtgttgctggtgaattagacgccatcgctgtgggttgctggtatggtgccgtgctatttggcacaggacacaccgcttgaggtctgtattgaacctctgaaggaggccgatactgaagctcggttggcagccggtattga

SEQ ID NO: 9023 - DNA, 309 bp, Homo sapiens
  misc_feature 190: n = A,T,C or G
ccctttcgagcggccgcccgggcaggtacctccagcaatgagaagcagagagggctaggttgacggtctcaaactggcaccggggagccccgtgactggttttaagggtgtgtgaatgaagattaaaatcttgtttgatattaacatgggttcagttttttttttttaatgtcactaagccatgctgtanagcccttctggaaggacttaggtgggacaaagagccagagtccacaacttctgtattgttcacagggccctagtgcatcctgggaagtttctctggcaccggaggtgagttttcctaag

SEQ ID NO: 9024 - DNA, 618 bp, Homo sapiens
  misc_feature 442, 450, 502, 505, 569, 571, 584, 598: n = A,T,C or G
cccttagcgtggtcgcggccgaggtacgaaaaaatcaggctactaagcccactgttaatatagacgcagaccaattgttaggaacaggtccaaattggagcaccattaaccaacaatcagtgatgcagaatgaggctattgaacaagtaagggctatttgcctcagggcctggggaaaaattcaggacccaggaacagctttccctattaattcaattagacaaggctctaaagagccatatcctgactttgtggcaagattacaagatgctgctcaaaagtctattacagatgacaatgcccgaaaagttattgtagaattaatggcctatgaaaatgcaaatccagaatgtcagtcggccataaagccattaaaaggaaaagttccagcaggagttgatgtaatttcaagaatatgtgaaaggctctgatgggattggangaactatnccataaggcaaatgctaatgggcttcaagccaatgaagggggctcactctanganggaccaagtttagaaccattttgggaaaaaaaatgttattaattgtggtcaaaatccggccttntnaaaaaggagttgncccagcctttaatnaaccaaaaaaaaaaaaaaaa

SEQ ID NO: 9025 - DNA, 468 bp, Homo sapiens
  misc_feature 411: n = A,T,C or G
cccttagcgtggtcgcggccgaggtactttttgtaagaaaatttttattgcagtgttcattctgattaagtgagaattattgtatttagttgccgctatacataatttttattaatattccttaagtgttgttttatcaggcgatttctctttgccagttgatacaatacaaatggaatataatgcatctaacatttcaaattcaagacatgattctgatcaaatcagtggtaaaatgaatacatatatgaattctacgacttctcctaagaaggatactggtgtgcaaacagatgacttaaatataggaatattcaccaatgcagaatcacattgtggatcattaatggagagggacatcacaaattgttcatctcctgagatttccgcagaacttattggacaggttancacccaagaaaaacaagcaagacctaactcaggataaaggagccagcttagaaaaag

SEQ ID NO: 9026 - DNA, 379 bp, Homo sapiens
cccttagcgtggtcgcggcccgaggtacatctacctaaaggactattatgtggaataatacatactaatgaagtattacatgatttaaagactacaataaaaccaaacatgcttataacattaagaaaaacaataaagatacatgattgaaaccaagttgaaaaatagcatatgccttggaggaaatgtgctcaaattactaatgatttagtgttgtccctactttctctctcttttttctttcttttttttttattatggttagctgtcacatacaactttttttttttgagatggggtctcgctctgtcaccaggctggagtgcaagtggcgcgatctcggctcactgcaacctccacatcccatgttgaagtaatt

SEQ ID NO: 9027 - DNA, 531 bp, Homo sapiens
  misc_feature 467: n = A,T,C or G
ccctttcgagcggccgcccgggcaggacgcggggacatcaatgcagagtccctctgtgaatttacaacacccaacacccatgagttcagtccttaagaaggaaaattgagcaagtatttaattggttggacattgcataaaagaggtccatatccaggctaactctagaaattttattctcaaacttagttggcctctttttcttctgtcagaggaccattcttagtggcactggggaaatcttggcacccagaagaattcaactgcgctcactgcaaaaatacaatggcctacattggatttgtagaggagaaaggagccctgtattgtgagctgtgctatgagaaattctttgcccctgaatgtggtcgatgccaaaggaagatccttggagaagtcatcaatgcgttgaaacaaacttggcatgtttcctgttttgtgtgtgtagcctgtggaaagcccattcngaacaatgtttttcacttggaggatggtgaaccctactgtgagactgattattatgccctcttt

SEQ ID NO: 9028 - DNA, 429 bp, Homo sapiens
ccgcggtggcggcccgcccgggcaggtacaggacaattataaagaacttaaaaggagtctagaaaatccagcagaaaggaaaatggaaggtcagaattcccagagtcctcaatgtttcaaaacatgctcagagcaaaatggttatgttctcacattgtcaaatgcacaaccagttctgcaatatggtaatccttatgcatctcaggaaacaagaggttattacagtatttttggtttgggattagctgcatctggagatttttttatggtttatattttcatggattagcaaactgctggtataatcaaccctaatacaaacattattttatttgtataattagcagttttaatatttaacactgtaactggcttcatctagaagtgatgcaccatgagatgagtacctcggccgctctagaactagtg

SEQ ID NO: 9029 - DNA, 129 bp, Homo sapiens
ccgcggtggcggcccgaggtacgtgttaatagaggctagtttgggtcttgcagaaatgatttcatttgggatgctttggttgtcattggggggcttggttgttggagacgtgagtcttgccgaagatcc

SEQ ID NO: 9030 - DNA, 128 bp, Homo sapiens
cgcggtggcggcccgaggtacgtgttaatagaggctagtttgggtcttgcagaaatgatttcatttgggatgctttggttgtcattggggggcttggttgttggagacgtgagtcttgccgaagatcc

SEQ ID NO: 9031 - DNA, 327 bp, Homo sapiens
aggtacggatacaattccgctgagttagattccaaattctaacctctccatcacacgccccagaaaggacagtagccagcttctctggatgctttgccaagcaattgactccatcacggtgaccatccagcgaagcaaggaatggttttgcaaatactcgttccagtttggtagcatttaaagctcttatatattctcgtgggacctcaaaaggatgtaaagcaggatcatagtttcttggaactctctgtaagtccaacttggtttcgcggacataattgtccggattccggctcagcatcttcaccttcatctcggttgctcttc

SEQ ID NO: 9032 - DNA, 437 bp, Homo sapiens
cgcccgggcaggtactttgggactgcttgttaacttttgtggttgtctgaggccaatctaacgtgaccatttctgacacctcaacagagagaggaaagcaacttgagcaatgagagtaaataacttgggctctcagagatttgaagatagagatctcattgtgagggggactattttgcaggtcctcatttctccaagaaagagatggtgttacaggaacccactgaaagccatatcccattaaatgaggaactaattttggctgggccttcttgtaatgtcctcgcaggtgtgttgtgaagattaatgcagggtagtatgtttgtagattgacacctagtctaaacttgaggtaattggtgctctgtgaatactcagtccgtgttcttttatagccttaatcatgatttgaactagtccctttgctttttaaatga

SEQ ID NO: 9033 - DNA, 512 bp, Homo sapiens
  misc_feature 454, 477: n = A,T,C or G
ccgcggtggcggccgaggtactacatatgcagaatctgatacaatgttaatagactgattaaaatcttgttaacactgtaatgacggcaaccaactctgctctttgagtcaagtgatactgagttttgatgactcattcttttggcccggtgtaagccacttttccattgctggaaccatcagtaaacactgccagagcattttttaaaggcttatgtttggtaactttaggtaaaatccaagtagtcaattttaaaaactggaagatttttgttttggggtaacgattgtcaataattcccacaaaatcggcaagaccaatctgccatgcaccagaattgataaaggcttgtctaacctgttgcttgttgaaaggaacagtgattttatctgggtcatttccacacaatgttattattcataatcttccctgaccaattaatgtagccatttnatccaagtacctgcccgggcggnccgctcgacccggtcccagctttgttccctttaag

SEQ ID NO: 9034 - DNA, 246 bp, Homo sapiens
ctatagggcgaattggagctccccgcggtggcggccggcgggaggctgacgagagccgggaggcgttagcgaaggaagagaaaaaccgaagacgaagccactacagcccccgcgtacagactttgaggtttcatcaatataaataaaagagcagaaaaatatgtcttggtttcatttgcttaccaaaaaaacaacaacaaaaaaagttgtcctttgagaacttcacctgctcctatgtgggtacct

SEQ ID NO: 9035 - DNA, 580 bp, Homo sapiens
  misc_feature 46, 502: n = A,T,C or G
ggcggccgaggtactttggtttggagtatattattttatcctagangatttggcttcactattaagacaacaattaggtctgcttttcttaggtatacacaaaaatagaaacagtccttatgatggattatttacagattatagtattttggtgggtagaggcatggggaactatttagctcagctggcaaaaagtccaagcaaaacaatccaaatgcctagagtggtgacagttgtgcaatgggtactcaccaaaaagccaaatttcccctttggagttggtgacttagtgtagtctgtggctgacctagaaagacacagagttatcaagagtttcccttcctagaagatgaatgttaccttttgtgttaggaggtagaagaaaataaaaatagcttttttttccctagaattgttaattactcttaacaacaaattaaattcaaagcctgtcctttgagaactggaaatgtaaaatcatggttcaaggttttatccttangtgattcctcagtaggtgttactaggagttcactgaatgaacttaggagtgaaccttcgatgggcctggatttctttt

SEQ ID NO: 9036 - DNA, 398 bp, Homo sapiens
  misc_feature 20, 227, 368: n = A,T,C or G
ccccgcggtggcggcccgangtactcttttcaaggctttacttccaatcttccccttaagtgctagtgtccagaggaaaaattatttcttctctgtagaagtcattttgaagacagtatttttctgagatccaatgtggttgggagttctgaagaggaagttatagttttaagctagattatctcattttattatattctgtgtttattttcctttgccgtgcttangcctttggcaaatgttctctagatgtacctgcccgggcggccgctcgatgctcttcttttcttcccaatgtatcttaataacatcagggaaaaatttctcaaagaagacaaaggtatgttccagcccttctggagctttgnttcagcaattgaaggaagaaaaatagtggg

SEQ ID NO: 9037 - DNA, 372 bp, Homo sapiens
aggtacccaagtttgtgatgtcaattgccaagactaaggaatgaaacatcttcatacgaggtcatcccggagccaactcattgcctgctttttttctgtgtatgttggtggtgtggcggggacaggattgataagcactgtcatcacagcaccctctttactcctccatctaccccaaaactatttccttcctcctaccactccagctggctgcagtctccgttgctgcaccaaccacagcgatgtaagccacagtggcacaggctgcagcatccagcgtgtagcaggtggcttctccctctggtcctctaagctgggaacagagcagctggtcaggaagacacagaagagccttccccgcgtacctgcccg

SEQ ID NO: 9038 - DNA, 555 bp, Homo sapiens
  misc_feature 431, 479, 511: n = A,T,C or G
ccgcggtggccggcccgcccgggcaggtacttccaaaccctcctgttctttcctttttgttttccccaattttaacataaggcaaaagcagtaattgagcaattctatcacctggattggcactccggggaacagtggagctgatcactaactgaattccccctttataatctgaataaattaccccagtatgaatttggactcccttcaaatttagacttgatctccctcaaaggcctaccctcccttctggcagcgggccatatacccctctaggaatcttttgtgggggctttccagggagtaaaaagaccatttgggtggaacataaatctactgcggtgctgcctgctgtggcgcgggacagctgttggattgttgtaattggctgactccctgaagtggtggtattttctgtaggggttggtgtnctttgaaaacccttgaggaacaaacaagttaactggggaatgccccantttggttgggggggcctgaggcttggcccctntttcctgttttcagacaatggttggcccatctttatcaaattta

SEQ ID NO: 9039 - DNA, 603 bp, Homo sapiens
  misc_feature 16, 20, 33, 470, 477, 505, 553, 561, 587, 589, 592, 594: n = A,T,C or G
tactatagggcgaatngaanctccaccgcgggnggcggccgccgggcaggtacgcggggagattgcctcatttcagctcaataaaacatcaccaaattcccttaggcagaaaaagggtggggagtgccctttcttgaaggaatcccttaagtgcacgtctcccgttttcttttcacatcaatgcagagtccctctgtgaatttacaacacccaacacccatgagttcagtccttaagaaggaaaattgagcaagtatttaattggttggacattgcataaaagaggtccatatccaggctaactctagaaattttattctcaaacttagttggcctctttttcttctgtcagaggaccattcttaagtggcactggggaaatcttggcacccagaagaattcaactgcgctcactgcaaaaatcaatggcctacattggatttgtagaggagaaaggagccctgtattgngagctgngctatgagaaattctttgcccctgaatntggtcgatgccaaagggaagatccttggagaagtcatcaatgcgttgnaacaaacntggcatggttcctgtttttggggggnanccngnggaaagccc

SEQ ID NO: 9040 - DNA, 285 bp, Homo sapiens
  misc_feature 154, 256: n = A,T,C or G
gcgattggactccccgcggtggcggccgagtactttgggactgcttgttaacttttgtggttgtctgaggccaatctaacgtgaccatttctgacacctcaacagagagaggaaagcaacttgagcaatgagagtaaataacttgggctctcanagatttgaagatagagatctcattgtgagggggactattttgcaggtcctcatttctccaagaaagagatggtgttacaggaacccactgaaaagccatatnccattaaatgaggaactaattttggctgg

SEQ ID NO: 9041 - DNA, 550 bp, Homo sapiens
  misc_feature 160, 413, 425, 442, 447, 454, 457, 466, 472, 473, 478, 479,485, 494, 502, 512, 514, 523, 531, 533, 537, 538, 539, 545: n = A,T,C or G
gggccctttcgagcggccgcccgggcaggtacacgggcaccgtcgactgttggaggaagatcttcagagatgaggggggcaaggccttcttcaagggtgcgtggtccaacgtcctgcggggcatggggggcgccttcgtgctggtcctgtacaccctggnacagtccaatctgaactggttcggcactcatctttcatgagatggatgtggtggcttttctcctttttcatcaagactcctcagcagggagcccagaccagcctgcactgtgccttaacagaaggtcttgagattctaagtgggaatcatttcagtgactgtcatgtggcatgggtctctgcccaagctcgtaatgagactatagcaaggcggctgtgggacgtcagttgtgacctgctgggcctcccaatanactaacaggcantgccagttggacccaanagaanactgcancanactacacantacctnngccgnnaccacnctaagggcnaattccancacactggcngncgttactantggatccnanctcnnnaccaancttgg

SEQ ID NO: 9042 - DNA, 547 bp, Homo sapiens
  misc_feature 400, 466, 527: n = A,T,C or G
cccttagcgtggtcgcggcccgaggtacaggtttttatgtgaacatacattttcattttctgggataaatgctcaaaagggcaactgttgggttgtatggtaaacacatatatttttgtaagaaactaccctactctttttccagagtggctctactttttacatacaagccactcatacaattcagacagcaatgtatgattgatccagtttcttcacatcctcaccagcatttggtattactactattttttatcttaaccattcacatagatgtgtgtaatgataccacatgtggttttaatttgcatttccaatggctaatgatgttgagtatctttttgtgtgctaatttgccatctatgtatcctcttcggtgaaatgtcttcatgtcttttgnctattttctatttaggtcatttggtctttttactattgagtttgagaaggtttttatatatcctanaaaaaaattcctctggtagaatatgtgggttgcttggaattttaacataacttctaccaanggaaaaataaagttaaaatt

SEQ ID NO: 9043 - DNA, 532 bp, Homo sapiens
  misc_feature 49, 50, 61, 67, 71, 73, 127, 287, 303, 312, 314, 323, 329,459, 513: n = A,T,C or G
gatatctgcagaattcgccctttcgagcggccgcccgggcaggtacttnnttttttttttntttttngtgngnaggggaaaacaacaccttatttattcagggtgtaatactgctacttcctttcanaagactttgaaaaagatcaaaataggataaaatggacagttactactaaacgattcaaatacttgggcagtatcttttccttttaaccctttcacacgtttttaaaggggcaaaaattgatgaatggtataaattcaaaagggaaaattttttttactgnaaaaggcattcaactngcacaaacngngggttcaanctgaanggcaagggcgtttcttggtttccttttgcactcgggcgggatcgttaacttccccaaagttacaactggagttgctctttccaggcttttcgaagcatctttaaagttcccccccaagtcctggaattgnttccatgcctgcactaaaactaaattttgggatagggatggggaaatcaagggntctggactttttttttttt

SEQ ID NO: 9044 - DNA, 493 bp, Homo sapiens
ccctttcgagcggcccgcccgggcaggtacttggtattgtattttttataaataagatttttatgtaaagcttagaatttgatttacagggaccttgctgagtaaataccatctcaattttgtgccactggttcagctgttagcacagtaaaaaaatcatttgtatcaaaggggcaaatgctttattaaggtagtaaaagggaacattacttctgcttttaggaagttactgcaagcacaagcatttgtgcttttaagcaaattaaagtagtaaaagaaaaacttaagtgaaacctttgccatcttcatgttttataatataaagcttacccaacaccagttaagccatggttaacctaaatgcctcatgccccagttcagcaaaaggaggaaaatgtgcctgcctcacagtcatcagtctttttaaatcttttttgttggtggttcttaagggtttgaatttgtctgcattccttggctttaggggaaattc

SEQ ID NO: 9045 - DNA, 491 bp, Homo sapiens
ccctttcgagcggccgcccgggcaggtactttttttttttttttttttttggagacagagtcttgctctgtcacccaggctggagtgcagtggcacgacctcggctcactgcaagctccgcctcctgggttcacaccattctcctgcctcagcctcctgagtagctgggactacaggcacccgccaccgtgcccggctaattttttgtatttttagtagagacggggtttcaccatgttagccaggatggtctcgatctcctgacctcgtgatccgcccgcctcggcctcccaaagtgctgggattgcaggcgtgagccactgcgcccagcctaggtagatcatctttttagctcattttgttaatgatttcagactcagatggtgtaggtagaatcagactcacatcttccattaatgtaattatgaagatgtgtgcgcattgtgttactaataagttgctaaaactagtttcattttggagaaagcttt

SEQ ID NO: 9046 - DNA, 444 bp, Homo sapiens
  misc_feature 322, 433: n = A,T,C or G
ccctttcgagcggccgcccgggcaggtacctaactatacactttgattcagcctgctaaatcaggggttcaatactagcttggacaaactttgtagtaattaattgctaccagccttattggaaacaaattatcaaccagtttcccctgcacaaattttgaaattcactgcttcacttaatctatttatattactaataatggattaataaagatgaattaattatatattacttaactagtattaaatgaaaaacagggactgaaatagttctgtattccgtgtttgcaacagccagccaactaagcagaggataaaccgntagcaaatgaatgtaataattactcatttccaaagatatctaagcacataagccaatacagggaacagacttcattctttttcttaacaaaaaaagcatcttcagtgtggngatttaaaaag

SEQ ID NO: 9047 - DNA, 460 bp, Homo sapiens
  misc_feature 347, 373, 385, 415, 443: n = A,T,C or G
cccttagcgtggtcgcggccgaggtcattagaaatggagagtttaatagctctttaactgctgcctcattaggtaatgataaatatttcccttaaataattgactattttgctgtgttttaaaaatgattgaaatttatcttgccatatctcataattcatgcacaaagttgactgagctaatcttgagaatatattccgtaaaataggagcacatttagttgaggtatacaaggtaggactctagacaaaaccttctattttagctttaagtgaatttcaaaagtaatgggtcttgggagtatagatttttattagtagcttgaaagagcttaatcatatgcaggnaagtatttttattaccaataaatttnaaattttttaangaaaaatattttatccctagggcccaagtngttgcctggccaccaatcagtaagttangtctataaccaaatttt

SEQ ID NO: 9048 - DNA, 556 bp, Homo sapiens
cccttagcgtggtcgcggccgaggtacggttattttacatcacctataccagaaggtcctgactgacagacagcgaaggctaccggtgtagaaaaatcttacttcagaagagcaatataatacagatttcacaggcactacattttaatatatcaggtattatgctggttttcttataattctttctgtcctaaagctggcattataacaatgaccaaaaaggcaaggattgaagtaaacggaaagtagataccaaagttgatatagtttttttcttcagatagattagtgcatagttctcatgcagataaacactgctatgcatttacactgttggaaagcagagtgaattgagcccaagttgtcacatttgtgtaaatcattttgtcagcctataatagcaccatgtaatggatttgcattaaacattaaattgatttcaaaattggtgacacagtattcactacagttaagtgctatggaatagcttcaatggttacctgctatatatcaaagcaattttcatcccactgctttttattggaaaaaataaagg

SEQ ID NO: 9049 - DNA, 710 bp, Homo sapiens
  misc_feature 23, 290, 345, 389, 393, 437, 462, 485, 494, 510, 540, 557,576, 596, 603, 633, 643, 662, 665, 668: n = A,T,C or G
cccttagcgtggtcgcggccgangtactactccttacaacaggggtgggtagaaggcttatgaaaattatactgcgggtctgatctaatttactccatgttactcacattctttccaacctaaattttggccaagtcagttctctttggagggagccctgtattctgtaactgactgggtggtccagagttattttgatatactgcttttcagaatggaaatttataatactttaaaaatattttgtaataccacaaatactgatgggcacttgatatttattaagtggngtatatggtccactggtttcaggccaaatctagaatttaagtgatactggctcanaagaatttaagttctattcaaccttcctgggcatcagagcctanattnaaaatgacttgtctttactacttttgttccacattccccctctntacctttgccctaccttctggttgnaagggcacttttaatattaattncagcaatgnctggttttatttcctntgctggaataggagaaagcctaatatattncccaagttgaaaagttnttgaattattcacatttancacccggatatgcctggagnggacagnataatctgtctataccactggagttccagncctgactttnttgaatctttttaaaaaangtntcntacaagctatgggaaatttggcttcccctttttttttttttt

SEQ ID NO: 9050 - DNA, 596 bp, Homo sapiens
  misc_feature 110, 115, 117, 138, 140, 146, 149, 155, 156, 164, 174, 175,178, 180, 190, 197, 198, 200, 203, 204, 209, 219, 230, 232,240, 241, 245, 247, 251, 255, 259, 264, 265, 270, 271, 280,283, 290, 293, 297, 302, 304, 306, 308, 310, 316, 319: n = A,T,C or G
  misc_feature 325, 326, 329, 331, 333, 341, 343, 351, 356, 357, 360, 377,378, 381, 387, 398, 409, 421, 440, 443, 450, 455, 462, 464,467, 468, 469, 481, 492, 494, 501, 502, 508, 509, 512, 528,531, 534, 536, 562, 566: n = A,T,C or G
ccctttcgagcggccgcccgggcaggtactttttttttttttttttttttttttcttttttttttttttttttttttttttttttttttttttttttttttttttttttncccgnanaacctttttgaaaattttttntngccagnagnaaaccnnaaaggggntaaaaaaagnnccntntttttttaanttaactnnanggnnaaacncttttaaaanttaaaaaaagngnccattttnntttncnaaantttnaaanccccnnccccnnggaaggganaanggttccnttngggnatttncncngnanaaattntgnaaaaannttntngnattttggnanaaaaatanaaaanngantttttttttttaaaatnnttnggggtnccctgcttttntttaaaatccnaggtttaaaaanggccccaaaaaaaattccnttnggggatntggcntttaaananttnnncaaaacttttanaaaaaaataananttttaanntttgcnnccncagggggaaaaaaaanttnaantnggccccttttttggatgaaaaaaaangtanactttttaaaaaactttaccttttttttaa

SEQ ID NO: 9051 - DNA, 740 bp, Homo sapiens
  misc_feature 445, 605, 614, 644, 673, 676, 693, 726, 730: n = A,T,C or G
cccttagcgtggtcgcggccgaggtacaccaaggtggtgcattaccggaagtggatcaaggacaccatcgtggccaacccctgagcacccctatcaactccctattgtagtaaacttggaaccttggaaatgaccaggccaagactcaagcctccccagttctactgacctttgtccttaggtgtgaggtccagggttgctaggaaaagaaatcagcagacacaggtgtagaccagagtgtttcttaaatggtgtaattttgtcctctctgtgtcctggggaatactggccatgcctggagacatatcactcaatttctctgaggacacagataggatggggtgtctgtgttatttgtggggtactactactccctaacccaaaccaggtgattctagtgaagactgtcaataaacggagcatgtgatcaagcagggcccatcanaatccttccctaagatttttataaaaagctggacctattctttttccatttgagcggggaatatttgaagatatgaggtctaaagctgtgatggcttattctccatccctgtgtaaattctggtctatagtaagcgaagaacaaaggccattaggcaganggcagcaanaaacataaggtgagaaaagagtgtggtctnttggttttctagaccctgattctggtttngangcttggctgatcacctnttcctttgattttgatagaaagcttaatgtttntttntaataaaacc

SEQ ID NO: 9052 - DNA, 120 bp, Homo sapiens
  misc_feature 29, 31, 34, 38, 40, 42, 43, 47, 50, 53, 69: n = A,T,C or G
cccttagcgtggtcgcggccgaggtacananatnaaanangnntggnatncanacatgagagagtgganagtgacattgttgcttggacactgtccattgaagcacttgatcagaagctg

SEQ ID NO: 9053 - DNA, 668 bp, Homo sapiens
  misc_feature 33, 99, 101, 135, 139, 143, 144, 146, 147, 154, 170, 171,175, 177, 182, 184, 185, 192, 194, 201, 203, 209, 211, 212,218, 219, 220, 225, 232, 233, 234, 236, 238, 239, 245, 248,250, 252, 260, 262, 265, 270, 272, 280, 285, 291, 293: n = A,T,C or G
  misc_feature 294, 295, 298, 301, 305, 314, 315, 317, 320, 327, 328, 332,339, 340, 344, 345, 346, 347, 351, 354, 356, 365, 373, 375,377, 382, 383, 389, 390, 391, 392, 394, 397, 398, 404, 406,408, 415, 418, 421, 427, 429, 433, 441, 443, 444, 446: n = A,T,C or G
  misc_feature 447, 456, 461, 463, 466, 472, 475, 480, 482, 486, 500, 502,504, 505, 508, 516, 524, 526, 527, 529, 557, 565, 576, 580,581, 584, 594, 598, 612, 613, 626, 638, 645, 646, 649, 655,658: n = A,T,C or G
ccctttcgagcggccgcccgggcaggtactttntttttttttttttttttttttttttctttttttttttttttttttttttttttttttttttttttngnttttttttttttttttttttttttttaagggggnatanaaanntnnttttttntttaaaaaaaaggggnnaaananttttntnnttagggncngggcttncntttaangnnaaaaannnttttncgggaannntncnnccaggnttnanantttttttntnggnggggngnaaaactgnaaaanccccanannnccnggntttnatttgaaanntnaantcttaannaaanggggccnngggnnnnaccnccntnagggggaanttcaaccncntnggggnntttttnnnngngannccaacncngnacccaanttnggngaaaanangggncaaactgntnncnngggggaaangggtntnccntcaaantcncaccnanttanaagccggaaaaaantnanngtnaaaccctngggggccncnngngggggcccacccccatttaattgggggngggccccntttgccccttntttnnagngggaaaaacntttngcgccccttttttnntataaatatgccncacccccccggnaaaaagnncgnttttcnttntttgggccct

SEQ ID NO: 9054 - DNA, 521 bp, Homo sapiens
  misc_feature 412, 482, 512: n = A,T,C or G
cccttagcgtggtcgcggccgaggtacaaaaattagctgggcatagtggcacatgcctgtagtcccagctactcgggaggctgatgaacaagaatcacttgaacctgggaggaggaggttgcagtgagctgagatcgtgccactgcactccagcctgagcgacagagcaagactgtctcaaaaaaataaaaaagaaaaaaataataaaaaggaaaacaaagcctttagaaaaacaaagcctttgaaaaaggatgtaaaattgaatatatagatacaattatttttaaaaagttttatagaaaaatatcctggattgttgatgttgttttaatatattttaatcatttttgtataatgtcatgtataatatgttataatgaaagtaaaaaaaaaaaaaggtcttagcagacangcagaaaaatgccaaactcagtgcctttaagttattttgatatgtggggaaagatcatgccttaaggctncttttagcttccttgcttgaacctaggaanggttaatcc

SEQ ID NO: 9055 - DNA, 452 bp, Homo sapiens
  misc_feature 262, 333: n = A,T,C or G
ccctttcgagcggccgcccgggcaggtacatctacctaaaggactattatgtggaataatacatactaatgaagtattacatgatttaaagactcaataaaaccaaacatgcttataacattaagaaaaacaataaagatacatgattgaaaccaagttgaaaaatagcatatgccttggaggaaatgtgctcaaattactaatgatttagtgttgtccctactttctctctcttttttctttcttttttttttattatggntaagctgtcacatacaacttttttttttttttgagatggggtctcgctctgtcaccaggctggagtgcagnggcgccgatctcggctcactgcaacctccacatcccatgttgaaagtaattcttctgcctcagccctcccgagtagctgggactaaaggaaccgtgccccccatgactgggctaatttt

SEQ ID NO: 9056 - DNA, 473 bp, Homo sapiens
  misc_feature 16, 19, 268, 275, 311, 330, 366, 379, 390, 396, 403, 423,439, 446: n = A,T,C or G
agcggccgcccgggcnggnacctatcagtatgctttaactgttgtcacctttctgccccacttttatctatctcgaacacccctttctgcacactctttaaaccactgtattaacaaacacattatgactgcatcctgccagacctacccatacaggcatcaaagtaatgattattgcttattgcctgacctaggatgtgagctccatgagaacagagactgattacctctcgctcccctgcacctaaaacaatgcctgcttggtgtnaagtaantgctcagtaattttttaaatgtgtgaccaatgaaanaaaccttcaagagcagagnagctcttttagattagaggcaccatactaagtgccngcatttcaacaanaaggacagacnggaaanaaagacnagaatgcaaaatagattctnattttatttaactgtngtaatgnagctgcccacttgcaattaaaaaaaaa

SEQ ID NO: 9057 - DNA, 273 bp, Homo sapiens
ccctttcgagcggccgcccgggcaggtacgcggggacatcaatgcagagtccctctgtgaatttacaacacccaacacccatgagttcagtccttaagaaggaaaattgagcaagtatttaattggttggacattgcataaaagaggtccatatccaggctaactctagaaattttattctcaaacttagttggcctctttttcttctgtcagaggaccattcttagtggcactggggaaatcttggtacctcggccgcgaccacgctaaggg

SEQ ID NO: 9058 - DNA, 460 bp, Homo sapiens
cccttagcgtggtcgcggccgaggtactacactgcagtatcagccacacattctccgcagactaagacttctgggctttttgattctttgggaatttccttggggcaagccttccccttaggcctacattgtaatgatctttgataagaagggtcctgtaaattatttatctgtgacattccacttaccatgtgataagtaaatctactggtagcactgactgtaggtacagccgttgtcaatggagagttcaaagacctaagccttgatgactttaaggggaaatatttggtgcttttcttctatcctttggatttcacctttgtgcgtcctacagaaattgttgcttttaagtgacaaagctaacgaatttcacgatgtgaactgtgaagttgtcgcagtctcagtggattcccactttagccatcttgcctggataaatacaccaagaaagaatggt

SEQ ID NO: 9059 - DNA, 452 bp, Homo sapiens
cccttagcgtggtcgcggccgaggtactttgaatatggagtagtttacagctattttttttcttactggtaatcttaactaatatgattcccttattagagagcctctcactcccccaccccgaaaaatgtctactattcatgacagtaaccaattattctggacaaattgcttctttttaatttgagctatctgccatggactttctaaaatggaaacacagcctgagtgtatcttagggagagtttgattgaaaaaatccaaatcactgtccatatagatcctggatataaagagatacctgatttttattaaaaggatactttttcaaatttaagagttaatcttggaaatttggaacaagtaaaggggcaagtaaaccttttgatgaaatataaaaggaactcattgcatgaagttgactatcaaattctgtgatgtgtggcttctta

SEQ ID NO: 9060 - DNA, 269 bp, Homo sapiens
  misc_feature 74, 85, 155, 262, 263: n = A,T,C or G
ccctttcgagcggcccgcccgggcaggtacgcgaattggagaaaaagttcagtgggaagcatgtcgtctttatngctcagagganaattctgcctaagccaactcgaaaaagccgtacgcgggggagctgagccggtgggtgagcggcggccacngcatcctgtgctgtgggggctacgaggaaagatctaattatcatggacctgcgacagtttcttatgtgcctgtccctgtgcacagcctttgccttgagcaaacccanngaaaag

SEQ ID NO: 9061 - DNA, 384 bp, Homo sapiens
ccctttcgagcggccgcccgggcaggtactgcctctaatttttctttgtcttcctctcactggcatttttttctctcccaggtttcttaagaataatgttttttaaaggaggctttttgcccatcaagaataaaaagaaataaaaccaaagggttaccagaaaaaaaaaaaaaaaaaaaaaaaaaaggtacccgccaacaagcgggaccgagcaggaatccgtatctgggaacagaatgaacggagaccagaattcagatgtttatgcccaagaaaagcaggatttcgttcagcacttctcccagatcgttagggtgctgactgaggatgagatggggcacccaaagataggagatgctattgcccggctcaagggggtcctgg

SEQ ID NO: 9062 - DNA, 507 bp, Homo sapiens
cccttagcgtggtcgcggccgaggtactccagcctgggcaacagagcgagactctgtctcaaaaataaataaaatagaataaaataaaataaaatgttaactaaaatcgatttctaatttgggaaacataataactaataccatttgattttaaaaagaattgtatcttaatcattaagctaaagacatagcaagaaaacaatgacatggtcacttgaagggtgtctcagccaacttttcatcatctaataagacacccttaaagtaattccagcagaaagtctcagaaattcattgatcaacctccaaagcacatcagggaaggtgctaatacagtggataacaagaacaataaacagcagaacatgttatttaaatttttgagataataaaacaatacagaagtaggaacccttgtgaaattatgttctggttttgggtaatgagatcattaataccgttataaacttcataccgtgtggcacactgtaagggattaaagaatgg

SEQ ID NO: 9063 - DNA, 536 bp, Homo sapiens
  misc_feature 383, 388, 389: n = A,T,C or G
cccttagcgtggtcgcggccgaggtaccattatgtgcccgaattccgaaaagtgtccatagcagctaccatcatctatgcctatgcctggctggttcctcttgcactctggggtttcctcatgtggagaaacagcaaagttatgaacatcgtctcctattcatttctggagattgtgtgtgtctatggatattccctcttcatttatatccccaccgcaatactgtggattatcccccagaaagctgttcgttggattctagtcatgattgccctgggcatctcaggatctctcttggcaatgacattttggccagctgttcgtgaggataaccgacgcgttgcattggccacaattgtgacaattgtgttgctccatatgcngcttnntgtgggctgcttggcatacttttttgatgcaccagagatggaccatctcccaacaactacagctactccaaaccaaacaagttgctgcagccaagtccagctaatgaggaaattctcttttgttttttggagcatggttctttggga

SEQ ID NO: 9064 - DNA, 548 bp, Homo sapiens
  misc_feature 472, 515: n = A,T,C or G
ccctttcgagcggccgcccgggcaggtacggtggtgtttttcttaaaggatgaattatcaaatgcttgctccccatggaagcctcttaaggaaaagttaaaactttgaatatgtcttatgggaagagactgacgtagcacaaatcattaaaaaaccttcacctaattgtcttcctggtcattttcatatggaccaaatgttcactctagggcccaaaaaacatttgtttcctgcatgtattcaatcttctggaacttgatatttcccacgaggtttggtaacagtgtcccaaagtcaaggtgacaaaagaactttgcattaataaagacaatttcgagctgtagtcaaatttggagggaataaactaccccttttccttatactgaaagtcttttaatatgcctgtgccttagttgaataaaatctcctacctttgggggggagaaaaacaatgctctgcaagtgtcatttncatacaaagactggcaaaatttttcagtcaaaatattcgtttnaaactttaaaaagaaatctattccatttccatc

SEQ ID NO: 9065 - DNA, 310 bp, Homo sapiens
ccctttcgagcggccgcccgggcaggtacaatagagtaagaaattagacaaagttttcatgtccagtagcagaataaaaggcctttcattaatctatctagaagtccccaatgcagtaggaaaacatgttcattcccctaacattgcggtatatactagcattagctttctttttaaaattttttttctctataagcatttttaaaaggcatacccaaaagaggtggtttaatcacccatccccaccaaaatatagtttattatctctctccctctttttaatgatagtgtaaactgaatccaattcctg

SEQ ID NO: 9066 - DNA, 351 bp, Homo sapiens
  misc_feature 239, 253, 300: n = A,T,C or G
ccctttcgagcggccgcccgggcaggtacactgaatctcaaccaggcactgaggacctgcagccttctgattcgggagcaatggatgtatccacttgcaatgctggctgtgcccagctcagcaccaaacataaggaaaaagatgctctgtgtctcgatatgaaagtcttctgcttctgtagatttgttcgtagactcgtcagactctcacagccctctacacttgacggaacagacccngaagaagcctcctnctgagataaaccctgtagatggaagagagaatgccttgactgttgtncagaaagatttctctgaacttccaaccactaaatcgaattctattaatagc

SEQ ID NO: 9067 - DNA, 530 bp, Homo sapiens
  misc_feature 333, 335, 373, 431, 521: n = A,T,C or G
ccctttcgagcggccgcccgggcaggtactggtggcaagtgagtgaagggtttcagcaagggggtccccaccttccaggcacagtgtaagtggaccccccacacttgggggctctcctgggttgcacagtgtcctctgaaaattcacatccacctggaacctgcaaatatgaccttatttggaaatggagtctttgcagatgttgtcaagataagatgaagtcatactgttttaggatgggccctctatatggcacgactggggttcttatacgaagagggaccctagcacacggatgcatacagggagagcgctgtgtgatgagaaaggcananattgcagtgatgctgccaccagccaaggagccaccatnaaccaggagacgggcatggatccgattctccctgcgaacctccagaaggagccaactntgccaacaccttggttttggactttttgttccccacaactgtgaaaaaatacattctgtgggtttaagctttattataatttgttactgnagccctggg

SEQ ID NO: 9068 - DNA, 607 bp, Homo sapiens
  misc_feature 301, 348, 354, 539, 544, 550, 591: n = A,T,C or G
cggcccgccagtgtgatgggatatctgcagaattcgcccttagcgtggtcgcggccgaggtactttttgctttagcagatagatagggcatccaatacaactgaaacaacctgataacaaattaattttatttttcaataaaaaggaatgctctggttttttaactggctccttgaggaagccagaaagatggcatctgctctttaaacaggcttctcttatctgatttgagacacaaatccaccaagattctttcttacagtggaaagtaggcccacccctcagatcacgaggcccctangaagaagcctgtggaaatcaacctgtgatgtgtggtggtgggccaanccctanaaaaccatggtgggtgggcacataaatccttcagcggactcaagtggaaggatgagaattctgtaagttcatgcccattttattgagtagtaatataaaatgctttttctttttcaattggtacaagtgcatgcttttgattgccaacatgtcagaaagtcaaattaccaaaggcaaggctttangctgnaagtgnaatacttgggcacttattccaattggtaaaaaatatgaaanggaccttttggtggtg

SEQ ID NO: 9069 - DNA, 757 bp, Homo sapiens
  misc_feature 207, 210, 213, 221, 226, 227, 237, 238, 239, 240, 246, 284,315, 329, 350, 357, 383, 394, 399, 451, 457, 461, 463, 478,484, 531, 532, 555, 556, 560, 564, 582, 590, 634, 657, 662,692, 698, 720, 729, 730, 732, 746: n = A,T,C or G
gatatctgcagaattcgcccttagcgtggtcgcggccgaggtacttaaaaatactgaattgacagctacattgaatacagggtttcccagggtagttcttattttgtcacttactccaattacattcaaggtcgttatgcctcatctttttcctgagctgtggcagctctaactggggcacccagagagatcataccaggttatctncanttntacttttntggtnntgggccctgnnnnaatgantcccacaatttagaaagtaggatgctaaacaaagttgnaatcaacatatctttttagaaaatatcaggntagaagaatactcntgaggacctgtttcttaccanaagttgncaaatgtgaaaaatgcatcaatctanaccagcagtcnttgtnaacacagcccggaactgcaaagtcaagggaaatgggttctgggccttccttnccaggntaancnaaccattattttaanaagcanccttcttgaaatgccagctttgtgggggaaaagaaatggggaaaggnngataaaaatcacaattaaatgcnntgtntatncatgaattccaaaagctnttttgtanaaaataaaaatcaaaaacccttttagaccaagaaagaaaattcngagacccttctaattctttttgncccangtgttaaaaatttaaaaaaattctggtgtnaatcanttggccattaagcattagtatngagggaaannanttttaacctttganggaaaaaaaag

SEQ ID NO: 9070 - DNA, 390 bp, Homo sapiens
cccttagcgtggtcgcggccgaggtactgaaagtgaaaaaacagaatggttgtatgggtaaatgaagtatggtttctagtgaatgtgcatcatttctgcttcattgtaaaactgaaaaattgtaagtaaaaccattgttgcctgtacggcagctccatcctgtccatcctgctggaggaggtcagccctgagctggtgtgcagcatgctgcacctctgctctggcacgcggctgcctgcactgaccgttcacgtgactcagccaaaggacggtggcttctgcgaaagtgtgcaagaaagctggtgggttatttggatcgcaacctggagaaaaacagcaccaagcaggagatcctggctgctcttgagaaaggctgcaagcttcctgcca

SEQ ID NO: 9071 - DNA, 346 bp, Homo sapiens
cccttagcgtggtcgcggcccgaggtactttttttttcctttttttttttaagagtataaggtttacacaatcattctcataatgtgacgcaagccagcaaggccaaaaatgctagagaaaataacgggatctcttccttgtaaacttgtactcttaaaaatctgttaagagagtggatctcattttaagggttcttaccacaataaaattaaatttttgaaataaatcagtcatatttgagtgaaatgaaacctttccgagtagtttcagacaattgataatacctagtttacagttcctgtagtcattttggagggtgaggacttgatgtgtttaagtaaagtt

SEQ ID NO: 9072 - DNA, 304 bp, Homo sapiens
  misc_feature 23, 37, 59, 81, 151, 173, 178, 198, 223, 239, 245, 267, 282: n = A,T,C or G
cccttagcgtggtcgcggccgangtactctctttttnttttttttttttttgttagtanagatggggtttcactatgttgntcagggtggtctcgaactcctgattacaagtgattcacctgccttggcctcccgagccttaacccttttnattccctgacaccaaatgctanttctnttggatagttatactgtganaagttggtgacgggcaaaacgggancccaggccagtgtcanaaactnacccagagtcacagggacaaanctgttgtgtgggttnttccctgtgagaatcttaagga

SEQ ID NO: 9073 - DNA, 478 bp, Homo sapiens
ccctttcgagcggcccgcccgggcaggtacttaagaaaaaagatttgattatcatcacagcagaaaaaagtcattgcatatctgatcaataacttcagattctaagagtggatttttttttttacatgggctcctattttttcccctactgtcttgcattataaattagaagtgtattttcagtggaagaaacatttttcaataaataaagtaaggcattgtcatcaatgaagtaattaaaactgggacctgatctatgatacgcttttttctttcattacaccctagctgaaggacatccagttccccagctgtagttatgtatctgccttcaagtctctgacaagtgtgctgtgttagtagagtttgatttgtatcatatgataatcttgcacttgactgagttgggacaaggcttcacataaaaaattatttcttcacttttaacaccagttagaaattatatcccatttaagtt

SEQ ID NO: 9074 - DNA, 525 bp, Homo sapiens
  misc_feature 500, 509, 525: n = A,T,C or G
cccttagcgtggtcgcggccgaggtactgtggaaatacatatttctttccctgagtaggttctagctaggtatgagtgccctagtttgaacatgtttgtgtgtgcatacacccagttaatgcagtcgtattttgagaaaaagaaaaggcagaaagagtcccattcactccctcaagcccagctcactggcaggaaagctggacattgttgctttggagcattgattttcctgcttctacgccactacagaccagaagctgtagatgccactgcctgctgattcttagcttggggcccctgccatttaaaatataggcaaggtcagagtataggatagcttcccataccttcggttggtggatgttttaggataaagaaaagacttgtaaaaagtcatcttgagtagtcttttttttgggtgttctctcaatataggaaacaaatgagccacagggagagaaaacccattttcaactcaagccaaaattaggggtagatgnggatatggntcccttgggaaggatn

SEQ ID NO: 9075 - DNA, 152 bp, Homo sapiens
cccttagcgtggtcgcggccgaggtactactcgattgtcaacgtcaaggagtcgcaggtcgcctggttctgggaataatgggggaagtatgtaggagttgaagattagtccgccgtagtcggtgtacctgcccgggcggccgctcgaaaggg

SEQ ID NO: 9076 - DNA, 497 bp, Homo sapiens
  misc_feature 460: n = A,T,C or G
ccctttcgagcggccgcccgggcaggtaccttcaggatctgaactgtcacatcttacccaaaggggaggaagggcagtaactggcagattaatcttcaaatgggtcatattaggattgtgagccatggtgtaaagcccaattaactgccttgccttcccaactggtaaagcaagtggtccaacattttcgccagtagagaaatcagatatggcagtttcttcagattgaagttcttcaatatgacttgtttcttccttttctagaggcactttttccactatgaaatactatgtcattttcatttagaatatttttcaaagggtttgggttggcctttgctgatcaactgcacttggacatcagcctcatagagaaatgggtctttacggattcctttcttttcttcattaaatttctgaaggagacgaagaataaaaagtcctctgctgcgcagttcancccgctcccacatcccgccccaatgtgagggcggtac

SEQ ID NO: 9077 - DNA, 501 bp, Homo sapiens
  misc_feature 309, 322, 327, 395, 417, 424, 448, 460, 462, 482, 487: n = A,T,C or G
cccttagcgtggtcgcggccgaggtacatgacgccgctttcatgatgttctggaacaaagaaaactaacctatagtgatagaattcctatcaatggctgcaacaatcgggagtgaaaggaactgactgagcaggtatacaagagaaccttctggggtgatggaaatattctgaagcttgactggagtgttggttacatgggtatatcaatttatcaaaactcactgaattgtatatttaaagtaggaacattttattgtaataaattacacctctataatgttcgttttaaaaaatattagatcatcanctggaaatcactnggttntaacaaaaaattttctctgcaatcttatttattctagcacttatcttcttgtcttcaaaaagccaatncaaaacttcactgtaacctaancctatgntagactcttacaaattccctaaanaggtagaattangntcaatgagtaatttcttatnaaatnattctagaatttac

SEQ ID NO: 9078 - DNA, 396 bp, Homo sapiens
ccctttgagcggccgcccgggcaggtaccagttgggcagctctgggtggaattgctgcggttctatgctttagaatttaatttggctgatttagtgataagtattcgtgtcaaagaattggtatctcgggaattgaaggattggcccaaaaagcgcattgccattgaagatccctactctgttaaaagaaatgtggcaagaaccctaaatagtcaacctgtgtttgaatatatacttcattgtttaaggacaacatacaagtattttgctcttccacacaaaattacaaaatccagccttctaaagcctctgaatgcaattacatgtatttcagaacattctaaagaagtaataaatcatcatccagatgcacctcggccgcgaccacgctaaggg

SEQ ID NO: 9079 - DNA, 770 bp, Homo sapiens
  misc_feature 113, 270, 376, 424, 502, 515, 543, 552, 567, 583, 590, 592,602, 604, 639, 652, 657, 673, 684, 686, 689, 701, 702, 703,720, 721, 726, 728, 737, 741, 753, 756, 757, 763, 765: n = A,T,C or G
cccttagcgtggtcgcggccgaggtacaggaagctaagagaaacttacaagttagccgggcgtggtggctcacgcctgtgatcccagcactttgggaggcccgaggcaggcanatcacctgaggtcaggagtttgagaccagcctgggcaacatggtgaaaccccatctctactaaaaatacaaaaattagctgggtgtggtggcacgcgcctgtaatcccagctacttgggaggctgaggcaggagaatcgcttgaacccgggaggcanaggctgcagtgagctgagatagcaccactacattccaacctgggcaacagagtgagactctgtctcaaaaaaagaaaaaagaaaagaaacttggaagccatttcanaaagacttcaagaaggccagcagccacttctgcacaaccagggggaanggctacattttactgcaagcagctggtttcttctgatccttctttgtaaggaagtgcaatgattttttgtttttgaangaagactttgaanaaacaatttgggtaggtatttccaatanggactgatnggggagggaaatcanattcctccatgagaanggatttnanaccttggtanangtcaaaaatacatttttgttttaaggatttttganaatggttgatggncccangggttattccaagacnttggatttggntnttnaaacctcaggtnnnaaattacattttttccnnatcancncctgatgtnggtnttaatctttaanggnngggatnanttaaa

SEQ ID NO: 9080 - DNA, 588 bp, Homo sapiens
  misc_feature 458: n = A,T,C or G
cccttagcgtggtcgcggccgaggtacctgcacgggctgaggaacctctggcaaatccttttccacataggagtggcttttctgccttcatatcagatactaacaaggcagcttcaggagaagcagtctgactgtggagtgtgaggatgacactgtgatgaatggattctttgattttcttttgaggatcaatctatgtttctctttctgcttctctactttacactccagtttccatccttttcagccaactggactgaaaaaccaggaattggggatgttaaacagttgcagtggaagtcatgaggttgcttgatacccagccttggttctgtgccaagcattactgcaggatctccagccagttcagcacgtttacctaggacagctggatctgggggctcatccagaaagagctttattggaagagagaaaggaaatattttggtcttttaagntgaatgatacagtaaaccactttgatttcaataacactggttttagtcattggagaagttgtctccaagggaaccactttaaaatccaaatcaacccttcaagtctaaacataacttgattaggtttttt

SEQ ID NO: 9081 - DNA, 475 bp, Homo sapiens
  misc_feature 426: n = A,T,C or G
ccctttcgagcggccgcccgggcaggtaccaaatttgcatatttgaaattaacactttagcacttgctgaactcagccctcgttaactcccttaacaagttcaatctgaaatcgaatttgcattcaaacagtttaatgccaccaagtaggtctgaactaatgtataaactcagcgccgccgccgccacccctactttcagggcagctgctcggggaagccggttttttttttttggccattttgcaaacaaaaccaacccacacccgttatcgcagagcacccaaggcccatggcaacttggttccacaaggggagagccttccaaggccatattgtcagtctaattaaatatgagctttttttttttcaggtgctgcctatgtttccttgggctggtagaaatgtggtggcatttattaatgggngctgcaaaaaaaaaaaattaaagaaaaggaaaaaaagaaaattccgaaa

SEQ ID NO: 9082 - DNA, 697 bp, Homo sapiens
  misc_feature 250, 299, 300, 308, 450, 462, 498, 501, 505, 533, 536, 541,567, 624, 630, 640, 649, 663, 672, 682: n = A,T,C or G
cccttagcgtggtcccggccgaggtacccattaaacagtttcttcctatgccttcaccctgaagcccccggcagctataaatatacattttatttttataggtttacctcttctggatatttcatataggtggaatcataaaatgtgtgaccttttatgtctgggttcttacactgagcataatgcttccagggttcattcacatgcagcatatgtgagtgctgtattccttttcatggctgagtagtantccattggatggatggactacaatttgttattgggacatttgggttgtnntctatggngtttttttctccccccaccccttcaagacaggggtctttctgttgccgcaggctggagtatagtggcatgatcatagctcacaagcagtctttgtactttgttacctcaacttaggggaactaatacacccatgaataattntttttctatagntagtaatcattttgatcccaattttgaatgaagttnctntagntttatatactggatgaagatagaatacntcntgagnaataaaaaatcccaaaaatatttttnccaattaatatttaaattcaaaatacccttactttgtttaggcccacgtatggtagnatttanatattgtgantgactcaanaatttacctttttnaaaaaaatngcaaaaattnctttttttccttttt

SEQ ID NO: 9083 - DNA, 293 bp, Homo sapiens
  misc_feature 2, 10, 15, 17, 21, 25, 34, 42, 44, 46, 47, 58, 60, 65, 66,67, 68, 69, 70, 71, 72, 73, 74, 75, 76, 77, 78, 79, 80,81, 82, 83, 84, 85, 86, 87, 88, 89, 90, 91, 92, 93, 94,163, 177, 266, 270, 278: n = A,T,C or G
tntttttttnttatntngggngatnatactatcntaagggcnantnnagatgcatgcncnacggnnnnnnnnnnnnnnnnnnnnnnnnnnnnnncccttagcgtggtcgcggccgaggtacctggaagagtttcctgatggcttttacaaagggaagttgttngtttttgatgaacnctatgctctgtcctacaacagtgatgtggtgtcaagagatgttcatactgtggagccctgctgggaccagtataaactctgctctactncccnagtgccgncagcttcgtttttga

SEQ ID NO: 9084 - DNA, 316 bp, Homo sapiens
ccctttcgagcggccgcccgggcaggtacgcgggggaggcattgcagggtttcaatacacaggacatgttctagttacagaagccttgctctgctgtcaacaattgggaaatgctcattttttcatgttttgtgaatactctggtcttgctgtaagctaatgtcatggctgtgggatattagagaagtgggtttatgactctgaagaccagcagacaccagactttaaaagtgcttaaattggaatttggaaactacagtaaagaaaccttcagataccagttccatcctgaagccctctgttgaacaacagggcc

SEQ ID NO: 9085 - DNA, 282 bp, Homo sapiens
ccctttcgagcggccgcccgggcaggtactagaacacacttaccaatatcatttaactgtttttaatattataaatgtgtcttcctgaatggaaaaaggatacaggctaaaataaagactattgttgctttttacctgattttattccaaaataatttaatattgaaaagccctaaacttctttaccacaaacaattctcaatatgtcaagtttgctacataagaaagaaaacatttcagtgatttcatagtcatgtacctcggccgcgaccacgctaaggg

SEQ ID NO: 9086 - DNA, 620 bp, Homo sapiens
  misc_feature 555, 565, 573: n = A,T,C or G
ccctttcgagcggccgcccgggcaggtacttggctcctttgagctacccttattttaagaattataaataggtgtcaacccacacaaagaacagattgtggattaccgtagggaaaaaaatagcttacccaacttactaaaagtttcaacaccaaaaaagatttaacttggctgaaagttctgaaacagctgagacacagaaccaggaagctataatttataatgaaatgttgatacatacttaaaagctactgcagctgtagctatactaaaataagatttcttcagggtttacttaccctgaaatgcaagaatacaagcataacaataatattactgtttttatatgcaccaatacctctctttaatatataaagctctacaacaaatacctctaataattttacaattaaattaaagtccatacttctatactactttggtctcaacatttttaaaacatcaattaattttgaaaatttacaatttaacaacatggatcctatcaataaccaagccacattttggaggtgggattaaaagacacatttcaancattgcaatncaagtggntcaaattcccttaatgataaattaaccatggctggttggacttttat

SEQ ID NO: 9087 - DNA, 165 bp, Homo sapiens
ccctatcgagcggcccgcccgggcaggtacaaaaaataaaataactgtatttatagtttatagattccccctctcccatttacaaaactattaagttcattacctttttttttaaaaacatgagagcaaattgtacctcggccgcgaccacgctaagggcgaatt

SEQ ID NO: 9088 - DNA, 229 bp, Homo sapiens
  misc_feature 202, 210, 229: n = A,T,C or G
ccctttcgagcggccgcccgggcaggtacttttacaaatggagcccttgggaggtgggttaggtaaaagaagctttttacttaacgttgcttatttccagtctaattttacgctgtagcagaaccagatggctgagaaaattctggaactatggatcttgaccccaaggatatattattttattccaagaaagatcaggtangcgaaaanatgacaggatacagagtcn

SEQ ID NO: 9089 - DNA, 246 bp, Homo sapiens
ccctttcgagcggccgcccgggcaggtactcaaagtataatttctactgaatgcatatcacttgtgcactgttgtaaagctgaaaaaccgttaagcctctacgatttttaagtaagttggggaccatcagtttaaaataaatgcaatactatttcatgataaacatggtcactgtaagttttactcttttgaatgagggtgcgacagaatgcagttagaatcaagttcatatcaccattaaaatca

SEQ ID NO: 9090 - DNA, 758 bp, Homo sapiens
  misc_feature 467, 605, 613, 622, 636, 652, 674, 675, 681, 687, 723, 739: n = A,T,C or G
ccctttcgagcggccgcccgggcaggtacagccggtcacccatgggaaagatcttctggaagtccgtggtcaccatctgggcctggatcccgaagcgcctgtctgcagcgatggccacacagttcttccccttcatggccatgacggcccctccgttataggacataatagacatgattgcggtgtacagtagattttcatgatcattgcatatttcttgtcattgaaatgtatcttttatgtttttaaatgcattcattttacacttgtgagtttatcattgactttaagagatagaaatgaaaaatgaaaattaaagctaaagcctttttatctattaatgcagatatattagaataagaatattttgggtttgtgtttattttttaatgaatttatgtttacttgatatggaaaattacgctttataggtggaaaagtagcaaataaagattaaagtaaaagtnagtgaaaatgatggggaatatagtattggaattttatagctaggtaaaacaataagtatcaatctaatttgggtggttattttgcagatgaagaaaaccagacctagaacccgggcatgttttggctgaaacatgcantgagttanaaacaaggnctaagaatagcttntagcatcaaaacaatncccagaattcattaacaccttnnaacaancccaanaaaaaaaatttaaatctatcctggttattgggcaanatatttgggtctaggntttaccaaaaaaaaaaaaa

SEQ ID NO: 9091 - DNA, 245 bp, Homo sapiens
  misc_feature 54, 215: n = A,T,C or G
ccctttcgagcggccgcccgggcaggtacttttttttttttttttttttttttngggtctgtaggtcagataatttaataaatatttcaaataaatattaataaaaactgaaataaaatgtcaagaatggggaactaatggtattaagttttatatagaagggcatgagggaagtgtattaaaatttgttcaaatttatgactgagagggctaanaaggtacctcggccgcgaccacgctaaggg

SEQ ID NO: 9092 - DNA, 307 bp, Homo sapiens
cccttagcgtggtcgcggccgaggtacactttgccaggttttatccctttgttaaagcaaatagaacagagagggaatatagctgccagtaaaaatcatttcccccctcttaatctcccatccttcatctccatgaaaccgactattaagataacctttctctctctgtgcactagtggaaaaagcaaagttctatagaaactcacagttaagagggactctgaatacagcaagttaaggcttttagtgcaaatagaatgaattcccactaaggtcaaaaggtttcaattgggtacctgcccgggcg

SEQ ID NO: 9093 - DNA, 361 bp, Homo sapiens
cccttagcgtggtcgcggccgaggtacaagctcaggattctccgaatgaagttaaggtcccttgcccatccggagaggcctcagctgtgtcggtatgatcttgtcctgatggaaaacgttgaaacagtcttccaacctattctttgcccagagttgcagttgtaactgttgccaggacacatggccataaataatagaaagaaagctacaaccacaggctgtttgaaagcttcacctcacctttctgcaaagcagaaaaagtatgaaaaaaaccaaggcttttttcagtagccgtcctatggatgtcacattgtacctgcccgggcggccgctcgaaagggcgaattccagcacactggcg

SEQ ID NO: 9094 - DNA, 451 bp, Homo sapiens
  misc_feature 58: n = A,T,C or G
ccctttcgagcggccgcccgggcaggtactaagagacagagattaaaatggcttccanaggaaagacagagacaagcaaattaaagcagaatttagaagaacagttggatagactcatgcaacaattacaagatctggaggaatgcagagaggaacttgatacagatgaatatgaagaaaccaaaaaggaaactctggagcaactaagtgaatttaatgattcactaaagaaaattatgtctggaaatatgactttggtagatgaactaagtggaatgcagctggctattcaggcagctatcagccaggcctttaaaaccccagaggtcatcagattgtttgcaaagaaacaaccaggtcagcttcggacaaggttagcagagatggatagagatctgatggtaggaaagctggaaagagacctgtacctcggccgcgaccacgctaaggg

SEQ ID NO: 9095 - DNA, 614 bp, Homo sapiens
  misc_feature 418, 453, 454, 524: n = A,T,C or G
cccttagcgtggtcgcggccgaggtacatttaagtctgtattataataagcaaaaagattgtgtgtatgtatgtttaatataacatgacaggcactaggaccgtctgcctttttaaggcagttccgttaagggtttttgtttttaaacttttttttgccatccatcctgtgcaatatgccgtgtagaatatttgtcttaaaattcaaggccacaaaaacaatgtttgggggaaaaaaaagaaaaaaatcatgccagctaatcatgtcaagttcactgcctgtcagattgttgatatataccttctgtaaataactttttttgagaaggaaataaaatcagctggaactgaaccctaaatcttgacttttgtcgttattatgcccaatgcctaagattggaaaggccctacagtatctngacactacacaatctgccttagctttaaaaaaatnngtttctcagaggagtcttggtcaaattgctaccttatcgaggaacattaaatgtctcttggccagatttnctctgaccctgaaaatgatggcatcagcttaatatgtgttaacttcaacccatgctttctagggaattttctgaggtttaccatatttaa

SEQ ID NO: 9096 - DNA, 351 bp, Homo sapiens
ccctttcgagcggccgcccgggcaggtacttctctaatgaggatggagtctagaggagacccaagagccacaactaatacccaggctcaaagattccattcacctaagaaaaatccagaagaccagaccatgccccaaaataggacaatatatgttaccttgaaggtaaaccacaggagaaaccaagatatgaaacttaagctcacacatagtgagaatagtagcttatatatggctctcaacactctccaggctgtcaagaaaagagatagaaactcaccaaggccaagaaatgcttgtgcgtggcacagaaggaatcaaagagtacctcggccgcgaccacgctaaggg

SEQ ID NO: 9097 - DNA, 721 bp, Homo sapiens
  misc_feature 16, 18, 24, 25, 60, 102, 106, 120, 124, 162, 163, 171, 199,214, 218, 255, 334, 350, 362, 364, 373, 381, 393, 394, 410,415, 430, 444, 464, 465, 484, 485, 495, 499, 522, 524, 538,550, 557, 577, 584, 603, 604, 608, 614, 615, 622, 647: n = A,T,C or G
  misc_feature 665, 666, 688, 704, 705, 716: n = A,T,C or G
ccctttccagcggccncnccggcnngtactctttctgactacaacatccagaaggagtcnaccctgcacctggtcctgcgtctgagaggtggtatgcagatnttcntgaagaccctgacnggcnagaccatcaccctggaagtggagcccagtgacaccatnnaaaatgtnaaggccaagatccaggataaagaaggcntccctcccgaccagnagangctcatctttgcaggcaagcagctggaagatggccgnactctttctgactacaacatccagaaggagtcgaccctgcacctggtcctgcgtctgagaggtggtatgcaaatcttcntgaagaccctgaccgncaagaccattantnttgatgtgngagcccantgacaccatttnnaaatgtgaaaggcccnagatncaagataaaggaggnatttccccccggancaggaaaggctcaactttgnnagcaagcagctgggaagannggcctacttntttntgactaccacattcagaaagaantnggcccttcacctgntcctgccctgangggtggnttgctaattctttaggcatnggattcncaaaggcccaatgattggnnttanttttgnnctataanccaatttggcccaaccttaagtttnaaaattaccaggtttcannaattactgaacctgttcaaaangttaaaaaagggtttnntggattgggcnaaaaa

SEQ ID NO: 9098 - DNA, 525 bp, Homo sapiens
  misc_feature 436, 488, 510: n = A,T,C or G
cccttagcgtggtcgcggccgaggtacatagtgtcgcgaactcaaatcggcatttagatagatccagtggtttaaacggcacgtttttgcttataaaaaaagtgcaaaaaagatgtggtttacaagttaaagctacagaatccctttttgctgtaattgcaccagttttaaagcctctggacagagcagtatttcgtttaaaactttgtttttcttaaaagcttacagtgtttggctaattctcctcccctttttacaagacgggggccggagggtggacactggtggcaggttaagggatactgtcactttaagaagcctgcagattgaagtgtaaacatggagaaattaggggctgattttttaaactgtgtgagatattaaccagccgccctgttataaaatcagggaaattcaaacagcgattttacacccnttaacacccctttatatatttttttacaaaaaatcccctgagaaaaaaaatnaaacggttttcatcttctcttnggcttttttttgggt

SEQ ID NO: 9099 - DNA, 434 bp, Homo sapiens
  misc_feature 177, 184: n = A,T,C or G
cccttagcgtggtcgcggccgaggtacagagacagaggaaggggggctccaaagccaagagagggaaccccacctgccacagataccagctaggtgtatatacagaggctggaggaggcagtgtctgatttgcacaggctcaggggattggtttgactaggcatgtcattcacgtancccgcangaaaagctggctctcccaccctgccttttaatatgcaaatgcagggcaccatgatcttctacacaggtggggatacttcggggtgtccatgtatccaggaatgtggggaaagggcaagaagtccacaggaatcccatgtttgggtggacccactttctaatggctggcatttggatatcgggtaactggcctggctttaaaaactggagctttacaaaaaactttttcagacgtgctttaaaaaacaaaa

SEQ ID NO: 9100 - DNA, 517 bp, Homo sapiens
  misc_feature 453: n = A,T,C or G
ccctttcgagcggccgcccgggcaggtacatcagtatcaattgcaaagttctgttttcttctacttcaggaaacaacctcatttgatttgtggccctatgaactgtccaaacacactgatgaatatcagcaacttctctcatttgaatttctcatgtccttaaagtaaatagaatttccagagacaactaaagagcaatgcaatatgaagaaaattaaaatttggctaagaaaaataagtaatcaactaaaaattgccataacactcagacttaaacagaaaataagtttgttgtcttttataagatgacaaaacttcaatctaacatcacaagttcttatactagatgaatttactagtatatgaatcaatatactagatttctttcttctaccccaactgcaaatatactaaacaattatttcttcaatagtttctttttcccctagtcgnggcatttaaaactgagtaacagtatttagcactaagtaaatttagaaaaatataaaaagggttt

SEQ ID NO: 9101 - DNA, 211 bp, Homo sapiens
  misc_feature 54, 59, 75, 94, 95, 104, 144, 148, 153, 193, 195, 196, 201: n = A,T,C or G
cccttagcgtggtcgcggccgaggtacaatagtggtcctgaggtgacgtatatnctcancttacaaagataacangattaatatattaaagtannacaggtgtngaaattataaaagtattaattttggaaactgataaatgtncaanaaatntttacaatttatgtttcctgatgcagcaccagctggtccntnnattcngggtccctga

SEQ ID NO: 9102 - DNA, 342 bp, Homo sapiens
cccttagcgtggtcgcggccgaggtacgcggggtaaccacctgggaaaacttcacagaaaatgagagtttcagatactgagaatagaaccactaagaagcagaaaagagaagatattctcgtgggggagaacaacggctgggaggggaggaagcatggccaaggcaaagaggtgggcattaataaggaatacaacatgtttaagaccacagaacatctgcataggctgtaaatttcgttgaatgatggatgcaaagatggaagacagatggatagaggaaaagacagaatcagatactggatgagttagtacctgcccgggcggccgctcgaaagggcgaat

SEQ ID NO: 9103 - DNA, 330 bp, Homo sapiens
  misc_feature 31, 47, 48, 315: n = A,T,C or G
cccttagcgtggtcgcggccgaggtactttntttttttttttttttnntttttccccctcttcaaaacaaaaaatggatttatacggaaaaagggttaatttacttggggtttatcagcacaccatttttaatgtgctttgaaagaattaaaaaccatgaaactgtattcactgaataccggtccatagttatattttttcttttaaccgtggcttaaatacatacatcatgactttctattaaaatccttaaatctatggggatgtgtggtagataagactatattaaaaatttttcctcattaaccaatttcnttaaattaaaaaaaa

SEQ ID NO: 9104 - DNA, 424 bp, Homo sapiens
  misc_feature 331, 360, 375, 389, 392, 412: n = A,T,C or G
ccctttcgagcggccgcccgggcaggtacaccaaaaagagaactttgtgatccgttggtaagatagtatccacaagtaagcacttgtgttcactgttttttgtccacactagaatacacccagttggataccagagttatttacagacatctgaggaagatcctagttttcaagtctgtcaggaaaatattccatattgttttaagccagatcatacccatggaaaaatagagaatggttttctttctttttctttctgaccaatacatgctcaagaaatcaaatatctgagatacacaaattgaacgcggtagggtgggggaggaagtanggagataaagcctatgctgctgattcctnaattataggagcagnctttaaaagccctngtnaatctagtgatgtgtttctntctggaattggg

SEQ ID NO: 9105 - DNA, 734 bp, Homo sapiens
  misc_feature 133, 134, 189, 228, 288, 295, 396, 405, 457, 498, 538, 539,542, 564, 583, 600, 610, 641, 655, 657, 664, 665, 671, 675,688, 706, 710, 713, 715, 718: n = A,T,C or G
cccttagcgtggtcgcggccgaggtacccgataggtagttttctaacccagccccttccctccaccctctagagtccatagtgtctattgttcccacatttatgtccatgtatggtcaatgcttagctcccannttatgaagtgaaaaccgtgatatttgattttctgttacagcattaatttgcttangattattacactgtggaaagtagtctggaaatttcttanagaacttaaaacggagttgccattagacccagcaatgccatactaggtaaatcccaaaangaaaatngaatcattcctaccaaaatgacacatgcactaggatgtcaattgctgcactggtcacaatagcaaaagccatggaatcacaccagatccccttcaaagggncattgggantaaaaaaaaaccttgcttccataccttcattttggaatgccttcccccgccngtagaaaaagaaaataaaattttttggccctttggtagccnacccccggattgggagcctggaaggcccataaattcttgnnccnctttttcaaaatgggaagaaangtttaaatttcattttctngaaatttcttattaagntcacctgaangttttttttttttttggaaaggccaattttngaaggttatttctngnggggaannatccantttnttttttaaggaanttgtggcctgggagtatntaanctncnttnaaaaagcttttttttt

SEQ ID NO: 9106 - DNA, 253 bp, Homo sapiens
  misc_feature 90, 125, 139, 184, 190, 195, 198, 218, 220, 226: n = A,T,C or G
gtacacaactgaaattcaaatatcgaggatggcaagaaaagctggcaacttctatgtatcttgcagaacccaaattggcgtttgtcatcnggattggaggttatcaattggggttgagcccaaangtctgaaaggtgtngcaacttcttttgccttcatcaaatctttcaatagaaaacttttngtgaanctcancanggcttcaataatgtgctgangnttgtanaaccatatatttcattgggcataccca

SEQ ID NO: 9107 - DNA, 601 bp, Homo sapiens
  misc_feature 474, 524, 583: n = A,T,C or G
cccttagcgtggtcgcggccgaggtacctcccagtccactcgagctgcttctatctttggaggggcaaagcctgttgacacagctgctagagaaagagaagtagaagaacggctacagaaggaacaagagaagttgcagcgtcagctggatgagccaaaactagaacgacggcctcgggagagacacccaagctggcgaagtgaagaaactcaggaacgggaacggtcgaggacaggaagtgagtcatcacaaactgggacctccaccacatctagcagaaatgcacgaaggagagagagtgagaagtctctagaaaatgaaacactcaataaggaggaaagattgccactctccaacttctaaaacctcccaaacctgatcagcccctaaaggtaatgccagcccctccaccaaaggagaatgcttgggtgaagccgaagttctaacccttcctgcttcgatctcagaagctnaagacacagagcagcagtcccctacaagtggtgggggaaaaagtagcttncagcttcaacccttctgaaggaaggaccaaggaagggaaagatgaaaattaagttgatngggatgaatgccccaaaa

SEQ ID NO: 9108 - DNA, 517 bp, Homo sapiens
  misc_feature 29, 54, 56, 58, 65, 89, 99, 130, 131, 132, 136, 138, 139,140, 158, 160, 162, 165, 172, 177, 187, 190, 194, 201, 202,212, 215, 218, 235, 237, 238, 239, 245, 249, 259, 264, 270,273, 274, 279, 286, 287, 290, 291, 297, 303, 309, 310: n = A,T,C or G
  misc_feature 314, 316, 319, 321, 324, 331, 334, 335, 338, 343, 353, 366,372, 373, 383, 384, 385, 386, 391, 393, 397, 399, 404, 408,411, 414, 447, 449, 451, 454, 456, 466, 468, 469, 472, 474,475, 481, 485, 489, 501: n = A,T,C or G
cccttagcgtggtcgcggccgaggtactnttttttttttttttttttttttttngntnttttttntttttttttttttttttttttttntttttttttncttttttttttttttttttttttggaaaaannnaatngnnngaaatttttttggccccntnanatncaatganagggngggaacaggnttntttncaggganntttttttggnggnatnttgaaaagggggcccangnnngggggnttanacctttaatnccaantttttnggnngtccnggggggnngannttttgnggcccngaattnnaaancnccntnggnaaaaaanggnnatnccttnttttaaaaantttaaaaaatttncccggnntgggggggcnnnnttgtngncccncnttctnaggnggnttnggggggaaaaatttttgggccccaaaatttaangntnaangnggcccgttanannaangnncttttncctngggnaaaaaaaaaaancctttttaaaaaaaaa

SEQ ID NO: 9109 - DNA, 475 bp, Homo sapiens
  misc_feature 302, 359, 399, 417, 419: n = A,T,C or G
cccttagcgtggtcgcggcccgaggtacaaatatatataacttacatttgattgtaaggccaacgttcaaaagtaaaaatgagatgagctctcttattgttatccgaggtcaagaggctgcaactgtcaaggggatgttctcaccaaaagggggtttgggggaagaggcacacacaaagctaataaaaccagaatccccatccccacaaaactcatgggaacaaaatttaaaggataaaacaaaaccccccaaggacccatattacaaaccaaatatggtaaccctgtgtcccttctatggnatgaatatgtcatggtaccttagtggtaaaggattaacataagggaactgcgcaatntataaaagatattttctctataaaagcatatttcgattgnttccattaaaataatggncntagaatccatcataaggttaaaaccaggacaatactgctttttctttatttaaaaa

SEQ ID NO: 9110 - DNA, 719 bp, Homo sapiens
  misc_feature 560, 562, 563, 604, 607, 620, 653, 654, 659, 665, 683, 701: n = A,T,C or G
cccttagcgtggtcgcggccgaggtacattggggcaatctcaaaagtagtaaaattttttttgtcttttggcttaaccctagagacacagtagaccagtttcagcttacatttaagatggcagaaggggagaacaaaaaatttgacaggaattaaagtgctaagaacatcaccttagaatcaattccaaggacttacatgaagagaaaaccatcctcccatatgaaaatatttgcagtaggagaacacagtgcaataggctccaaaaatggcttttaagacctttggtggggcagttactactgctttaaagccaggttaaagtatactctaagcaaagatgaccgtagagcagctagcttccttttttataatcacagggaaagctctctccattgtccatcaaatcagctctagaaggtttttcttttttttctacaagtgcacaaaggggaaacactgattttaagaaccttcttttccaaagttttggccacaatttcccttttcatcttctagggggggaaaatggctcttctcacatggatacgtaagtttaangnnccaaagttcctatcacaaatttacaaaaagccttcaaaaanccntgaaaagcttacncccggaggcctttttacctgaccccaaactatnnaaaanggcctnatttttaaagggaactgnaaaaatgggttgggcccnagtttttttagttttttt

SEQ ID NO: 9111 - DNA, 806 bp, Homo sapiens
  misc_feature 418, 462, 517, 544, 562, 567, 569, 592, 596, 611, 638, 655,666, 676, 700, 726, 739, 740, 742, 750, 788, 801: n = A,T,C or G
cgccagtgtgatgggatatctgcagaattcgccctttcgagcggcccgcccgggcaggtacttataccccccaaatatataaaacatttttaaaagaaaaaaaggaagaaactattcatacatgcaacaacttggatggatttcaagggaattatgctgaatgaaaaaagatcagcctcgtaagattacattctgtatgattccattcatacaacattcttgaaatgacaaaattacagagatggaggacagaacagtggtagccacaggttggggtgagggtataagaaagggatgtggctgcggctgtaaaagggcagtgcaagggatccatgtgacagaactgttctgtctcttgtgatggtggtcacatgaatctacacatgtgataatattgcatagaattaaataccctacnccaaaaaagttcaagcagttgagcacaaatattttaattgtctnaaatgacattttctttaagaagttatctacagttcaaagctcacttttatgaggngtcacatccatcccattttaagagatntaaaatcatgaaaagatntcccngnagctttgtaacatttcagcttanggtnaaagagaaaggtaanggtggtttcacaagggaattgaaaganggccattccaatgaagncaacatgggcnccccaaaatnttggtaaaagaactaaatgggaancccaactgcttaccaggtgggagaanaaaagaaaccttnncnaccgatcnccccaggggaccccggccaatgctgcctttggattttntagggaacccctnttttt

SEQ ID NO: 9112 - DNA, 166 bp, Homo sapiens
cccttagcgtggtcgcggccgaggtacatcctgcacagccctagatcccttaaaccttacagcacatgtttccgtgagcacagggttggggctaaagttcagattaacagcatctcaaggcaaagcaatttttcttagtacctgcccgggcggccgctcgaaaggg

SEQ ID NO: 9113 - DNA, 461 bp, Homo sapiens
ccctttcgagcggccgcccgggcaggtacaaatttgaagtatgtgagaaggatgattaatatgaaggtgttttctggtttaagttgttccccctcctctgagaaaagtatgcatttttacattagaaaagggacttttgttgacttcagatctatggataattatttctaagcaacgtgtttttattcctcactaatcttggctatatcagataccatttatgaaacattcttgctataactgtctctccaagaccccgactgagtccccagcacctgctacagtgagctgccattccacacccatcacatgtggcactcttgccactccttgacattgtcaggcttttctaatgttggtagtatttattaaagatgaagatgcacatacccttcagctgagcagtttcactagtaggaaataccaaaagcttcgtacctcggccgcgaccacgctaaggg

SEQ ID NO: 9114 - DNA, 564 bp, Homo sapiens
  misc_feature 48, 70, 544, 553: n = A,T,C or G
gatatctgcagaattcgcccttagcgtggtcgcggccgaggtactttntttttttttttttttttttttngtagggaaaacatcttttttattattattatttttatttatttatttagagacaggttcttgttctgttgcctgggctagagtgcagtggtgcaatcctaattcactgtggcctcaaattcctgggctcaagtgatcctcctgccccacccttgagtagataggactacaggcacacaccaccatacctggataatttttttatttttatttcgtagaaacggaggtccagccaagttccccaggctggtctcgaactcttggcctcaagtgatcctccatgcctgggctggaaaacataaccttatgggaaagttcctaaaaatggttgaagaacaagactgaaggctagaatatgaaagctcaaattctgattctgccccttcctagttgcatattcctgagcaaatattttcaactggtatttttaaaactgtgccaaggcacccagggcattagagtgaccttacaagangtttctcanaatatttaaaa

SEQ ID NO: 9115 - DNA, 417 bp, Homo sapiens
  misc_feature 59, 125, 129, 138, 141, 172, 175, 180, 184, 185, 186, 188,189, 195, 196, 200, 201, 203, 204, 207, 208, 210, 211, 219,222, 225, 233, 236, 241, 242, 245, 246, 249, 254, 260, 271,274, 275, 279, 282, 296, 298, 302, 305, 306, 308, 327: n = A,T,C or G
  misc_feature 329, 337, 342, 343, 349, 360, 372, 376, 377, 379, 386, 388,399, 407: n = A,T,C or G
ccctttcgagcggccgcccgggcaggtactttttttttttttttttttttttttttttncttttttttttttttttttttttttttttttttttttttttttttttttttttttttttttttttntttnttttttttnatnttttttttttttttttttttttttttttgcnaanaaaangggnnntnnaaaaanngggnncnnaannanntttggganaanaanaaaaaaanggnggggnngtnnaanaaaanaaaaanttttttttttnttnncccnccnttttttaaaaaaanantgtnttnngnaaaaaaaaattcttaattntntactactnaaggnngatggnttttttttttnaaaaaaaccttntttnngntggggananaaaaaaaaaanattctttnaaaaaatttt

SEQ ID NO: 9116 - DNA, 285 bp, Homo sapiens
  misc_feature 40, 104: n = A,T,C or G
cccttagcgtggtcgcggccgaggtactaataattttttnttttttttttttttttgtattcttagtagagacggggtttcatcatattggtcaggctggtctngaactcctgacctcagatgatctgcctgccttggtctcccaaagtgctgggattacaggcatgagcctgtaatctacagtttcttttttttcaacaatcatagattgcttttatttaatgacctggaatcgtgtgttaacacttatgaaaatcctgatccttcttgcttgataacccaagg

SEQ ID NO: 9117 - DNA, 624 bp, Homo sapiens
  misc_feature 108, 221, 420, 424, 440, 522, 532, 536, 570, 587, 588, 593,595, 610: n = A,T,C or G
ccctttcgagcggccgcccgggcaggtaccgtatttccaagtattaagaagccaagtgtttttttttttgacgtattattgacaaatgtattcagcgccatacacaanagaaatattattactccaaagaacgaaagttaacaaaactccaaagcaaaaacccttttaatggaggtgagaaataaattaatgtaacaacagctagattgcttttaggattnttcttttcttttgtggaaacttcttgacttgacttttcatcttgaacagtttttcccctcaagatttaatcttatatgtcatacttaagtttaggaacagcttgaataattagcattctaagataacacaagggccattgattcacttaaaaattccaagctctgtaaatttttatggcatttattttcaaatgttctnttgnatctcattttatctgnagcagtccccactagtctacctttaaccatctttatagctctgggaaattaaaacctttacgtaggactttattacaagganccaattgggncggnatttaaaaccctctccccacttctttagggcttnaggggccggaaagggannaaaangnaaggggcctgatttnggactttttaaaag

SEQ ID NO: 9118 - DNA, 572 bp, Homo sapiens
  misc_feature 383, 451, 509, 510, 516, 539: n = A,T,C or G
cccttagcgtggtcgcggccgagccggtaacggagaaagtttacgccgacactggcctgtattagcgcgtatggcctcgggccctcgttccccaaggcgtgtcgcctccctgttctcagtcgcaggctgaagccttgtctgctctcctcctttttggtttggttttggaactgactccgagggttgggagagcgcgttggtggcgacggccgagccagatcactataaacaaaatttccacaagagaaaatgttgaaataggagttgcggatacattggatatactggatgaaatacaagcggttaatttttgtaacgtgagggaaaagcccacattgctggttacatgtgtaaatcactgcgttattgctttaagtcattgnctctatttaacaatgacaagactggaagaaagtaaatagagaaatgaacatgcattctttagtgcggnatcttggctatttaaccagaatcaaattattgggttgctatatgcttaaggctattcnnaagaanggaaaaaacaaccaaaattcctnattttgggaaattttaatcttgggccttttggt

SEQ ID NO: 9119 - DNA, 318 bp, Homo sapiens
cccttagcgtggtcgcggccgaggtactaaatattcagatgagaagaacattgcataaagcatttaagggatcaatttttgttgtgtttgatagcattgaatctgctaagaaatttgtagagacccctggccagaagtacataatcgttttgtggagtcggcacagttcaggttatggaggcacgtaattcaccaaagtgtaaaaaaggcaaaggaaaacacgctgcattgtagaataaggcattcaaatgtgctgttaacgtttaaggcagctaatggccaaaacaggcaagtcaagaaaagtgggtctggtttgga

SEQ ID NO: 9120 - DNA, 281 bp, Homo sapiens
  misc_feature 41, 43, 44, 48, 56, 57, 65, 67, 83, 113, 227: n = A,T,C or G
cccttaccgtggtcgcggccgaggtaccattttgaaatggncnnaggngtcagggnntccttctnanactctgagttctgaanggatgcgttgaggcggaaggcgggaccccntccttcctcagacagacccaggcaaactaacaaacatggcaaaatggaggcaagccagtcctcctccttcatcttgactaacccaatagcagtggcccagggctttggggaatntcgatgggataggaaccaaaagctactgccagaagcctgtttaattaggatgtc

SEQ ID NO: 9121 - DNA, 225 bp, Homo sapiens
  misc_feature 3, 14: n = A,T,C or G
ttntactactatanggcgaattggagctccccgcggtggcggccgaggtacaaactaaggactatttattgataatgttttgctactcttgtcagacaatggctataaactgaattaggcagtcttaaaaaaaaaaaacagaaaaagaaaaaaaagaacgttgcaaatttgttaaaatgccaaaaaggacagtttaattttgtacctgcccgggcggccgctcga

SEQ ID NO: 9122 - DNA, 189 bp, Homo sapiens
aggtacttatatccttcctgtgtcgactggcaaaatgtgatgaagacatcctgagccaccttctagcgtgaaacctcaaccaaacaaaaagtaaagaacactcggtctggacgaccaccgcgactccgaagcaggaaccctcacaacccgagcctccacgaaattcaaacttgccgcccccgcgtacct

SEQ ID NO: 9123 - DNA, 619 bp, Homo sapiens
  misc_feature 457: n = A,T,C or G
ccgcggtggcggccgaggtactcgtaatttaaaacacctttgaaatgtagttgtccaaatgtaatgctgctatgtatattatttgggttccagatttttccctttaaaattctcaaaacactcagtgtccttacaactgcagctaaaatggttaatcattctggcaagaaggtgacagtgtgtatattggaaaggcagacattcacatttgaaaatattttgcattattgttagctaaaatcaacctctccttgaatgtagatacaatatatggttttgcaagtcaattctgaatggaaaaaaagaatcaagtctgaaatttatgtgacatgtggcttcagatcatttgaacgatatgtagaaatctagatgaacatatcattagaggtgaaagcaaaatttgaaagcctaatgagatgaagcaacattatctctctctaatctgccaacaatattncctagattgtgttgccactgtattgattctgagtaattttggcttggttatgcgtggatttaaatgcatgtggctgaatgcaagtaatttttcaaggtattggagttgtagagaattcaccactattcactggctcccagaggatgaaacttttaaaaagga

SEQ ID NO: 9124 - DNA, 570 bp, Homo sapiens
  misc_feature 552: n = A,T,C or G
ccgcggtggcggccgggcatttctcccagggatctctgtgcttccttttgtgcttcctgtgtgtgtggatatttaaaggggctggaaatgtgcaaaaacatgtcactacttagacattatattgtcatcttgctgtttctagtgatgtttcgagcggccgcccgggcaggtacgcgggggttctgcatatctgtgcctctgacgtttattggtgcatactttggttttaagaagaatgccattgaacacccagttcgaaccaatcagattccacgtcagattcctgaacagtcgttctacacgaagcccttgtctggtattatcatgggagggattttgccctttggctgcatctttatacaacttttcttcattctgaatagtatttggtcacaccagatgtattacatgtttggcttcctatttctggtgtttatcattttggttattacctgttctgaagcaactatacttctttgctatttccacctatgtgcagagggattatcaattggcaatggcgttcattccttacgagtggctttactgcangttattttctttaatcta

SEQ ID NO: 9125 - DNA, 423 bp, Homo sapiens
cgaggtacctctcagctctgaaccccagtgacttactcaggtcagtatctaatataagctcggagtttggacggagggtctggacctcagctccaccaccccagcgacctttccgtgtctgtgatcacaagcggaccatccggaaaggcctgacagctgccacccgccaggagctgctagccaaagcattggagaccctactgctgaatggagtgctaaccctggtgctagaggaggatggaactgcagtggacagtgaggacttcttccagctgctggaggatgacacgtgcctgatggtgttgcagtctggtcagagctggagccctacaaggagtggagtgctgtcatatggcctgggacgggagaggcccaagcacagcaaggacatcgcccgattcacctttgacgtgtacctgcccg

SEQ ID NO: 9126 - DNA, 266 bp, Homo sapiens
ccgcggtggcggccggggaagagactcaagtaggagcgcctgcccgagctgagactagatgtgaacctttcaccatgaaaatgttaaaagatataaaggaaggagttaaacaatatggatccaactccccttatataagaacagtattagattccattgctcatggaaatagacttactccttatgactgggaaattttggccaaatcttccctttcatcctctcagtatctacagtttaaaacctggtggattgatggagtacct

SEQ ID NO: 9127 - DNA, 277 bp, Homo sapiens
  misc_feature 5, 7: n = A,T,C or G
ccgcngnggcggccgaggtacgcggggacataaaagaaaaaaatgagagcgagagtgctaggggctgacttgcattccccctgcacccccaattcatatgctgaagccctaacccccagtgcctcaaaatgggactgcatttgcagacagggacttgacagagatgattaagttaaaatgaggttatagggtggaccctaatccaatatgactagtgtcctgatacgaagaggggacagttacagagggaagaccacatgggcacacagggagaaga

SEQ ID NO: 9128 - DNA, 565 bp, Homo sapiens
  misc_feature 548: n = A,T,C or G
agctccccgcggtggcggcccgcccgggcaggtactccatgttggttggtagtattttaaatctgaagcattttcagagtctaaggcaattcagactgcacagctgtcaactcaggagtcccattaaactgactctaaaaattcctaaaagaaggcatgatttattataagcaaatggctaacctggcttttttggtaatagaattttaaatgaaaataaaattatacaagatacacattgtttggatttttaaaaactctattaaatgtttaagtggttgtgaatatgaggaataattaaatgttaaccccagctgattagtgaacatataagaaaatggggggaactgatcccaaaagatcttctcttctaaggagaacttcacttgaggggcaaacactagaagatacaattgttattgtaaaacaaacactaatgagagtccgtcaaataattttaaaagaaaatagaacgcatttgcaactttcaaatgcatttgatgcccaacaatttcatcacctaccctatgtttaaaactgggaggcantccagaaactaaaagga

SEQ ID NO: 9129 - DNA, 524 bp, Homo sapiens
  misc_feature 296, 410, 502, 506: n = A,T,C or G
aggtactgtcaccagctggaggctctctgccacctccttgttaccctgttacctttaaaataaaggtgcccaagaaagagaggctcttggtcttgaacttggaatagctcatctccagtttgcctgtcttgatattgagtctgggtatgcggtggcgagggcaggggatgatatgcaggagctgaggcagtgagtagaggaagttgaacacctggggcatgaagaatagtagcatggtcttgctgaagtgtcccaagatgcccaccacggcaaaggtcatgccagcaaagtaacanaaggtatctcccacaaacacccgtgatgggtaccttgcccgggccggccgctcgatcgaaagatcaactttgatgcgcttttaaaattttctcatataaccccgtcaacgcagnagcacctgaagaaggtctatgcaagttttgccctttgtatgtttgtggcggctgcaggggcctatgtccatatggtcactcattttaattangctngcctgctgtctggccttg

SEQ ID NO: 9130 - DNA, 201 bp, Homo sapiens
  misc_feature 48, 105, 113, 135, 160, 164, 169, 171, 173, 178, 183, 184,200: n = A,T,C or G
ccgcggtggcggcccgaggtactttttttttttttttttttttttggnttttttttttttttttttttttttttttttttttttttttttttttttttttggggncctgctancctttatttgaaaaaatttacncaaaaatccccaatccaacatttanaagngaatntntntaaancccanntgcctttttcccaaana

SEQ ID NO: 9131 - DNA, 462 bp, Homo sapiens
ctatagggcgaattggagctccccgcggtggcggccgcccgggcaggtacgctgaaagcaaattgctgttttcctggtggttctgcacgtttcctaacttttatcatagtttgattttcattatttaagaaaaaataaaaaatccaaagaccataagatggcattagattttttaccattaaattattaatgcctatttggtgctcataaagattaatcatgtcacgcatgtttccaatctttcttttgcagtatattattttctaaaaattgttacatgcaaatttaaaccaagatttatcagtaaaagaaaaaaatagaatccttaataatgtaaatgttgttatatatgctaccctggtgaaaatatttttataaatcatgttgtcatttatgctttatgtagcctatttttcaataaccttcgagcggccgccgggcaggtacttaggaatttattca

SEQ ID NO: 9132 - DNA, 695 bp, Homo sapiens
  misc_feature 544, 578, 612, 625, 659, 668: n = A,T,C or G
ccgcggtggcggcccgcccgggcaggtactgcatgctgtttgtggcactttatcttcaagccaggatgaagggagactgggcaagactcttacgccccacactgcaatttggtcttgttgccgtatccatttatgtgggcccttctcgagtttctgattataaacaccactggagcgatgtgttgactggactcattcagggagctctggttgcaatattagttgctgtatatgtatcggatttcttcaaagaaagaacttcttttaaagaaagaaaagaggaggactctcatacaactctgcatgaaacaccaacaactgggaatcactatccgagcaatcaccagccttgaaaggcagcaagggtgcccaagtgaagctggcctgttttctaaaggaaaatgattgccacaaggcaagaagatgcatctttcttcctggtgtacctgtagtgagaaactgatttatgatcacttggaagaattgtatagttttataaaaactcaatttaaaaattgttgtttcaatgacctgtatttttgcngacttaaaatcacagatgggtattaaaacttgtnaagaatttttttgtcattcaagccctgtggaatnaaaaacccctgtntgggacttaattattgaggcttttaaaaagaatncaaatttcnaacttaaaaaaaaaaaaaaaaaaaaaa

SEQ ID NO: 9133 - DNA, 583 bp, Homo sapiens
  misc_feature 7, 421, 497, 523: n = A,T,C or G
ggagctncaccgcggtggcggccgaggtaccgtttttgttggtttttttctccctcaaagtgaaatgagagactattgtagggttttgagccaaggagtgatattatctgaattctgttttaaaaggttcattatggctcctgtgtggaggcagggtagctacttagaaaccaagccatctcagcctcccgatttgtagagatgtggtctcactatgttgcccagactggtcttgaactcctggcctcatgtgatcctcccaccttggcctcccaaaatactaaaatgatagatatgagccgccacacctggccataagcttcagccttgagcagatactttctaaacactttatatagggaaaaaaaactaattcttgcgtagccaaggtgttcattttgccgagaataacgtagcatantgtttacaattaccgtgggtgtaaatttctagctttgtgatcctgaagagactgccttatccttcatatgcctcangctctaagaactaggtggatcccccnggctgcaaggaaattcgatatcaaagcttatcgatacccgccgaacctcgaggggggggg

SEQ ID NO: 9134 - DNA, 477 bp, Homo sapiens
  misc_feature 2, 134, 157, 223, 228, 229, 241, 397, 450, 457: n = A,T,C or G
gngtacaaggaaatatatggactttcaatattttgggaaagaatatgcaagcacaagttgtgaagacacttgatatatcaaatatgtgaaaacagccagtccattaataagacatgattaaataagcaatggtntattaatacactagaatattcanagaagggtatcaacaagaatgatctatattcactgacaatgagctctccccatactattttaaaangtatnnctattattttanagcttattatcataaagaacactggttttcgttttttaaaataagcaggccttaaaattctggtcaatgataaaagctgtaaaagaatacatcaccatgagggcaaaaagacatccaccaaatctcttacagcaactccaatttttcagatttcangccatgagattaaaatggaataaataaatagacagaggtaggtttttttttgntttttgntttttcgggaattttcttta

SEQ ID NO: 9135 - DNA, 113 bp, Homo sapiens
ctccccgcggtggcggccgaggtactactgtttatccacattcgccgtggactctgctggcagagagaatcctatgggaacatctgaacagacagctggataagccaggccaa

SEQ ID NO: 9136 - DNA, 467 bp, Homo sapiens
ccgcggtggcggccgaggtacttaatttccaaataaagacaatgagaaagttgtagttctacctatcatgatgccagtatcctctgattgtgatttttgggattttagacattatggattttagattaggcattttgatcttttgggatttcaccattcaggattaaggtgttcgagattgtgtcttacaggattataaaccaaacccctttttgggattgggtttgtttcgccccagtcagccttattcttcagagattcttccagtttgttgctgtatcaatagttcacttttattttattttgttttatttatttatttgggatggagtctcgttgcccaggctggagtgcagtggcgccatctcagctcactgcaacctctgcctcctgggttcaagcaattcttctgcctcggtctccctagtagctgggattacaggcgcccaccactatgcctggctaat

SEQ ID NO: 9137 - DNA, 348 bp, Homo sapiens
cgggcaggtactacatgaaccatgtctgatggtagcttgttcccactgtcattttgttttctggttgaagattaatgagctcagccacacaaacaagagttcttcattgacctctacagtccctgcctgtttggaaacatctatggttttgtataacccctgtcatttaactgacagtgttagaagatatccccctgatgtgttactgtaaccaagaaagcatgaacgttaccctttctggtgacagcctgccatgggctgctgtggctgatacttatagaattgttgctccaaaattttggctccacttgagctgtccagaagtgtacctcggccgctctagaacta

SEQ ID NO: 9138 - DNA, 448 bp, Homo sapiens
  misc_feature 437: n = A,T,C or G
cgcccgggcaggtaccttcattagcagttcctgggccaaaggcgttggtgatgttgcggtttgtctccgctgctttataacccattttgaactcgaaaaagaaaattgctctaatctgctttttgtctgatattatttccacggtcttatgtatctgcgcaccctttgacccttggcattatcttgggaggttccaatagatttctcttctcacttctagtgattaaagtccagttaggttcctttgcgtcatctcctttctcctgtagcttggcctgtggggcctgcactggcactttagaggcacatgggaagaaagatgtgaatgtccttatccattgggtgtttctacctcttttccactggtgttcatggccttattaaagatgggatcccagattctgggtctctggggggtgcctatgtcaagcttcttncttcaggcctt

SEQ ID NO: 9139 - DNA, 393 bp, Homo sapiens
ccgcggtgggcggccgcccgggcaggtacagatctttaatagaaaagtatatttctttacagtagaaaaatatctgaacagtcaacttttcttaagacaaaaattcaaatgtaacatactacctaaactataaatttagctaaaactgaatcgagctgtttataagaactgattccaaaaatacatatatgaatttacataaccgatatgtagaagctcttcaaaatcgactgtaaattgaaaagttaaaattggccttgcctctgcagtttggagctgcaatggttgccagtatcggctgttttcttggtgcctgagctgcagggtgggcctgtcgaggaggggctgctgtctgggtcgctttccctctggctgtctgcggtgtaggtacct

SEQ ID NO: 9140 - DNA, 151 bp, Homo sapiens
cgcggtggcggccgggatcttcggcaagactcacgtctccaacaaccaagctccccaagctgagccgggctggcggaagaggcacgtgcgctgctgaatggagctggtcgctggttgctacgagcaggtcctctttgggttcgctgtacct

SEQ ID NO: 9141 - DNA, 687 bp, Homo sapiens
  misc_feature 2, 486, 551, 559, 560, 564, 565, 567, 575, 578, 579, 581,584, 586, 594, 601, 608, 613, 632, 633, 634, 645, 646, 660,663, 673: n = A,T,C or G
tnctttccttaactgctcttccttttctaccacatatgggacttggtcttcttttgtcgagcggccgcccgggcaggtacttgattttttatcagatggcctggaaaacccagtctcacaaaaatatgaaattatcagaaggattatagtgcaatcttatgttgaaagaatgaactacctcactagtagttcacgtgatgtctgacagatgttgagtttcattgtgtttgtgtgttcaaatttttaaatattctgagatactcttgtgaggtcactctaatgccctgggtgccttggcacagttttagaaataccagttgaaaatatttgctcaggaatatgcaactaggaaggggcaagaatcagaatttaagctttcatattctagccttcagtcttgttcttcaaccatttttaggaactttcccataaggttatgttttccagcccaggcatgggaggatcactttgaggccaagaagttcnagaccagcctggggaacttggctgggcctccgtttctaccgaaataaaaaataaaaaaaattttncaggtggnnatannanaatctaanttnntntanangggtcctngggccgnttttaanaactngggggatcccccgggcttnnnggaatttgatnntcaaggccttttcnganccccgtccanccttcaaggggggg

SEQ ID NO: 9142 - DNA, 460 bp, Homo sapiens
cgcccgggcaggtacctactgtgtgctttctactatcagccatcaaaaagaatgataaaagtccacagcataggaatctgttcatctgagtgttctgccaaaaaatacagtaattacaagtagtgtcaccatcagtgacaagggcagggaagactatttttcctttttttcccaacttattcaaatacttaaacctcttctatttcgagttcaaatgaggtaaacatacaacctcaaaggtaaactttgagttatgaaataatgggattttatgaattactaaatgattgaaagataggatcttagcttctctttaagtgtcttcagttagaagggagaacaggcgtcccctgttgaaaagtttattagctcattatatgatctcataagcctccccactttatcttgcttcttatttttcaagtacttcctaatatttacaactttcctttgaattttt

SEQ ID NO: 9143 - DNA, 356 bp, Homo sapiens
ccgcggtggcggccgccgggcaggtacaagcagaactgcatgatcagctgtatggtagccttgaaaaccaacaggccacaatcacagtgaaaacctcaggttggcagccactggaggatacaaaatgagtttggatctccttcaatgccccattcccagagaactgtcattatttgacctgctggtagttccctaaaggacgtgcaaggatgtttttatttgactggacacttgaagcttgccctgtatgaacagcccccatcttcccatgcttgtcaaaaatcaagaggcaactaacactgcggcttcctgagagtctcactctgtcacccaggctggagaagcaattgcacaaa

SEQ ID NO: 9144 - DNA, 145 bp, Homo sapiens
  misc_feature 2, 42, 44, 55, 59, 64, 66, 69: n = A,T,C or G
anggcgaattggagctccactcgcggtggcggccgatgtacncngggaaacaatncgtntgtgntnatntgaggcaaggatggccaggccatgttatgggatctcaacgaaggcaaacacctttacacgctagatggtggggaca

SEQ ID NO: 9145 - DNA, 479 bp, Homo sapiens
tcctatagggcgaattggagctccccgcggtggcggccgaggtacttttcaaaaagaaagacaatttattggaagaatttgtagctggaaacactgttcattaagaaaacattaagttaccctgagaaagactcttaatattaccagtgttttcagggccccctgaccaacgcatggaagagcaacttgtaggctctagccttttaacaatacctacataaagaatattttgatctaaaatgtaacttgggttctctgccacactggtaataagtcacaaccaagacatctgaatgtgatggagtataagcaaattttgcgtttattttaggctgcctctttcttttctaagagaaagagtttgcagttcttcaaatggtcttggatgaaacctactgtttggaaaaaagaatcttctgtaagtaaactggtagttttcttaaaacagtaaacaaatttatctggtctcattctctaaa

SEQ ID NO: 9146 - DNA, 376 bp, Homo sapiens
  misc_feature 291, 340: n = A,T,C or G
aggtacccaagtttgtgatgtcaattgccaagactaaggaatgaaacatcttcatacgaggtcatcccggagccaactcattgcctgctttttttctgtgtatgttggtggtgtggcggggacaggattgataagcactgtcatcacagcaccctctttactcctccatctaccccaaaactatttccttcctcctaccactccagctggctgcaagtctccgttgctgccaccaaccacagcgatgtaagccacaagtgggcacaggctgcagcatccagcgtgtaacangtggcttctccctctggtcctctaagctgggaacagagcagctggtcangaagacacagaagaaccttccccgcgtacctgcccg

SEQ ID NO: 9147 - DNA, 507 bp, Homo sapiens
tcctatagggcgaattggagctccccgcggtggcggccgaggtacttgattggtcagaaattgactcccttgacatatttgctcatgacaagcttgctcacggcctttaaatagagagtaaaatggaatggctgaatagccctcaaaaccaacgtatgtctagggatcatctacctaaggtagattctacagctgggcactagtaatttcatagaaaaaaatattttttagaattcatagaaatctttttgattactgaaaactaaattgtaataatcaaattgtcatccccatgacttattaaaataattttacaataatatacaacaaagctaccatagaatttgtagtttacatatagaacacattggtcagcatgttcttgggtctaaatgaaatacaagaaaattaaaatattttatacgaatgatgttttaaatttattaacatggcgatatgcctttgttacacaaaacttgctagagcagagtattttatttttttctt

SEQ ID NO: 9148 - DNA, 484 bp, Homo sapiens
cgcccgggcaggtacgcggggagggtagagtgagaagcaccagcaggcagtaacagccaacccttagccattgctaagggcagagaactggtggagcctttctcttactcccaggacttcagcacctaagacagctccaaaacaaaccagaacagtcagctccgggggagcacgactgggcgagaggcacagaaatggacaccagaaataaggcccagctccttgtgctcctgactcttctcagtgtgctcttctcacagacttcggcatggcctctttacagggcaccttctgctctcaggttgggtgacagaataccctttgagggagcaaatgaacctgatcaagtttcattaaaagaagacattgacatgttgcaaaatgcattagctgaaaatgacacaccctattatgatgtatccagaaatgccaggcatgctgatggagttttcaccagtgacttcagtaaactcttgggtcaact

SEQ ID NO: 9149 - DNA, 434 bp, Homo sapiens
  misc_feature 26, 28, 32, 62, 318, 376, 377: n = A,T,C or G
tatagggcgaattggagctccccgcngnggcngccgcccgggcaggtactttaggaggctgnggtaggtggatcacttgaggtcaggagttcaagaccagcctggccaacatggtgaaacctcatctctactaaaaatacaaaaattagcttggtgtggtggtgcattgcctgtagtcccagctacttgggaggctgaggcaggagaatcacttgaacccatgaagtggaggttgcagtgagctgaggtcgtgccactgcacttcagcctgggtgacagagtgagacagtctcaaaaaaaaaaaaaaaaaaaaaagtncatacttaatatatgtctaaaagcatcccacttccaacagatgccctacacatagggnntgcttttcataaatatttaaaattgtttagaaactgggaacagattgaaaaatgatt

SEQ ID NO: 9150 - DNA, 382 bp, Homo sapiens
  misc_feature 12, 37, 74: n = A,T,C or G
cgaggtactttnttttttttttttttttttttttttnactttgaaattactttaatttaggaatagaaaacatnttgaaaggaaaaaaaaaacccacaaaacatacaggcaaatttgtattctgtgagtttctcacaccctcacacttgttcaccaatctctaagatgtcgagcggccgcccgggcaggtacaaacttttttttgtcattaaacaatatagtataacaactatttacaaagcatttacattgtattagctattataggtaatctagagatgatttaaagtgtatggtaggatgtgcacaggttatatgcaaatactacaccattttctataagggacttgaacatcatggactttagtatcctagggggttc

SEQ ID NO: 9151 - DNA, 174 bp, Homo sapiens
  misc_feature 1, 3, 33: n = A,T,C or G
ncncctattttactactatagggcgaattgganctccccgcggtggcggcccgaggtactcttcagaagaaagaggcgagggctcgtcatttggtcaccctttggacattttgcaactcttcaatgggtttccattgttggttgattgttataagcttttgaggtacctgcccg

SEQ ID NO: 9152 - DNA, 409 bp, Homo sapiens
  misc_feature 17, 21, 151, 187, 216, 217, 218, 219, 220, 221, 222, 223,224, 225, 226, 227, 228, 229, 230, 231, 232, 233, 234, 235,236, 237, 238, 239, 240, 241, 242, 243, 244, 245, 246, 247,248, 249, 250, 251, 252, 253, 254, 255, 256, 257, 258: n = A,T,C or G
  misc_feature 259, 260, 261, 262, 263, 264, 265, 266, 267, 268, 269, 270,271, 272, 273, 274, 275, 276, 277, 278, 279, 280, 281, 282,283, 284, 285, 286, 287, 288, 289, 290, 291, 292, 293, 294,295, 296, 297, 298, 299, 300, 301, 302, 303, 304, 305: n = A,T,C or G
  misc_feature 306, 307, 308, 309, 310, 311, 312, 313, 314, 315, 316, 317,318, 319, 320, 321, 322, 323, 324, 325, 326, 327, 328, 329,330, 331, 332, 333, 334, 335, 336, 337, 338, 339, 340, 341,342, 343, 344, 345, 346, 347, 348, 349, 350, 351, 352: n = A,T,C or G
  misc_feature 398: n = A,T,C or G
acggccgccggacaggnacantagatgacttttacatcatgtatattacgccttatgtgatataaaatgtattacttacaaaatatacttaaaagaattatttctattataaatggtattcatgattgactgcttaattaatgcacattanatttctcctaatataaaatgaaatgatgcagtttanttcatttcaagtctagatgcccgtacctnnnnnnnnnnnnnnnnnnnnnnnnnnnnnnnnnnnnnnnnnnnnnnnnnnnnnnnnnnnnnnnnnnnnnnnnnnnnnnnnnnnnnnnnnnnnnnnnnnnnnnnnnnnnnnnnnnnnnnnnnnnnnnnnnnnnnnnnnatcatggtccataagctgtttcctgtgtgaaaattggttataccgntcaccaatttc

SEQ ID NO: 9153 - DNA, 303 bp, Homo sapiens
  misc_feature 81, 115, 143, 147, 152, 153, 176, 177, 199, 207, 214, 258,271, 283: n = A,T,C or G
tagaagaacaagtattttgggtattctgcgctctgcttgaagcccagttaccctttcggaaaaaagaagttggtaagcttnttgatcccggcaaaacaaaccaaccgcttggtanccggtggttttttttgtttggaaagcancaanattanncccagaaaaaaaaggattttaannaagaatccttttgatttttttntacggggntttgacncttcagtgggaacgaaaaattcaccgttaagggaatttgggtcntgaagaattattnaaaaaagggatncttcccctaaaaccttttaa

SEQ ID NO: 9154 - DNA, 166 bp, Homo sapiens
  misc_feature 14: n = A,T,C or G
agctccaccgcggnggcggccgaggtactttttttttttttttttggtgggggagttgaaacctaattttgtggcgtagcagctatgcagcttgaaatccaagtagcactaaattttattatttcgtatttgtacctgcccgggcggcgtcgaatattgaaaaagg

SEQ ID NO: 9155 - DNA, 648 bp, Homo sapiens
  misc_feature 15, 17, 27, 36, 37, 39, 40, 41, 43, 48, 49, 57, 85, 104,172, 206, 321, 335, 407, 421, 476, 499, 514, 561, 565, 574,579, 586, 602, 624: n = A,T,C or G
tggagctccaccgcngnggcggccgangtacttgtnntnnntnttttnntatttcgncccacttttttttaaattttactttacnttctgggatacatgtgcanaatgtgtaggtttgttacacaggtatacgtgtgccatagtggtttgctgcacctatcaacccatcatntaggttttaagtcccacatgcattaggtatttgncctaatactctccctcccctgttctcccaccccccgaatcacttattttaaaagtcagcaataaaaataaattgaaactaaatcaaataaattggatactatagagaacaaatcnagcggccgcccggncaggtacagtgtggggtatttttggtttttttctttttcacaacatctacaggacacaagagaagcacttanacactgtaaggctnggaaccatgctgtaataaccacccaagtgtgggtaatcaaaaaggggtcttttgnattttaaaaagggtggggggctnccctgcccttgtcanaatttccaccccaaatcacaatgctttgtttggaaaaaatctcacanaaanggaaagganggctnttaattnaacccaaatgaccttnccttttccaaaaaaattaaccncccacccaaaaaaaaaaacccccc

SEQ ID NO: 9156 - DNA, 457 bp, Homo sapiens
  misc_feature 197: n = A,T,C or G
cgagggtactttttttttttttttttttttttgagacagaatttcgctcttgttgtccagaggctggagtgcaatgacgtgatcttggctcactgcaacctcccaggttcaagcgattcttctgcctcagcctcctaagtagctgggattacaggcgcctcccaccatgcctagctaattttttgtatttttagtanagacagggtttcactatgttggtctcgaactcctgacctcatgtgatccacctgccttggactcccaacgtgctgggattacaggcatgagccaccgctcctggcctaaaatttgccttttacaaaaactcaacaaaagatcatctcaactaaggcatactaaataatatttaagacacaaacttacaggctaaaaaaataaacctgccatagtaacaaacacacactcaggaattacctacacgataaacattttaaat

SEQ ID NO: 9157 - DNA, 433 bp, Homo sapiens
ccgggcaggtacacattcctgagtatacaccattgtggtgatataatttattttggaattttctccattcagcttaaaaggtgtttcttcccaagaaactgaacttttctgtcaaatgcacttgatcgaataggagaattgggttcataaaatggattcattgaaaattttatatataaatcataaacatcagtaaagaagttctttattccatcttcttgtcttatgtcatgaagtcgagcggccgcccgggcaggtacgcggggactggggaaagggagggctcactgagaaccatcccggtaacccgatcaccgctggtcaccatgaaccacattgtgcaaaccttctctcctgtcaacagcggtcagcctcccaactacgagatgctcaaggaggagcaggaagtggctatgctgggggtgccccacaa

SEQ ID NO: 9158 - DNA, 527 bp, Homo sapiens
  misc_feature 140, 247, 305, 494, 497: n = A,T,C or G
cggtggcggcccgaggtactttttttttttttttttttttttgagacagaatttcgctcttgttgtccagaggctggagtgcaatgacgtgatcttggctcactgcaacctcccaggttcaagcgattcttctgcctcancctcctaagtagctgggattacaggcgcctcccaccatgcctagctaattttttgtatttttagtagagacagggtttcactatgttggtctcgaactcctgacctnatgtgatccacctgccttggactcccaacgtgctgggattacaggcatgagccaccgntcctggcctaaaatttgccttttacaaaaactcaacaaaagatcatctcaactaaggcatactaaataatatttaagacacaaacttacaggctaaaaaaataaacctgccatagtaacaaacacacactcaggaattacctacacgataaacattttaaattgctaaaccaaatagaaggaaacacanatnacattgtaaagtttgaaaggtacctgcccg

SEQ ID NO: 9159 - DNA, 176 bp, Homo sapiens
  misc_feature 20, 41, 45, 46, 61, 72, 79, 83, 92, 110: n = A,T,C or G
ccgcggtggcggccgaggtncttaaaagagaatctgggagngatnntgacctctttcactnacccagtgatnacatggncagnatcatcttnccaaagcctgaggatgancatacggcctgtgatatcaccggatccagtcatccaccgatgacacggcattcactggaccgacat

SEQ ID NO: 9160 - DNA, 449 bp, Homo sapiens
  misc_feature 390: n = A,T,C or G
cgcggtggcggccgaggtacactggaggctggagcctgcagacggcatggctctgcggctcaccttgctgcagttggtggtggtgacagagactgcagcttgactgtagtgaatttggaaattatctgtctggaagctctgagtttatcttgggacctcaagaggagaggatcacccaactcacagcaatcaaactccaaatggtgctataaactgaaccacacatggacacgtcagtcttccgaggacctttagatcaaccccaggaggagccctagctgctgttccccattcgacgcccctttccagcaggaagtagccagaagacatccgtcgcccaaacctctaacagcagttagtgcggcatctccacaggggggaatgttgtangagttattgataaattattttaggcagatagagaggaaaaggggtccttaagaagtttt

SEQ ID NO: 9161 - DNA, 392 bp, Homo sapiens
ccgcggtggcggccgaggtactgtggcatggcgcagtgggtgacagatggccacatagcggtcaaaagccatggccagcagcactgtggattccatgccagataaggagtggatggcaaacatctgtagcagacaagcatcaaactggatggtagtggaattgaaccagaagatggccagcattttgggcatggatgaggtggagatgaggatgttcgagcggccgcccgggcaggtacgcggggatagccggacggggatctgagctggcaggatgaatgtgggggtggcacacagcgaagtaaaccccaacacccgagtgatgaatagccgaggcatctggctggcctacatcatcttggtaggattgctgcatatggttctactcaaca

SEQ ID NO: 9162 - DNA, 453 bp, Homo sapiens
  misc_feature 14: n = A,T,C or G
agctccaccgcggnggcggccgaggtacaaaagaatacaatatgatttgtcaaaaaacatataaaaagacagctgctcttcctcaaatacatgagctaatgataaaagactttttcatgttaatgtctccaagttcttctttttcataaaaaaagaacattatggtggcaaatgtgaattatccttttaatattgaacattatattcttttaaaatccatccagatcaaatgcaataattttctttttaactcaacaactgatgctaccaaacgtggactcaatatacttgttaaaacgtgtaaagcgtgtctctagtcttcaaagctttcaggtgaagagaggtgctttttcttgatgcaaatctcaaggcagagaaaatcattttaaagcttataaaaagtggacagagaaatattaaaaacttctctgaaatatacaaatatgtgtaatt

SEQ ID NO: 9163 - DNA, 539 bp, Homo sapiens
  misc_feature 517, 527: n = A,T,C or G
cgactcctatagggcgaattggagctccccgcggtggcggccgaggtacagatctatgagctagaagaacacaagatagaaacttggagagaggtgtatctccaggactcctttaaaccgcttgtctgcatttctcctaatgccagcttgtttgatgctgtctcttcattaattcggaacaagatccacaggctgccagttattgacccagaatcaggcaatactttgtacaactgaatatgtttctatgtaaaagccacaataaagttaaatgaaatactaaataagtcttacaaattggtctcttaggagttctcaaaagaattagtaactgagtaacgttagattctaagaaatgccctcttcttgatctatcatttctgttttaactgaaaacacatctgccaacatatgttttggaatttctgaccctctgactttcaaggcataacaagcattctccactttggccaaactttgtttcaaggtatacagcttcttagaaacctcgtaaggnccagtgttgncaatgaatgaaa

SEQ ID NO: 9164 - DNA, 383 bp, Homo sapiens
ccgggcaggtacaacttaaatacgtccatatatgaccaggttcttcttatgccaagagtgaactctgtgctgaatcagttaatgttctactaaataaaggaaattcacattcgctttcttgttaggttcatgcaaatattgaaaactcttggaatgaggaagaagtttggagaattgaaatgtatatctcctttggcataatgagccttggcttactttccctcctggcagtcacttctatcccttcagtgagcaatgctttaaactggagagaattcagttttattcaggtatgtggggttttgtttggtgaaggattgtgcaggataggatttccttgttaagaacaactgcattttaaatatgttccttattaaaagggt

SEQ ID NO: 9165 - DNA, 204 bp, Homo sapiens
tcgctcccctgctcctccttggtggctctctcagaggactccagagttgtatccccaggccgtcttgtttgttctgcactcctgctccccttaaatagctgctccctctgggaggttgggggtaggtgaggcacaaggctgtttggagacagggcaggtgaatgctccctggatctgttgctctttttccttccccgcgtacct

SEQ ID NO: 9166 - DNA, 511 bp, Homo sapiens
  misc_feature 410: n = A,T,C or G
aggtacattctggctcggatacagaatcactgctgcagggctcactatttggagatgcatttctttgagaggtagtgtcaactgctataggtgttagctcaccctcaccgaatgcatcacttataaacatgccttcatggattaaataagccacctctgtgtccagtgaattatcttttgcagcattcttctgttgtgaaatctcttccaattctctagtcctttggtttttgtcaagaactgagagaacaacactgtgaatgatatttaatgttgccttcactctctgtaggaaaattgtaaacttagagaaaatatccttgagcagatcaaaccactggggaaaattcaacattctcatctgatctgcaagcttcacaacaacatctgtgtctatttcttctgtttgngaaactttattaatcacacactgtttaatgatattctttgctgtaataaccattttttcaccatagatttctaaaaaattaagctttctttggtttaaaag

SEQ ID NO: 9167 - DNA, 356 bp, Homo sapiens
ccgcggtggcggccgcccgggcaggtacgcgggacattgtctttctcaaagtaacggattcaggaggagtccttttctgagtagagtccacagaagaggtattctattgatgggcttaggtcacgagcaaggatttggagccccttgtttaaaatgcaaagaaaaatgtgaaggattcgaactgcacttctggagaaaaatatgtcgtaactgcaagtgtggccaagaagagcatgatgtcctcttgagcaatgaagaggatcgaaaagtgggaaaactttttgaagacaccaagtataccactctgattgcaaaactaaagtcagatggaattcccatgtataaacgcaatgtta

SEQ ID NO: 9168 - DNA, 591 bp, Homo sapiens
ccgcggtggcccggccgcccgggcaggtacagagacagaggaaggggggctccaaagccaagagagggaaccccacctgccacagataccagctaggtatatatacagaggctggaggaggcagtgtctgatttgcacaggctcaggggattggtttgactaggcatgtcattcacgtagcccgcaggaaaagctggctctcccaccctagccttttaatatgcaaatgcagggcaccatgatcttctacacaggtggggatacttcggggtgtccatgtatccaggaatgtggggaaagggcaagaagtcacaggaatcgccatgtttgggtggacccactttctaatggctggcatttggatatcgggtaactggcctggctttaagagctggagctttacaagaaacttttcagacgtgctttaaaaaacaaaaacttcctaaggaccccttttcctctctatctgcctaaaataatttatcaataactcctacaacatttccccctgtggagatgcccgcactaactgctgttagaggtttgggcgacgatgtctttctggctacttcctgctggaaaggggcgttc

SEQ ID NO: 9169 - DNA, 326 bp, Homo sapiens
  misc_feature 15: n = A,T,C or G
ccgcggtggccggcncgcccgggcaggtacgacgggagaaaaatgcatgaatgtcatcagtgccaaaaagccttcaccacgagcgcgtccctcacacggcacaggagaatccacaccggggagaagccttacgagtgcagcgactgcgggaaagccttcaacgacccttcagcccttaggagccacgcaagaactcacctcaaagagaagccctttgactgcagtcagtgtggaaatgcattccggaccctctcggccctgaaaatccacatgcgagttcacactggcgagaggccttacaagtgtgatcagtgcgggaaggctta

SEQ ID NO: 9170 - DNA, 457 bp, Homo sapiens
aggtacatgactgtgtgtgtatgtgtgtgtgtgtataattctttgttgttttggtaaaatcagaggagtgggttataagtgctaatttccttgggaaattaatgaactagggcaagtatagcatcccatgcataaaattagcacagggacatcagaattgtatgggtcttcttttttctttttttctttttttttgagatggagtctcgctctgttgccaggtttgagtgcagtggcgcaatctcagctcagtgcaacctccgcctcccaggtttaaccgattcccctgccttagcctttcgagtagctgggactacaggtgcacgccaccactcccagctaaatttttgtattttagtagagatggggtttcgcctgtatgggtcttttcttggaatgggggttacacccccatttttgttatgcaagaaaagcatttggaaaaaaaatgtaacat

SEQ ID NO: 9171 - DNA, 504 bp, Homo sapiens
  misc_feature 98: n = A,T,C or G
gggcgaggcaatcgactctgggcgaattttagctccaccgccgtggcggccgcccgggcatgttacaggcacgtgtcaccatgcctggataattcttngatttttttggtagagatggggtttcaccatgttggccaggctggtctcattaaactccgacctcaggtgatccacctgccttggcctcccaaagtcctgggattataggcgtgagccaccacatgcggcaaccccacagttttaacagattgtttatactttgatttggttttgcagatgatatgcatactaaggctttaaaaaattatctaaatgtttaataattttttgtttttgtgattgggaattatttacttctgggagtcatgatcctaaagaaacagtaaattggctgtttagagtgggaaaaaaaaacttcaggtaactttgttacttaaatcctgtctcttaattcataggttaagaccttaattttgcctctctcggtttatgacagtaccttcg

SEQ ID NO: 9172 - DNA, 376 bp, Homo sapiens
  misc_feature 340, 341, 342, 348, 357: n = A,T,C or G
aggtaccacgacatctcgggagatacttcaggggattaccggaagattctgctgaagatctgtggtggcaatgactgaacagtgactggtgactcacttctgcccacctgccggcaacaccagtgccaggaaagggccaaaagaatgtctgtttctaacaaatccacaaatagccccgagattcaccgtcctagagcttaggcctgtcttccacccctcctgacccgtatagtgtgccacaggacctgggtcggtctagaactctctcaggatgccttttctaccccatccctcacagcctcttgctgctaaaataggatgttttcatttttttccaaannnaaaaanaaaaaaaanaaaagggtaccctggcccg

SEQ ID NO: 9173 - DNA, 560 bp, Homo sapiens
aggtaccatatagatcaaaagctttgtaaccacgggaaaaaataaactcttccattccttaaagaatagaatagtttgtccctctcatgggaattgggctgtatgtatattggtcttcctccttagaattttagagatacaagagtttctacctagaactttttaatggacacaatttttcaccaacctttcaagatgcctgatgtagagcctattggggaaaagaaactttcaaaaactcaggaatgttttgctagagagccttacctgcttagatattatccttggaatccttatatgtttgtctctacaatgtaatgtttagaatggttcccctagctttttaagcttttaaacccatttcaaaagatttcctgccccccaatatccccaacagtccaaaaacttgaaatctgccgttggttggggaaagcccagcaggggccttttgggaaaaggaacccatgggcttggggtttaaaaaaggggttgggcttggaaagccccctttccggggaaaaaattttttttctcccaggtttttttttttttataagggg

SEQ ID NO: 9174 - DNA, 450 bp, Homo sapiens
ccggtctggtacctcaacatatttgccttgatagcttaacttagcttttctaatataccttaatagagttaagttatgtaatactcaattctgatttggaaaagtctaacttttcttttagctctggttaggatgagtgtaaggtgggatgagtggggttttgtttctgcatgtgtccacactaattttaaacacacatctgaacaatagcttttcattatctaagttgaatatcttagatactgaatattactaaaatttactaacaatattaatactaaataataccatcttatacttatgcaaaatgttacatttgcagagctccttctcacacgtttgaccattacaactttctaagacaggctggacaaggaaaactggctctggctttcagaggagaagaggtgtctaagtaacctgcggcttttctgctgagcagctgtacct

SEQ ID NO: 9175 - DNA, 478 bp, Homo sapiens
aggtactgttaacttctccccctcctggatctttgttttactaaatcagccctaaccctttctcttcagtctctttctcttgactttcccctagatcttgcccctagaccatcactcagctggttcctcttcattgcctccatcttagttcaaatgtttcttctttggacagtttggagttttgctccccctcttccctgccattctatagtaggttttttttttcttaaaatagtgcatatcatctgggtgcgggggctcatgcctataatcccagcactttgggaggctgagggggtgtatcacgaggttaggagataaagaccatcctggccaacatggtaaaaccctgtctctactaaaaatccaaaaaaattaccggggaaccttcccgggcggccgctttagaacgggggtccccccggctcgggaaattttataaggttttttacccccgcccccggggggggccccgccc

SEQ ID NO: 9176 - DNA, 341 bp, Homo sapiens
ccgggcaggtacagtcgtttgagctccatggaaaacagtggggaaatgtttcagtggcatttactgtgagtatttcttgagtttggcaagtccactacagcatgctcattggtggtcgagggcaggagaaaggggaggtcttggtgcattgctctcaagggagggcttttgcttctagtgccttccccaagacctcatggaccgttgacttgtttcatcatgtggagcttcatcttatgcaagctgaagaaacagtatgccggtttcattgctgcaagataattgaccccttgtgacttcatccagaaggtagcagcaacatgtgctcttagtgaaagatc

SEQ ID NO: 9177 - DNA, 522 bp, Homo sapiens
aaaaatctggatcagttggagcacccgtgcgtgatatatctgtgtttacgtgattgagtggacatgatcactctggataccacaatgaatgaaatttaaatggactaatccaatgaatgaaatataaaatgaaaataaaatgagaaatgtaagatacaggaaaagaatacttatttttgaaatcacagtgtggtggtattggctgataaaacctatctaatagtatcaataggttctttcacattctccaagggtcatagctgtacattaactgaggctaaattgaaaattatggtagactccagatttagaattgcactatctcacttatcatataaataactaaaccatattctaacatataatttttatttaatcatttatattacaaataatatagaaatattcagaacaaaagtggcatgttatacacaaatctaacctgtattgcacaatttatacaatatatgcaattctactctacaatttactttttctttcttttaccatttaccattctgg

SEQ ID NO: 9178 - DNA, 432 bp, Homo sapiens
aggtactttttttttcttttcttttcttttttttgatacagagtcttagtcacccagactagaggtcagtggcaggatctcagctcactgcaacctctgcctcctgggctcaagagaccagcccacctccgcctccaagtagctgggactacaggcgtgcgccaccatgcccggctacttcttgtattttttgtagagacggatcgtcaccatatttcttaggctggcctttaacttctgagctcaagagatgcactcccctcagcctcccaaagtgctgggattacaggcggccaggcctattttcaattttcaagtattgcatatcattgtgaataacattgtaaatcctttttatattaagtaacaggtagttaatccatttctaatgaataattttaaggttttaatccttccaagtgtacctgcccg

SEQ ID NO: 9179 - DNA, 479 bp, Homo sapiens
aggtactagtcagtatgctgtagtattaatcagtaggtcaagttcagtgaagtaaaggagaattgaattcttgaagttcacatttaggcaaaaatttggcgttttaggaggtgagtataagacatgatctttatagaaaacgctgatgataaaaacagcgctctctgttaggtgcctttatgcttgactccattgtcatcttttcttaagaaactaagctcaggactgggtgcaatggctcatgtctgtaatcccagcactttgggaggctgaggctataggatcagttgagctcaggagttcaagatcagcctgggcaacatagctagacctcgtctctactaaaaaacaaacaaacaaaaaacaaaaaaaaacccccaaaaaaaccaacaaaccagcttggctgggtgggtgcgtgccttgtggtcccagctgctcaagaagctgaagcgggaggatagcttgagccagggagatca

SEQ ID NO: 9180 - DNA, 465 bp, Homo sapiens
ccgggcaggacgcggggggctctcaaaaaatggtggccattattattatttgctcatggaccagtatttcaatgatggaaatactttagtgcctctaaaaatcagctctagtgttaacacacttaaggaaacccagtcaggtcacctctgactctgtaaagcattataaagaaaataatgaactcataagtgagttcttgtgagtcattcaggttttaagaagccactgctttgattttgaaaacagacaaaaaaatctcagaatctacttggactagggttcatttattctgcctgtttcaagtcagagcaaatactcctggaatgaccctctcctgtttcctgagtttgagccgatcctatttggcactgcaaacagggagaagtggatgtttgaggacagatgggaggtgcaaagtggagacaagtattgggcccaccttccactatgagactagcagggcc

SEQ ID NO: 9181 - DNA, 477 bp, Homo sapiens
gaggagagatggactgagttttggcgataggtcgcacaccttaccaacagcaggcggcgagggctccccacgctgctcgtttccagaggtgcctcgtattattgagaaggcgtgcagtgaatgaaaatgtgtccacacagctcctgctctgcctgtgacattgggttgctgtatattagctgggatagtatatttcaaattgctttctcaattgcaaagtatggtagaaataaatattcgctttaatttagtaactagaacttagaaaagttcctcctgtttcctgattgccaagtcgggatgagaaatagatttcataattatgatacaacttgatatcttgagataaatgtttaactttgaaagttaaacatggtattttttaaactttatcattttgtgttcattttgcacatctctatacctccaattttgaaaagaatttcttccaaagttatctttatgttatctttactc

SEQ ID NO: 9182 - DNA, 473 bp, Homo sapiens
ccgggcaggtactcatcgccgttctttttaaaaatgtagacaaattatatttttcccctcaactttttttctccagaggtgtttatttcctttaactttcctcctttggaaccccgttctcttatttcttaacaactgatctagattgctcattcaaaccagggctgaaaatcaatcagaaaaagcagttctgtttcccttgaagaaaaggcttactttttaaactatgcaaaggtgaaagggggaatatttgcagtccattcgtggtaaatcaattataaaaatagctagtatttattgagcaactactctgtcagttacttgttctacatttcatagaacttaaagttctacaaaatagaatttaaaatagaacttggttggggtgtcgtggctcaccattgtaatcccagcacttttggaggccaaggccggccggatcacaaggtcaggaggtttgagaccagcctgac

SEQ ID NO: 9183 - DNA, 480 bp, Homo sapiens
  misc_feature 462: n = A,T,C or G
aggtacatgtctgttggtatactttttaagtatctgtttgcaatttctagaagtggaacttctattcaaagggctgtatacctaattttgacgtataatgcttaaatatccttcaaaaaggttgcatccagttactttctaactaccatcacctaagcagacctgtttccctcatgctctcaccaataccagtattaaagcttttatagtaaaataaagttcacctttaaacaccacctcaattgccaaacgcagctcaaattgtccagtgcttttttttccctcatgctgttcaccaatccaacagagccctggctaggtgacccatggggaaaagcatgcttttcacagggattcgctctactgttccttcttgcctctttaacacaaacacgtgcatgtgctcaaggattcacgaacaaaaacttactaagatatgaagcaccttttatcaactatctncaagagaaggctaatcat

SEQ ID NO: 9184 - DNA, 768 bp, Homo sapiens
  misc_feature 692: n = A,T,C or G
aggtacagattaggatcaaacacagaacatgttcagatcatacatttatatctggtgtcagaatccatctgcagatatggctgttagctccctggaggtgaacttgaaaggaaaaacatgtaaattacatcatgctaattgaataggagaaaacacagtggcagagcctttcttgatacttagccctaagtaaaattcaaaaacagacgttgcttcaggagctgctgaggtcgttcagggctattagaatggtgcctccgccacacttaatccattctgccgaattcaagaatatttatttccctgaaatgaactcacaagttgccctagaggaaaacttggagaactagagctgctcactgtgcagatgccatcctgatgaccccagagatgtttacatcagtgaaacctctgggaatagtgagccccctggctagttttcaaaggacttggggaagagggtagagctaaatcctgtgttctcaacacaggaaataatataacccccattgggatgaaaattcattcttgggtggtgacaaaatcttagacgttataatggtttgtggtctctaaggggccacagcattaaaatctcatggtgggtggagttgggctattaatttctcagaatgctcacggggcatgtgataatgaaaaagagactgagaaacgctgatctaaatgccagngacatccttgggttattcgtatacctcatgctttagattcgcttttgggtcaggtgcctggccctagaaactctgg

SEQ ID NO: 9185 - DNA, 519 bp, Homo sapiens
  misc_feature 25, 33, 34: n = A,T,C or G
gggcgaataagagctacgtactganggcgcaannggagctccaccgggggggggcgaggtacccagccttttttctattttgttcttgtcttgtttattttacattttatagcttttcatgtttctgaaaccacttaccacatttaggccaaaaggcgaaataataaaaaataaaaccaacctcacctaaaaaaaagtttaaggattaagtatttccatataccagtgttgaacagatttgaacaatatatttgattttatgctctccagttgctaaagtgaggaaaagaaacagaaccatattgtttttatgtgctgacaccccgaaccatgttcatgtaaacttgggccaaaacccaacctgtttccggaaaactaagctttgaacaaaaaatttattcggggggccttttttttaaaaaaaacctttggaaaaaacaccccttttttttaaaaaaaatccccggcccccaatttggaggggagaataaaatttcttgggggggcaaaaaaatttaa

SEQ ID NO: 9186 - DNA, 507 bp, Homo sapiens
cggacatggcttatcgacttcgggcgaattgtagctccaccgccgtggcggcccgcccggccgttccaatttggattttttcataataggtgataacagactaaaggcaggttgactgtgaggggtggcaggaagcttttgggtgatagatggtgagtggtctgtagtgctggttattccatatagacttttgccaaagctcatggaagtgtttgtttaaaatgggtaaatttattacatatgttatacttcactagtgaaatctttaaaaactatgctggtggcttcctgtcatcttctgaataaaccctgattcttctttttcaaggtaaacaagaacttctggtgtgccttccacctttcccatacctccctccatcctcacctctaacctctccacttcaaattgccatctgcacctcagttgcgagctgccccctactcgtgtgctcttgcctctgggtctaaagtctgcagcgcactcacccacccatcctcccttctgca

SEQ ID NO: 9187 - DNA, 483 bp, Homo sapiens
aggtactgcgatcctgcaacaacaggagaatgtctgaaggacagtcccacacactggaaagctgggctatgggtggagatgcacagagattcgggtgctgatgaagagagggcacagaaacagtgaggacgattcacacatgcatgcacacttacgctcccccttcatttgagggtttacacacacctacctcacaggtctttgctaggaactgtgggggtgcaaagaagagcctgccctaaaaggaatcaataatctatttgtggacacggtctatcgagcggccgcccgggcaggtactatgcctagctaattttttttattttttgtagcgatgcattctcactatgttgcccaggctggtcttgaactcctggcctaaagtgatcctcccgtctttaccttcaaagggttgggattacaggcctgaaccactgcacccagtcccattttacttaaatatcaaattcaatcttcagtgtt

SEQ ID NO: 9188 - DNA, 436 bp, Homo sapiens
atgtactatttgaaaatcattaggtttgggcatatatggatgaacaaaacaagtcccctgccctcttagatattatagatcattgagggaagaaacaaagtaaatggcacttttcacagtaaggatcgatgaaggaaaagaagagcgtggatgagaagatggcaagggaaccaaaattagaacatggaatttgggggatgctgccagggaagcttagctacgtggaagtagctaatggtgaagctcattctgtaagaaaaccatatgtgaaagcacagataatgagggggaacaagacttggcctccaagtaagaaataatactggaaaataattaccaagaatacatagatgagggatggagttagagaggtaggcaaggaccaaacattttatagcacggggaccttagagggtctttgttaagaacctgtctt

SEQ ID NO: 9189 - DNA, 361 bp, Homo sapiens
  misc_feature 361: n = A,T,C or G
ccgggcaggtaccctggaagcaacatctacatctttttcagcaatctagatgctggggacacaaggtccaccttccaggaatatggccatgacaccagaaatcacaaacatgatgagaatggaatgactggggaagaagtgccagatgcttcacttgtaaatgaagacccagcctctggggatgcagataccacctccctgaagaagctgaatatctgcagataagtggagttcaccaatgatgaggagcgggatggagaaaggaggtagggagagtcatccaaggaacatgagcaacatgttaaaagaattgaaccagagtccggtgaatatcagcactgggaccagttagcagaggaan

SEQ ID NO: 9190 - DNA, 787 bp, Homo sapiens
  misc_feature 615, 616: n = A,T,C or G
aggacccagccttttttctattttgttcttgtcttgtatattttacatttttttgcttttcatgtttctgaaaccacttaccacatttaggccaaaaggcaaaataataaaaaataaaaccaacctcacctaaaaaaaagttagattaagtatttccatataccagtgttgaacagatttgaacaatatatttgattttatgctctccagttgctaaagtgaggaaaagaaacagaattatattgttttcatgtgctgacagccggaagcatgtaaacatctgcagaaaccaaacgtttcctggaactaagcttgagcagaaatctatcacgtggacctttgtttaaagaaccttgtgaaaaaccacagttatgtaaaagatccaggagcgcagttcatgtggattagattctctaggaggcagagagtctaaggagatcaaagaaaacaacgacttgggaagtgcatgtgctgagcgctggagccaaactagcagaaaggagttttagaggcactgaatccaggtctctggtttttggggactgtaataaaagaaagagttgaggcctggtgcagtggctcatacctttggtcccattactttgggaggcttanngctgaagatggtttgaggcttgaagttcaaaacagcctgggcacaaaacaagacccttttctaaaaaaaataaaaaaaatgaagtgatgggtggcctgaatcctaactactcagaagcttaggcatagggtcaggagcaaagccggattaaggttcagaactttgcggtcc

SEQ ID NO: 9191 - DNA, 555 bp, Homo sapiens
ccgggcaggtactaccttattgaattcttacaactattattgttccatattacaaaggaggaaaccaaagtctggagtggtcaagtaacttgcccaagcccatatagctggtaaatgctggtgttataataaccaacccaagcctactggctcttgaccactttgtttctactgtgtccattatcatgaaacccaggtttcttccagctctcctttagagtagccccggacaaaaaaaaagaatggtttcttgaaaatagagaaaccctacgttctttcttctttctatttacgggggggggccccccagaaaaaccttttttgattggcctttttttggggatagaaaaacggggaaattttaatctcccccggaaaaggatgtaatccccataaatatctcttggggggggaaaccccccccaaaaggggcccccttctttttgctgaattcttggggatggccccccaaatatgaaattatgtccttgggctttttttgttgttaaatgctttaaacctgggtttataccattgcccaatttagaagttact

SEQ ID NO: 9192 - DNA, 331 bp, Homo sapiens
aggtactttttttttttttttttttttggctatattactttattgaacaagtatttgctgaatgcctactgtgtgccagatgcaatgctaagcactaggtgaacagacactggtccccaccctccaaacaagtaagcatacatttatcactgcaacttgtaattatttgagggaaagtaaatcaaggtgctatgagagacaaaaagagcttatgttagttagacttactgaagaggaaaggcaactttgaaaagggacacaacccaagtagagaacaggtggccaggtgtggtggctcacgcctgtaatcccagcactttgggaggctgag

SEQ ID NO: 9193 - DNA, 455 bp, Homo sapiens
ccgggcaggtactctcgaatgctgtttacacagtgttttatacttgcaaaggactttacggaatgttatggcagtcttagagaaaggtggagaagtcctgacaggggtgtaggtgtatgtttagaactgcatgactacctgtatagtgtttgtcttttggattatgaatatagtaagcattttccatgtttcatagattcacatatttggtcttgtttaccttcacaacttcaaagtgaacctgctatgggagcactatcttccatgcataggcaaacttgtccaaagtcactcagcatcctcgatccatggaattataaaatgtgatggttatccagttcagctccccactggctatatgaatccctgacagtgtcctcctttagcttcacctcaaagctttcctgccatgaggaaagcttttagacagcatcagtcttttaaaaacaactttt

SEQ ID NO: 9194 - DNA, 466 bp, Homo sapiens
aggtacggggcagtcctgcacagtctcactctgacaacccaagttggaaatgctgcaaaaccaaggcccaggacagtgtgtggattatcaccaagagacctcagcctgcaagggccttcaggtcacacaggcctgtgcacagcatcctctggagtcagcctctgcatggacataaggagcactcaaaatacttgctcgtggcagccttgactgctgtgaatccaacacaccacataacagctgcctccaccttgccttccacaggggagtccgagtatttggggaggtcacagcctcttcaggctcaacatccgtctctttcccaactccacacacacccagggggttgtagcaagtgtgcccacctgcatccttcgtggagtgagcgtgcaaagggcaaaaggggtggtctggtcagtggaaaatgccacgggcctttttcttctttcttctggataacagcccg

SEQ ID NO: 9195 - DNA, 335 bp, Homo sapiens
ccgggcaggtacttttttttttttttttttgagatggagttttgctcttgttgcctaggctggagtgcaatggcgaatcccggctcacggcaacctccgccttccaggttcaagcaattctcctgtttcagcctcccaagtaactgggactacagcaagtgaaattactttacttttaaagagaaaaatatctattagtagcaagacagtttattggggatttgagcttattattgaaattaacaagtatgtaatgctcacatgatactctcaaatgaacttaaaattgaatggaggcagacaagttcaaaatagttgagaaaatgatcgtacct

SEQ ID NO: 9196 - DNA, 408 bp, Homo sapiens
ccgggcaggtacttaagtttttttttttttttcttttttttgagacagggtctcgctgcactccagcttggacgacagagtgagaccccgtctcaaaaaaaaaaaaaaaaaaactaaaaaactgagcaatggctgactaggacctttataagacaaattaggcctcagaagttttctgggggccgcagcttgccttccttcccatcctccatgtctgtgacttccactagaggccaattcagaatgtctgggggtggggctcatttaaaaagtatttccaggccgggtgcggtgtctcatgcctgtaatcccagcactttgggaggcccaggtgggcagatcacttgaggtcaggagttcgagaccagccatggccaacatgggaaaatcccttttcacaaaaaaaat

SEQ ID NO: 9197 - DNA, 434 bp, Homo sapiens
aggtaccagctctggctgttgcccccatgcttatattcaaactcttttgcttaactacaaaagcccttggttatctagacctatctatggcttcgaccgaactcattgttttctcacttttctccagtaagatgatatattgctatctttgcaacactttcctttcagctccacaaacatgtgtttctgaatggtggagtgaattagcaagtaatttcacattccattttctcagaaggagatggagctaggaaaaataacaaaacctcatctaataaagatgacgctactcttccagaggggcaaagaggcaacctggatggcaaatgtagggtgttttttattgcctctcagctacattataaatctcagctaacaaaataagtgccctttcatcaatatggggttggactgtggctcaaaaaaaaagcctg

SEQ ID NO: 9198 - DNA, 473 bp, Homo sapiens
aggtacgcgggatttttttgattgttgtttggcaagaaatattaatagtaacttttgtgtgtttgattattttcggggccggagcagcatctgtccagcacctttgggatttggtggttattgatttaagcacagggcttctaagatcagaacttggttcttcttcccacaagtgctctgttctggaaatgtgctaatgacacacattgaattatgtcagaggtttgtggccttaagttgtcgagggaggtgttttcatttggcgagaatctgtaatttgtggaacaataggattaagttctaaaggaaataggcccgatgaatctgcatagatggctagcttcgcaaagtaaagcacatagcccgtgaactgggggcaaactacacgttttggataatgtgagcctaaaaagaaaaaccctaaaacttttaaataaatttctaaaaaccaaaacctttagtatatggaattg

SEQ ID NO: 9199 - DNA, 466 bp, Homo sapiens
ccgggcaggtacagaatacctggacaaagacaaaggtcagcctctagaatttgccagaaatgggccagcaaagtgcagcatcttaataactgagtgatactggcaggaagatttctccaaagactaactatggtgtttgaaatacgcctgtaaattatttgacactcatcccttcaaaaggtggggactaatttctgtccctttgagtgtagactacccttaatgacttgattctaacaaataaattgtgacagaaatcatggtttatgatttcagggactacatcctaaaaagcatgtcttactctctcttcaatcactcactgtaggggaagctagatgccatgtcatgaggacactcaggcagtcctatggggacatatcgatggcaaagagctgggtcttattgacaatagccagcattagcttttcaaccacatgagtgagccacccttgaagcagtacct

SEQ ID NO: 9200 - DNA, 544 bp, Homo sapiens
  misc_feature 32: n = A,T,C or G
ggcgactgagctactcgaatatcgggcgaatngtagctccaccgcgctggcggccgcccgggcagttactattaaatttattgagaggtaatttatgcaccggcaggaagttcaaggggacagaaggggcttgctccactctggagccctatctcctctcacctccttccttctagtttgacatgcgatcttgtctctctcttttataaagtgcttccaggcccttttgattaggatgctgtcctaaatccttcctaaagagaggttttggagccaccaacactgcttcactgtggaataaactttccttattaagattcttcattcactcataatcatctcctttttcctcactgctcattcatttatggagatagcacccatatcatagctacttggtcaaatcatggtgatactccccacttaggagaggaagatgactaggttatagctcttgcctttaggaaattaaaaaccctgtggtgtaatctacattacacagtggaatatggcatatatcatgaaaaaatcctatgcagtttct

SEQ ID NO: 9201 - DNA, 477 bp, Homo sapiens
aggtacatctgaattacatagatgtgctaagatggtatgtgtcggtgtgtattctttggttgcaagcaccaggcatgagttttggtgaatttaatcaagagagtaattcgttacaagaacttggggtttctgtgcaacccaagaaaagtctgaaaataaccaaatttagaaaatgtaaggaatcagggggtttcaagactctagatagcaagaagtggaaaatcctgtctccagggaacctcctcaggggagaatcagctccagctggtttatatccaagtgccattctccccaacctccaggagtgagagtttctttagtatgtcttggatcctatgcccactttgtgaccagggcaagagggcaccttgattgacagccccacccagaccacatgcaaaaggagggggtggcttccttgggaattaaggtgatactgcacacagaagaaaatggatgctgagtgagcccagacaa

SEQ ID NO: 9202 - DNA, 514 bp, Homo sapiens
aggtacacaatctcatttttgttctctcatatcgatccccaaagaggctggtatctatattcccattggccagatgaagaagctgcgggccagcaagcatgttacggctggaataattagctcagcaatcactgtttcgaagaattgcatcaagggcacttttgtatcatgtatattgaaggctaccttcttttggaaaggtggggaccagtatgaaggcaaccaaagccctctatgctggagtttacaatttgttccaaacacatagaaatttataaatccccaaaagcggttgggccccctaaattcccctgatttgatcactacacatttctatgaatgtaacaaaatatcaccatgtttcccataaaggtgtaaaaaaattgtggatcaagaaaaaaatttaacttaaaaagacctttatgcaagtgaaggctgaaattttgttatgctcctgaaaggggggaaacatgagaaaggaccttgggacaaaaggctaaaaaatggtggaaac

SEQ ID NO: 9203 - DNA, 549 bp, Homo sapiens
  misc_feature 28, 55, 108: n = A,T,C or G
gggcaccgactcactcgaatcggagacngtagcggcaaaccccggcggccgaggnacagagtaagcaggcgggggtgaaaccaaagggatcgaacccgggaccaaaangacaggagggagaggggcggaggaggacgggggagggcctgcaaaaacacaggaaaaaaggagcccggaaggcaccggagggaaaaaccgtaaagggaaggagagggaagagtcagcacaggaaaagggaccggggcagacagaaaaggggcccgcagggaacaacaagcgggcagcgccccgggaaaagaaataaagaccaacagggggggggaagggaaaagccaaaagccaccgggagagaagaaaaaggaaaaccccaaaaaacggcaaagggggggggaaggagaaaaggcaaaaggggaggggggccgggggcacaaaaaagaaagggcccgagagggggaaaaggaaagggccgaaaggaaaaagggaaggaggggcgggcccaagaaaatcaaaaaacaaaccggggggaaaaccggcaaggggagggaaaaa

SEQ ID NO: 9204 - DNA, 410 bp, Homo sapiens
ccgggcaggtacctcctagccatccaattatagaggctttccctaggatactgcttgcccttgcagggaatgagatctacacagcccatacaccttaagagtccagtattgatgtcggtgttttcatcattcctcaaagccatttctggaccattcttcctctagccccttataaaaatgcttgttcacctgagctcaaatcaacactatcaccttttaccaactatttctcaactgtctacctcttcagtcacttttccctccttcattaagactttacacccatatcagtcctcctcaccacctcaaagtttgccatttaacagcttgatctttctcttcttgacctcttatcaccagcaggtcttttccttttatccttggttagggaattttcctgccaaataggg

SEQ ID NO: 9205 - DNA, 503 bp, Homo sapiens
  misc_feature 503: n = A,T,C or G
aggtactcctttacattcttaaaaatcattaaggaccccaaagaatgtttgtttacaagggttacttacattgataattaccacatttgaaatgaaaactgagaaacttagtattaattcatttaaaagtaagaaaacaattacttatctacataaatgaaaaagctattttccaaaacaaaaaatgaaaatttagtaagatgaatagccttgctttatgtttatacatctcttaatgtttggcttaatagaaaactggtggatcttaacattgcctttggatttaattctggtggaaatggggtggtcctaactggaagggtatgaagaaaaaggggcatttaccaccgacaccgtttgggaaaaaggaaggacttaaatgggtttttttcaaataactggggacattttttttttggttcttcccccaaaacttaacaaggggggggttttttaaaggggtaaacttttaccataacctaaggccattctaagggactttn

SEQ ID NO: 9206 - DNA, 962 bp, Homo sapiens
  misc_feature 149, 150, 174, 181, 182, 194, 195, 210, 211, 223, 224, 240,241, 282, 304, 305, 313, 314, 331, 332, 340, 341, 373, 374,396, 397, 398, 411, 412, 435, 437, 438, 445, 446, 470, 471,472, 478, 479, 485, 488, 489, 502, 503, 511, 512, 513: n = A,T,C or G
  misc_feature 526, 527, 535, 541, 552, 553, 559, 560, 561, 577, 578, 582,588, 591, 595, 596, 601, 604, 606, 607, 631, 635, 647, 648,654, 667, 668, 679, 680, 700, 730, 731, 798, 799, 854, 962: n = A,T,C or G
aggtacagtctaactctagaagacagggctgggggctgcggaagtgggactctgttccctactacactggtcaggctggcaatggcgccttatgctacatgttggttctctgcagtatgtgactaatcaggtcctacagcaaacccagnnggaaatcggtttaacttccccatngggacanncccaagaatcanntctgaatgaggttannactaatatccannaggagcagaccataanntttgttctccaattcccccacctttagtgtggcaaccactncaaatactcacacatactgtcnncagcagcnnaggaagtaacccacacnnaggcaggnnagtggtttccaacctcccaagaaacagtcttnntttgtgtgagaaatcacacagnnnacgttctcaagcnnctgccactttgtgctttctgagngnntgtctgnngtgaagccccacttccagaatccnnncactgnnctccanatnngcttccttaatgnncgctcagnnnaaagtctcaaacnnaggcattntctgcnctcaaacaatnnctgaannncccaaaatggaagagnngagnaatagnganatgnngcacnctnannaagttttcttcaagaacttttccncaanagaaaagcatgnngacttntctgactttacanncaggatctagnnttgaaaagaaccctggtganacattttccagcatccaaagaaatcctaannaccttgttaacttgttaaagaaaagaaaatttttgaaaagaatgaggtcttttatatttctagcaanncaaaatacaagctgcttcccatgagttggacaattccaaaaagccctttgagtgntctatcccagagccttacaccttaggggtaagttaagagttctagggaagattactcacttggctccagttgtgaaatactcaagaagggagattgatatacagcccn

SEQ ID NO: 9207 - DNA, 284 bp, Homo sapiens
ttatggtggtcgctagcattctcattttcaagaccactctgttcctttcttagaccatgtttctcatcttaagcagtcatgcccgagctggagacaggaaaccagacagcagtctgccctgataagggacagcattgtctgaaggcggggaatagccctgcttttacccccaactcagctctctttgcttgaaatttagtagtcatagaagaggcacaatgctgttgacagtttctgaaccaaaactaggattcatttcttccaaagcaaaaaaatagtgtcct

SEQ ID NO: 9208 - DNA, 475 bp, Homo sapiens
ccgggcaggtacatacattctatgacagactctaaaagttctcttcatgacaggcatcatttgtaacattagacaattgtatgatcatgcatattttacatgtttaatgcagtatctgttatggcaagtagcaggagtattgtattttgtttgaaatgtcatatttattgttgttgaggacgacaacatgttagatatttttaagagagatacgttttgaaatatgcacgattgaattttttcgtgtatatgatttgtttttcctgctcagtcaccgagttaatggccacatggacataaagatcagcttgatgtaagagggttattgaaggttttctattaaaatgttttttttataacgtgtctgcttttaagttgaattgcttgcaaaataaggcttttttttaaaaaaagatttaaataaaaaaatttggatatcttcatattaggggattttccattgaaattatttatt

SEQ ID NO: 9209 - DNA, 518 bp, Homo sapiens
gggggtggtaggagcactacgctgcatattgcacttttaaaaggtaggtgaccacttgacacaatgaaacacagtagtttgtgaattagggctcttgacagtaactgattggtattgccttgtcacaagactacacatgtgccttgcctagacaccaaaactaattagagtagtctattgtcccatggaaacctgaagacttcaagaattacttattgtcctatatgttacttttttgaggggagtaggagatttagggaggaaaatgttactatgctggggggcacattgttttatcattcactcagaacagattactaggagaatatgacttaactcttaagtggaatgttagatgagacaataccactagccaatttctgaaggcaaaacaaactttttacaacagtaataatggtaataataattactagcatacctgaatgcctaccggaaagcttattctactaagcaattgcctgcattatctttttttactggcttagaaattctggcag

SEQ ID NO: 9210 - DNA, 333 bp, Homo sapiens
ccgggcaggtactattacaggattttttgagatttataatagggatagcacttagcctattctgggttagtcttaagaaagcatatagaaacacagtgaaacacttttgagtcaagatttcagcatcatgggtttctacgtagtgtgattctcagtggtgtcttattttaaaaaggatacggctgggtgcagtggctcatgcttgtgataccaacacattggaaggctgaggtgggaggattgcttgagcctaggagtttgagggagctatgatcctgccattgcattccagcctggtcaacagagtgagatcctgtctctatttggaagaaa

SEQ ID NO: 9211 - DNA, 464 bp, Homo sapiens
ccgggggccattgagactgccatggaagacttgaaaggtcacgtagctgagacttctggagagaccattcaaggcttctggctcttgacaaagatagaccactggaacaatgagaaggagagaattctactggtcacagacaagactctcttgatctgcaaatacgacttcatcatgctgagttgtgtgcagctgcagcggattcctctgagcgctgtctatcgcatctgcctgggcaagttcaccttccctgggatgtccctggacaagagacaaagagaaggccttaagatctactgggggaggtcggaagagcaacctttttttgtcccgctgggacccatggtccaatggaggttccctatgctacttttactgggcatcctatgaatacacccaggagaaatccttgaaattgcaaggtgtctgggttcatgtctaagcttgttccactatccagaatc

SEQ ID NO: 9212 - DNA, 397 bp, Homo sapiens
acgcacacaaaagaaaaaaacctgcttctctgtgtttcatgcatgacgcacacacaggactggtctaacaagtcctgatctctcaggccaggccgcctccttctcctcccccattatccatgtgcctctccaaggccctccactgggacagatcacactgagttttctctaatcctgagaagagactgagttacttacctggatccctgtgcaaccttgccaaagacacctcacctagccctaaaaggagaaagcagggctttagggagaggccgataaggaaacaaagataagagggaggggcagaaaaacagaggaaggtgttagactaaaggaaggggagaggccaaatgcctttctccttcctacaagaggagagagatcaggtacctgctcg

SEQ ID NO: 9213 - DNA, 423 bp, Homo sapiens
  misc_feature 320: n = A,T,C or G
ccgggcaggtactatcacctggctataagttctgagtttaaatcttaggtgcagaactttctagctctatggccttgggcagattgcctaacttcagtgaatctcagtttctcttggccaatgcagacagaccagctacacctaacctggcgtgaagtttaaattacatgggatgacaagaaagcatttagcacccgctctacacacagctacaaataaccaagcactgattattatggtccaacaaagtgggagaaaaaaagaacaaaatatggtttttaagagaaatctaccaaacgcttcagtaatctgaggaaatnttagcttgagtttgacagaaatctcaagaatgctcagagtcgtggcctctttctttagagggttccttgactcctgcaatgtgagcctcaccatcatgtacct

SEQ ID NO: 9214 - DNA, 435 bp, Homo sapiens
aggtacacacaggcattcacacccccaatacacacttcctccttctatctccctgtctgatttccactcatccattctcagctcctgtttgtctgaggccacatgcaactggatttgtcaagcccccttttcacaacttgttgtcacagtccattaccaaattgcatatagttatatattccactaattaggcttctaaaatatcattaacatgtctcttgatcattagcataacgtatgaggcgacgtcgttaggcacgactcgagtttgttaacgtggtaatgaaaggcacaaggcaggctctgcaggaaccaagaagcacagagaagtggggaatatccaagcaccaagatgctagccacaaaggcatagacagagacacagagagacaaaggcaagcacagagaggagatgcaaggcacgaggaaaaggca

SEQ ID NO: 9215 - DNA, 390 bp, Homo sapiens
aggtactccaagctctgagaccacctcttctgcaaagccttcctgattctgcaaagaacaggtaggcatttcatccttgggacctcacagcaattcaggacacatttgtgtcccagccctgcttggcttggctgtctccatgaatatacactttgcaacttctgcaccaggcatcataccaagcacacagtaggcactcctgtgttttttgaataagtgactatatcatgaccacatttcaaatgcggaatatatgagctactagaaaagacataagggtagattttacatctttattgtatcctagatatacaagtctattactgccttttcccatgttctgtcaacatagcataaagaatggggatttacctgttagaaattgaataa

SEQ ID NO: 9216 - DNA, 467 bp, Homo sapiens
  misc_feature 266: n = A,T,C or G
aggtacttgattgttctgaaattccttatgcatgattagagaaagagtaaatgacgtattttaggattgtgtttaacaaaagtgagatgctaattcttgaaaattaggcctctctatggggactgcacgtaatcacattaccctagatcttgagttagcgagagaatattctgtcaggtgattcactgaccttgcctataacttgaaaccaatagcaaatccagatgtagtttcactggcctttgaagtccagggcaaaaagacanagcgtgactccctgtctccccattgcatcctgattgtctccctgtccagggacagaataaatatcctcaagacattgactctttccacagtgaagaacttgaggttgggagctttggcctcatctctaatagggttcatgctgatctttctgatctctacaggagggaaggaagggtcttttctgctccccttcctctggg

SEQ ID NO: 9217 - DNA, 486 bp, Homo sapiens
ccgggcaggtacttagggtaagcattaacaatattattcaaaatgttatatagagttcaactgtatacaatagagcatttattaaagtgtgtccaaagcgcttataaataaagcatcttcgaggcaggcggctcacttgaggttaggaggaaagcagactggccaacatggtgaaaccccgtctctactgaaaatacaaaaaaattagccaggcgtcatggcgcacccgtagtcccagctactggggaggctgagacacgagaatcgcttgaacctgggagggggaggttgcagtgagccaagattgcaccactgcactccagcctgggtgacagagtgggactctgtctcaaaaaaagaaagaaagaaagagaaataacgcattttatgtaggaagtttggagaaataaaaaatgaagcaatttggccaggcacggtggctcacacctgtaatctagcacttttgggaggccagccggttggaat

SEQ ID NO: 9218 - DNA, 535 bp, Homo sapiens
  misc_feature 20: n = A,T,C or G
cggcgatcctgacgcatacngggcgttttgtagctccaccgccgtggcggccgcccgggcaggtacaaaatggtcctctgagaattttgttcctctttgtcattgcaaagagatgcattctagctggatgttttcatttatactcccaaattctaagactcttgtttctcctccagtgtttcacacagatggttagtgaaaaagtcctttctttccccccgaccaaataaacttgattttctgtctggtcctattcggttcagcttagcaagtaacagggcaaattttttttcttctttgggacttgaagtatggtgttttataattcactgagtgattacagagtgcccagaactttatgtaaattatttttgtttctcataactcatctgtgtagtagatattagtgttcccattacatagatgaggaaatagaagctcagcaacaaaaagtaattcatagctggtaacagaatttgaacctatgttttctggctttaaatctacaatcttttcactactcaaggtgctaagg

SEQ ID NO: 9219 - DNA, 437 bp, Homo sapiens
aggtacatagtatccatttatattatttctctatgtttcccatctttataccagactacatttcctagaaaatcctggacctctttaccactcagcaatgattctccaaacatcgtatataatataggacacagtcccaagctatgaaatctgcttaccctttctggcgttttaaagaattcagagagctccgttaatatcttctttcaagtattcatgttctacgaactgcagtaagacaatctacccaggaacccacaatataagcctccctaagtttttctccctcttttaatttttaaaataggattttttactattattatcgtagagacggagtctcactatcttgccgcgtggtctcaaactcctgagctcaagtaatcctcctaccttggtctcccaaagtgctgggattataggtatgtacctgcccg

SEQ ID NO: 9220 - DNA, 475 bp, Homo sapiens
aggtacctgggattacaggtgcatgccaccacacctggctaatttttgtatttttagtagagacagggtttcaccatgttggccaggctggtcttgaactcctgacctcaggtgatccacccacctcggcctcccaaagtgctaggattacaggcgtaagccaccgtgcctggttttgtctgccatttttaatgttcactctgagaatcagagggcgcatcccaggatgaaggtgactctgggacatgctgaccgcagctaccctccctgacttaccacttacatagatcaggccatgggctctcccctactttcactcagccttcaaaccaccagctccaccagcttcctcatcaaacttgctttctccaggcacatccctgagcagaattcacttaaaagttactgatggaagaaaaaacagagcaaatcaaggcacctgtaagttatgccaaggcacctgtaagttatgaaa

SEQ ID NO: 9221 - DNA, 352 bp, Homo sapiens
ccgggcaggtacgcggggcaaagctggccttcctcatgaagctctgagagggatctggctatctcacaggaactgtgtgacatccaaccgtgaccttacaagcttgtttcttatcaagttttaaagctccccatccatcataggactttcagtaacttcctgtttctggatagagggaccagtagttctcatctgcagaggggagaaaatggacatgacttccattcaataactgatcagctcattcaggcccttgttacctcttacttccccagttgctttattcacctggcagaatcctgtgcatttttagatactcaataggatagtattttcccaggaaatcttttct

SEQ ID NO: 9222 - DNA, 848 bp, Homo sapiens
  misc_feature 15, 34, 603, 656: n = A,T,C or G
ggggtatgcatcaanttcgaattgcaggcgactnggagctccaccgttgtggcggccgcccggcaggtacttctttttttttaactgggaaattatcagagtatatactttttcttatgaaattaatgtaacttacgggtgttataagttcataatcatgcaatataaaaatggctcactgagtaaataattatcaagtgtcaggcagagcaggccctagcaatacaacaatgaaagatgcagttcttgatctctgcataaaggagacagataattacttataatcagtgttattataaagacatagtcaaagtgctaagaatatgatagagaagagcagatttgattttgtgtggtcaggttgtcaaggagggctcctcagagtagtcatttgtgtaagctgaaccttagtaggatctagtgttaagcatttgcgttagagagaatactgactggctagaccaggggacaaacatgagcataatcccagaggtgtggaagaagtggtatatttcaacaattcagagtgatccagtgaggacagaaagtagggtggggtaggatgttctgtggggtctaaataccgtgtagaaacatggattntattctgtggccacaataaagatggggttgaagccattactggaataatggtngaaaacctggtttttccattaacaggttaccatttttttatacattttaagggcaagaccttggccctttaagactagggaatccccgggcttgaggaattcgaaataaaacttatgaatccggcaacctaagggggggccgggacccaattttgttcccttaaggggggtaatggcccttggcgaaaaaat

SEQ ID NO: 9223 - DNA, 344 bp, Homo sapiens
ccgggcaggtactttcaaagtgaaacctcctctcctccacccagcttgccatcatctcacactgcttaagctcctgctgcctttcatgtctgcacattgactccaccaacctcatctggccttgttagttaatctacatgtctcctggaggagaacctccaaagggaaggatctctaacttagacattccactatctttgttgtacctcacacagtgggttttatgctcaaatattggttgaatgaataaaagtagtcaaattgcatataaatgcacacaggagacatttatcccctctctgaccctgatgagttttcatttcttcagataaatgtgtgatagt

SEQ ID NO: 9224 - DNA, 457 bp, Homo sapiens
aggtactcatacaataagaccctatacaagcatttaagtaacgatgcaatacaatatttaccaaactgacgacatgtccatgttatattgctaagctacaaaaaaaagtcatataacacatactctaagattccctttttaaaataatataaacatgcccatatacaaaagaataggaagataaatatatcactgcatggtattatagattactattttcttcttttcatttatgtatatcgtctccattttcacagtgaatatatacctattagtaagagaaaatccaatgaatatcttttttctttttttttgagatggaatctcactggctgcccaggctggagtgcagtagcgttgatctcagctcactgcagcctccacctcccaagttcacgcgattctcctgccttagcctcctgagtagcttggataacggtgcctgccaccatgagca

SEQ ID NO: 9225 - DNA, 479 bp, Homo sapiens
aggtactcggggggagatcgtcagaaagtcttgaattggctgttgtcctacaatcctttgtggcttcgaattggtctagagacaacttatggagaactcatatctttggaagataacagtgatgtcacagggttggctatgtttattctgaatcgcctactttggaatcctgatattacacctgagtataaaccccccacgggtccctccctgtttaaaaatgggccataaaaaaatttttgtccaattttttttttaaaaaggttttgggggggggggggggttttttttgtgttttgccaaaaatttccccccccccttttggacacccccccccttttttttttttgaaaaagcccccaaattgggggggtttaaaaaaaaatttttttttttttttttaaaaaaatttgtggggggggcctctcccccccctcgcctcggttatttttttttatccaaacacaacccttaaaaag

SEQ ID NO: 9226 - DNA, 498 bp, Homo sapiens
ccgggcaggttctcacttttgggtcctctcaaaattattgtcagataaagatttttccgggccatggatataataaataacccactcttaccgataaagggaagttagtgttgtaaaggaacaaatggtgattcaggtttgggagactttggaggtattcattctccactaagctatatcccaataccatcattatctgggtcagcctccgattcagcctcatcctgtgcttcagcagtggggtaaaacaaatgttacttgttagctgcttcttcatgaccttcatagactatgcattaatttgaagccctgcccccaaaaatagtgcttgggggggaaatgagttagtgattttgtgaagataatgggagttgaggaaaacacttaagtttgcttttttgagctctagctttattttaattgttagtcttaggattttaattgtcttcactggtttttctaacttggaagggaatcagatgggcaaaggggaaactt

SEQ ID NO: 9227 - DNA, 359 bp, Homo sapiens
aggtaccattaaggaaaagagatttaaatgcaatgtgcctacattctatctagagggcccattcttcagttctgacttcaacaacaggactaggtttactggcattcatgtccagtgaaaggaaggcggttaggaggagtcgcaataactttctcttctgttaagagctcccgtagcactcagccactcctggtggtgtatccttgtgttgggtaagctacccatatgccaaatgctttctagtagaggtccagacacatacaggattgaggtcagagtcattcacagacattcgaagatatgaataaaaaaacaaatcctctcaaatacgcagaagatagggtagggtttccattatc

SEQ ID NO: 9228 - DNA, 517 bp, Homo sapiens
gggggttacttggagcaccacgctccaagccggcattaaatgcttagaaatgtatgggttaaatgctttccatacatgatcttgtttaatacttatgatgatcctatgatgtaaaaatgttatctccctttccatgatgggaaaacagaaatgtcaagagattaagtaacaaactggtaaatgatagcactgggatttgaccccagactctgtggtcctaaccattttttttagggtggtcccgggtctgggtttgtttggacagccctggttgtgtctgttgtctcaaagtgattgttaatagtaataatagaacctgttttcaatcttaaaactgtcacaatttgtatgataagttatatgatcactttagtgattctgccccgaagatgagaaatggtgagtcattcaatggacatttataatcagaatgctttgggaaaggcccttggctatgtgtttagccagccctggtagcagaattcccagatggtgatttgatctgcagacagtgact

SEQ ID NO: 9229 - DNA, 491 bp, Homo sapiens
  misc_feature 491: n = A,T,C or G
aggtacttcctctggatgggtgataaagttgagctttgtagatggggaagcagggagcaaggagaacaggaagaggctgaattctatattgactttggaaatgctattagttccctggcctgggacaaacaatctgttccttcttcccaccagcaaagggttgtcctggagcaggaagaagagaaaagtggaggctggggacctaccttgtagtagtcatagagcaggccgagggcagcagcactgtcctcatcaccattaatgctcatcatggccttggtggctgctgtcaggggattctccaagtatgacttccaggcttcatcctcactggtgtaggctcttcgggtattgaatggagggtcactgggcatgggcactaaggccactagtcttttattactgtaaaaacaagagaaatgtgaggttcattttcagagagagcaaattttttacccctaataatatacatattacatgactacaaacan

SEQ ID NO: 9230 - DNA, 444 bp, Homo sapiens
aggtacaaaaattagctgggcatagtggcacatgcctgtagtcccagctactcgggaggctgatgaacaagaatcacttgaacctgggaggaggaggttgcagtgagctgagatcgtgccactgcactccagcctgagcgacagagcaagactgtctcaaaaaaataaaaaagaaaaaaataataaaaaggaaaacaaagcctttagaaaaacaaagcctttgaaaaaggatgtaaaattgaatatatagatacaattatttttaaaaagttttatagaaaaatatcctggattggttgatgttgttttaatatattttaatcatttttgtataatggcatgtataatatgttataaggaaagtaaaaaaaaaaaaaggtcttagcagaacaggcagaaaaatgccaaactcagtgcttttaattattttgaatgggggaaaat

SEQ ID NO: 9231 - DNA, 427 bp, Homo sapiens
ccgggcaggtactcaagcacaaaagtgagcacagtgttgagcgattctgacactgactgcatgacaaccacagactctgtatccaaacactcgcagacaagaagctaattgcagtgatgaaaggcactccactaaaagcatgagtaatcgctgcagtgatgcacagataaccctctctcctttactaccagggtgctgcggcatttatctcaaacctgtctctacccaatctgacaaccttttgtctctctgaccaatggaaaatggaaatgatttttcactactgttcccgcagcagtgaagggtctcttctgagtgtggagatttagttcaacagttgagtataaaacaaatgcaaaagctgacatttgacatccatggcagaaataaaaggctaattaatgagatctgttggagtcccttctcc

SEQ ID NO: 9232 - DNA, 579 bp, Homo sapiens
  misc_feature 132, 177, 553, 562, 567: n = A,T,C or G
ccggcaggtacatactgagttcttaataatgtttattgaattaatagataacccaaagtatcattttaaagtccaattagtatttcttggagagggtggttatttcgttaacttccagtccttctaagactnttaaaattgtttagtcacagttcaaattgaaatttattatttctncctcttcccattactctctttaccacttagagatgaccctgtcatacctctcccctgatggctccttcatatgttttaaaggacccatcctggctgggtgtggtgactcacacctgtaattccagcactttgggaggctgaggcaggcagatcacttgaggtcaggaatttgagacgagcctggccaacatggtgaaaccccgtctctcctaaaaatacaaaaattagccatgcgtggtggtgggcacctgtaatcccagctaattgggaagctgaggtggagaattgcttgaacccaggaggcagaggttgcagtcagctgggattgcaccactgctctccagcctgggtgacagagtgagactctgtctcgganaaaaaaaanaaaanaaaaaagttcct

SEQ ID NO: 9233 - DNA, 879 bp, Homo sapiens
ccgggcaggtactcttacttggcatgcagacatgtctgactccagagttgctgcttggagaataggagaaaacagtcccttgaagattaaacttgataatttgagtcatgtctcatctttgaactaaatgcttaggtttctggggtcaaaaagaagtgaagacagggaaatgattacttttccagattttgggcttcaagtcatgaactctgtaagacccttgccctgttttctgttactagaacaacatcatactcttagctcttcttcctcatttcttcaagagaagaatggatcatacattctaaaaaaatccacctggtagaggtgccgagcacatcacagccatcattaacaaaaaataaaaggataacagcccttggaccagcagaaatgagcagctggcattgtaagaagcttctattatagcagaggctcagcatttttagcagggggaattacattcaaatcttgatgggcctgatattattaaagatgcaatttggattatagtaccatttttgaattctctgtcattttaaatattacagtattcggtccgtagctataggacattcataattaacaaattagataaccattctcgttgtctaagttgctctctataatgtgtatgaaaatagtgcaatcataatatcaaatatagttttcatgtgtgattagatatatttaaaggttacactattatttatccattgactaaagaatgatatatcttatgtataataaccattgtttcatgaattgtacgttcgcttaatttaaataacaatcatttaataacgatgtataacgtttgtaaatatcaactgttggaaatactattttgattaatatatatgcgaaaatcacttgacc

SEQ ID NO: 9234 - DNA, 434 bp, Homo sapiens
aggtacgcgggggagatggaggcttgcaggacctggtggttggggagggccagtgaccaggtgtttagaagcagcacctcctgtgattggggctgagggtgaactctgctttcaagcagaggtggtttgtcgtgggtcttccatgatgacaccaggtcaagagcctccagatgctcagagtcttgcaggctcagaacaagaattgtcaacttgccaagatgaatctgtctctcgggggaggacccacacagaacaaacgtttgaagcagaagtttgcttggtaaacatggaatcggaacatgggaattgggccactgggatattcaattgcgtcagaccattgtagctgatactcctggacagaggggctttgccaactggacagaatattaaagtgtttgcttaccgagctcctgctctgtgtgggaagggta

SEQ ID NO: 9235 - DNA, 469 bp, Homo sapiens
aggtactggtctataattagaaaaactgttttaaattagatgttcccattatttatttaaacagctttttgctgagaaagcttagtggattaatgaggcagagggtgttttgaaatccaataaatagttcccacaggctgggtgtggtggcttatgcctgtaatcccagcactttcggaggccgaggtgggtggatcatgaggtcaataaattgagaccatcctggccaacatggtgaaaccccatctctactaaaaacacaaaaattagctgggcagtggtggcgcacacctgtagtcccagctactcgggaggctgaggcaggagaataggcgtgaacccgggaggcagagcttgcagtgaccgcgagatcatgccactgcactccagcctgggcccacagtgcaagactccatcccagagaagaagagaaacggaggtgcctgcccgggcggccgcttaaactagg

SEQ ID NO: 9236 - DNA, 390 bp, Homo sapiens
aggtactccaagctctgagaccacctcttctgcaaagccttcctgattctgcaaagaacaggtaggcatttcatccttgggacctcacagcaattcaggacacatttgtgtcccagccctgcttggcttggctgtctccatgaatatacactttgcaacttctgcaccaggcatcataccaagcacacagtaggcactcctgtgttttttgaataagtgactatatcatcaccacatttcaaatgcggaatatatgagctactagaaaagacataagggtagattttacatctttattgtatcctagatatacaagtctattactgccttttcccatgttctgtcaacatagcataaagaatgtggatttacctgttagaaattgaataa

SEQ ID NO: 9237 - DNA, 470 bp, Homo sapiens
ccgggcaggtactggattaaacccaaagtataaaataaatatgtccatagtgatataaataaatagaaatgacaactcttccttttagaattccagttaataaatgcagaaggaatacagagaagagaccatctctgctagaacactaccataagaattgcggcagatgcattctaaatggatgcaaaaactagagggagaagtttaaggagaaacaggatatttacatggtctcaaagtatctctccccacttaaaaataattaattaaaaagagaaaaacagtcactttataatgaagaaatctggcagataccaccctgacaatgtgattgaggttaacatgaccagtgacacgaaaaatagccagaggggaacgtaaggtcagagtgctcactcaaaactctgcctcctttatactcacagcgtcgttaaaaaaagaaaacaaaccaaaacattccccaaaatctg

SEQ ID NO: 9238 - DNA, 315 bp, Homo sapiens
  misc_feature 315: n = A,T,C or G
aggtacgcgggatactcatttgggtatatacccagtaatgggatggagacttttcaatacaagttcttttccattgggagcatttgggtgccaatggcagggcattcagggaggggagcgaactcttcgtggggcagtcctctgtgtctcaggctgctgaaacatctaaattccttctctgttataattgggcaccagcctgccactttttcctttcgctgtaacttccagcaaccaaagttaaagcccctgcctcccagcggagggaaattacaatgtcaggaatacgatagaagtaaaaaaaaaaaaaaaaan

SEQ ID NO: 9239 - DNA, 465 bp, Homo sapiens
gaggagagacggactgagttttggcgataggtcgcacaccttaccaacagcaggcggcgagggctccccacgctgctcgtttccagaggtgcctcgtattattgagaaggcgtgcagtgaatgaaaatgtgtccacacagctcctgctctgcctgtgacattgggttgctgtatattagctgggatagtatatttcaaattgctttctcaattgcaaagtatggtagaaataaatattcgctttaatttagtaactagaacttagaaaagttcctcctgtttcctgattgccaagtcgggatgagaaatagatttcataattatgatacaacttgatatcttgagataaatgtttaactttgaaagttaaacatgggtattttttaaactttatcattttggggtcattttgcacatctctataccctccaattgtgaaagaaattctcccaaagtattcttatg

SEQ ID NO: 9240 - DNA, 349 bp, Homo sapiens
  misc_feature 349: n = A,T,C or G
aggtacttgggtctggaaaagtttggttttcaaggggtccctattagaatgcaaatatttgggaacccaggtgttcttcagctgattttcttgattaacacatttgtgtcagaggatgtctgagcagtgaggcagtgtgagtcagatccctcaggtcctgatggttttacttgattgttcctgggaaatctaaatttcaccttctcttatctatttcaaggaaagtaatttattaaatgtaaactgaatgtaattcatttgaaaagatttgcaagatttaatatagtgaaatccacatatcagaaaaataatttatcaagccatttttcccaattttttcctgtagaan

SEQ ID NO: 9241 - DNA, 364 bp, Homo sapiens
ccgggcaggtacaaaagcttgtccaaacaaggaaacttggcaaatttttcagaagaaaaaacttaaaataataaaagagatactgctattagggtgaggtttggcatgcaaagtttcaacactgagcaagttttatggccaagctatatgtccttaaaaatagggctttataaatggaagcactggcacaaccttcactatagtattgcaaacagtaacgctattttatataacctagacaagaacgtctttttaaaatcaaaaagctggtctattttaatatgttgggctcaaaaatttttaacaaaaataattggaaccactattttgtttaaaatatcaaaggtgaaaagtcctggaacag

SEQ ID NO: 9242 - DNA, 456 bp, Homo sapiens
aggtacagtcttgttgcttgttgcttcttttgtttgtggtttgcatccagctgtgcaaattgctgttccctttgagtgtcacaccacttaatttcatgagacagttgtcttcaggaaagtctgttcccatgcccccaccctccaggaacccagctaacacccagagcttagctgtcaagacagatttctaatttttacccttcgatggcagaactttaatgttgtgtccctagaaatccttcagccctagaaaatgtggaaagtgggccaggggcagtggctcactcctgtgatcctggcactttgggaggccaaggtgggagaatcacttgagcccaggagtttgagaccatcctatggaggacttagcaagaccctgttgctacaaagataaaaataaagatcagctgggcatggggcggggcacctatagtcctagctctttgggagatggaa

SEQ ID NO: 9243 - DNA, 350 bp, Homo sapiens
aggtacaaaaaattagccaggcgtggtggcaggcgcctgtagtcccagctactcaggagagtgaggaaggagaatggcgtgaacctgggaagcagagcttgcaatgagccgagatcgcgccactgcactccagcctgggtgacagagcaagactctgtctcaaaacataataataataataaaaggtattagtgtaactgctgtgtggagaatgaattaggatggctgaaagagtgaacactgatttaccaaataggaagttctcacagtagttgaaacacaagttatggtggctaggactgggaggggactatgaagataaaaaaaagcggtctattttgaaatagaaa

SEQ ID NO: 9244 - DNA, 414 bp, Homo sapiens
agggtggatctttaaagtgttcttatctacacaaaaaatttcagactcccaggagagagaatcaggttggcttaagtaggttcaaatatctacacctataggttggataatgggtctggaaactagagctattgtaactaccattacagtggtctagataggagatgatggtaatttggattatagttgcagtggagacagagaaaagtggatgaatatgttaatgggcagaagccatcgggatttatagaataaagtgattgtgaagatagaaggaaaaaggaaagagaatcatgaatgatgcctagatttggggctcaaataactggtggaaggtggagccatttactgagattggaaaaatatgtaggggggattttgttttggggtgggggaaaaacggaaaattttttt

SEQ ID NO: 9245 - DNA, 476 bp, Homo sapiens
ccgggcaggtactacaggagcatgccagagtgcccaactaatttttcaaattttttgtagacacagagtcttggtttgttgcccaggctggtcttgaacccctggctttcaagcaatccttcctcctaatactcccaaagtgctgagattacaggtgtgaaccatggcacccaaccccaattagttgtcttaaatgtatatcagaacatgcttctcctctacttaaaagtagtaaaataggccagacacagaaagaaatatactgcataaatcttacttacatgtgaaatattttttaaaaaggtttgcatatataaaaacagaatagaaaagggggtcaccaagagtgaggaagggaggaagagattcaggtcaaaggggttgaaagacacatttatgggggatgaataaatttagacaactaatggatagcataagaactgggggttgtaataaagtaccccggggaaagcacc

SEQ ID NO: 9246 - DNA, 387 bp, Homo sapiens
ccgggcaggtactgactgtctcaaattcttttatagctgtccctcatgtcacctagctgctgagagctttgtgatcctaacaggtgatgactcagaccgacactgcattggtaggaattccacaaataggtgcctcaatgtgcctagattgaaatatcagcctttcccagactgacctgatgggttgacttcaggtgtggtgtaaacacctacattttaatgtaaacatttcagtgtaatcaatgagaactatcattctgctttaatcaccatgagttctgaaataacaaaggatttgtctgacattcattctaagaaattcattcttacctgactaagaaacttttttaacctggcacaataataagaaatgacctgtaagtacct

SEQ ID NO: 9247 - DNA, 360 bp, Homo sapiens; identical to SEQ ID NO: 78

SEQ ID NO: 9248 - DNA, 520 bp, Homo sapiens
gggttgtatcggttcacccacgcgtccggattttatggttttaaatatcaataaatattccaattgttaaatagtgctaaagtgtggtaatctgaaaaatgctgaccataaatattaaaatgtttataagagaaatggacttctaaaacccacacacaatacacacaatacaaaactcacactcataccaagaaacaaataaattatttctatagtaatattgttcttttcaatgtacagaaaattttccaagaaattaaaaatacaaaatgttaggtctgtagaccaattacacaagtacataagtctgtagatcaattacacaagtatattcaaatctaaatatagttataatatgctaatatattaatatcaatgaaaatattattctaatatttgtgaaactatcagacaaaaacagcaaagtaaatacagtattttgttttaatttattgccattgctttatgcaaaacattttttaagaaaggtagaggctggttatgaaattgggaagaatat

SEQ ID NO: 9249 - DNA, 297 bp, Homo sapiens
ccgggcaggtccgggcaggtactgtggagattttacaagtaggaacttaagatgcatcccctggaggtcttgccagcagcgagtgacttcatttaattcaatagatagtcatgttaaagtattggcactttccaatggttgttaacaagaggtagtggaaagtgccttaactttctaatcagaaagcattcatcctgttgagtcaaggtcctcataggaaatagatggcacaccgaaattaggatgagtgtgatacagcagaccatcaagggacattgcagtaacccatatgtacct

SEQ ID NO: 9250 - DNA, 463 bp, Homo sapiens
ccgggcaggtaccccaaacctaaaataaatgttggaattaaaataaaactcatattaaagttttaaaaaagggctttgtattaggtaattttacctaaacgtaggctaatgtgttctgagcatgtttaaaatgagactagccgggccaggtgtgatagctcacatctgtgatcccagtgctttgggaggccgaggcgggcagattgcttgagcttaggagttgaaaaccagcctggacaacataacgagaccctgtctctacaaaaatgagctgggtgtggcagtgtgctcctgtagtcccagccatttgtagggctgaggtgggaggattgcttgggcctgggagctggaggttgcagtgaaccaagattgcaccactgcacttcagcctgggtgacaaagtgaggccctgtcttcaatattttactttgtcaaaaaaagttccttggccgctcttaaattg

SEQ ID NO: 9251 - DNA, 504 bp, Homo sapiens
gcccgatcaccaattatcaattactataaggcgagtacgcagctccaccgtggtggcggccgcccgggcaggtacatgataagatgggaggatatggggtgtgtatgcactgttgggagagcatctgaatttggggagacatctgttgaagcctgtatagaaggattaacatcaaaaacattggccattgactctggaacaagggggaaaatcaaaccatctcacccaaacactgtgacagtgtttgaagaatatgtgaaccaaacatttgactatatcttcatcacaagccctctctcttttatagaattgcctactcctaatattgaagaacacaattgtattcatcttatggatcttcaggggaattatccagtatcaggtttttaaaagctggctcctgtgacacacctaaaaaattccactccctagtgatatgaaataataaatgaatgagtgaaatgaatgaaaacagatgaaactgaatgagagaaatcaaataat

SEQ ID NO: 9252 - DNA, 395 bp, Homo sapiens
ccgggcaggtacatcttttcatttttttcaacgttgaatcctgtcagtgtattttctaccccaaaaattaatgtaaaaacttcatctgcatttcacacctacatcaatagtagtgtgtgtcacccacgagcagctgcttggaacgtgccctctctgagaggttacaaattggtctgtgccacctcacacacaaccgggatgtcagcatggaggacagagctggaaggaacctcaaaggtcagcagcaggatgatttctaagcctggctgagaaacataatcacctgagggagctcactaaaaacacaggttcctggactccgacccagacctactgaagcagaacttccaggtggagcccaggaatcagtggtttttttcagctatccaagttag

SEQ ID NO: 9253 - DNA, 344 bp, Homo sapiens
aggtacaggaaatatcaatattgggagagccaaaggactttctaagaactctagacaccacatatcctacaggaacaggtgacaaaagtaagagaagagggtaatgcactgtttgtatttaatatgggaagtaaaaacagatgaggctcctattgaggatatgaatctcacacagcacatgagggagaaactgttcaaaaagtaaaattacttctccatattctccaaccttacccatatccctttcccaacgcgtttccccttgactcatcgtaaagcagtgtgaacgtaatagaaaataacattctcttcttcttccccatcacagtgtgagtacctgcccg

SEQ ID NO: 9254 - DNA, 475 bp, Homo sapiens
aggtacatttttgtcttccaggtgtaacttcaacatgttgttacttttgatccctcagttttaattcagtgtctaaagcctgagaaatgccagtggcctgacagcagcagacattgcacaaacccagggtttccaagagtgtgcccagtttctcttgaacctccagaattgtcatctgaaccatttctataacaatggcatcttaaatgggggtcatcagaatgtatttcctaatcatattagtgtgggaacaaatcgaaagagatgcttggaggactcagaagactttggagtaaagaaagctagaactgaagctcaaagcttggattctgccgtgccactcacgaatggcgacacagaagacgatgctgacaaaatgcacgttgatagggagtttgctgttgtaacaggaagacttgcaggacatatcagaagcctctgtcagaggtttacaggagatatgaaaaacagtagt

SEQ ID NO: 9255 - DNA, 451 bp, Homo sapiens
ccgggcaggtactttaggggtcttaggtgggaggattgcttgaggacaggagtcagagaccagcctggtcaacatagcggaagaccctgtctctacaaaaaatttaaaaattagccaagcatagtggtatacgcccgtagtcctagctactcaggaggctgatgcagaaagatctcttgagcccaggaggtggaggatgcagtgagctataattgtgccactgtattccagcctggataacagagcaagaccctatctcttaaaaaaagagttcttaggactattttcacccgaaaactgaaaacacacaaatctttgaaatgaaatgcctatgctacctactcctagatttgccagatttcaatttaaagtttaaaaagtgctatcctttttcaatagcaggtaataaaattgagtttatagaattatacatacttttcccattccagag

SEQ ID NO: 9256 - DNA, 462 bp, Homo sapiens
aggtactttaagtatagctatctggaatgcttgggaccaggtgtgttttaaaaattcaggtttcagattgtagaaaggtaatatgcagcatataccacatagattgtgatatctccactgggatcagatgcagcatccggtgatcaaataatattaacatttctgcagtgaaacatgagtattcacactaagaataagatgaggaccattaaaggccttacaccagtcaggtgcagtttggctgccctgggagtttaggactgtctgaatactgccaagcgagttttatcataatcaagtgaattatgattaaacttgatttcgagctttttggattttgcagatgcaggcgttgtaggaatagcactgtcctgttgggcggctgtcagttttgcgccccttaacttaaagggtcaacctacttggaacgtgaacagtttggattataattctcttttacta

SEQ ID NO: 9257 - DNA, 398 bp, Homo sapiens
  misc_feature 44, 56, 99, 118: n = A,T,C or G
ggagctcgcgaacgactattttggcgattgacctccaccgcggnggcggccgaggnacaaaggctggggaggttgcttaatgcgcaacaccaaggaagngatatgaaataaatagggntggtatccaccaacggatagaaatttttacaactatgtgtggggagagacagtgcaaacagaagaaacagaatgagctaaaacacgaagcatgttccagcatttttgtccttttgtttgaagtatagggtatgggaagaagtaagactggagagactaatgccattcttgtcgagtcctaaaagcagacttaggacttaattcaataagcaataggaagccattacatcttttgaactgcaatgtggcatagttacggacgtgctttaggaaggctgctt

SEQ ID NO: 9258 - DNA, 292 bp, Homo sapiens; identical to SEQ ID NO: 89

SEQ ID NO: 9259 - DNA, 364 bp, Homo sapiens
  misc_feature 340: n = A,T,C or G
ccgggcaggtaccacttcctgacttaagtcagagatgaccagcattctgagttaggacataatcactcagggtcctgacccactggtgaatggattgagagaggtagtgtggctgcacttgcatcaggagcaaacctgacatgactctaagctcagctgcttttctccttcttctcagaaaagctcagctgcagccaggtgcaggggctcatagctataatcccggcactttgggaggccaaggtgggagaatcgctggagctcgggagttcaagaccaacctgggcaacatagtgagaccctgtctctatttattaaaacatattaataaacaaaacanaaaaaaaaaaaaaaaaaagtacct

SEQ ID NO: 9260 - DNA, 295 bp, Homo sapiens
aggtacattaagcaaaactcttttagtttcattttccaaagatctatttgattttaatcaaacagccccaaaaaccataacgtaaacatgaaccagaatcagcgttttatactcttaaaaactagggaagctttgccttaagaatggctagattcacaggctcaaggaaattttcaggacaccgtatctctcacctctcacctgtttttcacttagttggccctgtttattctcaggtaaaatgaatgccaacaacatgcttgaccccaactccaagtttgtaacaaagaaggga

SEQ ID NO: 9261 - DNA, 354 bp, Homo sapiens
  misc_feature 161: n = A,T,C or G
tgtatttctgtaaagcataaaatattgtttttaagttagttttcatatcatgttacttaattcatcatttcaagattaaatcagtatctagtaaattgatctgcctacctagcgattggtttccatcactaatgataaaagttttgatgcttctccctttntcaaggtgctacatactataatccttagaacatcttaagaaataaaaaggcaaggctgggcacagtggctcacacctgtaatctcagcaccttgggaggccaaggtgggcggatcacgagatcgagaccatcctggccaacacaatgaaaccccatctctactaaaaatacaaaaattagccaggcatggtgc

SEQ ID NO: 9262 - DNA, 496 bp, Homo sapiens
tgggagtatgagctattagtactccagggcgaatttgagctccaccgccgtggcggccgaggtacttttttttttttttttttcagttctgggatacatgtgcagaacgtgcaggtttattacataggtatacatgtgtgggaaggggaggcaaaaccatgtagagttgtgcaggcaattgtcagggctttagctttgactctgagtgagatggaaagctactggtaagttctgaacagaggagtggcgtgattttttttttattatcttttcagttctgggatacatgtgcagaacgtgcaggtttattacataggtatacatgtgccatgggggtttgctgagaatgatggttttcagttttatccacgtccctgcaaagttctttgtttttttataagagcagtaatttccattcatcccgcgtacctgcccgggcggtccgctttagaatttaggggattcccccggttgttagaaattggtttccaacttt

SEQ ID NO: 9263 - DNA, 439 bp, Homo sapiens
aggtacatcagacaaggttctctagtgtcaagtgtaataaaataattttaaagactgaagatccctagcaatgagcaaactgaagctacaagagattatgtgacttaatgttacatgataaattaattaatttaaccaatatctattgagttaccattaatatttattacagtccttgctttataatccacagatctttctactttactactcagccctacatagctgataaagcaatgggtggggatactcagaatccctcatgttgcagccattaatttactgttgcttgtctccaaacctactcttctatttactattgtctgtgatgctggggctaggactgatcagatcacatctcttctttgccagtgaattctgtgaggtttctgccaagatgaaggtactggaaagagccatcaaggtcggaagaagagaa

SEQ ID NO: 9264 - DNA, 830 bp, Homo sapiens
aggtacatgccatgaaggacatatacaaggtaatggaaccacccaataaaaagtagtcttactatccttttgttttgggcatacaaaagcagattaaggataatcgtcttgttcatttatttatctatatacttatttatattctgtctctaggactgaaaaagccaaaagatcagggacctagttttgtttcttgctctttctcaagcatgaggacactgcctggcacatagagggctcacagtaaatatttcctcaatacatttgttgattaagtgaaggtgatagaaactgacagggaccttgaacaagattagagtattttatctgtatctatattgcatttgtttttgaaattctatccttatttgagctaatacaattttaacagaagacattttttatgtggagaagctataggaaataaaacctcataatgttgtaactcatgagagctaggatacatgtttgaacaaatattcttggtttgtctttatttctagatatgacatttgctttcttttttacaattcacctaaaggctgcttatttttaaatgtgtatttaaaacttcaaagttgcgagactatcttttagaataattagctataaagaatcaaggactttcagtgatctaatttcaacggtcttttttttcttcaaaatttaagagttggctgggctgctgaaacacagtttaattttaaaaatagccaagtatatccgataaccttatctgaatttgaagagataaaaggttatattggcatatggtacgcttgaagcttaacatttattcgaaaaaggtaagggatgaatccctaaaaaat

SEQ ID NO: 9265 - DNA, 391 bp, Homo sapiens
aggtacatcatgtagagaggcagactcgtcgctgacaaaagggctgacccctggaaaaccagcacagagccagctcttctgtctgaatccactctctccaaaacataacataagtcatggaaagaaatgagtctcaagaaatgagactcttaccgtgatgagagggggacattgaaaagctactttagtgattagggagagaagtccccttttgcatcccaaatcaagcagaggactggtagtccaaatataattttggaataacctgagtcacctgggccttgaggaatcctggcctcttagtccacatttgcagaaatatcaggaggtcaatcaggaagctgtttaggcatctcaacacagggtcaaaaagctcctaggtacctgcccg

SEQ ID NO: 9266 - DNA, 331 bp, Homo sapiens
aggtacatgccaccatgcctagctaagttttgtatttttagcagagacagggtttcaccatgttggccaggctggcctcgaactcctgaccttaggtgatccaccctcctaggtctctcaaagtgctggaattacggtgtgagccactgcgcccggcccttagtagcatcttttaatggaggtagagttgagatttcagtgactaacaactaaaggtattaaaggtaggggtttatatgatacatttgcattttagaaaactgatctaagcttcaatgtgaagaacagattgaaatggaagggggagaagactagaagcagaaacattact

SEQ ID NO: 9267 - DNA, 842 bp, Homo sapiens
aggtacagtttttcagtttagttctcttagacttaaattgtccaacatctggagagcagagagaggcactcacacatttatacacattccttttgagtggattgaagggaaggtgggcagccattgctttgggggtcatcttccagacagctgcctgctagggagccctttgcattcggcgatgctgctgctgttcattgtctggccatgggagtaacaattttggacatcattgatgatgtctggaattctttggtgtctaagtgcatggtagtttttttttctttgtgttaggctggtttcaaaaatggactgtcaccatattttgttgctagcacttaacagtgagcttttaagagccctctatgtcttgaattttgggctccatagcccacttgtcccaaagtgagtcatttctttgaaagaaaaataaaaggaggaggattttgctttggtttctatttctgttttcatcttgctgcttcagcttttgctgtaacaaaggtttatgtaaagcactcacaaaaatgccctatggtcttgcacaacatttaataggctcctataagacctagtaattatatgtgtgcccagtctcagagttttttaaagacctgtttcccttgcttattacttttaaagaaatattcctagttatcttgccaaaaaaaaatgactgtgtgcattttagaattcaaattatatccccaattgacgtgtttacaccctgactttgttatagaagccctcgtttcttgagatcgaaaatgccttcacatgacttatcatagagcggttgtcccatgcaccgcaacagatatgatcgttgccgtgctgccttc

SEQ ID NO: 9268 - DNA, 358 bp, Homo sapiens
aggtaccaggagggtattgatgtttgaggtccaaactgaaaacccatcacctccttcccactgctatagcagcgttagccctggggttcattatctagccagttcacaccttctaaagtggggctctgaaaatgtcttacttccctcacagacaaagcaattctcaagcctcctgagatcacccaccaaccagagcaactgctgtcacttggaggtgcagctgaattcttctaattgtgacacaaactcttgaaactgtaaatgctgaaagattaaatgaggttataacactcagaaggttttacaagtaaaagtaagtcaaatcaataggtctttatttcatatctgtaatggttta

SEQ ID NO: 9269 - DNA, 496 bp, Homo sapiens
aggtaccattcttatctcagaatgctgtaaaccatcagtagaagcagtttagatttggactgcatggtaaaatgaaaagtaataaccctccaaccacaacctagtcagggtattaataattatatgtagcaagaaaacaaagaagaaaataatattgaaaaaatggagattccccaaccagtttcatatttgaaggatctgagttgtatttttattaaggaaattttttttctgaatactgtcttccaaaatgttaacattaaaatctgaatcagaggactctgaatggaaaagaagtttgatcactgacacctagggctctgaagcgtgtgtggccacgtggaaaagtcgaaggatgcgctgtcgaatctcctttgtcttcactccatagacaattgggttgagcacaggaggaaccagcagatagatattggccaagatgacgggcagcggagagtcacgccgcttgctaaagcgatgcaccatggacaatcct

SEQ ID NO: 9270 - DNA, 363 bp, Homo sapiens
aggtactaaagcccattcttgctgaaaatctaggatgacaaacaactcacagggcaaaacccatgtggttaggtgggtgtttgttttgatgcgaagcctccagttttgttcctgtctaggcctgtcccacagtcatctgacattcctgcaaaaacttgtctttattttggatggacacacaagcaatggaattggcactgaaatttcagcttatggtgcagggtatgttaggatacaatttccccctgaagtaaatactgaaacactgacatgtgggtttgttttacttttttacttctaaaaatttgcaaacgggcacggcggctcatgcctgtaatcccactagtttgggaggcccaggcc

SEQ ID NO: 9271 - DNA, 456 bp, Homo sapiens
ccggccaggtccatcaccctgctgagggacatccaggacaaggtcaccacactctacaaaggcagtcaactacatgacacattccgcttctgcctggtcaccaacttgacgatggactccgtgttggtcactgtcaaggcattgttctcctccaatttggaccccagcctggtggagcaagtctttctagataagaccctgaatgcctcattccattggctgggctccacctaccagttggtggacatccatgtgacagaaatggagtcatcagtttatcaaccaacaagcagctccagcacccaacacttctacctgaatttcaccatcaccaacctaccatattcccaggacaaagcccagccaggccccaccaattaccagaggaacaaaaggaatattgaggatgcgctcaaccaacttttccgaaacacccacatcaaaaagtatttttcg

SEQ ID NO: 9272 - DNA, 470 bp, Homo sapiens
ccgggcaggtacgcggggacagtagtaagcctcattactcagttgtgagggggaaggtagactctttccagacctttgataaaggggctgctcaaaaaagccacgaccttgggcctctgctaaaaccatggctttaagtaaggagggagcagatatataaaaaaccttatccctctttctaatctcttatgtcctgtgagtgtcacccattgagtaaacccaagtggaagtcaaccggaaaggaacttggatgatggcagcctttacagatacaagtaaagaaggtaattggcccaatttgtgtgaaaaaagagaataattctaatccaaaccgcctgtctctggaaataagaaaagctctggagggtctccaaagttaccagaggaaggcctgaattttatgggtgattgataaatatttccaagcttatgaagaaaaaaatatcattagtctttccatggtagaaaag

SEQ ID NO: 9273 - DNA, 471 bp, Homo sapiens
ccgggcaggtactatatggacaccaacatggagcagaaaatgagggcagcagtgtccaatctcattccaggtgagaagttgcacagtgtccaataggtgcatacatctccttagtaagtagttgtgattaacaatgaaatagaaatgaaaaatatatttttttatttatgtgtattatatttttcaagcagctaataagttggtaggacataatatttaattcgttggggacctaattatttataaattgaatggttagatatttcttttggcctaagccaccatgaaaaaatcactgaggcgctaagggaaacatgaactaagaagcccttctgagtctctgttttctcaactgtaagatgaagaaacctgctccaccttcctcttgcgattgttgaacggcagttgagatactgcgcagaatggaccttattgatggcctacccaacatccattctctactccctttat

SEQ ID NO: 9274 - DNA, 440 bp, Homo sapiens
aggtactccctttccctgactcagccttttattgatgaaggcagggatgggatggggagagctcacctggcaaagactccacacaggtgtgcagcacaccctgatggggccagaaaatgtcactgtgagccctaggggtgaaagacacagtgatgggctgctgggcaactaccaagtgtagagatcctgagtgcccagagagttaccaaccacttcccttccctgtgcagatcagtggaggcagatacatacacaaaatgggaaggggaaagaaaacggcttttagatctccccaccatagagactataagattattccagaatggccacaattttttcactgcccactctgggcccaacagtgttcatacactaccgtcattcttaataaagggtacttaattccattttatgaagaggacatttaggctcaacttggc

SEQ ID NO: 9275 - DNA, 844 bp, Homo sapiens
  misc_feature 26, 332: n = A,T,C or G
agtagaccctatatgacacactatcnggcgaattggattgccaccgcggtcgcggccgcccgggcaggtacgttcttggggaatggctgcagggacccctggctattacatttgcatgtttctccttgttggtcagtagcgaactgtagggagcatcctcatcataggcttgcgggcaaagatgatcttgttatagttttcagttggacagtctctggaatccgcctgtaagtgtgtgggttctgggatcatggtaggagccatggccaataccgaataagcgccccacattgataacgtggattctgacagcgtgtccctgaacacagctntgccagaagacttggaagacttcctccttttcggctgaatgacgctggaaggtttattctgccttgatgcccagggtctttcctcgagggcacgcatgcattccagttctctagttttgcttttctcaatgagtcttttcactgtctgagaggtataggtgacataggcccggccagggtcatgttttttaagtagctttcggggaaagtcagtgttttctgtgaagtcctcttctttcttcaatcctcttgcatccatcttctttttaatatttactgaattttttaacatcacaaggttcaaaatccctgatgaaacttccttcaagggatggcccgggcagcggcttacgccttgttatcccaacgcttttgaaaggcggaaaacggaggattcttttagccccagaattttaaaccatcttggcaatttgggaagcacgcttatttttggtaattggaatcccaaaatcaggtgtttataggcgtgttttcttttaggctcttttttt

SEQ ID NO: 9276 - DNA, 323 bp, Homo sapiens
ccgggcaggtaccatggatggaagtggggctttggcaaaggccctagcatataggcctggcactgtggactcggtgttgtctagcagagaggccttgaggaagtggcccagcagtgtgcttgcgtttcaagatatctatcacccaaaagacttcgagatagacaagctttgttccctgccaaagtgacaaatgtcagcttgctggaaaagtttgaacgaagtgagagtggtgggaagattatgacccctgaaagcttatcatatccaagttgtctgaaacacgacagtgagatgaagccccaaacatctccagcttgccagga

SEQ ID NO: 9277 - DNA, 468 bp, Homo sapiens
aggtacgtatgttgaaagaggtaaataaatgtatgaaaatataaagcattcagaagacaattgtccataaaaaagaaccaagtgggtatcctggaaattcaaaatacaatgtctgaagttgagaattagatttgttacaaaccagatggcacacgtcagaaatctgaatgagaaaactcagaagcaagttaacagaaaatatccaaactgaatcacagaagaagactaaaagagagcatgggagttatgtgagacacagacaaaagttccaacatcgatgaaattggaatcctggaagaagagagaggggaagggcaagagaaatatttaaagaaaaaagtaattgagaattttccagatctgatgagaaactttaaatcactgaatcaaaaagttcactaagcccaacagggtggacacaagtgcacacacaaacatacacacaaaacccatccaagtacctgcccg

SEQ ID NO: 9278 - DNA, 514 bp, Homo sapiens
aggtacctggaaagatgaacaggattgcagcagatagagacaggtagaaggagagagattccaagtggaaggataaaggagagggaagagaagcaaagagcgcaacttccaagaagattttctggtttctggcactggccatagatagctcgtgcagaatcaagcaaagaggtttatgctgagatattaatggaatgacattttgagagtcttgagaatgggcacaaaagtgggatgtgaatttcagtttgggcgaagacactgaggatgatgtagattagatgaatctctccgttatgatcccgctatatcctagtaagtataaccctggaaagatcttgagatgcttcccagccttgttacagatcccctgggccagaacacttcttatgaaaaacagtctgcttcctattttgtcggccctcgattgttttttgatatcaattaattattgcgtttttttttcttagtaatagggggaaatatttttgaggattactattcgttttattat

SEQ ID NO: 9279 - DNA, 353 bp, Homo sapiens
aggtactccaaggctctagcaagaaatgaatttagggacctctgcctttgatatgtgcttcttcacaccccaccctctctaaaggaaaaacacacagaccactgaaaagaacactcttaaaaagattctgaaaactagcagtgaagaaagtttcaactagtgcttctcatattctctaactgtagaatccctttcctgagcatatcaggcccccaaaccaatttcaaggggcctctgaaatttctaaattggtttccaaaataaaattatcaaaatatttcacagaaaaacccagatttctgtcttctcttgcaaaaatgtggatgtgcaggcagctgtgggcttgtatctcc

SEQ ID NO: 9280 - DNA, 450 bp, Homo sapiens
aggtacctagtcacttctaaagcagaagggagcatttggctgggaaacctaagaatggaattcataggttttttcctggtcattgtgtctgctagctcacagggaaacacactgtataggtgaccatgagaatggccttcagactaaccatcagtaggtatttctaattgtaactactgatgggagagttccagttgaacatcgcagaaagaaaccctcacttgacatgcacatctttcaagtatcaaaacacctgttcagatccctattgaaagggagacaggatgactactcattttgtgtctgcaggtgtttcccacatgtctccaaggctcacccaattaatccattttgtcaaaatcctcagaggaagtatgaggtagaggaatgagcttgcaattggcagcctgaacaactctattctctaagctggactctgggtcttggctt

SEQ ID NO: 9281 - DNA, 434 bp, Homo sapiens
gcgaggtacctaaatcaaataaaggaaacatcaaccagacacaaatccaggaacaagtgcaaatgcctcacttgtcctgttcaaaatgctaatataagaaagacaaagcaagaagcaaagaatcgttcaaaataaaaggacgtgggccaggcgtggtgactcatgcccgtaatcccagcactttgggaggccgaggcagccggatcacgaggtcaggagatcaagaccatcctggctaacatggtgaaaccccgtctctactaaaaatacaaaaaaattagccaggtgtggtggcgggcgcctgtagtcccagctactcaggaggctgagacaggagaatggcgtgaacctgggaggcggagcttgcagtgaactgagattgcaccactgcactccagcctgggtgacagaatgagactccgtctcaaaaaaat

SEQ ID NO: 9282 - DNA, 456 bp, Homo sapiens
tgcccggcctctctccagtttccagttggaatccaagggaagtaagtttaagataaagttacgattttgaaatctttggattcagaagaatttgtcacctttaacacctagagttgaacgttcatacctggagagccttaacattaagccctagccagcctccagcaagtggacattggtcaggtttggcaggattcgtcccctgaagtggactgagagccacaccctggcctgtcaccatacccatcccctatccttagtgaagcaaaactcctttgttcccttctccttctcctagtgacaggaaatattggtgatcctaaagaatgaaaatagcttgtcacctcgtggcctcaggcctcttgacttaggcggttctgtttatcaagtgacatcttcccgaggctcctgaagtggcagatgaaggagactagttaaccctgcctgagggaaagc

SEQ ID NO: 9283 - DNA, 344 bp, Homo sapiens
  misc_feature 344: n = A,T,C or G
ccgggcaggtacatgtgtgcttttttgcatgtgtattacatgccaagggctttatatatgttatgtctgatccttctgacaccaccacgaagtaatattaattgtccccattttataaataagcaaactgatgcccaaaagattcattcaagcaaggctgtgcaactagtaaatggcaggaccaactttggcctgatgttcttttcaccgcaccacgctacctctttcagatgtccaagatggagccacatagcttggttatggggttccattagtctgccctcttatcttatttcagcacctaccctgtggccatgaaccattgattcataattttcctgtan

SEQ ID NO: 9284 - DNA, 805 bp, Homo sapiens
  misc_feature 10, 15, 31, 67, 69, 120, 121, 353: n = A,T,C or G
ggtggtcaanttcanactgcaggcgtctcgnagctccaccgtggtgaaggccgccgactgaagcggntnggaattttctgatgaacaggacacatattcgtggctgggatgaaacgaggnngcagatgtgaatagaccatatcagaaagaaccttgaggcaaggccaaggaacttgagcttcatgctctaagcagtccccactgagggcttgcaccctccagagtgatggggcaagattatagctggcatgctcagaaccgtgcatgagcgaatgaacctctgaatgcacatacatatgagcatgcacattagcaggagaaaaaggtgcaggaccacagctgaaagtaacggngaagcacagaggaatttaagcaggagggtgccattgttagctttgtgtttaaaaagccctttctagttatagtatggaacatgggctgggtaaggcagggagattgggaaaaggcaggaagtgggaatgggagacagggagaaaagtttaggaagtggtgatagtcaaggcaagaggtgatgaggcctgaaccaggaaagagatagaggagtaagagggagagatggatattttggggactaaagctactattgcttggggggtcaactgttgtgggggtgaaaggaaggaggtggccgggtgaactatggtgtctggattgaacacctaggcagacgttggggctattacaagaagagttttggttaaagcaatgtaactttgaaaaacttggaggaataccgttacttccttcaaaatacctgcccccgggccggtctaaaactagggaa

SEQ ID NO: 9285 - DNA, 450 bp, Homo sapiens
  misc_feature 97: n = A,T,C or G
ggggcgtaatcgagccattgatgtatccgggcgaatttagctgcaacgccgtggcggccgcttattcaatttctaacagggatttacacattcttangctatcttgacagaacatgggaaaaggcagtaatagacttgtatatctaggatacaataaagatgtaaaatctacccttatgtcttttctagtagctcatatattccgcatttgaaatgtggtgatgatatagtcacttattcaaaaaacacaggagtgcctactgtgtgcttggtatgatgcctggtgcagaagttgcaaagtgtatattcatggagacagccaagccaagcagggctgggacacaaatgtgtcctgaattgctgtgaggtcccaaggatgaaatgcctacctgttctttgcagaatcaggaaggctttgcagaagaggtggtctcagagcttggagtacct

SEQ ID NO: 9286 - DNA, 438 bp, Homo sapiens
ccgggcaggtactatgaatgttctaaggcccttccaaacctgtaaattctatgattcaatgaattacagaatatattcaaagaattatagaacagaacatatattccacgttcatgtgctctaccagaacacatttatttgctctattcaattcaacaaatatttaggtccggcatggtagctcacgcctgtaatcccagcattttgggaggctgaggcgggtggctcacttgaggtcaggagttctagaccagcctgggcaacatggcaaaaccccgtctctactaaaaatacaaaaatcagttgggcatggtggcacgcacctgtaatcccagctactctggaagctgaggcaagagaatggcttgaacttgggaggcacaaagttggcaggagccaaaaatggaccactgcacttcacatgtggtgacagaattg

SEQ ID NO: 9287 - DNA, 356 bp, Homo sapiens
aggtacctggtgttgattagcctgtgtgagaaagataaggagagctggtaattataattgagcatgtgccatatgccaggcgttatgttaactgctttacatgcattacctctttaatccttataatcctcatagtgctattattatgaatatttaacagctgaggaaacataggcctacaaaggttaagtagcttgcttaaaatcattcaaaagtgatgtggtcagaattaaattctaagcctgtcagttctcagagcacatgttatataaactctctctgttatactgtctgcaagataggcagcttttaatatttgaaggctgtcaataaagattatatgagagtagttccag

SEQ ID NO: 9288 - DNA, 436 bp, Homo sapiens
aggtacatgaacttgaatggaaataaaaaggttaaaagcaagtaagtggtgctaacaacaacaaaaaggaacaaatctgaagaagtgggaacgtgatgaacaaaccccagccccctgagcctcggggacagcacagatgcgtgtgtattgcagcacagaggggcagggactaaggacagaagatgcatttgaagacatggtctaaaacttcccaaatttggtgaaagacaaatttatagattcaagatgccaaagtgcaataaatgcaaagaaaatcacaccgaggcacctacgtgcaaactgctaaaaaccaaatctttagattgttaaaaaaaaaaaaaaagaaaaataaattaaaaaaagagtcaacccataattctagatatccagcaaaatacccttcaagaataaaggcaaaatataaatcttagagaaa

SEQ ID NO: 9289 - DNA, 481 bp, Homo sapiens
ccgggcaggtactgttcattcaatttttctgaatatttgaaaaattttaacataaaatcttgagaaaaagtaaactgtagatgctaatagcatacaaagtgcagtcagtgtggagaacagaagagaaagatgaattccaatgaagagattcagcaggtttgtggaggagatgggattgagcagaaacttaacagattgggccttttaggtggaggagacaatataggaaaggcacaaacctggggaaatgcacaatgtatgctgaccaagaagtggtctggcgggtagagtaaggctggaagagactctgggagaggaacatgagaggtcccagggctctgaaccagggcaaccaacagaaaaggaagggacagactgggctgggaatcatgaagagctgggtgttggttggagacacaacccttgttcaagtttgagtggaaagggacactccatgtggagacagtggggacaccagagt

SEQ ID NO: 9290 - DNA, 461 bp, Homo sapiens
aggtacgcggggattttttgaaaacaaagcgatattattttgacatccttaaaatagttagcatttgccttctatgtatttgtgaatgagatctcaaaatataatacttttcataagaaaggtcgcagaaataatatatgtcagcattttaagaaggggtatgattcgttttctataatgctaatcaagtaaaatgagagtctcagtgaagtggcacataataaaaatcttaaaatttttcatatccttttatcacagtaagacaaatgtttgttaagaaggaaagaaactaagaaagtatttgaggtcctaagtgagcccaaggcacaaggcaaatgcaaaaaatcctcaagtctttgtatcttcgatcacccccattatgttgcagtaattaagggtgaaacaaaaagaaggtcatgtttaagtgaacctaaaattctgttaacggccgctcttaaacg

SEQ ID NO: 9291 - DNA, 467 bp, Homo sapiens
ccgggcaggtacagacagggaaggacttgctgttggccatctttggagattgctgaccctggtttgcagattcttcttaggaactgtgatctttgtggttggggagtcatatgatctgattctttaacctgctgaaccttgagaagctaagagcagcaaagaaggggccagaagtagagaaagaaagaaaattagagaggcacagaggaaaggataaaaggggaatgaagtcagagaagtggagtctcaggaaccatggatatgcaactttgtttacaacgaactttctgctgcctttctaatcttcaaattaaaatttattttggccaccttattcccaaggggcatagcagatctggttcctgaccagttcaccttattggaccaataaatctcatgtgtcacatgatccactgactgtttctcttgtgactttgtcctggtcttggtcattttcctaatgagat

SEQ ID NO: 9292 - DNA, 458 bp, Homo sapiens
tgacctaagtgtatatttatccaaacatctaatttattccagctttagatcttctcgcatctgagttattaaaatacacatttaatttacaatacctactagtatttatcaaaaatttactgaaattattcatggtatttggggggaaacactatctaaaaaggacccatgattgattatttgtttatttatttatttagtgcacttgattttgcagatgagtctggaagtgttagttgcaaagatatgcatttacttctctggctacaaaaaagaatagaattgcacaaagcatagcattgtgaaaaagaagaggcgatgacccctacaccgaccaaagtcccgtgctccactgcccagtgcctatgtcccaccactgtcgctgccaccctgcccgagagaaaagctgaaggggatgctaaaggagataaaccaaggtttagtaaggactgcatagt

SEQ ID NO: 9293 - DNA, 477 bp, Homo sapiens
ccgggcaggtactccaacccaagcaacagagcaagaccctgtctcaaaacaaaacaaaacaaaacaaacaaaaaaaaatgaggtaggcatgttttattcccatcttacagatgaggagactgaggcaataataattcaatggcttatctaaagtcacaaagctagtaaggagcaaatccagttctgtctgcttccaacccaccttgtcccacttgcttctttattggagaaggggcagatatttactctgcagtccagggagcatggagagtcaagtagagaatcaaagtcagcaaagctgaacaccactgagagactgagaggaatgacagatgacaagagacagggttgggaattagtccattaggagccagcccttaacagcactgtggagctgggttgggagagggtgaggagccaggccaggaagagcagaggaacagcaagtgaaggaaaacatgacatcacaaacccctg

SEQ ID NO: 9294 - DNA, 608 bp, Homo sapiens
ccgggcaggtacatcaccctgctgagggacatccaggacaaggtcaccacactctacaaaggcagtcaactacatgacacattccgcttctgcctggtcaccaacttgacgatggactccgtgttggtcactgtcaaggcattgttctcctccaatttggaccccagcctggtggagcaagtctttctagataagaccctgaatgcctcattccattggctgggctccacctaccagttggtggacatccatgtgacagaaatggagtcatcagtttatcaaccaacaagcagctccagcacccagcacttctacctgaatttcaccatcaccaacctaccatattcccaggacaaagcccagccaggcaccaccaattaccagaggaacaaaaggaatattgaggatgcgctcaaccaactcttccgaaacagcagcatcaagagttatttttctgactgtcaagtttcaacattcaggtctgtccccaacaagcaccacaccggggtggacttcctgtgtaacttctcgccactggctcggagagtagaccgagttgccatctatgaggaatttcttgcgatgaccccggaatggtacctcgggcg

SEQ ID NO: 9295 - DNA, 361 bp, Homo sapiens
  misc_feature 361: n = A,T,C or G
aggtacctggatttgaaaacattacctgagagaaaggtgaattattggggttcaggtcaattctgggcaggatctcatcagagtcagaatgtggtcacaaagtccttcatagtggacagaggaaaactaggaatgtggttgatgagatgaggggaaaaaaaagaatagtgacatgaaagaaaatctttgcctaaataacaactttatataaagctagctttgtgcctcagaagggagaatttcctgtctgcttcccttctgccagctgccagcattcacacagttggtattgatggttaggtttctgtgggctaatctgggattgtaattgccatttataattccaattccagagggaaan

SEQ ID NO: 9296 - DNA, 455 bp, Homo sapiens
ccgggcaggtacgcggggtcttgaaggaatcccttatttgcacgtctcccgttttcttttcacatcaatgcagagtccctctgtgaatttacaacacccaacacccatgagttcagtccttaagaaggaaaattgagcaagtatttaattggttggacattgcataaaagaggtccatatccaggctaactctagaaattttattctcaaacttagttggcctcttttttttctgtcagaggaccattcttagtggcactggggaaatcttggcacccagaagaattcaactgcgctcactgcaaaaatacaatggcctacattggatttgtagaagagaaaggagccctgtattgtgagctgtgctatgagaaattttttgcccctgaatgtggtcgatgccaaaggaagatccttggagaaatcatcaatgcgttgaaacaaacttggcatgt

SEQ ID NO: 9297 - DNA, 507 bp, Homo sapiens
gcacgatgggtaatacgactacagggcgaattgtagctccaccgccgtggcggccgaggtacgcgtttaatctatacatttccactttttgtaaaatcccataatttttctatagggaacaacagatctgtcatatactagcttatgcttttcttattctaagtggattttacagtttagaaaattccaagtaatcttgacacatcattattacccaaacaattacttccaagtcattgtttaaatagatgaaacccattacaacagaggtctcagaccttcttgcctcaggggccagagagatgacataactgaaatagctcagctttagccagcaattgcttaatggaaatgtgggatctttgttgctagctctgatttaaaaaagacagaaagaaagaaagccaggtagggcatggtggctcatgcctgtattcccagcactttggaaacacttttggaaggccaaggcgggcagatcacctgtggtcaggagttcgagaccag

SEQ ID NO: 9298 - DNA, 473 bp, Homo sapiens
ccgggcaggtacagccactattgtgcgtcctttcaagggacatcagggcagcagcacagcttaccctggggtccccctgggcaccccagcataagcagtgatgtgctagacagccaccaaaaccaaagtataactacaaaaccttgttccaaagggttctgggggagattcagggggaaaagttacatattcttaaaattttgatcactggtggatgcactcaaaatcctgctcctctctgggagcgattttcatgctgttcctgaaagctcagaaagaataggaaaattttatgttcagtgatagatgggctagacaatgggaaacctgcactgaaccagacacaaaggacctagcagaggtgacgcctgccagggctgtgcacctgtgttttcttaacatctgctgggaccccattagtaagtttctatgaaaatgaattagactgtgtgccttttggtcttgcgggtcaa

SEQ ID NO: 9299 - DNA, 409 bp, Homo sapiens
aggtaccacatgatcattcaaacactcaagcttgtttctgttgaagaggagagtcagaaaaagtagagcctaaaaagtccccaaaccagttaagtcacactgaggccagaactgtcatatagtatacacactccagggacaagaaattccgagggctcaaacagaagactcctcagagtggctcagcatggtctgtgataaacagacagaaacactatgaggaagtgctcttcacactacactcagaggttttccctcccacttacacatgattgttgccatctcagacttttcatagtaagtttttttgtttcgttttgttttgtttttgagacggattctcactctgtcccccagctggagtgcagtggcggtgatctcaaaaaaaaaaaaaaaaatagccggaagt

SEQ ID NO: 9300 - DNA, 349 bp, Homo sapiens
  misc_feature 264: n = A,T,C or G
aggtacatatacttgaggcatgaatttaaaggaaaagtcagcccatggtttggtgcaattccattttctactgttaaataaccaagttcttttttttctttatcatcttcgacagggtcatcagacctttttttttttcagaacctgaagtgggacatggggagtgaactcgatcttgctcttttgcaaattcaacgactaaagtatgacctaaaagtttcagttgatggagtcttgtcaatgcctttatagctgcttttcatntagggaatgtggcaaaagctgtatgttttcagtcgccccttatctgacaggacccgcacagactgagccccgaagtacctgcccg

SEQ ID NO: 9301 - DNA, 278 bp, Homo sapiens
gccaggattcaaaccagggagtctgctccagcactccggctcttaacctcaaccgtctgcctctccacaaacaccaggatcaaccacctagaccaaaaaaacagtctcacaaaccatcaaacattgcacttggtggctcaggaccttagcttcgtcttaaaggtccctgttatgctttttctgagtgccccagtgtggagtggtcttcgtgtttgtgagtgcaggggtcaggggttgtgtcttttcttcttgtccccttccaagaggtgacatgtatc

SEQ ID NO: 9302 - DNA, 398 bp, Homo sapiens
ccgggcaggtacaggtggtaactgcaggggtgattaaaatgtctaagctgtctaaaagcaggaaaagcaaatagatttcatctcttatgttaacaccaatgagaaagtagtgagtatgagttgagtatgattcttctgtgggctggaaggaaagagcttgctgggggtctctgcttcttggtcaggaagaatggcctcaacttcacttagctatccctgtttgaaaataagttctttcctctgtagatgttttccttgttaatttctgtgcatgcctttaggacctctgccatttctttcctgtccgcttttcacttttttcttactgttgaagaacctatctctgccagacttctttatttccaattggttgatttctactgccttgctccatttga

SEQ ID NO: 9303 - DNA, 466 bp, Homo sapiens
ccgggcaggtacctatagcacaagctgatgatagctggcaactgaacatttggcttcaatgtcagagtaatagagtgtggcaaactgcagagctcatgctccgcctaaaaggggcagctgctgctcagctcctgccaattaccaccatgccggaaattgggcctaggggtgcttcagctcctcctgtttttacccagaagctagggaaatctgggttttttatgtggaaattggtcctaatttttttaaaatgttaagcattcccacttcttgaaaaaaaaaaggcaaaaatcacccggtgttgggccctaaaataaaaactattttgcttggccccaaaatgcaaagccttgattttggctccttgtttttcaaccccccttggcaccaagaaatttttggttccattatcttctactttggtggtgacccttcggccccgcttctagaaactagttggaatccc

SEQ ID NO: 9304 - DNA, 448 bp, Homo sapiens
  misc_feature 448: n = A,T,C or G
ggggccattgagactgccatggtagacttgtttggtatcgtagctgagacttctggagagaccattcaaggcttctggctcttgacaaagatagaccactggaacaatgagaaggagagaattctactggtcacagacaagactctcttgatctgcaaatacgacttcatcatgctgagttgtgtgcagctgcagcggattcctctgagcgctgtctatcgcatctgcctgggcaagttcaccttccctgggatgtccctggacaagagacaaggagaaggccttaggatctactgggggagtccggaagagcagtctcttctgtcccgctggaacccatggtccactgaagttacttatgctacttttactgagcatcctatgaaatacaccagtgagaaattccttgaaatttgcaagttgtctgggttcatgtctaagcttgtcn

SEQ ID NO: 9305 - DNA, 473 bp, Homo sapiens
ccgggcagttacactgatttattctcaggagcaatttaactctcagttcatatttgggagaaagagattccataatatgccaaaccaaaaatgaagttattgtttaaatgtgatcatgtccataatttatctccctgggatcccttatggttggtttctatctgcacctgaccaaagtgttctatcataggattcaagggatttatgggctgggcacagggggttcacgcctgtaatcccagcactttggaaggccgaggcaggcagatcacctgaggtcaggagttcaataccagactgaccaacatggagaaaccccctctccactaaaagtataaaattagcttggcatggtggcgggcacctgtaatcccagctactcgggaggctgaaatctgctctttaattctagaagtaacatcaataatttttttagataagtagatgaacagatttatattcatctcaatttt

SEQ ID NO: 9306 - DNA, 342 bp, Homo sapiens
aggtaccgcatgctggatatggacagcagccttagttcagaaacatactccaagcaaatcatagagaatgtcacctcctttaagcttccatttctttataagaaaaaaaaaacattttgtagggttacataagaaggcaataaaataataaagagaaagcatagagcctggcatatactacatgttcaatatgggacagaatgtaagcaggagcaataacaaaagtggtagaaatttggataagtcaaagaataagatgtggaaactcgggaaagggagcgattaattctgacctaggctgcacctagccattttggagaaagtgatacaaatagaattttc

SEQ ID NO: 9307 - DNA, 324 bp, Homo sapiens
ccgggcaggtaccatggatggaagtggggctttggcaaaggccctagcatttatgcctggcactgtggactcggtgttgtctagcagagaggccttgaggaagtggcccagcagtgtgcttgcgtttccaagatatctatcacccaaaagacttcgagatagacaagctttgttccctgccaaagtgacaaatgtcagcttgctggaaaagtttgaacgaagtgagagtggtgggaagattatgacccctgaaagcttatcatatccaagttgtctgaaacacgacagtgagatgaagccccaaacatctccagcttgccagga

SEQ ID NO: 9308 - DNA, 350 bp, Homo sapiens
  misc_feature 350: n = A,T,C or G
ccgggcaggcacttcttccaaggcagtggtcattagggcaatgtggtattgacacagggagagacaaataggccaatgggacaggattgagcattgggaaacagcccacacaaatatggaagcttgctgtgtatcagaggtggcctgcacatcctgggaagagcatggacttttcaatcaaatgttcaggagcagttggatacccacactggaaaaacattaagttggacccttaattacctcacatcatataccaaaaattcattcttgtcattctaggggattgaagacctaactatgaaaagcataactataaaggtcacatgactgaatatagaagaatatcttan

SEQ ID NO: 9309 - DNA, 482 bp, Homo sapiens
aggtacagtagttggatgtcgaggtttgattagattctggggttggtttgtttgttttggtggattgtttttgagtcgactttacagagggttgtttatccaccagaaggcacatgtgcttgcctgtgtcttttttgttattgttttgagacagagcctcgctctgtcttccaggctggaatgtagtggcacaatcttggctcactgcaacctccacctcccaggttcaagtgattctcctgccttagccctccaaggtgcttggattaccgggtgtgggcccaccatgccaagttaatttttggatttccagaaaaaaggggggtttttgccctgttgcccagcctggttttaaaattccaccccctaggtggacccccttgcttgggtcccaaaagggtttgaaattacgggggggaccccttttttttggcaaatttttaaggattttttggaaatttttttctttttaagggaaacaa

SEQ ID NO: 9310 - DNA, 472 bp, Homo sapiens
  misc_feature 454: n = A,T,C or G
aggtacctctgtaaaatgaccttacacagaataaaagtctaggccttatgagtttatgtgaggtaaaaagttaatgtgatgctgagaagttatgttaaaagtatacttttatgtaagatttttgctcccctccatgtttacatagcatttccttactatcccatattggtttatgagaaaaatctccctaaattgaagattcttcacatcttccatttggtctctttttttggagaacaggatctcactctgccccccggttggagagcaatggtgcaatcatggctcaccttttattgattagcacttggagaatggttttaagaaaagcctggcttttggagtgaagcagctttaattggtatttagtattaaagtatagtagagaagcaacttttatggtttccagacctctttttacttcttaaatatttgaggtacctgcccgggcggncgctctaaactaggtgga

SEQ ID NO: 9311 - DNA, 465 bp, Homo sapiens
aggtacttttccactttgtcttctttcctgccacacaccctatcctttcaggctgtgttgggatggacaaaagcagttctggagtcctaaggagaagatgagtgggatatgtttctgtgacctgcagtcattttaaagtttagctgttgctagctgactccatgtaagaataccttccaggaatttgatggctgtgcactccggcagtgcagctggcatggttatagggtgcttggccgaaggtttgcattaccattttaacccattcttccacacattttgcccacactggaagactgtggggttatgggccagaaacccaaattggcttttttgcaaggtttttaaaaataaatcttctttgtgactcacatgtgaaagaaacatgagagggttttacaaatttcagtatttgggaaattttcatttcttccccctagtttggaaactgaaatttttttttta

SEQ ID NO: 9312 - DNA, 810 bp, Homo sapiens
  misc_feature 282, 283, 290, 304, 305: n = A,T,C or G
aggtacattctacaaacttttctttaagcttctaattaaagaagaaaaaaaattaggtgaaatgctcataaatcaagggcactgtgacccagtaaatcagcaggcattagcatgacataatagaaagtgtcccaactctgcataagtcctagctccataatgaacagctatttgttcttggacaactttcttctcttaggctcaatgtcttcttctacccccgtgtactttttttttttttttttttggggttttttttttttttttttttttttttttttnnttttttnttttttaaaccccnngggggtttttaacaaccccccaattttttttgaacattcccaggtttgcgcattttttcaaaaaccccacaagatcccctaaatttggctataattttattaaaagccggggaaaaaacctttattaattttttaccctcccaaaaaataccccttttccacccttttaaaattttttttaaaaaaaaagccaatttttttggggcatttggggaacatggcccataaaaaaccaattatttttttcacatggcccttaaactgactacaaggggccctttttttgggggggaataaagtccaaacgccaaggtgttcaaaggggagcccaagggcctaccctccctaaaaaaaaacccttcaaaaaatctattaatttttagggggcccaccaacgctttccaaagagtgtttttttttccccatcattttaaaaaaaaagtttgcacatatgtgtgtgataaaataaaaacacttttaaaccaaaacgggggtctcacccggg

SEQ ID NO: 9313 - DNA, 788 bp, Homo sapiens
  misc_feature 488, 582, 606: n = A,T,C or G
aggtactaccctccttgggggtcatttatgaatgtgggcagggatgaacgattgggtgttacaatcctggggagcactgcagggactctgtgagggccccagagatgcttaaaatgctttaagtggggcagtcctacacaatgaaaaattgggccacccaagtgcccaaatcaccacaccagaggaacacgtgataacccacccctctccttggacaatggggaaaccaaggccttggctggttagcagcagggtcaattctaaaacctaggcttctttgcccccagttcagcagttattctgtgataacatacagaaaacaaacaataaagctgggtatcatgttacacacttagcttattcaagaaacaaaacttcctgcttaaatccagttgcctttttttctgactcatttttcttcttctggcactagaaccagattaccacccagccaaatcagggcacaggccctgaccttcacacacctncctctcaaataccacatgggaccatttgttagcctgaatacaggaccactgcaattagaagaggctttagtggaaaagacatggccaaaagcanatgtcaactgttagagaaccctgncatcccaaattaatattcgtgacagctatttgcaagtggcctcaaaaatcatgtcctgtattcgcaaatagcttaattcaatggggcacaaaagtaaacacatggactctcaggctggatggctacattgggtcttttaggatcagtatttacctcacccagctccctgtctttacttttca

SEQ ID NO: 9314 - DNA, 478 bp, Homo sapiens
aggtactcagaaatgcaagaacaaagtaaaagccaccatgagtcacaaacatatattctttactctcatcatctttgccacagaacttttgcacttgatcttacttttgtttttctgataatttgtgttttttcctttcttaaatggctctaagttaactcttattagaaagtttcaaacccccttctctcatcatcatgccccaaaatttgtcaaaaaaaagtttcagagatattatattgagttatttaggccaaaggcaataaatggctcttacaataagactttgaaaataatgtaatactctacaataggcatggtgtatcatgcataataaccctacccctttagagggcttgggcagaaagatccttgaggtcaaacatttgagatcagccagagcaacatagggtaccataatttgccccggtaataaattttttatattggttctttcccgggggggcctttttaaatt

SEQ ID NO: 9315 - DNA, 167 bp, Homo sapiens
ccggtcaggtaccaccatccccagcacatattttaaagttattcagacgcacctcagaactagggtaagtgcagtttaggatctcaactatgaaaaccagaggcaactggcacactttcattattaactgcaatgaaccatttaccaaccagctaattgctttctcc

SEQ ID NO: 9316 - DNA, 468 bp, Homo sapiens
aggtacgcgggatagttgctcagcatttcttactgcatgaaataatctttgttgtttttgccaaactctttaaattccttgaaaatgtgtattcttactaaacaaccttttctcctgagtctttggcatcagttagaagttaaaaagcactgcaagttttttgtaatcctgaagaggaggaaaagatgccaaaccagagtttattcaagataataagtggtatttttgagagatttattctctctcctctgaagcctgtttctactttagtttcacttccattttcctgcttctttgataggcagtgagatgatttttaatagcacatacactctgtcctgtttatagggtgctatcatttaatgagaagaaagtcaaataggacaaaaccgcaaatctttgaaacaaaactagaaagccctaatgggggctgggcataagggctcatgcctttaatcccagcacctg

SEQ ID NO: 9317 - DNA, 503 bp, Homo sapiens
aggtacacttagattgatttttttctaccagaagaaatttctatgtaaaatgcttaaaaaccagtcatcaatttgatttctgtagcattggatatagagtgtgagcttttaaggtttttaatgtgttgccaaatgttatttcccaaaaggctttatcggtttcataccctgctggtgagctctgtcctgttttactagctttcagcatgtgtgcgtgtgtgcgtgtgtgtgtgtgtgtgtgttagagatggggttttgctttgtctcccagtctggagtgcaaaggcgcaatctctttttactgaaaccttcgtctaccccattttgatcaattggtcctgaataaggcttttaaaaggtgttaatacatttgtttaccacaacacccagttaagttttgaattttaaagggaaaaggggtttccttggtggcctttctgaaccctctgacctaaattttctcccccctgggctactaaagtgctggtatcacctgcacgccc

SEQ ID NO: 9318 - DNA, 457 bp, Homo sapiens
aggtaccttcaattccagtcacatggctcgacctatctctcaaacttcttaaatgtgtagctttcttcttcaatagtgagaagtcttgctcctattgtctttaatatatttatatgttttcttattctactttacaaaaccaatattttgatacacatgccataaccttctcagctttaacattgctagtcatctctaatcataccctcagatttgactctgaatggtccttgttgtctcttcagccccagttgtttctttggcactggccgtcctcctgacctctactgtctccttggccctcaccctgaaagtccttccagactcacttgcctctggctctataagaccctgggtatcaccagggcctctgctcccttcatagaacccgtgtccctgaggccctactggctctagctacattaaagagagggaaaggaaaagaacccattgttcc

SEQ ID NO: 9319 - DNA, 467 bp, Homo sapiens
aggtactaggagaggtcctgtgacctttccagtgcctcagagagtgagaatgggaaagaggagtggatgaagtagggcttaccctcctgtgggtcacctctcttccctgctgcttctgaaccccactcagcctccttccctcttccccagcaactatcccaaagctgttacatcgtgtggcaaacgtttactgaggcttttagggataatataagtcggtttctttacaaccattccttcacagccagaacgcacgtaatttaaaactgtgtcattttcacacacgtcccataatgtctccttcatggggagcttctcatggccttggtctctccccagaggctgcctatggccatatttctggggatccaattctcacacactgggcccctcattcttgggcttcccaccttcaggtacctcattcttgggctgccccaaacagtcaaatccttattttcaagcgg

SEQ ID NO: 9320 - DNA, 487 bp, Homo sapiens
ccgggcttgtacaagttttttttctcatggaaatgttggcatattaattgatccacacaatcaaatatattagaaatggtgttcataaaagccctctaagggaaacagtagaaatctttttttcaaaacccttctgtgaaagcttgctgttaccacaaattataataaaagaccaaaacacataccagttatcatctatagactaccgtccctgagcaaattacttgactcaaactgttaatttggattaggaccattttttgtattttttggaaaagaatatcctgtgggtattttctattagaggcaatataattagacgatctgcttgtgttaatgctttctataaaatcccacataatgaataaaaaggatagcttatccattttaccttggattataaaaatcttgaccaggtgcgggggctcacacttgtaatcccagcactttgggaggctgaagcaagcaggtcatttgaggtcaggag

SEQ ID NO: 9321 - DNA, 405 bp, Homo sapiens
aggtaccatgtcaggatgactgtctacgtaatggaagccctgtcgccagcttttcagcttcctttcaaattcccccaactccttcttttttcacgcagcaacttgtctctttccatggaaatgctggggatttaaagaaggcggggactcagctttgcttccactgcgcagccccagatacaggctgcaggagtcccagccaccttcctctcatcatgctttcttccagggacagagttatggcccctaggagagggttttgttccaccggaacagtcagttactaatgagctcatgctgcttttccacccctggggtccccagccatcctccaaccctgatctcctagggcacctttatctggcagctggagactggggggagtgtgtggacccttccgggccg

SEQ ID NO: 9322 - DNA, 846 bp, Homo sapiens
aggtactttctctttaaatcactacaggatgggattccaccctcatcatgcctcttgtcacaacccccatgttgtccaatccaataatttttctgtcttcttacttgacctcagtgacatctgacaattgagcttccttcctctttctagaaacttcctctcttgccttctaagacattatgttccccatttttctcccacctactggctcacaatctcagtttccttcctctagtcctcctcttctaataaacctcttaatatcaagttttttcaaggattcatcctgtttctctcccttcccctaagtcacaggtttgcaaaaaagacaaaaccaactcctaaagctttgcaaaaaagacagaaccaactccaactcctaaagaagctttagacatttctagcagtggttttggggaaaatagtaattgcattaagtgaggaagggccagagatgccaggtattcttcaatgcaagagagttcccaacaatgaagacttttaccatgtcatgattttcaaatgtgccactagataatcacatgggtaagaaacctacctagaagaccaggtgtggtggctcacaccttgaaacctagaagtttggaaggatgaggcgggaggattgctcgaggtcaggagttcaagaccggcttggccaacatggtgaaacaacgtctttactaaaaattaaaaaaattgcccgacttgtggtgccatgttgagtcctagccactcaggaagctgaagccagagatctttaaacctggaggcaaaggtgcattaacctaaacgggcactggactccagctgggccccggaggaaaaaatatttataaaacagct

SEQ ID NO: 9323 - DNA, 476 bp, Homo sapiens
aggtacttagcatgagctcattgacggtgaaattggccatttatacataggcaaatctataaggaaattaacaatatttcacatttcttctaattaatggtctttttgtgaacatgcactgcctactaatgtcagcttatctatgatttgaatgtatagctttctaaagcgtagcaatttttttgcatatttatgtgtcctaagagagtccccccgcttcatttttccatctctcagcctcatgaaaggctacctctatctagaatttgtgacagaggaagctgagttttggggttgatggaatcttcctggttacaatctagaactattagagttttgcaatgatagtaacagcaatgactaacccttgcttggaatagtagcctttaatcattatcctcagtttctatctgggaaaactgagtgctattttaagcagtcttctgctagtagtggcaagaatggagacataaatc

SEQ ID NO: 9324 - DNA, 450 bp, Homo sapiens
aggtacaaattagacggtgacaacatgcaactactaatttccaggacgcgctgaaacagatccaatgttaagataaaaataaactaaaatgattttcctctggtttgatttaggtagataatcaaggccataacatgccgatgtggaaaaatgtcccaaccatccccaggaatgaagaaaactaataggcaacaaaattgttaaaaaaaaaaaaaaaacccagctcttcttaggacattctttgctttcttttggtcttcctctttctatttaagccctgtattgttgcccaatacaccctatttaggtctcattttcttatctatgtcccacatactgagcctttcagtttcctttttactttaaaaagctatgtccaagtgtcatgctcttgattgaaggcagaaagacaacataataaaagtaaccactgctattgggcaacctctt

SEQ ID NO: 9325 - DNA, 341 bp, Homo sapiens
ccgggcaggtacgcggggggctgaaaatcctctgggttggcaattgtaatcctgtggacattggtaatacccgaggatgcaaaatttccccaaaacaagcagaaaattttccatgaattgctgctataaagctgaattcctctccccaccccaacattttataaagagcaagtgacttttacagcctctgggtattgcccaatagcgatctggaaacaggctgctcttcgtttaaatgactgaacacacggttggggatctgttctgaaaggtggagggtgcccgcttgggaatagggacattataaatactggacaattgaagacaatatttctgaagtg

SEQ ID NO: 9326 - DNA, 799 bp, Homo sapiens
  misc_feature 626: n = A,T,C or G
ccgggcaggtactcactttatttctatgatcacctcactgtagttttcatatgatttcccagtaggaacagttagtagaagctgggtgaagacaactggggattattatatcttagcctttgggaggcatttcatagcgttttccatttagaaacattctcagacccagaactgttagtagaacaaaagtttccatccccaaagtgacttgtaaggataaaaataatcttaaacttttaattttctctcatttgtcaaaatcagtattttctatttttaaatgtctaagactagaataattttctttgagttaaaacacagggccaggcatgatgcctcatgcctgtaatcccagtgctttgggaggctgaggtggaaggattgcttgaggccaggagtttgagaccagcctgggcaaaatagcaggaccccgtctctacaaaaaaatatatttttaaaaagctaggcataatggtgcacacctgtagtcccagctgctcaggaggctgagggaggaggactgcttgagcccaggagtttgaggccacagaaagccatgattgcaccactgcacgccagcctgggcaacagaggtagaacctcttctctcaccaaaaacaaaacanaaccaacaaacaaaccaaccaaccaaacacacaagcaggtgtatctcaacatatttgtttttaagcctaacttagcttttctaatttacctttatagagttaagtattgaatactcaatcctgattgggaaaagctaaacttttctttaactctggtaagagaatgtaagtgg

SEQ ID NO: 9327 - DNA, 478 bp, Homo sapiens
ccgggcaggtacttgattgttctgaaattccttatgcatgattagagaaagagtaaatgacgtattttaggattgtgtttaacaaaagtgagatgctaattcttgaaaattaggcctctctatggggactgcacgtaatcacattaccctagatcttgagttagcgagagaatattcactgtcaggtgattcactgaccttgcctataacttgaaaccaatagcaaatccagatgtagtttcactggcctttgaagtccaaggcaaaaagacaaagcgtgactccctgtcttcccaatggatcctggttggcttccttgtccaggaacagaataaatttcctaagaaaattgacttttttcacagggaagaagccgagggtggaactttggccctaacttctatagggtgatggtgaacctttatctttccgggagggaaagggtttttctggttccctttctcgtgacaaggaaaaa

SEQ ID NO: 9328 - DNA, 461 bp, Homo sapiens
aggtacttaggccatctcaatcatcttcatccttttaactaagttattctaagacaatggtagccctgcactgaccactaagaaagcacacaccttgagccatccatccaactattataacctgggacttggtatctagtgatttcaaatctagtgattatcactgggctttcatattttcccccatgcagccaattcactctattgaactaataatctgactcactgggtggaatagccactcaatcttaagctctattcttgctggtgattggaaccctcctactcttggacagaatttcaagttgaccactgcctacctgtagtggactcacaagtattatctgactctctatctacttgtttttaaatcttgtgctaacaatagctgcccttgattacaggtaaactataatctttgtgcaactcaatgtcccctcctgctgaacctctgtaaccag

SEQ ID NO: 9329 - DNA, 482 bp, Homo sapiens
  misc_feature 331, 332, 333, 334, 335, 453: n = A,T,C or G
aggtacattaaaaaaatgcacggtgtgataacccacaatctactcaaaaccagagcttaattgtaaaaaatttaaattctctcatttttgattgtcataagcctaaatgaaggcatactaagcagttagacatattttaatacactttctcccagtttattttcttaactaaagtcaataagaagccaatgggttttcttaattgaattcccctttagtttgtgttatggaggtgctttaaatctagacactagggcaggcaaggaattcccctgacaattttattttcatagttgtgctgtgctggccaatatatattaaaatagtgggnnnnnttttttttttcttctctttcatgttatttgaactccgatcgaaaacaaaaataactgctggaaaattaaacttggaatttatttctcctggtttccggctaattttctttcatctagntaggttttaatcagctcccctgtctaggt

SEQ ID NO: 9330 - DNA, 505 bp, Homo sapiens
ccgggcaggacgcggggggtatagatgttttaatataggggtttgcattctagacattaaactgctgggcttgattctgtatttttgactgctacagtgtaaaaatatttttgctcagagaaggattaaggacagaaatggtttgtttcagtcttagaattttatttagaatttcactagggttgagcatgggcaatgcttgccttttcctctaggaagccatagctcctcagttggaatctgcaaacttttgctctgaggtcttgggagaaactgagaccttgggaatgcatcccggactccagagagccctattcctcagggtcaggatgtctcaagatgaaaaattatctaaaaattatgtttcaactctaatatttatttagctgcattttccactcaggcacaggcaaagaaaagtgccagaaataaaaagaccaggggatttttcacttctttagatgaaaagggcctggtgctttattccagaagtgctcatcactta

SEQ ID NO: 9331 - DNA, 480 bp, Homo sapiens
aggtacaattcaatggtttttagtatattcgcagttgtgcaagtccttcaatttttgagataaattagtaattgcataaaggttctctctcacttaagttttttatataaagagcagcagcatacttctactcactcagatggggttgtttttgcaatggtaaaagaaaatggacaggcctgttaggttcaagaactctcctgctctatatgggtgatccatgaagcagaataataaccacagatctaataagttaactttgcctctcaagttggaactttaagttttgtccattactcttatgctacatttcccaaataaaagaaaggaaaaaggaaacacaagggtaggcctctctgcagcaggccctaaatgaatccatccacttcaaaatgtatactgctatgtattcaataagtagaatttaactggaaattccccgtaggaaatactggagcaggtacaagcagtaaaaagggg

SEQ ID NO: 9332 - DNA, 346 bp, Homo sapiens
aggtacttttttaaaaagtgaaacaatttactttaaaacagcttgaaaaaatgatactgaaatacagatgcagtcaccaataaacgttagaaacgaaatattttaaggatacatttcctatttgtgtgtcttgatcttatgactacagaagagctctaaagcatttaggaaggagaaagagtctttgaattagtcatttattttagagtagtatttccataatcccctgggggtcttgtagaaaagtaaaattttgagtcccacttctctgaaattctgattcattaattttggggcagaactagataactggtatgtttaaaaaaattctcaaagtacctgcccg

SEQ ID NO: 9333 - DNA, 438 bp, Homo sapiens
aggtatctcataccaggcttgctgcatttgctgtttttggtattttacattcagctgctgttagcccatgctctggaaaaattacaaatgaaccaatgcagtggaattttcacttctggccaagactgagtaacaaggtctggatttaccctcccagctgaaacagtttgaaaactaggtttccaagacattgggcctcaggcatggacagtgatccttgcaagaggagaaacagatggtgagctgtatgattgccccaggatagagtttccaagaagggaaaacccaggtggaggcccgtggtctctctgagctggggagatgaagccgcaagtcaacggaggctaatgtggctggaattggcagagcataactcccaaaaaaagaaagttgccctgggagcgctctggagggttgttacatttccccttgagtggg

SEQ ID NO: 9334 - DNA, 488 bp, Homo sapiens
ccggccaggtactgttttaagatattggatggagaataataaattcctttttatttgcctactatgtgccaaacattggatgttatcttttaatcttaagaataactgaaatgtatgtggtgctagtttcattttacagggaaaataaaaaaagactgtgaggttaggtaacacacccaatagtaggaggagctctggtctgacttcaaagccccatttattatccagccaacctccttttattttatgttatatataaattctgcgatgaagactgcactccagtctgggtgactaagacggtgtctcaaaaaacaaaaaaaaagttcagtgctgacccctgtgtgcaaactgtctttgaccacagcactagacaggtaggtattcagtatcctgttaaagctgtgcctttgaaaattgtaaaccctgagaatgtaagatttatttacggtttttgatctttggtaaaaggaaaaagaataaatatt

SEQ ID NO: 9335 - DNA, 430 bp, Homo sapiens
aggtacaaacaagtgagtgtcaggattcaaataaggaggttttgctccagaggcctcctgaatttaaccactgtgctagagacacagggacattcaatggagcattaatgtcccgagctggtgacaggtcgagctgaggctatagatgtgttgaggagtcagcatcagtggaggaggaaagagatgcggatggagggagactcggtgtctttgaaatagataagagagagagacaatgtaatggtttccacttggcacagaaagaaatgccttactaattagaggaccagggagacacaagaggagcctaagaagaatggaatgaattagaatcatcactgtggagtctgcgatagggagtcaactaaagtggaaataagtaattaccaaataacaatgaggggtcagcatcggcaaaggaatatgtttg

SEQ ID NO: 9336 - DNA, 791 bp, Homo sapiens
aggtacataaaatacctgagaaatatattaaaaggacaattacagaactaactgaagagatagaaaactataaaatcttattgagggacataaaaaatatctgaacaaaaagaaaggcagtactacaatcttgcctgaaagagtttaatacacttggctgctaaaggcttatgtaaagtaaaaaaataaaataaaagactcagtataataaatacgtaaatgtaatacaattcaaactgtagccccagtagggtttttgagggaggagagggctctaggttgggggtagaattgataaaattttcttaaaatcaagtagcacaataaatgcctgaaaatagccaagaaagctatagaaaagaaagagtaatgaagaggttcttgccttactagctggaaagcatactgtaaagtaatatggaaacagtgtggcactggcccaagaatagacagagatacatgagggttatgaaaggtaagaaaaaaaaaaaaagaattgacaaatggatttgtggaacatactagaaagcccagtaagaggcctttaacaatatagtcatttgaggcctggcgcggtggcttatgccttgaaatccaacacttttgggaggctgaggtgggcgaaatatgaggtcaggagttcgagaacagtctggccaaacatgtgaaaacccattttttcttaaaattcccaaaaaaattagcccggccttgtggccaatccctgaatcccagcttccttagaggcttgggcaaaaaaattcttgaacccccagggcggggtgcatggg

SEQ ID NO: 9337 - DNA, 344 bp, Homo sapiens
aggtactaagagattgtattgattcttttgttgaaaaatatttaaaaggctaccaagtgatctgtatctgaaaaatctcttaaatatctatttcccagggggtgtttcccagttggactcctttgccttgagataggtggaaagctatttatgcaaatttcatggctctatctctaatttctatttcactcattgtttacccatatatcatttttaactatggaattctctccagagaagcaaattaacagattttaatattttatcagacaattcaagttgtgggttacaaattagagaggattaaaatcttgtcctttcacagcctttgaaatgttattcac

SEQ ID NO: 9338 - DNA, 505 bp, Homo sapiens
tgcagtgcctgaacacttttagccatggactcccgaaggcggcgagacccaatagttataaggccctgtgagtcaaataatttatttatgaaggccataagaagccagacaggttaaacacagtcttccttgtgatgctggtgaacagccatatacttactgatggatctcacctcccaactcagactcttatggtcagaggcatatttagtgctttcataggctgtgatctactaaggatcacaatttttttcctataagtgttcatcatcatagattctgtgttacactgcccaaggattcattgctcctagctcttggaaatttgtttgacatcactcagctagcaacccctttgggaattattttggcagaagagagtcacctttgccttatccatggtcatactccctaccaggggcagactacgtccaatgactggctaataaaaaaggcctggctcctcacctcaattcaagacaaccctgaaaggccctcctatctt

SEQ ID NO: 9339 - DNA, 492 bp, Homo sapiens
ccgggcaggtacatgaagaaaataaagtggatgaggagcgtatgcaaacaaggcaattgtttatttttctataaggctttttttagtcatctaaaactatttaatactttatattcttaaacatttatacatacagataacacaaatatcctatattttttaaaaccttaaattactttaaaatgaaaactgcttaggacatgtctttttatgatatgatggaacgtgtatatagtaacatttatttaaacttcattatacattttgcttctctgtgaccttgggcaagttacttaagctgactcaattttcccttctataaaatggagataactatacctttttttttttgagacggattcccactgcactccagcctgagcgagagagcgggactctgtcccagaaaaaaaaaaaaaaaaaagaaaatgcgtggaatgagctctgtgcaaggattttaccaactggtacaatgaagtttagaatgatttt

SEQ ID NO: 9340 - DNA, 340 bp, Homo sapiens
ccgggcaggtacccactccctcaattttctctaaaggtctcatttcagacatttaaatgaatattatgctacacaacagggaaactcagatgtccatcccctccttattcattcaaacatttccactgccataatatggcagctgcaacaccaagaaagaagaaaggaaaaaagactaaaagaggtgaagaatgaaaaagacctcaaagaaatttttttttaagagactgggtcttactctgtcacctagggtggagtccagtggtaggatcatagttcattgtaaccttgaactcttgggctcaggcaatcctctcacctcagcctcccaagtagctgc

SEQ ID NO: 9341 - DNA, 358 bp, Homo sapiens; identical to SEQ ID NO: 172

SEQ ID NO: 9342 - DNA, 433 bp, Homo sapiens
aggtacccagaggacacagttgaaatgaggcacatttaggaaaaactaggctgtttaatatccatattgagtagctttgcaagttactttcacaaacttccctacagaattggttctaacagaactgttcaaggccaaggatttgttttttctgggtctgggggagtcatctttataattttaatattccattagaatgccttgacactagaaggagggtccatctcaatcacatcaataaattgatcccaacctttataaaaataagcttggatagaaaggaaaatccgaaaactaaggtagtctggaataaatctataaggagacattttttaagaggaggaccataaaaggcattaaaacagagaacatggttctacccaaggcaactgagtttagtgctttccctacaattcttatttacacttaacct

SEQ ID NO: 9343 - DNA, 327 bp, Homo sapiens
  misc_feature 32: n = A,T,C or G
ggcatttcttcagggatctctgtgcatccttnggattatcctggcgagcgaggatattaaaaggggctggaaatgtgcaaaaacatgtcactacttagacattatattgccatcttgctgtttctagtgatgttaattatctccatttcagcagatgtgtggccttagatggtaaagtcagcagcctttcttatttctcacctctgtatcatcaggtccttcccaccatgcagatcttcctggtctccctcggctgcagccacacaaatctcccctctgtttttctgatgccagcttctcggcacttgctatttctcccgcgtacct

SEQ ID NO: 9344 - DNA, 469 bp, Homo sapiens
ccgggcaggtactgccaggcatgctcctgccttgggcagagtgtatatgtgtgagtgcacctgcccttcccacagcctagaacgttcctcctccagacagcacacatggcctgctctctcatttccttaaggtctttattcaaaagtgactttctcagtgaagccctgtctgctcaccctgcgtaaaatttcagctcttctttctatctctcttcccagatttttttttctccttcatgttcgttggtgtctaaggtttatcatctatttcgctaatggtcagtagaatgtaacctccacgtaagcaaggagttttgtctgttttgttcatgtctatgtccttagtgcctggagcattccctaatatgcagtaggtgctcaataaatgtcagttggattaatggctgaaagaaaggtcaccgctgtaaggatgggggtccgagaacaaacacagttaattcctggtccc

SEQ ID NO: 9345 - DNA, 328 bp, Homo sapiens
aggtacattcagaatccatttgaaacttctctcaacataatttaaaaatgtaagtcaaagccagctgcaaaaatttgtagatttggcccgagaaagtgcctggattttacaacaggaagatacagatcgaccttccatatcaagtaatcggccctgggggctggtatccctattgctaccatctgctccaaacagaaagtcctttaccaagaagaaaagcaataagtttgcaattgaaacagtcaaaaacttgctagaatctttaaaaggtaacagaacagaaaatttcacaaaaaccagtgggaagagaacaattagtacctgcccg

SEQ ID NO: 9346 - DNA, 450 bp, Homo sapiens
tccgggcaggtactttttgcatcggtggtagcttggtgctgggggtatgttattccccctctgtttccgcaggcgcccctctgagagaagagtggtcacagaatgttttctctatgctgagtaagccatcgaaagaaaagcacatgtgacttcttcagctcggtattaaccgagacaggtgtgaatagaagcggatttattcttcagctcccatcgaaccctaagtgttgatttcgccttcaacagtagttttttctaaccaaattcttcagtgtgtttggatgtgtccccagagtgagttaatatactgagggtcttagcagctgttgatagatttgtggtgtatatgagttttctcaggcatgtgtattctcactgagtagaaattctctcttgaccctggaatagttacttttattaggaatgtgtgatgttttctagattgtacct

SEQ ID NO: 9347 - DNA, 352 bp, Homo sapiens
ccgggcaggtacgcgggggggcggtaaaccacagggactcagtcaaaagcagaatcaaagaaatgcagaggaagtaaaaagacacagacataggctgactcaggaccctagagatgaacatgagattgacaggggcaccagccgacattcggaatctgctgccaagataagaacagcgaggctgggcgctgtggcttacgcctgtaatcccagcactttgggaggctgacgtgggcggatcacaaggtcaggagttcgagaccagcctgactaacatggtgaaaccctgtctctactaaaaatacaaaaattagctgggcatggtggtccgtgcctctaatcccagctacta

SEQ ID NO: 9348 - DNA, 348 bp, Homo sapiens
ccgggcaggtacttttttttttttttttttttttagatggactctcactctctcaccaggctggagtgctgtggcgagatctcagctcactgcaacctctgacttcttggtccaagcgattctcctgaataatacggtgggcattcaaaaatgctgttgaataaatctgtctggaaaaccgagcaattcaagatgacagaagacaagatgcttgctcatcagcaaataccactgaggtcatgtcatgagtgaggagccatgtgagacacagaaagcaacctagacagaaggaatggggtgtgtctctaactctggaagaactccagctttctgctagatctagtacct

SEQ ID NO: 9349 - DNA, 358 bp, Homo sapiens
ccgggcaggtacgcgggggaagcaaacccggcctcaccttttcctgcccgaagcagaagattctcgcagtcctggtttctccctccagaagacccccacccaaatcctctgtagctcctggtagtgccctgacccctgctgccaccgtccttcagagagcaacggaagagcttcccggagggcgaggaaaagagggaaagtagccagcaatgtcgaacgcagtgtataataagatgtggcatcagacccaagaagccctcggtgctttactcgataaagagcctcagaagatgattgaaccacaaagaaatcaggttttcatctttcaaacattagccaccttctacgtaaagtatgt

SEQ ID NO: 9350 - DNA, 284 bp, Homo sapiens
aggtacttgttaaaaattgtaatcagcctcttgacaatgtatgtgatttagacagcaaaacacaaaggttagatctgggctgataggaaggagacggcctatttgcactctggtgggcagggtggaggggtaagggaaagggtagcagagatgagccattttatagaggaggctctgtgaagccccaggcctcaaaccttggtgagtgggtagcagaaattcattcctggagaaatcctgtagccaaggctcgggaaggaagggcttctcgtccagaattcttt

SEQ ID NO: 9351 - DNA, 534 bp, Homo sapiens
ccgggcaggtacacaactattgagttttcaagaacagaaaaaagagagaaagtgagaatgagagtggtgttatctgtctttctttggaaactaatcaatcttcaaaaggaaaggaaagggacctctctcttccaacgaaggctgactgaaatgagccccaagccctattacccttgtaagaatggactgaatggatcccacctcagggagctttgccggccagaatcaacctgcttcctggagagataatgaggaggtgcagcagtgaaaaagaggcaaccatcctcaaagcccattctctcctcaccccaaacactgatggcaaagataggggccaaggtcagggacctgtcagaagccttcagtgaactgagttattcctggcagatggaagaaagccgggagaaataaatgctaaaatctttcacttcagaacttttctgaatcagtcaagatgacagcagagaactagtatgtccaaatataaacattgtatttgaagttatttgcttatgcttaggatcccgcgtacct

SEQ ID NO: 9352 - DNA, 333 bp, Homo sapiens; identical to SEQ ID NO: 183

SEQ ID NO: 9353 - DNA, 354 bp, Homo sapiens; identical to SEQ ID NO: 184

SEQ ID NO: 9354 - DNA, 462 bp, Homo sapiens
ccggtgcaggtactcgatggacacagaaggtcacaggcataagcacaaatgcctagagctccttttcaggtaattgcctgaaacaaatgggctaccatttagggcttctgtcacacaggaagtcagataacttaatactactgtatgtttgcagcaggactagatctagagatctagagaaggagtggcccactgtcctttcctagcactgggttgtgggtaagcagacacacttagttcccatccagcgttgatcgctgtcctctcttctttggaaggccagacgttaatctgctccgtagattgtcatcgttgggacacagttctgggcatgaggcttgtagtaacaagcaacataaacctggtcctggtcctcattgggctgaagggtccttgagctaaaagacattgggggagggtgggcctgatacagttttccagccctaggttataacctggtgg

SEQ ID NO: 9355 - DNA, 758 bp, Homo sapiens
  misc_feature 632: n = A,T,C or G
ccggcaggtacgcggggttttttctaaattctttttagattacatagcagtttcttatccctcaccatgattggatcacctggacagccataaaaatatggatgtctgttccccttataggccaacatggtggaaccctgacttctaaaaatacaaaaattggctgagtgtggtggtgggcgcctgtagtcccggcttctggggaggctgagacaggagagtcgcttgaacctgggaggcggaggttgcagtgagccgaaattgtgccactgcactccagcctgggcgacagagtgagactccgtctcaaaaaaaaaaaaaaaaaaaaagtttttctggaaagcagtttcacagcagagcaacaaggctgaaattgccccagtcagcctttgctggctgacttccctttttccgttaatagcaccaccacacccagtaactaaggcttgcgtcctcagttatctgcacgtagggaagagtctggtcagtgataaaaggtagttggtcagttgccacgtcttgactggaggcacgcaatgattccagattccaacccaatcaatacactgcaagctttatctttacaaggcatagctctgctgctttctgttccagaacctttgggggcattnttttttgccatttaatactctctttttcctgggcctaactaagctttcctacattttaaaatttcattggttctgggcagccaatatatgatggcttttccctgacaacacctaattttggttgcc

SEQ ID NO: 9356 - DNA, 885 bp, Homo sapiens
aggtaccaggtaatgaggaaggtgatcccggcccccattccctgatggaacctagacttcactaagggattcagatggaggaggagatgttcaagaagccaggaaggatcaacaacagggtgccctcaattcactggggccacgttagtgccgattactaaatgtcagaccaactgcagtagcgctgtcatggccactcatctctccgggatttcttcccttccaagccagctaggttcaaccttctcatttacttttaatacaccacctcttatatgatctttcttctctacttagaaccctcccataagccgaacccaatctgccttttcaccatcttcccatcttcctactgcctccatagttattcttcgggatctagctaagtaaactcttaagtattctcccatgttttcctagcacctaacattatcaattccccctccacccccattttcttccacatacggaggctcaataaataatagttaaatgaggctgggtgtggtggcacatgtttgtaatcctggcactttgggaggctgaggcaggaggatcgcttgagcccaggaattcaagaccagcctaggcaatatagtgagacccatatctctacaggaaaacaaaaagaaaaaccacaaccaaaaaaaacagctgacctggcgtccaacaactcataagcctgatggtggagaatcgcttgagcccggggaggtaagccttagtaagccatgtaagccatgaatcgaacccttttcactgcgttaatttttattgttaatgatttttatattggtataattgattagtatatctagtcattcttacactatgtcgacgtgtcttataatttcagagtcacgatttagtcgttaagatatacag

SEQ ID NO: 9357 - DNA, 344 bp, Homo sapiens
ccgggcaggtacaaaaacttttcatggacagaccatggattttaagttcctgaggataggggccatatattgttcactttcattttcagctcttagcacagaagtttgctgaactacattttaaaagaagatttttcactgttaatggtatccatagctgccatgacaacaaaaggatacgttaacagcatttcaattctgtgcatggtttacaaaatctatacattttatagctgtaaatactctagaataattatccagtccagttgcctcaatttatcaatgaaaaaaagagatcaggccaagcgtagtggctcacacctgtaatcccagtgctttgggag

SEQ ID NO: 9358 - DNA, 476 bp, Homo sapiens
  misc_feature 390, 460: n = A,T,C or G
aggtactttgggtttgtgttttaattacggaatgatctttgtaatataaccaagagaaaattagacgcttttcctttactattttctattactactttttaaaaaggtatcctttttctttttttctttttgagacagtcttgtgttgcccaggctgaggcaagaagatcgcttgaggcaaggagtttaagaccaacatgggcagaccaatacagtaagactccgtctctaccaaaaaaaaaaaaaaattagccaggcatggtggcgtgtgccagctactcaggaagatgaagtgggaggattacttgagcctgggaggtcgaggctgaagtgagtcatgatcgcgccactgcactccagcctgagcgttggagtgagactctgtctcanaaacaaaaaattgttgtatttggcaatcatgacttattttttgtgcataggtcttgcttctcaacctaantttaagcttgtgaagg

SEQ ID NO: 9359 - DNA, 358 bp, Homo sapiens
aggtactctttctcgtggtctggaataaataccctaccactttccactatcacctagtttactgagtctcacgtattaggattgggtttaaatgtaacctgtattgcctcacccagaaagcctttccagtctacccctgctttgattatttccctatcctctatgctgcctttgttccctgtgtgtctctccacaacagcaattagagcacatatgatttattatctcacatattggtctcaactttcagtctatgaagtctctgcgcacagaagctcatgagcgttttcttcctttctgtggattacctttgcaaaggcccgagaccaccagagaacctgccttcctacctctcttc

SEQ ID NO: 9360 - DNA, 467 bp, Homo sapiens
ccgggctggtacagacatagcagtggcaatgacggaaaagatggagctaagaatggtggggctgtagattaagaatacacaaactttaaataaacgtattattggcacttataacaagaaatggctcaataagcttcctaaagttggctccacagagatctgccatcaagcttttcctttctagcagaatttaggtttcttaaatggtgacaagaaattgttaataggccgggcacagtggctattaactataatcccagcactttgggagaccgaggcgggtggatcacctgatgtcaggagttcaagagcagcctgcccaacatagtgaaagcccatctccactaaaaaaatacaaaaattggccaggcgcagtgatgcacacctggaatcccagctactcgggaggctgaggcaggagaatcgcttgaaccaagaagcggaggctgcagtgagctgagtcgcgt

SEQ ID NO: 9361 - DNA, 326 bp, Homo sapiens
  misc_feature 326: n = A,T,C or G
ccgggcaggtacccagaggaccagatgattgatgggttctaccacgagcatctaatagcgactgctgcagaactggtgtggaaaaggtttctattttataaaagaaagtatccagaaggctaaaggcagttgtggaatttatttcttcccagtgctctgattgtcaaaatttgaataaagctcagtgaaaggaggacagtaattaatgacttgatagccaaacatcgtaatgatgatttagtgatatactagactggatgaaagagaggtcactgtcttttcactatggattcatcataaacagtatcattcttctcaggaagaan

SEQ ID NO: 9362 - DNA, 341 bp, Homo sapiens
ccgggcaggtacctttggttttcttaaagtgaaagtcagctatatctatcaacctttgtatttgaatagtcccgctttacactctaagaagggtcataaacagtaatttaatataattatgaccatgctaatgtgaattcttaggctttactatatttacaacagcacaattttgattcaaaatcagctcttccaactgtaataactatcttcaaaaactggtttccaggccaggcacagtggctcacgccagtaatcccagcactttaggaggccaaggcaggaggatcacttgaggccacaaattcaaaaccagcctgggcaacagagcaagattccat

SEQ ID NO: 9363 - DNA, 466 bp, Homo sapiens
aggtacctacccctctgtgagcttatagcttaaaatgagatatatatgagataaatgagaaaggtttataccacagaataacattatgtaaatcaatttaaccaaataacaacaccagagggaaaggacttttagctaccactcatattatgtcccaatataatgttccagttcatgttgcaaatagggcagcaccctggctattgtgtggtagtctgtaagtagtgaaatagctgtggggtaaggcagtgagtctttcaccttagggagggtgcgagcccagacccacttgaccatctatcacaaatcttgctgaagttctaagatccctttcaactacaaattttcatgcttccatagaatcatccctgacctcaggaaaaaatacaaaaatggaacaaacaaaacagaatagtaaaacctgaagtaagaaaaaaagaaatgaatttgacattgtacctgcccg

SEQ ID NO: 9364 - DNA, 463 bp, Homo sapiens
  misc_feature 429: n = A,T,C or G
tatgctatatcggcgaatggacttagcgcgggccgccggccggcaggtcagagcactccatggtatgacaggagtttgctggaccctctgcagcctcacactgactacctctgcggtagcatattattttgagaacgccatttaacctcttagtctcatgtttccacatccatggaatgggtgactctagagacctctgatctgactccatattccatgggttgtgagccccaacatgatccctgccaaagcctagattcctaggacactaggcaggtggaacatttataaaagaaaattctttttcattgttatggcagctctaatttctcctatgaatccttatatctttcctagatggtcatgtaaaactggttatggtggtgttaacgttaccctccatcaatcaagttgaattgcagaaggcanactgagaggaaaaaaaaaaaaaaaaaaaggtcct

SEQ ID NO: 9365 - DNA, 348 bp, Homo sapiens
aggtaccaggtaatgaggaaggtgatcccggcccccattccctgatggaacctagacttcactaagggattcagatggaggaggagatgttcaagaagccaggaaggatcaacaacagggtgccctcaattcactggggccacgttagtggccgattactaaatgtcagaccaactgcagtagcgctgtcatggccactcatctctccgggatttcttcccttccaagccagctaggttcaaccttctcatttacttttaatacaccacctcttatatgatctttcttctctacttagaaccctcccataagccgaacccaatctgccttttcaccatcttcccatct

SEQ ID NO: 9366 - DNA, 360 bp, Homo sapiens
ccgggcaggtactttattttctatgtttcagaacccacagggatatttactatgtagctaaagatgcttaaggtgcagaatagctcagtcacaaatgtctccttctcaagctctgagtgttctctgggacaaaaaataagagagaagaggatcccatcatgggtagagagtgagagagataccccagcctgggaaaattttctttgttttggtagtaatcctggagctgcagatgaagacgatggttgacagaatgacttcctcgcccacccctccccacacagcaacatgttctcatgacgtcctggtgcatctggaccccatttttgtctccagaaaggattgaatgagctatttctc

SEQ ID NO: 9367 - DNA, 846 bp, Homo sapiens
  misc_feature 156, 175, 213, 214, 250, 251, 268, 269, 292, 293, 361, 366,367, 413, 476, 483, 487, 488: n = A,T,C or G
gcgggcaggttcacttctgttctcctcctgatagaggggcttattctaaaccgtctcctggtccatcccccacaatttccgtttttttttttttttggtttggttgaatgtttgcctgcctgggaactgccagccgtcccatctcaaatctgcaanatcttcctctagactttgnggagaacagaaaagtagtctcctaactttcaagaggtnntagaatcctcagaaatgtggcactttttcaaggaannaagggttgtttaacctnngagtgataagaaatatctggagnngagagctcatcactttagtcggtgtgtagttgctgtgacttccgtctgtcctggcaatttctaatctnggtcnnctgcctgtgaattgcagaaagtgcttccacggtgttcttccagcanccccgtgaaagaaaagccttgtgattgggaattgcaagttcgttcttgtctttgcttatgaantggcttngtcnntgttcctgtggctttctaaggggcttctttttcctttgctggagtaaagaaggtttccttttttttgctaacttcaactttgctattttcttaaaaaaataaataaattagaggggcatccctttactttctacaagccagaaaatagaggaaaagagagcttcaggaaattgtaaaaatagaagaatttcccttaacattcactaatttttattttaagaactttaagtcaacctctgggttcaatttatttgaacctgggccggttttaaaataaggggaaccccccggctgggaggaattcgattttaaagttaatcatcccgtcgactttaggggggggccgggacccaatttt

SEQ ID NO: 9368 - DNA, 397 bp, Homo sapiens
aggtacactaggacttgactggaaaattttacaattcaagaaagcaagggacttctgttcctcttacctcctagtctttctgtctcctagggaaagagaaaaattacaaagaagaaatctctctctctctccattttaaagcaaaaatagagtcgggtgtggtggtgcatgcagatactctggaggctgaggtggaaggattgcttgatctcaggaggtcgaggctgcagtgagccatgatcgtgccactgcactccagcctgggtgacagagcgagaccccatcttgaatgaatgagtgaacggaatgaatgaatgagtgaacggaatgaatgaatgaatcattctctgccttctgggtagtaaccctggtttttaacatgttgtgtacctgcccg

SEQ ID NO: 9369 - DNA, 361 bp, Homo sapiens; identical to SEQ ID NO: 200

SEQ ID NO: 9370 - DNA, 360 bp, Homo sapiens
aggtacagcattcttgtattgctgtgtttggctatcctagtatagtttgtgtttaggcttcatcacaaaatagtaacatgcagggaaaaatcaatgaaccaacgtgattccatgttatattgatgccattcccttattcactaatttcacatgagctcaatcacatcgcagaaacacatcctttcacaaaataaactgtatacttggatctacttatttttttctatatgaatgtagcatgtcagttctttgttaatgaacaactatgtcttaaattttgtattttagaaaatgtaatgagcaacttattcatatctgtgataccttgccttcccagggtgggcttcagttgctgctttt

SEQ ID NO: 9371 - DNA, 451 bp, Homo sapiens
ccgggcaggtactttaggctgagaaataaatataaggtgagaaaaaagaacagtctttatagtcagtaagagtgaaaagagaaagatggtagttggggaaagacagatggggagaaaggttggctggttgttaataaaacagtagaggatgagcatgtattataaatgctggtgggaagaaaccttgtggcaaggagggtggtagtgttggagaagaaagagaggatatagtagaaagttaaagaggaactggaagcaggtgggatccaggacataggaaggggaagagccttgggcagaggtgagacatctgcaggagggaaggaactgagagaagggaaggtgtgcaaatgtggcaagaggagtttgaataaagtccatctgatatcctctattttctttgtaaatcattctgaatgaagtatgagacaaggagatcaaaggcttgaag

SEQ ID NO: 9372 - DNA, 332 bp, Homo sapiens
aggtaccactacactccagcctggtcaacaaagcaagaccctgcctcaaaaaaaaaaaaattcactgcaaagagagaaaaaagaaagataaattgacccccataattgtgcttaatctggccaaaagttgaactgaaatgggattatcgttcctgttctggttaccaagtattacataacaagctaccccaaaacaattttgtaggtcatgaatttaagcagaactcagttggagaattctgttccatgaggcattggtggaggacacttggcattgatctggcacgtagagtggtgtggcgggtccaagctggtttccctcgtatttctgg

SEQ ID NO: 9373 - DNA, 495 bp, Homo sapiens
  misc_feature 495: n = A,T,C or G
ccggtcaggtactaggacaagcactggaatttcaagataaagatgatacggtccgcccctcaacaactgtatgctataatctgaaaaaacaaacaggcaattcccatacagagtcatacatacaatgacgagcataagacagcacttattggaagacatagaagggatactagcccagatttgtgtcaatattgtaggcttttgggtagaggcaattcataaggtgatatctgaaggggaaggaaaacacatgtaggatagagggaagaagtaaatgcaaacagctggaggtgaagacgatcactgtggaggctcatgtagtctaggttggctggatgctttatctaactttttaacaacctggagaattaaaattggaggctggaggaatttttaagccggccaaattgggcacccgggtttaaaaaattttttaaaaaaaaaagttttaatttaagagtttgtggggggcccttcacttcttagaaccccgcn

SEQ ID NO: 9374 - DNA, 512 bp, Homo sapiens
ccgggcaggtacctgtctctgagactgaagttgttttgttttgtttttttttgttttgttttgtttttagagtcaggtcttactgtcacccaggatggagtgcagtgatgcaatcacagaagctcactgcaacctcaaattcctgggctcaagtgatcctctcacctcaggctcccaagtggctatgatcatcaagaaataagtcaaaataagagttcaagaatacaatgtgtgaactcaacagttccccttctaaatattcatccaagagaaagaaatataaccacccaatgacttacacaacattgttcagagcaactttctttgcagcagctcaaaccagaaataatttaaattgcattccacttgagaatggatggacaaatggtggtatattcatacaacggggcaacactcagcaataaaaagaaaaaatccagtgcttataatagcatggattaattttgtagacaattttttgactgatgggagtcaaatattaaaaggtacct

SEQ ID NO: 9375 - DNA, 613 bp, Homo sapiens
  misc_feature 611, 613: n = A,T,C or G
ccgggcaggtactaggagaggtcctgtgacctttccagtgcctcagagagtgagaatgggaaagaggagtggatgaagtagggcttaccctcctgtgggtcacctctcttccctgctgcttctgaaccccactcagcctccttccctcttccccagcaactatcccaaagctgttacatcgtgtggcaaacgtttactgaggcttttagggataatataagtggtttctttacaaccattccttcacagccagaacgcacgtaatttaaaactgtgtcattttcacacacgtcccataatgtctccttcatggggagcttctcatggccttggtctctccccagaggctgcctatggccatatttctgggatccaattctcacacactgggcccctcattcttgggcttcccacattcagttacctcattcttgggctgcccacaaacagtcaaaatccttattttctaagctgaagcagttgagctctctcacttactcttacaaatctaggttttgcctagaagtagtcaaaaaagcaagacagagacatcttcatcaaccacaaagtctcatcaaagtattttactccatcaaagagccattcacttntn

SEQ ID NO: 9376 - DNA, 782 bp, Homo sapiens
  misc_feature 532, 566: n = A,T,C or G
ccggcaggtacatttgttgggggcgtgacattaacatataaccacttagagtggacatgcagttagagaaaagtcaatgagctggaaccaagctgggaattccaacatgtagaagttaaacacaagaggaggagccagcaaaggaacagaaacagagcttccagcaggtggggggcatttggaagaaaacgatgccatagaagccaagatgaaatagacatcaaggagaaggaagtagtcaattgttttgaatgctatgaagaaagataagaataggtaaatagtccttatatttgataacagaggtcactagtgatcttgatgaggggtttcaatagaatggtgggattatatacctccctggattcaactgaggtaaggaaggcatacagaatagagacaggcactataaacagctctcataattgcattctagcaattagcaacactgtctgatggggaggtggctcaatctttcttgcataactgaatgaatgagtaaactatctatccatccatctatccatccatncctccacccatccttccctccatccatccatggngtttgagccttcaaatgtaaaaggcacaggcttatctagtgagaaagactttggattaggaggtaagagacagaatcatacatcacagtcacttgttagctttctgaacttgtccaaccaagggtttttttggactaattttcttatctatgaaaatggagaggtagttagataacctctaaaatcagctttaaaattcttgattgaggcctaact

SEQ ID NO: 9377 - DNA, 460 bp, Homo sapiens
ccgggcaggtactcataccaggcttgctgcatttgcttgtgtttggtattttacattcagctgctgttagcccatgctctggaaaaattacaaatgaaccaatgcagtggaattttcacttttggccaagactgagtaacaaggtctggatttaccctcccagctgaaacagtttgaaaactaggtttccaagacattgggcctcaggcatggacagtgatccttgcaagaggagaaacagatggtgagctgtatgattgccccaggatagagtttccaagaagggaaaacccaggtggaggcccgtggtctctctgagctggggagatggagctgcaagtcagcggaggctaatgtggctggaattggcagagcagaacttccagaaaagaaaagttgcgctgggagccttttggaaggttgctcacagttccccttggatggccacctgagaactgat

SEQ ID NO: 9378 - DNA, 452 bp, Homo sapiens
ccgggcaggtactttctaaaaacagagaggcatttgaatggattgaattcattatttccgtaagactcatctgctgtcgtagcaagtgaaaagaattttttacaagacctccagttccagatggaagacctcctgcatcatgggcaaatgctcttgcacctcgatcatcatgtggtggtatgttttttgtctgaaaatagggaatatcctttacctggaatatatcatttatatccaccgggagagcaagaccaatgtaatcatctgaacccccatatgtggcactggacaccatggaccgcactgaggaagatcgttgcagggtattttgattaataggactcaataaatcttctttatctaatgatgcataacttaaggctttcatgaacctgaaagggccgtttgtatttgaaggtcttaagctttctggattcccccacatgcttttt

SEQ ID NO: 9379 - DNA, 336 bp, Homo sapiens
aggtactctgttgtcttaaaaagcatggtttagtggtggtaacattgacctaggtgacaggcttcagtttagtttctggcactggtcatgaaactttgaacaagttaactcctctcttaggaccttatctttatgtagagaaagttggactaaatggctgttaaggtcttttcgggccttcaaatgctgtgtttctgtaataccacccttgtttaagccacagtcatctcttgtctggactcacaggagcttcctaacttgttttcatttttgtccttccccacattattttctacccagaatacaaagagacctttttaaaaatgtaaatcagac

SEQ ID NO: 9380 - DNA, 503 bp, Homo sapiens
  misc_feature 328, 345, 411: n = A,T,C or G
ggagggctattactatctggcgaacgaatcgccaccgcagtggcggccgacgtacaaggggccatgatccaaactgatgagatgatggacactgacttgaccacaccgacatctttcctggtgtcaaacatcctgaaaggggggctggtttttaaaaagcaaacagctgtggagggcaataagctggcttttccagcaatcaaaaagaaaagcaaaaaaaaagaaaaaaagctgaaggcagaggagtggccaatacaccccagtctgccaggatagattcaggttacagcttctgtcctgggaacaattgtgtgccccccttcacttntaatagtcagcctaatngctgatggataaatgaaaaatgttcagtgagccaacctgtctagggtcctaaagaggaaaagcaantcctagcccccgcagctcatgcacctgtgtggtttgccaaaagtttctccactgtggctcaccctgcatataaagggtgttccagatttttt

SEQ ID NO: 9381 - DNA, 361 bp, Homo sapiens
  misc_feature 361: n = A,T,C or G
aggtacagcattcttgtattgctgtgtttggctatcctagtatagtttgtgtttaggcttcatcacaaaatagtaacatgcagggaaaaatcaatgaaccaacgtgattccatgttatattgatgccattcccttattcactaatttcacatgagctcaatcacatcgcagaaacacatcctttcacaaaataaactgtatacttggatctacttatttttttctatatgaatgtagcatgtcagttctgtgttaatgaacaactatgtcttaaattttgtattttagaaaatgtaatgagcaacttattcatatctgtgataccttgccttcccagggtgggcttcagttgctgcttttn

SEQ ID NO: 9382 - DNA, 330 bp, Homo sapiens
ccgggcaggtacgcgggggcctttaaagtgagagagggaggcagaagaggaagtcagagcgatgtgctgtgaaatctactaccgtttgctggttttgaaaatggagaaaaagagtgaggaactgagaaacatggatggccttgggaacgtggaaaaggaacttcctatgtcatgaagacactcaaggaactctatcgagaaattcatgtatcaagaaactgaggcctactgccaatagccatatgagcgaatcatctcaaaagtgattttatagcccctgtaaagccttcacatgactgcaaccttatgagatatcctgagccagtacct

SEQ ID NO: 9383 - DNA, 877 bp, Homo sapiens
  misc_feature 387, 409: n = A,T,C or G
aggtacactaagaacatggtgtagcaaacctatgaaatccacactggttctgcactcccagtgcacacagaggaacatatatgcacacacaagcataattacctgcactgccatcctcctctgaggagccattgagtgtcaaacaggtcggctcacacagggcctccgaggagatcctgccatgccacagctgtgaaaacctcccactggatggagcaaattatttagtgcaagcctggcaacactttggaggacagctagaaacacaggttctccagattcaatccatggagagagacacaagaattgaacagcaagaaccctggagtaagaggcgggagaaccaggttccagcactagttctgccactcacgaactcggtgcctntggccatcactctacctctcanggcctcagctctcaagaggggatataataaaggctgcccttccacaatcctggagttacggcaagagccatgaggcaagagagagaaaagaggtctgaaaattaaaaggcagtataatgtgagttacaagaagtattaaagatcagtttgggtgtcacgctctgtctgatgggaggccattcttagatgcccaagacttgtcctcacgttgcaggttcttctgcaatctaaccaatgccccaattatgtggtccttttcacaacacccatcccattgcgtaaaaaaaaaaaaaaaaaaaaaagttctgcccggccgccggtttaaaatagggatcccccggctggcagaattcatatcaacttattgatccctcaacttcaggggggcccgtaccaactttggtccctttaagggggtaatgcgccttgggaaaaaggcaaacttgttccgggaaaatgtatccctct

SEQ ID NO: 9384 - DNA, 355 bp, Homo sapiens
acctactgagtatttggagatattagtttcaattatctgttctcacattccttttggtctgccaggttgcagtgcgaaagcaaggacagaccagccctgccatcataagccctatgaataccactgccaggtcaggtcatctggcctgctgcagacccgactattgaccttgatgtccttgtccttcaaatgtcgacctatcttttgtcttccagttttccaggggctcagatttttgactctagatcatattcttcttatgccttggtttctgaaacctgctagatggcatcctgaattataatattctgcctttctgagtacttgttagatctaagctgccagagctcaatgg

SEQ ID NO: 9385 - DNA, 352 bp, Homo sapiens
  misc_feature 352: n = A,T,C or G
ccgggcaggtacgcggggattctcaatcctacccatgatgcagacagattgcctcatttcagctcaataaaacatcaccaaattcccttaggcagaaaaagggtggggagtgccctttcttgaaggaatcccttaagtgcacgtctctcgttttcttttcacatcaatgcagagtccctctgtgaatttacaacacccaacacccatgagttcagtccttaagaaaggaaaattgagcaagtatttaattggttggacattgcataaaagaggtccatatccaggctaactctagaaattttattctcaaacttagttggcctcttttttttctgtcagaggaccattcttn

SEQ ID NO: 9386 - DNA, 775 bp, Homo sapiens
  misc_feature 15, 473: n = A,T,C or G
ccggcaggtactttnttttttttttttttttttttttcgcatttttagtagagacagggtttcaccgtgttagccaggatggtctcgatctcctgacctcttgatccgcccacctcggcctcccaaagtgctgggattacaggcgtgagccacccatccggcctaacgagacttatttttactcaactagatggcgttcattcatttgcttactcagctgtgccaggagttaagttgggcactgggaattccaaaaccaacaagacattctctgtcatcagggaactcacagcctagtatgagagataaacaaatgaacatgaaattataattcagtaacaaagaatgagtgttatggcagagggaatgtgtaagagcttggcagggtatccagcagggatacctaactaagccccactggggaaggcatccgaacagaagggacagctgagctgagttcaatgggccagtanggaatagggttgatataagtcaaatcatttaggtgtttatgacaactcttgaaaataagtattttcattttacagatgtgaagcctaagtctcaaagaagttttcaaccatattccagagtggtggggccccacaatatcccagggaccttgcccccaaactaaggacttttccccttactgggcggctttttaaagattgaaaattttccttgtggaatttggtaagtacctgggccggtttaaaactagggatcccccgccttgaggaattcatttaagctttttgtatcctcacccttg

SEQ ID NO: 9387 - DNA, 332 bp, Homo sapiens
aattacgttccttctaattagcactagatctctgctatattttacagaaaataacagaggctgaaacaggtaaagattattctctcatatgaagttattaggctaggcaaatcaggctagcacttttggaggccaaggtgggaggatcacttgaagtcaagagttcaagaccagcctgggaaacatagtgagacactgtctctaccaaataaaaattagccaggcatgatggcacatgcctgtattcctagctactcaggaggctgaggccagaggatcccctgaacacaggattcaaggttacagtgagccatgattgcaccactgtacct

SEQ ID NO: 9388 - DNA, 467 bp, Homo sapiens
  misc_feature 232: n = A,T,C or G
agggacctttttatggaatgctgtttcaacaccgtaggtttctttgcattctattcctccagatctctaaccctttcttctctatttttcatctaggtctctttaggtgtatctttcattttgtcatccctttcactgtatctaatctgcttaatcaatatgttacactgtaaattttaaattaccatatatgtatcatttacaaatccctttggttccaaacctacttggncaactttgattctcttcatcccacatcatattttctatctcctcttattttagtctacacctggtaattctaatatctgtaatctctttgagagtttaggtaatttgctgtatttgctgactgtctcagggtagcttgtttccacataggtccatttatattagaatgaagtcattaggactctatctgaggggaatctttgagccttggtttaaggagagttcctccagagaag

SEQ ID NO: 9389 - DNA, 480 bp, Homo sapiens
ccgggcaggtacctggactcctaagcctcagggatttactgaaataccattctattttataataatccttaaccaagaattttaaggatcttaaatttttctgtggttctattgttatctgatatatagatgatctgctgccatatcctaaagagcagatgaggccgggtgtagtggctcacgcctgtaatcccagcactttgggaggcagacgaaggtggatcacctaaggtcaggagtttgagaccagcctggccaacatggtgaaaccccatctctactaaaaatacaaaaattagctgggtgtggtggtgggcacctgtaatcccagctactaggaaggatgaggcaggagaatcacttgaacccaagaggccggaggttgcagtgagctgagattgcaccactgcactccatcctggcaacaagaacaaaacttattttaaaaaaaaaaaaaaaaggcccttggccgtctaaact

SEQ ID NO: 9390 - DNA, 475 bp, Homo sapiens
ccgggcaggtactcatagcaggtagcttcatcaagggtagttttcaatgcattttctgttgggtaaaaaactttcccctcaaaaatctgatgacaggcttctgctaacagtgaagcattggacagagctgccctcagaaaacgtttattctcccataactcagtattgtaaacaaatacaaaaatcagggcagagataagagacgcgctaaaaagacagtgcttccaagagcccatcattcacaaccaggaaatgagtaaaatatctctctcttgagataggatcagagtgtagatatatttaacttacattttctccaggttccgaaatcatcctcgtgatggctgaagctctcgttgggctgttccctgtcctttcagtcacggttctgggcctttttctttcttcttcccctctttacttacacttaggttgcattttcacttttttgggacacaattctggaggggctctt

SEQ ID NO: 9391 - DNA, 445 bp, Homo sapiens
ccgggcaggtacatattcactatggaaaagttggacaatatgggtatataataagaacaaaattaaaatcttactactgaaggataccactattgtatttctctgtttctatatctgaatccagtttgaaccatacaaaatgtaattttgtaaaaaaaaaaatcgtcaaatgttgacaattttatacaatttagcacatacacacacagcacactttcatttggtaatttccaacttgaattttagacacagataagaatgtcttccctccagagatcagggataattttgatagaatattcattttttttagcacttgctcacttgccatgtgttgctgaacaatcaagttatttttagttacactgcactaaaggagtctgaagtctggactagtgatgaattttgctgatctttcaacactgaatccctcttgagggaagag

SEQ ID NO: 9392 - DNA, 514 bp, Homo sapiens
ccgggcaggtactggagaaatgctcaagggaaccactggcctcaaatctcacctggctttggggcaggactgttcctcctcacttcccaaaagcctgagaagagagataaaggtggtagaccttcttttttctccagccataaagaaaaatgatacccagggaggctctcatccctttccctattgtctcccgtttaaggctggtgaggaagaaatggatgtaaaaggcagacaggggtgccaccaaaaaaacataaagtcctcagcaaaaatgcaaaaatggaaacgatggttaaaatggggcacttttgtgtggtattaaaagctgataaaagtgggccaatattcctttccaaaaagcacttgaaaaggtcactgggtcacaatgatggtttctgaaattaccaaaagggaacttgaaaaatttccaagagtcacaaggtaaggtctgtctttaaaaagtaccttgggccggttttaaaaactagtgggattccccccggcctgcaagaat

SEQ ID NO: 9393 - DNA, 306 bp, Homo sapiens
ccgggcaggtactttttttttttttttttttcagtagagacggggtttcaccatgttgctcaaggctggtttcgaactcctgacctcaggtgattgcctgcctgggtctcccaaagtgctgggattataggtgtgagccaccacgccaggcctaataactccacttttaaagttttatgttgtttagattgtagtttactctttaattaccagtgtttaagattagtaacaaaagatgttaactactaaaattcattcattctttcacaattttattggtcttcacaaataaatgaaaaagtacct

SEQ ID NO: 9394 - DNA, 539 bp, Homo sapiens
gcctcacacacagagccacctgccacctcttgacagctacgtgcacaggaaagaagtttcttttaatggagcccatgtgctatgagtctctgttatagcagctgagccaggaagtgcaggcttccttctgattccttgccctatttcttcttctctcagctctgaggctgagaccttaaatctgagaggaggtagatttactagtctctgattcatttattttttacttctttatttgagacagaggtcttgctatatcacccagtctagtcttgaactcctgggttaaggcaatcctcccaccgcagcctcctgagtagctgggactacaggcacgtgccactgtggccagcctctgactcatttaaaccatgtttctcagcctcaacacgactgacatttgggacagggtaacacattgtgagatgtttagcagcctcctcccagatgccagtagcactttcctgttcagctataacaataaaaatgtctccagacattgccaaatgacccctgttgtggggcaaacatcacaacct

SEQ ID NO: 9395 - DNA, 269 bp, Homo sapiens
aggtacacctccacgaacttctccccggccagagggctccaggcaaagggactctcagatgtgggcaacggaggctgttcgggaaccggattatttaattccaagctggcagcaatacatctttctttatgtccaaagggtccgaagaagacttcatcatcttcatttgcactcgaagaagacaacgaaagatcgaagtcaaatttttcatcggccaaaagaagaatgtcttccttcttagggtcatccatgttcacgtcccctgcccg

SEQ ID NO: 9396 - DNA, 478 bp, Homo sapiens
  misc_feature 285: n = A,T,C or G
aggtacaaattcctaagctacaattagggaaatgaggtagaaatgccatttataagctttttccaacataactgattcaaaggcactgagttcacagtaatgagcaggagtgtcaggtggggtgaggtcgggagcgaggcaccatttctaaacagtgacaatacattattgagcacagcttgaattaagtccaaagctgcacatatccaattcactttttaagaaaataggaaagaaacaaaacaatgtataaataagcacaaaggaaacagcatcatttagggngtgatttttacgagcttcaagcaatttcaaagtgaactacaccaaaagtatttcatatgcttggaaagacaaagtaatctgtccatagttctgtgaagagtttcacaattaaattcaagtctatctgacatcaaatccactttccttcaaccaagagtcccacactcttgagggtacagcccttcttgccccg

SEQ ID NO: 9397 - DNA, 489 bp, Homo sapiens
aggtacccctcttgtgctcatagtctgggccttctctataccagagtttagaataaaattatatgattattgccagataagtttgagtcttacgtaaggggagcttctgcaattcaggaaatccttttagccttcaagacaatcaaaagctacacattcactttctgctattgctttatggcttccttcctggaggcaaagctttcttttagtggaagggggggcacacgcccatataaaagggaaaaatgttttataacattttaaaacatctctttgttgaaaaaaaattttggggtgttttaaaccccattttttccccacacaaattttttccccccttttttaaaaaaaaaaagggggccccccaaactaaaattttttttttacggaaaaacttttttaagagagcttttttctcccccccccgggggggaaaaaaaaacaaaaaaagggggggggtctttttttttaaataaaagagaggga

SEQ ID NO: 9398 - DNA, 483 bp, Homo sapiens
ccgggcggtaccccgaatgcataaacaataaatgcatgtgaatccaaagaaattcaggataaaaaaggtcactggaggattcaaaatagaatgatgttgagtagaggggcagggtttaaaatggcagcaacaggaaacacaggtatagatgtgagttaagattaaattcaatttaagaaattctctttggctgggcacggtggctcacgcctgtaatcccagcactttgggaggccgaggcaggtgtatcacctgagtttgagaccagcctgaccaacacggagaaaccccgtctctactaaaaatacaaaattagccaggtgtggtggtgcatgcctgtaatcccagctactcggaggctgaggcagcagaatcgcttgaacccaggaggtggaggttgcagtttagccaagatcacaccaatgcacttcagcctgggcaacaagagcaaaactccgtctcaaaaaaaaaaaaaaagtacct

SEQ ID NO: 9399 - DNA, 469 bp, Homo sapiens
ccgggcaggtactgatctcccttaatccagaagtcagggaggaagttggctgtgtcatcatagtttctgggaaggcaggagttgatgtggaaacacttgtattccccagagtggaggtggtagccattggagatgtgggttttgttgtcactaagtcagccaaaacagaggaaggggatagatgtttataaatcacagtccctacattgactacaggtgtgtttgaggagggatgaattttctctctatctttggtgacttcagacgtggctaatatttcagctgaggtgctgctcaaatttggaggtgaactggtttcaggttctgagcttgtgcgcaacatgtctgtggtcttcactgggccaagggtgagaagtgcagtcacaggatgaggagaggaggagatgctctctggtaatgtggagaaaaaagaagttgaggtcatggcaggtgaagacagtgaggaaat

SEQ ID NO: 9400 - DNA, 455 bp, Homo sapiens
aggtatcgggacttgtctccaggagacatgtttgggaagaagagctagactggagaatcatgagcatgttcaggtgaaaacatgtgagtggataagagcaagagggtgagaacacagaccaaggggctaagggacagactgtgttcagtatttgggtatggaacttgtttttgctacttgctagttctaagaccaggctcagactctaacttctctgtaatgtgggaataatgacagcacttaccttataagattttacaaagattaaaatatcatatataacagcacttaacacaagtaagaattcagtaaatgttgactgttattactattgtctgggtcgttataagttttgaagacacaattgcataaactgtcatcattaaaaggaaaacagagaaaagtagttctggaaggagtctgaaaggcattgccagaaggttagggggaaaatt

SEQ ID NO: 9401 - DNA, 344 bp, Homo sapiens
  misc_feature 344: n = A,T,C or G
ccgggcaggtacgggacttgtctccaggagacatgtctgggaagaagagctagactggagaatcatgagcatgttcaggtgaaaacatgtgagtggataagagcaagagggtgagaacacagaccaaggggctaagggacagactgtgttcagtatttgggtatggaacttgtttttgctacttgctagttctaagaccaggctcagactctaacttctctgtaatgtgggaataatgacagcacttaccttataagattttacaaagattaaaatatcatatataacagcacttaacacaagtaagaattcagtaaatgttgactgttattactattgtctgn

SEQ ID NO: 9402 - DNA, 454 bp, Homo sapiens
ccgggcaggtacaatgtaagcttttatcatcttgcatgtgtcctctgagaggttcacatttttgaggccttgtctcatggaaactgggaaatgagcttctggaattcagacccaggatctggctgcattccagaaataaatatacatgttgggcgttgagatagacaattaaaagaataggagagtgtgcaaacttttgagaatgagaaggcagaaaatagactcttttctctcatgctttgctttgcttttgtttattttttatatttttacttttgagtatcagccagtgggtagcagggcaaaaacaaagcagccattgatctaagtgtaaggcagcaggaggaaggttaagagaatgagtgttattctttaggactacattcatagttgcatgggggtgcttttggcttaaagtctacaattaaatcaattgttggcacttccttgaaag

SEQ ID NO: 9403 - DNA, 489 bp, Homo sapiens
aggtactaatatcccttaatggcagaatgtgataatcatggaattaattattgctaaagtagttttcagataaaaacaataaaaaagaaaacaaaacagattaaacttgacacaatctgaccaaacacgtgtcaatttacaatttcaaggttattttacaaaatacctacatttacacaataggctcccggcagcatttccagacaaatgttcttttaatttatcctgacatgctataaatgaataaattacactatttaaaaattatcatcagtaagttttcctttctcatgggtcagagaaaaagaaatgagcgcgcaaagaagattgagaggaagcgcacgcacacagataactttaaagaagcaggaggggctggggagggttcaacaatcactgaacctcacacagtgtgatgctctccagggggaaagtcaactgcttatagccatttaaaagtatttaaagaaaaatgtttgagggaaaccc

SEQ ID NO: 9404 - DNA, 489 bp, Homo sapiens
ccggtcagtacatcatgtagagaggcagactcgtcttcgacaaaagggctgacccctggaaaaccagcacagagccagctcttctgtctgaatccactctctccaaaacataacataagtcatggaaaagaaatgagtctcaagaaatgagactcttaccatgatgagagggggacattgaaaagctactttagtgattagggagagaagtccccttttgcatcccaaatcaagcagaggactggtagtccaaatataaatttggaataacctgagtcacctgggccttggaggatcctgggccttttaatccaatttttgcgaaaaattcaggggggcaaatccggaagcttgtagggcttttaaaacccaggggaaaaagcttctagggccccttggccgtttaaaacaagggggcccccccggccgggggaattttttttaaacttttttaaaccccccacccctggggggggcccggcccccatt

SEQ ID NO: 9405 - DNA, 354 bp, Homo sapiens
  misc_feature 209, 343: n = A,T,C or G
aggtactttttttttttttttttttggtagagatggggtttcaccatgttgcccagcctggtcttgaactcctgacctcaggtgttctgcccgtctcagcctcccaaagtgcagggattacagctgtgagccaccatccctggcatatttttgtaaatttatataaactgtttgttttccataaactaggatcatgctgtatatattgntctatttactgactttccaactcatcaaaatgtctttggagagctctgtctgcacctgcaaatctctcccagggcttggcacactatggtccttgggctgaattaggcccacagcctgtatttgtaaatttttnttttttttttt

SEQ ID NO: 9406 - DNA, 362 bp, Homo sapiens
ccgggcaggtacatcagcaacctttgaaaatacaacatgatgaaaatacagcatgacctggtgcctagccttatccttttattgaatatggagggaaagagggtgggactgcagaggttaagaccagtcggcggtctattggtcttttaatgtttctgggtctcagttttattcatatttaagcaagtaagcctgtgtagacttctctcagaggaaaatcagcaagttgtataaatgaaagcagattaagcatatgaatcctttcaggagaaaagttagttggggtgtctgttgttttgtatgaatctgaactaggaaagtcagacaaactagagaaggataaaaagtgtccttctgcttat

SEQ ID NO: 9407 - DNA, 472 bp, Homo sapiens
  misc_feature 470: n = A,T,C or G
aggtacttgaaaggcaaatttcagtgcttttgttatgttggaggagggcttactgatgcgtgctaagaccgatttctgattgagggatgaaccttgggctcatttttttcttgtgaagtctctttctagaaaattttttggttttgttctttttaaaaaatacatacttttttgaatgtatcatgtcttcattaacaacagaaaatccacatggtgtttactaaacttgtttacgacattaaaaacttcctttttatttttagcagcccaggttgagtttttcacaagagatttttttcttagctgaggtattagttgtatagcaaggaagaattaagccagatttttggtgtgtggaaagacagttttctatccacgtctttttctggttgtcagaggtgggaggtatggtccaaataaatccattaggttactcctgcagcatgcgcatttagcttctctctgctganga

SEQ ID NO: 9408 - DNA, 408 bp, Homo sapiens
aggtacctggatttgactgatgtggtccccatcattttctgatagagttctttttgctgggatcctggaagatgatcttggtttatacatgaagaatctggggtccagtgaaagtgacttggtaaaacccacagatctgtgccgaaagccttggtcagctgccccttggcctgatgctcttttctctgcatcagtgcattgcttcacctcttcttcaaggactctgattaactggaagtggacataaactggtgttatttatgtgggattttgttttccttcctacatcttagtttgggtcactgaatatactcagttttaataaggggatttttcatttctggtcgcaacttctgaaaatgcgcttaagtctttgagagtatgctttaacctataattttttgtttt

SEQ ID NO: 9409 - DNA, 479 bp, Homo sapiens
tggcggccgcccgggcaggtacaaaagcaactttgtcactctaaaatactatgcagatgtgtggaattatctcatttattacttccaatagccgagtggtttgtgtagatgggaagatggggagagttgtttaaatgacctgcttcagatcccactgcagatctgtcttagtcctatgctcatgagattacactgcaatcaccacaagcttctattctaaagggttctaatcattctttcagataggaaagggtgttgtccccaattcaccaccagaggacatctctgagagttagccgtgatattcctgggcttgataggacatggagcccatgctagcttttcatctaaatgctgctagcactactcacatatttgcatacagttcttataggacaatgcaaccctgcgcttgcttgcagaggaaaccggttaaatctttcctaatgtttattttgggttaagttctctttgcaggg

SEQ ID NO: 9410 - DNA, 493 bp, Homo sapiens
ccgggcaggtactttttttttttttttttttgtatttttagtagagacggggtttcaccatgttagccaggatggtctcaatctcctgaccttgtgatccacccgcctcggcctcccaaagtgctgtgattacaggtgtgagccaccgcgcccggcctttacgttgaattctttaaattcagcttgtgactttgcacttcaggattctgagtgttctctgtcttcttcctgcattgtttttcttataccatacaggtttttcattggccttgactttttgttgttaactcattcttctttgggtttattttcatttgtttctgctgaatattatttgtttcaaactaaaaataacattccacattttaattgatgtgcggactcttaatctacttaaaatgtgggctgaaattccatgattccagctagtctggaataggtcatttaactgggatgttaattcacctacattgttcccttaatgacatgtggg

SEQ ID NO: 9411 - DNA, 733 bp, Homo sapiens
  misc_feature 280, 675: n = A,T,C or G
ccgggcaggtactagtggacgagtgggaagttaagttagaagaaaagggaaaataaaagtacctagtaaatgggcaattactaagccctggaacctctaataccatattgctagtggtaagatgatgagcaatgaaactgaagaccgcctcagaatggctttgtgtcataagctaagaagtttgagccttgtcctgaaaatgttgggataccattaaaaatcttctttaggggtcttctgctatggttttccctatttttattatctgatcatttgaatnttgaaatccaaatatctcattttcttatatttaaagctacttccttaggtgtagtatacatgaatttttaatgtttaatatatcattggaccaaaatggtagaactattctaagaaagagtagggaactgacatttaagcacctactgggagccatgacctgtgtcaaacacgttttttaattctctcaatgatctattgagtgttcatctctgttttatagataaagaaagtgagcatcaagcaggtaaaggaatttgcccaaggttagaaggctaataaatattggatcgatccaagatttgagcccaagtctgtctgaatctaaaccctttatagtctctaaactatactgtctttctggaagttgatatgaaactaaagtcatatgaattntattttataatggatcaaaaaattttttaatcaagtaagcccactgaatagtaccttg

SEQ ID NO: 9412 - DNA, 469 bp, Homo sapiens
aggtacactaggaaatgcacgaagaaaattatttgcccagatactgcaaagattttctagctatgtgagaaatgaaaatgcatttttgccatatttggtaaactgaatgttattaagaggacaaacctcatgtaaaaaggagataagcagaaactgatttgaatattattgcagagcaaagtaaataatcatgatgcattcaacctttataaatgtgcaaaaacagattaattttcccaattacaagccttaataatattaaatgactttaaacacatgaagtagggtaagaaatagatagcaatgataatacacgagtgtgttataagggatattaatgaataaattgggtacacaaaagagggaggggatggagaaaaaagggaaaatgctggattaaagttaaacagatatcctgaatacttgtcatatccttaaaggctaatatacgttctgaatctctaaaaga

SEQ ID NO: 9413 - DNA, 461 bp, Homo sapiens
aggacagctcccattgttacctgattaaacatgcatgcagcactgatcacactctttttatctgatgtggatctgtggctgccacaatggacacttcatctgatgggctagcctggcatcctataaatgtgccagctggcttaagattacaccacctctatcaaaatagtttttgaggctgggcacagtggctcaagtaaaagcgggcggatcacaaggtcaggagattgagaccatcctggctaacacggtgaaaccccgtctttactaaaaatacacaaaattagccaggcgtggtggtgggcgactgtagtcccagctactcaggaagctgagacaggaaaatggtgtgaacccaggaggtggagcttgcagtgaaccgagattgtgccactgcactccagtctgggggacagggcgagactctgtctcaaaaaaaaaaaaaaaaaagtacctgcccg

SEQ ID NO: 9414 - DNA, 516 bp, Homo sapiens
cgacacacgtgtagctcatttgtagtacggggcgaattttagctccaccgccgtggcggccgcccgggcttttacttattcgcataatgaaacttgggttattttgacaggatgtccgaacaaagggccaaattgaacattcacaagtaacgccgtttagaaggttgtgctaaacatcagaagagtgaaactccagaccagagatgagacaattatttttggattctactacaaagcaagcacatttcctatgctactcaaatattcccttaaaccagaagcaatggtgaaggggaaaggacagattgaacccccctacgcacctgcaagagattggtaagcaagatgagtgtctgcttccggatgaatgggtcggaatccttcagacacctggagatgttgggaatatacttgcccaccatgatggtgtagcgaatgtagagatcgcacattacaatgatgacgttgttgcggacagacacgttcttacacacctcgagctctcgcaccagggct

SEQ ID NO: 9415 - DNA, 496 bp, Homo sapiens
  misc_feature 31, 37, 95, 96: n = A,T,C or G
gggtgtccctatgaggcacatatgtagaccncgagcncattcgcgggaacggccgaggtactttgcacatacttcggcaaaacgatccactcgannagatgatgcctgaggacacaactccaatttagtagtttcttgataccctcccaaagcacctagcacagggctaagtctagagaatgcttttgaaatatctctcaaagcagaaacttgtgtgtatatattgggggaaagaaaataggtctacttcttaaaaaaaaaaaagccttgacctacttgaatgcgatgatgttagggtgcttcaacttcctcaaatgcttgatatccgtctcattctgttctctcactttcttggaggccacctcttccgcccggaacttgcccaaaaagacgctccttgggctccactacccaaccactggagatttgagaacttctcaaatgggacttcccaagtatctaggcacacaagcaagaaataagctttgaagagatc

SEQ ID NO: 9416 - DNA, 494 bp, Homo sapiens
  misc_feature 29, 46, 58, 71, 72, 73, 74, 105, 106, 107, 108, 109, 110,111, 112, 113, 114, 115, 116, 117, 118, 119: n = A,T,C or G
ggggctgacgcaatctgtagacggcgaangatgcttgccacgtccnggccgcccgggncaggatttttttnnnngtttttaaacacccatgtgttataacccccnnnnnnnnnnnnnnnggggttttttttttttttaaaggccgaggattaattaaacccggggaacaaaaaaaaaccagattaaccacacccaggcctaactttataaaagggataaaaagaaaaaaggaatcttataggacaaaagggttcatcaataaaaacaaattcccaaaaacccgggaaaaaaaattccaaaattcccccccaaattcaaagcaaaggaggaaaaggggaagtaaacttagcccccctaaaaatatctaaacaaagctttgggagggcaaaaaaaggaaagaagtccaaaactccgcccaaaaaaggttgaaaggggggaaaaaaaaaaatttttttgggcccccaccctaaaaaagggcccagcccctccaaaaa

SEQ ID NO: 9417 - DNA, 482 bp, Homo sapiens
aggtacttgcttaacagaagtctttaatgttagtgaatgaatgtataaaattataaactacgcattttcaaagagtagcatgtattttgtatcgaatccaagtaaatttttttcatagctacctaccacaactgcaaattattcaaaataaacttggatacatatccttatggggatatgggaagcccatctatattctcctacttgatgtttttaaagattgaaactttattctgaaacatcaggctctaaaaaattccatcattaagatgaataaatgggaaatggtttatttgttacttcgtaagcataaatgggaaatgttggctgttaaaaaaggcccccttttttttagggggggttttttttctccccctttggttcaccccaccaaccttgtgtgtggaaggaacctatttttttttgaaaaaggcaacatgtgttttttgtgggggtttttatttctccccccccaaaaaaaa

SEQ ID NO: 9418 - DNA, 452 bp, Homo sapiens
ccgggcaggtactttttttttttttttttttttttcgaagagagggggtctcactttgttgcctaggctggtctcacactcctggcctcaagctgatccttccacctcagcctcccaaagcactggggttgctggcgtgagccaccatacccagctgaaaagtgatttcttataagccaagcaatcagcctctgcagagaagacaggaccctcagcacatatctagctctgtaattcctcaactcaagttgggcattactatcacccctacattaacatgttctcattaggaatatgaccaagaccaggacagagtcacaagagaaacagtcagtggatcatgtgacacatgagatttattggtccaataaggtgaactggtcaggaaccagatctgctatgccccttgggaataaggtggccaaaataaattttgatttgaagattagaag

SEQ ID NO: 9419 - DNA, 333 bp, Homo sapiens
ccgggcaggtacgcgggggattgaaggagggctgggaaagcacaagacaggaagagtctgtgccaaaagaccctggataggaagaaacacaagaaaaaatttatccaaagtcaagattgagtgggagcccagaggaacgttgcattcaaatgacaaagaatatgaagccgatagggataaagtgagtaacccaaggtcacaagacaagagagctggtccaggacaagaacttggtgctcatgtcaggttctctctgccacatcttgagaatacgtgcatcctttgaattcttgcccttttcagtagaaagcatcgtgggaaaacatacagagt

SEQ ID NO: 9420 - DNA, 269 bp, Homo sapiens
aggtactggaaagaggagtgctttggacttatcagctgaacttgtagtcgataaagccatggagttaaggtttgtgggtggcgtctatggtggcaacataaaaccaacaccctttctgtgtttaaccttgaagatgcttcaaattcaacccgagaaggatatcattgtagagtttatcaaaaatgaagatttcaagtatgtccgcatgctgggggcactttacatgaggctgacaggcactgcaattgattgctacaagtacctgcccg

SEQ ID NO: 9421 - DNA, 521 bp, Homo sapiens
  misc_feature 15: n = A,T,C or G
tggaagattaacccnctagactacctatcgggcgtttgtaaccccaccgggcggccgaggtacaatgtgaaagcagccagcacctattcttggttgtggctgaaaggaaccacatggagatctcttgagcaggcctggaggtgaaatactcccctttattgcagctgttggttaatgaagatatgttgagggaatttcacagctctggcatcaggtaggagactcacactgattctgtatgattctgacccagttgtcaaaacatagtctcccagcaggactgtgctttgctccctggtgactgtattctccatttttacaaactgctgtttgcacaggaagcctgccttggtcttgcccttgtcctccaagattagcattcgactctgaactccaacatcaagcctgttccctggaaatcaatgacaggtttctttttgtccattggaacttcttgcattgcctatttctattcttctgcccttagaacactgcactgactcatactgcatgcacatttt

SEQ ID NO: 9422 - DNA, 422 bp, Homo sapiens
aggtacgcgggtgaaaatgtgagagctctgttcacatctgacaggtctattggttgaagtttcaagtggcaactggtttgttagaaccagtctcttccagtgaagaaagttgttcactatttagcaaacgctaaggaggaagttcatgtaattcagataattcctatggtgtctccacagatactatgtggaaaagatggggagtagtgagagaaaacacaagaatatgtgaacccttcaggtctgtgagggatggaaggattgggattattggagaaaaataaggattgcattccagctgggcagatctaattcgagaataaacaggatgtgcctgtagatcaatgaaaagaaaggccaactgggattagatgcctgtttgaagggattactcttatttaacagcagttatgtaaaaaaat

SEQ ID NO: 9423 - DNA, 352 bp, Homo sapiens
aggtactccagcctgtgtgacagagcaagactctgtctgaaaaggaaaaaaaaaaaagaaaaatcatatggatcaaagtaattataatcaacattgtcaactgactttattaatcttttcaaatgaagtagctgtaaactttctttgctgtctccattaatttgttgtttttaacattagctaaggtataatggaaagagaacaaaaagaagggagaacaaaagaaggggaaagaagagagctagggcctgccttctcctggctctgtcacttgctaacggtgtgactttggacagggagatgtcccctctaggccctggtgaattagggagcttggcaaagtacctgcccg

SEQ ID NO: 9424 - DNA, 470 bp, Homo sapiens
ccgggcaggtactttgagaaggaaatactgtgttgtaatcatggataaaatatgcaggggaggggaggagattatagatattaatatagagtttagggtggcattaggcaaggatgacatctgaatatctaacttccattttacattgccatgtaagtctttttgcccagtgggtttgggggacattgaggcagaactcctggaaaatagaaggaagtgaaaggtcactggtctctccaataatcttgatgggaaggactagacaacaccattagcaaaatgtgcctcttaaaaactcaagacacaagcattatcttcatctcactgaaataacagctacatcctttattaacatgagaaaatcgaaaagcttaagaaaattgtcctgaaattggaatattggtaataatttgccagaaccactaaatctactttctggaaacagtaaacacttcaaatacatcctttag

SEQ ID NO: 9425 - DNA, 483 bp, Homo sapiens
aggtacatgatgataaggaacacaaggcctgggataaaacaggatctttttttaaaacaagcacaaatagtgtctggaccagaatacaaaaatcacatcaatctttagaacaaaataaagaccgaagaaactgcaagcagacaacttctggtgatgaccattagtcccttctcggtagttttggagagttttttttaaaaaaagtttgagaagcaatgatataacttaacaattatgcaaaacaaggtagggtggcagtaggagatggaaacagaagagaaactataagcgtaactgagagccagttataaacttaactattaaaaaattgaactgtcctattattcttgagagaaaaactactgaactatgaatggatttcttattctttttaaagagttaaatgttcgaaagagtttcaaatagggacctaggacaggggaagcactattaaatggtaaataagaaatattaacactaatt

SEQ ID NO: 9426 - DNA, 403 bp, Homo sapiens
aggtaccaggtttccctctcagcgggcccgttcccctgcatctttttacaacttaggtttattcactcctactgcagacagtcttttcccatactctggaagacatgggtgtaaaccaccatcaacccttccatagctcccacacaggaaggcatggccctctgccccacaagcttgtataggatatcctgagggaggaccctcctaggccctccttaagtcagtttttccctctatgtgggctgtcactcccacaacacccactatgtcctgggaaattaccctgaatcagtggttttcactaagactgattgggatgggaatgcaatttcccagcgaagaggtgggttttgtattcagaagaaaaaaggtttaaaatactatatttccattctacatgggc

SEQ ID NO: 9427 - DNA, 423 bp, Homo sapiens
aggtacttttttttttttttttttttttgccgactaagatcccagaagtatctgagaacttgggctgcgcagggaatgctggtgtgggagaagcaagccaactgagctgagctgcggccctgtttgtccttagctctccaaaacttgctgtctatgtcacttggaaggaatctgattcttttctgcaaggcactgacaataccttacaacagagctgggagataaaatgcagagcttgtgaaagtcatcagaaagttgaacacagatggtccccggcttaaaacggttcaacttgatgatttttcgacttgatgatggtgtgaacacgatacacattcagtagaaactgtatcgataagggctgctttattcaccagaagtgaaaaacacgatggttgtgtgagtatttgaagtaccttgccg

SEQ ID NO: 9428 - DNA, 471 bp, Homo sapiens
aggtacaatgtcctatatttacgaggaccttactacttttaaatcgctgtcgttcaaaaacaaaacaatttttttcagcgtgttcttatatgcccattactgagctggtccctggggatgcaaagacacatggacctcattgttttcctccaggaattcacttggaaaaagaaacacgggagatgctgcctagaatccttgatgcctccgaagttagactggagttggattaacccggcctctctctgtggaaataggagatggctagaagagtgacatcaatcagccacaactgcttcagcctcataacgtcggagcaatggtatcagacttgatgcagagactacccgggcatatgtggcttttttttttaaaatggagtgaaaaattccaagtcacaaccacaacactgaactattaaaagatcatttcatgttttgggttgtattaaatgctctttgcactttgctg

SEQ ID NO: 9429 - DNA, 501 bp, Homo sapiens
  misc_feature 501: n = A,T,C or G
gggactagccatcgacttcgggcgaattttagctccaccgccggggcggccgaggtacgctttgggagaacgtttgaaagccctgttttggctgttgtcctacaatcctttgtgggttcgaattgggctagagacaacttatggagaactcatatctttggaagataacagtgatgtcacagggttggctatgtttattctgaatcgcctactttggaatcctgatatagcagctgagtatagacaccccactgttcctcacctgtatagagatggtcatgaagaagctttgtccaagtttacattgaaaaagttattgttgttggtctgttttcttgattatgctaaaatttccagactcattgatcatgatccttgtctcttctgtaaagatgccgaattcaaggctagtaaagaaatccttttggctttttcacgagatttcctatgtggtgaaggtgacctttcccgtcaccttggcttattgggattacctgttan

SEQ ID NO: 9430 - DNA, 437 bp, Homo sapiens
ccgggcaggtacgcggggaagcaggtcatccacctttccctgtgaaggggtcctccctcagggaggtagagaagataatgttaatcccctcctatccaagaaacaggctcccaccagtgccaagtgcagctttcagtgagcatggcttccagtgggcatgtgtgcctaggaatcagtagtcctatagccacaaaacagtcaaagacctggaacccaatggaacaggttccatgatccactgaaattctgtccggctcctatagaacagattttgttggctcactaatcaccagaaaccagctgtcttaggatggaataggagaaaggtgccctgtgttgcgagctgggctattagacagtggtctgccctctatgcggtccaggcccaacgaagaaaccttggagaaggcatcaatggcgtcgaaacaaacttgggg

SEQ ID NO: 9431 - DNA, 430 bp, Homo sapiens
aggtacagtggcacaatctcagctcactgcaacatccacctcccaggttcaagtgattcttctgcctcagcctcctgagtagcttcgactacacacgcatgccaccatgcccagctaagttttatatttttttgtggagacagggtttcaccatgttgcccaggctggtttcaaactcctgagctcaagtgatccacctgcctcggtctaccaaagtgctaggatgacaggtgtgagccaccatgactggcctattttttgaggaacaattccagtctgctgagatcttgcctgtcttcctttattagagtcttttaaaagctccatttagcacagatatatttcattttgaatacctgcacatggagatctcaaagtatctccacttctctttttatatctggttaacctgacttctagattgttgttt

SEQ ID NO: 9432 - DNA, 362 bp, Homo sapiens
ccgggcaggtacaacttctataatcttagttatatggtttgtgtctctctaaattataaaggggagagtaattacaataggtaggttaaacggcaacagcaagaagtggtagctactacaagcttgaaaaagggaaggaggccaggcatggtggctcacgcttaaaatcctaagctttaggaggctgaggcaggcagattgcttgagcccaggagctcgagaccagtctgggcaacatggtgaaactccatctctaaaaaaatgcaaaaattggctgggcccaggaggctgaggcagggacatcgattgagtctgggaggtcgaggctgcagtgagccatgatcacaccagtgaaccccagc

SEQ ID NO: 9433 - DNA, 464 bp, Homo sapiens
ccgggcaggtactaacaaagagccctattcttcattcttaatcttctgtaaagaatttgagtttggaagttgctaaagcaatgcagtgaacagtgtacagccttctgacgtgctcaagaaaataagccttgcatattaagggagaacttatttcaactttttcataatcgtatttaatgaaaacactattaaaccttataataaattacaatttgggttttgaaacacatgccatcttgtttagtttatctgctgaaatatagaaacaaaatcagcaacagatagaacaactaaaatgatacaaatctaaaggtgattaaagagttgtaataatcagaagagagtcagattcagacacgcacatgcccctcctaaatatccagtcttctcatctctcattctttctcaaatgtgctgactgtgagtaaaacgggcagacagactgatttcctatcaactcgcct

SEQ ID NO: 9434 - DNA, 308 bp, Homo sapiens
aggtaccaagggtggtatggattggcagagccactcaggaaactgtcaatgacttatacttcctgggtctgggaacaagccagctatgttgctactgaattgagcagcaataggaaatgaactcgactccgaagttgcagttctaaccaaaagacaagaagatcaatattaggagaagtgggaaaaataacaaccagggcattggagatgagagaacgctggaaaaagattactattctggaaatcagtctcttgaagatggaattatgatctaagaggaagtgagtacctgcccgggggccgctcga

SEQ ID NO: 9435 - DNA, 462 bp, Homo sapiens
aggtactctttctctttgtctggaataaattccttaccactttccactatcacctagtttactgagtctcacgtattaggattgggtttaaatgtaacctgtattgcctcacccagaaagcctttccagtctacccctgctttgattatttccctatcctctatgctgcctttgttccctgtgtgtctctccacaacagcaattagagcacatatgatttattatctcacatattggtctcaactttcagtctatgaagtctctgcgcacagaagctcatgagcgttttcttcttttctgtggattacctttgcaaaggcccgagaccaccagagaacctgccttcctacctctcttcctcatctccacccattccctgcctcacattcagttaacaccaaactgattgacgtttttttcaggtgctacttgattgatgctttcatgcatccctgtacctgc

SEQ ID NO: 9436 - DNA, 458 bp, Homo sapiens
aggtacttagaaatacaattctgcaaattttatctttagggagttttatttcttgggaggatgattcaagaatatagtcacagatatttatttttgtctacagagaaaataatcatttaaatgaaaaacttttccactcaactgaatatgcactccacttagcacagtgagtggctgatgagcacaacacccgccaccccagcaggcttacacggcacttactatgtgccaggcacggttccaagaaaggtcactagttacattgcctcacacaatcctcacaacaaagtaggtaatattaacatccctcttttacagatgggaaaactgagacatgaagaggtttaaaagctcacccaaactgaaatgcctagtaagtgacagaaccaaaatacagatgcaggtcagcctcgctactgtgctatatgatactgtctctataatctactgctggcttt

SEQ ID NO: 9437 - DNA, 397 bp, Homo sapiens
ccgggcaggtactaattttaataccatttattccacagagcatacaccatattatattacttacttgttttttaaatgtctgataccctgaaatatatttaaattcctcaaagggatgcatattcctttgaatatgggtccacagatgagtttcagagtgtctgaaggacccttgacattttacgtagagacctagaaacactttctaggaacagggtctgtaactttttttctttttttttttttttgagacggagtctcgctctgtcgcccaggctggagtgcagtggccgggatctcggctcactgcaagctccgcctcccgggttcacgccattctcctgcctcagcctcccaatcgatactgcttttaaatgatgcttatatttttaaattg

SEQ ID NO: 9438 - DNA, 465 bp, Homo sapiens
aggtaccaccagctttggtcggttttgcctctgcagtatggaggaagctattgcctttggatattttgaaagatctttttgcctttagaaccctatcatattcctatctctgctttgaggaatctcaatgtggtgcataattggttatcattcagtccttttaaatcaataacagccacatactttaaagattctattctgaagggcacatctcaatggccgtcaaagctgtggtttactgttttgatgccacatgaagctaagttgtatatcctttctcagttccttgtcatatttggtctttttttatattatctttttctggatcacatttgaacagaaaataactttaaaagtaaaatgggctctaaggaattattgaaaaggttaagaatgtcagcctttctggcccagggatctcttaaaacctctggtgggtttgggatctaagggcctgtcacggca

SEQ ID NO: 9439 - DNA, 339 bp, Homo sapiens
  misc_feature 339: n = A,T,C or G
ccgggcaggtacttttttttttttttttttttttttagtagagatggggtttcaccgaactcctgagctcaggcaatccacccgcctcggcctcccaaagtgctaggattacaggcatgagccactgtgcccaggcttaggaacttttaataacacccctgagaagttactgtaagacacccttagtctgtggaatgccacccatgaatggacatgatttttctagatcaggacttctcttttcacccatgggccacaggccacacttggaaaagcttttgggaaggaattgtttgaatctgaagcatgaatagcctggagtaaataaggatgtgtctn

SEQ ID NO: 9440 - DNA, 434 bp, Homo sapiens
aggtacaaggagtagtctaaaacaagtgactttactacttattcttctgcatgtccttaccagcttcttaccttcttcaggttgagcatgagatcagcttcacagggatgggtccttaagggtttttttccatactagtttcagccttaacaatgagttttcaacccttaaacatgaaaaataaatagtgcgaaagaggggaggatggtagaaatgctttaaaattaccttttgtaaattttactttgtttatgttttaattgtgccttgcttatcaggcaagtcctacaaacaaagatctccacggcttctcaggtctcccaaggaacaggttcccctgttcctaaaattctgggaagtggttttgcaacatctactgtcaaggtaacattctactgcgttattacactttgctagcttttttttcttttcct

SEQ ID NO: 9441 - DNA, 474 bp, Homo sapiens
aggtacactgtgaaaactgaatttggagcacagctaggtcggcatccagggacctcttggctggcagtaatttctgggtcacacaaatttgtctttgcttctcagcaatcttcattttcaggaattggatcttttcttccagtagatgtatttcaatttctccatttagtttcatcttctcttggatatttattttttcataaaaaatgcatattccttcttcccgctctatcagctgaacgccactatggtcaaattcagaggcggaggctaagtgggcattgagaccaccgttttactagtcattgtggctccctctggctttggatgcacgatatacacaacatagcatacttccagaggatcacagatagtcaccaatggctttctagttaaattacatccacactttggaattctctaggaaagcatgggttactgagcctctcactttgaggctgcaatgcggttggg

SEQ ID NO: 9442 - DNA, 470 bp, Homo sapiens
  misc_feature 41: n = A,T,C or G
gggcgttgactgagttccaaaatgaaaactacgggcgaatnggagtgccaccgcggtgccggccgcccgggcaggtacgtacttttaaaatctggcaactaaattctgaagtatgctataaaatttaaaccaaatccccatgaacatataaaaaacagcccagcctgtttcttccccaaatttgtctgtttattccatcgactaatgaaagtctctgtttcagactccgagatgcatatctgtgaattagtgctcagtttcccaaaactaaagttaaccttctttcctgcctctcactcttcatttgtccttgatccttccataaaaccccaaatccagaagcaatgattaggaaactgtagactctagtaaaagtaatttcactagtgtcagagaaagagaaaggttacccaattaaaagaactaaggcttggcatcagaaacagaagttgtgaacatgacaaataaca

SEQ ID NO: 9443 - DNA, 479 bp, Homo sapiens
  misc_feature 454: n = A,T,C or G
aggtactgttagtgtcatttcaccaaagacaaccattactagaacactccttagctagcataccaaacttttataaaaacagaaattctgaggctaaaagaaagcttttactatttgacaattggtagttaaaatacctagttcctatctagccaaacaatattttaagaagtatttgagaatgcacattctttcaacaccatcatcacagatcacagaaaccatggtatctaggcaccagagactcataaaaagaatggtaaatcattcagagagccttattttgaataggaaccgttcatgccgatgatatcctgaaatgatttagagtatgtgataatgctggcatgtagttaagaagcctggagaggagataaaggaaaagtgaggcccaccagggatctggaatggcacagggagttactgaggctgacagaaattctcacactatctnctccagaaatacttcaggaaggcag

SEQ ID NO: 9444 - DNA, 523 bp, Homo sapiens
tgcgacgatacgcatacgggcatattgtagctccaccgccgtggcggccgcccggtcagtttacaaggaagactggctgaagatgaatctgagaacaaagcaggtctacagaggaaggagcagtgactagcctggtccctgaacgggtgaaatgggaaagtagctctggctccccactgccaaaaggcctcagtgatcttgctgtttggggttattagagcaccttttacccttttcaacaaagcccaattttacttaatctagttagaatttctactccttgaaaccaagagagacaaagcaaaatcaactataatttaaccattcctcctactttgagagcatgtaggttatttttaattttttgattaccctatgtgatgctatagtgaacatttctgaatacaaattcttggttgcatttctaggtattttcttaagatatatatgtatgtggaattaaaagatacaaacatttaatccttgaaaactattccaaaaggttagggcaaacattaattac

SEQ ID NO: 9445 - DNA, 361 bp, Homo sapiens
aggtacaagtgctcatgggtggcatcaggaaataatgagacctttctctcaagattttctacatatttaggttctgtcacatcaaggatgctgatatttaaatataaacctttttagaatgtatttgacagaatttcggggcatgaggcaatatatcatagcgctttaagagcatgggctcaggaaccagactgccagggttaaagcaaacctatgagttgtgtgactctcttggcttctgttttcttacttgtgaagataggtgtctcaaggtgtgttttaaggagaccatggatcggtgctcttaggacagtgtctggtgcacagtgaatgctctgtaagcagccaccgtggttctggg

SEQ ID NO: 9446 - DNA, 495 bp, Homo sapiens
aggtacatactctctctggagttaatttttcacattcagtgatttttggtgaccctttcaaccccaacaatgtgagacaggtgagagaggccttgctttttatagtgggctggatataaataaataaggtgagactcagctttatttgtttttaatgtagaccatggtttggataaccttcatatgtcaagcagaaaatattgtagacatttaaaaaatatccatgggtatgttctttgtttccttgtgcaagcctttaaaggattacaggaatagcaagtgatgtgggtaactcgggccaataatggtattaataaatgctgtgaaacactaatgtgctaggagacagcatctccagggagtcaacacccaggccagattccttcttttcttgtggtgaattcttgaagggttgtcagcaatctgaggccaacgtctttttttagggaaagcttagatttttcgatttaccccaaatggaggtttaaattattt

SEQ ID NO: 9447 - DNA, 444 bp, Homo sapiens
  misc_feature 20, 29: n = A,T,C or G
cggaactgctatcgactacngggcgaatngtagctccaccgccgtggcggccgcccgggcagttactttttttttttttgtttttaagatatagggtctcatggtattacccaggctgctacacagtagctattcacagggacaatgccactactgatcagcacgggagtttgaacttgctcccttatattttattataaatattaactaaaatgggctcaaactgtccgtctgtccctatgtttctcagtggatgctaccacgcaccttcttcctgggctgctggccatgaagccacatgcatccacctgggcagttactggtggcctgtttcccactgcagggacagagaggccacaactgagattgcccactgtcactgagctttagaatgttgccagttatagacacgcaaacaatgccgggatgaacttgtcagtacct

SEQ ID NO: 9448 - DNA, 484 bp, Homo sapiens
ccgggcaggtacatgggagtttgttttcatattctgtctccttttggaaatgtttgagattttccagtgtcttctttctccagtgtgctgagctattggtctgcccaaaaatctgatgttttccctttgttcccatgcagtgttccaagagctgccagggtggctttcgggtccgggaagtgcggtgtctgtctgatgacatgactctaagtaacctctgtgaccctcagttgaaaccagaagagagagaatcttgtaaccctcaggactgtgtccctgaagttggtaagtagagatttcaatcatgggggaaaggttttgtgttttttaagcttgtcagattctccggtgtgacaataacaagcctcttttaggtctttctgtgaccttgcacacagtcatggagttcagagggttgaggtgcttttggtattataaatttcatggtttaagatgatcattcatagcgaggatggctgtctat

SEQ ID NO: 9449 - DNA, 791 bp, Homo sapiens
ccgggcaggtacactgtatactctctgttgtccccttttgatggtgtggcatacggggagctactcttgctgcccagcatcgtgagagtgtatcattctgcatgtcactagctaggaagtgagcagaattcaaaactcaagtatggtttgaatgtgcattgctgtcacattattgcaaaatcagaaaatcctaagtcagggactgcctgtatgtgggaggaaaacaatggagtgagttttgtgaattgctctgggctgataagggtccagagaccccgtgtgtaaaggagaatttatatactgcccatataaataaagaaaagggaaaggatagacagagctttttctctgtttgctgctgcttgttaattgtctgctttaactgtcttcccagaaataatttttatgtcagagtcatattttggtgttaacatagtatcctgtgatagtcagttttaaatcaggaagtatgagttctcctcctgtccctttgttcttttttaaaaatagtttggctattctgggtcccttgtatttccatatgaaatttaagattaattgccaatttctgcaagaaaaaaagccatctggattttgatagggattgatctggaccttggccgctttaaaactaatggattccccggccggcagaatccaattcaagcttatccataccgtcgccctcgaaggggggccccggacccaactttttgttcctttagtgaaggttaattgcccgcttgcgtaatcaagggcataattgttcctggtgtgaaattgtattccct

SEQ ID NO: 9450 - DNA, 506 bp, Homo sapiens
  misc_feature 39: n = A,T,C or G
gggcgtgcctgtgaggcactacttgcatatccggcgaanattagctgcaacgcccgggcggccgcccgggcagtttctcggggatgatcaaccaacacagttggaccgctcagagctgtaatgcatcaaacattgaccacatgcttccatataaacattaggaataaaggcaaagcactaagttattcgaaagtttaattatatcaatacttgctattcaaaacatttaaaattattttaatgcaaataattacactcaatataattttaaatcttcaagaagcaatctcctactacttttatcctacatacaaataaattatccaattattttaactttggattattctctataatgaacactttgaataatttaactcatgacaggattcatacaattaaccttttaaacatttggcttatagtttacatcacatttgattacccttttattaaatctcaatagcaccaaaaacctgacaatgggataaacactgcccaactac

SEQ ID NO: 9451 - DNA, 437 bp, Homo sapiens
aggtacttttaagacagaccttacctgtgactcttttaatttttcagttccatttggtaattcataaacatcatgtgaccagtgacctttcagcgcttttggaaggatattggccactttatcagctttatacacacaaagtgcccattttaccgtcgtatccatttttgcattttgctgaggacttatgtttttggtggcaccctgtctgccttttacattcatttcttcctcaccagccttaaaacggagacgaatgggaaagggatgagagccttcctgggtatcatttttctttatggctggagaaaaaagaaagtctaccacctttatctcctcttctcaaacttttgggaagtgaggaggaaccgttctgccccaaagccaggtgagatttgaggccagtgtgttccctttgagcatttctccagaacctg

SEQ ID NO: 9452 - DNA, 508 bp, Homo sapiens
ccgggcaggtacgcgggaagaaaataaagagtttagaccccaaatccagccctcattccccaataatatggtgtctgtaaagttaaaacaaattattttccgggtcacaggacaggtggcactaagtttttggattggtggcaaaaaggatctgagccactatctgatgatgaacaggaacagagggcagtgcttttaaaacgttaatcacagcactttgggaggctgaggcgagagaattgcctgagggctggattttgagactagcctgggcagcataatagggccccatctcttaaaaaaaaaaaaagccaagcatggtagtgcattcctatagtcccagctactagggagagactgaagtgggaatatcacttgagccaggagatcgaggctacagcaagctatgaccatgccgcggcattacagcctgggcaacagagcaagacccttgtttaaaacaaaacaaaatctttatctacctaactttaaattgaaggtggtaaag

SEQ ID NO: 9453 - DNA, 511 bp, Homo sapiens
  misc_feature 461: n = A,T,C or G
gggggttattggatcaccacctccgtctttttgatcccaatggtttattctttaactggtggtctctgaactggtaaataccactggagctatcaagaaagatcatttagtgttcaagatgaaaatgctggaattctttttctaataataatttcatctagaacagatacaaaagacacttaactctattaatgtttacaacacagatggtttctggcatccttcctctattgaaagtcagaagttgggtgtcacttatggtccacgtgtaaagcttcctgaaatgagtgtagagtcctaagacaccaagggaagcccgtggagcccttactggttagtttactgttttcggcatgctgcagtgtctggtagcttacatgtgtctggttacacagacgcagaatatcttacgttaaaaatccctcttaaaatggacaagtgccttaaaaagactcctgcanataaatgggagggggaaaataattattgtaatatgccaggctaagcaaag

SEQ ID NO: 9454 - DNA, 466 bp, Homo sapiens
aggtacgcgggatagtaatcttttaaatatataaggtattagcattaataatctaatagtaaaatctgttggtttattttttgcttagtccttgaaagttggtgtggtttgttctgaaaaaaaagagaagaagattaaaaattatcttaatgatcataactctgggtggcccctgttggggaggctcaccaggctggggtctggctcttggcaaagccccagcagctctgtgaccttgggtgaaggtcacagaaaatcccctatgagctctgacttcttctcacatgtgataaaaggcaactggtgctgaaaataaagaatatgcctggctggatcttgaagggggaaccacattttcctgttgcctgggaaccttttaaaataccaaagcctctttcttgttgggggcccaatggttaaaaaccccccattaaaaaatgggaaggggcccccaaaaaggattccg

SEQ ID NO: 9455 - DNA, 466 bp, Homo sapiens
aggtacaaaaaaaattttcagaccatgctttttcctattataacatttcataatctcttccttgttttgtccctgcacctctacctccattaaccaggtctcatcaagttgtgacataagccaggtttcatcaagttgtgacaggtgacagaggcgtcacatgacaggggacctgattaggaaatccatatcctcataggatgcactttaacatcttcttgagctgtcttgatattttgagacatacggcaaagattccatatactgttccagtgaccagtgaccttgagaacatatttaaaactatagatttctgtgccccacccagagatcccaattcagtagcgctgaggtgggatctgaacatgagtagacttagaaagcctctagctgattctgaagcacagctagtttggggagcactgacatattgccactgcccatgaaccgggatgttcctaaatcg

SEQ ID NO: 9456 - DNA, 898 bp, Homo sapiens
ccgggcaggtactaagacccctgaatgtatataattatttaccaaaaccccaaacaaacaaaatcccaacattctgttagcgtaggtgatcctctgttaaataattgtaagctttgggatttaacggaagttgacggtgacttctgaccttactacgcttccaactactgacttagccaaactcctcaagtttacagaggtgaaagcccaagaaatcttttatttctatactcctaatgactttaattttctgccttgtttcttacaggatcttaataaatatccatttgtcttaccagaagcttgcatcctgcgttgtatggaaagaattcaaaagattcatgaacttggatgtcatgtaggaaaccaaaatacataatatctgtccagtaggtttatgagatcctttggaccagaagctatacgattcattatttacaagacattccactatcatggagcctgacagattacattgacaaataagaatcgatgaatcctaattggttcccatgctatgctttttaacatgccctgagagaccccgatatttctgtcctttactcatatgatcatactgtacatttgtatatcgttacctatctttgactacaaaatacatcactaattgataatatattctatctcttatcttcatggatcttcccagttaatctctgatgatattatctttgatagaatatattgcgaacaaattaattgtcggtatttcattttctatatacatatttcgcgttgtaaaatcgtgaatatatgaattctggcattatttcttggatatataatactgtagatatataatacttgaagaactatttcttagctaataactgtgccttgtacttctcttcgctgaaataattctgctatattagta

SEQ ID NO: 9457 - DNA, 434 bp, Homo sapiens
ccgggcaggtacctctgcagtccataaagttaggctggactgaggcctatcattgatggattgaagctgtcatccagcttcccctggtgctgggaactgggtgtgtctccttacccctgtagggttgggctggccttcgagtggcagaaatgccagctatactgaccccacagctcacacagacgacaccatgtccttcaagccagtatgacaggggttattgtcccacgtttcaggtgggaagacagatgcatgatgaactgttataataataccagctgctgatcacagagcactgactaagtgacaggaaccatgccaagggcactactaggtcatcctctcaagaaatcctcatcacaacaccatgaggtagggaatcaatcatccacatttcacagatgaagctccaagaggtaaatgacttgcccgcc

SEQ ID NO: 9458 - DNA, 391 bp, Homo sapiens
ccgggcaggtacctgctactaaataaaaacaccaggaatggtagtttttgctgttcttaacccaaaggaagaaagagcccttctctgaatggtttttgttgtttagttaagaaaatgccaactgaccaatgtcccagaaacaaatgggtgtagagccctagcatgcttcatttcaacacctttcacaaacagtagttttggcactttgcctaccaagctgtgagctaggcaactttccccttatattttgtgtgcctctgaaaacatctccagaattcaaatgacgatttttgacataagttatcccttcctcccctctgattgcaagggcagcatcactctttctgccatgcataagtcaacatttggagtcaatagccctcttgtacct

SEQ ID NO: 9459 - DNA, 434 bp, Homo sapiens
  misc_feature 408: n = A,T,C or G
aggtacaggtccaaaagaaaaggtccaagaactaaatcctgactaactcaaattttaaaagtgggcataagagaaataaccagaaaaagagaaagccaaagagtagggggaaaaaatcaggagactgggggagtcctgaagcccagtaaagaaagcgcatgatggaaaaagtgtcaaatgtgtcaaaaaaaaaaaaaaaacgctgctattaggtcaatgaaggtgagaaacataagctgaccactggatttggcaacatggagataactggtgaacttgaaaagagcgtgatggaaaaagtgtcgaatgtgtcaaaaaacgctgctattaggtcaatgaaggtgagaaatatgagctgcccattgggatttggcagcatggagataattggtggaacttgaaaaacgnaaaggtgacttgagtgcattaaaggg

SEQ ID NO: 9460 - DNA, 469 bp, Homo sapiens
  misc_feature 318, 375: n = A,T,C or G
aggtacactaggaaatgcaggaagaaaattatttgcccagatactgcaaagattttctagctatgtgagaaatgaaaatgcatttttgccatatttggtaaactgaatgttattaagaggacaaacctcatgtaaaaaggagataagcagaaactgatttgaatattattgcagagcaaagtaaataatcatgatgcattcaacctttataaatgtgcaaaaacagattaattttcccaattacaagccttaataatattaaatgactttaaacacatgaagtagggtaagaaatagatagcaatgataatacacgangtgtgttataagggatattaatgaataacttggttacacaaaagagggaggggatgngagaaaaaagggaaaatgctggattaaagttaaacagatatcctgaatacttgtcatatccttaaggctatatacgttctgaatctctaaaaga

SEQ ID NO: 9461 - DNA, 473 bp, Homo sapiens
  misc_feature 387, 388, 471: n = A,T,C or G
aggtactatagtctgaatgtctgtgtctcagaatgggattagtgaccttataaatgagggagcttgtttgtcccttccactacatgaggttacagcaaaaagatggctgtctatgaaccagcaagtaggcctttgccagaccccaaaatctgcagactaccctgaaccttggacctttcattctggaccaatttaagaaataaaataccggtggttattcaaccactcagttaatggtatttttggttatagcagcctgaactaaaacaaaggtgagatcttagggcatagctacatttaaagtctttccatgctcagaatctccatctgctggcagctaaagtggttcgcacttgtaatcctggcactttgggaggccaaggcggnntgggtaccttgagtcaaggaagtttgagaccagcttggttaaatggcaaaactctgtctctactaaaaaacaaatacccgggngg

SEQ ID NO: 9462 - DNA, 343 bp, Homo sapiens
  misc_feature 343: n = A,T,C or G
ccgggcaggtacatatatacaatatagcaaatatatgaatagcatgcttgtaaagtccaggatcctaaaacaggccaataagaaactaaaacaaatgaaaaagcagaacacatttttaaaggaaaaatcacccactcattgaagatctcacttcctactgcccccaggaaattcaaatagtggcaagcaatatgtaagaagaaacagagacagaacaagatctgaggctccaagcaaaacagtcctgcatgtcatctcttcctcttataaagtagtaactaacttcacatgaacagatatgtagatgctgagtagccacaactgagaaactcatccttaatcn

SEQ ID NO: 9463 - DNA, 348 bp, Homo sapiens
aggtacaaaagaaatggtattgtattgtttgtttcacaggattattgtgaatatacttaactccatgagaaaaagtgttgtgaactccaaatcacatgtataagatcagcctgactgggtgcagtggctcacacctgtatccagcactctgggaggctgagacaggaggatcactcgagcccaggagttcaagacccgcctgggcaacacagtgaaaccctgtttctaccaaaagtttaaaaactagccagacatgtgcctgtagtcctagctactcaggaggctgaggctgaaggataacctgagcccaggagttggaggttacagtagcttatgattgtgccactg

SEQ ID NO: 9464 - DNA, 361 bp, Homo sapiens; identical to SEQ ID NO: 295

SEQ ID NO: 9465 - DNA, 573 bp, Homo sapiens
ccgggcaggtactattttgtctattggctaaaatgccattatatttacttatgcgcaaccacttcattatttataacaccaagaataattctaaatcctttctccctgaatttattccctctctcttccaaagacctggtctcatttatagaccacaatctacaaacatctgccccaaataagctacgcccataattccatttctcacgagagtccctggaaagtaacaaggcacctaaatgacactgaaagataaaatccttattttatcctatcattattttagaacgtgagttatatcatttttttactctaaatgaaccacccaaacatttttaagaaaaaagcacttcatatgtttatatatccaaccgggacagacattacaatttacactatcattttgctgtcacactgtttagaaacattttccatagaagataacccctgaaaactttctgtataaataaatactagcagaccctctgcacttctatttatgttcaagtttactgagactcagtgcaaagctatcttgcttttaaacaaagcactcatagataacaagtacct

SEQ ID NO: 9466 - DNA, 458 bp, Homo sapiens
aggtactgtgagtgtttattgggcagtgttgacaggagcttcagtctcagaagaaggataggaaattgctctcagactctgaaccctaagatgtgctgctatgttacatttctgcccctaatcctgatggtttctcctgctcaatgaagagcacctttaccaagtagtcacctgagtattagggctagaggaggtccgagggtatgacagcttcccattttatgagacgagatttgtctggagataaaatgagcatgtggtgtttggcagggctgcatgtgtaggtggtagccatcgctcatgatgttcatggttcttgtaattggagtaaggacctaagacacattgctagatgaatgttttcctgttccttctttgtgggagggagtgcatgtgagttgtgagatatggcaagggttttttttcgaacagcctgttaagcttttattttttaatcc

SEQ ID NO: 9467 - DNA, 450 bp, Homo sapiens
aggtacccagggaccaacagggaggcccgagtggcttgagcaagagagtgatcagtgagtaggagaaggcagcaggagaagctagagacgactgaactttacaggccacaaaagactaaggctttgggggaggaagaggaagagaaaaaaaataaaaataaaaaagattttttaaaaaaaggttctggctgttcttattctagaggatggggtagccatgaaagggccctgggtgcagggtgacaggccctgtctatgttaccgggctgcccagcagcaatggcatgtggcttggactttcaaaagcattttgtgaaaaggactggaaccagacttgtacaaaggtggtttacagaacaccagcccaaaattaagttcaagtttttcaggttcaaatcattggcttcttggcttaaaaagggagggtctggtgggtaaaagcaaaacttg

SEQ ID NO: 9468 - DNA, 329 bp, Homo sapiens
  misc_feature 260: n = A,T,C or G
ccgggcaggttcttctttagggctggttaattggttcaaataatttttaatttcctttctagtatcttctcaagttggaaaaatatacatacagtcctccttcaccttactctgtatttatattacccataactagcaagaagttcttgttctagattttttgtttgtttagttataacagagtaacataccatttaattacaatttttagccagaaaagtccccactattttactaacttgttaaaagatatctatatnaaattgcctggccttatatttttcagtagattagaccgtgccaatcacaatcctgggtggatttgtgta

SEQ ID NO: 9469 - DNA, 446 bp, Homo sapiens
ccgggcaggtacaaagggaatggagaacttaggttggttacctgagagagagttacatctactgaacaattaagtgctcctcatcacgaaagaaaaggaaagaatgcggactgaatcctgtgccctgaaagtcgaatcagcatatacctgctgtttctatgtcaccaagaggctgattccaggtccaatgcagagacgatgaccactaggggtcagactttttacattactcctcttgaaagaaggaacccaagtcttggattttttaactggggaaaaactagagaggtcgtctatcctgcatctggccggcccatgtgtaaacagaatgaagagtcagcatggggaaagaatctgaatgccccgtttcttagccttttaaggatacagtgaaatgggacagggtctgagttaggaaactctttgaaattatacggagattcaag

SEQ ID NO: 9470 - DNA, 480 bp, Homo sapiens
ccgggcaggtactgaagattttgcaccatcactgttgtttttctcataaattctttatgaggctattagtctctagggtgctcttctgaaaccagaaggaaatttggctcacacacacacacaaaaaaagttgccatataaaggcaactgcaaaatatagtgggaagttggtggaggatggagtttcactgagaatgggacagcaacatgatggaaagaacatgaacttgaatttcagttctaccacttactagaaagatgcctttgaacaagtctcaatttctgaatcttcatttgttgctctgtaaaatggggtcatattatctcacaaagttgtcacaataattaaaatgagatcttgttttctaagtcacctgacatatattaagtgtgaaatcatttttctttctcattttcttttttataacgctctaataaataggaaggggaagaagttctttccaggatggtctcatcaaa

SEQ ID NO: 9471 - DNA, 484 bp, Homo sapiens
ccgggcaggtacctcctagccatccaattaaagaggctttccctaggatactgcttgcccttgcagggaatgggatctacacagcccatacaccttaagagtccagtattgatgttggtgttttcatcattcctcaaagccatttctggaccattcttcctctagccccttataaaaatgcttgttcacctgagctcaaatcaacactatcaccttttaccaactatttctcaactgtctacctcttcagtcacttttccctccttcattaagactttacacccatatcagtcctcctcaccacctaaaagtttgccatttaacagcttgatctttcttttctttgcctcattatcacccagcaagtccttttcatttctaatctttggttaaaggaaaattttccttgcaaacttagggtcattgaaattgggacccaaaaaggcttggtcacttgttaacccccagccaatcccatagtttt

SEQ ID NO: 9472 - DNA, 357 bp, Homo sapiens
aggtacatgccatgaaggacatatacaaggtaatggaaccacccaataaaaagtagtcttactatccttttgttttgggcatacaaaagcagattaaggataatcgtcttgttcatttatttatctatatacttatttatattctgtctctaggactgaaaaagccaaaagatcagggacctagttttgtttcttgctctttctcaagcatgaggacactgcctggcacatagagggctcacagtaaatatttcctcaatacatttgttgattaagtgaaggtgatagaaactgacagggaccttgaacaagattagagtattttatctgtatctatattgcatttgtttttgaaat

SEQ ID NO: 9473 - DNA, 518 bp, Homo sapiens
gggggttacttggatcaccacgcgtgcagtagacttcacggttcattttatttgatgatatagctaaaagcacataaaaaattctaaatcaatatctatattgcatttaacagcagaatactatttgaggaagatgcccaagcattcacaaattccagaggtctgcagtatttttacccattgcaccatatgactgagatgtattccatagactttgtccctaaagttctgccaggagcatttacttggccttaaatcctcagtggataaagtagtctacttattgctagatgggagaggctgattaccttcacctgcccttcttgtacattgatttgagtactctttacagttatcagtttacaattttttgactatcttaatgcatggttattggttagaaaagtgactctaaaaatgacatctgggtctcaatcgataattttcatatcaaatggaagctctggctctccaaagaattctgcttagtcttcactgggctttttgtatcattaacg

SEQ ID NO: 9474 - DNA, 494 bp, Homo sapiens
aggtaccaatggttttataatcttacagccttctttctggggctcttagaactgaccagaactaggaactgaaggccagccttttcttaaatatacagcatgacagtatgaccatccaacttcttaaaggtgttgtttatctatggtctaggtcagctaccggtttgccctgcatgtttgacatcacagatataacacgccacctggactacttccttcttcagggccttttaagactcttcagaggaaggccagctcctattggctctgcaaatccactttacagtgccagtgcccaaggctgtaagccctggagcttggagagaaatttggaagaaaagcaagagaaacagcaaccaaattgtcttagaatgtagaatgtctttgggtttgttttctcttttcaaacaatgacaaccaacatacagttcattatttccgttttctaaacagaggaccatgttcctacttggcgatatggggctaacataaaa

SEQ ID NO: 9475 - DNA, 462 bp, Homo sapiens
ggcaggtacaggtcccctaatggcaggcacggttgtagtgaccacactttccagctttggctgggacagcctagcttttgcctattgtcctaggacggtcattaatacagcctcttttcactctcctagtgcgtggatttggaccatcacctatatatacaatatggtcactgtttttaaagtggtagcaaagagagagtcatgagtgagagatgaatcccacaccaaggaggttgagaaacagttacatttaaggccacgtagcccttctgccagtcacttaagctcctctctcctcctagataggtctacattttgtctttaagggtagggggcaatgatccaacagccccttagaaaaaaatcgtgtgccatcggtgcttccaggcaggaaagaagggagtgcaactggagatgggctggtcactcaagggtaaacttgttccaatttaataacaagga

SEQ ID NO: 9476 - DNA, 432 bp, Homo sapiens
ccgggcaggtactgtatttcaaagctgacatttttttcccaaaatgtgcacctgtgaacactgcaaaaactgcaagtgcaaatgcacttgcaggtcatgaaattttgaggttttgtgcattgtaaaatcctggagcgattatatattagtcataatttcaatgaaaaagtaacgccagcagccttgagtattggcctgaatgtaatgctaaatgatgtgcgtccagggaactgttgctttttaagcgatggctttttgtcagtagctgctgtgactgaaatgaagttacaacttcaatacctctgtgcagagcagtatcaggaattctctgccctttggcagagctctgcctttcctcgttctttcagatgtaagacagcccaaatctctgacatgagccagtttagaactggaacgaatgagaaattagtg

SEQ ID NO: 9477 - DNA, 945 bp, Homo sapiens
agtaccattcttatctcataatgctgtaaaccatcagtagaagcagtttagatttggactgcatggtgaaatgaaaagtaataaccctccaaccacaacctagtcagggtattaataattatatgtagcaagtaaaacaaaggaagaataatattattcgaaaaagatggagattctcccaacgcagtttcatatattgaaggatctagattatgtatttttatgtaaggaaattatgttatttgaatacatgtcttcctaaaatggttaacgattaagaatcttgaatcagagagactcttgaatggtaaagagagtttgatctactgacaaccataggggctctaggagcgtgtgtgtgacacatgggaaaagatcgaaggatgctgctagtcgaatctactgttgatcttgtactcaatagaacaatttgggttagagacacagagatggaactcagcgagataggatatgtgtctcagtatgtacgagacagtgatagagtacaccgcctgattgctaatatctgagacactataggacaaattcgagattgaaaggtacctgggctcagccgagtttcttatggaacttgagggatacctccgggctgacaggaaatctgatgatagagctgtagtgaggtctcgagttgacatggatggggaggcctcggaacccacattatgtgtccctttataatgaggggtaaattgactctcttggcagtaggaatgggatgatgacgtgttacatgaggagagatgagattcgatgataacatgtgtatacgatgatatgtgcgtggatgacatatggtgttaaaatcatgttagtgcgtatagacgagaacacactatgatgagatatgatatggcatgattacatcatatgatgacaagacgacatatcatacaacatgatattgagaaatgatcagatatg

SEQ ID NO: 9478 - DNA, 437 bp, Homo sapiens
aggtatctaaaggtcatttcattttcattcatttaagtcatttaatttttaaaatcaagtggataaaaacaaataaatgtggctttgataataattttgacttgccaaatgcctcttttccattgacccctggagctgttcagtgttgtgagccctaccatgtgttagggccacatctctttttctcacaaagggaaactggccacgaggtgggagtcataggagcgttggcttatgaatgatgaatagggtagagttggccatagtgatcacaaatcagatctgcaatattctgctatttatatactgaacccagcatcatattaagtgagaatttcattcataagcgcgcatttctcattacattccaaaaatcagaccatgaaaaaaacagctttgggaaacatttgagagactgttgcttgagtacctgcccg

SEQ ID NO: 9479 - DNA, 396 bp, Homo sapiens
  misc_feature 396: n = A,T,C or G
aggtaccctaccactcaattttttaaaattcagataccaaacaaaggacaatatatcagctgtcaaatagcacataaaagtgtgtttatcatcattagtcatcagcaaaatgcaaattaaaagcacaatgagataccactaaacacccactagaatgactaaaattaaaaacacaaacatgttcaaggctgcagcgagcttttgatcacaccactgcactccaacctaggaaacaaagtgagaccctgtctctttaaaaaaaaaaagatgaacaccaaaatgtaagatccagacctaccaaattctcacacactgctgctgggaatgtaaaatggcacaaccaccaggggaaaaggtttggacaggtcttaaacacttaatcctatgtctaccctn

SEQ ID NO: 9480 - DNA, 466 bp, Homo sapiens
ccgggcaggtacgcgggtatcaacatttgaaaacttggggaattactaatattactgtagcgataaaatggaaattttgatgatacagacaatagtccacagagaattatgacttaaattattctttctaccaaccattttaagttagtttgccatcttatgttggtgctcttggaggcttacaaattattattatttgagacaggatctccctctgtcacccgggtggactgcgatcacggctcactgcagccttgagctcctggtctcaggtgatcctctagagtagccagaaccacaggcgtgagccacagcgcctggccaggaagcttacagattattaatgaaactttgttaagaacccttttaccttactgtcaaccagaaaagttattttactggtttgggaataaatggacacttatgaaaatgaagcaacctcttcaagttattttttttaccaaaa

SEQ ID NO: 9481 - DNA, 345 bp, Homo sapiens
  misc_feature 344: n = A,T,C or G
aggtactttgatccttagggaataaacactccttagctggacagcaacacaaataactcttaaatgaactgcgtctgttacacacacacaggcacgcatagagtttcaatggggtttattgaaataaagtggcctctacactgaagaattgtaaggactgtattctatccatttcctgtttacttctccatttatttgtattcataggtaaggtttactagcacatcattaagatactgtaaaacagcattaaaatcctaccttttaatttcctcaggtaagcgcctctcttgtcttagcaatgcctcggttctcaggccttgtttatctttctctgtaattgng

SEQ ID NO: 9482 - DNA, 320 bp, Homo sapiens
ccgggcaggtactgccagcaggaagtggttggtgccttagtgacccatatctgcagtgggaatgaagctgaagttgatactgccttagatgtccttctagagttggtagtgttaaacccatctgctatgatgatgaatgctgtctttgtaaagggcattttagattatctggataacataccccctcagcaaatacgaaaactcttctatgttctcagcacactggcatttagcaaacagaatgaagccagcagccacatccaggatgacatgcacttggtgataagaaagcagctctctagcaccgtattcaagtacct

SEQ ID NO: 9483 - DNA, 453 bp, Homo sapiens
  misc_feature 453: n = A,T,C or G
gccggggtccagggaattggtgttaatatgtaattacagttttcattgggctttatggggtttatatctgcgttccagaaattgttgtttcctttctaaatctctaaacttttaccattactggaaaacaccaacagagggcatcaggatttaattctggggagagagcattacttctttaaatcaccatagcactgtgtgcaagccactttctctgagtgattcttcagctttaaaatggagtgatggcaaagaacgtatgttatttcctccatgaaacactacttcttaagagctcaagtccagaacccttcattcttccagacataaaagtcagcctggatggctaccaccactaatcagatttgtctgctgatgcaaggcccttcagtcattccagaactggtaaatggagtcaccctgaggacaggccctgctgctgattgatgtccn

SEQ ID NO: 9484 - DNA, 301 bp, Homo sapiens
aggtactgacactcattcatgattggaaggatggaggggaatcctttcttactttttgagatgaaacatctggcatgctgaaagactgaggcaggaactgctaggaagggaaactctttagagaagtaatattttaggaaggcagtagcttgtgcaaagcccaggatgaaaagggggaaagagaaagtggtgtgggagggagaaatgagaaaaacggtgggggacagaaaaaattgcatgtcactgtcaagagactggtggactggagactggcaaggcagggatattgaagcatgtcttg

SEQ ID NO: 9485 - DNA, 343 bp, Homo sapiens
aggtacatttgttgggggcgtgacattaacatataaccacttagagtggacatgcagttagagaaaagtcaatgagctggaaccaagctgggaattccaacatgtagaagttaaacacaagaggaggagccagcaaaggaaacagaaacagagcttccagcaggtggggggcatttggaagagaacgatgccatagaagccaagatgaaatagacatcaaggagaaggaagtagtcaattgttttgaatgctatgaagaaagataagaataggtaaatagtccttatttttgataacagaggtcactagtgatcttgatgaggggtttcaatagaatggtggg

SEQ ID NO: 9486 - DNA, 368 bp, Homo sapiens
ccgggcaggtacgtgcagctgcatccttgcccattgacggtgagattatattggcaactttgaaaaaccaaatattattgaaatactgacccattttccctttacaataacatctttggctgggataattttacccacctataattctcgaagaaaaatgacttcaattatgtcacaaaatttaaaaaatcttaggattggaagagacattaaagagcaattccgagcctagcacagtggctcattcttgtaatcccagcactttgagaggccaaggcaggctaatttgcttgaggctgggagctcaagaccagcctgggcaacatagcaagaccctgtctctactaaaaacaaaaaaaaaaaaaaaa

SEQ ID NO: 9487 - DNA, 423 bp, Homo sapiens
aggtacagcaaaatgaatggagatgttggatttagaatacaggtaggcaaggtaatcagagacatagaaagcattgggaaagccactgctccccaagaagtcatatgacctgtgggatctctagaggggacctcaagagaatggtgtgtgtcaggcactgcactagtgactttatgtagattgcttcatttgttcctgccaacagcccactgaaataagtattaaaattctgtgcccagtgaagaaacagagagggtgtttgtgatgctcggaaaccaataatattgtgtgtagctctcaactcaagttcagggtatgctgacaccttgccatttgtctcctcaaatggtcgtatgtatttccaggtgaaaaaaaaaaggttggggttttccttgaggcccaattttgtgaatggaatataca

SEQ ID NO: 9488 - DNA, 451 bp, Homo sapiens
gaagatcttgaatccgctactgcatacaaggctaatttgagctccaccgccgtggcggccgaggtacgctttacgtgctttcctctctaggtttaattcttgtgtaatgagtggtatgataccatagctttaaaaggtatatttatgcaaatgatctcaagtttaaatttccagttcagatcttctctccatattccaggcttatagcttaactgccgtcttgacttctctacctgtaaaatttaacgttcagtgctacactcaggctggacatggaggctcgcgcctgtaatcccagctacactggaggctgagtcaggagaatcacttgaacgtgggaggcagaggttgcaccgagtggagatcgcaccactgcccttcagcctaggtgacagaatgagactctatctcaccccaaaacttgagggataatatatgtacctgcccgggc

SEQ ID NO: 9489 - DNA, 298 bp, Homo sapiens
ccgggcaggtacgtaacaggacatcaataaatattagttgaatggaagattaaatcaacaaaatggtgagttcctgatgatcataggtatgtgccacctgggttctattccagtaaggaatgggagattggctgccggaggcaagaacgtgtttcatttacatttacgcatttgaccctgaaaaatgtcaccagattttacaagttatttacaatggtgtcttggaatgactgcaggctcgtaaataaccaggaaagataaggctgaaaaaaaaaaaaaaaaaaaaaaaaaggtacct

SEQ ID NO: 9490 - DNA, 484 bp, Homo sapiens
ccgggcaggtacgcgggaaataaactaggtgtctaatgtaacttaaaatacagagaaggacatagagaacagaagtaaaaatagccaagtaaaggaaagcaaaataaagaaatagaagtcaatagggaaagtgatagatacagaagttaggcaaagataagcatgtctacacgtgtgtgttgtaggtgtgtgtgttacgcatttgtcttctgccacaactcttttcttaaaacatggtttgacccaaatattctataaacttgaagttaaaattccttttcctttttttttttaaaaaaccccatgatcttttttttggccaacaccttaaacgttggcgggggtgggaatgaaataactttttaagtgcagttaacaccatcaacagactaaatgttgcccacttttggtttttgggggattcataattttttaaaaaaaagaaaaacttgtctaatggcccatttggggaaattttttaaag

SEQ ID NO: 9491 - DNA, 866 bp, Homo sapiens
aggtactatatgctagaaacttggctgaatgatttgacattatcctatttaatgttcatgacaatccaataacgtaaccactcatatctcccttttgtgcagataacaaactgaggcccagagaaatcaaatatgttgcaaaatctacatcgttgaagagatgggtttcaaatccaggtcggcttggcccttgccacgacttcataatgaaattccatgggtgagtgttaccagtttctggttcatccgtgcttagttcaagggtctcatcatcccatccactgtatcagtaattttgctactggctttactcttactaccattggaaatgacttatgttttttttttcatcaatatgctgttgagattattatcaatcacctatgaaattaatacagtgttttgttatggtttggataaaattgatatgctttagttatatttaaggagagggtctgaatatgtttataattatatgttattatacttgatcaggttagcctgatttgagttgtaatgttttgtgttgtaagtgttttgatttgactggaataatttgatgtataagttcttatggtctaattgatattaatgtttagttatgtacattttttttgatatgtgtataacgataatttgggatgttagattgaagatagtgttattaaatatatgtattatctgtcatttattaatacatatttgatgtacttagtatagtggtatttatatataaaattgatttgtatggatttatcaatgaatgatgtatttttttagattattgtatttaatatgttcattatattgcaatttataactaatattgtttagtgtaattgtttgttagttggattattaacctt

SEQ ID NO: 9492 - DNA, 355 bp, Homo sapiens
aggtacttttttttttttttttttttttttttcatgtgaaagctagacagatctgatgctagccaagcattttagccatcagtaatgttcattacttggcacagagttggtatttcctaataaattttaaaataacactatgcgatatccagtagaaaataatatattcaaaatctactttaaagcatttacatcagaatatcacaaacccatgtaaaaattacccatggttacactgactactgaaaattagcatttcccctatgtttttgtctccactctagttcccttacattagatgttattactccacactttaaaacctctagtgctggtgagacttacaagtaaggat

SEQ ID NO: 9493 - DNA, 351 bp, Homo sapiens
aggtacttggctgatgtgccatgaagggagactgttagttagtgctagaccttaagggcccttccagtatcaaggatacatgtcacctcttggaaggggacaagaagaaaagacacaacccctgacccctgcactcacaaacacgaagaccactccacactggggcactcagaaaaagcataacagggacctttaagacgaagctaaggtcctgagccaccaagtgcaatgtttgatggtttgtgagactgttttttggtctaggtggttgatcctggtgtttgtggagaggcacacggttgaggttaagagccggagtgctggagcagactccctggtttgaatcctggc

SEQ ID NO: 9494 - DNA, 482 bp, Homo sapiens
aggtacagatcaatccctatcaaaatccaagatggctttttttttcttgcagaaattggcaattaatcttaaaattcatatggaaatacaagggacccagaatagccaaactaattttaaaaaagaacaaagggacaggaggagaactcatacttcctgatttaaaattgactatcacaggatactatgttaacaccaaaatatgactctgacataaaaattatttctgggaagacagttaaagcagacaattaacaagcagcagcaaacagagaaaaagctctgtctatcctttcccttttctttatttatatgggcagtatataaattctcctttacacaccggggtctctggacccttatcagcccagagcaattcacaaaactcactccattgttttcctcccacatacaggcagtccctgacttaggattttctgattttgcattaatgtgacagcaatgcacattcaaaccatacg

SEQ ID NO: 9495 - DNA, 400 bp, Homo sapiens
aggtacccacagcattggctgttcttcataggagactcagagaagacttcataggagactcattattgtttactggacatcaggtgctatattgtatagcattcacattccacaggtgaggaaacaggctcagaggaataagtggcatgccaagatcattgagtatatcggtagcagaattaggattcagactttgttaggcctaactccaaagccctggcttttttttttttgagatggaatcttactctgtcaccgggctggagtgcagtggcatgatctcagctcactgcaatctctgcctcctgggttcaagtgattcccctgccttagcctcctgagtagctgggactacaggcatgcaccaccacgcccagctaatttttgtatttttagagaa

SEQ ID NO: 9496 - DNA, 500 bp, Homo sapiens
ggcgagcgagtagcagctccaccgcggtggccgccgcgccgaggtacttctggaggtgcttgaaatctgactactctactggagactacacaaaaaggctacaaggagggggaggtgcaggtgcccagctgagcccagactcttagccataccctccaaagcaccacacatcttccagccccaggtgccacctgactacaacaaagcacttactcaacggtctcgaggtgtccttaaaaaaaagaaagaaaacaaaacaaagcatcacacacgttccagcctcagctgcacctgacttaacagctgcatgacaaaccacgaaaccacaagaactatccaactcagcctatcatcccactgaatgaaaaataaataaaatgactgtttcaaactactaagtttgggggggggttattccttgcacttgataaatggaacaaatggggaggggccctcaagccccttttgttccccgggcgccctaaaacaaagggagcccc

SEQ ID NO: 9497 - DNA, 480 bp, Homo sapiens
aggtacaaagggatatagaacctgtaaataaatccgtgtgtctgtggtcaattgattttttgataaaataactaaaaatacacagtgaagaaagaaaattattttcaataaatggtgtagacaaaactgactatccacatacagaagaataaaatttgacttttattttgctctttatacaagcatcaaatcaaaattaaagtttaaatgtaaaactactacaaggaaatatagaaggagactgtatgacattggcctgagctatgattttctgtagattattccaaaaggcaacaaaagcaaaacacacaaatgagactgcataaaacttaaaacttttccacaggaaaagaagcaatgatagaattaagagaacccacaaatgggataatatttttaaaccatacatcagataaggggctcatataataatatataagcaactcaacctactcaaaaataagaaaaaaactatgctta

SEQ ID NO: 9498 - DNA, 486 bp, Homo sapiens
ccgttcaggtacttagtttgctcccaacaataaattctctgacaaaccctaagtgtaactcagaaaaaagctacactaactaaatgcagattgaattaacataatctcccataatcagaagtttcctaaagacttttcatttttctttgttaacatttatgtctataatacctattgtcattactcctaagaaatccaactttaaaatataacaagcaagttttttgcaatgaaattggcagagtaagagttttataaccaaagggatctgtgtttaaattatgcactctctgccactttgtatctatgtgactgaaaaaaactcactccatttttaagagtaagacaacctcaaaaaaaatagttatttgggataaaaagggaacctttgttgggatttcaaggggccgacccctttttggggctttgttttttttttttaaaaggggctttttaccccacattttttgaaaaaaaaaaacaact

SEQ ID NO: 9499 - DNA, 323 bp, Homo sapiens
ccgggcaggtacatgagtgtattccgtttattaatgaatatatgtgcacagcaggcctgagttgctcaaaccctgcacatgccaaagacaggcccttgaccagctcctgagagagaacctctaagcccttggaatatgccacctgataagagtgtatgtttatgctgaggtcttgggccacgcagtattggtttggcttctgggatggtaaagggagagtagctggcgtcactcatgtgggagctgcgtacctagacgagagaccccattaaaaaccctgcacaccaaatctcgggtgagcatcggtggttccgagtaccatc

SEQ ID NO: 9500 - DNA, 471 bp, Homo sapiens
aggtacatactatagacataaacttgtttcgaataatttcagaataagtcgcacactcatgtcccttatcccaaaatatctgtatttcctaaaattaaaaatattttattatataatcaaaatgcaaatgattctgattatatacaataaatttaacactgataaaaataattgtaatctaacctactatctttattgcagttttgtcaactgatcccatatgtgtcttttttttttttgagacagggtctttctctgttggcccagactggagtgcagtggtgcgatcttggctccccacaacctccgcctcccaggctcaagcgattctcctgcctcagcctcctgagtagctaagactacaggcacatggcccctactgcccggccaatttttgtatttttagtaaagacggagtttcacttttttggcaggcttggtcttgaactcctgacctcaaattatccacct

SEQ ID NO: 9501 - DNA, 242 bp, Homo sapiens
ccggcaggtacgcggggggcctcattctccttggctgaaaacagaccgtttttcattgtactggtgaattagaaattctatccagccactcctggagattgattttccgtctggggatctgacctcttgcttcactagcaagggtcagactgttctgagaggagtcaacgagctggccctcagaaaagccttctctttcttttttgctcttttttttcttttcttttttttttttttttaac

SEQ ID NO: 9502 - DNA, 326 bp, Homo sapiens
aggtacttttttttttttgtagagacagggtcttgttttatttcccaagctggtctcaaactcctagcctcaagtgatccttctgccttggcctcccacagcactgggattacaggcgtgagccaccacactaggcttggaacaattcttaagttcactctgacctctccctttcttatcacttcatgggagtttagttagtgctgtgatctttccacagaaggagctcatgcagaagaatatcatttcaacaaacatcatttcaagactgccggacttcctaggttacaacacctactgatggctctaactattagcaggtatag

SEQ ID NO: 9503 - DNA, 476 bp, Homo sapiens
aggtactgggatcgttgttctccttccacagctacaaaatcagttgtgtcccaacccagtagctgtaacttcaccttttctccaattcttccccactcacaccaacatttttcatctggaagagtcaactgtgaatgggacaagagcttttttttttttttgatacagagtctcgctctgttgcccaggctggagcacaatggcgcgatctcagcccactgaaagctctgcctcctgggttcaccccattctcctgcctcagcctcccgagtggctgggattgtaggcgcctgccaccacgcccggcgaatttttgtgtctttagtagagatggggtttcgccatgttggtcaggctggtttataggaccactgtcatatatgcagtccgtcatatacacttgggcaccagagtgaggaagaaagaaaggaaagaaaggaaggaaggaaggagggcaaaagaatagaaaagaaaag

SEQ ID NO: 9504 - DNA, 752 bp, Homo sapiens
aggtacgcggggggagaacgtcagaaagtcctgaattggctgttgtcctacaatcctttgtggcttcgaattggtctagagacaacttatggagaactcatatctttggaagataacagtgatgtcacagggttggctatgtattctgaatcgcctactttggaatcctgatatagcagctgagtatagacaccccactgttcctcacctgtatagagatggtcatgaagaagctttgtccaagtttacattgaaaaagttattgttgttggtctgttttcttgattatgctaaaaattccagactcattgatcatgatccttgtctcttctgtaaagatgccgaattcaaggctagtaaagaaatccttttggctttttcacgagatttcctaagtggtgaaggtgacctttcccgtcaccttggcttattgggattacctgttaaccatgttcagacaccatttgatgaatttgattttgccgttacaaatcttgccgtagacttgcaatgtggagtgcgccttgtgcgaaccatggaacttctcacacagaactgggacctcttaaagaaactcaggattccggcaataagtcgtcttcaaaagatgcacaatggtgacattgctctttaaagttcttaaatcacgaggaattgaattaagtgatgaacatggaaattcaattctatctaaggatttgtgggtaggcacaaaaaaaaaactctcaggtgctttggaaaatagcgttggt

SEQ ID NO: 9505 - DNA, 799 bp, Homo sapiens
  misc_feature 95: n = A,T,C or G
aggtacgtaacaggacatcaataaatattagttgaatggaagatttaatcaacaaaatggtgagttcctgatgatcataggtatgtgccacctgngttctattccagtaaggaatgggagattggctgccggaggcaagaacgtgtttcatttacatttacgcatttgaccctgaaaaatgtcaccagattttacaagttatttacaatggtgtcttggaatgactgcaggctcgtaaataaccaggaaagataaggctgaaaaaaaaaaaaaaaacagttgaagaatcagttgcttgttttaaaaactcatttcacaatgcgttattttcttaccaaagaggcaggaagctcaatgtctataaaactttaaagtaagcatttccctttaaaatgaagacacactcttaaacctctctgtgaaccaatctctccataaaaatttatgatgtatttgaattagagcatgctaatttaagtgtgatgcacaaagagcactgcaaaggaaaaaacaaaccttaattttatttaatcttaaataataactaataattgcacaagaaataatcaggatctttgaaaatataagccgtcatttacattgccattggtagcttaaatgtgtaggccaacaatcaaaacaaggagtcaaagttttttttaaggatctgaaataaaaaggcaaatagcaaaccatgtgcccaaacagccggcttggataactacctgttccagaagctcaatgctttgtaaaaaaatatcaattgggaatggtcttctacattaataagctaaaggaa

SEQ ID NO: 9506 - DNA, 355 bp, Homo sapiens
gaggagagatggactgagttttggcgataggtcgcacaccttaccaacagcaggcggcgagggctccccacgctgctcgtttccagaggtgcctcgtattattgagaaggcgtgcagtgaatgaaaatgtgtccacacagctcctgctctgcctgtgacattgggttgctgtatattagctgggatagtatatttcaaattgctttctcaattgcaaagtatggtagaaataaatattcgctttaatttagtaactagaacttagaaaagttcctcctgtttcctgattgccaagtcgggatgagaaatagatttcataattatgatacaacttgatatcttgagataaatgttt

SEQ ID NO: 9507 - DNA, 500 bp, Homo sapiens
aggtaccattcttatctcagaatgctgtaaaccatcagtagaagcagtttagatttggactgcatggtaaaatgaaaagtaataaccctccaaccacaacctagtcagggtattaataattatatgtagcaagaaaacaaagaagaaaataatattgaaaaaatggagatcccccaaccagtttcatatttgaaggatctgagttgtatttttattaaggaaattttttttctgaatactgtcttccaaaatgttaacattaaaatctgaatcagaggactctgaatggaaaagaagtttgatcactgacacctagggctctgaagcgtgtgtggccacatggaaaagtcgaaggatgcgctgtcgaatctcctttgtcttcactccatagacaattgggttgagcacaggaggaaccagcagatagatattggccaagatgacgggcagcggagaatcacgccgcttgctaaagcgatgcaccatggacaatccaatga

SEQ ID NO: 9508 - DNA, 459 bp, Homo sapiens
  misc_feature 459: n = A,T,C or G
ccgggcaggtacgttaacatacaaggtatgtaaatgaaaatcaatgcacttgtcatttcagcacaattccttattgcttacattcaacattttaaatacattttatttaaacactaataacttttgttcttgtcttggaagtctaatgatcttcttggctccctgcccctacagccctctaatcttcacagccgtggccacttagcccccatctggaggttcaggcttattctgcatcttggagctaatcttgtccctatgctgggggcatacaagatatcatagccaagagctaactgatttagcactcagctttgctgctggtttcattctgatcttgtaatttatttctcagatgtaggctatgcttctcccagcaacttgtaaccaaggcttggctttgtataccagttgcaatatctatccaggctttcggttttcagttctgaccagtttttn

SEQ ID NO: 9509 - DNA, 349 bp, Homo sapiens
aggtaccaggagggtattgatgtttgaggtccaaactgaaaacccatcacctccttcccactgctatagcagcgttagccctggggttcattatctagccagttcacgccttctaaagtggggctctgaaaatgtcttacttccctcacagacaaagcaattctcaagcctcctgagatcacccaccaaccagagcaactgctgtcacttggaggtgcagctgaattcttctaattgtgacacaaactcttgaaactgtaaatgctgaaagattaaatgaggttataacactcagaaggttttacaagtaaaagtaagtcaaatcaataggcctttatttcatatctga

SEQ ID NO: 9510 - DNA, 403 bp, Homo sapiens
  misc_feature 377, 393: n = A,T,C or G
ccgggcaggtaccaactcttgtcaggctcagtggcagcttctacgacctgatggatggaaaaaaatcaaactctgtgactctatggttgactgccacctctgcaaccttgactcatctgctgaaaaggcaagaagaagaaagggcagcaagccctgttttagggactacataagatgaggggagataagggggacatagatgagttctttaggattgcgtgtgttttgagtttttgtttctaactgaagaaatctatcaatattaaatagggtgggaaaatggtttcttggaataactgttcaactgttgtgtaaataaggaaagttttaaatgagtattacttattgtaattaatgcagaaggacttccccagtcnaaaaaaaaaaaaaaanaaaagttcct

SEQ ID NO: 9511 - DNA, 496 bp, Homo sapiens
ccgggcaggtacagagggtgccaggcactgtggtgcacacctgtagtcccagctacttgggaggcttgaggcgggcggatgcttgaggccaggagtttgaggctgcagtgtgctgtgattgctcctgtgagtagccactgcacttcagccctggcaacatagcaagaccctgactctaaatataaaaaaaagtatagcgggcacaaatggggcgaagccagggtgggatgcagagtctagagggagatgaagctggagaggcaggcagtggtcaacatgtggccatggaaaatagtttaggtttgattctgatggcactgggctgccattagagggttttgaagcaggtcagtgatgtgatacaactaaagtcttcaacagatcattctggagacagtgctaacatggactggtgggcaaaagagtgagaagccgaatccttaattcagaaggaattgaaatattgtttgatttcaggcagggcaaataaggctgg

SEQ ID NO: 9512 - DNA, 447 bp, Homo sapiens
aggtacacataaacacacacatatgtatgcatacgcacatatatgagatagaaatttctcctttaagtgccactctgtaggacctaagatatttctggattttgtttgtttatttttgttttacatctgtgagttggtatcaacttacctagcaaagtaaggggagaggcgcataaaaaaggcgcctttgcactttctggaaactagccacctttgactcaccttctgcctccagctcccagactcaggctctgagattagcaaggaataaatctccctgcctgcaggcagggtcacattcacaccctccgacactcagaatctgctccctttacaaagtcttagaaaactgaatccccggactgtctttacagccaatttggatgtttaccaacactcaggggaaagaaatcattcctcctgtctaagcttaatgccgtgaacttt

SEQ ID NO: 9513 - DNA, 339 bp, Homo sapiens
ggggccattgagactgccatggaagacttgaaaggtcacgtagctgagacttctggagagaccattcaaggcttctggctcttgacaaagatagaccactggaacaatgagaaggagagaattctactggtcacagacaagactctcttgatctgcaaatacgacttcatcatgctgagttgtgtgcagctgcagcggattcctctgagcgctgtctatcgcatctgcctgggcaagttcaccttccctgggatgtccctggacaagagacaaggagaaggccttaggatctactgggggagtccggaggagcagtctcttctgtcccgctggaaccca

SEQ ID NO: 9514 - DNA, 391 bp, Homo sapiens
aggtacaagtttcagccactggtggtttgccaaactggctgattacccataaacacacaacatggttctgttttgctcctagcaatccttaaaccattgcatgtctaacattctcagactaattcacaaatcagaaacatctgatgcccaacccataccaaatgcatttcagggcaaaaattatgctcctataatgtctggcttcctgtcttcaaggcactttgcttacatgactgaatcctcactgtgaggtgtagctatccatcatttttgagcaagaaagccaagatggataaataagtgactttcccaagacaactagagtggttggcaccatgatgggattggttgtcttatttttcagttggtcctgcccgggcggccgctctag

SEQ ID NO: 9515 - DNA, 466 bp, Homo sapiens
aggtacattttaaaagtcaggaagaaaataaaatctgactcttgtagcatttagctttgtattggagtggcctttgcaggtaatgccaacttccacgacatttagaagattcataaagtgctggtcaaaataatggaaaaaatagcagctgtcatttgatcagaatctgtgtgcaaaccaattaaaagccctgtcataactatttaagcatgtaaggtgatttatgattacctttcataaattaatgaattctaccaataagagcagggtgctacattgggtgctcctgttctcgcagagtttacagctacacattacatgaggactgctccaggtttgctgtgtttaaatgattgacaaggcagaaactgtgtcttttcttcaactgattggcactatctacttataacttataacttagcttatttttcactcccccccaaggagagtagagtccagaatcccc

SEQ ID NO: 9516 - DNA, 465 bp, Homo sapiens
ccgggcaggtacgcgggggaccttgggcctcttttaaaaccatggctttaagtaaggagggagcagatatataaaaaaccttatccctctttctaatctcttatgtcctgtgagtgtcacccattgagtaaacccaagtggaagtcagcaggaaagtagctgggatgatgcagtctttacagataccagtaaagatgtcatctggccaatttgtgtgaaaaaagagaataattctcatccaaaccgcctgtctctggaaataagaaaagctctgagggtctccaaagttaccagaggaaggctgaattttatgagtctagtcctcaactctaaccaaagtaaaggaaactggaaagacacacgctttttcagtcattaatagaaagttgtccagaaacccggcgagtgaatttaccccgagctgaagcttcctttgcaacttgggaacaccaaggccccagtgac

SEQ ID NO: 9517 - DNA, 559 bp, Homo sapiens
agaagcaagtctttcaggacatacctaaagaagatagcatccatggtgcatgtttcatgtgcctcaccaggcatcaccatacccaccacagctcatgcgtgcggatgcctttgctacccaggacggccatacaaggaagccattggcagtcctgtgcacaaacggcatgtcaagaaattaaatgatttcctcagggccccgcaattaccttcagcaaagctgagattcccagccttctctccgctccctgagactgactctgaattgcttttctgctggagatgaaaacaagaacagaaacagtggaaactaatcacatttttaaaagttttacataaccacttaattataatacgcctgccccaaaagcactcctaacgtcctaacacatggtaacttatttgtttaattttataagtattttcagggacatggtgggagggagagcatcaggataaagagctaatgcatgtgaggcttaatacccaggtgatgggttgatctgtgcagcaaccaccatggcatacgtttacttgtgtagcaaacctgtacctgcccg

SEQ ID NO: 9518 - DNA, 394 bp, Homo sapiens
aggtactccaagctctgagaccacctcttctgcaaagccttcctgattctgcaaagaacaggtaggcatttcatccttgggacctcacagcaattcaggacacatttgtgtcccagccctgcttggcttggctgtctccatgaatatacactttgcaacttctgcaccaggcatcataccaagcacacagtaggcactcctgtgttttttgaataagtgactatatcatcaccacatttcaaatgcggaatatatgagctactagaaaagacataagggtgagattttacatctttattgtatcctagatatacaagtctattactgccttttcccatgtgtctgtcaacatagcataaagaaggtgggatttaacctgttagaaattgaataa

SEQ ID NO: 9519 - DNA, 268 bp, Homo sapiens
aggtacatggtgtatgtaaggaaggggtccagtttcagtcttccagagcagaactttctaacttgtgtgtgggtgttgtgctctgggcaggttaacagatccctccaactcgaggagtctgggtggctggagctctgcactggtcacctttggggtgagtagcctggccccaaagtgacatacaaacatcattttctgtgtgtgtcacagcctggagaaaggtgagaagtcccagatgatatcagtctaagagttttgtacctgcccg

SEQ ID NO: 9520 - DNA, 380 bp, Homo sapiens
tttgagctcaccgcggtggcggccgcccgggcaggtactagaagtataattctattatcatgatagtttatgactatctgtatagtcagattaaaggtaactttagaacaatggataggtttttcaaatgcagaatcaaggttgcaattttgtagcatataagctctcaaatctctagggggaaatgtagaaaaataaaaacttactgaagtaaggcaatgtgcatcctacattattatggcaacaaatcgataatggtattacaataaaatctggtgtaatcacattttccttcttcgtattgcagtattaatctctgtctgatgggagatgagatgaatcacaagatgtataatggaatgcagaatattctgccttgt

SEQ ID NO: 9521 - DNA, 472 bp, Homo sapiens
  misc_feature 407, 435: n = A,T,C or G
ccgggcaggtaccttgaattagagcctgaaatgggggaattgcagccataaaagacattctcagacaattggagactttcctgagttgtgataatggagttatgaatatgtaggagaatgtctacatagattttatgaagatgcatgtggcaacatatctgcagcttattccaaaaaaggtccaagaaaaaaaggaaaggaaagaaaataggaaaaactcggtcgagccaccatgccaagcctcactgtttctaataaccaaattgttcctgtatttattgagtctctgtttcatgccagacactctgctatagtctgaatatgttatttctgttaattctcataacagttctgtgagcaagaacaattaatatcacccttttacagattaggaaactgaggcttangatcaacaatgtgcccagggtcttacancttgtgagagatagtggtaacttgcaaatcattctgt

SEQ ID NO: 9522 - DNA, 454 bp, Homo sapiens
ccggtccggtacgcggggattacggtgagtgtagtaacagctactggtaatatttttgcaaatcacgtgaaagcattggagcaactgtcttggaaaatgctctttaaacttcaaaccccagtatgttttggtagtagtggatattacacatatatgctgctcttttcagtgttcttttattgtgcgaaaacatttttaaaacatttgatttattaataggatttatttttaataggattgttaataggatttatttttctaggacattgtctttaaacacttggatgattttatatgtcttaattctttaataatttgtagatgtaaaaaacttcgtgggcagaaagcgaagaaataggaaaggatttagatttatttggcatttaaaggattttgttttattatgcccctttatttgggtataaactaaaaattatttatcctttatgcgttg

SEQ ID NO: 9523 - DNA, 458 bp, Homo sapiens
aggtacgcggggctatgttgtgtatatcttgcatccaaagccagagggaaccacaatgactagtaaaacggtggtctcaatgcccacttagcctctgcctctgaatttgaccatagtggcgttcagctgatagagcgggaagaagaaatatgcattttttatgaaaaaataaatatccaagagaagatgaaactaaatggagaaattgaaatacatctactggaagaaaagatccaattcctgaaaatgaagattgctgagaagcaaagacaaatttgtgtgacccagaaattactgccagccaagaggtccctggatgccgactaggctgtgctccaatgtcagtttcacaggtgtacctgcccggggcgggccgctcgacccgggcaggtacgcgggaggaaaaatgattgactatgcccatcctgggggttattttggcatgttacctgtactag

SEQ ID NO: 9524 - DNA, 453 bp, Homo sapiens
aggtactgagcatgtggcttcaacacaccagtgcctaagctattaaatgttacggttggcatctcactgtccttttatttctgaacaaacacttaatgatgcccactctatgccaggagcaactctattgccagagatgtttctgtggataatccacagtgccagatgttaaggattcccaggcgagggacaggggccagataaatttccaaacggccgtgtttcccaaaatgggtaggagatcattttaggtagtccatggatgtatgatggttacaccattatggtttttatatttttgttaatctgttatttgtgtaatattcatctttgactcttaatgttatcttttttgattagctaattattgctgaactagttgatattttatattttatggagttattttttaaatttatattgtgtttttattgattgtataatgcttttttg

SEQ ID NO: 9525 - DNA, 456 bp, Homo sapiens
ccgggcaggtacagatttagatgaagaagatcagaatgttgggtttctaggtttttatctttttagtagagtcggggtttcaccatattggccagggcgaacttctaacctcaagtgatccacccgcctcagcctcccaaagtgttaggatcacaggcatgagccaccgtgcccactgagaatttaatacactttatgtaagttaattttttatgatagttatctagctttgccagaccaattttgttagtaaatttaaaacattaaaaaattttgaatcctcctaattctgtgtctctaatttagtaattttaagttttgatccttgtttcattctatcattcttttatttaaaaaaattgccattggcttttctaaaagtgaatcgtgaatcatgatttcatgtgaaataattaacttttaaacagcaaagattccctttagaacctttatttg

SEQ ID NO: 9526 - DNA, 465 bp, Homo sapiens
  misc_feature 271, 325, 422: n = A,T,C or G
aggtacgcgtggacagagagaaggttaagagcaacttgatgggaggcagctgcatggaacctgtcccactgaggaagtaaaacaggaatccaaaataatacgtttgctgggaattataaagaatttcattgagaaagtaaaaaagaaaaatctatgcaaaggaagtgattctgttgtttaatgccatcacctgtcattctgtctcttaccatggctggcttggctagtggcaccacgaacagatccctacagaccccaacaccaagaaaangtaggtttttcttctttctttgcagttctttggtatagatttgatgttctaggngtgggtggaaggccattcgtgtgagaaaagattacacttagtattgggaatgggtgaagggaatgactttcctttttcttaccctaatatggacttnttgtttttagagatgctgtcctgtacctcagtttaagatgagg

SEQ ID NO: 9527 - DNA, 834 bp, Homo sapiens
aggtacaacatacactgtgtgtgtgtgtttcaagaagggacagcccagataaagggaggttactgaagcaggctaagtttcagcaaaatgtaaccttcaccttagaaaccaggaaccagagtaattagatacaatctttccaacactatgggagagatttgatcaattaaagccaagatcagttacattatttggtttacctaagtaatggacccttaaatgcaatcaatacttctctaggctgtgagtcttcaagacctgagatgcattcaaaaaacacaaatggattttcaaagggcctcgggatgttcatcacaggctgaggaggaggattgcagagggtggggggcagaaggaaacagacaacagacctgagcttgctgtatgaagtcttcatttccttccctcactgatgtgctgctttcatgttcattttgtagttcatgtatgaattaaatttgttttaccaaagaaccttaatctagggatgagcagccatgtcactcaattcattttaaaattgcagcattaaaactcatttaataggataaagaatacgattaagagttctatttgtgtttctgaaaatccacaaaacttacatttgggagttacgaagaaaaaagcagaagttgctctagaatcttttaccttgtgccccatggccatcctttcccaacatggatttagggaaggcaatggcccagtttgcttgggaaccaggccatgacccatatgcctggacctactggagcggccatatctgcctttagaacaccctggctagagtggatcatacaagtccgggtacagcaactttccacccccatcttt

SEQ ID NO: 9528 - DNA, 347 bp, Homo sapiens
aggtacccctttcagactggcttctttcacttaggaatatgcatttaaggttcctccatgtcttttcatgtcttgatagctcactggataatatttctttcttttttctttttctttctttttttttttgaaatggactttgctccagcctgggcaacagagtgagaccctgtctcaaaaaaaaagaaaaaagaaactaaacgtctctgaatcatgggagtcagttctaccactagcactgagtaaacaccacaatggttatttcaccaccatgagcttcagtttatttgtctgtgaaatgggatcattggtaagagaaccccagactccctttcctagcgattgtt

SEQ ID NO: 9529 - DNA, 833 bp, Homo sapiens
ccgggcaggtacttttaacttagatacatttactttttatccactcagctgaaaaaagaggagaaaaataaaagtaggtcaggtcaatctgtttcctttcccatttaatgaattcatgcccaggagtgagtgagaaatgggaggactgaatctgctgttctccaagactagcttaggagtttctgacatcatgggcatcccagcaagccaacggtcacattagtcaccacgtatttttcatatcacgtgatccctctatcagtgtatcagcctttgctgtataatgaacaatcctaaacatcaatggcttaaaacaaaatcacttattagcacataatttggtaggttcatattttgggctggccgcaggtaggttttgcagatttcacctggtcttgtcattttgctgcagtcggctggcattttgaccagggctggaggactatccatgtgtgacaggaagctggttggctggggtgcctagtttcttcttggttctcttccatgtgggcttgggcttggtcaaatggtcttgggtttctctatgcaggaagagaggacagccccaattaacaagtagttttaacggtttggcttttggcatgttcactgatgtccttttggccaaaggaagtcacatggccaagtccaaagtcgtatttaaacgggttaccttagggagtgattcagggagacatgatttatggtcccaaggttcatacccttccatgtgcagattaactacccccctccaagatcccaaaagtttatttggttaaaagtccattcttttggaacatctggatgtactaaccttttactgaaccttttgg

SEQ ID NO: 9530 - DNA, 450 bp, Homo sapiens
ccgggcaggtacagtggggtatccctggggaggatagcttagatatcaaagcttacgttttgcaggcttcacagaacagatgatatagtagaatagcggtttccttctcatccacccccgcctggcttcctgtccataagtgaatagcatctgccttgatcttcctgaaatattttgtctttaatataacctctaagtatgctagccccaagaatggaaacaaggaattttcattaggaaaataacatttatgggagcctttcttttaagcagtgtgtatatgtgtgtttgagtgtgtgtgtgtgtgtgcgagagagagagagagagagagagagagagaaagagagtgggagggcgtaaactgcactctcatttgtgaaagagggctcacactttccacaggggattcccttttttgggccagggcgcctattagatgggaaaagcctc

SEQ ID NO: 9531 - DNA, 465 bp, Homo sapiens
ccgggcaggtacttctagaaatgccacagaaatcaccacattcgccccaaatcaccaaatctcttaattcagattatacatgtccagaatatccagttctcctagaaacaaaatgacacttttatgtttccctaagtttgaaatatttttgaagtattaaaataagcagagccatagtcccacactgtatttttctactgagaatacaacaccagaagctaatctcatgaaattagcccatgtgaagaacaggctgttaactactgttgtgatggtaagtccagaagccctgtgcaaaatgtgctcctggaaccagctgggccagcatcacttcctaaatcagaatccctgcaggtggggcccagccagctttgtcttaagaagtcctccaggtgattctgatgcgtgcctgaatttgaaaactgcttgtcaattttcagaagtccacagaaataaaaacaaagc

SEQ ID NO: 9532 - DNA, 670 bp, Homo sapiens
  misc_feature 15, 18: n = A,T,C or G
cgtgggtgaaacgcntanctgtaggcgactcggagctccaccttggtggcggccgcccggcaggacactgttgagctttctttacataaaaaggtaatgtttattttcctaatgatttctatccaaagtgacttgatgaataatatgtaattaacttgaggagagaaagcagaaggagccaattggttggagaaaacaatcttgatgccaaagagatgggttaggtctagagaagtgcacttgaaaatagagataatagttgaggtttgtggataaataaaatcgctcaaggagagtaatacattggaaagaagggaggtgtagagcagaacctgtggattagcagtaagggagactgagaagtggttagctgaagaaggaacaagtataccaagaaaaagtaggtagataaaaatcacaaattgaagatgttttgggacctgattgtttggcagagattttctgtattatttttttctacaccatatgtatgtataattagaaaattattttaaaatcgtattggtttcgtgtaattaacagtcctatattgttacctgggcaagttaaatagtcctaattgtccctgagttgttagagaatgtttgtgaaccactcagcacagaccttgacagataggtttttgttttttgcttttttgaaataccct

SEQ ID NO: 9533 - DNA, 360 bp, Homo sapiens
aggtaccttaccaccccatccccagagcattgcatggggtgtttggcacacagtaggtgctcaatgtagacgtgtgcactgtgacatgttagagccagacaggatctcatccagcccgttctctgcacccctccctcccctctccaagtagccctgctgtgggttcaagtaaagaggggctggggcgctggtctgattgtgtgggtgatttggggagatctcttcctcttccggaaccccaaaaggttgggacaaacacagcaacaagcccagctccctgaatttcagtgattcatttgtgcgataaaggagtgaatgataaagtgaaggacgattgtccccgcgtacctgcccgggcgc

SEQ ID NO: 9534 - DNA, 479 bp, Homo sapiens
aggtacagggacccacttttttttcttttacctcactagtcctggcacagtgcttagcaaacacaagtagctcaataaataaatacttattgatggacataaggaagagaactggacactgtgcaaagcctgtctcagtatgaaaagccaaaactcccagcagggcaactgatctcagtcacctttccagagttctccctggcccaagagagccaatgtgaatcccaggactccctgtgttacaggaataaagtagctctggcaaaaacaggcctttgcagcaaatgctctaagagatcagggaataagcaccatagggttccatctaggaaaaatattaattttccttgaggagcaaagtgcacatgaagggcttcctgtgcatgggccagcttggggcgaaatcagtaacattcttaaaacattctaaaacacaatttgtacctgcccgggcggccggtttagaactagtgggaccc

SEQ ID NO: 9535 - DNA, 486 bp, Homo sapiens
aggtaccatggacaataccatcagagtttccaaaaggctggttctcactcttctcctgccacatgctttccctcacacccctggtgtggaataaatgttaaggaaagctaagacacaattgggaggaggggacacaggcctttccactcaagcgcaaatccttgcaaaatccctgggtgccaccaaagaattttgccaaaaaccctgattaacggcaacggggcattaaaaaaaaattgctaccttaccaagggaaaaaaaagggggggcccaaaaatgttttggggggggaaaaattggcccattatacaccgggataaccctggggctgggaaattctatttattccacaaacccaattaaaaaaattcaaaattaacccaaattttaaaaggtccccccaaaaaatgaaaaatttttttttaaaacccaagggagggatttttatttgggaaaggattttttttttttaaaccaccaataaaa

SEQ ID NO: 9536 - DNA, 469 bp, Homo sapiens
  misc_feature 447, 448: n = A,T,C or G
aggtacttttaaatttaattttaataaattattcaagttattcatgccaatagcaaaaaattcaaatgaaacaaaaagcaagtttaagaagttaaagttccctttatcctttaccattcacatccagaattccccacaccaggcaataatcaaaattttggtagccacccttctatagatgggtagtattaacatcatttctatcctacaaatgataaaactaagtatcggccaggcacggtggctcacgcctgtaattccagcactttgggaggccaaggcaggtggatcacctgaggtcgggagttcgagaccagcctgaccaacatggagaaactccgtctctactaaaaatacaaaaaaattagccggatatggtgccacatgcctgtaagcccagctacttgggaggctgaggtaggaagaatcgcttgaacttgggagcannaggttgcggtgagcccagatc

SEQ ID NO: 9537 - DNA, 379 bp, Homo sapiens
  misc_feature 329, 339: n = A,T,C or G
ccgggcaggtactactgacttacctgccatgggctttctcaagacaagtcctgcaggagaggcacactcacttctagcgtcaactattgaaccagccactgccttcactcctcatctctcagcagcagtggtcactggatccagtgctacatcagaagccagtcttctcactacgagtgaaagcaaagccattcattcttcaccacagaccccaactacacccacctctggagcaaactgggaaacttcagctactcctgagagccttttggtagtcactgagacttcagacacaacacttacctcaaagattttggtcacagataccnatcttgtttntcaactgtgtccacgccaccttctaaatttccaagtacct

SEQ ID NO: 9538 - DNA, 352 bp, Homo sapiens
ccgggcaggtactttttacctttagaaaaacttgtaggtaaaaaccaacaggtgcattcaaaccaatcacacgccaacttttaccacccaccaccgtcttaccttctgctgctgtgttggctcattattttgcgcggacccgaaatgaaggctgtctcgtcctttctgtttaattggagcgcctggagagcacaggtgagttgttaaaaacccggtgaatcctgcatggatttgcaaaccaaactacatggagaaatcagttaaattctcaggtttcagggttgcagctgccactgagaagtgtatttaggcaggttctggcaacagacttggtgttgggcttgagtgggaa

SEQ ID NO: 9539 - DNA, 395 bp, Homo sapiens
aggtacccagcacaattctcacatgtgcttattttgaaattaaaccaatgcaaaagtttttaccctgaggtgttgctaattcatgaacctattctcttgacagtttttccctccaatataacctatatcttattaaatgtcttttcttcttctagattgtttccaatagtagcttaattttagctttgttcaggctccaaattagaaaaacgctgagattagccaaatatttgaacactgtaaggtattaatcagtttaattcaagattatctcgtctgtatacctctcattggtaatgctcactttgtggcttcatttcaaatctgtaatcccgtccaaataaaattccccaccaggacctgttttccggcccatccttaagggaccccttcat

SEQ ID NO: 9540 - DNA, 362 bp, Homo sapiens
ccgggcaggtacgcgggggtagctgggactacaggtgcccgccgccatgcctggctaattttttatattttttagtagagacggtgtttcaccgtgttagtcaggatggtctcgatcttctgacatcgtgatccacccgcctcggcctcccaaagtgctaggattacaggcgtgagtcactgcactcagtcaggttttcaggtgctggttccatggctcttcctgagccgaaaataaggaaactccatagaccttgtccactggaactcgttcccatctaccctccactctatccaggtaagaaaccaaccatctcaggaaaggaaccaggcaggagtcagaggggaagatgggcactgaag

SEQ ID NO: 9541 - DNA, 400 bp, Homo sapiens
tttggtagccctagactacacggcgaattgtagctccaccgccgtggcggccgaggtacgcggggttgtggggacccagagaatggtgtctctttaatagtgcgattgttgttgttgtatgcagctcaatcagaaaaacaggaatcctaatcaggaaagggctagagggatgtttactcaaggggaaatctagatggttactgttctgtattgataagaatgtcacctgttaagtgaagtcagccttttaattcagaataagttcagagaaggagacacaaaaactcagatttaaaaaatttgaatggtaaggatgatattgattaggcaccctaagaagtagattgcttttcgactttgatcccagaataagcttgtcattttcttttgtacctgcccg

SEQ ID NO: 9542 - DNA, 487 bp, Homo sapiens
aggtacttagcatgagctcattgacggtgaaattggccatttatacataggcaaatctataaggaaattaacaatatttcacatttcttctaattaatggtctttttgtgaacatgcactgcctactaatgtcagcttatctatgatttgaatgtatagctttctaaagcgtagcaatttttttgcatatttatgtgtcctaagagagtccccccgcttcatttttccatctctcagcctcatgaaaggctacctctatctagaatttgtgacagaggaagctgagttttgtggttgattgtatcttcctggttacaatctagaactatcagagttttgcaatgatagtaacagcaatgactaacccttgcttggaataatagcctttaatcattatcctcagtttctatctgggaaaactgagtgctattttaaagcagtcttcctgctagtagtggcaagaatggagacataaatccatcccttg

SEQ ID NO: 9543 - DNA, 484 bp, Homo sapiens
  misc_feature 484: n = A,T,C or G
aggtacgtgtcaacatgtgacttaagatggttaatatatgtgtagaaacgatacgtatttcttttaggctgtgcctttaaaggaaatgagcaaacattcccctgccactttcccatttttgctggctagtaaataatgaaagagctggagcagatatcttggacccaaatatgggtggcagatgttgaggatgatagagccatcttactaattcttgcttgccaacatctggactgttatatgagagaaaaatgaaattttagatgcagtaagttgcaaaagcactattattttatgtaacctcaagaagaaaaatatacatacccagttaaactatgacataatgcttgaatgacattgattacaaaacacatttccatttcagaattgtttacaagtgaaaattttgtattttaaaacaatacatttcttgtttaagccactgcacctgggattcattgtgttagtggtttatgctatattn

SEQ ID NO: 9544 - DNA, 458 bp, Homo sapiens
aggtacttttttttttttttttttttttgtttcagtgaaagaacatcagtgtatcagcacagcaaatattccaaatgccaggctggattccctccaattaccaggacctccaggcttctcctcctttcaagaactttctgaccctggatccagtctaaatgttggttataaactcacctgacatccacagggcccttccaaaatactgtcaagtaagtgattcttaaatttagttcaacaaacaccagttgttggacttggttgcatccaggattagttttcacaacaatcccatgaggtaggtgggggctggcactttgccccattttatagataaagatgccatctcggaggctcaaatggcatgtgcacagccagttaggggcagacctgagactgcattcaaatctgatctgcttctacccataccgtgggggagacttgggaggaaggaggcc

SEQ ID NO: 9545 - DNA, 392 bp, Homo sapiens
tattcaatttctaacaggtaaatccacattctttatgctatgttgacagaacatgggaaaaggcagtaatagacttgtatatctaggatacaataaagatgtaaaatctacccttatgtcttttctagtagctcatatattccgcatttgaaatgtggtgatgatatagtcacttattcaaaaaacacaggagtgcctactgtgtgcttggtatgatgcctggtgcagaagttgcaaagtgtatattcatggagacagccaagccaagcagggctgggacacaaatgtgtcctgaattgctgggaggtcccaaggatgaaatgcctacctgttctttgcagaatcaggaaggctttgcagaagaggtggtctcagagcttggagtacctcgg

SEQ ID NO: 9546 - DNA, 432 bp, Homo sapiens
  misc_feature 90, 94: n = A,T,C or G
ggagttaggtcattgactcaggccgaatttgagctccaccgccgtggcggccgcccgggcaggtactactgacttacctgccatgggccnttcntaagacaagtcctgcaggagaggcacactctcttctagcgtcaactattgaaccagccactgccttcactcctcatctctcagcagcagtggtcactggatccagtgctacatcagaagccagtcttctcactacgagtgaaagcaaagccattcattcttcaccacaggccccaactacacccacctctggagcaaactgggaaacttcagctactcctgagagccttttggtagtcactgagacttcagacacaacacttacctcaaagattttggtcacagataccatcttgttttcaactgtgtccacgccaccttctaaatttccaagtacct

SEQ ID NO: 9547 - DNA, 359 bp, Homo sapiens
aggtacttagcagctgtgtgacctagagcacagtgctttgagtttttgagtcttagcttctgtgtctataaaatggggttcacacaactcaccttacagggctgtaagattagattacacagaaaatatattttttggctgtgggggctggaagtgttgctgattagcatttgaaatcccatcctgtgggtgagaaaaccccaccttatgacttggtgggaaacaaagccaacctcccactgatgaagctgaaagtagcagaaccttgcttctactgcctcccttgcagctagaggcaggcacaggactagcctgtcaattggatgcaaatgctccaggccttgaatcacaacctggtg

SEQ ID NO: 9548 - DNA, 615 bp, Homo sapiens
ccggcaggtacagacatacaaatatggctccaccacttatttcactcatctttacatatttcttggagtctcagtttcttcattagtaaaattaagataattcacctcattgttagcacaaattagatgatgcatgttaaatttaacacagtgctagtcacaaaaaactcaataaatgtcagttatttttatgataagacaattctaagttaaacaaactggaggtataggtttgatcagcagaagagtagaacacacgagcatatgcaacaaaaaaattaaatagggtttaacttccaaaagatcaaatatatcattaattggaacaatcaagacctagtagctggggataggaagaaattagttacctcattccaagtaactaagtgataactagttctaagaaatacaaagaatttaaaatgaaattttatttcactaacttattatttcactagaatttaaaatatactatttatggatgtattccagggggggggaatactgaacttattcttattaatacagcaagcgttaatcactagatatttatttaataaaaattagaattgtcaatatggttaaaaataatattaaaatatagtccctgggcgg

SEQ ID NO: 9549 - DNA, 460 bp, Homo sapiens
aggtaccctgcccagagatttctccaaaatgagctcttgtgaatgcaggcaagctaaagccacacaatgaagctgaaattcattcagcttagcttctcctgagagccttctttttgtgggggtaacattgcccttttgtttcacagcgaggtctgcgctaagacttgctacttagggagtcaaagctaataaaacataccgtctagaaatacagacataactggtagaactatacaagaaaaagaaagggcagaggaagaagaggaatgtgattgtgaagaggtatgaaggggattacaaatccctgcttctcagagcgtggtccatggactagcagtgtggacatcactttcaaatctattagaaatgtgaatcttacacccaacccaagaacctgcattaaaattttcagccgggcgcagtggctcacgtctgtaatcctaacactttgggaggctgg

SEQ ID NO: 9550 - DNA, 468 bp, Homo sapiens
aggtacttgattgtctgaaattccttttgcatgattagattatagagtaaatgacgtattttaggattgtgtttaacaaaagtgagatgctaattcttgaaaattaggcctctctatggggactgcacgtaatcacattaccctagatcttgagttagcgagagaatattctgtcaggtgattcactgaccttgcctataacttgaaaccaatagcaaatccagatgtagtttcactggcctttgaagtccagggcaaaaagacaaagcgtgactccctgtctccccattgcatcctgattgtctccctgtccagggacagaataaatatcctcaagacattgactcttttcacagtgaagaagctgaggttggagctttggcctcatctctataggttcatgctgcatttctgatctcaacaggcgggagaaggtctttcctgctccccttcctcctggcacatgaa

SEQ ID NO: 9551 - DNA, 806 bp, Homo sapiens
  misc_feature 124, 521: n = A,T,C or G
ccgggcaggtacttttttttcttttccttctttttttttttttttgagacggaatcttgctctgtcacccaggctggagtgcagtggcgcaatctcggctcactgtaagctccacctcctgggncacgccattctctgctcagcctcttgagtagctgggactacaggtgcccaccaccacgcctggctacttttttgtatttttattagagacggtgtttcactgtgttggccaggatagtctcgatctcctgaccttgtgatctgcccgccttggcctcgtagctctttttgaccctcagggacagtcactgaattatgtcttgggagcccatgcttctgaggcaggcttagggagcaggagagcatacaggtgtagcagcctttccagctgatccccatgccctgctgcacctggagggctggagcaagctattctcatattggggaaaagggctgatgggacctcagtcatgtggcagagaatctgaaagccagaagcttggcaggtctgtctcggngtggggtgacggagagacatttccctagaattcaactgcttggagcagaaagacagagcatgggcaagtgctgggtatttgaagcccgcagtccttagcatggcctaaggccgtctgttttatgacagaacctgaagaaaggcccaagcattatgcatctatgtgtgccagtctacttgtgctaaaggcactttttaacattggaacccttcctgtcttgtaccttgtgcggtttaaaaactaatggaatcccccggctcgaggaatttgaatatcaagcttaag

SEQ ID NO: 9552 - DNA, 850 bp, Homo sapiens
ccgggcaggtacaaagtccctgaggcaaaagcatgcttgctgtgttctaggaaaagcaaggaagacagcatgtctatagcagtgggaggtggaaggataataaacagtacgtgaggttagaggggaccaaatcatgtattttccatccagaggttcccaaccttggctgcacattagatttattctaaggagcttttaaaaaataccaatgactgggtcccagcctagagtgattaaatcagaatctctggaggtagacttgagaatctgatgtttgcaagtttcctaggcaagtcaaggctgaagaagactgctgcaggccattgtaagagccaagcgttgatctcattcaacctttccctcagctcttctagagacagccagcattctcttatggcacaaatacagcctttcaccctgacagaaagacacaggacaacaaattcaatatattaattcactggcatggatgatattctcaagactaattgtttccagtttgataggagacaaattaaaggctggaaggcactggaatgcctgatgatgaattggactttcaaacttgggcactactgaaacaaatggatggccagagacacatgagattcattggagccagcttcatagctaagtgggatacacagaacctggaaatgcatggagcatggagcttgaagttatccacattggttactgatgaagtgacaggtgatgaatgggatgatactattttattttgaggccacaggttctccatccttagatggggtgacatcagtttgatatcatacgatgggatattatgatgagatcacatcatgtggtgatttgaggtgatatatgatta

SEQ ID NO: 9553 - DNA, 479 bp, Homo sapiens
aggtacgcgggacaaaaaaggaatcctaatgctacagaactgccactcctaccacctcctccaagcctacccaccattggagcagagactagacgtagaaaagcacgacggaaagagctagagatggagcagcagaatgaggcttcagaggagaataatgaccagcaatcacaagaagttccagaaaaagtaactgtatccagtgatcatgaggaagtagacaatccagaagaaaaaccagaagaagagaaagaagaggttatagatgaccaggagaacctagctcatagcaggaggaccagggaagatagaaaggtagaagccatcatgcatgcttttgaaaacttagagaaaagaaagaagcggcgggatcagcccttggaaagagaactctgatgtagagattactacaaccacctaaaaaccttggttggggaggggacaaaaatgaaaccccggaactggagtagcaactctgg

SEQ ID NO: 9554 - DNA, 458 bp, Homo sapiens
ccgggctggtactgaagattttgcaccatcatttttgtttttctcataaattctttatgaggctattagtctctagggtgctcttctgaaaccagaaggaaatttggctcacacacacacacaaaaaaagttgccatataaaggcaactgcaaaatatagtgggaagttggtggaggatggagtttcactgagaatgggacagcaacatgatggaaagaacatgaacttgaatttcagttctaccacttactagaaagatgcctttgaacaagtctcaatttctgaatcttcatttgttgctctgtaaaatggggtcatattatctcacaaagttgtcacaataattaaaaatgagatctttgtttctaagtgacctgacatatattaagggggaaatcatttgggctttccattttcttttttataacgctctcataaatgtaggggaaagaatcct

SEQ ID NO: 9555 - DNA, 453 bp, Homo sapiens
  misc_feature 219, 220, 222, 223, 224, 225, 415: n = A,T,C or G
ccggtcaggtactaagggatcaagggactttttccaaggctgagcaggtttaaggaaaacatctaggtgaaacatctaagggctagctagcaataggagagccattatcactctttttttttttttttttttttatttttttttttttttttttttttttttttttccttcttttttttttttttttttttttttttatttttttttttttatttttannannnntgtttaaaaccaaccttttttaaaaggtatctttgctttttaaaaaatttttttttaaaattttttttttttttttttcggggtttttttttcccctgcgcccaaataccttttttttccctggggtgaaaaaattttttttttttttttccctcttttattaattttttttgttgctaattttaggttnttttttttttggttgtggagattttttcctctaacaac

SEQ ID NO: 9556 - DNA, 487 bp, Homo sapiens
ccgggcaggtactttgttcttctctcccctacaagagggcaggaacctggtcttagtcatttgtgtatccaacagcatcaagcaggtatgtaaagagtgcttgttgaataaaacttaatataaaaatttaagttagctctacgcaacattgatgtaagagacagaagtgccatgtctctgttccaattagttttattacttaggcatgagggttcaggttccaagttcccaggtcggtgttaatgtcactgctgaatttaccttggagaaggcaccaaagctaaccacagcagagacattgtcactcacagcagtgttgtgattagccaattgtctttggtcgcgttatgtattgccatccttcacaccgcagatggttcttatcagcgcgtcatgtccatccttattcacggttacctgttctatgggaataaggctttgagagaaattcggcccatattaatctagaacagtgtttcctagacag

SEQ ID NO: 9557 - DNA, 429 bp, Homo sapiens
ccgggcaggtcactaatctgtattctaagtttgaagatttgatcttcatgatgatgtgaatctgtgtttcctagtcttgagaaatggattttaggctgggttctagagagctgaagtgatagtgagctgtgctggtggaggtgaagatgtagagtgttctagaggtgactagcattttaagctaaggattgttggcaaatagaagatgaaagaataggaaataattccaagatcttcaactcttctgcattacaatatgtaaccaaatgatcttaattgtctagtcaaccaaagtttacaaaaaataaattctgccataactgtgactcaaatatatgcgaatgcataaaatatgggtaagaaagtgaatttgaggcttgaacacaggtaatttagaggatcttataagaattgccaagacttgatggt

SEQ ID NO: 9558 - DNA, 448 bp, Homo sapiens
aggtacatacttcagaggctagtttgcaggagtcactattttaatccatgcacagtgttcagcccagtgcctggcacacagtgggtgctcaaacaacagcttttctccctgcatgttggtcattagggtcacaggctctgaagtcaggctcctagggtaatatcctgtccctatcactttcaattgtaggaagatgggcaaattacatacccccataagctttaattttcttactataaaacagagataataattgtatctaccttatgggttattgcaagcagcacatacagtcacccaaataaagtatataagagttctcttgtaagttcccagtaagtgctcactcctatgatatttgaatgttccccatttgaaattcctgtggtattatgcaatcattctgtgccataggaacccgattagcatagggtcctgggattctggc

SEQ ID NO: 9559 - DNA, 460 bp, Homo sapiens
ccgggcaggtacgcgggtgatctaggtcctgggaatacagcagtgatcccaacagacaaagccttgtcctcacagagcttaccttctagaacgaacaaagaaacacataaacacacaaaatgtcagatggtgggatgtgctacggggaaataaagcaagcattccctaccctacacttccttgtaagaggtaagagtgggttgctagtttgtatcaggtgttcagggaaggccttactgacatttgacctaaaagaaaggtaagaatgtgacacctgatgataaatagggaaagagtatttcaggcaggagaatcacttgaacccagggggcggaagttgcagtgagccaagatcacaccgctgcactccagcctggcaacagagtgagacttcattttaaaaaaaaaaaaaaaaaagtaccttgggcgcttttgaacagtggatcccccgggctggagg

SEQ ID NO: 9560 - DNA, 458 bp, Homo sapiens
ccgggcagttaccaaccaggtgaggaagtcagcatccagcagggttgtttaagctattcaggatcacacagcaggttggctacacgccaggactgggtggggcccacagtgggtgaaactgtgaggaaatccacaagcacctctaggtgctcaggatcggctcctacagattctagtccaatctcattcatgacctcatttgcttttcagtttaacagtgcttggttttggtttactatttttcccatggaaacattttttaattatgtcttatcagttattctccatttatcccaaagggtcggttttgtgattttaaaattgacactatgtagacctttatctttcatcatacgcaaaaatcaactcacaatgagtttaagacttaaacataagaccaaaaactataaaactactaaagaaaacctagggaaatcgctcctagatattggtctagg

SEQ ID NO: 9561 - DNA, 349 bp, Homo sapiens
aggtaccgcatgttgacataagatgaaatgcatgaagaacattctgaaaaaagtgaaattttctccagtgcttggctttatcgagagctgatcttgtgatttctgtcactcaggctgtggatgcaagttaaaaagcatcatctgtaaccagtcacaggaggatttctgagttgggctggggtaggggagagagatttctgctttgggtccccatagtttctgtaactctggtttagtttccttgtcactggatcctgcattccttgagggcagccattgtattttatctttcagctttactaaagtatatgaaaagccgggcatgctaaagtgtacctgcccgggcggc

SEQ ID NO: 9562 - DNA, 477 bp, Homo sapiens
ccgggcaggtacgcggggagttgtgagtgtggaaggtagactctttccagacctttgataaaggggctgctcaaaaaagccacgaccttgggcctctgctaaaaccatggctttaagtaaggagggagcagatatataaaaaaccttatccctctttctaatctcttatgtcctgtgagtgtcacccattgagtaaacccaagtggaagtcagcaggaaagtagctgggatgatgcagtctttacagataccagtaaagatgtcatctggccaatttgtgtgaaaaaagagaataattttttatccaaaccgccctgtctctggaaataagaaaagctctgaggggtctccaaaggttaccataggaagggctgaattttattggggattgataaaaattcccaagcttatgaagaaaaaaaaaaatcataaatcttttccatgggagaaaaaaagaaaaagcttgtaccaaaaaag

SEQ ID NO: 9563 - DNA, 506 bp, Homo sapiens
ggcaaatggctactcgactaccgggcgaattttagctccaccgccgtggcggccgaggtacgcgtggggagaacgtttgaaagtcctgaatttgctgttgtcctacaatcctttgtggcttcgaattggtctagagacaacttatggagaactcatatctttggaagataacagtgatgtcacagggttggctatgtttattctgaatcgcctactttggaatcctgatatagcagctgagtatagacaccccactgttcctcacctgtatagagatggtcatgaagaagctttgtccaagtttacattgaaaaagttattgttgttggtctgttttcttgattatgctaaaatttccagactcattgatcatgatccttgtctcttctgtaaagatgccgaattcaaggctagtaaagaaatccttttggctttttcacgagatttcctaagtggtgaaggtgacctttcccgtcaccttggcttattgggattacctgttaacc

SEQ ID NO: 9564 - DNA, 469 bp, Homo sapiens
aggtacatggccagctcctcatggtgattgttgccgtgaggaaatgtgaccacttttgctagatctagttttttcaaaagatgcccgcattttgaaatgtaatgtaaattatcctaatatttaactctagacaatttaagtaaaaaccaacaaccaaccaaatgaacctcaacacaggacgggtatggcccgtgggccaccagtctgagacagctaatctagaattgcagtcagccggagtgacttgtattttcacggttctgagtgtaacacccacagttccactttagagttgaagaaactgacgtagggggagttaataattgagctagtcaatggtaaacataaggtttcaattgccggtgtgtctgaattgtgaagccaagttttttttccatctcactgcctttaggcaaaggagggagataataatggagagataaaaggaggaatggaggaaaagagttta

SEQ ID NO: 9565 - DNA, 446 bp, Homo sapiens
aggtacttttggcagacatctttaatccatcacatcatgccttcccactgatcacagatgtagcttcagggcattcgagttaccacttaagatggatatgagtgaccctcccttatctcactcttctcctttcacagaagcaggatctgaggcccagagagggaagctataataaactcccctaagtcaggtcccttctaagaggcagaggtaggtttagaactcaggcctcagaaacttccagaagccaagccatttgggctgtagttggtggacagtctatcagcgctctgcagatgtttcttctcagttagggaacttggaaaatgcagaaagaaagattctgtctctaagactctgtgtatgatcctactcggtaatctgcctgcttggagaaaaaatatttatcttctgggacggctttaccacaaggcctgaatgctatg

SEQ ID NO: 9566 - DNA, 491 bp, Homo sapiens
ggggacgtcgactcaggcaattgtgactcaccgggggcggcgaggactaatgaaggtctccaatacctaattttccaatagggcttagatttatgaagttgtatattttttcctccttataaaaagctctttttataaagaatatccatgtaatactaaaacggggaaatctcctaaataatatattttttaatattacttttttaaaaagctagggtgagcacctcacaatcaaaatttaatgtatttgtcatattgaaatgcagggttttttgaaggaaacatggtaggtaaacattttagttcccaactcctgatcgttaaaatgcaaaattgggcctggtgtggtggctcacgcctgtaatcccagcactttgggagaccaaggcgggtggatcacgaggtcaggagttcaagaccagcctggcctagatggtgaaatccccgtctctactaaaaatacaaaattagcccggcatggtggcagaccc

SEQ ID NO: 9567 - DNA, 435 bp, Homo sapiens
ccgggcaggtactgagcaatttttagagtcctagttctcatggaaattattgttctgtaaagaaaataaatataccaactattacaaaaaataagttataacattacagaagcaatagaaactttaaggggcaattaaatttgtcaaataggtcaggaaacatatggcatatagcatcacagatttgaatttagccttataccctaaaatacacatgtatatttactatgctataaactacacaagcaagatataagtgtgtgtgttgtggggggaggtgagggggatatattttggaattatgtcctgctgcctaaacttatctcttataaggacattgttatctgtttataacttttcaaaataaaaatttttttttattttaatatttaatggttttagttgattcattatttattctatatgcgttcttac

SEQ ID NO: 9568 - DNA, 341 bp, Homo sapiens
aggtactcatataagagtatactaataatgatcgctagggcaatagtggtagaaaaggaaagaaagaatagatttcagagatatttcattggcattaaaaattacataactggatgttttgagctggaaaagtgtttagagatcatctagcccattacgaaaaacaaaacattaatgtagtctttccagaaagcttttacctcaaaacttaagttgcatttcaacctcaacctttttcctctagctgagtctagcatatcccccactgctcctggccccaccaggctaatactactgccgtatcagggattttattttattacctcttacttaaatactca

SEQ ID NO: 9569 - DNA, 347 bp, Homo sapiens
acgtacccaatacttcataaggccctgagagtcaaataatacaattatgaaggccataagaagccagacaggttaaacacagtcttccttgtgatgctggtgaacagccatatacttactgatggatctcacctcccaactcagactcttatgggcagaggcatatttagtgctttcataggctgagatctactaaggatcacaatttttttcctataagtgttcatcatcatagattctgtgttacactgcccaaggattcattgctcctagctcttggaaatttgtttgacatcactcagctagcaacccctttgggaattattttggcagaagagagtcacctt

SEQ ID NO: 9570 - DNA, 362 bp, Homo sapiens
tctaacagtagaaggttgcccaggcagagctgtggtagcagttgtgaagaacgaaggagtaggagcttgttgagtgttgatttacaagtaagagaccattatttagcacaaaatataaattgtatgattagcttaagagatttgcctgggaaaactgtttattgagatggttaagtcataaaggaggagtttcatttttatttgatttgatttttgtagagacagggtcttgctgtgttgcccagactggatcaaattcctgggctcaagcagtcttcctgcctcagcctctaaagccaccaaggccagctttttaaaactttattttatatataaaaaaagagtttaaaggattacaaagg

SEQ ID NO: 9571 - DNA, 365 bp, Homo sapiens
aggtacctgaacaaatcccatcaaggacagattctcagtcttgaagaggcagcacagtaaaggggaaagatcatgagttttggggccaggttcccttggatattgtggggtccccacacttctggatgatgttggataactctttgagacttaggcttcacatctgtaaaatggaaatacttatttttcagagttgtcataaacactaaatgatttgacttatatcaacctaattcctactggctcattgaactcagctcagctgtcccctctgttcggatgccttccccagtggggcttagttaggtatccctgctggataccctgccaagctcttacacattccctctgccataacactcatt

SEQ ID NO: 9572 - DNA, 461 bp, Homo sapiens
aggtactttccaatttaggttttacctgattgacatgtgttcctaagaatgatattcagccaagacttttgggaaaatccattatttgattccctgcacagcaaaagcccacctgatacaaacataagatgctttatggaatagataaatccaggttgggggagaaaggagaaaatggctttaaaatatcactttgccaactcaagatgagagttttaagatgagggcatcccttgtaactgtaagcacatagggaaggctcaataaatgcttaccaggtgaaattcttctcatgtaagctacgaaagcatctcttaaatatttttacaactgatttcctgttcaagctcatgcttgccagtgaagatacacttttctatctcatgctaacaacttaattttttataattctgaccactttcaaatgagcctattttgaaggaagcctttcagtgggtgtc

SEQ ID NO: 9573 - DNA, 450 bp, Homo sapiens
  misc_feature 19: n = A,T,C or G
ggccgatgcatcgagctanatacgcagtacagggcgaattttagctccaccgccgtggcggccgaggtactgatttgtctaaatttttggatcgctgtcctacatgtcacctagctgctgagagctttgtgatcctaacaggtgatgactcagaccgacactgcattggtaggaattccacaaataggtgcctcaatgtgcctagattgaaatatcagcctttcccagactgacccgatgggttgacttcaggtgtggcgtaaacacctacattttaatgtaaacatttcagtgtaatcaatgagaactatcattctgctttaatcaccatgagttctgaaataacaaaggatttgtctgacattcattctaagaaattcattcttacctgactaagaaacttttttaacctggcacaataataagaaatgacctgtaagtacctgcccg

SEQ ID NO: 9574 - DNA, 377 bp, Homo sapiens
  misc_feature 369, 370: n = A,T,C or G
aggtacatgtctgtggtcccagctactcgggaggctgaggcaggagaattgcttgaacccgggaggcggaggttgcagtgagctgagattgctccactgccttccaacctggacgatggaacgagactgcatctccaaaaaaaaaaaaaaaaaaaaaatcaaaccacatgaaatattttggactcttatactaattccaacactttgaagatctggggagaacaaactagattggtgctttccttggcttagtatgttctgtttttatagggagagcaaattattgttcaccagcactattaaaatagctacaacaggatgggcatggtggctcacacctgtaatccaacactttgggaagctaggggnnagcagcg

SEQ ID NO: 9575 - DNA, 708 bp, Homo sapiens
  misc_feature 619: n = A,T,C or G
ccgggcaggtacaaaaagactaagtcaaaaaatttcagctgtgcacagtggctcatgcttgtaatcccagcactttgggtggccaagggaggaagattgcctgaggccagcagttcgagaccagtataggcaacatagcaagagcccatctctaaaaaaacaaaaccaaaccaaattagccaggtgtggcggctggcacctgtgttccaactacttgggagactcatgtgacaggaagatcacttgagcccaggagttagaagctgcagtgagccgtgatcttgccactgcactccagtctgggcaacacggcaagatactgtgtcaaaaaaattttttttgataaaaaataaaagagttacatgacattcagagaccatccaaaaaacctgtgggttcccggctgggctcagtggctcatgcctgtggtcccagcactttgggaggccaaagtgggtggatcacttgagggccagagtttgagaccagcctggacaacatggtgaaaccccgtctctactagaaatacagaaaattggccaggcatggtggtggatgcctgtaatcgcagctactcaggagagggcgctggaaaatcgcttgaactcatggtgcgcangttgcaaggaacccaaaatgcaccattgtgcttcagcctgggcaacaagagcaaaacttcattccaaaaaaaaaaaagtactttgggcg

SEQ ID NO: 9576 - DNA, 481 bp, Homo sapiens
  misc_feature 481: n = A,T,C or G
ccgggcaggtactctgcatagatggcagattacaggatggataggagaaagtgtttaacattccaccccacatcatcgcgcaatctgaggcagcaccacaaaatctgatgccagtagccctggagtaatatcaggacaccaggaaatttgagttgattgagacactatggctccagagttctgctaacaaccacctgaaacaaacttagtaggagaagaccagccttccaaaaaattattattttaatggaatataaagaatgaactaggaatagaatagtaagtatgtgtgaaggccacatactatgagtagatattaataaaatatgtgtgcatttatatggtataaagtctagaaatacaaccgattttgtagctaaagatatatacatgtaggtaaatttaagatttaaagatttttttgcgtgtatgtatacatataagcttagatgtatataatgtctaaaacaggtatgtatan

SEQ ID NO: 9577 - DNA, 436 bp, Homo sapiens
ccgggcaggtacgcgggatatggaaacttcctacatcactttgctgtgtgtgtttacacaggtggattttgctttacttgcactgacagcacacaggagggcagcacacaccccaacccacatcaactgccattaaagaaaagaaatttcagcccataatttcatgtccagcaaaaataggcatcataagtgaaggagaaataagatccttttcagacaagcaaatgctgagggaattcaatatcaccagatctaccttacaagagctcctgaaggaagcactaaatatggaaagaaaaaaccttcaccagccacttcaaaaatgccagtgaagaacgcagtgaattgcgcactccaatgatgctaaaaaccaaccacatacgtttaagtctgcaaaataaccagctgacagcatgaagacaggataaaatccaca

SEQ ID NO: 9578 - DNA, 365 bp, Homo sapiens
ccgggcaggtaccattcttatctcagaatgctgtaaaccatcagtagaagcagtttagatttggactgcatggtaaaatgaaaagtaataaccctccaaccacaacctagtcagggtattaataattatatgtagcaagaaaacaaagaagaaaataatattgaaaaaatggagattccccaaccagtttcatatttgaaggatctgagttgtatttttattaaggaaattttttttctgaatactgtcttccaaaatgttaacattaaaatctgaatcagaggactctgaatggaaaagaagtttgatcactgacacctagggctctgaagcgtgtgtggccacatggaaaagtcgaaggatgc

SEQ ID NO: 9579 - DNA, 435 bp, Homo sapiens
ccgggcaggtaccaagtgctttacatgaattattggatttcattcatgaagttgattccttgctgattatattaagcactgtttcttttggtttgtttacttatctagtatctgtcttacttacttacaggagggcaaggagcatgtctgttttattctctgctatataccagtgccttatacctcaatcaatgtttgctgaattaataaattaatgaatctgtgaaagaaaggatgagccctctagaaatgatctttgactctcttctatcaagtgctcttgattctttcacaagcagcatttctgggatgcattcatttctttatcattcctacagccataggcctgctcctgactgtcacgggcttaagtctggactgtggcagccacatcgtaattcttatgtgggtctagcttcttctcactcccagccg

SEQ ID NO: 9580 - DNA, 910 bp, Homo sapiens
  misc_feature 417, 657, 669: n = A,T,C or G
aggtacctggaacatagtggtatttggcaaatatttgttgaatgaatgaaatgaatttactaagctctatttgccctatattcttctgtgtgatttatattttatagcccctttgtttcctaatagcaccctaattaccgtcattcctcactgaggaaactgaggtttggtgaggtcaagtgacttcttcaagacacttttttttttagacggaatttcactcttcttgcccaggctagagtgcgatggcgcgatctcggctcactgcaacctccatctcccaggttcaagcgattctcccgcctcagcctcccaagtagctgggactacaggcatgcgccatcacgcctggctaattttgtatttttagtagagacggggtttctccatgttggtcaggctggtctttgactcccnaacttcaggtgaatcttcttgccttgccctcccacaatgcttgggattaacaggcgtgagcccactgtggcccggccagacacttcttaaataatacttttatgccaaggccatttatatttatgctataaaaagttgttccaaattcaggctaatctttccttttctgaacctagaacatgcagaagattctactggcaaaccagtgatttaagaaacttccgaaaccaaaaagaccanattgtggggtanggaaggtaacaaaattggaaaaagacagaccctagtcaatgggtttgggaaagccttcattggtggtgaaggccctttgaaaccttttttaaaattgacccttaggccttcaggccttttgccttttaaactgttttgacccctgacgccccttacatggggttctttccttggaaactgggaatggataatggatggtttacactttggcctgaacataaacttggttgggcataccaat

SEQ ID NO: 9581 - DNA, 350 bp, Homo sapiens
ccgggcaggtactagctgaggtcattaattccccttaccttcacgtttggccaaaaatgaagagaaaaatattttctgtttttttttttaaataccacagtgttcaggttcttgatatgagtaaatcacttttgacggagaaaaaaagaatcgttaatgttgactgtttccactagtcaaattacttgtttatcagactttagattataggaatctaaagaaaagagtaacatttcaaaataattttgataactgttcaagccttagtgagctcttctcaaacaagaaaagccacatccacttgaacacattgtaggaaaaattaggaagagttttttttatttattgtc

SEQ ID NO: 9582 - DNA, 326 bp, Homo sapiens
  misc_feature 326: n = A,T,C or G
ccgggcaggtactgcaatgaattcagaaaagaatcaggcctgttactctccgaaggcctttctctttctttatcctctgaagtaaagctgaggactgctttttgggtgaactaacacttaggagttgagagtttcagaaaaagggcttgcaatgtcatgtcctattgccactgaagaagaaaaaggcacaccaacttcacactcagctactccaagttcagtttcaattaaacataaagagacagctgggccgggcacgttggctcacacctgtaatcccagcactttgggaggccgaggtgggcggatcacgaggtcaggagttn

SEQ ID NO: 9583 - DNA, 524 bp, Homo sapiens
  misc_feature 178: n = A,T,C or G
ccgggcaggtacctacttgaaggacttcataagcaaattacgatttaatttacaagaacactatgtcacacgtatacacacaggtttttatatttgttgtcttttccgtgattatctcttacagtgttgtatatttaatatattcattttcattttaattttatgtacggttcctcanttccttcatatgtgtattacatttccctggaactatcacgtattttatatacttagcaatggaaagctcctggtttcagttgtctgtgcagcaggcagggggaggagaagaaaatgggtcacactcctgaccctgcctgcatagccacaggttcccaaaagcagaggtccctgctgtgcaccttccctgggacaactttcttattgatgggtcttgtgtttaattaatgagagtttgttttaagggtatggggccaggtgcagcttccgaatccagtgcaagagtggaaataagcttccaaaacagtatcacctgagagagaactgagtccatccctgtagtacct

SEQ ID NO: 9584 - DNA, 359 bp, Homo sapiens
  misc_feature 359: n = A,T,C or G
aggtactggatatttttgcatataaacttgcagtaatagttcaaaaattaatagtttttgacattggcttttctgagaagagaaattgaaagtgtcacaaaataaaaaaagatgaaatgaagcatataattgtcaattttttcaattttctagccaacagagaatcgaaggattctgttcaaatattagtaaaaattgaaaataaacttgtgcttatattttgtttgcaacacactagttaatttaacctgtgactagttatctctaccgaaggtggatgtgtagtttctggttttaaaattcaagcaaactggaaaataatccatctaattatgctttctttcccaagaagttttttn

SEQ ID NO: 9585 - DNA, 360 bp, Homo sapiens
aggtactctagtttattattattttttttttcttttaaggcgtagcattactagaagtatagctttgggaaccttgtagcatcttaaagacttttaaagggttgacagctattggcaaattgactaatacagagaactaaactttggttcatgtattcaatgtctaaatgaaaaatgggaagataaaagagctaagaatgaaatgtgatttcatgtgcttctcctttttagctcttataatagattgaacagatttgatatttgtggtaaatacactcaggcagagtgacagaggcttggttgtcatttagcctttagggccttagtggagttaatgagaactgcaaatggtcatcaagt

SEQ ID NO: 9586 - DNA, 469 bp, Homo sapiens
  misc_feature 325: n = A,T,C or G
aggtacttcaatcctaagatgccactgaatggtctcttacagtcctttatggactattaagaaaaacagattgctagttcaattgtcacatgctatcagttgcaagtggtaaaactatacatctcagaatcagtaaagtgtggtatctggaataacagttacaggtaaattttttttaatgatttttatgatgaattacatacatagaattaaaagttcaaaaacctaccttaaagggtaagatacgttacttttctatgctagtaggaattcaaatccttgaatgataaagccatttagagtcttattccaaggtcctgctgancagagcctgatgtcaacgatttccatgacataatcttgtaactttgtaaaaggcttttcttttcccgtcttctctatcagggctggtgcggatgggaagggccccagatttttggaaccaaggatgcatacataacttattggt

SEQ ID NO: 9587 - DNA, 458 bp, Homo sapiens
aggtacttgagttttttcccttacaacttatatagtctgtgagggattagataggtatgccttaacatgatgctaaagatgtggctagggttgcatatttcttatatgacttagttaactttgccctcttccaaggtcacagattttgtccctgaccccaatcaccatgcacatgtgcacatgcacgttcaacatgcctttggtaaaataaaagaggaccaggagaaagtgttcaaacttgccacttcctgacttctagaaaatagctgaaagcccatgccctgctgatggcatatcctcagattcaagatctaaaatgccgtcgtaacaaaacacagtttgttttgctagcttttctttttccaagtggtatctataaacatttgcgaatggcagctaaattggtttttcttaaacagtcatgagttgattgccaatcaacaaggcaagccttgtat

SEQ ID NO: 9588 - DNA, 364 bp, Homo sapiens
aggtactgaattcaggcaagggcacgaaatccttaaagccaagcctatcgccttttctgacttctgctagcgagcaggcccacgacactgtaggcacaaggcagagatcccaatattttgataaataacgtagcagatgtcctaaagcttcccagagactctgttaactcttggaataaagttttcactttaaatcctgtatatatcaggaaattcaaacataatggtatatggatttctctttcatctgaaaaacaccaatgcaatagattaaatgctaccaccaagccagatgcagccccgcctccaacctgcaaggaacccattccctcgacatagacctgtgctggcgacatggctgact

SEQ ID NO: 9589 - DNA, 387 bp, Homo sapiens
aggtactagtcagtatgctgtagtattaatcagtatgtcaagttcagtgaagtaaaggagaattgaattcttgaagttcacatttaggcaaaaatttggcgttttaggaggtgagtataagacatgatctttatagaaaacgctgatgataaaaacagcgctctctgttaggtgcctttatgcttgactccattgtcatcttttcttaagaaactaagctcaggactgggtgcaatggctcatgtctgtaatcccagcactttgggaggctgaggctataggatcagttgagctcaggagttcaagatcagcctgggcaacatagctagacctcgtctctactaaaaaacaaacaaacaaaaaaacaaaaaaaaacgtacctgcccg

SEQ ID NO: 9590 - DNA, 474 bp, Homo sapiens
  misc_feature 342, 348: n = A,T,C or G
ccgggcaggtacttttttttttttttttttttttttggtatagatggggtcttgctatgctgtccaggctggtctcgaattcctggcaagtgatccgcttgcctaggtccctcaaagtgctgggattacaggtgtgagctatcgctcccacactgacgatttttggtgggagtgaggggcagggatgcccttcatcagaagagactgagaagagggagaagagggacagctgtggacaaggccttataagaaggccttggatttgggaaccagagggtccctgtgctgggtcaggccttcaagtttacatcccagagatgtggctgtaaaggaaaggggggnggtggnagtaaaaaaaaatttttacaggaaaacacatgccagggaaatactttttttctctttggaggaagctttcacatgcctgtaagtggaactcaagaaaggagcggaaatccttaggggtaccctcgc

SEQ ID NO: 9591 - DNA, 323 bp, Homo sapiens
ccgggcaggtacttcaccttagaagtggagcttaacgcatgatacagtgttacatgaaaaatgtaacttatgaaagattcttcggtgtttgttgctcgacgtgatttggaaaaaaatcagcttatttgatcattctttattcaactcagtatcctggcaaaataaactattccattttctccgtatattaatataacctggcatgccctacttcagtgcccataatgattctctttcctccataagagagatgtgttcctttcatcttaacctttttaaatgttgtttgttccatccacacctgaattaattcccgattttaa

SEQ ID NO: 9592 - DNA, 363 bp, Homo sapiens
ccgggcaggtacattgctacacggccgggggccattgagactgccatggaagacttgaaaggtcacgtagctgagacttctggagagaccattcaaggcttctggctcttgacaaagataggccactggaacaatgagaaggagagaattctactggtcacagacaagactctcttgatctgcaaatacgacttcatcatgctgagttgtgtgcagctgcagcggattcctctgagcgctgtctatcgcatctgcctgggcaagttcaccttccctgggatgtccctggacaagagacaaggagaaggccttaggatctactgggggagtccggaggagcagtctcttctgtcccgctggaac

SEQ ID NO: 9593 - DNA, 806 bp, Homo sapiens
aggtacatagtagccatttatattatttttctagtttcccatctctataccagactacatttcctagaaaatcctggacctctttaccactcagcaatgattctccaaacatcgtatataatataggacacagtcccaagctatgagaatctgcttacacctttctgggcgttttaacataattcagagaggctccgttaagtatcttctttcaagtattcatgttctacgaactgcagtaagacaatctacccaggaacccacaatataagcctccctaagtttttctccctctgttaattattaaaatagatttttttactattattatcgtagagacggagtctcactatcttgccgcgtggtctcaaactcctgagctcaagtaattctcctaccttggcctaccaaagtgctgggattataggtatgaccctgcctctgacattttggaaactttgctcatttcctagacccaataagtaaaaaaaacccattgccatttttgaagaacgctgttgttaatgtaccaaaaccttttctggcctggggtggccccaaaactggaaggggggattttctggccttttgccagtgggcttcaattctggccaattgggtttggtacctggcccgggtgggtccggtttttgaaatatggggatacccccgggctggagggatttcgatttcaaggctttatcaatcccgttggcccttaaggggggtgcccgctaacccacattttggtccctttagggagggtaaatcgccgcttggcgaaacaatggtatacttgtttcttg

SEQ ID NO: 9594 - DNA, 476 bp, Homo sapiens
ccgggcaggtaccattcttatctcagaatgctgtaaaccatcagtagaagcagtttagatttggactgcatggtaaaatgaaaagtaataaccctccaaccacaacctagtcagggtattaataattatatgtagcaagaaaacaaagaagaaaataatattgaaaaaatggagattccccaaccagtttcatatttgaaggatctgagttgtatttttattaaggaaattttttttctgaatactgtcttccaaaatgttaacattaaaatctgaatcagaggactctgaatggaaaagaagtttgatcactgacacctagggctttgaacgggtgtggcccattgggaaaagtcgaaggatgccctgtcaaatttcctttggcttcacttcataaacattgggtttgagcacaggaggaacccagccgatagattttggccaagaagacgggcagcggaaagtcacgccgtttg

SEQ ID NO: 9595 - DNA, 469 bp, Homo sapiens
cggcaatcgaagctccaccgcggcggcggccgcccgggcaggacaattttctaaagcagagaaaatccttcccaagaaaataaacactcccaaacaactgtcccattctgttacctatttggattacataattattatgaagtcaagactttcttactgacacgccaaaaaagacctctcatctcataagctgaactgcctttttctccactatccaaagttccaaaaaatctccaagtccctaaaaagcaatcaccactgctcactgtaatggtcatgaaaaactgcactgcctcatctgtgcccagaacagaaactgaggtcaaaatattttcagagtttggggatatataagttattgtataccatattcttgaacaacaacaatgataaatatcctcacaaatgccctaaaatgccctacattgggaagaaaacactggattttcttccacgctttggtgaagaa

SEQ ID NO: 9596 - DNA, 358 bp, Homo sapiens
ccgggcaggtaccgtatttttaaattaaggagttttagttataatgaaattgatttgtagtctgttttgccgtaaacttgtttttctttaaattgttcttacagtgatatcttactatttttaactgtctggggtttctgatatggggatttcagcccctggttaatcagtcttgtccctacaagtccctgatgcagtatgtttatttgtgatgtttaaagaacatttcttggctgggcgctgcggcttgcgcctgtaatctcagcactttgggaggctgaggtgggtggatcacctgaggttgggagttcgagaccagcctgacaaaacatagtgaaaccccgtctttactaaaaat

SEQ ID NO: 9597 - DNA, 448 bp, Homo sapiens
  misc_feature 35: n = A,T,C or G
aggtacgcgggatattagggctggttaagaaaaanacaaaccaggtgaagataatctttgactttttccacctggaatttaacactttttcttttctcggaacatacagcacctagaatccttaaacactgcttaggctgccccgagacccacatgtgacctccattagccctgagctccactttatgatgctatcttcttctttgcccatcaaaatggccctctggtgccacttcctatctggcctcctgacctcctttcagtgagttataataggtgataaaaggtattaaccagccaaaggagttttcctctggaaggtagcattatctcaaacctgtttctccaaacttatgtgccacagaatgatggtttgggaaatggaaatagatgggcaggaaaatgatttctgtggtcaaatgtttgcaaaatgctgtgtacctgcccg

SEQ ID NO: 9598 - DNA, 780 bp, Homo sapiens
  misc_feature 550: n = A,T,C or G
ccgaggactttaaaattgctgcactgagagtggaagaaagacagaagtaacagggctgtggataggggaaagggaatgtattgggaagagagacgcaccatggagtcacgtccccacaaatacacagcacatttcagaaagaaggagcaggcactggccaaccaaaacgagtttgaggaaaaatctataaaaggttctgtgccacacaggaaagactgcctgacaaattagctaatgaggacaaggcatctgtccttggaggtctcctccagatgcaaattggcccaaatttgaggccaactgacctctatggaaaaagcaaaaccaaagtcagattcctgtcatccggagaacaactgtcaccttgatcacactccaaaatcaagataaaagcttggctttccaagggtcacaatgggcttacaataaatgagcccatgtaggaagaaataaatatgtgaagcacctctttcacttgacatttggggcaaaggagacgggcagccactacaggatgtctctcagccccgataggcagatttctcccggntggcaccgcacagtgttgcaacttgacccatttcgcttgagtgggcccacggagggacagcatggactgagaagtctttttcagctggggaactgatggcactcacagcagcaacaaaatctctaaaagtcttttaaaagttcggggtgacaatgcaaaaaactaccgcccatgctactgcataagctaactttgactatcggtcagccaaaagagttgtggaaagactt

SEQ ID NO: 9599 - DNA, 370 bp, Homo sapiens
aggtatcgcgggggtggctaaggcggctttagtttcagcatgaagcgcaccccgactgccgaggaacgagagcgcgaagctaagaaactgaggcttcttgaagagcttgaaaacacttggctcccttatctgacccccaaagatgatgaattctatcagcagtggcagctgaaatatcctaaactaattctccgagaagccagcagtgtatctgaggagctccataaagaggttcaagaagcctttctcacactgcacaagcatggctgcttatttcgggacctggttaggatccaaggcaaagatctgctcactccggtatctcgcatcctcattggtaatccaggctgcacctacaagtacctgcccg

SEQ ID NO: 9600 - DNA, 340 bp, Homo sapiens
aggtacaatggtttcctggaacattctgagtaaagaaatgggaaaccaatacagcttacctagcttgttaccttctatgaacgctggcattaaaagtaaaaggcagccttgggaggaagaaatgcaaacacagagggagaacatagcttccccttgtctctctctgccacaaaagcctggccaaagtgactctactaggttgaagcagcctgcataataaaacgcttaaccttggctaagttaacctcctcagccattaaaaaaagggagggtgggggaagggctagcaaaatcaagcttacgggaaataaacctaatcaaagccgagtagtaacaaagg

SEQ ID NO: 9601 - DNA, 474 bp, Homo sapiens
ggcaggtacgtgatctttcggcaagttgattgagggaggtgggggaactgttttcctctggcaatggggagaagcttctttggctggcccagagggttcaagattctccagcttaactacacgaatacccccacaccaggtttcgtagtcccacccttactcgttagggctctgattgtgacatacgagacaggtcgaggctgcacatttgacctactttgaaaatttaccacatggaaaagtcatgatctgggtctgattttagtgcagttggccctgaagctgcaggagacaagagtctctttttctatggatacagaatctttgcacttttagaatatgcctgaagccagcaattagctgctttggtttcattttctttttgcaagacctcaaatgctttcacaaatagccatttcacacattccactctataatgggacattatcttctgccaatcaatgatgcacccag

SEQ ID NO: 9602 - DNA, 365 bp, Homo sapiens; identical to SEQ ID NO: 433

SEQ ID NO: 9603 - DNA, 477 bp, Homo sapiens
aggtactgggattataggcgtgagccaccgcttttgtcctctaacgagatatttctaaaggttaggccttcagtcaagaattttaaagctggatcttagaggttatctaaactaacctccccatttcatagataaggaaagtgagtcccagaaaagcactggtttggacaagttcagaaagctaaacagtgactgtggatgtatgattctgtctcttaactcctaatccaaatgtcttctcactagaataaggctgtgccttctacatttgaaggctcaaaccccatggattgaatgaaggaaaggttgggggagaattggaattgcataaaaaatatctggggttttttcgacacaccttcattcattcctttttggagagaaaagaatgagcccccccccccattggatcagccgcccttctatccccagaaattcaattatgggcaagctgtttatagtcccctggcctctaag

SEQ ID NO: 9604 - DNA, 496 bp, Homo sapiens
ccgggcaggtacaacctgaatgcttgtaattagatttcataggagggaaaaattttctttatcaacctctttgaatttatttgatttgtaacgctccacatttccacctagacttttttttgttttttattttttgttttgaaacagaatttcgctctgttgcccatgctggacgcaggggtgctatctcagctcactgtaacctccacttcccgggttcaagtgattctcctgccttagtggattacaggtgcacaccaccacgcctggataatttttgcatttttagtagagatggagtttcaccatactggccaggctggtttaaaactcctgaccttatgtgatccacccaccttggccttccaaagttgctgggattacaggcttgagccaccggccctggctttcatttaaactttgaaaagattgccttttaattacagtagcattcttttattaaaaaaatggtgttattaaattgggtttaaaaatt

SEQ ID NO: 9605 - DNA, 473 bp, Homo sapiens
aggtaccacagttacttctaaaatgtgttgctaaatgtagaaatctctatccccattgacttctcagttggaaattagttcatgacctagagactgagagcaccccggctgtgctttcagagcaggagtccttggatgtagctgtggaatgagcagcgttggaggatttgaaaaaatcctggacctgaaacgtaagctggcctgtgtttccctgatgtgccctatgccttttattgtgctgatttctactatcttaataaatagtaacattaaagttctttctgtgttcaaaaccttttccttgttttcctatcaaactgtttttgaaagcctatttcatctattttgagcaacactgataactgatgttcatcgaaggcagaaaggttggaggaactttggccagtgtggggcagacagaaacccatgggtattccccctaggcatcaagggctttgtcagctgcattctgc

SEQ ID NO: 9606 - DNA, 360 bp, Homo sapiens
aggtacagctgctcagcagcaaagccgcaggttacttagacacctcttctcctctgaaagccagagccagttttccttgtccagcctgtcttagagagttgtaatggtcaaacgtgtgagaaggagctctgcaaatgtaacattttgcataagtataagatggtattatttagtattaatattgttagtaaattttagtaatattcagtatctaagatattcaacttagatatccaatggttattcattatctaagtccaatatcaggggtatggctctagatatcaatagatattggacttagataatgaaaagctattgttcagatgtgtgtttaaaattagtgtggacacatgcagc

SEQ ID NO: 9607 - DNA, 838 bp, Homo sapiens
  misc_feature 9, 21, 809: n = A,T,C or G
cgagtccanactgaatgacanggccaattggagttccactgcggtggcggccgcccggcaggtacataatatcatatatgagttaaatcttaatcacatgaattctatattacatcactgaggtagaaggaacaatatttaatagacagctgcaataaatatttttgtgaagaattcttttgtcataaatcaaaatcataaccttagttctgaaaaagaaaaattatatcaaataatggtaaatacaatattggatcaaaatttttttgtctttttacgttacaaaatttatgttacttatagcaagtatatttattctctaatatgagattttttaaatgtagagttcacttgaagtaagacaaactaatattcttaattttattatgatgtagattcttgatacatgcataaacatgagaaatgtcatacatttattaaaccacagtgtgcttggaacacactagacattgggatgaagacatttaaaggaagattcctgtcttcactagacttacaatctagttgaggaaaccagactgctgtatacaaactgacattaatcataattttaacttggttcaaaattatttatatttataggtactagcgtgaaatccaatcccctaagtctatcaattacgtggattaaaatctcaatatatcttttgatacattaaaataagaattgacttttctgggggcatcagatctttgggttaagcactaatgctggctttaaaagaattcccttggctttcagtagttccttgaaaattttctaagcattaatggaacaggttgtctanacagaagtagcatgggctggagcaacaat

SEQ ID NO: 9608 - DNA, 466 bp, Homo sapiens
aggtacgcgggggggctgaggtgggtggatcatctgaggccaggagttcgagaccggcctggccaacgtggcggaactgcatctctactaaaaatacaaaaattatctgggtgtggtggtgcacacctgtgatcccagctactcgggtggctgaggcaagagaatcgcttgaacccaggaggcagaggtttcagtgagccgagatcgtgccactgcactccagcctgggcgacagagcgagactcccatctcaaaacaaaacaaaggtgggtgtcttgagtgccttttgagtataggccttcagactttctgaggattgggaaagcatttttttttaaccttaaaatatttattgaataaagaatggcaagatcagaaaaataagctctggttaggatttgatgtggggcttcattctcagctctggtgctaccttctttatgaacttcggggggctcttttcctg

SEQ ID NO: 9609 - DNA, 883 bp, Homo sapiens
  misc_feature 552, 645: n = A,T,C or G
aggtaccaggtaatgaggaaggtgatcccggcccccattccctgatggaacctagacttcactaagggattcagatggaggaggagatgttcaagaagccaggaaggatcaacaacagggtgccctcaattcactggggccacgttagtggccgattactaaatgtcagaccaactgcagtagcgctgtcatggccactcatctctccgggatttcttcccttccaagccagctaggttcaaccttctcatttacttttaatacaccacctcttatatgatctttcttctctacttagaaccctcccataagccgaacccaatctgccttttcaccatcttcccatcttcctactgcctccatagttattcttcgggatctagctaagtaaactctaagttattcttccatgtttttctagcacctaacatatcagtttccccctccacccccattttcttccacatacggaggctcaataaataatagttaaatgaggctgggtgtggtggcacatgtctgtaatcctggcactttgggaggctgaggcangaagatcgcttgagcccaggagttcaagaccagcctaggcaatatagtgagacccatatctctacagggaaacaaaaagtaaaacaaccacanaaaaaaacaggtgacctgccgtccaacaactcagaacctgatggtgggagattcgtttgagcccggggaggtaaagcttcaataagccatgtaaggcatgatcggaaccttgtaacttgcccggggtagttatactctagggagggctggtttaatataaccttggatacgctttttttacttataagtaatctttatgttttgcccctcctctcctcagagactacttttatttgaa

SEQ ID NO: 9610 - DNA, 715 bp, Homo sapiens
ccggcaggtacctggaaagatgaacaggattgcagcagatagagacaggtagaatgtatagagattccaagtggaaggataaaggagaggggagagaagcaaagagtgcaacttccaagaagatttctggttctggcactgtcatgatagcttgggaggaaacaggcagagagggttttggagaaacagagctgcaaagccaagttagatgttaggtgagttgaaaaaataacttagggcaaaagcagagggagggaggtatttactctgaacagagatgacagggtggggaggacagattgttttgagtaggcaaaggccaggagcatgaagcaagctaggaattgggaggctggcctagaagcatgggccacctgggaaagggacaaaagttaaagtatgacaaaccctttgtgttcaccaaatttcttttctggagtccttaaccatttgatcttactggaatagaagttatactagaactcactgcaaagtggagtaaggcttacagagggaaaacagcagagggcctaatgcaagattaaccttctcagggacccctgcagggactgggagtgctaagaatcagggaggcttggaacagctcactttacaggttaatgagaacaggactcacctggctcaagcctggcatccaatcatcagcccactctgggtttcatcctttgcgctagctgaaagccaaatgtacctt

SEQ ID NO: 9611 - DNA, 506 bp, Homo sapiens
  misc_feature 31: n = A,T,C or G
gggagaggccatcgactctgggcgaatgtangctccaccgccgtggcggccgcccgggcagttacatttgttggtggcgtcgacattattatataaccacttagagtggacatgcagttagagaaaagtcaatgagctggaaccaagctgggaattccaacatgtagaagttaaacacaagaggaggagccagcaaaggaaacagaaacagagcttccagcaggtggggggcatttggaagaaaacgatgccatagaagccaagatgaaatagacatcaaggagaaggaagtagtcaattgttttgaatgctatgaagaaagataagaataggtaaatagtccttatatttgatgacagaggtcactagtgatcttgatgaggggtttcaatagaatggtgggattatatacctccctggattcaactgaggtaaggaaggcatacagaatagagacaggcactataaacagcgctcataattgcattctagcaattagcacactg

SEQ ID NO: 9612 - DNA, 354 bp, Homo sapiens
ccgggcaggtacctggactcctaagcctcagggatttactgaaataccattctattttataataatccttaaccaagaattttaaggatcttaaatttttctgtggttctattgttatctgatatatagatgatctgctgccatatcctaaagagcaggtgaggccgggtgtagtggctcacgcctgtaatcccagcactttgggaggcagacgaaggtggatcacctaaggtcaggagtttgagaccagcctggccaacatggtgaaaccccatctctactaaaaatacaaaaattagctgggtgtggtggtgggcacctgtaatcccagctactaggaaggatgaggcagga

SEQ ID NO: 9613 - DNA, 490 bp, Homo sapiens
  misc_feature 490: n = A,T,C or G
aggtacttagcccctgacagtcacattcatttgtctgttactctctgtctctctccactggatgcaagctctacgagaccatcctttctgttgtccctgcactagtcacaaggcctggaccagtgtctggcatataataggcgcttaataaaccacagataaatggacggataccggaaactacaacaatggaaaatgcacactgcagaggaataaaaaattgttctggaaggttagcagtaggtatcattatgagctattttgaggtagagggtcaagaggagaatgaaggaaggttagtatgaaattcagaagaaagatgactaagacagggtcgctgtgctttatatgcaagtcacttgtcaatttgaaagcaggtggtgtcaccatgtagggagaagctttacaagacagacatgacctcaagatgcagaagacatgcaaatcagcctgggacttaacttgcacagctctggacccaacattcatn

SEQ ID NO: 9614 - DNA, 332 bp, Homo sapiens
ccgggcaggtacgcggggaggaagaaaattgcattattcaagaaaataaccaagaatgtcagtcacaggagagctgctgtgtatagatgtctggttttttaaggagtgatgataatttaatcagcggtgcaaaggtgcgatctaaatactgcataaacctaatcatcttattctcaacctttctcaatactccacccacttaaagaggtgggtgtggccttcacagattcttataaaaggacatagaagagacaagctcagttttctccaaaggagaaggagcgcacttataagaagctgtgttttggtgacccctgaaacttagtaccttt

SEQ ID NO: 9615 - DNA, 472 bp, Homo sapiens
aggtactatatgctagaaacttggctgaatgatttgacattatcctatttaatgttcatgacaatccaataacgtaaccactcatatctcccttttgtgcaaataacaaactgaggcccagagaaatcaaatatgttgtcaaaatctacatcgttgaagagatgggtttcaaatccaggtcggcttggcccttgccacgacttcataatgaaattccatgggtgagtgttaccagtttctggtccatccttgcttatttcaagggtctcatcatcccatccactgtatcactttttttgttacaggctttactcttttctaccatggaaaagactaatgatatttttttctccataagcttggaaatattatcaatcaccataaaattcagcctttctctggtaactttggagaccctcagagcttttcttatttccagagacgggcggtttggatgagaattattctcttt

SEQ ID NO: 9616 - DNA, 364 bp, Homo sapiens
ccgggcaggtacttataacaactacaaacttcatctctatatgctttaaacagataaaagagaataatgcagtgataaggtagtaaatatggccagatagtttgaggtataaattcctctgtgttgcttgctttaaaagaaacaaaatacctgttacagatttcctctgtatataaaaatattacaagtcttttcttttgtggctctacctaaacaaagccaccatgtccattttgttatttcacttgttttgattttatgatagtcagtttatgatcaatggctatatgctagttcttcaccattttacgctgaagaattaaatttaatccattaactaatatttaaaaaagcaattacaaaa

SEQ ID NO: 9617 - DNA, 345 bp, Homo sapiens
ccgggcaggtacaacaatatcttattaaaaatagtagcagcatatgatgatttgaatttttaaaaaactaataaaaaagttctgtaatatacagaatacccatatcacaaggcaggcaggggaaggagtaaagaataaaatacatcaaacgatccacaagatgaaacaatatacattaatctaagttaatataaaaatagtataaaactcagccaggcacgctggctcacacctgtaatcccagcactttggaaggccgaggtgggcggatcacctgagctcaggagtttgagaccagcctgtctctactaacaatataaaaattagctgggagtcacggtgggc

SEQ ID NO: 9618 - DNA, 472 bp, Homo sapiens
  misc_feature 151, 155, 162: n = A,T,C or G
ggtactttaggctgaaaataaataaagggtgagaaaaagaacagtcttatgtcagtaaaatgaaagaaaagatggtagttggggaagacagatgggagaagggtgctggtgttataaacagtaagatgagcatgtattataaaatgctggntggngaagaanaccttgtggcaaggagggtggtagtgttggagaagaaagagaggatatagtagaaagttaaagaggaactgggagcaggtgggatccaggacatatgaaggtgaagagccttgggcagaggtgagacatctgcaggagggaaggaactgagagaagggaaggtgtgcaaatgtggcatgaggaagttgagttaagttccatctgatatcctctattttctctgtaaatcattctgaatgaagtatgagacaaagagatcaaagggcttgagaaaaaaaagaaaattttgaaaaaaaaagtaccttgcccg

SEQ ID NO: 9619 - DNA, 517 bp, Homo sapiens
aggtacttatgactcactaatccagccacatgaaagtgatcattcatctgaataaataaataaacagttttcattattttctccatgaaaaggtctgaattaattgatgcggatttcctgccagcttacttttatctttaaggatttaaggaataaactcaaattcagaagtctctgcagaacatttgcgcaacatgtgttacagtatcaacacccccaagtcatttgctgggcatttcagttttgtaaaaggttttcaggggggtttcctccccccagccttggagggatttttaaatgtataacgtggggggtggcccttttttacttaccaggggcccctccccccttttttattaaaaaaatttgaaacccccccctttttggtgggcgctcctccttggaagaccttccacatctttttcacttttctttgggatcagatgtgagataatgcaagaatttaaaattcgccctttaaaaaccaagttttttaaaagggttttttttcccacaa

SEQ ID NO: 9620 - DNA, 703 bp, Homo sapiens
  misc_feature 671, 680, 683, 684: n = A,T,C or G
ccggcaggtacctgaacaaatcccatcaaggacagattctcagtcttgaagaggcagcacggtaaaggggaaagatcatgagttttggggccaggttcccttggatattgtggggtccccacacttctggatgatgttggataactctttgagactaggcttcacatctgtaaaatggaaatacttatttttcagagttgtcataaacactaaatgatttgacttatatcaacctaattcctactggctcattgaactcagctcagctgtcccctctgttcggatgccttccccagtggggcttagttaggtatccctgctggataccctgccaagctcttacacattccctctgccataacactcattctttgttactgaattataatttcatgttcatttgtttatctctcatactaagctgtgagttccctgatgacagagaatgtcttgttggttttggaattcccagtgcccaacttaattcctggcacagctgagtaagcaaatgaatgaacgccatctagttgagtaaaaataagtctcgttaggccggatgggtggctcacgcctgtaatcccagcactttgggaggccgaggtgggcggatcaagaggtcaggaaaacgagaccattctggctaacacggtggaaccctggctttaaccaanaaagagagnacnnaaaagggtcctctgggcgg

SEQ ID NO: 9621 - DNA, 402 bp, Homo sapiens
aggtacttttttttttttttttttttgtagagacgaggtctcgctatcttgcccaggctggtcttgaactcctgggctcaagtgatcctcccaccttggccttccaaagtgctggaattacaggcaagagccagtgcacctggcctttgaattttcttaccctcaataagtttctttcatgctgctaaagtgtatcactctctgtgaattgtctcagttatttttgagtcttgtagggaacctgaggaactcctgaaatgcctcacacttaatacccaatccatttcttccttttcctctttctcttttttttcttatcaccccgcctccattttgctgcaggacatccttaaagttatggactggggcaaagacaaaacacaaaaacgaaattcctgcccg

SEQ ID NO: 9622 - DNA, 346 bp, Homo sapiens
ccgggcaggtacgcggggattctcaatcctacccatgatgcagacagattgcctcatttcagctcaataaaacatcaccaaattcccttaggcagaaaaagggtggggagtgccctttcttgaaggaatcccttaagtgcacgtctctcgttttcttttcacatcaatgcagagtccctctgtgaatttacaacacccaacacccatgagttcagtccttaagaaggaaaattgagcaagtatttaattggttggacattgcataaaagaggtccatatccaggctaactctagaaattttattctcaaacttagttggcctcttttttttctgtcagaggaccat

SEQ ID NO: 9623 - DNA, 454 bp, Homo sapiens
ccgtgcaggtacaaaattaatttgctcatttggttagagtatggttattgattagggggctaagcatttagttactgcatggggcagccaataataaaatcacagccctgtgtatttacctccacagtgtgtgctgataagtgcaaaaggtttgtgcaaattcttttgaagttatattgtaaccatggtatatgtattgaaaacttggccattttaccccattcctatgaatgaaaactatttggtgaatcagaggatagtctgaattgggatatgaaggccagtataagtgtcagttagcaaagtcagctctagtttagtttttttttttttcttttaaggcgtagcattactagaagtatagctttgggaaccttgtagcatcttaaagacttttaaagggttgacagctattggcaaattgactaatacagagaactaaacttttggttat

SEQ ID NO: 9624 - DNA, 450 bp, Homo sapiens
ccggccaggtacaggcacgtgccaccatgcctggttaatttttgtatttttttggtagagatggggtttcaccatgttggccaggctggtctcattaaactccgacctcaggtgatccacctgccttggcctcccaaagtcctgggattataggcgtgagccaccacatgcggcaaccccacagttttaacagattgtttatactttgatttggttttgcagatgatatgcatactaaggctttaaaaaattatctaaatgtttaataattttttgtttttgtgattgggaattatttacttctgggagtcatgatcctaaagaaacagtaaattggctgtttagagtgggaaaaaaaaacttcaggtaactttgttacttaaatcctgtctcttaattcataggttaagaccttaattttgcctctctcggtttatgacagtaccttcg

SEQ ID NO: 9625 - DNA, 471 bp, Homo sapiens
aggtaccatttcaaattcggtttgttataaggaaagggtggggaaacctttggaagaagagagactaatagccaggagacttaactttttcattgtgttctgtcactttacatcctaaggctgtgctctcacctcacttttctttactcagttgggcagattacctttttggttttcccctgtttggttctcagttactttgatttcatattccttattgttcattcctgctgccactctctctggttaaaccaaattcccttaagggggagatggggaaggaaagagggaaatatcccataaagcaaaatagcttttgctgtcttggagaaattttattttgatttatttatttttttgagatggaatcttactctgttgcccaggttggagtgcagtggcgaatctcagctcgctgcatcctccgcctcctgggctcaagctattcttccacctcagtctctttggtag

SEQ ID NO: 9626 - DNA, 448 bp, Homo sapiens
ccgggcaggtaccttttttttttttttttttttaagagacagggccttgctctgtcaaccaggctggaatgtagtggcacgattattgctcaccacagcctccaactcctgggctcaagtgatcctcccaccttagcctcctgtgtaagaatccaaccctatttataatactcttttgtcagacattcagatgatttctattttttaatattataagcagtgctatgtagaataatcttacagctgaacatttgcaaacaagtatgatatttccataggaattattggaagtaggttgctttgttaaagggtattccaaacatcaaggcttttaatacatactgccaaacttatccagaaaaagtttaccaaggcatgcagctgcaaaaattctatgagagcaccctgggaaacctatattttcttagttttaaggatatatgcctga

SEQ ID NO: 9627 - DNA, 457 bp, Homo sapiens
ccgggcaggtactgtcacccatggccctgataggaaacagatggcatattcaagctggataatttgaagaggattaaatgaaacaagtattcacaaataggtgggcagagtttagaaaatcaacaagagatattgtagtatcctgggctagcaacagagaggatgggaatattgccccatagacctgaagtgcaaagagaaggagtgctacctcaaaaagagagctttgtggagaaggctgcctgatagcagctgtagtcccaggtagagggtgagccaccacgcccggcggttattacatagttttaaaagtgactcctcttaaggaaattttaattaagagaaaaatatcctagaactatgattagggtcaaaacagtatctatgttctttagggattaaggaaaaagtgtttctgtcctaagaaagggtttataaggagaaagaatcttttctg

SEQ ID NO: 9628 - DNA, 460 bp, Homo sapiens
cgcccccttcgccgcacactactgactatcgggcgaattgttgctccacacgcggtggcggccggccgggcaggttcatgacctgcagaacttagccaagagtttgggtctccgggccaacctgagggcagacaagttgttaaaagccttgaaaggctacattaaacatgaggcaagaaaaggaaatgagaatcaggatgaaagtcaaacttctgcatcctcttgtgatgagactgagatacagatcagcaaccaggaagaagctgagagacagccacttggccatgtcaccaaaacaaggagaaggtgcaagactgtccgtgtggaccctgactcacagaatcatgaaaagcaggaaagccaggatctcagagctactgcaaaagttccttctccaccagacgagcaccaaaaagctgagaatgctgtttcctcaggtaacagagattcaaaggtacct

SEQ ID NO: 9629 - DNA, 492 bp, Homo sapiens
ccgggcaggtacgtccacggtcagccttgctgtatgcttgtgtgcttagaggaacccagggtaacgatggggcaaactgaaagtaaatatgcctcttatctcagctttattaaaattcttttaagaagagggggagttagagcttctacagaaaatctaattacgctatttcaaacaatagaacaattctgcccatggtttccagaccgggaactttaaatttaaaagattgggaaaaaaattggcctaggatttaaacccgggccattggggagggtaaaaacaccccccttcccctaggaaagattggggcccttttttaaaaaaacttttagacccctttaaaccaggaggagatgtttttgtatattttgacgcccccaaaaggggtgaaacaaatttggaaaaaaggcggggccacattccccccagggacggaagggtcccttttaaatttttcccaccttttttgggctcttctcccccacaatg

SEQ ID NO: 9630 - DNA, 513 bp, Homo sapiens
  misc_feature 333, 350: n = A,T,C or G
cgggcatgttactctaattaggaagacctggagctccatcttggtgacaggtcgcccgggcaggtacagacttagttttcagaatgttccatgtatatgtttcttaattcccataaaaagtttcatctttgcttttccatgttttctatttgcacttcctagaaggggaattctaaggttttatttctatcctacaggaatgtaaaaaacttgatttcatataatctactggcaagtgtagttcctgagtggggagacgggctacaaaggattctgaagtagattggcttttatttcgtggctggtgatccaaactgagtattcctcataagnagtcttaaggggatggntgttgtttaccaaccaggttgtctttgcaagttaatggaggggtgggccattcaggttgaaccagcctgggggttagcccctagcttctgggatccaggcattcaaatttggagaaaacctttatttcaccatccagaattcagaggttagaacgcaacattt

SEQ ID NO: 9631 - DNA, 424 bp, Homo sapiens
tgaggacttttttttttttttttttttttgccgactaagatcccagaagtatctgagaacttgggctgcgcagggaatgctggtgtgggagaagcaagccaactgagctgagctgcggccctgtttgtccttagctctccaaaacttgctgtctatgtcacttggaaggaatctgattcttttctgcaaggcactgacaataccttacaacagagctgggagataaaatgcagagcttgtgaaagtcatcagaaagttgaacacagatggtccccggcttaaaacggttcaacttgatgatttttcgacttgatgatggtgtgaacacgatacacattcagtagaaactgtatcgataagggctgctttattcaccagaagtgaaaaacacgatggttgtgtgagtatctgaagtacctgcccg

SEQ ID NO: 9632 - DNA, 481 bp, Homo sapiens
gcgggcaggtactgagacctttttcataacttacaggtgccttggcataacttacaggtgccttgatttgctctgttttttcttacatcagtaacttttaagtgaattctgctcagggatgtgcctggagaaagcaagtttgatgaggaagctggtggagctggtggtttgaaggctgagtgaaagtaggggagagcccatggcctgatctatgtaagtggtaagtcagggagggtagctgcggtcagcatgtcccagagtcaccttcatcctgggatgcgccctctgattctcagagtgaacattaaaaatggcagacaaaaccaggcacggtggcttacgcctgtaatcctagcactttgggaggccgaggtgggtggatcacctgaggtcaggagttcaagaccagcctggccaacatggtgaaaccctgtctctactaaaaatacaaaaattagccaggtgtggtggcatgcgcctg

SEQ ID NO: 9633 - DNA, 392 bp, Homo sapiens
aggtacaattatttaactgtgtcaggaaattaactttattacaatactattgcccaatctagcaatttaatacaatattattgcttagttgctcaatctagagacgatattcaaatttcatcagtaacacttttttccaatgcagaacgcagcccgcagtcatgcgttgcagttacagttggagcgtgtcccttcgtctcttttaatctgaactcattcctcagtcattctttgtctttcatttttaaagagtgctgatcagttgttaactagaatgtcactccatttgtgtttgcctgatatttcctccttgttaaattcaggttatagtttctgtcaaggatagcacagcagcaatgggctgattccagggctggaccaggcataagtgt

SEQ ID NO: 9634 - DNA, 399 bp, Homo sapiens
aggtacctgtatttgactgatgtggtccccatcattttctgatagagttctttttgctgggatcctggaagatgatcttggtttatacatgaagaatctggggtccagtgaaagtgacttggtaaaacccacagatctgtgccgaaagccttggtcagctgccccttggcctgatgctcttttctctgcatcagtgcattgcttcacctcttcttcaaggactctgattaactggaagtggacataaactggggttatttatgtgggatttggttttccttcctacatcttagattgggtcactgaatatacttagtttttataagagatttttattttctgattggaacttctgaaaatgtgcttaagtctttgagaagttgctttaacctattaatt

SEQ ID NO: 9635 - DNA, 635 bp, Homo sapiens
  misc_feature 575, 579: n = A,T,C or G
ccgggcaggtaccctaatgttttatataattatttactaaaccattccaggtgacttaattacaattgttgttttacatacatatatatacctatctctttatgtatctgtgaatacttactctatacagttcctagaaaacaaaatgccttaagcattgcatagttacaactcacttggcctgcttacttccttttaaaggagggaatgctttagggagggggaagatgcaagatggtttttaacccctatgtgctattcattcattggacatcttataatgtaattgtgttaaaactgcctggaaattcctaacagttcttagctttttatttgaagaaattttggagtgatgaaaatatagtttatttagggaaattcaaaagaaagggttaacatgaatccagcaaaacaaccttatccatagtgggtaaaaaaaccaaatctgctctgcaacctgaccctacttcagagttttctcctagttccttttccctactgttactttcccagtccttgctcctaccctccttgtctaatgaacgtgattgaattaccatttagaatgtgcttcntctncaaccctaaccaatatggcatgacccatgtagctagtgtcagcgatgtaccttggg

SEQ ID NO: 9636 - DNA, 344 bp, Homo sapiens
ccgggcaggtacgggacttgtctccaggagacatgtctgggaagaagagctagactggagaatcatgagcatgttcaggtgaaaacatgtgagtggataagagcaagagggtgagaacacagaccaaggggctaagggacagactgtgttcagtatttgggtatggaacttgtttttgctacttgctagttctaagaccaggctcagactctaacttctctgtaatgtgggaataatgacagcacttaccttataagattttacaaagattaaaatatcatatataacagcacttaacacaagtaagaattcagtaaatgttgactgttattactattgtctga

SEQ ID NO: 9637 - DNA, 497 bp, Homo sapiens
  misc_feature 30: n = A,T,C or G
gggtgtcccatatgagcacatatgtagacncgagctccatcgcggtgacggccgaggtaccacttcagatctgttttcactggatatgactctgaatgtttttctgtagctcgtatccatccctagtcactttgccaggatgaatgctgttgggcagcagtagcctaagttacggaaggggagcagattgaatggggttttgagacatcttctctgataccttagctttccttctgctctggtcgctatccactcagtcgtgtgctagaaatgtttaacaaccaggatctctggggtgggggtggggggggaagcccttaatttgtagcattttgctgcaaatataaattataaataaaattctaatataaattagaattttatatcaaattctttgatataaattagttactcctcctgtggccgatttcaagctaccaccttaaagttcaaaaaggatgtgcacagttggctcaaagcccagtgctggcaaacca

SEQ ID NO: 9638 - DNA, 860 bp, Homo sapiens
  misc_feature 237, 545, 563: n = A,T,C or G
ccggcaggtactatgcacttcccatgctcctagggttaggaatagtttcaaacatgattggcagacataacaacggcaaatactcggactggggcataggactccagagtaggaaaaagacaaaagatttggcagctgacacaggcaacctacccctctctccagcctctttatgaaactgtttgtctgccagtcctgccctaaggcagaagatgaattgaagatgctgtgcatgtntcctaagtccttgagcaatcatggtggtgacaattgccacaagggatatgaggccagtgccaccagagggtggtgccaagtgccacatcccttccgatccattcccctctgcatcctcggagcaccccagtttgcctttgatgtgtccgctgtgtatgttagctgaattttgatgagcaaaatttcctgagcgaaacactccaaagagataggaaaacttgccgcctcttcttttttgtcccttaatcaaactcaaataagcttaaaaaaaatccatggaagatcatggacatgtgaaatgagcattnttttcttttcttttcttnttttttttttaacaaagtctgaactgaacagaacaagactttttcctcatacatctcccaaatggttaaacttactttatgagtgtttgtttagaagttcggccaacagaaaaatgcagtccgatgtcatcttggaaatggtttttaaaaaataaggcatgttccttgcccgaaacttaggagcatggaaataaatcaaaggtaatttcctttctatataaaacagccaatgcccaaaattaagggttgggcaaagctattaacgcctttcttaagaccaccaaggagattgttttt

SEQ ID NO: 9639 - DNA, 444 bp, Homo sapiens
ccgggcaggtacctttctatatttagattctatctttgtcaagcaagatgacttgtttgacagggctctggtttttcacctctgaaaagctactcatccacagagcttgggattgaggggagaggaaagggggaggagatctggcttctctctccaactctgaacagattggatccaaataagggcccttctacatccctagccaaaatgcctgggccttggcagttgtcccaagacatagacaatggggtctgatggcagcttctcagacctggctttccctgggcaagaggcttttcctgaggctggcaatgccattttcttcagactcacaaaagggatttagggagggggaaatggggactgcaatgaggcaactcttgacagctttaccctggaaaactaggacccactttgtgggagcccagcccagcagctttgcca

SEQ ID NO: 9640 - DNA, 387 bp, Homo sapiens
ccgggcaggtaccccatatatgctggtggtttctaaacctaaattgttgtcccagcccattcctacttgcagctcggatgtgccttgctagcctggcttctctacctggcacctcacactcaggatgccaaaaaaagttctgttttctttccccgaaatcctgttctctgctgctgctccactgccacctgttttcttttcttttggttgctggttcccaccacccattcatattccagccggacacacgggattgtcctggactcctctgaattcctcatactcttaccctggcccacatttagttgggaggactccctgattctatctattctatacattcttgatatcctaaaatttttttgaacacgtagcacttctttaaac

SEQ ID NO: 9641 - DNA, 407 bp, Homo sapiens
ccgggcaggtactgggattataggcgtgagccaccgcgtctggcctctaacgagatatttctaaaggttaggccttcagtcaagaattttaaagctggatcttagaggttatctaaactaacctctccatttcatagataaggaaagtgagtcccagaaaagcactggtttggacaagttcagaaagctaaacagtgactgtggatgtatgattctgtctcttaactcctaatccaaatgtcttctcactagataaggctgtgccttctacatttgaaggctcaaaccccatggatggatggagggaaggatgggtggaggaatggatggattataacgatttgcttaatttctatattatgataactctttttataatattggttttgaatacaacattcctcctc

SEQ ID NO: 9642 - DNA, 381 bp, Homo sapiens
aggtacataaaataaaaacataaatagtaaatggcacttttcttcatgtgaggcagggtgcagaataggtttgaggaaaaaagtaagtaaaaccagtgaatggaagcacaaatagtaagtggctgtgcttctcttaatttttctgtagaattttttctcaaattcttattattgaaatgcctattatgatgtagcaaacactgaggagatactaaggcttagagtttaagaaatctaattaaatagctaaacagagcacaatgtaaactcccacaatctgattccagattctgagtccaatcatctcattatttgtctcattatggaagaataacaaaccaacaagtgaaaatgctaaaactctaggggaacaccatgaaa

SEQ ID NO: 9643 - DNA, 523 bp, Homo sapiens
aggtacttactaggaccaaagtcgaattttttaaattctgatatttttcttcataattttcttaaaataaaagggaaataaagaataaaaataaaatatgatggataagatagaagtcacttatgttttccttatcattttgaaggctttctttgcatacctagcatggttagaagatattgaattgtattggtgtatttgtaatgtttctaaaattttttatttttaatcattcattaatgaattccacatataagtttttaccaattagtatttgaaaaatatttttatggcattttataaataataaaatggaaggataaataatttgattatgtcaacaaatatggccattgtttaaatgttggatgaaaaacttgcataaaatactaacattcttttgcacacctcattcatcttgttaaataagcttttccctcaccgtaagtacttctcctggaacttttcccctatttaagccctggtatactttttcaggctcccttcaggtttaaaagtactg

SEQ ID NO: 9644 - DNA, 486 bp, Homo sapiens
aggtacaagcagccacttcagttttaccacattcatcttccacacactgatgaaccatatggaggcagcaggaattgaagtagaaccagagggagtagttaggacagacattctgattcattcattctgattctcactattggtcaggaggtaaaggtttcattggaatttttccttctgatgaaataaaatgggtcagtttttcctcagttgccaatgggcttacctttttggaagtagcatgcttctacaaggacttttaactaacttgatttagttaaaagttcttagaacctgccttttcttgtatttttttttttttaaaatttccaaactttttattttttaagatttggaataaaaaaaatggtggccagggtttttattggtggtgattacctgtaagtttttgggggggtaactcttgcccccgtgggccggagccctctttttagaaaacttaggttgggatatcccccccctggg

SEQ ID NO: 9645 - DNA, 454 bp, Homo sapiens
  misc_feature 177: n = A,T,C or G
aggtactttggcttttgtttctagaacaccaatgagtatatgctcattaagatagtttgatgcaataaatccttattttacttgcctctattactgcattgtaaactgttgtctactttgtcttcttgaaatcctacacctcccccagccccccacaattgggcctaatggaacaanttactttatcctgattttccccctaacccttctggcaaatggcctctacagacttctcttccagaaactaacttttactctggtttttccttttttaatggatggaccagttttaatgcccaatttgttgtcctttcaaaaccttattaaaccgaccccagtacaaattagtatataaaccagttcaaacaattttaacttgaaatatccttaactttgtggtttaaagatgcctcgtttattattatggataattttttaattccttttgttaaaa

SEQ ID NO: 9646 - DNA, 403 bp, Homo sapiens
aggtacatgtggcctttcagctagcgcagaggatggaaaccagagtgggctgatgattggatgccaggcctgagccgggtgagtcctgttctcattatactgtaaagtgagctgctccaagcctccctgattcttagcactcccagtccctgcaggggtccctgagaaggttaatcttgcattaggccctctgctgttttccctctgtaagccttactccactttgcagtgagttctagtataacttctattccagtaagatcaaatggttaaggactccagaaaagaaatttggtgaacacaaagggtttgtcatactttaacttttgtccctttcccaggtggcccatgcttctaggccagcctcccaattcctagcttgcttcatgctcctggcctttgc

SEQ ID NO: 9647 - DNA, 416 bp, Homo sapiens; identical to SEQ ID NO: 478

SEQ ID NO: 9648 - DNA, 809 bp, Homo sapiens
ccggcaggtacccaccttgtattagctgagtgactttggttaaggacagttacttaattatcctgggcctcagtttctctctttgaaaaacagattcattcactaaaataatatttatgaagtattcattttgtgatagcactagtctagctaccggggatatacatttacaaaacagattttaaaatatcctgtcctggtggacctcacattacgttcattactaacagggataatttcagtgcctctctcataggattgttgcaagaattaaattgatgaatacatacgtaacacttataacagtgtcacaaaatgagagctcagtaaaagccatcatcaccataatcaaatattgaattttcataaaaagttttcctttatgttttcccattccttgtttccttggaacttagaaataatagatttaagttataaaataatagtgttaatgtagtatcactagacctcaatttccttacctataaaatggtgatatccccctctacagtgttggtataaaaataaaatgaaacaatttaaatgaaagtgcttttgtaactatcaagagctccacagactaaatatgtcattatgtagcaagtgccttggctaaagtccttgcactcagaggtcttcaatacacgttaatttgattaatttatggcctagcaattgcatagctactatttgagcggtctgaaatcctggaacccggaactaacctatataagtgggtacagcttctaaaacacttctgctattaaaattggctatcataataccggcatttaaagggtgaaaacagc

SEQ ID NO: 9649 - DNA, 408 bp, Homo sapiens
ccgggcaggtacgcggggaggtttaaactgggaaatctgagaaatggtatggttgtatgtgggttggcattcttgcatgatgggagtggccacctgctttcatattctgaagtcagagtgttccagacagaagaaatagcaagtgccgagaagctggcatcagaaaaacagaggggagatttgtgtggctgcagcctagggagaccaggaaagatctgcatggtgggaaggacctgatgatacagaactcttcttgagacagccagcgtttttttaatggcacaaattacagtcttttcacccttacagtaaaggtcacagggtcaacaatattcctataaaataatttttctggtaagggattgatttttttacttaactatattgtttaggcaattttaattatat

SEQ ID NO: 9650 - DNA, 481 bp, Homo sapiens
  misc_feature 481: n = A,T,C or G
ccgggcaggtacagaagggcccctaatatgattactatagcaggttatagcagatattaaagaattccaaggaaggggagagaagacgcctttctggaagaggtatgctttaaaattgagaaatgtttaggtaaggagagaggcaccgaagacattgtgctaaatgtaaacaaagaaccttgatttatataaataaagtgaactcggtttttcttggacagtttattattttcttcttgtctaaggatgtctgttccatgacttttgaaacagattttgttccaatgtggaatatacctagtaggaataggtatgtcttgaaacaaggtagagtctaattaagttttcaattaagaatgtgtgctggaatttttagttcaacaaatctaaccccagcatatatttgcaatgctctgcgacaaggacttgtgggacagagaatttgtgaattgtggatgagttaacaaactgtggcagaaan

SEQ ID NO: 9651 - DNA, 423 bp, Homo sapiens
ccggtctggtactcaacaagttggtaaagctcttttaagctcgtaaactcatgctggctaggtttggtgaacgacgtagtaaggtgtctggtaactcattagttgtataaatgacactatactaaaccaaggcaatataattttaaacattcagatagaaaaaaagttttatttgagttactctttttgtttcagttttttctaaataagatgaattattttgatttaaaattaatatatagtaattgtagaaaatttggcatagaaaattcatgaaatacagtaaaaaaattaaaaatggataattccattattcaagtcacatataataaccagttaaccatttttatgtttatggtttatggaaactatgtattaagcttaatatattccggtggaaaatcccaattacatttgttattg

SEQ ID NO: 9652 - DNA, 378 bp, Homo sapiens
aggtaccacgtcattactgttacctgggggaaaaaagtaaaaagcactgctcccagctagcactggtttcgtccccacactcaactgtgtctggctccgataatggggcacattttttttttggagaatcctttctttactattctgatgggcaaagattgaaaactggcaataaaaagaaattaaagctgtactttttcataaacagatggcaaaattttatgtgtatgggtgtatgcatacaagaaagggaaatcaagggccgggcgcggcggctcacgcctgtaatcccagcactttgggaggccgaggcgggtggatcatgaggtcaggagatcgagaccatcctggcttacaaggtgaaaccccgtgtttacg

SEQ ID NO: 9653 - DNA, 409 bp, Homo sapiens
ccgggcaggtacaattattaatacttccagtccttgctcttttacacccaaagtgaggaaccaagagggttacgaaaccagggaatatgagaattgacatagtgggcatggaagggtaatgctgaaaacaccgaaaaggacagtgttcggatagaagataggagccagtgtgcactccctccagctgggtttttacacccctggatagacttgtgctgggcaggctggatttattttaagattcacgagagatgcaccaatttgtttttaaacataaatatgtgtcaaatagaatgaggttttttaggggcccttcttgttatgggggagggaggaaattatttttaattttaaggaacctaaaagttttggttaaaccacctatctataagttttttgttattgcccg

SEQ ID NO: 9654 - DNA, 435 bp, Homo sapiens
ccgggcaggtacattttattcatccgtcgtttgggtcagggtctgcgggcagacacaggtagctactgccctgttgtgagaagcaatacctcaattggtgccccatgtgaggagagctgtgtgaggacagtcaggggtctgcagaaacagaccttccgcaatcggagcccctttgtaaggcaagctttgaaggaagtgtaaggaccgctttcatgaggaaagctgcaaaggaagcctgaggaatgcgacgggcccccgggaaacaaaggtgaagaaaaaccgcgtggtcaagtcagtgagtaactagtaagtcattggtgcccactcaaggttaccaagttctggggaaagttggttcaagctgagatttcatcatgggacaacagttattagcacagcagaaacattatataaaagtattacaacagctgctta

SEQ ID NO: 9655 - DNA, 404 bp, Homo sapiens
ccgggcaggtacatcttttcttgcctcacatcacctattttcctcaatcactgcttggatttataccccttgaagtgtcaacattataatctgtgcatcaggctctgctttccagcagatgcagcctaggatactcaggctaaaatccattatacctagtaggacaatgttaatgttttctcctttaatctcttagatattaatatggtgacagatagatagatagatattgatacacaaatctatctttcacttcttcattcctgaaataaattcttctcgtattttttaaaacactagatttttttatatgttagcattttatttaggaattattcatttatggtcttaaataagatcagtcattagaattattttactgtcagtatccggtttcaatgtca

SEQ ID NO: 9656 - DNA, 657 bp, Homo sapiens
  misc_feature 128: n = A,T,C or G
agcatctagtcacatacatctgtagcattcatgcataactaactatagatataatatatagctatgttcgtgaacgattagatgtctgtatataatgatctactattatttgtaaaaaatgtacaganctggacttggaaccacttattaaggccaattggagcttcaccgcggaggcggccgaggtactatttttaagaaaacactgttggcatctaatatatagaaatgtatacattttgaaagtgtaatgtttggctttgaaactcttctcccagttattgagtagcaccaattcagaagcaacccatcaggaagtataagggaatttttctaggacttaaaatgtattttattttgcttttagccaaccagcccgttagaaagggttgaatgaattgagttagggaagcgaaacaccacaggctttaaaaacccttaagggctgttgggagaaattcgaaagggttcccaatagttccttcccaaaatgttgccgtgttggaaaacaaaggccagcttaaaaacggtggagaaaaacccattggaggggcctggaaggttggaccaaacactttaaggtattgggttcaatggaatttgaagggggaaaaatggggataggtggggggtttggttggtggtgcctttggggat

SEQ ID NO: 9657 - DNA, 495 bp, Homo sapiens
aggtacaattgaagtatgtgcagtttattgcatgtaaataaaccttttaaaaattaaccgatacaagttgacttacatgaccagaaagctcttgaaaaactctcctgttttctcccctatttttattcttgcatgcaccttatagactgtgttaacacattttctcatgcttacgtgttctttttgatgtctacaattttctcacagagtcaaatattaacctattcaccataaatttccttgggttatcttcttttagtttcattcagataaattattgagataaatggtatttgaaaaatggtttaaatggataatgtttccattgccatttcaagaaaatccttctggctccttcccgattctaacaataaataggtcgaaatttattgccttgtccaaccgatttaccacaggatataatttggcttttttttttacttttttttggaggaccagaagttcttcggctttgggtttaacctcaagggctgg

SEQ ID NO: 9658 - DNA, 401 bp, Homo sapiens
aggtactacataaactgggctctttgttctctggctttaaatcgggttcaataaatgagaagcaacaaccagggtctctctggactcccacaactactctctccctttgcccttgctgggccaaatatggtgcaacttcctatcattgctagtccctaggtgctgcactattccttgctggattcccgtaacccttcccataccattgtaaatacctgcttcattacactctttgacctaattaagagtgttacttgtttcctatcaggatactaatagagagggacacctaactcagtctggggaagcctgggaagaattctcagaggagatgatgcttcagctacgttttttgtttgtttgttttttgagactgagtctcaatctgtggcccaggctgg

SEQ ID NO: 9659 - DNA, 393 bp, Homo sapiens
aggtacttagcagctgtgtgacctagagcacagtgctttgagtttttgagtcttagcttctgtgtctataaaatggggttcacacaactcaccttacagggctgtgagattagattacacagaaaatatattttttggctgtgggggctggaaaatgttctggattaacatttgaaatcccatcctgtgggtgagaaaaccccaccttatgacttggtgggaaacaaagccaacctcccactgatgaagctgaaagtagcagaaccttgcttctactgcctcccttgcagctggaggcaggcacaggactagcctgtcaattggatgcaaatgctccaggccttgaatcacaacctggtgacttgcacccaagtctattactattgtctcttg

SEQ ID NO: 9660 - DNA, 431 bp, Homo sapiens
ccgggcaggtacagcagaactgcatggatcaggtaagtgtgctgagctgtggatcctcctaattcctgagctgggtgtgtagagacaagagcaggagactaggggctgatgatcttttagtcacatccatttaccccagagtgctctatacaaatagcatttttatgtattccccggcatgaaaaagctggaaagcaccaagagaaggttggtgttaaacaacatgaagttttggaatctcagaaagtctgaatgagttaatttttttgagctttagcatacttatcattttataatgaggataattccttaaagcaattctgtccaatagaactttgagatgatagaaatgttctgtatctgagctgtccaatggtgtagccactagtcacatgtggcttttcagcatttaaaaaatggctagtaaggtt

SEQ ID NO: 9661 - DNA, 384 bp, Homo sapiens
aggtaccagctgctaagcatacaaagattcaaggttaaaaaaatcctctcttcattcaaaaagttcagcgtctagtaggatgaataaatgaatgaatgaataaaccaagtgaaacactgccaagtgctattgtttagatctaaaccaaagcctgcagagggaacagtggactctacctgggaagattaagaagatcttacccaagtggggacagggaacaaggtctcaaggtgtgagatgtcttccaggtgaagaagcgagagagggccattctaggcaaggagaaccccagagatgggtcaaacaagaggttggaagtaagtaggaaaaaatagtgaagggtgaaaagatatctgtcattttaaaatattaataaaagacaga

SEQ ID NO: 9662 - DNA, 401 bp, Homo sapiens
aggtacatgagtctcttttttttaagaattttaattttcctagtttcttatctttttaatgattattctttaagtggtatagctccattctccaagacatttaagacatgcgcttttaagagcagctgaaaattattggttgtttactatgggttttatccatttgtatactgtttttttttctcagctatcttcaaaatagccataggaggtagattccattattattttactctaaaaagagaaaactgagttttaaagtgttaaagtggcaggaccaagatgaagatacgaggtgaaagtaactaaaggttgttagcataacaattcaaccaaagatgcaattgaaacaatatgtctttgctgtcatgtctagacaatgagatggccagattgcaggc

SEQ ID NO: 9663 - DNA, 392 bp, Homo sapiens
ccgggcaggtacgcggggtaatctcagttacttgggaggctgaggcagaactgcttgatcccgggaagtggaggttgcagtgagccaaggtcgcaccactgaactctagcctgggcaacagagtgagactcagtctcaaaaaataaaaaatagaacgactgacaggccatcttccaatgttctgatctcccctgactctgtgggtccaacaggaccattctgagcaggtcgcagtcctgggcctggacaagtttgactggtcccatgccagttttttctctgcttttactcaatgccccaatgcccctcaagttgcctttgggtgaattcaacccaaaatgggctgatgagcaactgtccctgaaacatgggcacttgttattctcctggtg

SEQ ID NO: 9664 - DNA, 424 bp, Homo sapiens
aggtacttttttttttttttttttttttttagatggagtcttgctctgtcaccagcctggtgtataatggtgctatctcagctcactgcaacatctgacatccttgttcaagcaattctcctgcctcagcctcccaaagtgctgggtttacaggcgtgagccaccgcgcccagccaactttttgcttttatatgtctttcagtaagggtctgttgctagtaaacttagtcctgattggtgtgaaaatatatcttaaaccccacacttgaattaatttcaggtgcagggttattttccatcagcattttgacactattatgccatcatctattattactaagccattgttctaaatataaagttggtggtgagagtgcctgcttttctttcacggataacctgcttttctctctggtatcatttt

SEQ ID NO: 9665 - DNA, 431 bp, Homo sapiens
aggtacctttagtccttctttttgcctggaacatggactcaggaggtggaagagccaggatgtgttcatgagaacatgcagtgacacgccaaggagagcagaacaagactctagaaggctcccaagcctgtgatgaattgtaagtgcatgtttattagcccaggacctcttcctctggagttgttccatgagaaaaacagtatctcttttggttaaaccactctagggtttctgtggcaaggagaatgtcatcgctaattgacacaactcaggttttgtcttttatttttatattcaacaaatattagcacatatgcctgtagctatgtgccagtaactacgacagatactaaaagacagtcctacctcgaggcacttgtggtctggtaggataaattctatagctgggttaacctggcaaaagggattag

SEQ ID NO: 9666 - DNA, 504 bp, Homo sapiens
ccgggcaggtacaagatttcttagggcgaatccaattccatcaatacctggggaaacacaaaaaacctggtgcagctggaaggctgctgcactgaaaagctgccactctatatggtgttggaggatgttggcccatgtgggacctgatcggctttctctggacctgtactgcggtaatgtgatgaactattggatggtcctttctctatgaatcttcaacatataaaaacatgattttattcacatttttgaaaaggcatatgtccttttttggcagcttggtaaatttcctgtacagggagaaaatccatttttggtttccaatgggggtaatgttggcaagcaccaggggaaatattttctgtattgcaaaaagatggaatcctacaactggtttaaagaccttttggtgggaattataaaggcccctgggccttttaatgtaaagtttttttacaacccccttatggggggcccaaatatatcacttttttaacttcaaaa

SEQ ID NO: 9667 - DNA, 792 bp, Homo sapiens
ccgggcaggtactaactctaccactcttattctactgattctattactgctattaataattctattattactgattctccttgttattaggcaatattgataaaaagggggcggaaatgacacacacaattacttctttttcgagcacaaatacatatggacccttctgggtgctttccttataaaatgaaatggacctatccattttaggtgtgacatctacttttaaaattaaaaaaaaaaaaactatacacatgtttcagaaaagtttgtaactgtcacagttataatgcaacttgtttagtccatcagtataaatatactttttttggtcaaaaatctctggatggaaaaatgtgtgaattattcttaaaactgtgccttacaacgtggtagaaaattaagccaaaacacaagacagaatgaccaaaaccaccagatgttttcatagaatgcagacattgctctaatgaatttcatccctatggaaaatcccacccgattttataaggttcataatgtgtttccttaaagaatggaaacattattggaattgtgtcttaacaggccgcacataacttcccattatgaaaacaatttattcaattattttttcttctaatacccaactttgcttataaaaggtccaccaaggtttggctttcttattctaaaacgtttataacctaagattacagggcttaaatatttaaataaaataaatgggccccttattaaagatggtctccacccagtatgcttccataaatagggcatattctcagtgagtaa

SEQ ID NO: 9668 - DNA, 370 bp, Homo sapiens
aggtactttgggcttgatcattttaagtttcaattgcaaaaaaaaatttttgacggagtgttgctctgtcactcaggttggagtgcagtggtgcgatctcagctcactgcaacttccacctcccaggttcaagcgattcttatgcctcagtctcctgagctaaattttttttttttttgtatttttagtagagacagggtttcaccatgttggtcaggcgggtctcgaactcctgacctcgtgatccacctgcctcggccttccaaagtgctgggattacaagtttgagccactgcacctggctaacttgccctattttaaagtcaagcaatgggaagaataacaagattatatagtaatcagtttcatg

SEQ ID NO: 9669 - DNA, 646 bp, Homo sapiens
acgtacagaactagctagctagctcattggtttagatacgggtgccggtgaaggtttgtggcttaggaggtagattagatatttatttccattggactgaggcttaagctcagtttaatgctcatggatatggataacttattttgattcacctccagaaattgtcgttaagcaatttgtgtttgtgcaagtgttaccatctctcacaaaggatatgagtttctgaacactgatattttatagtttctgtatcattatactttgcaagattttggtcaaaaagaccaaaagctttatgtcaaaatgggaaagtagtgataataaaaagttactcagtatctttttctttgcattaattcccatgaatggattaaactaagagattaaccatacttaggggaaatgcaaacttttttctgttttcttttttttgagacagtgttgctctgttccgcatgagtgcagtggtgcagtcatggttctctcacctcctgagctcaacctgtctttccatctcagctttccttgctcttttaatttacgaaaatgttcctgtccatagccactcctgggacaagaataaacattgctttgttgaaatagtgtggaaacacttttaagttaacagaggagagaatagcaatga

SEQ ID NO: 9670 - DNA, 351 bp, Homo sapiens
ccgggcaggtacttttatctgacagaggcttcatttttctcaaatattcctttgaatcaaagacatccatcatattaaaaagagtaaaatcatttcagggaggattgctagaggatacagagggcagggatttagccttccaggtgacctctgctggggtcccaaggggtgggacagggtttttagtcactaatttaaaagtataaaaaggtttccaatgctttataagttaacaaacccatatcctgagaattcaaagaatactgaatggcaacattataaatagtaacatttgctattaaaaaaggcagtaagactctagctacctgaaaccaaaataagcagttaagg

SEQ ID NO: 9671 - DNA, 421 bp, Homo sapiens
aggtacattcagggtcttcaatcttaagcttgccattatctcctcaaaataataaccaagtgatgcttactaggtattcaaattgagctgtcaccagaagtcttgttgaatattttctcacttccctaagcaagttgaaccaagcaggacagatatggagaatggatgattgctgatcacccaggtcattattgaagggcaaattgaaatgggttggtgcttgctaagaaggtagaagaggccgggcacagtggctcacggctgtaatcccagcattttgggaggccagggcgagtggagcacttgagttcagctcaagaccagcatggccaacatggtgaaaccctatctctactaaaaatacaaaaaattagctggacgttagtggcacgcccctctagtcccagctacttggaaggct

SEQ ID NO: 9672 - DNA, 447 bp, Homo sapiens
aggtactcaaagtcaaatcatttatattttcatcatgtattattttcaccttaaatttcaaataaactacagtgaatgaaatatgtatctattatttacaaattaatttttactttgctatacttcccccaaattcagaaagccaaattaagatactgtttctttgtaaagtaatgcttaatacgccgttatcttctaaatatagtatggctttacagactaaactggttttaaaaaattctttgcatcttatctcatataagccttagagttaacaaagtcatttcccctttttaaaataaatttagtgacacaaagtttgcatgagcaaaaaagttattaccttacgtgaatgtcttacaaattgctctcttatcaacaggagacaatttcaaaatgtcattcttaaaatattaacttgctggctgggcgcggtggctcacacct

SEQ ID NO: 9673 - DNA, 374 bp, Homo sapiens
ccgggcaggtacttcaaaactattcataagcaaaaatcagtgtcaaaaatatttagtaacttaaaaaaaacaaaaagtataagtagagacggacaagaactcctcctgctttctcccactgggctcatcgtatttctgttccattacataagagactaaaactgacaaactctgttttatcgctaacacctaaaagcaataaatgtgatttgttaccatattatgataaaatttaaccaaaaaattttaaagatcggatattctgcagtttacagtgacatttatgtatatatgcctaaaagctacatataaaccttgaattcatttaaaattatttccaaagaataaatgaaggctgcttttgaagtgccagg

SEQ ID NO: 9674 - DNA, 394 bp, Homo sapiens
ccgggcaggtacctgctaagaatattttcagctacgagtatcagaaaactagcctagaggatcttaaacaaatagggtttttcacatgtaacaagaagtttctggtttgcgtcagctgctccatatcaccaccaggagcccagattctttcttaccttttttctcccctccctagagagctttctgcatttttgtgttcatggttgttgccccctggacacagaatttgacagaattgccaaatgtatcaacattttaggcaggaaaaatcgtaacgggcagaaggctgtatcatccatgtctgaaatccttttttagaggacaaaattttgtccctacaacactgctcagttgatttctgcttatatctcaatggccatttaatggccagtgt

SEQ ID NO: 9675 - DNA, 393 bp, Homo sapiens
ccgggcaggtacatcttgagccagttgtcacagctctgtgttaaagaacccaactaatggttcctagtttttaagaaggttaaggactaactagtctctagaccattatgagattaagataatcctgaaataaataataccgaagaagtaacctttttaagaacatacagcccagaaatgactgttagaattctcgcctcagatgctattcatagcttataagtagccttgctcttctcaccatgaggatttccataacattatttttaaagtcaggcacttctaaaacaccatgtgtgaaaacaccctaggccaatgcatgtaagaaaaatgtggaaccatatttgatcatcagacttacatcacgtggagtgggcttctctctttctcttg

SEQ ID NO: 9676 - DNA, 378 bp, Homo sapiens
aggtccccgggtgctgagtaaagtctataaagagcagttgagaatccatggccagaaaataggttagagacaaaactggtgttggaacctacacgtcttgtcttgtaattcaggagcctcatcaagtcaccttgaagtctaccttggataagataacacaagacccatgacaaattgaagtgtatcacttaacaatgcctgtgaaaaagactttctctttagtaaccagaacacttttacagcaagagattttatttcagatgttcataattatttataaaagagacaactacataaccacttgctttgttaacagtggacagtgagacatcttgaagaggaagttgttggtctctttagattgggcagtctaaactg

SEQ ID NO: 9677 - DNA, 386 bp, Homo sapiens
aggtacatttcaggctgaagaaatggcaaatcctaaggccctaaagcaggagcaaaattgacatgtttgaagaagacgagtgtgactggacctctgtgattggggggaagcggcgcaggatgaaacgagggaggtatgtaaggaccaaaacatggaaggaaagcaagatttccagaaaaagtggatgggagaggcactatccatgaatatgatccagttgtccaagaaagttaatttagcagaaagaaatggaatgttaatgttggttcagatgcagaatctaatatgtgttttattttaaataagggagagttaagcatcgttaaagacataagaaaagagaaagctgactccttttcttccagtgaccattagtaacgtattct

SEQ ID NO: 9678 - DNA, 381 bp, Homo sapiens
aggtacttttttttttttttttttttttgttttgttttaactttgttgactaagatctcagaagtatctgagaacttgggctgcgcagggaatgctggtgtgggagaagcaagccaactgagctgagctgcggccctgtttgtccttagctctccaaaacttgctgtctatgtcacttggaaggaatttgattcttttctgcaaggcactgacaataccttacaacagagctgggagataaaatgcatagcttgtgaaagtcatcagaaagttgaacacagatggtccccggcttaaaacgggtcaacttgatgatttttcgacttgatgatggtgtggaacactattcacatttcagtaggaaaactgttatcgataagg

SEQ ID NO: 9679 - DNA, 419 bp, Homo sapiens
ccgggcaggacgcgggcaaatacttcaagctgttttggtgtttgattatgtcaaattttaagaaaaggcagaggatcagttcaggtattcaaaaggccaacatatccaaaaggtattcaaaaggccaagacagagctgcttttgtgtgggtcaggtagaaagtaaaggactgtatttctctgtccattgatttacaaaagaaattagtgtccattcacctttccaggcactctaataaatactacttattaagaagactttacatttaagtttgacctttttgtccaaggcttagattttttacggggttactctttgccttaagactcagacccaatgggcacctatattagtttaggttgttttcttgagaaaaaagtttttgtttttttcccccagtctttgagttgccaatggtc

SEQ ID NO: 9680 - DNA, 446 bp, Homo sapiens
ccgggcaggtactgggattataggcgtgagccaccgcgtctggcctctaacgagatatttctaaaggttaggccttcagtcaagaattttaaagctggatcttagaggttatctaaactaacctctccatttcatagatcaggaaagcgagtcccataaaagcactggtttggacaagttcagaaagctaaacagtgactgtggatgtatgattctgtctcttaactcctaatccaaatgtcttctcactagataaggctgtgccttctacatttgaaggctcaaaccccatggatggatggagggaaggatggttggagggatagtcacctctatttgaatgtgattacagttcctttatcattttgctctttaccttcatatttcttttcaatacttgattctaattcgacattccattttactattgcaattttactttttcg

SEQ ID NO: 9681 - DNA, 404 bp, Homo sapiens
ccgggcaggtaccgcatgcaaccagtttacatgaatctaccccagttgtcaagatggcacacccttccacctgcacattagtttcatccctgagccctacttacaggctggagccaggagagctggtggccttggaaccaaacagactgggccttgaactctggttttgatgctccccagctgttcaactatacaagcttcttaatctctctgggcctcagttcccatcatgttaggattgtctgaggattaaatgaaactgtcactgaagcacctggcacgtagcaggtgctctatccatgtggcagtcattatttttactattcagcgtctggttctgttgaggccctgcctagcccagtggctatttcatcagtctgtccctggagttgctgtgtttgtcc

SEQ ID NO: 9682 - DNA, 374 bp, Homo sapiens
aggtaccctgagattgcatgtgcgcacgccctttctaatcttctgactttgagtgtggctggtctgtagcttttgctcattcttcctaatgaccatgggaataagggagtggggtggggggcaagaatggctgcaagtagtggggagtagttgaaggtgtgcaaaactgtgtctgcacccagcctgacccccaagagtcctgggcaggccccatggtttgggtgtgagtcctggtgagtgtttgctcaaaatctgcttgactattgatggttttttactgagtgttaaatttgattaaactcttaagtcctcctaagtgccaggaagacactctgctttctctccctcttttttctccttgattcatagtggta

SEQ ID NO: 9683 - DNA, 433 bp, Homo sapiens
aggtacttcagttgaaaagttgaccaaagccaaaaaatgtctatctggtggtcagtagtttgataggttcaaggagttgaaagaagcctaggatggctgggacatgtagatcatagtgctaagagatggaaagcaccttgtgctatttggccgttttagatgcgatgtttcttaacttgagcgttgggaactaaaggtctgttctctaactaattgatctcttaaacttctttgtactttacttgtatattgatccgatactcccatttttctaattttcatttttctattttatattcttctatcatgttcatattgaaattctttagtatgtgcgtcattctacattccatttatgagattcctccagtttgaagtattacctccaattctatatatctttcccaatcttctcagttttttcccatttccc

SEQ ID NO: 9684 - DNA, 391 bp, Homo sapiens
aggtacttcttaattagaatttagggctaacaagagatattataacatcaatacttgcattatatagaggaggcctttaaactactgtctagggaattcagagagccatgttcctttacaacattccttctcgtgcaattcaaagacaattgatagctagaaaatgtcaaggaaccaagattcttgaccaacttgaaaagcaagacttggataaatggcattatgagatatatttgcactaattgtttcaatttgactgaagtatgtcatctctgctagattgtaatttccacaagggctgaggcttcatgtctgcatatcaccccttatttatttctcagaaagggtcccctattacctagtgggaccctcaaaaatatttgatggatca

SEQ ID NO: 9685 - DNA, 427 bp, Homo sapiens
aggtacgcggggtgatcaagctggaagattgaagaaggaatggggatggattggagtcagcattgtattctggtcatggtaaacttgccagtgtatataaatcatccaaatggacatggtgatgaggagttggacctgtagatctgaagcgtagagaggaaggcagagttggagatgtagatatgggagcctctggcctgtggagagagtgtatgatcaccatcctggactacacgtggagaagaaaagatgaccagcgacagagggctgggtagagccagcaaaggagacctcaaaaggatggcagacagggtgaggtaaggtcaggaatgtgtgctgtggcattactgaaacctaaagagaaaaaaatcgtgtttcaggaagaaatcaacttataaatgctgaggaagaaaggctagtagtgatt

SEQ ID NO: 9686 - DNA, 416 bp, Homo sapiens
ccgggcaggtactttttttttttttttttttttttttgcagagatggtgtctcacttcgttgcctaggctggtctcacactcctggcctcaagctgatccttccacctcagcctcccaaagcactggggttgctggcgtgagccaccatacccagctgaaaagtgatttcttataagccaagcaatcagcctctgcagagaagacaggaccctcagcacatatctagctctgtaattcctcaactcaagttgggcattactatcacccctacattaacatgttcccattaggaatatgaccaagaccaggacagagtcacaagagaaacagtcagtggatcatgtgacacatgagatttattggtccaataaggtgaactggtcaggaaccagatctgctatgccccttgggaata

SEQ ID NO: 9687 - DNA, 421 bp, Homo sapiens
aggtacttaatggacaggtgttttgagcagaggtttatagctcttagaactttaaatgaggcctccagtgaagttgattacaatggaatgagccaaacaaggcccgcagagttcacctccacttaataactcactaatgctgtccttcaaaagtccgaagattacagctctgaaccagagcagcacacagagggaaaacacaaggtaatctctcatctaaatgagggagtcagaggctgcaatctcagccatctaagaacttgccatccactagcaagcaggtttgtccctgaaaattcctgagcagtggacttgaaattaaacacagacccagtaaaaaatgaatatcagtaacaaataaaggggaaaacaaggtctattttccagatatagaatctaggaagtgtttaaaactctttac

SEQ ID NO: 9688 - DNA, 357 bp, Homo sapiens
ccgggcaggtactgttttagtagcttacttgtgttttttaaagttcatttctccacccacaggatagctccatatcttccagcaccactaatgagtaagtattagggccaagctggtatctgcagagtgctgactggccaagagtctgcctgtgactcatgccttaggctgtccagcattggggtgctggggggctgtagccataacatttgcaggatttggaaattccacctcaagctccaatcccagggtgttgattctggctaaccatgtttatgcaaagcaatccaagcactttgactcactttgggaatctggcattcttgggcttttgatattgagacagtggaacacttt

SEQ ID NO: 9689 - DNA, 295 bp, Homo sapiens
ttttttgataaattttaaacttctggtttgaaacttttgtttcctgtgcttaaaaggagacagttaaaaacactctgatttggactgacagaatgttttttagatgttagatagatctagctttgaatatttatttgcagagaagtagcagggaggactaggaatgactttttcttaggaggtgctatgcattccatcaggtgactgacccctttgtgagctgtagtggtcagtcccagcatggcccacacttgttggctgtcttagccatggtggctgtggttggcgggtacct

SEQ ID NO: 9690 - DNA, 439 bp, Homo sapiens
aggtacgcggggacatcaatgcagagtccctctgtgaatttacaacacccaacacccatgagttcagtccttaagaaggaaaattgagcaagtatttaattggttggacattgcataaaagaggtccatatccaggctaactctagaaattttattctcaaacttagttggcctctttttcttctggcagaggaccattcttagtggcacctggggaaaatcttggcacccagaagaaattaaactggggcttactgcaaaaatacaatgggcctacattggaatttggtagaaggagaaaggaagcccctgtaattgagaaggctgtgcctttgaaaaaatttttttgcccccttaaatgtgggccgaagcccaaagggaaaaatccttgtgagaaaatcatcaattgcgttgaaaaaaaaacttgggcatttttttc

SEQ ID NO: 9691 - DNA, 994 bp, Homo sapiens
aggtactgggattataggcgtgagccaccgcgtctggcctctaacgagatatttctaaaggttaggccttcagtcaagaattttaaagctggatcttagaggttatctaaactaacctctccatttcatagataaggaaagtgagtcccagaaaagcactggtttggacaagttcagaaagctaaacagtgactgtggatgtatgattctgtctcttaactcctaatccaaatgtcttctcactagataaggctgtgccttctacatttgaaggctcaaaccccatggatggatggagggaaggatgggtggagggatgcgttgatccctgggcgatatgttattgggctaagtacgtgggcatgggatctgacgcaaaagcaggtaactctttaggatgcgtagataatatgcgttgattacgggagtgagtggaatgaattgcatttcgtgtgtgtctaaaaaaattatatagcgggcgcaacgcgtgataaggtagagtatttgtcggtcttaactgagggagagtcgccttaagcggtacggtggaattaacgtcatgatggtgaattagataatgacgttattggagtaaatatgttgtagcatagactattggttgcaccagtggacttatataacgtctgtggcgggttgataattgatgagtggattattacgtgattcattagatagacgtcatatctatggaagtatcattagtgcatagtataactacatctgatggaatggtgggagacgtcattgcgtcggtagattatgttgacgttacagatcctgcatgttctactaaatgcatagttgactcttgatacaatataaacagtccaagatatacgtaatcgtttatggcgctcgctgactcacggctatatcactcgtaatatattagggtgaataatccgtccgggaattgcgtggtcgaaaaccttgtggtcaaacaagaagcggaaaactaataccgtgtgcaaca

SEQ ID NO: 9692 - DNA, 395 bp, Homo sapiens
aggtacatacttcagaggctagttggcgggagtcactaagttaatccatgcacagtgttcagcccagtgcctggcacacagtgggtgctcaaacaacagcttctctccctgcatgttggtcattagggtcacaggctctgaagtcaggctcctagggtaatatcctgtccctatcactttcaattgtaggaagatgggcacattacatacccccataagctttaattttcttactataaaacagagataataattgtatctaccttatgggttattgcaagcagcacatacagtcacccaaataaagtatataagagtatcttgtaagttcccagtaagtgctcactcctatgaatttggtggttccccatttgaattcctgtggtattatagga

SEQ ID NO: 9693 - DNA, 407 bp, Homo sapiens
ccgggcaggacagctaagaacacagggttgcctctaatctcagctccaggtcagagtgctattctcctaggaagggcaggacattagcatttctcatgctgctcctagctacttgttctgaggttaaattctgtgtaagtataattgagaaatgaaagctccttccttcccacccccacaacctcaagccccccatgcatggaacagagactctaactccttgagcataactgcactagaatattggagcctgtctttcccttggcttgtaaggtagagattccaggctaagagaggcaagcttataaggcctgaagctactgcctgtgcccttctattcagtattcagcttccaaaacagtggaactgctactcagagagggaaatgcacattatccctatgccca

SEQ ID NO: 9694 - DNA, 387 bp, Homo sapiens
aggtactggttcatgtgtaactcatacatcccacaagcatctactgtgtgcagaatgtctcgtatgtgaaagacactgtgggcatataactgtggcttagatgggcttctaacccctgagaagataatatatcagcagaaaaaaaggaacatgtatatgaactgccatcacacaacctatccagaattccacaagaaaagtatggtcaaagagctaggaggtgttgaaggaaagattacctgcaggagaggcaatgcgagatgatagaagattctgagctatagagcgaggcggacccagatgggaatttcaggttttctcgggatgtgggaccctaaccaagcttcttatactttccaagcatccattttctcattttaaaaaaga

SEQ ID NO: 9695 - DNA, 648 bp, Homo sapiens
  misc_feature 396: n = A,T,C or G
ccgggcaggtactagacaacagctgtttccctggtgtatgatggagccaacaccagtcaggggtatattattacatctgattatcagtcaggataaggtaggcaattctctggtaacaaaccatcctcaaatctcagtgcttatataggcactatttcttgctccactagatggttcatacttgctcacactacccatcatgggtcgttaggagatctctgcttatggtcactcaggaattcatctgacaaaggagccaccaccttgaatatcatgggtcactgtgcctcgagggactgaggcagctctctctgtgagattgctgatatgcaactgggcttggcctctttattcttcttggaccgacttgacttctcactttcctgtttctcctgngaacactcgtaaggaatggctcagtgaatttccttctcaaggtcggcatatggtgtgctggtcctggacctgtttgcactcagatccatccttctgctctgccttgttctggggtgaagaagttgatcctcggcagggtgactttttcaggctccaaagaatttctgaaaggacccccgcgtacatccatcaacagatttctactcagcaataaaaggaacaaactaccaagacgttatctgtcatggacag

SEQ ID NO: 9696 - DNA, 388 bp, Homo sapiens
  misc_feature 331, 345, 346, 357, 358, 359, 376, 377, 378, 388: n = A,T,C or G
aggtccaaaactggtctgggatgcaaaaacattatagcacaattgatgagagagaatttactaaaaaattaataaattgatcaaagaaatgggattcctgtgcttcttcctattagtattacaaagtttgacctcatgacttctgcttggaaatactcaaactcccaaatccagtgcttactgactcagtttacctggctgtgtttcttttgtaggctcttattggcgggaggcagtgggaggtggtgttaatgctaccctgaacatacagaggactttctaaaacactgtctcctgtgatgccacccagcaggcaggaagaagtgtccantttgtaatcattanntttctattttnnncagatgaagaagacctnnngggctccagn

SEQ ID NO: 9697 - DNA, 314 bp, Homo sapiens
  misc_feature 314: n = A,T,C or G
ccgggcagtatttggttttcaaaagaatcttatggagagcatttttgaaagtagatgtttggaaatctttccaacattatgtgatttttgtctctaaaaatgatgtatattgcttataaaaactcatatctgcacacttatcttagaaactgaaattcctaacctcttttagaaatcttccaaatggagaggttgagttttaaatatattgaggaattctaaggaggacagtggcgcagttctggcttacttaaggcgtgcgaagggaagagagtcagcagagctcgtccagaggcagcaagcctcatatgctn

SEQ ID NO: 9698 - DNA, 400 bp, Homo sapiens
ccgggcaggactattcttagccactgttttattacaaataaaaccttcacaggaaacagaaggttagaagaatctgaaaatcattctttcccttataattcttgacttttagatgataaatccagtttttctagcagtatgttaaaattagaagattcatctgaatatatttaggcttaaaacaaactttattcacaaaacacagctatatctatataaaaaaagctaacttcacctcaaaataattcagattatattcttttttttttcctgtttctccttcccttttttttcctttttttttaaagtgatggggtctcactctgttgcccaggctggacttgaattcctggtcttgagggatcctcctgcctctgcctcctaagtagctgggacttca

SEQ ID NO: 9699 - DNA, 358 bp, Homo sapiens
aggtactaagttgccatttaagaacctcttcaggttccccgtctccttgagctatgaaagttttcatgaacacttcagttttaatggcatgccaaacattttgttccatgagcaacgcaacagttttaaaaattgccattgagtgttttaatagaatttagccagttgtttttaaatatatttctatgagccaaggcttacaaaaatgtataaagaggaagtgcccagatataaagaagctttgaaatggttgctgttgcctccttaaaaatcatcattaaacaatctttcaaacagtcagtgtttggctcagtaatttaatcaaaatttgtaagaagtagcttgaatgaacaaaagg

SEQ ID NO: 9700 - DNA, 390 bp, Homo sapiens
ccgggcaggtacatgcatcaggccatggtgaccaattgtctgtggagggtgaggcagaaggaattgttgaggatgactgaggtgtctgggtaacgctttcaactgaaactgggaaaggggatcaactgaaactgggaaagggtttggtgtggcaggtataagtaatgagttcaagttgtatattctgagatggaagtgtcatgaggacattcaggtggagaaatcctgtaggacactggaaacggatccagagttcacagaagtcaggataaaggttagggctcattagcatctgggtgatgaacgaaggcttggagagaatggggtcccttatggggagtgtgattaaggacaaccggccgaaaatagaaacctgaagcaaggaccgaa

SEQ ID NO: 9701 - DNA, 381 bp, Homo sapiens
aggtacataaatatgaatatattctaccagatgtcaatcacagggaggaactagatagagacccaaactatgaacacttatttagtatcctttgggttgaagtttgggcagaaaaagggtgaaaggagatactgtcttttgatacaaatgcttctgtttgcttgaatctcttgcgtgcaaatgtagccatgtatcatttcagtaattaaacatagaaaaagcaaaacaagccgaactggtgctttgttttttgaacctggagttaagaaggtaagaaagaagcattgtcagtatctgcattccaagcttgttccaaagaatggagctggtaaatgtctcctgctgtcttaattaacaaaaatctgggatgagagaattttt

SEQ ID NO: 9702 - DNA, 366 bp, Homo sapiens
aggtacaaatagactcgatcctcaaagactgaacaacttggaatcttcacaatcctgggatcatttgttagagcacttgttcttaaataatgtaacaatgatgcagttctcaacatgaaagtctgtgaattttagcaaaagaaatggagaggcttctggggttctgaattccataactcacagctctgaaggcgagactactgaaacattccaagtagagaaaggtcactagcaatatcagggtggtcccttgtaaaaggcccacaggctggcttccaagaggacttatacggtgacatttattatcttgatgatttaccagtctggctcttagcttttcaggttcagaaaccgatttaatcaaga

SEQ ID NO: 9703 - DNA, 857 bp, Homo sapiens
  misc_feature 270, 365, 387, 457, 458, 459, 460, 461, 464, 465, 466, 467,468, 469, 470, 471, 472, 473, 474, 475, 476, 477: n = A,T,C or G
gctgggtcccgcactcttgattcccttgcattcaatgccttaccactctacaactgtcttctaacagagctctattccttaatcaccagtgtaatctatccaccttctgcatccctgtcactgagtagctgggtgaattctgggaaaaacaaatgctcagagttgtcttcccaaaacccagctgagctcccaacacaccttccaatccctctcagtttcttcagcaatcatcataccctaataccatgaaattcactatgcacaactctntcccctaactgcagcccaagaaaagctgaaaaactcaaaatcctgttatagcttcccactaacctcatctatatccacatctttccagacctctntcctgtcaggttcagaggattnttcctctgcttgctctttattctatccctagggagaccctctgcacctctgctcatccccgcgtactttnnnnnttnnnnnnnnnnnnnntttggaaagaccactctgccgcccttttcaagatgttcactcttgccccatttacagttaatagcaggacattggtcaaattaaggcccaacccccaaacaaaaattttaggtgatcatcaaaacaggagaacttactatgcaatcttagatggtatgtcccggatattatggaaaaaaccaattttcagaaaataggctgtcttttttcattaaaaaatcatttgcaaagggataattttatgtccattggaaaaaagttactagctggaaaatggaaatgaaaatattttccctgcgcctggttttgataaaactttctcttaccaaagacccttaaaccattggcgctttgcctttttaattaaaataaaaaacttg

SEQ ID NO: 9704 - DNA, 887 bp, Homo sapiens
aggtacatttgttgggggcgtgacattaacatataaccacttagagtggacatgcagttagagaaaagtcaatgagctgaaaccaaactgggaattccaacatgtagaagttaaacacaagaggaggagccagcaaggaaacagaaacagagcttccagcaggtggggggcatttggaagaaaacgatgccatagaagccaagatgaaatagacatcaaggagaaggaagtagtcaattgttttgaatgctatgaagaaagataagaataggtaaatagtccttatatttgataacagaggtcactagtgatcttgatgaggggtttcaatagaatggtgggattatatacctccctggattcaactgaggtaaggaaggcatacagaatagagacaggcactataaacagctctcataattgcattctagcaattagcacactgtctgaaggggaaggtgctcaatctttcttgcataactgaatgaatgagtaaactatctattcatccatctattcaatccttccttcacccaatccttccctccattcatccattggggtttgagcctttcaaatgtagaaaggcccacctttatctagtggagaaaactttgggtttaggaagtaaaaaaacagattcattcattccacagtccctggttaacttttttgaccttgcccaaaccagggctctttttgggactacctttcttaatcttataaatggagaaggttatttaagaataccttttaagatccgctttaaaaatttttgactggaggcctaaccttaaaaaatatttgtttagaggccaaacccgggggttacccctataatcccgtaccctggccgtttaagaactagggatccccgggctgcagat

SEQ ID NO: 9705 - DNA, 494 bp, Homo sapiens
aggtacgggttaacatttaaagaatctacattatagataacattttattgcaagtaaatgtatttcaaaatttgttattggttttgtatgagattattctcagcctacttcattatcaagctatattattttattaattgtagtttgatgatccttacagcaaaaactgaaaagctgtcatcttcaaaaatatgatcttatttgaactaataaagaagtttatttcaacaggaagttacttactctattgaaaaaaaactacaacagtgaattatataatataataatctataataaaatataaataataaaagttaccttgcgctcgggccgtgccaaaggataccttcttggtctttacacaattttttccaactttctaaaactttctatttttttttccaaaatttggttttcattccttaccaaccttccccaaatttaaatcctattcccattttttcggctctgcccgttttttaataaaaagggcg

SEQ ID NO: 9706 - DNA, 378 bp, Homo sapiens
ccgggcaggtacgatcttggctcactgcaacctctccctcccgggttcaagtgattctcgtgcctcagcctcttgagtagctgggattacaggcgcgtgccactgcgtccggctaatttttgtatttttagtagagatggggtctcaccatgttggccaggctgatctcaaactcctgacctcatgtggtccacccaccttggcctcccaaagtgctgggattacaggcgtgagccaccacgctcagcctacaagcaattttttaaaaactgacacctattactgataaaattctctgtttaaaatcctatttactattttaaagataagtattagtttttttaaatacaataattctgttattgataaaatttaagg

SEQ ID NO: 9707 - DNA, 409 bp, Homo sapiens
aggtacaagtgctgtatgaacatgtgggaatagtatcatcacacaactatctgtcctttttgctgaaagttctgaaatctccacctaagaatgttggaaaatggatataatgtgtaggctaaatgtgttgtatccaaagttgtgtaaggcagtggttttcaaaacttttaatagaagcaagtaaattaggatctctttggattcttattaaaatgttgatttctgggctccacaccttagatcatcttcattagaacctctcagacccgaatatgtgtattttacgtgaccctatggtttcctgtgcaaaccaaagccagagactcactgctgcaggggagtcaagcttttggttcttccttcctagtcactcaaggactagaaaagcagctctagtattagtcaaatc

SEQ ID NO: 9708 - DNA, 406 bp, Homo sapiens
aggtactatgaaggaaaagtatgctaaaaaatatataacagaggcaccagatgggaggagagaagtgggtggtggatggaggtgagggtgggctgcccaggctagaaggacattccaggctgctaaagcatcatgtgcaaacgccctgggctggtaaggccccagtcacactcaaggaacataacggcggctagtgtgggttagaatggcaggaaaggaggtcagatcacaggggaccttataagccttggtaaagcatctgaaaatttgcattcagggttgttgaccaagcccctgcctgacccaatcctccactcttgtattggcccacaaaaaacttcttgcccctccattccatggaaggaggtttcacaccccccaaattcagccttctgccccctttgca

SEQ ID NO: 9709 - DNA, 425 bp, Homo sapiens
aggtacatgagatgggagctcgacacattttatttggagaataaaagaaaatatgccgtcatcaaactagagcgtgttggggggcatctggtttacagaactaagtcaaggagaagaactctcaagcaatggtgacatctgccagctctgcaaagtgggccctgccttgtcacacaagtctccttgggcaaatgttttctatgtagattttagacactttcctgtgactttctcaaggtcttttggtgacacatgcagcttgaagcttttgcaaggggctggagtctaatctcttcttgcccagcttggctgcaggagaagaagggagatatgttaggacttggctttgactgaggtggtgtagcctggggttgcaagggctgttgccaaggctttctggtggcatcacatgcttcaggagttgg

SEQ ID NO: 9710 - DNA, 423 bp, Homo sapiens
ccgggcaggtacagaaaacagagtctgttgctgctattgttgtcacttcccttggagaggacatgtaaggccagcagggagccaggctcaaagacaaagaatagatgcagagagaactgggtttacagtcttccctggttccctcagggctgcgcttgaagctccctaaatcccagagcacgagagctatacgttcttccagctgtcagtccagatagagaatacctgcagctaaggagctatgggacttccattcagcctggcctggttaacacatggaactggcctgagtaaatgccctttgtgttcagctacaggaaacccctatgtcttatggaaaagctgctcaagctgagcatccttcaattcctgctcaaaggcagcagaaacaaagatatgtgcatgtggaagaatagagcattt

SEQ ID NO: 9711 - DNA, 374 bp, Homo sapiens
  misc_feature 341: n = A,T,C or G
aggtacttgcaggtggtttggcctggaaaatctagatgagtggtttttaaatttagttgcttattagactcaagaaagaaatttaaaaaacaatactgattactgagaccagcttttctagattcttcattcagtaggagtaaggaaaggccaatgaatgtgtattgataaaaaggttcctggccgggtgcggtggctcacgcctgtaatcccagcactttgggaggccgaggcaggtggatcacctgaggtcaggagttcaagaccagcctggccaacatgtgtgaaaccccatctctactaaaaatagaaaaattagttcacgttgtgggtggcagggngcctgttaatctcagctacttggggagggctga

SEQ ID NO: 9712 - DNA, 479 bp, Homo sapiens
ccgggcaggtacgcgggaaggacagattctcagtcttgaagaggcagcacggtaaaggggaaagatcatgagttttggggccaggttcccttggatattgtggggtccccacacttctggatgatgttggataacctctttgagaacttaggctttcacattctgttaaaattggaaataacttaatttttcagaagttgtccataaaacacctataatggattttggactttatattcaaaccttaaatttccttacctgtgcttcagttgaaaccttcagacttcaagcctgttccccccttcttggtatccggaatgcccttttccccccagtggggggccttttaggttaatggttattcccctagcttggggaatacaccctgggccaaagacttctttaccaacaatttcccccttcctgtgcccattaaccaacttcaatttctttttggataacctggaaatttattaaat

SEQ ID NO: 9713 - DNA, 403 bp, Homo sapiens
ccgggcaggtacgtataacaacatgaattcatctcaaagacattatgttgaagccagatttgacataactcattctttgtcattccatttatgtgaactttgggaatagtcaaaacttagctatggtgacagcagtcagggcagtaattatctatcgagtgtggagattgactgaaaagggcacaggagaactttctgaaataataaaaatgtcctatatcttgttttgcatcgtagttacacaggtgtagacagttgctaaaacgctaaaaactaaatgtgtaagatttatgcattttagtgtatttaaattataacccccagaaagcattgccttattttttctggagggtaaatatgctcgttaggagcataaggggatgattttgagaaaacccttgct

SEQ ID NO: 9714 - DNA, 409 bp, Homo sapiens
  misc_feature 282, 283: n = A,T,C or G
aggtacatttgttggggacgtgacattaacatataaccacttagagtggacgtgcagttagagaaaagtcaatgagctggaaccaagctgggaattccaacatgtagaagttaaacacaagaggaggagccagcaaaggaaacagaaacaggggcttccagcaggtggggggcatttggaagaaaacgatgccatagaagccaagatgaaatagacatcaaggagaaggaagtaagtcaattgtttttgaatgcttatgaaggaaagaataagaaaatagtnntaaatagttccttaatatttttgattaaacagagggtcaactaagttgaattcttggatgaagggtgggttttcaaatagaaatgggtggggaaattattattacccctccccttgggatttcaaa

SEQ ID NO: 9715 - DNA, 428 bp, Homo sapiens
ccgggcaggtactttcacttttgtgaataattttattttccaaccatggaagcatcatcgtgaggttgaaagaggatcattcttggaaaatacaattacttaacagttatgtgacctgggacaagttgagcctaaatgtcctcatcataaaatggaactaagtaaccctcataagaatgacgtagtgtatggacactgtttggcccagagtaggcagtgaaaaaattgtggccattctggaataatcttatagtctctatggtggggagatctgaaagccgttttctttccccttcccattttgtgtacgtatctgcctccactgatctgcacagggaagggtatttttttggttatctctttaggctcttaggatcttattcactagtttattttcataacattatttaaaataatctatagatgaa

SEQ ID NO: 9716 - DNA, 427 bp, Homo sapiens
aggtacaccaagaaccatcaccgattctgttgacggaacatgaagcagttacacggggcttaggcaggaagagcacctgaggacagatcatgacttgcagacactgaatttcaaaaaatattggtgatgtgggatcagatttgttttaggaagatgacccctggggctgggtcttgtggagggacagaattcctggggacacaagtgaaggttaggagaccagttggggaatatgcgggcgcagaagtttcggtgagatacaaagagcccacggtcaagaatttatgtcatcaggaggtgaacgagggaggacgggggtcctcccactggatgtgggccaggggaagaggatgaggaattcataggagtccaagacaattcccgtgtgtcccgctggaatctgaatggctggtggggaaccctcaac

SEQ ID NO: 9717 - DNA, 402 bp, Homo sapiens
aggtacccctcgtttggggttccaaaaaagagtcctctcactttaaaaaattaattaattaattaaaaaggcccagcctagaaactggaaggaaagaattctcatgtaatgtgtgtctatgatatgccaagcatagcagtgctctatttatatcatttatttaactcttatagtaaacccctgttttacagatgcaggggacgtaacttagtaggaagttacttatgcacagtataagtaggaaccaggaagagatggaacggaaattcaaattcaggtcagcctggcactaaaattcccatgtccttttctagtagattcctttacctctctcagagaatccttcaaaattcaaacctcaaaagtagattcatttggttctcctacataagcaatatcggg

SEQ ID NO: 9718 - DNA, 380 bp, Homo sapiens
  misc_feature 302, 313: n = A,T,C or G
aggtacttttttttttttttttttttttttgagacagggtttcaccgtgttagccaggatggtctcgatctcctgacctcttgatccgcccacctcggcctcccaaagtgctgggattacaggcgtgagccacccatccggcctaacgagacttatttttactcaactagatggcgttcattcatttgcttactcagctgtgccaggaattaagttgggcactgggaattccaaaaccaacaagacattctctgtcatcagggaactcacagcctagtatgagagataaacaaatgaacatngaaattataanttcagtaacaaagaatatgagtgttatgtgcagaggggaatgttgtaagaagacttgggcaggggta

SEQ ID NO: 9719 - DNA, 511 bp, Homo sapiens
aggtaccctataattttttaaaaatctcgcccctcattactcctccacctgacatccttttagacaaaggctcaaagtcaattatgcagacaatggcacctttctcttctgtagctgacaacccggctcttgccttctgcaacccaaaaaacagccctcgactcccaataaaatgaaaagaacctacgccagagggaaaaatctaggtagggtctcccaatgaaagcaccaatatttaaaagtccttaatggtgcccctttaacaatggcctttcaagcaaacttgggctttttttttcctttcacttttagatgaagaattttgaagaaagaattccactccggtaaattacccttttctgcctcgcccaaaacctttcttttagttcaaaaacttgaattagagtactctggggagaaagaatactttcttccaaccacttggggcttggaaaggtggcattggctttttttcaccacaaaacttgaaattaagggattggccaacaac

SEQ ID NO: 9720 - DNA, 377 bp, Homo sapiens
ccgggcaggtacctaacaaagaccccaatatatgaagcacaaatggcagaatggtagaagtagaaaattctcaatgtgaactgctgactttaatataccaactagacctaacggacaaattcagaaacacctaatcaaaaaccttgaaatgagcaaaaattgattgcattttcacattgttttcaagcaagcaatttaaccaccttgctattttatggcatgcttattttttaaaaaaaagttatgatgaaatatgcataacatcatactcagtacaaagtttctggtatatttataattatgcaactatagccatggtataactttaaaatatttccactatcaggactagacaatcattactgatttccctttta

SEQ ID NO: 9721 - DNA, 364 bp, Homo sapiens
aggtacccattcttaccagggagagctgggtgcaattaaagtttttcctgttaggtgcaagactttttgaatgactcatcatagttcctgcttaagacgtgtcaaagaggcccaaggctatatttaggaacttactatgaaattgcctgtcagttccaaccaatttttccaatatagtatatatgaagagttagtagcaagtaactttaaatacatgaaaaggtttttgttgtcattttttgttgttgctgtaaactggtattgaagattttcttaaacggatggacattcctttcattgtgaaatgatttaacacccattcagcatacacatgactatactggaatgaccctcatatgaccat

SEQ ID NO: 9722 - DNA, 449 bp, Homo sapiens
ggcccatattcgacgcaaatacgatattcgggcgaattgtagcttcaacgcgctggcggccgcccgggcaggttcacttggaaaggattaaaaccttaattttattcattagaaatggattaactacctgttacttaatataaaaaggatttacaatgttattcacaatgatatgcaatacttgaaaattgaaaataggcctggccgcctgtaatcccagcactttgggaggctgaggggagtgcatctcttgagctcagaagttaaaggccagcctaagaaatatggtgacgatccgtctctacaaaaaatacaagaagtagccgggcatggtggcgcacgcctgtagtcccagctacttggaggcggaggtgggctggtctcttgagcccaggaggcagaggttgcagtgagctgagatcctgccactgacctctagtctgggtgac

SEQ ID NO: 9723 - DNA, 393 bp, Homo sapiens
aggtactttttttttttttttttcttttttttttatttttagttgagacagggtttcaccgtgttagccaggatggtctcgatctcctgacctcttgatccgcccacctcggcctcccaaagtgctgggattacaggcgtgagccacccatccgggctaacaagacttatttttactcaactagaaggcgttcattcatttgcttactcagctgtgccaggaattaagttgggcactgggaattccaaaaccaacaagacattctctgtcatcagggaactcacagcctagtatgagagataaacaaatgaacatgaaattattaattagtaacaaagaatgagtgttatggcagagggaatgtgtaagagcttggcaggggatccagccggg

SEQ ID NO: 9724 - DNA, 517 bp, Homo sapiens
tgatgcgcgttccattcactatttggcgaattggatctccacctggtggcggccgaggtacatacttcagaggctagttggcaggagtcactaagttaatccatgcacagtgttcagcccagtgcctggcacacagtgggtgctcaaacaacagcttctctccctgcatgttggtcattagggtcacaggctctgaagtcaggctcctagggtaatattccggtccctatcacttttcaattgtaggaagatgggcaaattacatacccccataagctttaattttcttactataaaacagagataataattgtattctaccttatgggttattgcaagcagcacataccgtcacccaaaataagtttttaagaagtttctttgtaggtttcccagtaaggtgctcacctcctaatgaaattgaatgttcccccatttggaaatccctgggggaattaatgccattaattctgtgccaataaggaaccccggattttcccaaaggggttctcgggga

SEQ ID NO: 9725 - DNA, 361 bp, Homo sapiens
aggtacctttagtccttctttttgcctggaacatggactcaggaggtggaagagccaggatgtgttcatgagaacatgcagtgacacgccaaggagagcagaacaagactctagaaggctcccaagcctgtgatgaattgtaagtgcatgtttattagcccaggacctcctcctctggagttgttccatgagaaaaacagtatctcttttggttaaaccactctagggtttctgtggcaaggagaatgtcatcgctaattgacacaactcaggttttgtcttttatttttatattcaacaaatattagcacatatgcctgtagttatgtgccagtaactacgacagatactaaaagacagc

SEQ ID NO: 9726 - DNA, 405 bp, Homo sapiens
ccgggcaggtactatcttgcactttgcttcttcttcttaatgttttgactcaggcttcaccctagttaaagctcctttggcattttctccagttttatggcgccctttttttttccagttcagctggcctttgagctcctcttttgatgttcagtatgtttgtctagacagtctggccccaactctttgtcactaatttattttcgtattgtgatccatgatatacccccacaggctttaaataatttcaagaatgctgtttatagttgagcaaattataacctgcataaaggtggaaaatgagggagtaatggagaggtggggtgtggggggggactgcttgaaatccagcctggaggaaagggtgctttttctaattggtcaatgggtgtgccttaaaaaaaa

SEQ ID NO: 9727 - DNA, 402 bp, Homo sapiens
ccgggcaggtacagatctgcgttaatttttgacagctcatatatacagatttttagaaatgtaatagaaaatgattttgcacatatggtgcaagtcttgctggtgtatgtttaatgtggcaacacgtgccagaactgtttggcaaaacatgttaaatggagtgcttgagtcagaactctaatgtaaatgtgtctaaacagcagtatgtatcattatgatgtatttttgtaaacatagtgatggctgctttcagtcatgtaagtgctggataaaaataaccacttcagttggagtaatgtaggaaaacgtcacccagcagatgggtagtcctctgcaaagttacactgtcagccagtggcactggttcttttatttatgttgggctttttgtacttaaaatag

SEQ ID NO: 9728 - DNA, 464 bp, Homo sapiens
gggaaatcatgcacttcatatacggcgactcggatctcctccgcggtggcggccgaggtacttctttctttctttctttctttctttctttctttctttctttctttctttccttctttctttctttccttcttgctttctttctctccttccttccttcctttctttctttcttgtcttgccaggctggagtgcagtggcacgacctcagctcactgcagcctctgcctcccaggttcaggtgattctcctgaccttaggtgatccaccctcctaggtctctcaaagtgctggaattacggtgtgagccactgcgcccggcccttagtagcatcttttaatggaggtagagttgagatttcagtgactaacaactaaaggtattaaaggtaggggtttatatgatacatttgcattttagaaaactgatctaagcttcaatgtgaagaacagattgaaatggg

SEQ ID NO: 9729 - DNA, 417 bp, Homo sapiens
ccgggcaggtacagcatggagatcaactaattgtattaaaaattattaggaagatcagttatcttttatctttactaggttaagttgatgaatttgaggaacaaagtttcttcgttattgatagtaggatggattcttgttggtttttaataatcttcttctgggattttagtagaatgttaatacaaaattgctttcatagaaccttttgaaaaaaataattctattcattggaacaccaaaggaattctaaatattcaaaattgttttaatcaaattctgttttaaaaacgactacagtggctcacacctgtaatcccaacactttgggaagccaaggcaggaggatcgcttgagctccggagttcaagacctgcttgggcaacatagcgagacaccatccctaaaatataaaat

SEQ ID NO: 9730 - DNA, 396 bp, Homo sapiens
ccgggcaggtactgcatggacaggagatgcttagatctgaggtgaggaaatccagagatgaatgttttgtttacctcatgggattgtggcattgttagccactcaatccaaccagattataatgtattaagaatttgaaacatcagccattgtggtttcacatacacagatgtatattattttgttagccgggtaatgacagtcattgtcaagtggaagatctaatcagactgaatattcattcatgccttgctttgtcaatagggaaaaaaatttcaaggacaatcggatattctctcagatgactgaacctttctttccatctacctgaaggcgaggaaaggaggagggaaggaggcttggacagcacatcctccccgattagatccctgcccc

SEQ ID NO: 9731 - DNA, 515 bp, Homo sapiens
ccgggcaggtaccagcaaagatggatgtatacacatacacgagtcaatttactgtaatcctgtttcattagtgaaacacagagaaagaaaaaacaagaaaccacatgactgtccatcaacagatgatggctcgacataaactatttaattaaatccaattttggttgaacttgcttgaaaattttaaacttcggttttcaaaacttctcgcaaacaaactgtactctaaaaattgataatctcattacatctcgatgaataacagttaaaaatattgtttacctataaggacatataatatgaaggcttatttcaactaatacctaaatagcctatggatccttcattttctttattaacaaaaactccaaaagaacttataacatgcaattatattgtcactaatcattctttttccctaaaaggtaaggcatttaaacgaagtgaaacaccaacaaattttttacttattattaataatgctttttttattttttaaccaactttagcctatt

SEQ ID NO: 9732 - DNA, 443 bp, Homo sapiens
aggtacatttgttgggggcgtgacattaacatataaccacttagagtggacatgcagttagagaaaagtcaatgagctggaaccaagctgggaattccaacatgtagaagttaaacacaagaggaggagccagcaaaggaaacagaaacagagctttcagctggggggggggcattttggaagaaaacgatgccatagaagccaagatgaaaatagacatcaaggagaaggaagtagtcaattgttttgaatgctatgaagaaagataagaataggttaatagtccttatatttgataacagaggttactagtgatcttgatgaggggtttcaatagaatggtgggaatattataccttcctgggattcaactgaagtaaggaaggcatccaaaaataaagacgggctctataaacagctctcataattggattctaaccatt

SEQ ID NO: 9733 - DNA, 396 bp, Homo sapiens
aggtactatatgctagaaacttggctgaatgatttgacattatcctatttaatgttcatgacaatccaataacgtaaccactcatatctcccttttgtgcagataacaaactgaggcccagagaaatcaaatatgttgtcaaaatctacatcgttgaagagatgggtttcaaatccaggtcggcttggcccttgccacgacttcataatgaaattccatgggtgagtgttaccagtttctggtccatccttgcttatttcaagggtctcatcatcccatccactgtatcactttttttgttacaggctttactcttttctaccatggaaaagactaatgatatttttttctccataagcttggaaatattatcaatcaccataaaattcagccttc

SEQ ID NO: 9734 - DNA, 353 bp, Homo sapiens
aggtactaggaactgagtaatttggaaataacattaaccactttcatataccacacacctatcttgttaagtccaaaatgtcagtagtaataaggcttaatcattaagattaagaatattgttatatgtttggaatatgctaaatttatatgctcttctttgaccaaattcagtgtcaaacaaatgtcaatcacgtatctgatttattccctggtcggcattactgaaagaaaaatgtttatttaaatcagcatgtttcaatttattttattatttttttatactttaagttctgggatatatgtgcagaacttgcaggtttgttacataggtatgcatgtgccatggtggtt

SEQ ID NO: 9735 - DNA, 398 bp, Homo sapiens
aggtacctgaacaaatcccatcaaggacagattctcagtcttgaagaggcagcacggtaaaggggaaagatcatgagttttggggccaggttcccttggatattgcggggtccccacacttctggatgatgttggataactctttgagacttaagcttcacatctgtaaaatggaaatacttatttttcagagttgtcataaacactaaatgatttgacttatatcaacctaattcctactggctcattgaactcagctcagctgtcccctctgttcggatgccttccccagtgggggcttagttagggtataccttgctggattaccctgccaagctctttacacatatcccttctgccataaacactcattcttttgttactgaatttttaatttt

SEQ ID NO: 9736 - DNA, 345 bp, Homo sapiens
aggtacatttgttgggggcgtgacattaacatataaccacttagagtggacgtgcagttagagaaaagtcaatgagctggaaccaagctgggaattccaacatgtagaagttaaacacaagaggaggagccagcaaaggaaacagaaacagggcttccagcaggtggggggcatttggaagaaaacgatgccatagaagccaagatgaaatagacatcaaggagaaggaagtagtcaattgttttgaatgctatgaagaaagataagaataggtaaatagtccttatatttgataacagaggtcactagtgatcttgatgaggggtttcaatataatggggggat

SEQ ID NO: 9737 - DNA, 397 bp, Homo sapiens
aggtacttttttttttttttttttttttttaatagagacagggtttcaccatgttagccaggatggtctggatctcctctgacctcatgatccacccacctcagcctcccaaagtgctgggattacaggcgtgagccaccgcgcctggccgggtcaggctctttctaatctgtttaaaaccatatcacccagaaggtattcagtatatacttatttaaatgaattgaaagtcatatgagcagcatggacttactactttaaaaaccacattattagaaacctaacaccttggaagctctgcatattctgaatgaagaatatactaaaccactcagagggaaatagttattaaccattttaccacagacgactaaacaactaccatggcccttccctt

SEQ ID NO: 9738 - DNA, 412 bp, Homo sapiens
ccgggcaggtactttatcacaaggaaaacttattctacattatcctgaccatggggaaagacttgtattttggtaagccaattgttgcttacttattctctgacctaacacactctccttctagcaccccaagctggttccacagggctataatgcaaattcggatacatttctttatggaccttgaaatcagactgtttggcagagaacatagtccacattattttggaaagccagctgtatcaccggagtctacttttatttaatcttttacagccaagaaatctatggcatgtttttgccagtctccctgatatttacatggatgatgaaatgtccccaaatttcactgaaccacagcaaacactttgactactattgtggcaggactgtaataacattgagtgcccct

SEQ ID NO: 9739 - DNA, 429 bp, Homo sapiens
aggtacagttattatactgcatcttaaatagtggggtgatattaaatggttatattctggaagctcatgcccacactgcctttgaagttcaggctgcccagccacattcaggcattgattcaggaaactcccttggcctttcagtaagagagagctcccttatgccagaactgctttgaaatagaatccgaaacgtgttgtgcacgcgcttactgagctcgattccgatggggtcgcatcatcagcatagctttgtgatgggtaaccggaatgtacagagtgacccacctaaaacatttgcgagaccgtattcatctctcatctatagcattggaaaaaagcctcctaacaggcctccccaatttcatacttgcctacctaaaatatttcttacttgcacagtcagaatatttacatagaatgcttatg

SEQ ID NO: 9740 - DNA, 818 bp, Homo sapiens
ccgggcaggtacaaaattatctttattcagaagatcacatagcagcatgttcataatcaaaaacattttaccttagcaataaacaccagtcatttatgcaagagcttcccagggttggtagatatttttattgcttcattttgctctagttaaagaaatggaaaagatgcttttaacttattatcaatcctacatcaggtgtcaagaaatgcaaagcattagaaagagagagggaaagagggatcttcaatattctctgtaaaggagcaaattctgacatggtcatctcagacaccctcttttaattccaaagtctaaccttacaaaagcagagaaaggccgggcacggtggctcatgcctgtaatccaagcactttgcgagactgaggcaggcggatcatgaggtcaggaatttgagaccagcctggctaatatggtgaaaccctgtctctactaaaaataaaaaaattatctggacatggtggtgtgtacaatattttttgtctgtttccatgtgatatcaaatttattctttaatcctattgcatttacatgagtcaaggcatgaaagttcttgtgcttccatgaatgcagatgatactagcaagtcaacttgttcatttgctttagttaaaggccctggtgaattagtgtgtgctcgaatttgagtatataaaatgggaaatttcttttttttcattttggtgtaacaaattaaacagcgggtttaactgatcatccataatggattggattagggtctttcaatattcttgtacctggaccttggccggtctaaactagggattccccggctg

SEQ ID NO: 9741 - DNA, 377 bp, Homo sapiens
ccgggcaggtacttacgttgcctcgtgtcaccaaaattggtgtggctgctgtggtgcggggggctgcactgatggcaccccttcctgtcttcatcaagcagctgcccttctgccgctccaatatcctttcccattcctactgcctacaccaagatgtcatgaagctggcctgtgatgatatccgggtcaatgtcgtctatggccttatcgtcatcatctccgccattggcctggactcacttctcatctccttctcatatctgcttattcttaagactgtgttgggcttgacacgtgaagcccaggccaaggcatttggcacttgcgtctctcatgtgtgtgctgtgttcatattctatgtacctcggccgctctag

SEQ ID NO: 9742 - DNA, 376 bp, Homo sapiens
ccgggcaggtactcagctaagaagaggattgctttgggcataggaagcagaatgacgagttcagtcttcctcagtagttggagcacagttctcaaagcccatcaacactttggaatggatttgttgttttatttatgccatcaagggagagttgatatttgtgtattgctaaaaactactaaagtatgtcgatgcttaggtaggaacatacaaaccatatatcctctgggatctgcccaggtttctgtataaggcttgacctacgtaagatcctatgatgaagaccagaaaactttttttaaaagtaggtaaattaaaattaaaatcacgagttttgttcacattttgttcccatagggttccttagtgcaaaaaa

SEQ ID NO: 9743 - DNA, 483 bp, Homo sapiens
  misc_feature 76: n = A,T,C or G
tttagccctttagtatagcgcgaattggagttccacgtcagttgcggccgaggcactttgttctttatttgagatngaggtcaaggcgctcactgtaccaagacagcaggacccaggattcagacctgtaaaatttttatttcctggctggtttgtgtgccctcatgcatgttatttacagtgccatgttctttcacatgggaacactgacacaggtgaaatgggaggttccataggatgattgtgcaaaaacattaaagacaatcctagcagatgcagtgagttcaagggagagtccttgtggagtaacacgaaaggcctggtggatgagatgtttgaagatctaaatgcctgcagatagtgagctgtctgcaactaccacaaagcaaaatcatgggcgaaaactccccagggtaggatctggcctgagcatccccactgggagatgggaggtgaagggctctgtagtgcttaactgaatag

SEQ ID NO: 9744 - DNA, 612 bp, Homo sapiens
  misc_feature 168: n = A,T,C or G
cccgctcatataggcgatatgggccaatagcgagcgtccaccgcggtggcggtcgaggtactttcacttttgtgaataattttattttccaaccatggaagcatcatcgtgaggttgaaagaggatcattcttggaaaatacaattacttaacagttatgtgacctgngacaagttgagcctaaatgtcctcatcataaaatggaactaagtaaccctcataagaatgacgtagtgtatggacactgtttggcccagagtgggcagtgaaaaaattgtggccattctggaataatcttatagtctctatggtggggagatctgaaagccgttttctttccccttcccattttgtgtatgtatctgcctccactgatctgcacagggaagggaagtggttggtaactctctgggcactcaggatctctacacttggtagttgcccaacagcccatcactgtgtctttcacccctagggctcaaagtgacatttttctggccccatcagggtgtgctgcacacctgtgtggagtctttgccaggtgagctctccccatcccatccctgccttcatcaataaaaagctgagtcagggaaagggagtacctgcccg

SEQ ID NO: 9745 - DNA, 397 bp, Homo sapiens
aggtacaggttctttgaatgcagtatttattcacatagttttcattttctgtcctgacaaaaacttggtgatgtttgaatgattacagaacaaataggattgtggtttatgtttcctattatgcatatttggcagttgaattatgacattagattgggacatggtgagagggggcaggatacggggtaggaggaggggagcaagttacaaaaggccccagttccgggaagctgggctgagttgttctgtttaacttcttcttcctttattcctatggttttatgattgcaaattggcagtggcagggcagctctgactatatttgctagaagcagatgtccacattaatttagatgtttagggattaaaaatcatagagggtggcgctaggaaatat

SEQ ID NO: 9746 - DNA, 386 bp, Homo sapiens
aggtaccaggagggtattgatgtttgaggtccaaactgaaaacccatcacctccttcccactgctatagcagcgttagccctggggttcattatctagccagttcacaccttctaaagtggggctctgaaaatgtcttacttccctcacagacaaagcaattctcaagcctcctgagatcacccaccaaccagagcaactgctgtcacttggaggtgcagctgaattcttctaattgtgacacaaactcttgaaactgtaaatgctgaaagattaaatgaggttataacactcaggaaggttttacaagttaaaagtaagtcaaaatcaatagggtctttattttcataatctgtaaatgggtttaacctcttcggggaagtgtta

SEQ ID NO: 9747 - DNA, 450 bp, Homo sapiens
ccgggcaggtacactattatgtgctataaaggaaaccattgcaacaagaaaatgtcttggaaatttggctcccaagtttggtgaatctggagaatgtattttaatatggaaaatatggacagtcttctaatttttcagtttactttctctcctcttaaaaatatcactctattgtattattacgattttttttctttttttgtgatggagtcttgctctgtcacccagggtggagtgcagtgtcgtgaatccagctcactgtcgcctctacctcctggattccagctatactcctgcctcaacactttgggatgccgtaagctcacgttgggctaaaattttttgcacccattcagtttgtatatttaccagtgagcctgttatatttaccactgttccttcttgtctgggtaacgtaatagcagaaccctgttcttaaaactccaggat

SEQ ID NO: 9748 - DNA, 365 bp, Homo sapiens
  misc_feature 334, 359: n = A,T,C or G
ccgggcaggactactggcttcccagtggttgggttgagtataagcccccaaatatgagtaaaagaagaaaaagttaattcaatcaccaagtcttgctcgcatattaaaaattggatagatgaatgttcaatcatatgttttggcttttggccagccagacgaggtcaatttttagatttgaactgcttagaattcttcaggcaagtcttgatggagcacttcttggacagttagaactttaccaggttcacaggagagctcagatgaagcgaacacctcatccacactggtttcctttggagacctttactgttgagagggtggtttttcatangccgcaaaatgaacaagttgcaagnttgagt

SEQ ID NO: 9749 - DNA, 404 bp, Homo sapiens
aggtacaaaaggacactatcaacggtatagaaggaagagtcagggtctagacttcaggcccgccttcaccacctaccatggaaccttgatctagtcagtgtgtctccttgggtttactaatttataaaagaggtgggcagggcaggtattattcctatatttatgattatgatcaactaactagatgcttttgaaaatgtgtagcaccgtgcccaccttagttttgtttttctctctcctttctagtttatggtagtaattaatggtagatgttgtgggttctccaggaaggtattgttaagataacagtttctgaagactgataagtctgacatgacagatgactacttgccgtcacattttaaacatactttgaactgatgaaaatcatttcaaaaaagagt

SEQ ID NO: 9750 - DNA, 356 bp, Homo sapiens
aggtaccttcctccttaaatccacattccacatgagtttgtcatctttttagatgtatatttgggaagttgctccttgctgacaatccttgaaaagtgcccagttctcaggacccagttgaaataatttccgcctggggctgggcgcggcggctcacgcctgtaatcccagcactttgggaggccaaggcgggcggatcacgaggtcaggagatcgaaaccatcctggccaacatggggaaaccccgtctctactaaaaatacaaaaacttagccgggcgtggtgggcgggtgcctgtagtcccagctactcgggaggctgaggcaggagaatggcgtgaacccgggaggcggagc

SEQ ID NO: 9751 - DNA, 424 bp, Homo sapiens
ccgggcaggtacgcggggacacttcctgggctctgtgactctgacaaggcactgaatttagctgctactatcagttaaggctcagctcatatgtaatcagttccaggaccaccggtccccaggaagaggatggagaaattgaagctccaaatggctaagcaatctacccaagatcacacagccagattggtggcatctaaaattcgaacccagtcctgatgtgctgaacttcgcatctggatttctcaaaatgaagatgtggccaaggagaaacaacttcctattcctatcctgtagcctgccaagcctgagaagctacctccctgaaaatcttcctaggactcctcagcttcctcaatgctaccaaatacccactatctccatagacacacacaaatcccctccacccacaatgatgtcctgg

SEQ ID NO: 9752 - DNA, 349 bp, Homo sapiens
aggtacaagaagaaaggtcaatagactgttgtcatggaacaaaattcaaaacaggatgtataacagataggagagagaaaaacctgctggcagcctgggaatcgtgaatcttgcaggcatatttttggggtaaacaaatcagttggcagctgataaagagatcagtctgggcgttctgggtaggacaactagtatcaaagaaaacaattaagtgtggacagatttttcgaaccccctgatggtatggctgaggagcatatgaggcttgctgcctctggacgagctctgctgactctcttcccttcgcacgccttaagtaagccagaactgcgccactgtcctccttagt

SEQ ID NO: 9753 - DNA, 409 bp, Homo sapiens
ccgggcaggtaccctttatgatctagataaaccattgtgttcttctatagtttttccaactatatttgaataggtgaagttaatatgtttaatcataaaatgctctcagatgcttgcaaaaacaattactccatcagataagaacacattaaaaaatttgaaaaatttaaaaaaagtcattccagctatatgcaaataacttttagtatatgcatctgaaaagctaccaaacgtaacaatgaaactctaaacttgtagtagaaaggtaaatgcactgtgatcagctttcacatcacttcagagtatattctaaaacttcttagattctacattatttatagagtgaactctaaattcaaacatttctcaggaacaaaacgactcccatccaattatttaattagggaag

SEQ ID NO: 9754 - DNA, 420 bp, Homo sapiens
ccgggcaggtactgggattataggcgtgagccaccgcgtctggcctctaacgagatatttctaaaggttaggccttcagtcaagaattttaaagctggatcttagaggttatctaaactaacctctccatttcatagataaggaaagtgagtcccagaaaagcactggtttggacaagttcagaaagctaaacagtgactgtggatgtatgattctgtctcttaactcctaatccaaatgtcttctcactagataaggctgtgccttctacatttgaaggctcaaaccccatggatggatggagggaaggatgggtggagggatgggaatgaaaaaatgggatggaattgattgttttactcatttcatttccgttatgccagaaaggattgagcccatcttccccaatagtacaggtgg

SEQ ID NO: 9755 - DNA, 400 bp, Homo sapiens
aggtacattgcttctgttctctgtcactctgtttctgtgccagaagacacattgcttctcctcattctcttatgcagtgctgtttaagtggtggtccacaaattgttgctggatggtgatgagatcgattaggagtttatacctcaatgtaaattaatgcacttccttccttccttaagaatgtcttgccatgaaaatatcagcatgcctgtggatgtcattgatttaaatgagggcacaagttccgtatttccttgcagatgggtccagactgtttgcagactggccatggtccttgggccacactggaagaagaactgggctaagtattttttatgcctgtgatttaacttctccaataaaccgcagctcttgtaggatatgatggtcggctgtcagg

SEQ ID NO: 9756 - DNA, 385 bp, Homo sapiens
aggtactgcttgaatacactggccaccattgtttacctgttatgggacaggcaagatggggaagcaaaggaattattgccatcaaagagagaataacagcttacctggaaagttccactatttctaagaattacataatgttcatttgcctgatcatggaaggataccccccgtaagaatgggaatctgttcccctctactgatggctgctgggggcagaaagaatgatgttgcatttatctaggtttattagacaaagaaaagctacagcgttggtgagaacaacaaatccaggtaagactgcctaagaagagcctggccctgaaataatccttttcctcctttctgctcatcagactgggaccctttgtctaaactcctcctg

SEQ ID NO: 9757 - DNA, 390 bp, Homo sapiens
acgggcaggttctgcttcaaaaggcatgtataactaagacatatgaaaactaaaatgacaaatgggttattttcaacaggaacactttgaaaggaaaaagaaaacaaacaagaactgtaggatattctttttgaaggcaactgcatgatgctagattgtgtccatggactagatttctaaaaggccatctaaaatacatttttaaatacttattcctttcacaggtaatatcttacgaagtttgattatttttgaattgacataatatggacttaatatgggaggaaggtagttccaaaatgacagaagtaatcgcgttccacataacttttgtgtttgtatttacatatacaaacacatttttatcttgtcacaatattatctgaaaca

SEQ ID NO: 9758 - DNA, 413 bp, Homo sapiens
ccgggcaggtacagtcatatgcagtaaaggcaacaaatgcttgtccttgaatctgaacaatttctcaaggcattcaccgtctgcctttttcctagtttattcaatttgggataaaatgtgttgaatggaagttacgttacttttgcataaaaagaagtctaaaaaaatcacaatttcttttttcaagaatcaagttctaattcaattcatcaagcattaattaagcataaagttatattcaaagaagcactgggctaagagtttacggaacaaaggagacacaggtatctcacgagcttaaaatgagggatgaagaaaatatattcacaaataattacagttaaagacaacatgcggggctgggcgcggtggctcatgcctgtaatccaagcactttcggaggccaaggcagt

SEQ ID NO: 9759 - DNA, 384 bp, Homo sapiens
aggtacaaggagggcatgtcaaattcacagtaaaggagtctaaagcgaggccattatatgcttctcttctacctatctcatatatgccatttatgagcccacttaatataggacctgccctcaccataacgctcaggcctataagaacttttatacctacaaagacttcctcacacctttgccttctgctctataactggccatgtctgtattctgttcagattagagagaggtccactgaagctttccccaaaagttaggagacaaaataacaatgcccctagtaagctgacaaagggaaacattgaaaacataaatgagggccaggtgcggtggctcacgcctgtaatcccagccctttgggaagccgaggctggcagatca

SEQ ID NO: 9760 - DNA, 342 bp, Homo sapiens
  misc_feature 342: n = A,T,C or G
aggtacagtttcaataatatgtttttttaattgatgttaaatatgctcctagaagctgcactgcaacaaagtaatttcagagaaaggcaaactggattcagttttcagataataaatatatatgtgcataattaaaagagattgatgtttccagaaaggagcacaatggaatgaagaaggtggtgcagaaaggctgagccctgtgctattagtgatgagtttcaccggaggtcttttttttttaaataaaaacttaatttctctgtctttgaattctatgagatctctttcagacaaacacaacattctgaaaatcaaagacttggggattacttgggaaan

SEQ ID NO: 9761 - DNA, 391 bp, Homo sapiens
aggtacaagttctacaagttgccttttaataatgaatcacaactattactagggcatgcatggctttgtctagttctaaaaatgttaaaggatggaatataagatacagactgagatatgcttgattacaattagtctaccatatttaaatatgccgcagtgtattcatttaccaggtgaattattttccttcaaagtggtcttttttttttttttttgagacggagtcttgctctgtctccaggctggagtgcagtggcgtgatctcagcttactgcaacctccgtctcctgggttcaagcaattctcctgcctcagcctcgagagtagctgggactacaggcatgcaccaccaagcccagctaatttttttgtatttttagtagagatg

SEQ ID NO: 9762 - DNA, 463 bp, Homo sapiens
aggtactttttttttttttttttttttttttttggaatttgagtctcactctgtcgcccaggctgaagtgcaggggcacaatctcagctcactgcaacctccacctcttgggttcaagtgattctcctgcctcagccttccaagtagctgggattacaggggtctggccacccacctgggctaaatttttggattttttagtaaaaaaccggggattttcaccaatgttgggccgggcttggtccttgaaacctcctgacccttcagatggaatcagcccccgctctaaacccttcccaaaaagggcttgggaattacacaggttggggaagcccattcattgcccccgggccaaaaaatttttaaaaaccatacccccttttttttttttttattttccccctttttaagaaaaaccgggaagatctttggcttttctggataaccctaaggggttggggaa

SEQ ID NO: 9763 - DNA, 399 bp, Homo sapiens
aggtacgcggggtcccagaagacaggtattattgtatttagcacaaagcaaagggaagaagaaacactgtttatgtccaaaactatggggcagtggtcttctcttttacttttctttgctgctgttcatgaagcttgttaccttttcgctgtcttttttttgagacggagtcctgcattccagcctgggtgacagagcgagactccatctcaaaaaaaaaaacaaaaaacaaaaacaaataaataattgtcgatgacacattgatggctttgaatatggtccagattttgccaccatttctaatcatgattagtagagggcttattgtgaaccaccctaatgagagaaagaaagaactggggtggggaagaaggatggcaagaagaagcatgggaaaat

SEQ ID NO: 9764 - DNA, 779 bp, Homo sapiens
aggtacagatttgctacatcatatagcattttttagaccataatttagatctttccatcctccaactaagatttacctttttatatgaagctttaattactttccgcaacacttttgtcaaaatctgaagtctttaagaaccaagatgtttctgatgtttattttaatgttcagggattttggaggtgaggggctagaaacactgactcctgcccctgactcccgcccctgactcccgcatttattttcataaatgaaaatagtaaaataaattcattaagggtattatgtggagaatagaaacaagagtaaaggactgagagtatattagagaaaactatcataattttggcaagagataatggacatcgaagcttgagtgaaaataactgttagagaaaggagtagaggacctcgagatataaggagaaagtaaagtctaaacttgctaaatggactggatttgtgggatgagtgaaacggtgaagcaaggatgacttgaagtttgagttagctattagatctccaagcaattcccaggcaaatgttagaggattaggaaatatttagccctgttgagagaaattttgtgagtcattcacatataaaatggctttggtaagtccatggaaatcgaagaggtcacactgggaaccaaagaaaaggaaatttcccaagtgtggaagccacccctttacggccctttccaacattttgtgaagaggggccttttttttgggggggaaagggaaaaaaaaggggggggggggtgattatcg

SEQ ID NO: 9765 - DNA, 354 bp, Homo sapiens
ccgggcaggtacaggttctttgaatgcagtatttattcacatagttttcattttctgtcctgacaaaaacttggtgatgtttgaatgattacagaacaaataggattgtggtttatgtttcctattatgcatatttggcagttgaattatgacattagattgggacatggtgagagggggcaggatacggggtaggaggaggggagcaagttacaaaaggccccagttccgggaagctgggctgagttgttctgtttaacttcttcttcctttattcctatggtttttatgattgcaaattggctagtggcagggcaggctctgactatatttgctagaagcagatgttccaca

SEQ ID NO: 9766 - DNA, 448 bp, Homo sapiens
aggtactgcctgtccttctattcacagcacatgtggcagcaaaccccatattacagtgatacatccctgcatcccttataagaatatatataagctttgtttcctcattgaagcaacaagacatggtttctcactcgtccttatgttcctcatagctcatattatgctactgtgtttttagtaggaatgggtgcctatggtcaaatgtatggtctgagtgtactttatgttcagcataatatatttggattggcttgggagtttcagtttatattttccagtatacatattagcaattgtaagtatactatgatatttttacacgttttctattatatcaacctcccctttttctgttttttctttgttacagttttagtatttgacatattttatattattgcatgttccctttcttggggaccttatcattccgttctataaatcc

SEQ ID NO: 9767 - DNA, 394 bp, Homo sapiens
  misc_feature 40: n = A,T,C or G
aggtacaggcaacaaaagcaaaaatacacgaacgagatgnccataaaactaagaagcttctctgcacagcaaaagaaacagtaatagattgaagagacaacccacaaatgggaagagaatgtttttaaaccatatctcaggtaaggggttcataccaataatatgtaaggaactcaacccagaaatgagaaaacaagcttactaaaaaataagtaaaggagttgaatagacattttctaaaaacagacatacaaaaggccagatttttatcaaaaatgttgataaaaaacatcaacattcctaattatcagagaaatagatgtcaaaaccatgaagatattatctcacagatgttactgaggttattataaaaaagatgtggcggggcacggtg

SEQ ID NO: 9768 - DNA, 407 bp, Homo sapiens
aggtaccacagtttgcttaaccattcacctactaatgagagtaggttcccataggtccccatcatcacatccttgtagaggcccctctgagcagggatcagacagtcccactcctcgggagaggggacgctggagaaatttattcttaaactaattggcctcttttttttctgtcagaagaccatttcttagtgagcactgtgggaaattttggtcacctcataataattctaactgcgcctcactgctgaatattcaatggtcctacatttggattttgtataggaataaaggtagccctgttattggagagctcttgcctattgaaaaaattttttatgcctctttttatgttggtttttattcccaattttattgttcctttttaatatgttttttcaattact

SEQ ID NO: 9769 - DNA, 420 bp, Homo sapiens
aggtactttcacttttgtgaataattttattttccaaccatggaagcatcatcgtgaggttgaaagaggatcattcttggaaaatacaattacttaacagttatgtgacctgggacaagttgagcctaaatgtcctcatcataaaatggaactaagttacccctcataaaaatgacgtagtgtatggacactgtttggcccagagtgggcagtgaaaaaattgtggccattctggaataatcttatagtctctatggtggggagatctgaaagccgttttctttccccttcccattttgtgtatgtatctgcctccactgatctgcacagggaagggaagtggttggtaactctctgggcactcaggatctctacacttggtagttgcccagcagcccatcactgtgtctttcacccctt

SEQ ID NO: 9770 - DNA, 363 bp, Homo sapiens
ccgggcaggtacctcaccattccacctcattattcaaagctcaatgttgcagcccactttaagctgacaatattgatgactgcctctaaaatacaggacagggttacttataaacctttatacaggccggagtttcagatatatctgtggtagattatggtttcagcttgatgtgagagaataactgaaataattcctacccctcacccccttgccccctgctttttttttgagacagggtctcattctgtcacccatgctgcagtgcagtggtgtgatcacggctcactacagcctcgacctcctgggcttaggcaatcctcctgcttcagcctctcaagtagctggaaccacaagtacctt

SEQ ID NO: 9771 - DNA, 796 bp, Homo sapiens
  misc_feature 468: n = A,T,C or G
ccgggcaggtaccgggccttgtgccaaacaccttagatgggttatctctgaacttcacatcagtcatatgaggtgggtaatatcattatctacattttacaagtatggaaactggggattactgaggttatttgcccaaggtaacacagatggtagattctggagccagagttggaaactgggtagtttgctccagacccaatgatctagcatcctagatgtggtccattagggctctctcttttcatccgtttgtaaaagagaagttttcactttcttctcaaaccattgagaaacaacttggaactggaagtgcaaagggagaattctaaagaaagcgttttaaaaaggagaaagaacaagaaagcaggacaccatttcctacctttggtattctccaaatagttggcaccaattctcataaaaaaaaaatggcacaaaatggtgcatatttttacacacacactnttgtaatgttcatttaagatttgaccacaatttaattaattaaaatgatataccccaaatattggattgtctattgctggttcccctttgttagcatagactgtggtcttgtgcctttgtccccagggaggacttaccacagtggctgcctcagcaattccaggctttcattattccttccttactagagcatttctgagtctgttggtattcataaaatagttccccgtagacctaccttgaaaaagctatcggtactttacccaagaaaggcttaaaaacattgatatggaggccggaaataagagttaatatcctctaaaactag

SEQ ID NO: 9772 - DNA, 499 bp, Homo sapiens
aggtacctaaggaggcaacatctaaactggtcttgaggaacagccgaagatggcgaacgggacagttcctgaaaagggaatgtgagatttggcaatcaggatagctgtagcctttactacggaaaagtcagtggtggagacagcagacagattcagcgggctgaagagtaagcataaggtgaggatgggttgtgcaggatatatgaaaccattatttgtttgaattttgatacttaaatagtaaaggaaagtgctaatactttgataggggggaagttttttctaaaatgggttgggaactttgaaacatgtttttacttaccagaaatgaagaaggtaattgttgaaaaaggccctaaacgttatataatagggcaaatatttgggttgaaatcaaaaagcctcttgtaaaaggtcagaactaaaacggtcttttcaatcctcatagcactctttttatatatttttttatttcacttgcaatatttttttccttttg

SEQ ID NO: 9773 - DNA, 292 bp, Homo sapiens
agaagggcattctccctacttgtgtgtcatcttagggactctcactttgaccctgagtgtgataggaaccatggggaagtctgagctgaggttggacgtgaaaggtctcatgttttaacagggtcactctggccccctccactgagaacaggctgaaggtggcagggactgagtggagagacctcttgggagaccactgcagcaagtcaggtgagagctggaggtggcttggcccaatgggtagctgtgaggtcgagagcaatggctggagccaggaaacctctgagtacct

SEQ ID NO: 9774 - DNA, 394 bp, Homo sapiens
ccgggcaggtaccatttggaacttatttttatttaagttttagctcaaggttctccagaatctgggagttgagaaaatgccaatggaaataggaaatatgaaatatccaggatcaatggtagacttttcttcttactgtaacagtgctctgggcacatttcttaccttgctatttttttggagaccaagaaaatattgcatctatgtccatccctacatagacctcacaaagcataggtcaaattctaataggcagccatgattctccaattttttgttcacaaataagtcgactgacttcctaattggagtcattgggggtaaggagcaacggacaatgtcagagaggaccacctcacaggtggacttgtgaggggctgggaaaagaaaagac

SEQ ID NO: 9775 - DNA, 402 bp, Homo sapiens
ccgggcaggtactttgtttttcaatgcaggacttctgcctacttcaaagaaaggggttcaaaagtttctcaaatgatttttaagtaaaagtctgttagattttttaaattagtaactgaatatgtatagatttcaaaagttctatacacatatatatatacacatatctgtgtgtatttttttaaaacctaaacgagaatattctgcatccttacgttgtcatttttacttaatactttgtgttacttcttacttttgataaggtagaaacttgcttttggtaaaaaacaatttgaccattaatttggtcataagaaaacaaatgctgctaccctgtgatgcccagtgtctaataaagattttttttttttgaggccaggctggtatgatcttggctcactg

SEQ ID NO: 9776 - DNA, 425 bp, Homo sapiens
aggtacgctccagcattacctctaagcaaaccttcaaatatggctactgtagaagcacttctctcagcagcacccctcactctttcctcaatgagaaaagaagttgaggccccaattgcatcctctttactgatccacccaaaacaaactccctgcaggaaagtagagggataagatttccaaaggagatgctgaagagtaaaaagcaatcacacttcaaaataggactttacaaataattaacaacagctccagatccatcctgttctcttctctagaaccactagaaactctcagatctgaaactgtatcatagattacacacctacatatcccactccatgatacacatgttgaacttcctatgtccatatccatcctccacatcctcagagttagcaaacgagttagacatctaagacttt

SEQ ID NO: 9777 - DNA, 415 bp, Homo sapiens
ccgggcaggtaccctgagaacagcaataatgcacaaacattactattccaacagctgcattgaaacacccttggtaggattgggaaaaagatggattattgccatttggacactccaggactgtccattaatactcctgactaatggaagatgataaagattgggcaagaaaaatgactgcagcaaacgccttggcatcttcaacttgtcacctttagcaagaggcctcttcaacagttcttggactgtgtttggcagccaggcactctcagaacggcaaggagacacagctaacatgatctttgcaatgcaacaaaacaagcgatcttgaggcgacagagtccaaaagatgacagaaaattcatccaactcctgaagcatgtgatgccaccagaaagccttggcaacagccctg

SEQ ID NO: 9778 - DNA, 388 bp, Homo sapiens
aggtacctactttgtggggttattctgagagttaaataagaaccaaggagatcctaaatatattcatccaaccaataggtatgtcatttttgtagttgcttaggagttatttctagatgaaacagacaaaactctgtgcttttatagaacttattttctagtggggcaataaatataaaaagttaccatgacttccacaatggcagcatgaggacctctgtagacctacttctcagtgaagtgagcataactgattaaaattatgtaggtctttgggatcccagagcacctttagtctcgggagacgctctgccagccagaaatgatggaagaattgcatagcctggacccacgacggcaggaattattggaggccaggtttactaga

SEQ ID NO: 9779 - DNA, 395 bp, Homo sapiens
ccgggcaggtactttattattccgagagagaaaggctagcccgaaaaagctgttacctaagcagctttagcataattgctctctgcacagaagaaatctctagaaatccaattttctctttggataagactaaagaaccaattaagaaattgagctccaaaattcctgtgatcacagcccacatggcacacggggcagcccagtctgcattgctgagggctgaatatctgttttcccaatcacctttctttgcttctttctctttcttgagctgcttgccttttagctgctttattgctcattaatatgtccactggaaattgaaagagggaggaaagggggctcttaacttctgcatttctacttattagtggcttttggttaaatggttttcg

SEQ ID NO: 9780 - DNA, 410 bp, Homo sapiens
aggtactagacctccctgtctcattctcattgaaacattttcttttggctttcataaacctttcagaccaatcttccctcctccttctacttgctccttaaatgtcaatgttttccagggttccattcctacattttgctcatttcttcatccaaccctcattcgctcttgactaaaatttgaccctctcagaatcaagaggagtttgagatcctctttgctacccacacttgttttcaaaccattacttcccctcatcttaaaaagccctctgggctgggcacagtggctcaacactttgggaggccaaggtggcagatcacttgaggcccggagtttgagacaagcctgggtgacagagcaagattctgtctcaaaaaaaaacaaaaaccaaaaacctctgtttcttt

SEQ ID NO: 9781 - DNA, 392 bp, Homo sapiens
aggtaccaccatgcctgactaatttttatatttttagtagagacgggatttcaccatgttggccaagctggtctctaactcctgacctcaagtgatccgctcacctcggcctcccaaagtgctgcgattatagctgtaagccaccgcgcctggccaggagggtctatatttaatgtcagacatggcccctctcttacaagagcaggtccaccaagtccaagagggtttgagatgcacagagggacacacataacgaggcagagactccgatccagtccactctgaaaaaaatccagctccccagagttaaggaccctcacaccccccttgaacaaggcctggtgttctgggaatattcaactcgagtctgcttcctcgctcggccttcctct

SEQ ID NO: 9782 - DNA, 388 bp, Homo sapiens
aggtactggtagtttaaaatatctcaatatgaaatggctgaataaaatcatcacattttcattttatatcaatggttctgaaagaatgatgcaagaaaaatctctaaccttagtgagatgaattttgtaaagttcagtgaattccttccatgcacatttgaagccagtccaggtttttcgacctaagtggcctcagtcatgttcagcacctaacgaacaaatcatctcctgtctccaatgtcattaacaactctatgggtgaatgaggatcactaactgtggagtaagaaggaagcaggcagcctgtttccaataacatgttgtgattcaaccacaatcaaatgttataaaactaatgtcttaaagttaatttgaccttgaaatgtct

SEQ ID NO: 9783 - DNA, 383 bp, Homo sapiens
aggtaccctggagccttgagcaacgttcttttgcattatgccaggaagaactgctggcaaatgtaagtgggcttagaattcatgactgcagtcagcagcagttgtgtaaatctagggagagactggtatttgacacctgcaagtcctcaaggttaacagaagtctcaaaaagcccaagccccagattttgtaaaatacatggtttcaccccaacctaatcaatgtcaccaagaaaacttgtaagtccaataagacaaacaatagttaagtctgcagaatatttccatatagatttagaagtatatttaactcttaattctctgctttcaatatcaattgtttttgagccttttcttgggtaaaagttaccgaatgcttttttt

SEQ ID NO: 9784 - DNA, 518 bp, Homo sapiens
  misc_feature 250, 310, 311, 320, 322, 323, 353, 354, 355, 380, 381: n = A,T,C or G
ccgggcaggtacacagttaatagtagtattgtataagccatgacagtgtagctccctttcattgttttaaacatgtctgtcttacttgagatcttcctatttaaagcgaaaaaagaaatttttttaatttccaaggataaaagctggggtgataatttttaaaaaacctgacaattaatttttgcgttattatttttcagtgaaacgaaaagccagcaattgtaataaatttccgttcatgaatgataantttagggctctttcaaatattggaagcccaaagttctaacctttaataaccttttaatannaaaaatatntnncatgtgtagcaccccattaaaaaccatttnnngttttagggaaatatatttatttgnnaaaatgggctttttttaaccttttttccttggccttcaactgtggtggaaaagaagtgaaaattgggtaagtttggtaaaggccaccatttatttcccttgttaaaaaaaccaggctttaagtcatttccaaatttg

SEQ ID NO: 9785 - DNA, 413 bp, Homo sapiens
ccgggcaggtacgcggggagtagtaagccacattactcagttgtgagggggaaggtagactctttccagacctttgataaaggggctgctcaaaaaagccacgaccttgggcctctgctaaaaccatggctttaagtaaggagggaaccgattttttaaaaaaccttatcccctctttctaatctcttatgtcctgtgagtgtcacccattgagtaaacccaagtggaagtcagcaggaaagtagctgggatgatgcagtctttacagggtctctctgtcacccaggctgaagtgaaatggtgtgatctcggctcactgcaacctctgcctcctgggttcaagtgattctccagccccagccttccaaatagataccagtaaaaatgtcatctggccaatttgtgtgaaaaaa

SEQ ID NO: 9786 - DNA, 461 bp, Homo sapiens
ttaacactatatagggcgacttggagctcctccgcggtggcggccgaggtactactattttggttagttgtttattgctttattttgcagatgaaaactccgctattgagagaggtgaaatattctatcccagcagaaaatcttccagtgagtcaaacatctgctagtgagttgacaaaaaaaaatctaggagctctttccgtcagcacttggaaatattcttattgttactgttggatgacccctggtttgtagacaccgcctatagggcaatggttgggttcagaattacagagcgagaggcataagcatcatagcacagagaaacatattaataaaagcctctgagaaataaaaatgagatcccaaatccaccaactgactgaacagaaccccttttggccaaggggacctcaaagtaatcttgaaaattgagttctcagtcatggacggatgtgagg

SEQ ID NO: 9787 - DNA, 360 bp, Homo sapiens
aggtacagaagggggaaatatgccccaaatgtcaatttcctcttgcagcactatatgtggctctcacagtggaagacggaagcaccatgaaatgtgggatacacaagataactgaaaatgtgagatgttcttgatgagttggtggtgacctttgcaaatttctccagttttgaggaattgtccttgagcaagtcagtccaagcagattttattttattattttgagacaaggtttcgctccatcacccagagttgagtgcagtggcacagtcatggctcactgtagccttgacctcctgggctcaggtgattctcctgcctcagccccctgaccagtagctggaactacaggcacatgcc

SEQ ID NO: 9788 - DNA, 332 bp, Homo sapiens
aggtacatttgaatgagtaaataaagcaaagtcatatacatatatcactcttactagcagtcctggtaactcccacctgtttgttattggagtaggggtggcaataagctgctgttttataaatttaaggagtctcaggggtcatatcaccagttccaaaaaataaacgaattatgagattaacagtaaaatgtccattttaatgaaaatcctatgctaattcaaatgaggaccctactgttgaagaaacatttgctcttcacacataaacatgaaatataccctaactcatttatgagctgcagtcttgaatccaggcacaatatatcact

SEQ ID NO: 9789 - DNA, 486 bp, Homo sapiens
aggtacttgagggcatcattaaaatcagccagtgttcagtgagagacttaatgatggatttaatagtattaaatgggcaaaaatgcccttggcctttacatgctcatttaaaaacatataacaagagcacgtaaattcaggcaggttatcactttctactcaaagcatttttcgctcttaaagtcacaaaatgtgcaagccgggaggccctacggcttgattgtgctaggcctctacaactcccacgtcacttcccaaccggaagcacagaaagatgcatcgtatggagtcattaaatgtagcaaaaccaaccccgacaaactcctactacttattaaaatcatgaggcccaacagagctgccctgtgcctgggggacattaatacgtgggagaaaaaaacaatgcgagacaatggttccaagggtagcgtcttcttggaagacacctgccctttcggaaatagccttgttgaacccccccaacag

SEQ ID NO: 9790 - DNA, 508 bp, Homo sapiens
aggtactccttcatatagtagtaggttcagaaactcaggctaaggaaagcatccagaaaacattgtctgcctctgcaacagtttgtggatagcttgtaattgtagtttctgatcttgtcaaatctgtcttataaactctaaatgttgtggtcctcaccttggcttagattaccagaataataccctattcttgcttattagaagtcagtgcaaattccttcatacccctattaataaaaagtatgagttttcttaggaacatttccattctaaatagagtatatgctcatgttttgctcttccttgtattattgtttgacctagttctaggtccaatttttcagactatgtcacattatttcatgtcaccttagtaggaaggtacttttcagataaaaaagttttccttatgttcaggtaaaagttctttcccacgccaaccattatttttgtttttctcagagttccttaattgggcaaatttcccttcagggaattcttggaaaaa

SEQ ID NO: 9791 - DNA, 463 bp, Homo sapiens
caattgagctcaccgcggtggcggccgcccgggcaggtacgcgggaaggacagattctcagtcttgaagaggcagcacggtaaaggggaaagatcatgagttttggggccaggttcccttggatattgtggggtccccacacttctggatgatgttggataactctttgagacttaggcttcacatctgtaaaatggaatacttaattttcagagttgtcataaacactaaatgatttgacttatatcaacctaattcctactggctcattgaactcagctcagctgtcccctctgttcggatgccttccccagtggggcttagttaggtatccctgctggataccctgccaagctcttacacattccctctgccataacactcattctttgttactgaattataatttcatgttcatttgtttatctctcatactaggctgtgagttccctgatgacagaga

SEQ ID NO: 9792 - DNA, 839 bp, Homo sapiens
  misc_feature 114: n = A,T,C or G
ccgggcaggtaccctgcacacactatgttctcaagaaatattcatgtaataagtgaataattgaatgaatgaatgactaagtgaaacttctctttacaacaagcaaatgtaatnaggcctttctaagctctcatcatcctcattgtccttggtggattcccaccacactcagaattccttttcacctttccatgcatatgaggccccacctaatcaggtgctggtcttcttagctttctgtctcctaccactttttgtcttgcttcgggaactccactgtcttttctgttataggaacatgctaagggtattcttcatagtcaagagcacaagctctgaacccagcccaatctgtttttgaactcaagttccacttatgtgctaactgggttatatcgtgagaacatttatgtactgtaaccctcacctccctcatgtgtcaaaaggaagtaatgatggtgcctcggccgtacggacaaggatctttttcatcataattaaatattttagaagacaaaattgtttgaaatattcaggcggaacgcatttgcatagatatacacgaagcactacattctgggatttaagcgaatatttatgcctaaatctacacagataattgtcaggtacgcgactgatgggtatacatatacatgacattagagtgattcaaaagtcactagacatacgactatacgagcgataggaggcatacgtatgagatacgtgagagttttagacattataaactggtattgaagatagattttacacgattgcgtaagagtaattcatatgatagacatctcagatatgtgatatatgagatacatcagact

SEQ ID NO: 9793 - DNA, 405 bp, Homo sapiens
aggtacaaatttgatcattttattatatctgaaacagactaaaggcaggttgactgtgaggggtggcaggaagcttttgggtgatagatggtgagtggtctgtagtgctggttattccatatagacttctgtcaaagctcatggaagtgtttgtttaaaatgggtaaatttattacatatgttatacttcactagtgaaatctttaaaaactatgctggtggcttcctgtcatcttctgaataaaccctgattcttctttttcaaggtaaacaagaacttctggtgtgccttccacctttcccatacctccctccatcctcacctctaacctctccacttcaaattgccatctgcacctcagttgcgagctgccccctactcgtgtgctcttgcctctgggtcta

SEQ ID NO: 9794 - DNA, 929 bp, Homo sapiens
  misc_feature 141, 167, 168, 189, 326: n = A,T,C or G
ccgggcaggtacaatgtcctatatttacgaggaccttactactcttaaatcgctgtcgttcaaaaacaaaacaatttttttcagcgtgttcttatatgcccattactgagctggtccctggggatgcaaagacacatgganctctcattgttttcctccaggaaatnntcacttggaaaaagaaacacngggagatgctgcctagaatccttgatgcctccgaagttagactggagttggattaacccggcctctctctgtggaaataggagatggctagaagagtgacatcaatcagccacaactgcttcagcctcataacgtcngagcaatggtatcagacttgatgcagagaactacccggcatatgtggctttttttttttttaaaatgtagtgaaaaaatttcaagtcacagcccacaacactggactaatcaaaagatcatttcatgttttggtttggattaaaatgctcttttgcactatggctttttgtatgagaatgcttgagaaattctatgaaataagggagtggttgaagaagaatccattgttatagagcagggaacttaaaagaatacaatctcttggccccctattttctcttcccctttctgaattttaaaaaagaacactttcaaaccggatgaaaagtcttttattgtaaatggatggggaccaaacttcaacgtgaaaagtgaaccctttcttttttttttttttttttcaacaaaatcttggggaatgcccatttggacctggaaacaaaatttttgctgtggaaaatacttggccaagggactttttctgaaggcccccccaatggccaaaaaaggactggtgaaaaggccaaactgggcaatatattggggggaaacgggtttcttattgaagggaaggccaaaaccacatctttttatgggggtgg

SEQ ID NO: 9795 - DNA, 387 bp, Homo sapiens
  misc_feature 279: n = A,T,C or G
ccgggcaggtaccctacctgtaatatttgtattaataatatcttattagcattttaattagaaatttaatattaatgatttggaatcagtagttttcaacaattttaatagtgcaaatttatttgtagtatttgatggggagatatggtgttttgtgactatatttacaactggatgtatctgggaatatctcaaagtttctcccaaaaggaaaacatttctattacaaatatgtgacttgtgaaaataatttgtaattcttttcaatatatctcattnttttttttttttttttgagacagagtcttgctctatcacccaggctggagtgcagtgggggcgatcttggctcactgcaacctccgcctcctgggttcaagcaattct

SEQ ID NO: 9796 - DNA, 568 bp, Homo sapiens
aggtacgcggggacagagagaaggttaagagcaacaagatgggaggcagctgcatggaacctgtcccactgaggaagtaaaacagagttttactcttgttgcccaggctggagcgcaatggtgcgatctcggctcaccgcaatctctgcctcctgagttcaagcgaggagcaagtgagtagctgggacaacagccctacctgatggactggacttctgcctggattggagtttgatcatgcctccatatgggtgtttaccaggcgtatgcattgaacctgagtttgtcccttcaatacaaggaaaatctctgccgcttagtgattttccaagaaacatgagcttctgcctttcaatgaggaagatactcagaagtcatgttcgagcactccggaaaatgtccttggagtttcaacatttctttggtcttccacatttcattttgtcctgattaaagaggaagccagttgctgtttgtgtggccatgtgagcaggcagggagatggtggctgcctagaagccaagagaagtggcctaaagatgaaatctaccttgctggtacctggccg

SEQ ID NO: 9797 - DNA, 423 bp, Homo sapiens
aggtacttttttttttttttttttttttgtatttttagtagagacagggtttcaccatgttagccaggatggtctggatctcctctgacctcatgatccacccacctcagcctcccaaagtgctgggattacaggcgtgagccaccgcgcctggccgggtcaggctctttctaatctgtttaaaaccatatcacccagaaggtattcagtatatacttatttaaatgaattgaaagtcatatgagcagcatggacttactactttaaaaaccacattattagaaacctaacaccttggaagctctgcatattctgaatgaagaatatactaaaccactcagagggaaatagttattaaccattttaccacagacgactaaaccactaccatggcccttcccttgtttcagctggtctgggtcg

SEQ ID NO: 9798 - DNA, 397 bp, Homo sapiens
ccgggcaggtactaacattcaaaaaaccataaatatacatccacttaaaaagacacattccagttacgatacccttcttaaaacagaagtctgattattttatatattatctgatactgttactggcttgctattttgtgagctataagaagtaaactgatggttaaaatactataaccttgaaaatatacactaaccttcattatccaaaagaactgtcaaaaaacatagaaaaacagaaaacaaaccttttgaaagctttgtttcttctaccgctttggttagatgcccttcgacgatcagcttctctgccaaggaaaataaacgttaccatccaagcccaaactgagcagcatttccctgagctgggcagtgtaacacattccatgaccaaatt

SEQ ID NO: 9799 - DNA, 816 bp, Homo sapiens
ccgggcaggtacatttgttgggggcgtgacattaacatataaccacttagagtggacatgcagttagagaaaagtcaatgagctggaaccaagctgggaattccaacatgtagaagttaaacacaagaggaggagccagcaaaggaaacagaaacagagcttccagcaggtggggggcatttggaagaaaacgatgccatagaagccaagatgaaatagacatcaaggagagggaagtagtcaattgttttgaatgctatgaagaaagataagaataggtaaatagtccttatatttgataacagaggtcactagtgatcttgatgaggggtttcaatagaatggtgggattatatacctccctggattcaactgaggtaaggaaggcatacagaatagagacaggcactataaacagctctcataattgcattctagcaattagcacactgtctgatggggaggtggctcaatctttcttgcataactgaatgaatgagtaaactatctatccatccatttatccatccatccctccacccatcctttcctacatccatccatggggtttgagcctttaaatggagaaggcccagccttatctagtgagaaaaactttggattaggagttaaaaaaccgaatcatacttcacagtcacggttagctttttgaactggccaaaccagggctttttgggacttactttccttatcatgaaatgggagggttggttagatacacctttaaaaccagctttaaattttggatgaaggcctaccttagaattttttggtgaaggccgaccgggggtaagc

SEQ ID NO: 9800 - DNA, 393 bp, Homo sapiens
caggtccttgggcttttgtttttaaaacaccaatgagtatatgctcattaagatagtttgatgcaataaatccttattttacttgcctctattactgcattgtaaactgttgtctactttgtcttcttgaaatcctacacctcccccagcccccacatttggcctatggaacattactttatcctgattttccccctaaccttctggcaatgcctctcagactccttccagaactacttttctctgttttccttttaatgatgacagtttatgcaattgtgtcttcaaacttataacgacccagacaatagtaataacagtcaacatttactgaattcttacttgtgttaagtgctgttatatatgatattttaatctttgtaaaatcttata

SEQ ID NO: 9801 - DNA, 384 bp, Homo sapiens
ccgggcaggtaccataatttagttattgctcagtggttgaacatttaggttgcctctagatttttctatttattagaaacattcagggtttctagatttttcagttttataaggaacattccagtgaacactttcgtggaagacttttgcaggaatttcaacacctaattttgttacaaccctaactttctccatttgttttgatgagtagtaaatttttattttgaaaaagtcttaaggcaaaataaatgtaatgcacttatatttcaaaaatataattgccatatactacctataaaataggagtatttcaggaaatcaaacaaaaacaatgatttttctcaagcataaagaactatgcctggtatgacctgctccttttga

SEQ ID NO: 9802 - DNA, 367 bp, Homo sapiens
ggcacgatggctcacacctgcaatcccaaagtgcaaggattacaggtgttgagtcaccgtgcacggccccaagagatggtggtggtggtttgtttttttttttaacagtagaactgtttttttcgtttccattatttatttcctgattcacttataaatgttggagctattgaagcaattggaatttttttgaattatagttaacaatagtaaagatgtatcttaaaagatatagtagctttatttatcatttaatagtaatgtaatataaggccttacttgtgtgttccataatttttactttctgccagtatgaaatagccaaaagtgactgaaagccagtaattttcatatcccgtgccagttt

SEQ ID NO: 9803 - DNA, 404 bp, Homo sapiens
ccgggcaggtacattacagagcatatgatctttcaaggttttgttccacatgtgttatgcatagtaactgctcatttctattaaaaatactcataaattgaatcacattacaaataagtgccatatacttaactgagcaatatacacacatacgcattcctgataggtgatacaaaggcaagaaattctgagaaattttaagattgtgatctgtatcatttggatggtatagcaggagtggcagagggaggaacgtttcctaagttcttcacttactggctcctgcacttaggtaggatcatgtcactagtgctggccaatgagcaaaagtatggtgtgccatttctggagtaagggaaacgtatgtgcaatttctaatttattttttctcttccattgatact

SEQ ID NO: 9804 - DNA, 421 bp, Homo sapiens
ccgggcaggtaccgtaaaatacttgttttcttaactatatctcccactgggctcctggaggacgtgatcatcattgttccccaagtgcctctcatatatttggtggtctataaatatgaaataacaaatgaatgatggtgctatgaattcaaccacacccacacttcttttcaccatctgagagaaacagaaggatccaaatcttggtaatctaaatgcatgcctccaatacaaagatctttaataatcaccaggcctgaaccacttcttagcaattggccaggctgcaaggagccgtatcaactccttactaggacagcttaagcccctgaagaaattatctcatgcactaaggaatgacctgacataaaagcctacttgaaaataagctgatgcctgcccagagggaataatttaaaat

SEQ ID NO: 9805 - DNA, 387 bp, Homo sapiens
  misc_feature 342: n = A,T,C or G
aggtacatttgttgggggcgtgacattaacatataaccacttagagtggacatgcagttagagaaaagtcaatgagctggaaccaagctgggaattccaacatgtagaagttaaacacaagaggaggagccagcaaaggaaacagaaacagagcttccagcaggtggggggcatttggaagaaaacgatgccatagaagccaagatgaaatagacatcaaggagaaggaagtagtcaattgttttgaatgctatgaagaaagataagaataggtaaatagtccttatatttgataacagaggtcactagtgatcttgatgagggggtttcaatagaatggtngggattatatacctccctggattcaactgaggtaaggaaggcata

SEQ ID NO: 9806 - DNA, 518 bp, Homo sapiens
aggtacattttacactgtcagctatgggttcagtcagatatgcccataaattcatttatgaagaagagctccctaaacttctaatgattttttcctggtggttttatttagctccaaaaacttatgttttttttcttaaaaaaattcccataaaatatattcatttatcaatacataaatatttgatggatatcaactcaagaaaggtagatgtcctcacttcttaagcattatttattaaaaaatttcacagggcagttccacttttttcttaggaaaatatattgccaggtgaatcccttcttagcactttattgtcattccttgggggatttattaaaaaccaaggcttgcttgaagcatgtcctttgtacaaccctgcttctttgtgaacacaaatgtcttcccaggccttgctttaattttttggcccttattaaacttcttcaaaaggtttgtattggggcccctggcctctttaggaaggggaagggttattgctaacacaaggaattgct

SEQ ID NO: 9807 - DNA, 425 bp, Homo sapiens
aggaactggatatttttgcatataaacttgcatttatatttcaaaaattaatagttattgacgttggctgttctgagaagagaaattgaaagtgtcacaaaataaaaaaagatgaaatgaagcatatataaattgtcaattttttcaattttctagccaacagagaatcgaaggattctgttcaaatattaataaaaattgaaaataaacttgtgcttatattttgtttgcaacacactagttaatttaacctgagactagttatctttaccgaaagtggaagtgtaaattactggttttaaaattttaagccaaccgggaaaaataatccttctaattttgcttatctttcccaaaaaatatttttaatagaataaccccccttttacaaaatttggaaacaaacgccttaaatagccaatgcc

SEQ ID NO: 9808 - DNA, 417 bp, Homo sapiens
  misc_feature 358: n = A,T,C or G
aggtacccagacctgcaagagttgtctcaaacaataacaacagtatacaaatgttaacccaatcttaattcagaacagcttaaatgtaataaggtaaccttggaaactatggcgagctctcaggtagaagctagaactctgtttcacgtgacagaagcagacagattgttaagaatctgttatgagtggagtcccatgccagggcttaccctggccaccacttactagcggaagccttgagcaaattctgcagccgttgtgagcgtcacagagtggtgaatgtaaagattatataacattctctatggtcagtgtctccgcatctagcacccctaagaaaatccaaatgccacctgcnattgtgacagggacaatctctgggtgctacttgcaccctgcgaaatccaccctctccag

SEQ ID NO: 9809 - DNA, 388 bp, Homo sapiens
ccgggcaggtacaataattagatcatggtatcaattcaaacaaagaaattgatgtcctgggaactggttatacaaatacattatttcttctctttgaaatgagtagaaggaaagggaactaataataaaatatcacattattgcctacccactaaaggcagcctgaaattttacaaaacagtcttcctggggtcgtctcgatggtgagatataactgcctttcataatactagaagtactgagacagaagaagaggctgggacccatctggattggctgtaggtaaatttgtttgtgctgggggctgcgttgggactgcttgacgcaaaaacacaacattggtctgagtccgaggtgtcccatttgatattggggcctgggactggcc

SEQ ID NO: 9810 - DNA, 398 bp, Homo sapiens
aggtacaaaagcctgacgatatggtcttgaggggtaatcctaaggctgttagaccgaaattaaaacaaaccttaccagtagatctgtgtttttaagacagctctatttaagaggaccatgctgattataccaagagataagccccacagaatgtaagggtgatcacttcagcaaacatgggcatggcattgcaattttctagtttttcacctcacagaagagcaaagatctcacaatcacttcgttaaatagcagcggattcctcaagacatacagtccgtggtatgcatgagcctgagtaagaggttgactttaattttttcagccttgaaaataaaaaaagttaaatgctcacgtatataattggttcaattatcactaaaataaagcagtgctga

SEQ ID NO: 9811 - DNA, 416 bp, Homo sapiens
ccgggcaggtacatttgttgggggcgtgacattaacatataaccacttagagtggacatgcagttagagaaaagtcaatgagctggaaccaagctgggaattccaacatgtagaagttaaacacaagaggaggagccagccaagggaaccaaaaacagaagcttccagcaggtggggggcatttggaagaaaacgatgccatagaagccaagatgaaatagacatcaaggagaaggaagtagtcaattgttttgaatgctatgaagaaagataagaataggcaaatagtccttatatttgataacagaggtcactagtgatcttgatgaggggtttcaatagaatggcgggattatatacctccctggattcaactgaggtaaggaaggcatacagaatagagacaggcactataa

SEQ ID NO: 9812 - DNA, 383 bp, Homo sapiens
aggtacatcatcgggaattcatgattaagtgactaaatgatttgtttctaaaacagagatgtatgctgtctgtggcaagggctgggagctgggcaacagctgggcagggggcacatcgccttaaagcctcatgcaccaaagagccaaaccggggagggctttcttagaaagcaaaatacagcgctcacactgcaggggtggcggcgcaggtgtggaaccctgtcttgatgcctaacgtgggggtcacagctatccgaaggcaggctccagagagcaccttgaccatttctgcttgttttctcccgtctatgccccagcctggcagtcactggcctctgatttaaagagtcgagtttgcgggtggtttgctaattatgacccca

SEQ ID NO: 9813 - DNA, 433 bp, Homo sapiens
aggtactcctactcatatgcttcagttaattatatatgttgaacaggtaggaagcagtgctgtttttatttattttaatatgttattcatacatttgaagaattatgttctttctgtaggcagctgaattttttttttttgagacgaagtcttggtattgtcccccttgctggagtgcaatggcatgatctcggctcactgcaacctctgcctcctgggttcaggcaattctcctgcctcagactcctgagtagctgggattacaggcgcctgccaccacgcccggataatttttgtatttttagtagagacagtgtttcactatgttggctgggctggtctcgaactcctgccctcaggtgatccgcctgcctcagcctcccaaagtgctgggattactggcgtgagccactgctgccagccggcagttgaa

SEQ ID NO: 9814 - DNA, 435 bp, Homo sapiens
ccgggcaggtactgacctccccactcctcccttaggtgtgtagaatatgagagaacgatttagccttcatttagcaagttccacagggaaaccagtatcttcaaggaacagccaggttttagtgaaggcgaggtaaaggcaggaatgttcagtaaagatgttgaggagtagaggagctggttcacagtggaatgggggtttcaaacagctcagtaaaatggtttatgagggaacagtttagagaagggtttcaaaattccctagagcaattttgtgtgatgatctggattgaatatcaaatgttgttattatgatcgttttattcatattttattaattttttatcattctatattttttattctttattttataatattttttgatttttttttaatatattattattttcaattatttaatcttttattataa

SEQ ID NO: 9815 - DNA, 850 bp, Homo sapiens
  misc_feature 16, 359, 531, 656, 670: n = A,T,C or G
aggtactccagcctgngcgacagagcgagactccatctcaaaaaaaaaaaaaatagctggtcatagtggcacacacctatagtccagacatttgggaagctcaggcagaaggatcacttgagcccaagaattcgaggctcgggaccatgattatgtcactgcattccaacatgggtgcagaacaagactcccaactccaaagaaagaaaaaggattatgggtttaaaacacttggaaaggatgtaagcttgtaggaaataaaatatcactgtcctcttttgctcagggtcagcaacatggtaaaatgaggaattttagaaattaacttccaggaaaaaaaaaagggagagagagagcangaagaaacacaaatatttacagttttgaaattatctactaattaggtgataagtagtgtgtagatagtggaaacagaataggatgcacagaagaatgttttgaatatagaaatgatacaaaacttgagcactgatcacaaatgctgaggcagacctgaagatggcacttcanggtttggacatatgaagaacgaaagttccattgatagaaatgagaagttgccagggggaactcatttatggtggaagaacattaaattagtattgaaaacactgcctttgggcaatctgcacctncctaaatgcttagncctattttccactgtcccctttaggctccaaacacacctgaaccactgctggtggccgaaacctacttggtttcaaaaccctaggttcaacagggatattgaatgcctagccttcttccggggattggtgcgtcttcatattcccttcaagtcccaacccagaggtacctgcccgcgccg

SEQ ID NO: 9816 - DNA, 407 bp, Homo sapiens
  misc_feature 184, 236, 241, 242, 277, 282, 283, 321, 322, 352, 379: n = A,T,C or G
ccgggcaggtactttgaaagaattgatccagctgaattggaaaatgtgggaaggggatggggaagaggctgctccacctgagatctggctccaggacttacagcaaggggaacttgggcaagttacagacctgtcctatgccctcagttttctttatcagcagaaacagaaaatcatcccatanaactataagggtcgatggtattcagcgggtccccccaaactgagctgcacantctgnnagtcatgttagacaaacacatttctcaggccccancctgnnagccctctgaatcagaaattccctgtaaggagggatgnnatgaacttgaatttgcactgactttcccangctgttttcttacttctgatcaacttngggggtagggacccattgaagctgcata

SEQ ID NO: 9817 - DNA, 403 bp, Homo sapiens
ccgggcaggtacgtcatttgggccaattgttcagactctttcttccctctgaaaccattaaccaaagccactaataagtagaaatgcagagttaagagccccttcctccctctttcaatttccagtggacatattaatgagcaataaagcagctaaaaggcaagcagctcaagaaagagaaagaagcaaagaaaggtgattgggaaaacagatattcagccctcagcaatgcagactgggctgccccgtgtgccatgtgggctgtgatcacaggaatttggagctcaatttcttaattggttctttagtcttatccaaagagaaaattggatttctagagatttcttctgtgcagagagcaattatgctaaagctgcttaggtaacagctttttcggctagcc

SEQ ID NO: 9818 - DNA, 399 bp, Homo sapiens
ccgggcaggtacgcggggccgggcgcggtggcgcgtgcctgtagtcccgagtaggtgggattacaggcatgtgccaccacccgggctaattttgtatttttggtagagacggggtttctccatgttggtcaggctggtcttgaactcccgacctcaggtgatctgcctgctttggcctcccaaagtattgagattacaggcatgagccaccgcacccggcaaaagccacatgttcttagcagttcttagtagtggtagagttaagtttgtctctggggctctttgttaccaccgctccagagttgcccattgaggactatcaattggaaatatgtccctgaggaaaaaatgatataccagttgattgtgtgttaccactcagatacacaggcaacaggg

SEQ ID NO: 9819 - DNA, 378 bp, Homo sapiens
aggtactataaaccaatgccatgtttttgtaaaggccggaatgaaagaaccacctggaatccgactcatggtgctaatactgaactcatttggcacaagttatttagattcaaaaaggccaccccaagagcactctctttcagtttgagcagaactcctgaaaatcatactaactacctttcattgtgttcttattatgagcaggatattgggataaagaacactggtttctctcatttaattccaacagcagtctggtggctcaggagctattaggattttttttgtatcgataaggagactgagggtcaaagaggtgacgtcacttgcccagggtcatagcaccaggaagcaggagagttaggctttacatacagc

SEQ ID NO: 9820 - DNA, 386 bp, Homo sapiens
ccgggcaggtacatgcatactcaatgtttagttcccacttataagtgagaacatgtggtatttagttttattcttttttatactcagtccagatttgtggctcacaggctgggtagataaagacttttgtgtccaaatttccaaccagtagctgctatacacacatatctgggcctgccgattttcccatttgcttgttgaagaatcgacttttatgaaagaatcaagatctgtttattttcctaaaacaacagtaatgacggaatcataagtagaagtgggtaaccatgggttccctgaatccagcttctaggaacacactttctcctgtttctccacagttaagttttgtggataaggggaagatttatcataaaagcaatatt

SEQ ID NO: 9821 - DNA, 302 bp, Homo sapiens
aggtacaaagcaaaatcaacatgctttttattttacctcattattacataaaaaatttttttgtagagacagagtcttgctttgttgcccaggctggtctcaaactcctggcctcaagcaatcctcccaccttggcctcccaaagcactggaattatagctatgagccactgtgctgggcccactacaccttttaaacaactcttctcctgtcacctctcaggtgttttattttagtttggtattatatttaagaattctttcttagtggcatacatttcatttctgtgatcagaaatcaga

SEQ ID NO: 9822 - DNA, 864 bp, Homo sapiens
  misc_feature 528: n = A,T,C or G
ccggcaggtacatccattctcataatagaggtatctttcattaaggatggacttcgaaagtaactgaaacacctgtgtgaagggatgtgtgtgcctgtttatggggaaggggttaagagaagaagaagggataaaatatcatttctctttatatccagactgaaaacagtcaaaactaatacatttatacataaaagagattctcaaatacaccctgccaaatataatttataaagaagaagaatggcttataaataagtcaaatataataaaattgactcattgcaaagtaataaagctccatctgatagcattgggaataccgacttatgatttcagcaaatatttctgatttcactttagaaacagccttatattcccttaattatcttacctgataaattatctcagtaagtccaaagtaggtcagtggaaactcttttctctgggaactattccttagaagtaatttagcctggaactttctgttggttctgtcagtcagaagtagttcagagccccggggtngatacttgatttaatatacatatccctccaaagccctggtagcttggtctgaccataagaatggctgggtatgaaaatggctggctgccatatttttccggaacagaacacaagtgccacaggttaaaaaccaatgccgcccaatgccaatgccattaggggccacttaattattagggttttggcttaaatggattcctacaaccctttttcccggttaaccttcctttggagtttcctcccgcccacccgctcccttaacaatttttttgggataatgccattactccttaaagtatttggtttgaaagcataaaattattccacgttaaggag

SEQ ID NO: 9823 - DNA, 461 bp, Homo sapiens
tgccccgttcaccacattagttagggcaattggagcttcccgcggaggcgcccgaggtacctgaacaaatcctatcaaggacagattctcagtcttgaagttgcagcacagtaaaggggaaagatcatgagttttggggccaggttcccttggatattgtggggtccccacacttctggatgatgttggataactctttgagacttaggcttcacatctgtaaaatggaaatacttatttttcagagttgtcataaacactaaatgatttgacttatatcaacctaattcctactggctcattgaactcagctcagctgtcccctctgttcggatgccttccccagtggggcttagttaggtatcccagctggataccctgccaagctcttacacattccctctgccataacacccattctttgttactgaattataatttcatgttcatttgtttatctc

SEQ ID NO: 9824 - DNA, 498 bp, Homo sapiens
aggtacgatcttggctcactgcaacccctccctcccgggttcaagtgattctcgtgcctcagcctcttgagtagctgggattacaggcgcgtgccactgcgtccggctaatttttgtatttttagtagagatggggtttcaccatgttggccaagctgaatctcaaactcctgacctcatgtggttccacccacctttggccttaccaaagtgcctgggtattacagtgtcgtgagtccaaccaccgcctcagccctaccaagcatatttttttaaaatactgtacaccctattacctgaatacaaatttcctcctgttttaaaaaattcctatttttacttatttttaaacagattaaagtatttagtttttttttttaacataccaactaattttctggttatttgaataaaaaatttaaagtgcaatttttcatttgccccttttttgcaggattttaactcataaacttaccctaacaaagggaaaggaagggt

SEQ ID NO: 9825 - DNA, 419 bp, Homo sapiens
aggtacttttttttttttttttttgagatggagtcttgctcagtcgcccaggctggagtgctaacctctcctttcatgtggagatggacagggatggcaggagcactgagtgctcttgacaacaccattgaagatgatgctgacgatcagctaccctgtggagaaggcaggccaggctgggtgagaggggagctccttggaagtcagggggtctgtaaggacagcaaggatctctttgtcccaacctccagcagcctttatgggtgcttctgtgttggccttgattctgggatggccatctcagtgctgttgctggctagcgatttcagaaaactagatttttctaggcctgagccctgttttgagaaagaagcttccctctggtttgtagctcaacattaatgagttttggttcctgg

SEQ ID NO: 9826 - DNA, 390 bp, Homo sapiens
aggtacagtggcatgaccataacttgctgcagccttgaactccaggattcgagtgatcctcccacctgagcctccaagtcgctgggattacagacatgtgtcaccatgctcagctatttcacatcttttgatgtgatgtgacacaaagtatacaacatcacctatgggtgtccatgccaaaaacgggaaatgtttaacagtgagttattatatgtaacatccagcttacaggaatgataggaagagaggaactagtgaaatgatgccacaaggaagcacacagataaatccagaaagttagaaattctgtaggacaaatggcctggtctcttcaacaactgttgctgataatatgacaaaaaagagagtaagaagagcatgaggcatggg

SEQ ID NO: 9827 - DNA, 456 bp, Homo sapiens
ccgggcaggtacagaattgattgaggtggtgggtctagaattaagagagctggatgagaaattactatagtcatctaagaatgaacggtagagcagtcagaatgaaaagagaaaactaggtcttaagaccaaatgacatgaggccatgtgtggtggctcaaacctgtaatcccagcactttgggaggccgaggcgggcagatcacgaggtcaggagatcgagaccagcccagccaacatggtgaaaccctgtctctactaaaatacaaaaaaaaaattagttgggcatggtggcgcgcgcctgtagtcccagctgctcgggaggctgaggcaggagaatcgcttgagcccaggaggcggaggttacagttagctgatatcgcgccactgcactccagcctgacgacagagcaagactccattccaaaagtagagaataattgaaagtctcgtacct

SEQ ID NO: 9828 - DNA, 399 bp, Homo sapiens
ccgggcaggtacctaacttattagggccctgataatcaaattagccaataagtaagaaaatgttttcttaaccacactgtaaattaagaggattcatattgaaatcacttttccattattgctgtcttagcctgctaaagttatatttagtgtagtgcaactaggcagggttgtgagagctgggaaggtagactgttgtattgggcagggtcagggcagataaaggaccaaaataatgcctgaaatgctgtattaacctgctctaccttgaactgctgtcttgaattggggggaaaaatgaagctctgaggggatggtgcacagggagaaaagagagaatctcaggaattgaaagtctcgatggagaagaggtgggagaagaataggaggctagagtga

SEQ ID NO: 9829 - DNA, 403 bp, Homo sapiens
ccgggcagtatttggttttcaaaagaatcttatggagagcatttttgaaagtagatgtttggaaatctttccaacattatgtgatttttgtctctaaaaatgatgtatattgcttataaaaactcatatctgcacacttatcttagaaactgaaattcctaacctcttttagaaatcttccaaatggagaggttgagttttaaatatattgaggaattctaaggaggacagtggctcatttacttgcttacttaagtgtctcactcaaggaggatatgtctttaatttttaattctataatgccaatataccttttatttttttaacctcaatacatttcccatcaatgggactttcataacatcatgtatcccatttttattaatgtaatcttcgataacaa

SEQ ID NO: 9830 - DNA, 510 bp, Homo sapiens
taacctagtcgatcggtaaggccgaggggaatagcagcggagtggccgccgaggtacctgaacaaagtccatcaaggacagattctcactcttgaatatgcaacacagtaaaggggaaagatcatgagttttggggccaggttcccttggatattgtggggtccccacacttctggatgatgttggataactctttgagacttaggcttcacatctgtaaaatgggaaatacttatttttcagagttgtcataaacactaaatgatttgacttatatcaacctaattcctactggctcattgaactcagctcagctgtcccctctgttcggatgccttccccagtggggcttagttaggtatccctgctggataccctgccaagctcttacacattccctctgccataacactcattctttgttactgaattataatttcatgttcatttgtttatctctcatactaggctgtgagttccctgatgacagaaaatgtcttgttggttttg

SEQ ID NO: 9831 - DNA, 370 bp, Homo sapiens
aggtacaaatatctatgagaagtcagattcagtggaaagtctgtgattatggttttgttttttaaatgaaattgaacatttaaactgcaaaacgtggggaatgaaaaagccatctgtcaggcactatatcacaaaagaatccacccacttacaaataatccctgaatgtcaccactcttctttctattcatcatcctggtgttgtaaatggaatactcacaataaagctgccattagcagagtatccctgtgatctatccttaccaaccatgttgatctaaagttggaggtcactgtgattagaaaactcaagacaccaccccctgccccaccagggttgaaagggactgaaaagtagatttttaactgt

SEQ ID NO: 9832 - DNA, 198 bp, Homo sapiens
  misc_feature 140: n = A,T,C or G
cgaggtactattaaatttaatgagaggtaacccatgcaccggcaggaagttcaagggggacagaaggggcttgctccactctggagccctatctcctctcactcctttccctttctagtttttgacattgccaactttgncttctcttcttttataaaaggctttccaaggccctttttggaaataaggaaaggcttg

SEQ ID NO: 9833 - DNA, 382 bp, Homo sapiens
ccgggcaggtacttctattttttttttttttttttttttgtatttttagtagagacaagatttcactctgctagccaggatggtctcaatctcctgacctcgtgatccacccgcctcggcctgccaaagtgctgggattacaggtgtgagccaccacgcctggcctccagtatttttaaattaattttcttgctcaaaccagaattaagtttctcttaccctaactaagggaactttggctaagacaaaaaaacgacctgttacttaccttaagaaaaccaattttatttctgattattgcaaaagcacacaaaaaatatgctggttgtttagccctatatttctgcaaaaccaacatttaaagtatttgacaactttttaa

SEQ ID NO: 9834 - DNA, 405 bp, Homo sapiens
  misc_feature 267: n = A,T,C or G
aggtactttcaaatgagaatggagttcagttttaccatctttaaaccccatgtagggcaaagtggagtcacaactcagcttgaattataaatataattgttcttgtaatggtgaggagatctacctttgaggtttcccagagtcaagatgaaaatcatcttttcactctggagaaaaacagctccttactggactgaggctgtcagacgtagacttgggtcattgctggaagaaacatagaaagcagcacagctccgaggtcctttntcatcagatgtgtaaatatggccttctctcttcagagcagattgcctggcagtcatcatccctcctgtctgtctccagcccggctgctcatgcagtgtctcaagcttcttgcatttgctgtgttatgtggtttttgag

SEQ ID NO: 9835 - DNA, 371 bp, Homo sapiens
ccgggcaggtacagtggatatggtgagcactggttagagtctggatatattttgaaggggaactttactgaaggattacatgtgaggtgagagagaaaaagagtcagggaatataacacagtttggagcctaagcagctggaaggacggagttcccatttattttggtaaggaaagatggtttggggaaagagataagttttggacatgttatttttgaggtgcctattatacatgcaagatgcatgtcatgttgagggcagaggtctgaacaggatgtgtaaatgtgagacatcaccaagggagtgagtctacttgaaggaaagatctgggagtggaactggggtccctaacattgagagtttcaggagg

SEQ ID NO: 9836 - DNA, 370 bp, Homo sapiens
ccgggcaggtacagtagtgcactcttggctcactgtagcctcgacctccggggctcaagtgatcctcctgccttggccccacaagtagtgggactataggcacacagcaccatgcccatctaagtttttgtattttatgtagagacaaggtttcaccatgttgcccaggctgatcttgagctcctgagctcaagtgatctgcccaccttggactcccaaaatgctgggattataggcgtaaaccaccatgcctggccttaaatcaactttagagtcaacatctcttatcactggagcttctggagaaactccatcacgtggtgctctctttcctgatgtgttgtgcccaaatagcttgttctcatcagat

SEQ ID NO: 9837 - DNA, 406 bp, Homo sapiens
aggtaccacaatgctagggctgaggtctccgggatcctctgggcctttttcatggttgaaaaatgacagtggcagcttcattccttgtgcccagttccagagaggaggaatgagaaaggagcaaggagaaaaggctgacatctatgggaagccaaactttttcaggaatcccctgctcaggtttgctcaggcttgtttgacatcttactggtaagagcaccattgtatggccagccctatattcaagggaggctgaaaactgtaattttacagctgaatcccgcgtacctgaccggtctagaatttttaatttttacatctattaacttttaagtttataaaatctgtgattcattaaacattttacatttaaaaaatttttaatttattagttattttatatttg

SEQ ID NO: 9838 - DNA, 477 bp, Homo sapiens
  misc_feature 250, 459: n = A,T,C or G
aggtaccctggcaaggtttgtcctgtcttggtagcagaaagaacttctcaaagtaagggcttcacactaggggagagttcaatggcccaacccagccatggccaccctgacaccatgccctgatgctagtccctgtggcctggcccacactgaaaatactgtggggacaacagaatggatttgcaagttaccactatctctcaccagctgtaagacccttggcacatttgtgatcctaagcctcagtttnctaaatctggaaaagggggaaattaaatgggtccttggcacaaaaactggtttttgaaaaattaaccagaatttacgcatattccaaactataaccaaagtggtctggcattgaaacaagaagccctcattaatttccggggaacatttttgggttaatgggaaaaccaagggagggcttttgccattggtgggggttcacaccctggnaattccctatttttcttt

SEQ ID NO: 9839 - DNA, 466 bp, Homo sapiens
ggctcaacactcctattacggcgagtcggagctccaccgcggcggcggggcgaggtactactggcttcccagtggttgggttgagtataagcccccaaatatgagtaaaagaagaaaaagttaattcaatcaccaagtcttgctcgcatattaaaaattggatagatgaatgttcaatcatatgttttggctttggccagccagacgaggtcaattattagatttgaactgcttagaattcttcaggcaagtcttgatggagcacttcttggacagttagaactttaccaggttcacaggagagctcagatgaagcgaacacctcatccacactggtttcctttggagacctttactgttgagaggtggttttcatagccgcaaaatgacaagtgcaagttgagtagatcagtgtttatcaaccaggtgccacattgtgccccaggagacatttggcaatgatggg

SEQ ID NO: 9840 - DNA, 442 bp, Homo sapiens
ccgggcaggtactttgagctgtggcatctcctgaatttcagtggctttgcttttattaagctctgcattagagagcaccgaaatgatggatatatttaaaagctgcatatttttagaaacagcaaaaatctagggcttgttccttggtgaaagaggtagggcagtggttagaacctcctggctgactgtgggaattgatttgctgctagaggagggtagattgggttttccaaagtctttttaagacccagaccatctgaaacaagggaagggccatggtagttgtttagtcgcctgtggtaaaatggttaataactatttccctctgagtggttcagtatattcttcattcagaatatgcagagcttccaaggtgttaggtttctaataatgtggtttttaaagtagtaagtccatgctgctcatatgactttcaattcag

SEQ ID NO: 9841 - DNA, 423 bp, Homo sapiens
gcggtggcggccgaggtacaggaactggcttagccataggcactgaagacttgagttttccaagctcagagagaaaaacagtcctcaagcacacattaacccttcctgcaccaaaggtggggtgcagccttctcaactctggcttctcctctattccaggctcttttggtttctatcccctagaattgcattaacatttcttttccatattggctgtaaacattagaggtaaacccatgaaatggtgtttaaatggaaatcggtcctgcaggcttgtaaagtgcttttgtgctttctctcttactgctagagattcaactgctgtaatttcctcagaaaaactgactctctctttaattctcaaagctaatttggttataacataattctttcctttaaaaatcatatttttgtttgctctta

SEQ ID NO: 9842 - DNA, 385 bp, Homo sapiens
aggtactcttgtgtatgtgcacatatatcatacatgtgtgtgcacatgggtgcgcatatatatgtttgcatgggcatgtgtgtgtatttgggaatgtgcatgatatgttcatagaactgggtaatcatgatcttgactagtttttttagctgtccagttttggacattaaatttgaggtgcctgtagaagaagagagagggggccgggcacagtggttcacacctgtaaagccagcactttgggaggccaaggtgggtggatcacgaggtcaggagtttgtgaccagcctgaccaacatggtgaaaccccatctctactaaaaatacaaaaattagcctggcgtggtggcacatgcctgtagtcctggctactcccgaggctgag

SEQ ID NO: 9843 - DNA, 418 bp, Homo sapiens
aggtactgatctcctgttggcctgcttcatttgtcctgcagttgtcaatccagaacaatatggaataatttccgatgctcctattaatgaagtagcacgatttaatctgatgcaggtaggccgccttttgcagcagttagcaatgactggctctgaagagggagatccccgaacaaagagcagccttggaaagtttgacaaaagctgtgttgccgctttccttgatgttgtgattgggggccgtacagtggagacccctccattgtcttccgtcaatcttctggaaggattgagcagaactgtggtttatataacctacagtcagcttattactctggtgaattttatgaagagtgtgatgtctggggatcaactgagagaagatagaatggcttttgacaatttattggcaaacctg

SEQ ID NO: 9844 - DNA, 442 bp, Homo sapiens
ccgggcaggtacctaggggaatttctgagttcatgatatcgtaggtggtgtggaaacaagtcccagcataaacccacacagctggctgaatgaagttcaagtgaaggtcatgcagcatcaaagtatatgtgtgtcactgaaacttatggcagtggagtgagaataattttgaaattacttagattgtgagaaaatctggctgatgattagaagtgttgatataagaggtcagtttggagttccactcaaaattcatactaattttaatgttatggtattctaaactactagatgggtaaggggaagttataggattctgaacaataccattaagaattaggataggattttctactgtggtgtcacagaagaatcagagctagcaaattcataaaaagaaaatttgattccccaagcccagggtaaaaatccagagtgctgt

SEQ ID NO: 9845 - DNA, 494 bp, Homo sapiens
aggtaccttctcactagggttactgtgaaaattaagtgtatgtgtaaactgttcctcacaacccaagatattaaacactcagtgaatggtagcttacagcatcatttttattattaatagaaatatctctcagaccgggacacagtaggcttcacgtcctagtaattcccatgcactttggagagggccaagtgttgggtccgaatttacctgtagattcggtgagatttcatagaaccataccttgaccatacatgtgagtaaaccccccgttcttcttacttataaaattatcaaaatattcaatcttggggccattggttggtcaacaattggcctgttaaatccccaacctatttttggggaagggccttgaggccacgggaaaaaatcaactttgaaacacccaaggaaggccgagtaggtttgtcgggtgaatgccaagtattcggcaacccacttgcaacttaccaagttctttgggcaaacctagg

SEQ ID NO: 9846 - DNA, 414 bp, Homo sapiens
aggtacacaaaccataaggtcagtaaatatcacaaagagagtatgcctgtgtaaccaccatgcaatctctgtttatcattgtaggtgatagccacctctgcccaagttggctaatacttgaaaaaaagtggcccagaactcacgtgctgcacattttctgaaattactcttgacttctgatttcatggcaactcttcttattttccagtgttgcttaaaattttgtcttatttttggtattcatttatttcagaggtctttaaggagacattaaaacaaacaaacaaacatgggttcattattaaacctggaatcaggttgtggatgaaactgcttaaggagaatataaaatgagtaagaaaaaataccagtttttaagaggaaccttgcaaaaaatgtgcattgaaggcttca

SEQ ID NO: 9847 - DNA, 430 bp, Homo sapiens
  misc_feature 382, 403, 404, 421: n = A,T,C or G
gaggccctatcactactatagggcaattgagctcccccgcggggccggccgaggtcccaggagggtattgatgtttgaggtccaaactgaaaacccatcacctccttcccactgctatagcagcgttagccctggggttcattatctagccagttcacaccttctaaagtggggctctgaaaatgtcttacttccctcacagacaaagcaattctcaagcctcctgagatcacccaccaaccagagcaactgctgtcacttggaggtgcagctgaattcttctaattgtgacacaaactcttgaaactgtaaatgctgaaagattaaatgaggttataacactcagaaggttttacaagtaaaagtaagtcaaatcaatagngtctttatttcatatctgtannatggtttagctctgcgnggaagtgta

SEQ ID NO: 9848 - DNA, 818 bp, Homo sapiens
  misc_feature 642: n = A,T,C or G
aggtactcaaattggcttagatatccttgcctttaaaggctttgtatccgcaataactgctctctattgtccttgttaataaagtattattttcaccttattattactaatcttttctttgtaagtaaccacacctggttctatccaaaaaaaaaaaaaaagtgcctaagtatttgccctttgtggtaatacaatgcataatttagttaatctaggctatctttccgtgagaggtgattgtttctgtattatgaaatgtgttcacagtaaagcaaaatccacgccagatacctagaggcagacggagagccacttaccaagcacgaagctgcttcaaactaaccctgacgcgactgtatagccactcccacacacaaggtattactcatgccaacttagcctctgagttataaccgcacctttcttttacaaacatggccctttattaagttaacattacacacagccaggccgagagtcccacccccagaccccatgaaaagggcttgaaaaaatatgaacttccggtttccatttgagatcctgacattactctcaacgttacctggatgaaatctagaaacgtcagcggcagcaaatcatccaagtgtccatgtctttggagaaacgatttaaattctntctgcaagaacggatatgaaaaattactcattttcccagatggaccctttaaaaaaacaattcccaaacaaatcaaaacaatattttaaatgcatatgtatttatataataatcatatgaaataacccatgtcaatggtaaagaaaaagaaattagaccaatccctaaagagaact

SEQ ID NO: 9849 - DNA, 327 bp, Homo sapiens
ccgggtaggtactgtcttgggggcgtttgggggctttccatgcccacgacaaagtgtaacatctggatcaggagacaggaaaccaaataacaggttctcctctcagccccaaatgagttataactgtaagcccgtgcatacaactttagagtttgcttagcagaactgcccctagcagttggcactcatacatagaaattactttatagagattttggctaaggcctgacggtgttcagagctcctgattgaggttgcgtaaacccaccgagtgtccaagaagcacaacagaacaggccctcacatattctaccactatactgcaaa

SEQ ID NO: 9850 - DNA, 379 bp, Homo sapiens
aggtactttggcttttgtttctagaacaccattgagtatatgctcattaagatagtttgatgcaataaatccttattttacttgcctctattactgcattgtaaactgctgtctactttgtcttcttgaaatcctacaacctcccccagcccccacatttggcctatggaacattactttatcctgattttccccctaaccttctggcaatgcctctcagactccttccagaactacctttctctgttttccttttaatgatgacagtttatgcaattgtgtcttcaaacttataacgacccagacaatagtaataacagtcaacatttactgaattcttacttgggttaagtgctgttatatatgatattttaatctt

SEQ ID NO: 9851 - DNA, 382 bp, Homo sapiens
ccgggcaggtacgggacttgtctccaggagacatgtctgggaagaagagctagactggagaatcatgagcatgttcaggtgaaaacatgtgagtggataagagcaagagggtgagaacacagaccaagggggccaagggacagactgtgttcagtatttgggtatggaacttgtttttgctacttgctagttctaagaccaggctcagactctaacttctctgtaatgtgggaataatgacagcacttaccttataagattttacaaagattaaaatatcatatataacagcacttaacacaagtaagaattcagtaaatgttgactgttattactattgtctgggtcgttataagtttgaagacacaattgcataaactgt

SEQ ID NO: 9852 - DNA, 400 bp, Homo sapiens
ccgggcaggtacattattcatacactgtaatggcgtaaaagaaccctagacacatggactcccttgctaataagtgcaccttcaaagcgatagtcattatttagcatttatcggaagaggctggccccagctctggtgaagggcagagaaggtgtgggtggcctcacgtgttctcaatgtcacaaaatgatagcattaaacagacccactccctcatggaaggcaatttgacgaccttctattgatattgcaacatgtgtctctggcagcagatctcaatccttatgtaagggatatgggaagacttcctccacttcatgtatatgctttccctaagcagatctggcagatgcaaatttatccatatcttttcatttccattgaagttttagtatccaca

SEQ ID NO: 9853 - DNA, 402 bp, Homo sapiens
aggtacagatttgctacatcatatagcattttttagaccatattttagatctttccatcctccaactaagatttacctttttatatgaagctttaattactttccgcaacacttttgtcaaaatctgaagtcttttaagaaccaagatgtttctgatgtttattttaatgttcagggattttggaggtgaggggctagaaacactgactcctgcccctgactcccgcccctgactcccgcatttattttcataaatgaaaatagtaaaataaattcattaagggtattatgtggagaatagaaacaagagtaaaggactgagggtatattagagaaaactatcataattttggcaagagataatggacatcgaagcttgagtgaaaataactgttagagaaa

SEQ ID NO: 9854 - DNA, 400 bp, Homo sapiens
aggtacgcgggggcctcagggacgggtcttttgaagtgcctggtgtgacccatcttccgtgcttgaaatcgacgtagtggaccctggctagcatatttttccctgccaagattattgcaaaaagaccatgtggtggttaatatcggaaagaatgtgtggttaatatcaggaagaacacgtgaaatggagaatttcagggctaacatttcttgttttgtttctgaaaacatcggcatgtcctaaaaagtgttgcctgtgcccatcatcttttaggcttgggaagcaggacacccgccggcttactttaaagcccagggaaaagaaatttggacaaaccaaactacgttttgggagaagaacccccatggttagccaaagctcccgcttttaatctgtgggc

SEQ ID NO: 9855 - DNA, 409 bp, Homo sapiens
ccgggcaggtacgggacttgtctccaggagacatgtctgggaagaagagctagactggagaatcatgagcatgttcaggtgaaaacatgtgagtggataagagcaagagggtgagaacacagaccaaggggctaagggacagactgtgttcagtatttgggtatggaacttgtttttgctacttgctagttctaagaccaggcccagactctaacttctctgtaatgtgggaataatgacagcacttaccttataagattttacaaagattaaaatatcatatataacagcacttaacacaagtaagaattcagtaaatgttgactgttattactattgtctgggtcgttataagtttgaagacacaattgcataaactgtcatcattaaaaggaaaacagagaaaagt

SEQ ID NO: 9856 - DNA, 391 bp, Homo sapiens
aggtaccaggcaaagtgttaggaacgttttatccattttctcttatgtgctaagcagtcccgctagctgcttcatcctggaaatatagatgggagactgaagtcaaggactccaactgtgtgtttaacatctcccttgactcccaggaacctccagtttggcatgtccaaaatgaaacacatgtctgtcttctatcaatatgttttgcccaacccctgcaacactcccacttccagaaaaatcacacaaacaaaaaaccacacacacaaccattgtgcctttcctctctcagggagtgccaagaaaccatctggttcatgccagaaacttgggagtcaaccttgcccccttctctgcttgccccccataaatctgccaccacaaatcctgt

SEQ ID NO: 9857 - DNA, 867 bp, Homo sapiens
aggtaccaggctcagtggaagccaggaactggcaacttaatcctgttaatgagattttgggcaagtcgctcaatacccccttagcctgattttcctcatcagtcaagtggcaacaatcatttaccttccctgactcccagggtggttgggagaatcaatgaaatgatgcacatgaaaaagctttgcaaattactaagggctatctatgtataagcatatgtgtgtgtgcatccaaacatacacaacctaaacataccccaaaatgaacatcaaattacagagaaagactgaagtctgttaagcaaatttctgctcatcttttatgatccagttgaaatgtccctgcttctatttatttggctcagtgcctaaaataattagcttgaattttttttttaaaaaaagaatatagtcaaacaaaaggaattgcacttatggcagagtggtgatcactgaacagtgagcaatgagactgaccaaagaagaaagcagttttgtgttttctatcccatcttcactgtggaatatcaatgctcaatgagtgtaacaagtggtcataataaccctacccgctaaaattccggttctggggtctttggcctctcataaaaaataatatagggttaattcatgccaataaaaggcccatttgattggacctctactcttaccaaaaggcttcatgtttctggcctattgaactgggagttcttataaaattctttttaacacaaggctcccctggtaaaattgtgatgggacttgcttttaacaaccagaaggggacttttgaatgggttgtttcaaaacctgaccccgaaaagggggagtaaaataaggggtgtggatttgtaagtcttcaaggcc

SEQ ID NO: 9858 - DNA, 401 bp, Homo sapiens
ccgggcaggtacatctggcaaggggcacttttactctgatgtcgggtgttttagggatatgagttcagtgaataagtagctagagggaggagctagttaggtctcgattttaggcaaatgctaaatctacctcattttccatacctgtcttttgattgggatagctaaagaatttataccagatgaaccaagcaagccaccttcttacgacattaaatttggtggaccaagcccccagtagaagcgctggggcccagcacggccaggctctcaccttttagagcagcacccccgactaatccagcgaatggaatctggctatgaaagcagtgagaggaacagcagcagccctgtcagcctggatgcagccctgcctgagagctcaaatgtctacaggtatt

SEQ ID NO: 9859 - DNA, 382 bp, Homo sapiens
ccgggcaggtacaagaaaaaatcaaacaatcacatcaaaaagtgggcgaaggatatgaacagacacttatcaaaagaagacatttatgcagccaacagacacatgaaaaaatgttcatcatcactggtcatcagagaaatgcaaatcaaaaccacaatccgggaggtcttgccaaagaccacccgggctttccgggcaatgtgctagagcttctgggaagcagtcgtggccctttggagattccacggcttcggatccctactgcaggatgctccactgtgtctgctggcctctggcgttttgctgaggggtaacctcggaatggctagaaacaagaacattgagatggcccaagtcgtgccccaggcattcccgcacacgt

SEQ ID NO: 9860 - DNA, 387 bp, Homo sapiens
ccgggcaggtacatgaaaggagattgagggcagggagctcacagaaccaagacagcaggacccaggattcagacctggaaaatttttatttcctggctggtttgtgtgccctcatgcatgttatttacagtgccatgttctttcacatgggaacactgacacaggtgaaatgggaggttccataggatgatagtgcaaaaacattaaagacaatcctagcagatgcagtgagttcaagggagagtccttgtggagtaacacgaaaggcccggtggatgagatgtatgaagatctaaatgcctgcagatagtgagctgtctgcaactaccacaaagcaaaatcatgggcgataactccccagggtaggatctggcctgagcatcccca

SEQ ID NO: 9861 - DNA, 405 bp, Homo sapiens
aggtacatttgttgggggcgtgacattaacatataaccacttagagtggacatgcagttagagaaaagtcaatgagctggaaccaagctgggaattccaacatgtagaagttaaacacaagaggaggagccagcaaaggaaacagaaacagagcttccagcaggtggggggcatttggaagaaaacgatgccatagaagccaagatgaaatagacatcaaggagaaggaagtagtcaattgttttgaatgctatgaagaaagataagaataggtaaatagtccttatatttgataacagaggtcactagtgatcttgatgaggggtttcaatagaatggtgggattatatacctccctggattcaactgaggtaaggaaggcatacagaatagagacaggcacta

SEQ ID NO: 9862 - DNA, 402 bp, Homo sapiens
ccgggcaggtactgtttgttctccaaaatccagctttccgttgaaagtcaatgaaacatctctaaaatgcagacatacccaggttcattgggaacacagtcactgtgagtatacatgattatgtcctgctaaccctattgggaaagaatgctgggcttggccctagtaagtagacttgggttaaagttcacctccgccactaactagctgggaagttcaacttccctgagctgagtttgtcacgttagagaatattaataaatatgaaaattgtggagcagtcttaagtttaaaaggaactttcatggacattagctcattttgctgtgcccaccctgggaaggaagcaggacaggcaggcagtggcatccctgtcgtcaagcagcctgaggactgctgtga

SEQ ID NO: 9863 - DNA, 437 bp, Homo sapiens
ccgggcaggtacccactccctcaattttctctaaagatctcatttcagacatttaaatgaatattatgctacacaacagggaaactcagatgtccatcccctccttattcattcaaacatttccactgccataatatggcagctgcaacgccaagaaagaagaaaggaaaaaagactaaaagaggtgaagaatgaaaaagacctcaaagaaatttttttttttagaggctgggtcttactctgtcacctaagggtggagttcaatgggtaggatcatagttcattggaacctttgaacttttggggctcaaggcaatctttttaccttaagccttccaagtaagctggggactaccggccctgggcctaccaattactgggttaaattatatttttttttttttggggaggggaccagaattttaaccacgttttcc

SEQ ID NO: 9864 - DNA, 464 bp, Homo sapiens
ccgggcaggtacttcttggagtgccattttccttgtaacccttagattaattcagattgactgagttctgtgtcagtggaaattgccagaattacatcattgtgctttgcatctagtttcacttttccaaaagcctacacagatttcataatgttaaaaaaatagcatcttgttttcctttctgggcaaatcttttttcatagtcaccaactcttgtcatgcattctgcactttgggcaaatttttcctagtgactctcccctttctgtctttcttttaaaaattacgaataatacttaatctcatattgtatactgcatgccattgtcccatgtaaaaagttcttgacttttgttatttgtactttatagtatctctataaattcaaccctttttcacatttttacctatttttctaaaattataacattttctcaaattttatttaatcacctatttgtcct

SEQ ID NO: 9865 - DNA, 397 bp, Homo sapiens
aggtacaagaaacagaaatcaatgaggcttacttaagcaggaaaggaatctattggaagaatgtccaacagaattgatggggagcccgcagacacaaaatctcatatacgataaaaacttgcagacagggctacttctatcatcaaaaggtgtttcttaactttataacacgtgtgaatagccaaccttaggccaagcctggagggtaggtatataaaaggagtaaaggtcctgacagtaggaaaatggattgaattaaaattaaagtccgggtgtggtggctcatgcctataatccctgcactgtggaaggccaaggtgggtggatcacctgaggtcaggagttcgagaccagcctggctgacatggtgaaaccctgtctctagtaaaaataaaat

SEQ ID NO: 9866 - DNA, 436 bp, Homo sapiens
ccgggcaggtaccaggagggtattgatgtttgaggtccaaactgaaaacccatcacctccttcccactgctatagcagcgttagccctggggttcattatctagccagttcacaccttctaaagtggggctctgaaaatgtcttacttccctcacagacaaagcaattctcaagcctcctgagatcacccaccaaccagagcaactgctgtcacttggaggtgcagctgaattcttctaattgtgacacaaactcttgaaactgtaaatgctgaaagattaaatgaggttataacactcagaaggttttacaagtaaaagtaagtcaaatcaaataggtctttatttcatatctgtaatggtttagctctgcgggaagtgttagcagcttatatgaattatgaagaatttagaagacaatccctaaacacatgaaa

SEQ ID NO: 9867 - DNA, 676 bp, Homo sapiens
aaaacaaaacttccagaacagataaaaaaaataaaacgaaaacagaaaaaatatcaagcgcagagaaacaaataaaaacaggaaagacaacaaataccagaacgagtcgaaccaattaagaaatacggcgaataggtgctccaccgaggcggcggccgcccgggcaggtacatgggactacaggcacgccccaccatgcccagctcatttatgaatttttagtagagacagggtttcaccatgttggccaggatgatcttgatctcttgacctcatgatccgcccctcttggcctcccaaagatgctgggatcacaggccgtgagccaaccacaccctggcacctcgtatataattctcctttaaagaagagaagaaaaactattgagaagggccaaaaattattttaaattaaaatcctttacccttaagcaccaaaggggaaaaaaaatggggaatttggcctaaatataaggttgaatgaaagcattacaacaaatgaaacaggaaaaccaattcaccaatttttagttaaaaaaaggcaaaaaaaatatggaagaaccttaataaagccaataatggggtaagccttaattttattgggggtggggggaaagaaaaatggaggaaaaaagaaaatataaaacaaacccctttaactggggcatggaacaaaa

SEQ ID NO: 9868 - DNA, 379 bp, Homo sapiens
ccgggcaggtactaatcatactgaccattatgagcagtcatttctggatttctccactgtccctttgctatttggaatgattttgggcttcactttctttattaggttgactgagctgctcttggttaaaaaacaaaatttaaactttaaagaaaatatcatatcagcatttaattaagtttattgcaaattgttgcaataaacctagaatgctttcaacagttttgcaggattttgttgtggttgaaatgttagtttcatttggtttacttttagctttaattttaattttaccataatatttcaccagatatttcataattccattttagatgaatgttcaatttcatgaaaagggataacatttcaatatccctgg

SEQ ID NO: 9869 - DNA, 405 bp, Homo sapiens
ccggggcaggtaccctacctgtaatatttgtattaataatatcttattagcattttaattagaaatttaatattaatgatttggaatcagtagttttcaacaattttaatagtgcaaatttatttgtagtatttgatggggagatatggtgttttgtgactatatttacaactggatgtatctgggaatatctcaaagtttctcccaaaaggaaaacatttctattacaaatatgtgacttgtgaaaataatttgtaattcttttcaatatatctcatttttttttttttttttgagacagagtcttgctctatcacccaggctggagtgcagtggggcgatcttggctcactgcaacctccgcctcctgggttcaagcaattctcctgcctccgcctcccgagt

SEQ ID NO: 9870 - DNA, 431 bp, Homo sapiens
aggtactttttttttttttttttttttttttttttttttctttcacgagtgtttatttgctttccaggaacttcagggaaaaaggttaattaatggagggaggaaagagggaggggttggcaaatcaaacacaggacttaaaagtcctagatctaaaccttgaaatccccaaatattttatgttataaaaagatgtcccactttcaaaatccagttctgtaaatagttttcaaaagtcgggggacttgcaaagatttaatttgcctgacaaaaattttcattggcattttctatatttcctagcgccaccctttatgatttttaatccctaaacatctaaattaatgtggacatctgcttctagcaaatatagtcagagcttccctgccactgccaatttgcaatcttaaaaccataggaataaaggaaga

SEQ ID NO: 9871 - DNA, 412 bp, Homo sapiens
aggtacatttgttgggggcgtgacattaacatataaccacttagagtggacatgcagttagagaaaagtcaatgagctggaaccaagctgggaattccaacatgtagaagttaaacacaagaggaggagccagcaaaggaaacagaaacagagcttccagcaggtggggggcatttggaagaaaacgatgccatagaagccaagatgaaatagacatcaaggagaaggaagtagtcaattgttttgaatgctatgaagaaagataagaataggtaaatagtccttatatttgataacagaggtcactagtgatcttgatgaggggtttcaatagaatggtgggattatatacctccctggattcaactgaggtaaggaaggcatacagaatagagacaggcactataaacag

SEQ ID NO: 9872 - DNA, 350 bp, Homo sapiens
ccgggcaggtaccacaggacacctggtgggtagtcctgggatggggtcctaggtctctggagcctcctttctctcccagtggtcatcccaggatgggccgaggattctacacgctgtcagaacatgtctctctggttgcacagaacaaggacgtctgtctcgttcttacaggagtggggaccatttcacttgtcaaactgcctttctcttagaagcttctcaacctcaggccacggagattttaaagtgctctttggcaccagcaggggattgattttctgagttgggttttgttttgggtgtcagattcaaatatttggtgtgccttctgagggaattttgatgtttgg

SEQ ID NO: 9873 - DNA, 378 bp, Homo sapiens
ccgggcaggtactttttttttttttttttttttttttttgagacagggtttcaccgtgttagccaggatggtctcgatctcctgacctcttgatccgcccacctcggcctcccaaagtgctgggattacaggcgtgagccacccatccggcctaacgagacttatttttactcaactagatggcgttcattcatttgcttactcagctgtgccaggaattaagttgggcactgggaattccaaaaccaacaagacattctctgtcatcagggaactcacagcctagtatgagagataaacaaatgaacatgaaattataatccagtaacaaagaatgagtgttatggcagagggaatgtgtaagagcttggcagggta

SEQ ID NO: 9874 - DNA, 380 bp, Homo sapiens
aggtactccagcctggatgacaaagtgacaccctgtctggtaaaataaattaccacgggcagataaagtgctcagtgagcccacactaatttgccacagaagggtggaagcaaattcaaggctgaaatctagctcttcatttcctgaaatcattcatgcccactctctcctggcatgaaatgctgataacctggtttcaattttaagcttaaatttacagcaaacagtgcaggtatctcagttcaatgccttggaacctcctctaaagatgattctactaacactcattttaaaagtgagtgcaaaataatttttacataaacaacccagtttttcccccaggccttgcttactaattttactcaaaaactaccctgcac

SEQ ID NO: 9875 - DNA, 406 bp, Homo sapiens
aggtacaataatcttggaatattagatgccaatataagtggagcagtgtgtaattatttggaaagagaataaaagtataattcaataacttctatgcccagtcaagttgtcattcatgagattaagttcgcgagccaagacaacaaaaagacattttaaatatacaaccatttatgaattatacaactcaagcatgcttcctaaaagtggttgtgtcttatattccaaacaattgaaaaataaacaaaaataaagaactcgtatagggaagttatgaaatgataggagaagaaacacctgttttgcaagacagagacagagagaaacagagaactcctaatgttctttgttgaggccagaaaggactaacaggagctacttaagcaattaacattcacttattgaa

SEQ ID NO: 9876 - DNA, 366 bp, Homo sapiens
  misc_feature 288: n = A,T,C or G
ccgggcaggtactctcacctgttttccgataagcacaaatgtgcacctgaaatttaagtttaggtttttgttgaacatattgcatgttgtaggtgggtaataagtgaatgtcattttaaaaacctagttaactgtatatatatattagcttgcactgcagtgtgttacttaggtatacagtgggctaaaaagtcaaagtaagctaaaatatgtgcaaagtatacattttattgtccctgacattaattactagaaattgcatggctgggtataaatcctacagtgggngtttatagagccaaaattactgagggatgctgggtgacctgttccgcatgcccaccatctctttctggctttaatatg

SEQ ID NO: 9877 - DNA, 387 bp, Homo sapiens
aggtacagaatttgatattaagataatttcctaatttaaaaactactctgccaactatggatactgaacaaaataaaagactatatgctctaaaccctaaaagttgtccatctaaattacagaacactatgtcgacaatgtgtaaccatagcaacattttcaactgtaatcaggtctaatcattgcaaatgtcatattgatctaaaagggtatgttttttcttccaacaacttactgacatttcacccatttcccaaaataagaacaatgaaaagaaatagctgacaattgttaagttgccttacatcattcataatgtgcacaggacatggagtcttacttatgaccaaatcacactttttgcgcaatgaaaactttccaatcatt

SEQ ID NO: 9878 - DNA, 385 bp, Homo sapiens
aggtacgagtagagtcagtagcttctcttgtcttatcccaaaggagatggtgcctgctcctgaagctgatcctggaatttggttggatttattaactctgtgcccagagctggccttctgatgggcagacttgtgccgggcttgttattaagacagggttttatgtctctagtcgtttcattcccattttctgttctatttggccagtctccattttgtgggtcttacctctccatgctgactctagatatttgagagcaaggttaactaagaccacattttagttctagttcattgtgcctgacactcagttagaggttcaataaagaatgtatctacctgtccctaactgtgcagaactcacttctttgtaagcagtgaagat

SEQ ID NO: 9879 - DNA, 376 bp, Homo sapiens
ccgggcaggtacgcggggagaatcctttgcgctctcggtgcccccctccacgcccaggagcgtgggaaccctgcttaagggctttactagggaaaacggtgctggttcactggggcgcgtttccgggaaggtgaataccggtgaaagttatgctgagggtgaggtaggctctgacgacgcacttgcaggttgaatactggcacatcatttacttgttactcccgtgtggtgagtgcacctgtgggttttgatgccggatcaaattcctggaaagaggcgcgcattaagactgcggattgctgagctgcgcgacactccgtatttttccaaaacgtatttgtaatattctttcaacctgtttgcataatgggacatc

SEQ ID NO: 9880 - DNA, 385 bp, Homo sapiens
aggtactattaaatttaatgagaggtaacccatgcaccggcaggaagttcaaggggacagaaggggcttgctccactctggagccctatctcctctcacctccttccttctagtttgacatgcgatcttgtctctctcttttataaagtgcttccaggcccttttgattaggatgctgtcctaaatccttcctaaagagaggttttggagccaccaacactgcttcactgtggaataaactttccttattaagattcttcattcactcataatcatctcctttttcctcactgctcattcatttatggagatagcacccatatcatagctacttggtcaaatcatgggtgatacttcccacttaggagaggaaagatgactaggg

SEQ ID NO: 9881 - DNA, 400 bp, Homo sapiens
cgggcaggtactgttcattcaatttttctgaatatttgaaaaattttaacataaaatcttgagaaaaagtaaactgtagatgctaatagcatacaaagtgcagtcagtgtggagaacagaagagaaagatgaattccaatgaaaaaaattcaccaggtttgtggaggagatgggattgagcagaaacttaacagatttgggccttttaggtggaggagacaatataggaaaggcacaaacctggggaaatgcacaatgtatgctgaccaagaagtggtctggcgggtagagtaaggctggaagagactctgggagaggaacatgagaggtcccagggctctgaaccagggcaaccaacagaaaaggaaggaccgactgggctggaatccaggaggagcat

SEQ ID NO: 9882 - DNA, 410 bp, Homo sapiens
ccggccaggtacaagagatatggggtggatacctggagaacgctgtgaccacactatcatattacaagacactgaatggcttgccacccattgggtgccaatgatcagttatttattggctagctccaaatgggacatattggctattttggcactaacttatggccgtggttacctccacagtggctaggacaatgttccctatgttatgcctgggcacaaggactagttatccagacctgtcaaaaccagcaaaccttttttatttacaacttgggctaggacccaatttggtatttctaatggaattgaaccactttatctttcaatctattgtacacctccagcctaattttaaaactttgtggaatcccccctgtcctgggaggaatttcaattattcaagcctt

SEQ ID NO: 9883 - DNA, 407 bp, Homo sapiens
aggtacttttttttttttttttttttttttttggatttttagtagagacagggtttcaccgtgttagccaggatggtctcgatctcctgacctcttgatccgcccacctcggcctcccaaagtgctgggattacaggcgtgagccacccatccggcctaacgagacttatttttactcaactagatggcgttcattcatttgcttactcagctgtgccaggaattaagttgggcactgggaattccaaaaccaacaagacattctttgtcatcagggaactcacagcctagtatgagagataaacaaatgaacatgaaattataattcagtaacaaaaaatgagtgttgtggcaaagggaatgtgtaagagcttggccgggtatccagcagggatacctaactaagc

SEQ ID NO: 9884 - DNA, 463 bp, Homo sapiens
ccggcaggtacagtaatctagtatagttagtgataactattcacttcataacatgttcttaatatttatatgaataaaatatagctccttttcaaaactgttttcaaaatataacttgtgcatttcttccaaattttaacaactgtattccaagtgataatatcttcagagttaaattgaaatattttgataaatatgataagcttatattttagctagacaccagagaatattcatgaataacttttctaaggaaagatcttaccctagagggaatattttgttaagaaagtgtcctctggctggacgtggtggctcacacctgtaatcccagcactataggaggccgaggcgggcggatcacctgaggtcaggagttcgagaccagcctggccaacatggtgaaaccccatctctactgaaaatacaaaaattagccaggtgtggtggcaggtaccttgga

SEQ ID NO: 9885 - DNA, 388 bp, Homo sapiens
aggtacctcaattatctctcataacacacagggtcccatgttggccattgcctcagcacatagtcaggtagccagcctctctgaatgcctggtagccaggattaaaataaataccctaggtattatctgcatatctcagggtcaggatatatcccatgactaagcccacaatcacagtaaattctttgagccagaccacattttggactcacatttaatgtaaatccacatcactccaatcctgcatgatggcacaggtagatttttgggagctggacaataaacaactattgagtgcatccccacggaccccaaaattcaattttataagaagtatctcaaggcattaataagtgcatcaaagatggtcaatgtggcattatttggc

SEQ ID NO: 9886 - DNA, 843 bp, Homo sapiens
  misc_feature 288, 564: n = A,T,C or G
ccgggcaggtactctgtgttccgcctgctcaagttctagacttctggtgtccatagcaacccagcagaaaacatctgcatagcctttgggctgacgtgagttaaacttgagcagtgaagcagcataagttttatggtgcaaggcacactacagatcctcccttacccctcacatctgatccctctgcctatgctcagagccactgctatttctacaaatctacaaggcccagactgaggtgatgaccgggccaatctctggaatagtgtcagacaattagatactctntcctgtcttcaggagcccatctggaataaagctacttatcaagtttcaaaaacaacagaaaagaaatgagattgaggtggaaaacaacccaagtgttcatcaacagatgaatggagatgcaaaatgtggtctctccatattacagaacatgattcagcctcgaacaagaaagcaatgttgatgcaagcgtcaacacagatgaaccatgaggatattatgctaagtgaaatgagccaatctcaaaaagcaattactgtatgatttcacttatatganggacctagagttgtccaaatcatagagacagaagttgaaggtggttggcaggggcttgggagaaagggatggaagtgactgcttaatgggatagagcttcaatttgcaggagaacaagtcttgagtggatggtatgatccaccacaatggaattgacctatgccctaaagttcctttaaaatgttacatggtcctggccgtttaaactaggatccccggcttgaggatttcaattaacttttgtaccgccacctcaggggggccgtaccactttgttcc

SEQ ID NO: 9887 - DNA, 440 bp, Homo sapiens
aggtaccctcattgtagccatgggaaaattgatgttcagtggggatcagtgaattaaatggggtcatacaagtataaaaattaaaaaaaaaaagacttcatgcccaatctcatatgatgtggaagaactgttagagagaccaacagggtagtgggttagagatttccagagtcttacattttctagaggaggtatttaatttcttctcactcatccagtgttgtatttaggaatttcctggcaacagaactcatgactttaatcccactagctattgcttattgtcctggtccaattgccaattacctgtgtcttggaagaagtgatttctaggttcaccattatggaagattcttattcagaaagtctggatagggcttatagcaagttatttatttttaaaagttccataggtgattctgataggcagtgaggttagg

SEQ ID NO: 9888 - DNA, 382 bp, Homo sapiens
ccgggcaggtacacatttgacattgcataactaatttacttacttcacatttaaaaaacagatttgtgtatgtctgtgaaaaagacaatgtgttgatagtagaactataaggtagaaagttcctctttctccttctgatccttcccctgcccttttcctcaaatgtgactacaaactgttaacagtttgaagtcccctaagttttaaaatcaaatggaatgaaatggcatttaggaacttggaagagtggaaaccttttttccagacctatgctaccaactgagtttatattttcaggcagatatgatgaatttgctgtgggccttggagtcagcccactgttccaatttcttgtttcattcctagagccacacgccaagtg

SEQ ID NO: 9889 - DNA, 394 bp, Homo sapiens
ccgggcaggtacctgatttgaccaagtcttcacactttaccttgaatgatcactaaccacaaatattctccagtgaatctctttaaattaaaaaaaaagcactatagtagcccacatatgcaagatttatcctcctgaaggctgaaaactacctcttttccctttttatttaaaagtcactagtatatgtttcttccttgtaaactactcatttctaaaaagtcttatcagagttcctgaaacaggaggacaacaagtagagaaataagcaatttaataaacccagatgtgagcagatgttatgttcaggaatagtcttaagaagtggcttccatgcattcacttgacaagtattatcaagcaccttctctgtccaggcaaagagctaaccctc

SEQ ID NO: 9890 - DNA, 432 bp, Homo sapiens
aggtaccccctggctgattccaagcctgtctttggctgttgcgggaccatagaaaccttgaacatctggctgtgactcccatttggtattggcctgaacattccaccttgcaaaccttattctaaagctacctcaatttatggcagtgatttccctctgagaagcttcctggcaagatttttagttagatctgggttggttctaccctgcacagtaatctggcactgttcaggaatgctaaaactctgtatctcctctgcctgaccacattgtggtttacattgatgtgactccacccccagtgttaggggtagcctaagactctccaatggaaaatggagctccggtgagtagggtgggactgttgaaaagtggaaagttggcacttgtctacttatgttactttcctttcttcttttttattttccccac

SEQ ID NO: 9891 - DNA, 405 bp, Homo sapiens
ccgggcaggtactgggattataggcgtgagccaccgcgtctggcctctaacgagatatttctaaaggttaggccttcagtcaagaattttaaagctggatcttagaggttatctaaactaacctctccatttcatagataaggaaaggggagtcccaaaaaagcactggtttggacaagttcagaaagctaaacagtgactgtggatgtatgattctgtctcttaactcctaatccaaatgtcttctcactagataaggctgtgccttctacatttgaaggctcaaaccccatggatggatggagggaaggatgggtgggaggctatcgtcgtactatatagttcattttgactaatccttggatttcttcactctaggctagatatactctactctccctcctg

SEQ ID NO: 9892 - DNA, 396 bp, Homo sapiens
aggtacaatggtgcgatctcagctcactgcaacctctgcctcctgggttcaagcgaactcctgcctcagtctctcaagtagctgggattacaagtgtgcaccaccacggccagctaattttttgtgttcttcgtagagacggggtttcaccatgttggtcaggctggtctcgaactcctgacctcaggtgatccacctgccacagcttcccaaagtgctggcaatacaaccgtgagccactgagcccggcccctttgtccaccttggttgaatgtcaggcgttatttgtctcctaccacattagaaacatcctgcagacaaagccctgagctgaatcttctttggggccctaacacccatctggacaggtaagaggacaggcagtgaatgtttaca

SEQ ID NO: 9893 - DNA, 425 bp, Homo sapiens
ccgggctggtactacgagggactagctgtgcaactctgggcacggtgcttaatctaggccttagttttcatatttgtaaaatgtggtcaattgataaagacctctctcatagagttgttacgaggattaagtaagataatacgtagaaagcatttagcacagtgtctaaaaatagtaagttcttaaaaactgcaacctgttattatcatccaacttacttgtgactacatccagatatttaaacacttggaagtaaagcaaaatataaatgtaacttttgaatcacaccaatagaaaaatttagaaagtcatatggtccctgagaagccttaaattcactaaagataaatgggcgaaccggctttccaaggaaaacaattctgaaaaaataaggaatttttggaaacacaaaatttattttggtt

SEQ ID NO: 9894 - DNA, 391 bp, Homo sapiens
gccgcccggccaggtactatagtccaagattgaaatctgtcttattaatcattttccccttctgtctcccctaattgccttactgtatggttcctaatgacttctagttattcttttgttttccttccattaacttaaaggatatgtgtatcctctttttatgtattcatagaagatacctaaaggagatattgtatacatatatataagatgttcatatgttcctaattttacaataattgttaaatgttatgtagatacataccctgtaatatgtatatgtaatatgtaatacagagaagtgtgatatacggggaaattacccatttagtaatcctttcaccagttggttttctgtctttctgtgctatgtctgtcttctctgaattct

SEQ ID NO: 9895 - DNA, 367 bp, Homo sapiens
aggtacttttttttttttttttttttttttttttttttaagatgggatgttgcagtgttgtctgggctggagtataatggctattcacagatgtgatcatcacatattatagtatccaactccgagactcaagcaatcctctagcctcagcctttcgagtagctgggactacaggcatgtcaccatgcctggctcttacaattacacattgttattttttgactccacttaaaatagctgagattctcttgatcaaataaagccatcaattaaagggtttaaaaagccatacacttgtttttgggaggattaccccattttaagccatttaaaagagtaaccagaaaatttaagccaaagtgcccaa

SEQ ID NO: 9896 - DNA, 424 bp, Homo sapiens
taggccctatcactactatagggcaattgagctcaccgcgggggcggccgaggtactaaccttagctagtaagtaggaaggcttggaatcgaccccagctcttctggcttcaaagctcctatacatggtgccaggacatataatccagtcctcctatcttcccacccagtggctctttgctgttataatgtccatcatccctaccctgtctttccttctccaccttctacttaggctggattcagtcctaattatttaccaagcaacagtgatgatgaagctaataatcatcatacatgtttgtgtgtagcctagttcaacctttaattactgctctctccccagcacctagaatagtgcccagcccattattgggctgataaatatttgttgaataaatgaatacatgaatattattcgtatg

SEQ ID NO: 9897 - DNA, 433 bp, Homo sapiens
ccgggcaggtacatgaaaggagattgagggcagggagctcacagaaccaagacagcaggacccaggattcagacctggaaaatttttatttcctggctggtttgtgtgccctcatgcatgttatttacagtgccatgttctttcacatgggaacactgacacaggtgaaatgggaggttccataggatgatagtgcaaaaacattaaagacaatcctagcagatgcagtgagttcaagggagagtccttgtggagtaacacgaaaggcctggtggatgagatgtatgaagatctaaatgcctgcagatagtgagctgtctgcaactaccacaaagcaaaatcatgggcgataactccccagggtaggatctggcctgagcatccccactgggagatgggaggtgatgggctctgtagtgcttagctgaataga

SEQ ID NO: 9898 - DNA, 397 bp, Homo sapiens
aggtacttctagaatccacagctctgggagggctaccttaaattaacactggcagttctttgcaattagggtgccataaaagcagcacagttgactccaaaatggactgagttttggaaagatgtctgccagcaaaatcatatagactctcttgctgaagggatgaaaaattaataatgccttgaggtatattaatataaaaatatgtgaccaagcagtgtaattaattcccctttttcctcaaaatgtagcctttttttttgagatggagtttcactctgtcacccacgctggagtgcagtggtgcgatctcagctcactgcaacctcaacctcctgggttcaagcaattctcctgcctcagcctcccaaagtgctgggactacaggtgtgtgcca

SEQ ID NO: 9899 - DNA, 386 bp, Homo sapiens
aggtacttagtgtagatatttaaggctgatcatttggatggatcagacagaccatgtctcaaagcatgctggttgtatgagctaaggcaaataatgtcaaatttttagcactgacttgagggttcttgtgagagttaaaggagataagggaggccaggcccaggggctcaagcctgtaatcctagcactttgggagcccgaggcaggtgggtcacgaggtcaggagtttgagaccagcctggccaatatggtgaaaccccatctctactaaaaatacaaaaattagccagtcatggtggtgtgcgcctataatcccagctactcaggaagctgaagcaggagaatcactcaaacctggaaggaggaggatgcagtgagctgagatc

SEQ ID NO: 9900 - DNA, 378 bp, Homo sapiens
ccgggcaggtactgaccttatacaataaattgggtagttttccttctccctttattttctgaaagtttgtataagagtgttagttcatttgttggtgttccattgatataaatatatcttaaagttttcatagaatttaccagtgaccttttgagtattataaaatgtccttttttgcctcttatactctttgtcttgaagtctatgtggtagcattaatatgggcacgaatcagctttcttatgcttattatttacatagtttatcttttctgtcttctggctgtcttaaagatttttctttttctgtttagatttcccataatgttccacggtgttagttttattttgtgttttattcttgctttgcagctttgct

SEQ ID NO: 9901 - DNA, 410 bp, Homo sapiens
ccgggcaggtactactggcttcccagtggttgggttgagtataagcccccaaatatgagtaaaagaagaaaaagttaattcaatcaccaagtcttgctcgcatattaaaaattggatagatgaatgttcaatcatatgttttggctttggccagccagacgaggtcaatttttagatttgaactgcttagaattcttcaggcaagtcttgatggagcacttcttggatagttagaactttaccaggttcacaggagagctcagatgaagcgaacacctcatccacactggtttcctttggagacctttactgttgagaggtggttttcatagccgcaaaatgacaagtgcaagttgagtagatcagtgtttatcaaccaggtgccacattgtgccccaagagacatttgc

SEQ ID NO: 9902 - DNA, 378 bp, Homo sapiens
ccgggcaggtacagcattattagctggggctttcactgaaaaccccagggtctctttctattgtccccatatggttggagtcacaagagtgggagagatggccaagctctctgcagaggatcctggcagcagcctgaaccctcttgctacttccatcaaaggaaaaaaaaatcaaatatttacccccacgagcttataatattacagagaactccaccatcctgccctgcaaaatatcctgggatttgactaatactagagctgcttttctagtccttgagtgactaggaaggaagaaccaaaagcttgactcccctgcagcagtgagtctctggctttggtttgcccaggaacccttagggcccacgtaaaacacac

SEQ ID NO: 9903 - DNA, 386 bp, Homo sapiens
ccgggcaggtaccaagaggagagagctgtccaaaagtggaagatatcgtttctggcttaaggtgcgatgaaacaaaacaggagacaccaaaaagaagtgcggaaaagctaggtctcagagtagggcggcaggctgaggagggccgcgctgaggaggaagtggatgggtgccagggggtgaactcacagggagaccctttagaaggggatgactgcctgatctgtttccatggactcttctatttttattaggattatccatttctcttcctacaagctcttttgctttttgtccacccttaagttataatgtatatactgtttaaaaacatttaagtgatacagaagtatatcaaggaaaaatgatgactattagtagtttggtaa

SEQ ID NO: 9904 - DNA, 417 bp, Homo sapiens
aggtacctgccctcaatggagctcacagtctagtgggggttgaaagacaggatatagacaataaaataaatatgtaaaatatttgtcatgttacattttgatatacaacatgaagaaaaattaagcaaggaagagagatagggagtaaagggtggagggttatatatattgataggaatggtctatggtgctagcatttgaggaaaggcttacagaaagacacttattgctttatatcttagacaggatattctttggccttgaatgtataataaccctttttaaactcgctcttgatgataatgtcaataaacctttttttatttcttaagtgacggataaataatactaaagtaaccttaaattgaatgtcctcagaacccctttataaatagtattaaagccttttgggtacca

SEQ ID NO: 9905 - DNA, 515 bp, Homo sapiens
aggtactttctccattttaatcctggaaattaggcaaccttctgggttaaagcaagcgttctccgccactgactaacagtgagtgtataatggatctgtttccccacagatagccagctgtctgcattaattacaggactgcattgcatttctggtgaaagagaccttttaatttctggggtcagggccttgtttcacatttcctaaagactaaaggtggccacttctcttctcaatggcttggacactttagtccaaagaacccaataccatattcctttcaccccaatttttaaggaaacaacaatgttattaaaaaccagttcaggccacagaatgggacgaggccattccctggctttctttgccttctggccatggagaaccccaaacacccctttccctgattttaattttgggacatttaaatggattaaattaccaaaagccaaaagtagttaaggcctattttggtttgattcttaaaaccaaaaatgggtgttgtaaaaataaat

SEQ ID NO: 9906 - DNA, 408 bp, Homo sapiens
ccgggcaggtactgggaccttcacactgcacaggggagcaagaacctcttctcttagcctctgctttgtgggattttccaaaatcctcctggcttcttttcccttcccttccttcttcccagagcaggggccagctttacctcagttggtagggccacacaccatggggtggagatggtcaaaggtcctctgcttggacaagttgctccctgtcttcattcctctggccaaggccagtgttaggtggggactggtgagctgtctggccccacagggctaagctttcctttaggtgggtttatcccacttctcaacagtctaacaaagaacagattccacaagcccacttcgtctcttgctgcaagctatgccttccgattctgccttcattagaaataagggtgatat

SEQ ID NO: 9907 - DNA, 383 bp, Homo sapiens
ccgggcaggtacacctataaaatggaatgttaagtaacattaaaaattatgtggaaaattaaataaatgttcatgaaaaaaaaaactacggaactgtagcctggtctcacacagggcctttgccttgtttgcccagggtccaggttaccaaggttagggagagactgagcacaaagaccgtgaaccccttaccacttaaccctgatgcagggcaagggggcatcggctggactgagcgcagtgtgggtgggaggccttgcgttccatgagcctgatgctcaggagcttgtgagctgccggtgagtgtccctctatgggatgcagcctgagaagttttttccacagaggagtgtttaataacctacaggcttatccagccttgt

SEQ ID NO: 9908 - DNA, 457 bp, Homo sapiens
aggtactcaggctttcaaagggttgaggaaaggtcttttgtttgaaggaaggagtatctgaacatgtttaaatgcaaagctgtatgtgccaggagtgtgaggctgtagctagatcaagtcatttatcaagggagaggtcctagggcacaggaaaaggggttcgtcttgggcaggacaggccctggcaagaaggtatggaagcgtgtgtgtgtgtgggtgtctaagagggaagttctgcccgaggctgatatttggtgggggagtgtctgagattataccgcatatattgtatagataggtggggtttaaagtgtttttttacttaccagtttagctttatttcagtttatctactttatcgtggtatttacttttttttctttaataatctttatcgattctcttaatctcatctatttatacatcctaatttttttatactgtttcttattatgtt

SEQ ID NO: 9909 - DNA, 424 bp, Homo sapiens
aggtacctacctgcggtatctgatcagtttctgcctagtcagatgtgccctgttgctgagcctgcttgggtggggagcatgggaaaatggggcaagtgcttcatgagggagctgttctcagccgccccctctcccaactccccagctctctctccttgtcctgtctcctgtttctgggctctaatcctggtcaggcccaatgccccttgcctgtgatgctgggtctgcagttttgctcgccgtcctcgctttgccttcttgcccgccacttccagcattcctcctctgctcagcttctgagctggtgtcaggtttctacctgcctggccactgagcccacctgaagatgtctggccaattccttttagcctctgccttctcaccatgccagggatgcttattcatggtgggaccacaggtggaa

SEQ ID NO: 9910 - DNA, 416 bp, Homo sapiens
aggtacatttgttgggggcgtgacattaacatataaccacttagagtggacatgcagttagagaaaagtcaatgagctggaaccaagctgggaattccaacatgtagaagttaaacacaagaggaggagccagcaaaggaaacagaaacagagcttccagcaggtggggggcatttggaagaaaacgatgccatagaagccaagatgaaatagacatcaaggagaaggaagtagtcaattgttttgaatgctatgaagaaagataagaataggtaaatagtccttatatttgataacagaggtcactagtgatcttgatgaggggtttcaatagaatggtgggattatataccttcctggattcaactgaggtaaggaaggcattccgaatagagacaggccctataaacagctca

SEQ ID NO: 9911 - DNA, 464 bp, Homo sapiens
ccgggcaggtactttaggctgagaaataaatagaaggtgagaaaaaagaacagtctttatagtcagtaagagtgaaaagagaaagatggtagttggggaaagacagatggggagaaaggttggctggttgttaataaaacagtaaaggatgagcatgtattataaatgctggtgggaagaaaccttgtggcaaggagggtggtagtggttgtaaaaaaaataagaggaattatattatgaaaaggtttaaagaagaaactggaaacccaggttgtgatccccagaaccattatgaaagggggaaataaacccttggggcaaaaagttttaaaacatattattcaaggaagggaaatggaaacctgtacaagaaagggtaaggggtttatacaaaaatgttgggcaaggaagggagttttttgaaattaaaaatttctcattcttgaaaaatccctcctaattta

SEQ ID NO: 9912 - DNA, 473 bp, Homo sapiens
aggtacttgcccctttcaaagtatatcattttccaaattatcttatatttgtggagaatatagctgaatggcacataaactatcttgcttatatacttttagatcactgtcttttgtttgattgattttgtttggattttttaattcttaatgttttttgttttttatttattaaatttttttatctttttcatatttttataatttttattttatttaattttttaatattttttaatattattgatttttttttaaatttttatatttttttttacttttaaatttttttctttattataacatttttttcatattattattttttattatttttttaattattatttttacttttttttttttttatttttctatttattttaaattttattattgttcattttttaatactttatttctttatatttattttttgatgtatttattgtttaatatgattgagattgtat

SEQ ID NO: 9913 - DNA, 387 bp, Homo sapiens
ccgggcaggtactttgagaaggaaatactgggttgtaatcatggataaaatatgcaggggaggggaggagattatagatattaatatagagtttagggtggcattaggcaaggatgacatctgaatatctaacttccattttacattgccatgtaagtctttttgcccagtgggtttgggggacattgaggcagaactcctggaaaatagaaggaagtgaaaggtcactggtctctccaataatcttgatgggaaggactagacaacaccattagcaaaatgtgcctcttaaaaactcaagacacaagcattatcttcatctcactgaaataacagctacatcctttattaacatgagaaaatcgaaaagcttaagaaaattgtcct

SEQ ID NO: 9914 - DNA, 391 bp, Homo sapiens
ccgggcaggtgagagcaaagaaatgtgatgagccagctaagctgaccagacttgtctggcaacctgcatggagtataaaatgggagagcattttcacattttcatatttccccccttggtcattctctctgtggccagagcagaagtattatattttgggggtgcactgagaaagggttttgaggctgggcgcagtagctcatgcctgtaatcctagcactttgggagaccgaggcgggcagatcacctgaggctcaggagttcaagaccaacctcaacctggccaaaatggcaaaaccccatctccactaaaaatagaaaaaattagcagggtgtgagtggtgggcacccgatgctgagggaggagaattgcttgaacccaggaggcaga

SEQ ID NO: 9915 - DNA, 353 bp, Homo sapiens
ccgggcaggtacccactccctcaattttctctaaagatctcatttcagacatttaaatgaatattatgctacacaacagggaaactcagatgtccatcccctccttattcattcaaacatttccactgccataatatggcagctgcaacgccaagaaagaagaaaggaaaaaagactaaaagaggtgaagaatgaaaaagacctcaaagaaatttttttttaagaggctgggtcttactctgtcacctagggtggagtccagtggtaggatcatagttcattgtaaccttgaactcttgggctcaggcaatcctctcacctcagcctcccaagtagctgtgactacaggcctc

SEQ ID NO: 9916 - DNA, 438 bp, Homo sapiens
aggtactggtagtttaaaatatctcaatatgaaatggctgaataaaatcatcacattttcattttatatcaatggttctgaaagaatgatgcaagaaaaatctctaaccttagtgagatgaattttgtaaagttcagtgaattccttccatgcacatttgaagccagtccaggttttttgacctaagtggcctcagtcatgttcagcacctaacgaacaaatcatctcctgtctccaatgtcattaacaactctatgggtgaatgaggatcactaactgtggagtaagaaggaagcaggcagcctgtttccaataacatgttgtgattcaaccacaatcaaatgttataaaactaatgtcttaaagttaatttgaccttgaaatgtctttgagttaagattagtcacaccctaatgtattaattcctcgaaaaatttt

SEQ ID NO: 9917 - DNA, 490 bp, Homo sapiens
  misc_feature 335: n = A,T,C or G
aggtacttcattcctttttgtgctgagtaatagtcagttataaggatacaccacgttttgtttatgcattcatcagttgatgaacatttgggttgttttcactttttggctattgtgactaatgctgctgtaagtattcttgtatgagtttttgtatagatgtgtgggttcattcccctcttagtggattacctaaggaggaggaacttgctgggtcgtatgggtaactcttatatttcaacaattttgagggaacccaccaacactttttttcaaaggtgggccaccaccattttttacccaatccttgctaggcaacggtattgaaataattncctattttctctttgcatttcctttaccaaacaacttttgcccatgttcttgtccttttttttaatttttaagcccattctttttggtggggtattgaagggtgggtattctggctttgttggttttttgaattttatatttttcccctaaatgg

SEQ ID NO: 9918 - DNA, 403 bp, Homo sapiens
ccgggcaggtacaaatattactataccaaggtgtagaggagtatgtctaagcctgtaatgatagcaggtggcaaggtggaggtagatggccttctgtggtagttcacggggaggaagacagtggatccaagcaaataagaaaggccacattttttttttaattttgcatctcaaggtattttagtcaaaattttttttttagttttccacagcaaacgattacgtaaaatataaacctaatgtattctttaggactaagtgtgccttttctctatatgctaagaggtgtaagtagagaatagacgttttagtatcctaaccaatgaatattcacaagaaaaggcttcaaaacttaattatcttggccttatttctaaatttaacctaaagtcatcttgctttt

SEQ ID NO: 9919 - DNA, 455 bp, Homo sapiens
ggggctgctcgatctctatcatagggcgacattggagctcctccgcggtggcggccgcccgggcaggtacaagggttcccttttctccacatactcaccaccatttgttattgcctgtctttggatacaagccattttaactggaatgaaatgatatctcattgtagttttgatgtgcatttttctgatgatccagtgatgttgagcaccttttcatatgcctgtttgccatttgtatgtcttcttctgagaagtatctattcatatctttcacctattttttgatgagattattagattttttttcctgtagagttgtttaaactccttataattctggtgattaattccgatccctccactggctttcatttttctcttccccctccccactccacctacccatatgtagggttttggtcaccatttgaccttgcatccctgttagccgcaca

SEQ ID NO: 9920 - DNA, 382 bp, Homo sapiens
ccgggcaggtacaaaattatctttattcagaagatcacatagcagcatgttcataatcaaaaacattttaccttagcaataaacaccagtcatttatgcaagagcttcccagggttggtagatatttttattgcttcattttgctctagttaaagaaatggaaaagatgcttttaacttattatcaatcctacatcaggtgtcaagaaatgcaaagcattagaaagagagagggaaagagggatcttcaatattctctgtaaaggagcaaattctgacatggtcatctcagacaccctcttttaattccaaagtctaaccttacaaaagcagagaaaggccgggcacggtggctcatgcctgtaatccaagcactttgggag

SEQ ID NO: 9921 - DNA, 413 bp, Homo sapiens
  misc_feature 413: n = A,T,C or G
ccgggcaggtacatcagcgccacaccgcagggctgtccacggtgagctatgaggctggagatggttctggagcagtgaactgcagaggaaagaaggctgccctacccctgggccaccaatcactagcagtgtgacctccggcagcttcttctcctgccaaatggggatgtttgcttcactgacagaaacacagtgggtgaaccgggagtgagcggcccacttggctgaccacttaccaacatttcggcggggcctcgtgctgagacctctccccaccctgacggaacagtcagttggaaaacagccagtagttccattcccactaacatcttatagtgaccaataatactctaccataactgtcgaaaatcctaaaaactctttcaaccctgagattctacttctaagagttn

SEQ ID NO: 9922 - DNA, 377 bp, Homo sapiens
ccgggcaggtacacaggccaggcacagtggttcacacctgtaatcccaacactttgggaggctgaggcgggtggatcacaaggtcaggagatcgagaccatcctggccaacatggtgaaactctgtctctactaaaaaatacagaaatttatccagtcatggtggcacgttcctctagtcccagctactcgggaggctgaggcagaagaattacttcaacatgggatgtggaggttgcaatgagccgagatcggtccactgcactccagcctggtgacagagcgagaccccttctcataaataaaaatgttgtatgtgacagcttaccattttaaaaaaaagactgatggaagagagagaaagttgggacagcacta

SEQ ID NO: 9923 - DNA, 381 bp, Homo sapiens
  misc_feature 289, 335: n = A,T,C or G
aggtaccaacatttttctctacaaaaacttcccacatgctggatgcagtggctcactggaagcaacttgagagcctgaggtgagaggatgtcttgagcctgggaggttaaggctgcaatgagctatgatagcaccactgctctctagccggggtgatagagcaagaccctgtctcaaaaaaacaaaaacccaaaaaactcccacaaggtcaaaagattgtttattttaaacaagatcaacattctttgtttattatgaaaattacttgtttctccatagaaactgacgnaagtctgaacctttttatatatactattcactttttctaccgtggngaatctaaatgaatgacgtttgctatttaaatcttttgaggaaaga

SEQ ID NO: 9924 - DNA, 388 bp, Homo sapiens
ccgggcaggtacttttccactttgtcttctttcctgtcacacaccctatcctttcaggctgtgttgggatggacaaaagcagttctggagtcctaaggagaagatgagtgggatatgtttctgtgacctgcagtcattttaaagtttagctgttgctagctgactccatgtaagaataccttccaggaatttgatggctgtgcactctggcagtgcagctggcatggttatagggtgcttggccgaaggtttgcatagcaatatgaacgcatcctacgacacatctagccaacactggaagactgtgggtaatggacgagaaaccaagattgactttttgcaagtttttaaaaataatcttcttgtaactcacatgtgaaagaaacat

SEQ ID NO: 9925 - DNA, 388 bp, Homo sapiens
aggtacttagcagctgtgtgacctagagcacagtgctttgagtttttgagtcttagcttctgtgtctataaaatggggttcacacaactcaccttacagggctgtgagattagattacacagaaaatatattttttggctgtgggggctgggaaggtgttgctgattagcatttgaaatcccatcctgtgggtgagaaaaccccaccttatgacttggtgggaaacaaagccaacctcccactgatgaagctgaaagtagcagaaccttgcttctactgcctcccttgcagctagaggcaggcacaggactagcctgtcaattggatgcaaatgctccaggccttgaatcacaacctggtgacttgcacccaagtctattactattga

SEQ ID NO: 9926 - DNA, 405 bp, Homo sapiens
ccgttcaggtacgcgggttaataacaaaagctctcgtgttacttttaaacaaggtaaaacttaaacagttttttcctccgtttctttttttatggaaataagaggcaagtgatagcaagtgggtaattcaatggcaggggcaactgaagcactgacctgttacaagagagacggaagcttctacttgagcagatacaaatactgtcatccgtggagatttgaaagaagtctttctatcactgggtagtttgagagctcattagtcttctttagaatgggtttaaacttggaaacatcaaagcaagttacaaggaaacttagttttacagtgttggcagcctaggcgccagaatttgttataaagtgtctgaaagtggcacaggtattacttaacttttctttaag

SEQ ID NO: 9927 - DNA, 413 bp, Homo sapiens
aggtactatatgctagaaacttggctgaatgatttgacattatcctatttaatgttcatgacaatccaataacgtaaccactcatatctcccttttgtgcagataacaaactgaggcccagagaaatcaaatatgttgtcaaaatctacatcgttgaagagatgggtttcaaatccaggtcggcttggcccttgccacgacttcataatgaaattccatgggtgagtgttaccagtttctggtccatccttgcttatttcaagggtctcatcatcccatccactgtatcactttttttgttacaggctttactcttttctaccatggaaaagactaatgatatttttttctccataagcttggaaatattatcaatcaccataaaattcagccttcctctggtaactttggag

SEQ ID NO: 9928 - DNA, 373 bp, Homo sapiens
ccgggcaggtacatatctgcaaggagacatatacaaggacgttcatgccatgggttagaaacaacctaaatatccaccaataatagaatagtccatctttagaaactctttagaaaaattaaaatatactaaatatatattaatttgcctaaatttcaatagcaatgttgagtaaagatggaaattacaaaatgataaaatgggaatactttatgtagtttgttgttgttgttggttttgttttgttttgtttttggattttttttggaaatgaaggcttgctctgtcacccaggctggagtgcagtggtgcaatctctgctcactgcaacctccacctgctgggttcaagcaattctacaggcgcatgctgc

SEQ ID NO: 9929 - DNA, 405 bp, Homo sapiens
aggtacaataataaaactaagcttatgcctaaaatattctcactgagtgcctgtgaatccacgactattagcactgtggagcaatttctccttgcagaagagtgctaactctatccattaaagccttggaaattgccggtaaatatgtaaaaaatcaagtgcttaaatggatagcaattattggcaggacctaaactgatacaaaagtgttccactgtctcaatatcaaaagcccaagaatgccagattcccaaagtgagtcaaagtgcttggattgctttgcataaacatggttagccagaatcaacaccctgggattggagcttgaggtggaatttccaaatcctgcaaatgttatggctacagccccccagcaccccaatgctggacagcctaaggcatgag

SEQ ID NO: 9930 - DNA, 382 bp, Homo sapiens
aggtacttcttgggagaaaagcagactcctctagaatcccacaatttataaggcagagaacaaaaccattgtttaacaaacaggaaaaaaaaaacctcacagaataaccatcactgaagctaatgaaggagaaagtttcaaggaggaggaggtaaacattgctgaaagttgagatgagggagagaaaaacaaatctgagattagacttttggacttggcatgtagaaaatcacgggtgacatcatttggaggattttcagagccattagggaaagaattcagattgttactgaaggtgaaggaataataaacaaaagcagactgttctccaaaggaatttttatccttataaaaaaaacagccggaaattgagagagaaacc

SEQ ID NO: 9931 - DNA, 400 bp, Homo sapiens
  misc_feature 276: n = A,T,C or G
ccgggcaggtacatgccaccatgcctagctaagttttgtatttttagcagagacagggtttcaccatgttggccaggctggcctcgaactcctgaccttaggtgatccaccctcctaggtctctcaaagtgctggaattacggtgtgagccactgcgcccggcccttagtagcatcttttaatggaggtagagttgagatttcagtgactaacaactaaaggtattaaaggtaggggtttatatgatacatttgcattttagaaaactgatctaangcttcaatgtgaagaacagattgaaatggaaggggggagaagactagaaagcagaaacatttactcatttaaagtaattctggaccatgaaaacctgaaaaaaaggtataggggacttccaaaa

SEQ ID NO: 9932 - DNA, 418 bp, Homo sapiens
aggtacttgcaggtggtttggcctggaaaatctagatgagtggtttttaaatttagttgcttattagactcaagaaagaaatttaaaaaacaatactgattactgagaccagcttttctagattcttcattcagtaggagtaaggaaaggccaatgaatgtgtattgataaaaaggttcctggccgggtgcggtggctcacgcctgtaatcccagcactttgggaggccgaggcaggtggatcacctgaggtcaggagttcaagaccagcctggccaacatggtgaaaccccatctctactaaaaatagaaaaattagtcacgtgtggtggcaggggcctgtaatctcagctacttgggaggctgaggcaagagaattgctggaacctgggaggcagaggttgcagtgagccgaaatc

SEQ ID NO: 9933 - DNA, 400 bp, Homo sapiens
aggtactgttttaactcatttatcttgtggtaaacttgtagcagccgccgtaggaagctaattcaccctcatccctcacattcacaccacaatctccttctcctcaccggcattccatctcctctgcctcccaagtcacagagccccaggtgccacaatggctgtggagtctgcggtgcaacctcattgcaaatatttgtatgctcggaagaaaaacacgagttaagcagtggtaacaagcagagtcccgggaagcagtggtaacaacgcatagtcccgggaagcagtggtaacaacgcagagtcccgggaagcagtggtaacaacgcagagtcccgggaagcagtggtaacaacgcagagtcccgggaagcagtggtaacaacgcagagtacctgcccg

SEQ ID NO: 9934 - DNA, 506 bp, Homo sapiens
  misc_feature 3, 44: n = A,T,C or G
gcncaggttcgagccattcgaatatccggcgaattgtagctccnacgcgccggcggccgaggtaccttccttcttaaatccacattccacatgagttttttatctttttagatgtatatttgggaaggggctccttgctgacaatccttgaaaagtgcccagttctcaggacccagttgaaataatttccgcctggggctgggcgcggcggctcacgcctgtaatcccagcactttgggaggccaaggcgggcggatcacgaggtcaggagatcgaaaccatcctggccaacatggtgaaaccccgtctctactaaaaatacaaaaacttatccgggcgtggtgggcgggtgcctgtagtcccagctactccggaggcttatgcaggagaatggcgtgaacccgggaggcggagcttgcagtgagccgagatcttgccactgcacttccacctgggcgaaagaaagagacttccgctttaaaaaaaaaaaaatgaaagaaaaaggg

SEQ ID NO: 9935 - DNA, 394 bp, Homo sapiens
  misc_feature 274: n = A,T,C or G
aggtacaggcaacaaaagcaaaaatacacgaacgagatgccataaaactaagaagcttctctgcacagcaaaagaaacagtaatagattgaagagacaacccacaaatgggaagagaatgtttttaaaccatatctcaggtaagggggtcataccaattatatgtaaggaactcaacccagaaatgagaaaacaagcttactaaaaaataagtaaaggagttgaatagacattttctaaaaacagacatacaaaaggccaggatttttatcaanaaatgtttgataaaaaaacattcaacatttccttaattaatcaggagaaattagatgtccaaaaaccattgaaggatatttatcttaccagaattgttactgagggttattaataaaaat

SEQ ID NO: 9936 - DNA, 420 bp, Homo sapiens
ccgggcaggtactgggattatagacgtgagccaccgcgtctggcctctaacgagatatttctaaaggttaggccttcagtcaagaattttaaagctggatcttagaggttatctaaactaacctctccatttcatagataaggaaagtgagtcccagaaaagcactggtttggacaagttcagaaagctaaacagtgactgtggatgtatgattctgtctcttaactcctaatccaaatgtcttctcactagataaggctgtgccttctacatttgaaggctcaaaccccatggatggatggagggaaggatgggtggagggatggatggatagatgggtgggttaatttctcttttcttttaatccttatattccctaagagagggctcccacctccctcgtaatgtcaccttggcgtg

SEQ ID NO: 9937 - DNA, 484 bp, Homo sapiens
  misc_feature 38: n = A,T,C or G
gcatcgtcaatgttagacgctgttgaatccggcgaatngtagttggaaaactccggcggccgcccgggcaggttcacagccaagcgcttaggctgcagctgtgatatggacccaagccccagctttcacagggttgatactacagccactcaaaacagggatgtcatgaggctgcagcatcttaaatatcttagaggaaaacattctttaaaatttctttaacaacaagcctaataaaatgaagaacattttgcaggggtaaggggttgatgttgaggaggaagataatatgttaggcattaacattggatttgttcataacaattattaatattcaaacacatgttaatttttaagatcgggggcagtaaactacttctgtaaaggaccatattataaatttttaaggcttgggggttccaaaaaatctctggtcaactactcaattttttccactgcagtgcaaaatcatccttagaccttg

SEQ ID NO: 9938 - DNA, 396 bp, Homo sapiens
aggtacatactcccattccacagcttagtctaacatgcaaaaagggcatgattagagattgttggtcattaagaagaacaggaggaaacgttctggagccttggcactatgcctggggaagagaggatctcaacacccctcagccatctctgggccagaggaaagtcacctaggggttgtcctaaagagttccacgggagaagagattatgctgtctgatgaccccttactgttttctccagtatgtccctacttttttttgtccagctgagtttattaaacttgtcctgcttctgaggtcggtttcttttctaccatgtgaaggtttaaatctgctttactgtctttgctctcttttcttacttttcccagaattcctacacttactacataacc

SEQ ID NO: 9939 - DNA, 409 bp, Homo sapiens
ccgggcaggtacggcttctatgtgtgaacaacacagaccactaagagatgtgacaaagctgttccatcagaggaaacatagtctgggggacaaatcctcccattcctgataggacaggagggagcggttggctggggaagacctgagtgagggagctttcttgaggacgggttttgtcggagtgtagttcatataccatgcacagcctgtcagcatacagcttgaatgaactcacgtgtgtaaccagatcaagaggcagaatattactagggtggcagttttgagtcccatgaaaacaaacacatttactctgtctagctccatctctagttaattctaatgcagtttaaatgctcacaaaatccttatttgaatggatgagtcagtggtttgaattgaatagtttttg

SEQ ID NO: 9940 - DNA, 410 bp, Homo sapiens
aggtacctcagaatgataaatcagaatctctgaggaatgggcccaggcatcagtatttttcacacgaacaagcagaggtggatcctttaccttctcctaaaaaactgtcacaagggacaggtcacttggaaggcagtttaagagaaaaccaaaggaaaaatctggtgacacatgtaacactgtgattaatctattgcttacgatgttttatatgttgaaagtctggaattctgaatattttattatgtaagagatccagttctccaatgtcacagcctctataatttgaataataataaaggagcacaacaattcacttatgatacccaacagaagactgcaaggatatgctggggcacagagcccaattagggtttaataagacagggtttatgggtgaagcaatctta

SEQ ID NO: 9941 - DNA, 401 bp, Homo sapiens
ccgggcaggtacaatcttaaaagaatattagttacaagtaactaacaaaaagatttttaaaaggacactaaaattactttctacactattcaaacatctgatacgagctgtgcatcagttaaccactgctctatagcaaacttaccccaaactcagtggcttacaacaaccatggatgatttacacatctctacaggtcagccagtgggtgattcaggtaaccctggccgacctagacctgctcaggagacagcacacagctgacaggtcagatggcattggctggtctatgatgaaatcggcaagcacaaacctggccccctccactgggctagcctgggcacgatctcatggaggtggcggggtctgaaggtgcaagcccagtcctgtaaaaggatatc

SEQ ID NO: 9942 - DNA, 862 bp, Homo sapiens
  misc_feature 523, 531, 539, 622: n = A,T,C or G
aggtcatttgttgggggcgtgacattaacatataaccacttagagtggacatgcagttagagaaaagtcaatgagctggaaccaagctgggaattccaacatgtagaagttaaacacaagaggaggagccagcaaaggaccagaaacagagcttccagcagggtggggggcattttggaagaaaacgatgccatagaagccaagatgaaatagacatcaaggagaaggaagtagtcaattgttttgaatgctatgaagaaagataagaataggtaaatagtccttatatttgataacagaggtcactagtgatcttgatgaggggtttcaatagaatggtgggattatatacctccctggattcaactgaggtaaggaaggcatacagaatagagacaggcactataaacagctctcataattgcattctagcaattagcacactgtctgatggggaggtggctcaatctttcttgcataacttgatgaatgaagtaactatctatccatccatctatccatncatccctncacccatncttccttccatccatccatgggggtttgagccttcaaatgtagaaggcacagcctttatttagtgagaagacatttggattangagttaagagacggaatcatacattcaccgtcactggttaactttcttgactttggccaaccagtgcttttctgggacttactttcctaattattaaatggaaagttagttatataacccttaagatccactttaaattcttgactgaaggctaaccttaaaaatattcgttagagcccaacccgtggcttacccataatccagtccttgccggcggccgtttgaaataaggatacccgg

SEQ ID NO: 9943 - DNA, 430 bp, Homo sapiens
tacgcccgatcactactatagggcaattgagctcaccgcggggccggccgcccggccgggtcctgggattacaggcgtgagccaccgcgtctggcctctaacgagatatttctaaaggttaggccttcagtcaagaattttaaagctggatcttagaggttatctaaactaacctctccatttcatagataaggaaagtgagtcccagaaaagcactggcttggacaagttcagaaagctaaacagtgactgtggatgtatgattctgtctcttaactcctaatccaaatgtcttctcactagataaggctgtgccttctacatttgaaggctcaaaccccatggatggatggagggaaggatgggtggagggatggatggatagatgggatgggttggatagagtttactcattcgttttagttatggc

SEQ ID NO: 9944 - DNA, 351 bp, Homo sapiens
  misc_feature 351: n = A,T,C or G
ccgggcaggtaccattcttatctcagaatgctgtaaaccatcagtagaagcagtttagatttggactgcatggtaaaatgaaaagtaataaccctccaaccacaacctagtcagggtattaataattatatgtagcaagaaaacaaagaagaaaataatattgaaaaaatggagattccccaaccagtttcatatttgaaggatctgagttgtatttttattaaggaaattttttttctgaatactgtcttccaaaatgttaacattaaaatctgaatcagaggactctgaatggaaaagaagtttgatcactgacacctagggctctgaagcgtgtgtggccacatggan

SEQ ID NO: 9945 - DNA, 406 bp, Homo sapiens
aggtacagacgagggaacgtccagtctggcctgccaaagaagaaaagagtaagctcagatttgagaatgtaaaccctaacaaaaacaaaagctgctctcttgctgtgaagtcgctacagctgtcttcactggtcaagtgggtgattttgacatgttcaaacctggactgctttgtgatgaagggtttgattttcctctaactaggacaaggatgggacaaagacaatttggtagcttggtatctctaaagtcaggaggcaaggattacaaacagccggcctgtaacagcaacacagtctgcgcaccagccacaagaacacaggcatcttatctggctggtgacgcacagtaactgtgcggggcacagcagccagcaagcgggtcagacataggagagaccaacagg

SEQ ID NO: 9946 - DNA, 458 bp, Homo sapiens
aggtacttcaatggtggaaagaggcatcaatgattaaccataatcatttctgatcatgaccaagtcacccctgagactagtaactgcaggtgctcacaaaaaaatatgcagctgtccttcctgccttcaggggatcattcatgaaagtaatttctcacctgaccaaaatgatcgcttaacatttattgcatcattgcccctgtttctgtagactactctaccgaagttttaatttgtcactagtttaaagggccaaaagatctgttttcttcagatattagagacacaaaccaagcatctcccactttcttggaattccttctcaaaaatgactaaagtctgagactgttttcttatttaatgtctattgaattctgttttacagaatttcaaaagagcaggttcttagcttacttttcaatggaacattttagccaggtagtataagtacctgcccg

SEQ ID NO: 9947 - DNA, 410 bp, Homo sapiens
aggtacagttttgtaagcaagatgattgaaagatctactgagtgccgtggagtcacagagaggaacaactaccctcaggctatggagttcagtgaaggctgcctaaagagaggatgagttgtcagctgagacttacagaatgaaagaaatgtcctagttgtttagcttgactgtaaacaaatggggcttattacaggattctgtatgcatttttaagtctgatgtattttcctcaaaagatgaggatggtaaggatgatatggggggaagggcactaagcagaaggttctttattcttcttactgccctgtttctcccctgctgtcttatttataacctcttgtttaatgacaagaatttctattgaacaaattatttattttatataaatgtggataattggaatcaag

SEQ ID NO: 9948 - DNA, 398 bp, Homo sapiens
ccgggcaggtactttttttttttttttttttttttttggagatggtgtctcactttgttgcctaggctggtctcacactcctggcctcaagctgatccttccacctcagcctcccaaagcactggggttgctggcgtgagtcaccatacccagctgaaaagtgatttcttataagccaagcaatcagcctctgcagagaagacaggaccctcagcacatatctagctctgtaattcctcaactcaagttgggcattactatcacccctacattaacatgttctcattaggaatatgaccaagaccaggacagagtcacaagagaaacagtcagtggatcatgtgacacatgagatttattggtccaataaggtgaactggtcaggaaccagatctgct

SEQ ID NO: 9949 - DNA, 358 bp, Homo sapiens
aggtactttgttcttttactactcaatgagactgagagcctgctggattcactaagaccaggtgaacccagagggctctcggtctcattgactcaattgggtttgaatctcaattctgcaacctacgtggctttgggcaggtttcctcattttcaaaattatacaataatatttaccttttaaacttattgaaggattggaaagctgtaacacctagcatgctgtcgtggcataaggtgggggttaagtaaaaagtagctactattaacatttttgaaaagtgctccttcattttccctgctccctttcatactcttcatcctactttcctggtagttcatttcttcttagttggctg

SEQ ID NO: 9950 - DNA, 482 bp, Homo sapiens
ccgggcaggtacctactaaacagcaaagaaaccatcctagaggaaacaaagagcctgactcagaagcgctcaacaagcagcaaattaagccagagcctaatttggtctgtggtctcttaactgtggagccaagaacaaggagaaacaaaagttgggggccagatgagagaccacaggaacatgagggagcaccaaattattgcccattcctttcaaggccaaaagctcactttagggtattggatattaggccagtcaaatatgttttgaaaggggtttaaatggcattccaatccctaggcttcctaacttaaagacacggtgagcaaattattgcgccaaaaagtttgtatctgtgattttgcctttttgtggaacatgtcgctatttctgggccccgaatcaaagttaatacaatgggaacaaatagggcaacaccgctttgttggttaaataacctcacttcaagcccaaacaatatg

SEQ ID NO: 9951 - DNA, 790 bp, Homo sapiens
aggtacccaaattaccttgatttaaaccccagctcgcccatttattggccgtatgaccttggacaagttatagaatctctttgggtctgttgtaacatggtaataataatacctacctacctaacacacagggtggttgtagattaaaggagttgccacatgttggaagcatgcttatgctaacaggcatactcatgaagtatcagctatttaaattatcatcctccctcaacaggattctataaactggttccaagataaggtaacctgggataataaagttttctgatttggttagaaatacacctagaaaacttagaaaccaggcaaatgtgaaacataaagagtagatatctgggaacaaaaaagtatattataaaatgccaatactgtcaattcatataaaaggcatcttaatcaatctcccactccccacaaatggaaagcggaggatggtacccgggattatcattattattattttttaagagacagggtcttactagttgcccctgttgggcttgaatttctgagttcaagcgatccttccaccttaaggctcttagtagctgggactaaaagcatgtgccaccacacccaacctccattcaagggttctagaaattggtggggtcatattttagaaccttgaaattggcgcctttactttggttcataaaatggtcttgaaataaaatttttcccttgccccgggggggggctcgcttcttataaaaaaactctttaagggtgggggggaattttactcttctcctccctcctggggggt

SEQ ID NO: 9952 - DNA, 455 bp, Homo sapiens
aggtacttgagggcatcattaaaatcagccagtgttcagtgagagacttaatgatggatttaatagtattaaatgggcaaaaatgcccttggcctttacatgctcatttaaaaacatataaaagagcagtaatttcacgcagttttactttttctcaaaaattcttgtttctaaattataaattgccacactatagaccctactttttttttataccttttaactattatataactctctttcacttcactaattaaaacattacttaataaatcttttaaacctattcaataaatatcaaaatatttattactaataaatttattattaattatacttattataatatacttaaatataattaaatctttaacataaatattaatatttattattttaaaaaatattatctttttctaaacatatttatgttctcactccatactttttatacc

SEQ ID NO: 9953 - DNA, 399 bp, Homo sapiens
aggtaccttcttggctatgtctgccagcaggaacaaagaggcatccaaagcatgtcctttgggccatggcattgtctttttccttctaagtctaggatgggtgtgtctgctgaagctacatcattgtgtggaacctgagctgtggtccagctttccagcctctagtgagcagtaaggcacactgcaaggggaatgtggcagaggtgagtggatccacatggagtatttactacatccacttcattggattctacctggatcactgtgttggaggtggaaggccatctgtgatttgtggtgcttctaaaacattctaaggacgtgccctatttcagttaagacacacatttgatttctagctatgcaacctttacaactgacctgatacttcctgaactt

SEQ ID NO: 9954 - DNA, 854 bp, Homo sapiens
ccgggcaggtaccctacctgtaatatttgtattaataatatcttattagcattttaattagaaatttaatattaatgatttggaatcagtagttttcaacaattttaatagtgcaaatttatttgtagtatttgatggggagatatggtgttttgtgactatatttacaactggatgtatctgggaatatctcaaagtttctcccaaaaggaaaacatttctattacaaatatgtgacttgtgaaaataatttgtaattcttttcaatatatctcattttttttttttttttgagacagagtcttgctctatcacccaggctggagtgcagtggggcgatcttggctcactgcaacctccgcctcctgggttcaagcaattctcctgcctccgcctcccgagtagctgagattacaggcacccaccaccacgcctgtctaatttttgtatttttagtagagatggggtttcacgatgttggccaaactggtctggaactcctgacctcaagtgatctgcccgtctcgggcttcaaaagtgctgggattacaggcgtgcgccattacgcgggccaatacgtgtcattcttaatacatgtcttcctttttatttttttttccccccgctttttattgagcttctactatttgctgggtatgcagaggtggaaaaaaattaaggtttaatcttattcccctgagaagccttttttggtattttggtgtacctgggcggtcttaaactaaggatcccccggcttgagaattggaatcagcttattattccggcaccctggggggggcccggcccacctttgttcccttatgagggatattggcccctggcgaactagg

SEQ ID NO: 9955 - DNA, 824 bp, Homo sapiens
ccgggcaggtactgggaactctggcaggatccttgatgtcctcttaatctcttttaattttcataatactgtgatgcaggtatcattatcccccctctccactaccttgttttatcccagagggaagtaaagctcagagaggctaagacactttctccaggtgacagactctggaaggggcaaggttaggatttgattgtctgtcagattccattatgctgtgtgcctcaaatgcctggtgatcctatacgctaccatgggcactatgtggggcagtgccactaagctctgctgtgacctcgaggttacctctgaagtttatgagccactgccagaggctcagggtggatgatccaagatagctgggctagggtattaaaagggccctatcagaacaaagatcattcacttttgaagtctaatctctttgggttctagatgggaaggaaacatattaaaagtggatgaaggaaggaggtacctcggccgcccgggcaggtactgccaccatctccggttccaggagtcttctgcttggactttcgggtcttcctcacggatcctggaaggggggttctctgcagaagcgaccaccccatcttcctgggagagctggttcaagaattttctgctgggggacaacctgccttctttcctgaggagggccctcttaattaacttctctgcatggggcttctagatgggtttttgaaaatcttttcttttgcagatggctggccccagaggtggaaaccctgcttttttgaacacaatcaaccctgttttatttccaaccaacaaatcttcctttttcctttccagat

SEQ ID NO: 9956 - DNA, 862 bp, Homo sapiens
  misc_feature 775: n = A,T,C or G
aggtacaaaatatgagagaattcatttccagtaggcctacactacaataaattgacaaagaaaatttgtcaggccacagggtaataatatgagatggaagctcaaacctacaagaagaaaatatttataggaaatataaatatgtgggtaaatctttttttaattaatgtaagaatcaaaatattattttgtgggatttgtgatgtatgcagatgtaaaatatataacaaaatagcacaaacaataagggaaggcaagtggaattctacacaactgcaaagtttttacattttatgtgaagtgatatgacattaaatctaaatagactgaggataagataaagatgtgtggtataatacccagagaaaccactaaaaacaaatatccaaaagcagcagagctaagaagtcattgttggaattaaaataaaatactaaaaaatggattaacataaaagatggcgggaaagaaagaccagaaatgaaaaacagaaggtatcaatagaaaacaaattggaaaatagtaaaccttgaacccagtcatattagtaactgcattaaaatacaatgggactggcataagccatttagtgttggttataacgaattacctgatcctgggtggttattgaagaaaagaaggcttccttacttgcgggtcttgaagcctattggaaagcaggcttcgcttcggttggcttttggtgagggcttcattcttattcaaacttaataaaaaggccaaggggaaatgggcgggcgcaaaggaaacctanaaaggttgggttttaacaactattttcacgaactttaatttcttaaagtcattttttttaagaggagaaactctactctcggaggat

SEQ ID NO: 9957 - DNA, 408 bp, Homo sapiens
aggtactgtttttacagtcattttggattcctgctgtcttatacaccaaataagtagttaaagtgacacagttcatagaataaaatgaatgaaaacacagacatggaaatggaaggaaagtgcagagctgctttctaaatcaaccaaattaattaaatcctgaccacaaatactgaaatgcagagatgcaaagtcctttttgagtagcctggatcaattgtttcctaagagcagatgggcactactttagctgtgttgtctacaaagaaatccagttggcgagaaaatatttcatccacagaactatgattcacggggttagttcctagaggtatctgccccaaggccacctgggatgattaccaaagtcactttaaaccaagattctaagcctaatacccttgcccc

SEQ ID NO: 9958 - DNA, 552 bp, Homo sapiens
  misc_feature 5: n = A,T,C or G
aaatntatcgacgcgctaatacatcactatagggtctaaattgagagatctccactctcgagtgtgctggctcgcctcgggcaaggtgatcttcaaaaaagaatcttataaatacattaatattatataattacctaaaaatatgtgagatattataaaatagtctataaatgatgcaaaaacatatcaatacttaaacattatattttaatttatttttaatataaaatataaaataaaaaatatactaaatgaaaataaaaatttttaattaaaatttataaaagtttttactactaacaaatctttataaaataatattaattttatactacaaaaaaaataacattatattaatataaattaaaaaaaatattttaatttaaattaatatttaatgacttaaatttaaaaaaatttaaattttaaaaaactaaatctaaataattataaaaataaaaatattataaatatttaaaatcattaaatttaaaaatacttataataaaaatttatataaaattttaaatatcaaaaaataattaatataaa

SEQ ID NO: 9959 - DNA, 421 bp, Homo sapiens
ccgggcaggtacccggggggcatcacggacctacccaatatgtgatgtcacccctggtgggcccagctgtgtcatggagaaacttcagctgggcccagagattctgcagcgggaaaatccaaggcttatttatgccaggctgagtggatttggccagtcaggaagcttctgccggttagctggccacgatttcaactatttggctttgtcaggtggaaggaacagcatatttaagttcttttctgtggaaaacttagaaattgagtctgtgggaagcacctctaggacagaacatgttggatggtggagccaccttttttttacgactttacaggaacagccagatggggaaattcatggctgtttggagcaaataaaaaccccatttttttccagcctgcttgatcaaaggaatttggaa

SEQ ID NO: 9960 - DNA, 409 bp, Homo sapiens
aggtgcctcagaatgataaatcagaatctctgaggaatgggcccaggcatcagtatttttcacacgaacaagcagaggtggatcctttaccttctcctaaaaaactgtcacaagggacaggtcacttggaaggcagtttaagagagagcagaggagaaatctggtgacacatgtaacactgtgattaatctattgcttacgatgttttatatgttgaaagtctggaattctgaatattttattatgtaagagatccagttctccaatgtcacagcctctataatttgaataataataaaggagcacaacaattcacttatgatacccaacagaagactgcaaggatatgctggggcacagagcccaattagggtttaataagacagggtttatgggtgaagcaatctag

SEQ ID NO: 9961 - DNA, 516 bp, Homo sapiens
  misc_feature 299, 300: n = A,T,C or G
aggtacatgggactacaggcacgccccaccatgcccagctcatttttgtatttttagtagagacagggtttcaccatgttggccaggatgatcttgatctcttgacctcatgatccgcccctcttggccttcccaaaaagtggctgggatcaaaaggccgtgagccaaccacacactggtcccttctatttatttctcttttaaaagaggagaagaaatactaattgagtagggccataaatttattttaatttagaagtcttttacccttaagacatcaatggtgaataaaaattggnnaatttttgccttaattatagggttgaatgatagtcattaacacaaaatgaaaacagtaaaacacattcatcattttttaaggtaaaaaagggcaaaaaaattttggaggaacttttataaaagccttacattgggttagcctttatattttttggtgttggggtgaaagaaaaatgaagaaaaaaggaattattaaacaattcttttttacctggg

SEQ ID NO: 9962 - DNA, 520 bp, Homo sapiens
  misc_feature 102, 114, 115, 122, 123, 267, 268, 277, 279, 280, 288, 289,294, 299, 300, 305, 306, 317, 319, 320, 327, 336, 337, 343,345, 346, 355, 356, 361, 365, 366, 367, 374, 375, 378, 379,387, 389, 390, 402, 406, 407, 447, 453, 454, 467, 468: n = A,T,C or G
  misc_feature 469, 475, 476, 480, 520: n = A,T,C or G
aggtacgcggggatcaatgcagagtccctctgtgaatttacaacacccaacacccatgagttcagtccttaagaaggaaaattgagcaagtatttaattggnttggacatttgnncataaannagaggtcccattatccaaggccttaacctttctaagaaaaatttttttaatttccttcaaaaacttttaagttttgggccccttctttttttttccttttcttgttccaaggaggggaacccaattttcctttaagttgggccnnaccttgggngnnaaaattcnnttggncaccnnccagnnaaggaaatttncnnaactggncgccttcannctgcanannaaataccannatggncctnnnacattgnnganntttgtagnannggagaaaagggnagcnncctgttattttggtgaagcctgttgcccttatgaagaaanatttcnntttacccccctgnnnaatgtnnggtncggatgccaaaagggaaagaatcccttggaagaaagtcan

SEQ ID NO: 9963 - DNA, 437 bp, Homo sapiens
ccgggcaggtaccctttatgatctagataaaccattgtgttcttctatagtttttccaactatatttgaataggtgaagttaatatgtttaatcataaaatgctctcagatgcttgcaaaaacaattactccatcagataagaacacatcaaaaatttggaaaatttaaaaaaagtcattccagctatatgcaaataacttttagtatatgcatctgaaaagctaccaaacgtaacaatgaaactctaaacttgtagtagaaaggtaaatgcactgtgatcagctttcacatcacttcagagtatattctaaaacttcttagattctacattatttatagagtgaactctaaattcaaacatttctcaggaacaaaacgactcccatccaattatttaattagggaagaagagatcccaaattttcttgctaattat

SEQ ID NO: 9964 - DNA, 429 bp, Homo sapiens
aggtaccacccctttgaatacccacatgcaccgtggtccagaggagagagcctgaatccagagctgacagctgaggtttggatcctgtccccaccactcactcaccttgagaaggtgagcaatcttcctgtcctcacagcacatcacttagaggctcacttgcttcacatacacagcaaggacaatgatatccaccttagagtcagagtgcactattatttgacactgttgtaaccatgcctagcacaagatcgggccctaagaattcctattgtcgctaagaatttcctatgacaccttcacacttccagtctaccctggagagctctgggcagcctggatactccaagtatttggaatttttggccactactgaagcctggacttcaaagttgtgcccacaccattctgcagagaacgcctttcaaa

SEQ ID NO: 9965 - DNA, 355 bp, Homo sapiens
aggtactctaaccatttttaaagagccatataacaggttagttaacaaaattaaacacaatagaaaatagtttattgttgtatccaacgaaactagttaaatatagcagagaagtagatgtcagtagacatttgaaatgtgtgttcagattagtagaataaacatatcagcaagatgcctagaagccaaggaaagatgcaggaaacttgttaagtcacatatctttgataaaaagtaagcaccaagctaactgaatcactctctaatttctggatttaagtagattatttaataggatcaggtaatgacactattgatggggaaatttttatcaaccttctttaaaggtgagaac

SEQ ID NO: 9966 - DNA, 438 bp, Homo sapiens
  misc_feature 209, 210, 226, 227, 246, 247, 312, 313: n = A,T,C or G
aggtactggggaaggcggctggaggaaatgtgagcaggtgcagcgccctgtcctgccctgcccctgcaggagtcctcattagtgaatggactgagagtggcctgggcagtgttctatctggacatacagatacattatttttagggcttaaaaacagtattgaatttggcaaatgggacccaccaagtttgaaatcacaatctctaaanncccaggagcattttcnnctgtggttccttgtggagnncagtttcctcttgttctgggtaaagtgtgagggacttgtgagaacatgaacccttgtcacattanngagtggtgggaccaagggagttataagggttgggtgttgaaaaaagttttggcttgtttaaaccaacggggaacctggtttattgggattcccaccttcttaaagcccaaggggttaagttttcg

SEQ ID NO: 9967 - DNA, 387 bp, Homo sapiens
ccgggcaggtacaaaataaatttgctcattgggttagagtatggttattgattagggggctaagcatttagttactgcatggggcagccaataataaaatcacagccctgtgtatttacctccacagtgtgtgctgataagtgcaaaaggtttgtgcaaattcttttgaagttatactgtaaccatggtatatgtattgaaaacttggccattttaccccattcctatgaatgaaaactatttggtgaatcagaggatagtctgaattgggatatgaaggccagtataagtgtcagttagcaaagtcagctctagtttattattttttttttttcttttaaggcgtagcattactagaagtatagctttgggaaccttgtagcatct

SEQ ID NO: 9968 - DNA, 409 bp, Homo sapiens
ccgggcaggtacagtagtatttaacctagacgtgaggaaggagtaggaaattttctggtgaatacagaagagcaaagaacagcaggtcagcaggaatgactaatgtttttctatgcatgtttaatggaatattcgtgtaggatattttgagtaggtaattggataatcagcatttgtaacttgcatcctagtagtctgactctcactaataagacttgtcaaagatccaagaatccgaaagtggatgataaatgtccatgtgtatcaccatccatgaccgaaaatcatcatccacagaacacagaattgggacagatgaacttaatagataaagatgaatatcggagttgttcctcttagggaatgatactctccatgacctgtgggagtgacagctgccagaaaagaa

SEQ ID NO: 9969 - DNA, 410 bp, Homo sapiens
ccgggcaggtacaatttcttattactgcatctaaaaatgaggacaacattctttaaatatcacgcttatataaaaacttgcagaaactcaatccacatgtcttaattagaagccaccataaagaaagacatttcattgttttaataacttatgttcagaaataaaactgctcttacttaagcactgcttagcagaaacgttaaaatcaagtctagagaaaaagtagaagatggtaatgttcctaagatacatgagaactgagtttggttacagttagagagaaacagaattttttccactcccaaaccagatctattgaatttacttggtttatttttgtatatatttggcatctaaagaatgaattgccttttagacaaaacccttctcggtgaagttgtttcttttgt

SEQ ID NO: 9970 - DNA, 437 bp, Homo sapiens
aggtacaatgtgattttcatcagtgtttatgtttttgaaaggaaaaaaaatggctgaagtattattttagtccatgtgcaaagcaaattctgttttgtctgttaaaaaaataaatgagcaataatctccaagaaatcatcttgaccagcattaatgactagtttggtagttaacagcccgaggcatagccagaggctattaaggctctgggggaaagaaaaggttggtagattgtggtttaccagtaattaactataggtatgaatcaaaacttcctaagaaaagagatttaagttactttggattatttaatgtgtatgcttatcttttcatacatccccctcccacaccttttctaataggaaaagaagatgaagccattatttcacaaaccaagttgaattggaaataattcacgtaatgaaacaggaaacaca

SEQ ID NO: 9971 - DNA, 383 bp, Homo sapiens
aggtactgtgttgtaagagatgcaggttagcagaaaccctccacatgagatctgctttaagactgacccaagcctgaaacgctctctccctaagtgatccatgtccctgcagtaataccataaccactaagctaacacactcactgtaaaagtgttgcttctccatgaggcaccaagacttgatgaccatttgcagttctcattaactccactaagaccctaaaggctaaatgacaaccaagcctctgtcactctgcctgagtggatttaccacaaatatcaaatctgttcaatctattataagagctaaaaaggagaagcacatgaaatcacatttcattcttagctcttttatcttcccatttttcatttagacattgaat

SEQ ID NO: 9972 - DNA, 382 bp, Homo sapiens
aggtacgcgggggggcggagcaatccacactgctgagcctgggggggtttggaattcttcggcgaagtggagcgggccgagagtgggtttcccgtccccgagccctccctcatctcggagatgccgcacttgtgagcgacagggcttcatttgaattttcgcacctcgcgagttgcggagcctgcatctctgaagctgcctcggtgaagagccacagcattattttttttctctttgggagagtagctgtctgggatttgagatcctatcttccctgcaaattaccaggttgcatcttcactgataggaatacatttcttcaccaaaggacatggatgaaaatgaaagcaaccagtctctgatgacaagcagccaatatcct

SEQ ID NO: 9973 - DNA, 342 bp, Homo sapiens
aggtactgcccagatagaaccttctgcctctttggggtaaaattcgatttcaaagagagagaactgtggggtgagaaaggaagactgggacccaaggggccaaactagtgacaatgactgctgtcatgaagggtgacaaggacaatacctgctgagctcaaaccaccctttggacccagtgaagctcagatgttgcttccagtgcaggagtagttaagctcaactgttttacaatatccagttatttggcttgggtgtgatggctcacacccacactcctagcactttgggaggccaaggtgggtggattgcctgagctcaggagttcgagaccagcctggg

SEQ ID NO: 9974 - DNA, 358 bp, Homo sapiens
ccgggcaggtactacctcttccataggttgtgtcacccagttctgagatctttcaaagcactggaagagaaccgccaagttctcagctgtcagtgcaaactggtgtcactgagatatccattgtcctagctcatataatgtccaggtcagtgtctttctgttcctctgagccctgttttgacactagaatctttgccgtagctgcctgcggctccatctgccaaggagacgcccctaacccctctaaggtgacgttttccagcagcactgccagagaacagggtgaagggccctgcattccaggacccacaatagctctgtttttctttcctgtctctccatttccaggagaattgtt

SEQ ID NO: 9975 - DNA, 412 bp, Homo sapiens
ccgggcaggtactgggattataggcgtgagccaccgcgtctggcctctaacgagatatttctaaaggttaggccttcagtcaagaattttaaagctggatcttagaggttatctaaactaacctctccatttcatagataaggaaagtgagtcccagaaaagcactggtttggacaagttcagaaagctaaacagtgactgtggatgtatgattctgtctcttaactcctaatccaaatgtcttctcactagataaggctgtgccttctacatttgaaggctcaaaccccatggatggatggagggaaggatgggtggagggatggatggatagatggatggaatgattgtttactcattcactcattaatgctagaaatgattgagcccccctttccatcagtcagtgtgc

SEQ ID NO: 9976 - DNA, 405 bp, Homo sapiens
cgggcaggtacctgaagcttgaattcctgaacttttttttttttttttttttgtatttttagtagagacagggtttcaccaaattgaccaggttggtctcgaactcctgacctaaagtgatccgcccaccttggccccgcaaagcgctgagattacagacctgaaccactgtgcctaacctccctgaacttctcaacattctgagttagtcactttccctttggtttaagccagctcgggttacttgcaaccctagttatacagccacttttctacaacacaaacaaaccacctagaataaaattcattttcctccttttttttttttttttttaatggagggtggtggaattcagagagcagaaatctgtcctgaccagagaagagttcttaacaggttccact

SEQ ID NO: 9977 - DNA, 410 bp, Homo sapiens
aggtactaaagtcagcaagacctaatgtctaatttacttatacctatgatgaaatctagtgccaaggatcatccatggccattgccccacttcaaatattcatgagcctccacaatccaaaatgcattaaatgtgggcaggttgccaataacacacaatcttcctaatgacagggagctttctcagatcaaaggagcaagatgttaaagacttcaaactaaactgtctttgtaagagacacccagaaaagaaatgccagatcccacaccctgtttcagttatgaaacatcaatgaaatagagaaaataataaacattcattcattcctctttggaactcatttttttgcaacaactttgcttctttcctttcttaccattgcactcaatcactaaggatgttatacacta

SEQ ID NO: 9978 - DNA, 401 bp, Homo sapiens
aggtaccatcaactagcgttcattatattgagaaactaatgaatggttggtctctactaaacaaacatcatgtgtttacagctaaatattgtatatccaaaatgtgaacaggaagatgaaaccaattgataaaggttcttacttcacattttccaagtatagtattaattcaaatttctgagaaaaatcaagagacatatatcacataagggcaataaatactaccatagaatttcatggtatggaagttcctacatacttatggttctgtccttcactctcttttttgaacacgtttgtggtagaaaaaaataaatacaaaaagaatcatttccaaaataattggatttgaattcttaaaaatagtttggtatttacttatgtgtttgttcatgaatgac

SEQ ID NO: 9979 - DNA, 437 bp, Homo sapiens
ccgggcaggtacttttttttttttttttttttttttttttcgagacggggtctccctatattgccaaagctggtgtcaaactcctgggctcaagtctctccttagcttcctaagtagctgagaccaaaggcacaggccaccgtgcctggctctacttctcaccttaactaaataaccatccacctgagaaataacatatacatgtaagcttaattcaaatattcaggttttgtgatcctcaaacgtgaatgatcagaatcacctagggagctttttgaaaaaattaaatcccccctctacatcagtttctacagggaagtctgggaattcatgtcttaaaaaaaaaaaaaccccttataggctggggcttgggggctcacaaccttaatccccgcccttttgggaggcctgaggcaggcaaatccacctggggtcag

SEQ ID NO: 9980 - DNA, 394 bp, Homo sapiens
ccgggcaggtacctggcttggacttgaaggagaaatgagagagcaactatccgcagtagaaggctgagcatttcaaatccctgtgaaacctagggttttgaaaacagtatgtttcggcaacagcaagtggttcagtgtgattggaaccttaaagggaacagtggaaagatgaggctgagcatttaaggaggtgccagattgccccaaaggcagtgttctcaatactaaactaatgttcttccaccataaatgagctccccctggcaacttctcatttctatcaatggaactttcgttcttcatatgtccaaaccctgaagtgccatcttcaggtctgcctcagcatttgtgatcagtgctcaagttttgtatcatttctatattcaaaacatta

SEQ ID NO: 9981 - DNA, 385 bp, Homo sapiens
aggtactgtcacccatggccctgataggaaacagatggcatattcaagctggataatttgaagaggattaaatgaaacaagtattcacaaataggtgggcagagtttagaaaatcaacaagagatattgtagtatcctgggctagcaacagagaggatgggaatattgccccatagacctgaagtgcaaagagaaggagtgctacctcaaaaagagagctttgtggagaaggctgcctgatagcagctgtagtcccaggtagagggtgagccaccacgcccggcggatatttcatagttttaaaagggacttctcttaaggtaatttttattaatagaaacaatattccttaaactatgaattaaggataaaacatgtttctatg

SEQ ID NO: 9982 - DNA, 383 bp, Homo sapiens
aggtaccatactcttttggttgctgtaattctgtggtataatatgaagtcagaaaatataattcctcccaaagtgctgggactacaggcgtgagccagcgcgccaggccaagaatttctttccatctcctgtgtcattgctttggcagtggaaaacgcacgtggcctctaaagagtgggtcccaaggtcatgaaggcctgtggggtggagggcaaggtatctctttccaggctggaatggcagaagacgcggcggcagaggggctgcatgtcctcctcacagcaggcccctgaggacctttatcctcctgagccatgaatgtccctcaggagtgtctaaagcacccggtggggcagggggacccctataggccttaggagctt

SEQ ID NO: 9983 - DNA, 424 bp, Homo sapiens
ccgggcaggtacatcatcgggaattcatgattaagtgactaaatgatttgtttctaaaacagagatgtatgctgtctgtggcaagggctgggagctgggcaacagctgggcagggggcacatcgccttaaagcctcatgcaccaaagagccaaaccgtgaggctttctcagaaagcaaaatacagcgctcacactgcaggggtggcggcgcaggtgtggaaccctgtcttgatgcctaacgtgggggtcacagctatccgaaggcaggctccagagagcaccttgaccatttctgcttgttttctcccgtctatgccccagcctggcagtcactggcctctgatttaaagagtcgagtttgcgggtggtttgctaattatgacccaacgagcacttctggcttcggttggagtgagtggggtgt

SEQ ID NO: 9984 - DNA, 395 bp, Homo sapiens
  misc_feature 373: n = A,T,C or G
ccgggcaggtacgcgggagaataacaaaagcactcgtgttacttttaaacaaggtaaaacttaaacagttttttcctccgtttctttttttatggaaataagaggcaagtgatagcaagtgggtaattcaatggcagtggtaactgaagcactgacctgttacaagagagacggaagcttctacttgagcagatacaaatactgtcatccgtggagatttgaaagaagtctttctatcactgggtagtttgagagctcattagtcttctttagaatgggatttaaacttggaaacatcaaagcaagtttacaagggaaacttagttttactggtgttggcagaccttaggcgccaagaatttgttataaaagntgtctggaaagtggcaccaggg

SEQ ID NO: 9985 - DNA, 442 bp, Homo sapiens
cggggccggtctgcccggccaggtccaaagcgcaaataggcaatttggttcaatatctcccaacttaaacccactgctttttcaacagaaatgttttttacatcaagtgttgcctctgttctcactctccctccttcttgatcttttaatctaaccctgtcttcttgacttctttctagcccctgccccattgccattggtttataggtcaaattgcttgagttaaatgcatagaagatgcaactatttcagacctcactttaaacaatgtggtaagtgttaagacagaataaaagataaaccaaaatattgtagaagatgattctaatggcatatccaggagctaacctgctctgcattgatgagtttagctatcataattccaaaggaacactatgattgagaacaaccaagagcactactaactccagcatcaccaagg

SEQ ID NO: 9986 - DNA, 354 bp, Homo sapiens
aggtactttttaaatgacaaagagtaatttcaacaaaaccaaatgctgcagtgtggcactcagctataacagtgtattttctttatccaaataaacacaataaaagctttgctttgcattgttcattataaaaaactgaatttttcttttgcaactatttatttttaaataaggaagtaaaattctcaaaatgatacagttgctgctgcaaagtatgaataataagactgagggaggtaagagagaaaggactagtgcaagccctaacaaaagccctgtaccagatggaaaatgtttttggtgatctggctgctgcttaaagccagttttccctaagaactccaaaggctaaag

SEQ ID NO: 9987 - DNA, 433 bp, Homo sapiens
ccgggcaggtactttggcttttgtttctagaacaccaatgagtatatgctcattaagatagtttgatgcaataaatccttattttacttgcctctattactgcattgtaaactgttgtctactttgtcttcttgaaatcctacacctcccccagcccccacatttggcctatggaacattactttatcctgattttccccctaaccttctggcaatgcctctcagactccttccagaactacttttctctgttttccttttaatgatgacagtttatgcaattgtgtcttcaaacttataacgacccacacaatagtaataacagtcaacatttactgaattcttacttgtgttaagtgctgttatatatgatattttaatctttgtaaaatcttataaggtaagtgctgtcattattcccacattacagaga

SEQ ID NO: 9988 - DNA, 354 bp, Homo sapiens
ccgggcaggtacgattatggttgggcaagtttcctgcccagtggtgcttacattctaaaggaggcaggcagttagtaagcctgtaaacaagtaaataaacatggcttctttaaagacgtaacatttcaactgattctgaatgatcacagagaaccatcttatatccagggtaacggcatttcggtcagaaggacaactgcaaaatcctgagaaaagaaacacttagtatgtttggtggaaaaagaggtctaatatggctagagccacatgaatgaggaggatggtggaagatgaaattaacaaactgggatcacacggccttgtcttgtaaggagttccggttaactgcccaag

SEQ ID NO: 9989 - DNA, 421 bp, Homo sapiens
aggtacatttgttgggggcgtgacattaacatataaccacttagagtggacatgcagttagagaaaagtcaatgagctggaaccaagctgggaattccaacatgtagaagttaaacacaagaggaggagccagcaaagggaaacagaaacagagcttccagcaggtggggggcatttggaagaaaacgatgccatagaagccaagatgaaatagacatcaaggagaaggaagtagtcaattgttttgaatgctatgaagaaagataagaataggtaaatagtccttattatttgataacagaggtcactagtgatcttgatgaggggtttcaataggaatggggggattatatacctccctggatttcaactgaggtaaggaaggcatacagaattgagacaggcactataaaaagataat

SEQ ID NO: 9990 - DNA, 403 bp, Homo sapiens
aggtacttttttttttaatttttttttttttttttatgtagaggtagggtcttgctatgttacccaggctgggcttgaactcctggccccaagcaatcctcctgtctctacctcccgacaagaaaacattttaaaattcacattatattctctagctttgtgctgaacctctgaaatataagatgaaacagaaactggccctgccttgaaggaatttacagtagtgtggggtgggaagcatgttcatgtagagatataaagagatataaagaattaagtgccaattggaagtgaagtttttcttcggagtaattaattctaactgcaggttaggcgtaaggggataaaggcttctcagagaaggtatcattttagctgactcttgaatcaggatttttagtag

SEQ ID NO: 9991 - DNA, 432 bp, Homo sapiens
aggtactttcacttttgtgaataattttattttccaaccatggaagcatcatcgtgaggttgaaagaggatcattcttggaaaatacaattacttaacagttatgtgacctgggacaagttgagcctaaatgtcctcatcataaaatggaactaagtaaccctcataagaatgacgtagtgtatggacactgtttggcccagagtgggcagtgaaaaaattgtggccattctggaataatcttatagtctctatggtggggagatctgaaagccgttttctttccccttcccattttgtgtatgtatctgcctccactgatctgcacagggaagggaagtggttggtaactctctgggcactcaggatctctacacttggtagttgcccagcagcccatcactgtgtctttcacccctagggctcacagtga

SEQ ID NO: 9992 - DNA, 400 bp, Homo sapiens
aggtacctcagttggaaatgcagaaatcacctgcctactgcattgatctcgctgggagctgcagaccggagctgttcctattcagccatcttgccagcaggtatttctttatagcaacacaagaacagcctaatacaatttccagtatcaacgggctgttacaagttccccctaccccttcccagtgggatggagacagtggagtgtctaaactttcaacatcgtccagaagtaaagaggccactcgctccctcttccctctggtgtcaatggagagccatgtggtagaacagtgaatgaggacaactccttattcttttccaactaggaatggggatccagcaagaggccctagaagggggagcccaaaaactccctaagtcccacccatggcaataac

SEQ ID NO: 9993 - DNA, 371 bp, Homo sapiens
ccgggcaggtacctttatctctttacctcttcctttctttctacctgaaggttacagtaagtcagccatcatgtgactatgaagcagcaagcatttgccaaggcaggttaagcagaaagataaaaggaacctggggctttgatatcataaaggcaacaacattattgtcaactgtattaggagaaaaataaagtcttccattgattcaagctactgttttcagctttttattacaaatagctaaatattatttctaactgatataccatcagaaacttacctggacaactttctattaatgactgaaaaagcgtgtgtctttccagtttcctttactttggttagagttgaggactagactctggatataa

SEQ ID NO: 9994 - DNA, 510 bp, Homo sapiens
aggtacagaggtggctcagacactgcctgccctctggagcatatagtccagtagagagggaggaggctgggcttagatggatatggagttagacaggactagctaatgcagtcaatgagggaaacacgagggtgcgaaatatgaccctcagaggaacaggccccctgactcaactctttacaccaggaaaccacacccctgtgagaaggggtggttagcttttagctgagtactccaacggagattgagctggaatggccttggcttagccttttgatggatttaaaacccaataaaagggaaataattattcttattgtaaaattttaaaatttaaaaaaataatcctaattctaaacaaaaaaggttaacccaacaaaaccaatatggttaaaaaggaataaggcctgaagtacttggggaaggaagaattatttagcccatagtttaatattaaacccaaaaaaagagtattgggtgcaatccaagaaaatggtggtcaaaggagga

SEQ ID NO: 9995 - DNA, 411 bp, Homo sapiens
  misc_feature 411: n = A,T,C or G
ccgggcaggtacaggccaggtgagccaccgcgcccggcctacacagtttgcattttaaaagattactttgtatacccctagagaggttcccccccatggaattctatattgtctaactgttttctgatgacataaaatttctcctgagtctttggaaatcaattgaaaggaaggaaagaattgcaatggccattcagattcctctcaccatttggattgggtggttctgaccactttaccattttttatgttgattctgatcagaggaagatggctgaggattagtaaacagaaacctggataactgtaggtgggcctaggttaagagcaaggacagtagagccagaccacctgagtttgaatcctgcctacactgtctaatctctgtgcctcagtttcctcttctgtaan

SEQ ID NO: 9996 - DNA, 539 bp, Homo sapiens
ctccaccgcggtggcggccgaggtaccggctgggcaatgaggggacagtgtttgctatcagacagctcactaatgtagaaaaaaagaaaagtggagtgggagactataaatgagaccacagggttaaattgcaatgcaagaggaaaacaataaaatacttttagaggctatttatgttttgcccacataaaatcccaaataattaatttacccttgacaagttaagcattctaacattgggattttgttaattcctctcccttttaaaaatacaataaatgtagacttgggtcgtggatggcttcacaacactgttaatctccaagcaacttttgtgtgatagttcaaagtgttggtgttgtgatttggcactagaagcttcacgtgagtttttaaagtactcagtctcttggtgtcaatctattgaattgataaaccccccattcttcttacctatataatttcaaaaaaatattttatgtcctgggtcctttgtgtcgccaccttggccgtcctcttttaaaattccccaagacttt

SEQ ID NO: 9997 - DNA, 420 bp, Homo sapiens
ccgggcaggtactatagtccaagattgaaatctgtcttattaatcattttccccttctgtctcccctaattgccttactgtatggctcctaatgacttctagttattcttttgttttccttccattaacttaaaggatatgtgtatcttctttttatgtattcatagaagatacctaaaggagatattgtatacatatatataagatgttcatatgttcctaattttaaaataattgttaaatgttatgtagatacataccctgtaatatgtatatgtaatatgtaatacagagaagtgcgatttacggggaaattacccatttattaatcctttcaccagttgggtttctgtctttctgtgctatgtttggcttttattgaatcttttggacagtatccttgttgttctgtgtgcttca

SEQ ID NO: 9998 - DNA, 388 bp, Homo sapiens
aggtacttcagttgaaaagttgaccaaagccaaaaaatgtctatctggtggtcagtagtttgataggttcaaggagttgaaagaagcctaggatggctgggacatgtagatcatagtgctaagagatggaaagcaccttgtgctatttggccgtttcagttgtgatgttttttaagtagagtgttgtgatcagaagggccctttagaaagattgtggctagaatatggagaacaaagaggagaccaccagagtggatgtgggaggccaatatgtaggttattctagtagctttgcagtgacttacacaaaggcagttttagcggacttgttcatgagttacctaagagataaaattgacaggacttgagaatgagttagatgatgggg

SEQ ID NO: 9999 - DNA, 395 bp, Homo sapiens
ccgggcaggtaccaggagggtattgatgtttgaggtccaaactgaaaacccatcacctccttcccactgctatagcagcgttagccctggggttcattatctagccagttcacaccttctaaagtggggctctgaaaatgtcttacttccctcacagacaaagcaattctcaagcctcctgagatcgcccaccaaccagagcaactgctgtcacttggaggtgcagctgaattcttctaattgtgacacaaactcttgaaactgtaaatgctgaaagattaaatgaggttataacacttagaaaggttttacaagttaaaagtaagtcaaaatcaattaggctttaatttccaaatcctgaaatgggtttaacttcttccgggaaatggtttccc

SEQ ID NO: 10000 - DNA, 364 bp, Homo sapiens
  misc_feature 325: n = A,T,C or G
ccgggcaggtaccattcttatctcagaatgctgtaaaccatcagtagaagcagtttagatttggactgcatggtaaaatgaaaagtaataaccctccaaccacaacctagtcagggtattaataattatatgtggcaggaaaacaaagaagaaaataatattgaaaaaatggagattccccaaccagtttcatatttgaaggatctgagttgtatttttattaaggaaattttttttctgaatactgtcttccaaaatgttaacattaaaatctgaatcagaggactctgaatggaaaagaagtttggatcactgacacctaggngctccgaagcgttgtgtggccacaatggaaaaagtcgaa

SEQ ID NO: 10001 - DNA, 405 bp, Homo sapiens
ccgggcaggtactcagctaagaagaggattgctttgggcataggaagcagaatgacgagttcagtcttcctcagtagttggagcacagttctcaaagcccatcaacactttggaatggatttgttgttttatttatgccatcaagggagagttgatatttgtgtattgctaaaaactactaaagtatgtcgatgcttaggtaggaacatacaaaccatatatcctctgggatctgcccaggtttctgtataaggcttgacctacgtaagatcctatgatgaagaccagaaaactttttttaaaagtaggtaaattaaaattaaaatcacgagtttgttcacatttgtcccataggttcctagtgcaaaaatgcagggagataaaagcaaacatttgaactcagtg

SEQ ID NO: 10002 - DNA, 398 bp, Homo sapiens
aggtacccaagtgacatgactaattacagtaaccatgaattcagtgcctggccatttatcctagcaatttcaagtctcaggaatctcttgcagcattaagaaaccagagagacaactatatgtttaacttctaccttctgtcccctgagaagtcactactcatcttgcttccctcaggatgaactttctgtttctatgtttaaaagtctgcaaaatagatttaaaaaacaaacaaaaaaagcagactcagtatgagatcaaaccttacgaatcattgtcaaggtcattttttacctcttctatacctagactactgggtgggatagtgcattcataaaattccagattcaatgctctcatttccatcgtgacaaaatgctactttatgaagaattatg

SEQ ID NO: 10003 - DNA, 424 bp, Homo sapiens
  misc_feature 424: n = A,T,C or G
ccgggcaggtacttggatttccttcctttgttgactcaacttgagagctctcattgtttccagaagcactttgttgaggcttgcttttggccgctgcatctggaagcttagaggcaatattcctgggtgggagtaacatccgagttggatttgatgtgattaaactcaaagggggaggaggctgatcacggaaaacagatgtcaagcagagctgcacagtctctttcattgctttcatctgtgactccctgtcaagagctgctttctccagttcatttttggctacagctaatttttgttccagatcagtaagctgctgcgccttaaataataaatccttcttcccataacgaagctccttcagctgggcttggattttttttgactcttctgcgtgaatgccacagagcttgtttcctgacan

SEQ ID NO: 10004 - DNA, 424 bp, Homo sapiens
ccggccaggtacttcagagctaagatagctctttgggttctaaattctgcgatcttctttttgatttctcttggagcaataatgaaggcaaaacatcaataaacataacaaactgggtaagggagaccattgagaaggactaaggacaccttcaaagttctgagtgagtttaaaaagaagaatgatgaaaactttgatagaaatatgaaaaaaagtataggaacttgtatggcttgaaacttcttaatgtttaggctaattatattgaagatgacagtggtcattgagaaaaacaaaatccccaaagcaattttggaataagggccaacatttaatacttaccatacaactattctaagtattttactatattcacttatagcaactctaaaaagcatgtagtattaacagagaaattgaggca

SEQ ID NO: 10005 - DNA, 413 bp, Homo sapiens
ccgggcaggtacttctctgctgaattaaatagaatccattgattttcatttaacttttacttaatgatttggtattgtcattatgagcataaattattataatgtaatgaataaaaataatataatacaaatatatgccctctaggttataaaacacttgaaggacagggccccagtatgttattcatcaatgtatccctactactgcaagcatcataataatggcttgcatacagtggtggtcacttatgaattataattaagtattgcattaaaatgctgaacgtgtatatctagctcatctccacctgaaagtcactgggaatatatacatgtgtgtatacacacatatacacctgtgtgtccatatgtaatatatgtccttaagtgtatatatacattatatatatacc

SEQ ID NO: 10006 - DNA, 379 bp, Homo sapiens
aggtacatttgttgggggcgtgacattaacatataaccacttagagtggacatgcagttagagaaaagtcaatgagctggaaccaagctgggaattccaacatgtagaagttaaacacaagaggaggagccagcaaaggaaacagaaacagagcttccagcaggtggggggcatttggaagaaaacgatgccatagaagccaagatgaaatagacatcaaggagaaggaagtagtcaattgttttgaatgctatgaagaaagataagaataggtaaatagtccttatatttgataacagaggtcactagtgatcttgatgaggggtttcaatagaatggtgggattatatacctccctggatttaactgaggtaaggaa

SEQ ID NO: 10007 - DNA, 775 bp, Homo sapiens
  misc_feature 562: n = A,T,C or G
ccgggcaggtacgcgggctccacataattgctgttctcagatatagagataagaagttttgatagcaagttttctgtttaatgtgtaataagcactttctctttttttaattctcataggtgaatcatctctaatcatgaacaagttaaaatgccctcattgtagctatgtagccaaatacagacgaacactaaaaaggcacttgctcattcacacaggagtgagatcatttagctgtgatatttgtggaaaactgtttactcgaagagaacatgtaaaaagacattccctggtaagtaactttaaatacagctgatctttgagataaactatatttatgtcagtgaagtttaaagggatttaaacagttaattgtgaatttaaagaagattgtctcctaaattgctttaaacagtttgactttatgaactgatagtgagctttttacagagaaaccggtggattcactcacctataaatgggggggttaaatttgagtggttccaaagcattctattatatataataatcttattttggatttttttccccttcaaataangggcattaaaagggttaaaaattccaatgttttgtgggttaaaaaaacttcatggtttcaaccgggggttggataaaactaggaacttaacagtttggcgttgggttaaacgtgccgatttaataccagccgaaaggccgaaaggtgtaacagggcaaggttccaatttccttgggttgaaaatcccagaagattaacttggaaaccttttaa

SEQ ID NO: 10008 - DNA, 419 bp, Homo sapiens
ccgggcaggtacggttataagggaattgggaagtcttcgtcatgggagacgtatcagaattccggaggtgactttaacttcagattagattctagaatcagtttgcaaaatagagtcatttatgaatttgtattttgacaaaaagttcatcaacaccttttataatattctatgttgtggaaaaaagttaggagcaacctgactctgtatgtgatattatgacttcaaaggagcttggtttctctctctctctctctcagaggaaaattttagtgtgctcataacttaatatagacccttttcagacatttcggttggtttcctgcttctgatttaccaaataatgccacattgaccatctttgatgccctaattatgccctggaaatccttctaataaaattgaattttggggtccgg

SEQ ID NO: 10009 - DNA, 385 bp, Homo sapiens
ccgggcaggtacacatagctcaggaactactgatgcactgccttccattttagtggcagtttgaatttaagaatttctagtttgtcttaagcttttctgtaatctctcacatatatattcttaatttcaactgataatttctttcttaatgtctaatatagcctatttgccctctgaacagcattgagatgctttgaaattttaatgcccaaaaagttggctttggtaaggtggtcttcatttctgcagtagaaccatggttgaggctaatggtcccatcagcattagcaggcccttggctagttgcacagtaaactgcatgtttcccactagtaaaagagataaccccaacagttttaggattaatgctgagttgtagtgttct

SEQ ID NO: 10010 - DNA, 450 bp, Homo sapiens
ccgggcaggtacttttttttttttttttttttttttgtatttttagtagagacagggtttcaccgtgttagccaggatggtctcgatctcctgacctcttgatccgcccaccttggcctcccaaagtgctgggattacaggcgtgagccccccattccgggcctaacgagacttaatttttacttaacttagatggccgttcattcattttgcttaactcagcgtggtgccatggaattaagtttggtgcacctggtgaatttccaaaaacccacacaaggacatttcttctgttcattcagaggtaacctcacgagcgcttagttgtggagagcataatcccaaatgtaacattggaaatttataattttcagttaaacacaagaaatgacagttgttattgcgctaaagaggtaaatgttgttaaagaagacttaggccaatgggata

SEQ ID NO: 10011 - DNA, 358 bp, Homo sapiens
ccgggcaggtacggttgctatttatagccactatcataacatactgctgcctctaactcctggcctcaagcgatcctcccacctcagcctcctcggtagctgggactataagcacatgccatcacacctgaattaaggacactttttgttgttagtattaatgcattggttcagctgagcaaatatttaacaaaattctactaagcaccaggctttcttttctaatatacaggtattaatagtcattagcctgaggcacatataatacacagactatttgaatgaatcagactgatgatacaaagtataattgatgagagacatgtagtccaaccagaagattgaggacaatcatcct

SEQ ID NO: 10012 - DNA, 494 bp, Homo sapiens
agagaacgaaataattggaaagacattaccactcgtacggatgggacgagacacgacaccgggacagggttactatttttttattatttttattttattacttttatttttttttattttttttttttttttaataattttttatatataaatattatttttttattttatataataaaaaattaaaaaaataaaaaaaaaaaaaaaaattaaaaatataaaaaaaaaaaaaaaaaaataaaaaataaaaaaataaatataaataaaaaaataaaaaaaaaaatataaaataaaaaaaaaaaaaaaaaaaaatattataaaaatatataaaaaaaataaaataaatataaaaaaattaatataaataaaatataaaaaaataatataataaaaaaattaaaaaaaataatacaataaaataaaaaacaaaaataaataatattttaaaaaatatataaattataaaatatataaatattaatataataaaacta

SEQ ID NO: 10013 - DNA, 483 bp, Homo sapiens
  misc_feature 251: n = A,T,C or G
atgcgacgcatatacggacatatcgggcgaattgtagctgcacagcgctggcggccgcccgggcaggttccgggccttgtgctaaacaccttagatgggttatctctgaacttcacatcagtcatatgaggtgggtaatatcattatctacattttacaagtatggaaactggggattactgaggttatttgccccaaggtaacacaggatggtagaattctggagccaagagttggaaaactgggttagntttgcttccagaaccccaatgaatcttagcatccttagattgtggttccaattaaggggcttcttctcttttttcatttcccgttttgttaaaaagtagaaaggttttttcacttttttctttcttcaaaacccaatttgatgaaaaacaaacctttggaaaacttgggaaagttgccaaaaggggggaggaaatttcttaataggaaaaggccggtttttttaaaaaaagg

SEQ ID NO: 10014 - DNA, 370 bp, Homo sapiens
aggtacacagagacacgatccacagttgtgtaggaataacttcctaaacatctttaggatctacctctttttcctgttcccactgttatttctttgtttcaggcccttaacatctctaatatacactagtatttctgtcttcacactgtttttttttctttacacagctcttttcatagcccctccattagcacacagattggaattgtgtctccttgttacccacagaataaaacccaatgttcttaatatgtagtcttaatatagactctataaatagcccctttgttaatctatcttgaattactcacttttaggtttcagctccctactgagaccccaactggctttaccttttgttccctcctgg

SEQ ID NO: 10015 - DNA, 520 bp, Homo sapiens
aggtacttgtccttcaattttgggaaatgctattatttgataatttctctttttgtattttctttgtttctctagattcttagttttcaattttgtctttcaaaccttgtatttaatttttatttctgctttcatatgtatatataatttgtcattctgaatgttctttttttattacccttaccttatattttcatggaatgcaagtagctttaaccttcttttgtgataattagttttttaatttgaacaaaataaaaaatttgtgttattatttgagcttggggctttgggatggtcttcaacggccatgttaaattcggtagacaccttttgagtgcgagctcaaaggccgtggttggatttgcccttgagtctccatggtaattttcattgacccatgctcttgggccaaacaacaggtggaaaacccccaatcttctacttaaaaattacaaaataaaaaatttagcctggtccaattggcgggtgttgcacccttgttagtcttcaggctact

SEQ ID NO: 10016 - DNA, 517 bp, Homo sapiens
aggtacgcgggcacccacacacatcttactagaccaaaaaagaaaacttgtcaagcaaataatctcccatttcttgggtcatttggagagataacacaggccaggttatatgtcctgaaagatgagaatgtgtgaagtccccagagagtctgatactagggccttctttcaagggagttagtggatttggccggttgcaaccagcccttggcccccctttgccatgctcctgaacttcaccttgcaccaatcatggggttgcttggctgaatgccccagggcttttcatggactggaggcatgtgcactcctttagcaaccctcttcactctgtttaacccaaacggtaggattttgacggggtccggaagggcatttttaaattttggagaaagggatgggaaatggtctgaaggggcaaggtaaaacttttaacaaagcagggaaggtctggcacccctggccttgcacattgagaaatcccccttattgggcaattggaaaggtaggggggagg

SEQ ID NO: 10017 - DNA, 356 bp, Homo sapiens
ccgggcaggtacacacatataattcagctgtgatttttaaaaatgtgaacttcatactggcagtcacggatcctcatcatttctcagcttgatttattctctctctccaggcctggccgtctccaagtcatcctctacaaagcactcatgataccttttgtaaaccacaaatcagacgtcataactcagaattttcggtctgcttggggcacaagaccatttttgtatcctctgtgagctgaacaatgtctctgcacccttacactcaactggaacactctgcaactacagaaggccaaagaggcttccaagttctctcttctgggcctcttctcactcactctcttttctaaggt

SEQ ID NO: 10018 - DNA, 350 bp, Homo sapiens
ccgggcaggtacaaaaattaagattttacaaaataacagatgcaagatctggcaaatgattaatttggggaaaccatgtcatttactacatccaagtaagtctagtatttccttgaaatttggaagacagaacaagttctgcggccctcgtgaacatttctcaacagggttacgggaaaactctgttatttgaatgtgtaggggacagggcgtggcaaaggtgccagtggaatttaatacagtcaagcaggaggcttcttttgaaaaatacccacgaggctgccagcggagttcaccaaggggctaaaggcagcaatcaaatgaaaaaaaaaaaaattaaaaaagtacct

SEQ ID NO: 10019 - DNA, 441 bp, Homo sapiens
aggtacaagaaaaaatcaaacaatcacatcaaaaagtgggcgaaggatatgaacagacacttatcaaaagaagacatttatgcagccaacagacacatgaaaaaatgttcatcatcactggtcatcagagaaatgcaaatcaaaaccacaatccgggaggtcttgccaaagaccacctgggctttccgggcaacgtgctagagcttctgggaagcagtcgtggccctttggagattccacggcttcggattcctactgcaggatgctccactgtgtctgccggcctctggcgttttgctgaggggtaacctcggaatggctagaaacaagaacactgagatggcccagtcgtgccccaggcattcccgcacacgtggtggcaaagaaaggcgcgccgacagagtgcccagtcagcttggtcagagttctttacaggttagg

SEQ ID NO: 10020 - DNA, 699 bp, Homo sapiens
  misc_feature 588: n = A,T,C or G
ccgggcaggtacatctggcaaggggcacttttactctgatgtcgggtgttttagggatatgagttcagtgaataagtagctagagggaggagctagttaggtcttgattttaggcaaatgctaaatctacctcattttccatacctgtcttttgattgggatagctaaagaatttataccagatgaaccaagcaagccaccttcttacgacattaaatttggtggaccaagcccccagtagaagcgctggggcccagcacggccaggctctcaccttttagagcagcacccccgactaatccagcgaatggaatctggctatgaaagcagtgagaggaacagcagcagccctgtcagcctggatgcagccctgcctgagagctcaaatgtctacaggtattgtttggcctttgaacagcaacattgtctcttgcagcaatgtgagccacctacttggggctttcaggcatggctgagacaagtggagggatggcctttgctattatctctatgtgctctttcaacttcctataacaacagcaccctctgctggaagaacagaggcacttgagaaaggagagagaactntctatttgaaatacagttatcatgtataaaataattttaaaaaattaggttcaaggggcatatgtgcaggtttgttaggattaaactgggtcataggagtcattgaacctt

SEQ ID NO: 10021 - DNA, 395 bp, Homo sapiens
ccgggcaggtacagttgtagtttatctgcatagataatatcaaccaagttagacccaataaagagtaatatatagaatgactatttaaaatactatagggaaaagttggattttttttttttttaagctagattacccaaagttaaatttggccaaagtggatatcaattcctagacttgggttttaacttaaatggatttatttatggcctctaagacaatcattttattctcactgcattcatgaaataattcactaacacatttctcccagagttgctaatgcaatgctctttccctcagtggagtcatctgattgttttagcgcaggcactatcatctcaccatcagaatatataagaaatgtttgaccttcaattaaagttgcagaatat

SEQ ID NO: 10022 - DNA, 397 bp, Homo sapiens
ccgggcaggtacgcggaattacatcacatctatatgaaaaatcaatctgtttttttagttgctgaagcacttggagactccaaagtaaatcaaatctttacatcaattttccaggaaaagaaaatgataaaaatctttgtccttgaggttccacttgacagggtcaaaagcaattctttcattgcattataccataacacaaatgagaaaatgcaaagatttcagaattgctctatttcacatattagcttcttagtttgcctctgcagctgagcaagtgttattaggcacaagaaattttattgaattcttaaactggtctcgagaatttcgtgatggatggtttactcaatttaaaacagatcatctggtgaaattgctttcaggttaaaaggaa

SEQ ID NO: 10023 - DNA, 423 bp, Homo sapiens
aggtacgcggggtaagtttctgatggtatatcagttagaaataatatttagctatttgtaataaaaagctgaaaacagtagcttgaatcaatggaagactttatctttctcctgatacagctgacaataatgttgttgcctttatgatatcaaagccccagttcctttatcttctactaaacctgccttggcaaatgcttgctgcttcatagtcacatgatggctgacttactgtaaccttcatgtagaaagaaaggaagaggtaaagagataaaggtacctgcccgggcggtcgaggtacaaagtccctgaggcaaaagcatgcttgctgtgttctaggaaaagcaaggaagacagcatgtctatagcattgggaggtggaaggataatatacagttggtgaggttagaggggaccaaattt

SEQ ID NO: 10024 - DNA, 427 bp, Homo sapiens
aggtacatggtgtttcttgtgccccaggagagagcctcccaatcaactctcctgttgatcattttcccttcttcagcactaatcatgaagctgtctccaaaatgagaccaaaacaaacaaacaaaatcagactcaacctaaaagccttttttgttttgttttgttttgtttttgagacagagcctcgctgttgtcgcccaggctggagtgcaaaggtgtgatgatttcggctcactgcaacctctgcctcccaggttccagcaattctcttgcctcagcctcccaagtagctgagattacgggcccctgccaccacacgtgactaatttttctatttttagtagagatggggtttcaccatgttggccaggctggtcttgaactcctgaccttaggtgatccacctgccttggcctcccaaagtgct

SEQ ID NO: 10025 - DNA, 438 bp, Homo sapiens
ggggggggggtggtcgaggccgttagtcatacgggctaaagttagcggcaacgccctggcggccgcccggtcaggtatcaagattttttattgcgaatttaagtccatcaatacctggggaaacacaaaaacctggtgctgctggaaggctgctgcactgaaaagctgccactctatatggtgttggaggatgtggcccaggggacctgctcggctttctctggacctgtcggcgggatgtgatgactatggatggtcttctctatgatctcacagaaaaacaagtatatcacatcggaaagcaggtccttttggcgctggaattcctgcaggagaagcatttgttccatggggatgtggcagccaggaatattctgatgcaaagtgatctcactgctaagctctgtggattaggcctggcttatgaagtttacaccc

SEQ ID NO: 10026 - DNA, 389 bp, Homo sapiens
ccgggcaggtacggttgctatttatagccactatcataacatactgctgcctctaactcctggcctcaagcgatcctcccacctcagcctcctcggtagctgggactataagcacatgccatcacacctgaattaaggacactttttgttgttagtattaatgcattggttcagctgagcaaatatttaacaaaattctactaagcaccaggctttcttttctaatatacaggtattaatagtcattagcctgaggcacatataatacacagactatttgaatgaatcagactgatgatacaaagtataattgatgagagacatgtagtccaaccagaagattgaggacaatcatcctgatgtagattttcattgactttagtcttgga

SEQ ID NO: 10027 - DNA, 411 bp, Homo sapiens
aggtaccattcttatctcagaatgctgtaaaccatcagtagaagcagtttagatttggactgcatggtaaaatgaaaagtaataaccctccaaccacaacctagtcagggtattaataattatatgtagcaagaaaacaaagaagaaaataatattgaaaaaatggagattccccaaccagtttcatatttgaaggatctgagttgtatttttattaaggaaattttttttctgaatactgtcttccaaaatgttaacattaaaatctgaatcagaggactctgaatggaaaagaagtttgatcactgacacctagggctctgaagcgtgtgtggccacatggaaaagtcgaaggatgcgctgtcgaatctcctttgtcttcactccatagacaattgggttgagcacagg

SEQ ID NO: 10028 - DNA, 428 bp, Homo sapiens
ccgggcaggtaccacatttgtgaatttatgccacagacttatttacgtagtgcactaaaattataaatagagataatgattgcagcatggtttagagtagtaaaggactggaaacaatctccatggcactgataaggcaagatgtagggaggagaaatggggagtgactgctcagatacagtgcctccttttgggggtgatgaaaatgttttggaacttgatagaggtgctagttgcacagctttgtgagttttctacatgtcacttaattgcacactgaaaaatgttaaatgtgggctggggacaatggctcatgcctgtaagcccagcatttttggaagccaaggtgggaggatctcttgaggctagcagttcaagaccagcctgagcaacatagtgagactgcatctctacaaaaatttaaaact

SEQ ID NO: 10029 - DNA, 405 bp, Homo sapiens
aggtaccctgagaacagcaataatgcacaaacattactattccaacagctgcattgaaacacccttggtaggattgggaaaaagatggattattgccatttggacactccaggactgtccattaatactcctgactaatggaagatgataaagattgggcaagaaaaatgactgcagcaaacgccttggcatcttcaacttgtcacctttagcaagaggcctcttcaacagttcttggactgtgtttggcagccagacactctcagaacggcaaggagacacagctaacatgatctttgcaatgcaacaaaacaagcgatcttgaggcgacagagtccaaaagatgacagaaaattcatccaactcctgaagcatgtgatgccaccagaaagccttggcaacagg

SEQ ID NO: 10030 - DNA, 374 bp, Homo sapiens
aggtacaactattttcacatccaagaaaatttgaggagttctagggcaaatgtaaagagataacattccttgcatacctgaagagaagaaatatggacagactgagaaaatgatttttaaaatgacaaaataggctgggcagagtagctcacacctgtaatcccaacactttgggaggctgaggcaggcagattgcttaagctgagaagtttgtgactagcctgggcagcatagcgagatcccatctctacaaaaaaaaaccacaaaaattagctgggcatggtagtgcatgcctgtagtcccagctactctggaggctaaggtgagaggatcgcctgagcctggaaggtcaaggctgcagtgaactgtgatcg

SEQ ID NO: 10031 - DNA, 390 bp, Homo sapiens
aggtactatatgctagaaacttggctgaatgatttgacattatcctatttaatgttcatgacaatccaataacgtaaccactcatatctcccttttgtgcagataacaaactgaggcccagagaaatcaaatatgttgtcaaaatctacatcattgaagagatgggtttcaaatccaggtcggcttggcccttgccacgacttcataatgaaattccatgggtgagtgttaccagtttctggtccatccttgcttatttcaagggtctcatcatcccatccactgtatcactttttttgttacaggctttactcttttctaccatggaaaaagactaatggatatttttttcttcataaggcttggaaaatattatcaattcaccattaa

SEQ ID NO: 10032 - DNA, 419 bp, Homo sapiens
ccgggcaggtacacccaaagaaaattaggaaaacttaaaaataagccagataatattcagtgataggacaccttttgttttaacattaccgtgttaaacatctatccctctattgtgggtatatgtccttgctctcacactactctgtgtttctcgaggtaagacagctagtattttattcctgaatagtgcctacactgagaatttatagaaaggacagcaaaattatttgaaacatgaaaaatgttttaaaatgaaaatagtagtccaccataacaagttctatcacagttaatataaattgagcaccccaatctaaaaattcaaaatccagaatgttccaaaatctgcagtttttggagcagtgacataacgccatgagcagaagattccacacttgatctcatatgacaagtcac

SEQ ID NO: 10033 - DNA, 381 bp, Homo sapiens
aggtacagtatgccttaaatgtataggaccactgagttcaggaagaaaagcataggtattctgtaggtgaattacactaacaaaatcacaactgcagaatgtgatctgatacttttgttggacagtaaagctaatacattttatatacacagtcatacctttttttttgtaatgtgtttcgttaacgtaagcacacagtcatcacagactgagacaggactttgttagaccagatcttgtgagctaaatatttaagagcttaacatatataaatgattttaattggtattgggcgaaggaaacctaaaaatgcttaaattgacagatcttacaatttgcttactgaaaattcagaaagcttttatgaaaactttgtatttt

SEQ ID NO: 10034 - DNA, 398 bp, Homo sapiens
aggtacagtatgccttaaatgtataggaccactgagttcaggaagaaaagcataggtattctgtaggtgaattacactaacaaaatcacaactgcagaatgtgatctgatacttttgttggacagtaaagctaatacattttatatacacagtcatacctttttttttgtaatgtgtttcgttaacgtaagcacacagtcatcacagactgagacaggactttgttagaccagatcttgtgagctaaatatttaagagcttaacatatataaatgattttaattggtattgggcgaaggaaacctaaaaatgcttaaattgacagatctttacaatttgcttactgaaaattcagaaagcttttatgaaaactttgtattttaaaatattttttgctc

SEQ ID NO: 10035 - DNA, 400 bp, Homo sapiens
aggtacaagcagtgttctgagtagtgagacaagacctctctactaaggtcatcctttcaatagagcccctgcagggaatgagggggtgagccacacgtgtatctggggtaggcttggggtgtggtgattgtgcaacaacagtccaggcaaaatgaacagcaaggggacaagactggtggaccctcactgggccattggtggaacagcaaggaagctagtgtggctgggatggactgatgaggagtgtggtagaaatgaagtcaaagaggcaggatttaatccctgatttcccaagagagaagcaaagacacaggtgttaatttcaatcagtcctggaacccagactcaaacccaggtctcctggttcttcatgcacagacttgttcctgatgtctcagtc

SEQ ID NO: 10036 - DNA, 400 bp, Homo sapiens
aggtacctcaattatctctcataacacacagggtcccatgttggccattgcctcagcacatagtcaggtagccagcctctctgaatgcctggtagccaggattaaaataaataccctaggtattatctgcatatctcagggtcaggatatatcccatgactaagcccacaatcacagtaaattctttgagccagaccacattttggactcacatttaatgtaaatccacatcactccaatcctgcatgatggcacaggtagatttttgggagctggacaataaacaactattgagtgcatccccacggaccccaaaattcaattttataagaagtatctcaaggcattaataagtgcatcaaagatggtcaatgtggcattatttggtaaatcagaagca

SEQ ID NO: 10037 - DNA, 375 bp, Homo sapiens
ccgggcaggtacgaccttggctcactgcaacctctccctcccgggttcaagtgattctcgtgcctcagcctcttgagtagctgggattacaggcgcgtgccactgcgtccggctaatttttgtatttttagtagagatggggtttcaccatgttggccaggctgatctcaaactcctgacctcatgtggtccacccaccttggcctcccaaagtgctgggattacaggcgtgagccaccacgctcagcctacaagcaattttttaaaaactgacacctattactgataaaattctctgtttaaaatcctatttactattttaaagataagtattagtttttttttaaatacaataattctgttattgataaaatt

SEQ ID NO: 10038 - DNA, 393 bp, Homo sapiens
ccggccaggtactgaggtgggtctagaggattagtctgtgaattgcagcctggattctgcagttgtggggtctgcctggtgctgagttttactgtggtggactcagtgttgggatccagcggaaaatcctgtgcttactttcctctcttcctgccaagtggagagtatgtcttttcatgctctgctgcctggaattggaaaacaggtgatttggataatgttaaactgtccttcctatcctcttcaacgtatcttttattattattggggctacaaccatacactgtgatctttcatctggttttcttaaatgtagtaaagatattgtgtgccttggaccatgtctggtgggcttatgcctggaatcttatttttgggagggcatggtctgag

SEQ ID NO: 10039 - DNA, 438 bp, Homo sapiens
ccgggcaggtacgcgggtatacgcgcacatatatacgcacacacacgcacatacccctcaagaagcaattaaaccgttgatatgtaatcttccaattaaagtagcttgatgcccatcttaaactgtaaattgaggaaaataacatttgtggctgtaatagatgatttatgtagggctctagggcagtcggagtctacattttagccagccttgtaaacttgtgtatggaattcatagttgaacctatagagagctgaacccctctaaggtctttgagcagctaagtggcagctcatcttgtaattttaaggttaaacaaggatgtgtgatgtgtgcacatgcatctctctcctttagagacgttattcccagttgatgggctttactgaaaatcagcgaggccggtaaccggcttacccttgtgcacacgtggtgggt

SEQ ID NO: 10040 - DNA, 397 bp, Homo sapiens
aggtactttaaaataatagaccttacaaagttttctagacagacttcctgtgaagaacaaggagcagggggaaaggggaaggggtagaatttaccaatctgaatatttcagcaagggagaatgcatgagttttactataaaaccacactgaacattgcaacaatactaaattccatacatatataataatcactgagctataaggttgctgatgtatttgttcttgaaagtgaattagagttactttatgcagaatcagctagtttttatgtttcataattgtctttcccttttttgaactttttttttaagtctaaaagtagggggaaaccaagcccgcttggtggtgaatttgggaaaaaaatcttgaaatccggcttgcaaatgcttattgccc

SEQ ID NO: 10041 - DNA, 472 bp, Homo sapiens
ccgggcaggtactatgtgcccactctttcatagtcaactaaaaaaaagcagcttcaattctagctagttttccttttcctttcaaatagaaaaaagaaaggccagaagtcagcagtttctcttcccctgagtccctgtcctcatataaagatattttcccaagccccttctgaaaacttctgctgaaatatctatcagacaaaaacatattgcataagtcagacttaatagcaaaggaagctgaaacacaacttttttatctaagcactttactactacagcaaaaattcagaattctagtaggtaaaaaaaaggaatgggtaggataggatctttattagcaaccaaaaaagcctagatcattaaagggagagaaagagcttaggaatctaaaagcaagattttttctaatgtccaaacaccaggggcaggataaatcaccttacctttaccagaaccatccccatatttt

SEQ ID NO: 10042 - DNA, 870 bp, Homo sapiens
  misc_feature 449, 719: n = A,T,C or G
ccggcaggtacaggaatttgtttaaaacctgagaataatacatcagatgttcttagatatgtttttatatcatttattgtagttttagaagctgtaaatcttccattactggtttctgcgttattagaaagctatagggaatttgggtggagaggacatctaccctccgccaccaagtgtaagaaagctgtgagggaatttgaatttatgtaatttcaaaggagacattcactttcagagaataactcattaggctcgaaatttaatagtttcagctactgaagaggctgaggtagaaggattgattgagcccaaagggtgacagtcaggtatgatgaggccactgctctccagcctgggtaagagagcaagactctgtctcaaacaaacaaacaaacaaacaaaaaagaaagtctatatatcttttaactgttatttatttatctatntataagcctgcagtggtttctggtgtgcataagaaaatgaacattagcctatggaaggcggaaatcaatagtcttgattttggagaccaccaagctgatctcctgaactgcaaagatagcatcatttcaaatgccaatgttaaggaatctgggatgtttttgagaagtttcagtatgttggttttaatttactattttctccatcatactccttcaaaatgaataatccaaatgtaacttaacagatttttagtctttgaaaacatctgntttatgttggctaataaaaaggaacaggttattggaaaccaaatactgggtcctaaatcctatttctagcactaattttctttggccttaaaggatgcgggtatactgttttgcttattgagaatagttggcagttccataaccttttgaa

SEQ ID NO: 10043 - DNA, 388 bp, Homo sapiens
ccgggcaggtaccctgagaacagcaataatgcacaaacattactattccaacagctgcattgaaacacccttggtaggattgggaaaaagatggattattgccatttggacactccaggactgtccattaatactcctgactaatggaagatgataaagattgggcaagaaaaatgactgcagcaaacgccttggcatcttcaacttgtcacctttagcaagaggcctcttcaacagttcttggactgtgtttggcagccaggcactctcagaacggcaaggagacacagctaacatgatctttgcaatgcaacaaaacaagcgatcttgaggcgacagagtccaaaagatgacagaaaattcatccaactcctgaaccatgtgatga

SEQ ID NO: 10044 - DNA, 384 bp, Homo sapiens
  misc_feature 312, 344, 345: n = A,T,C or G
aggtacaataataaaactaagcttatgcctaaaatattctcactgagtgcctgtgaatccacgactattagcactgtggagcaatttctccttgcagaagagtgctaactctatccattaaagccttggaaattgccggtaaatatgtaaaaaatcaagtgcttaaatggatagcaattattggcaggacctaaactgatacaaaagtgttccactgtctcaatatcaaaagcccaagaatgccagattcccaaagtgagtcaaagtgcttggattgctttgcataaacatggtttagccagaaatcaacanccctgggtattgggagcttgaggggtggaatnnttccaaattcctgcaaatgtttattggctttacagccct

SEQ ID NO: 10045 - DNA, 404 bp, Homo sapiens
aggtacagatttgctacatcatatagcattttttagaccataatttagatctttccatcctccaactaagatttacctttttatatgaagctttaattactttccgcaacacttttgtcaaaatctgaagtcttttaagaacccaagatggttttggatgtttaattttaatgttcagggattttggaggtgaggggctagaaacactgactcctgcccctgactcccgcccctgactcccgcatttattttcataaatgaaaatagtaaaataaattcattaagggtattatgtggagaatagaaacaagagtaaaggactgagagtatattagagaaaactatcataattttggcaagagataatggacatcgaagcttgagtgaaaataactgctagagaa

SEQ ID NO: 10046 - DNA, 381 bp, Homo sapiens
aggtacaggttctttgaatgcagtatttattcacatagttttcattttctgtcctgacaaaaacttggtgatgtttgaatgattacagaacaaataggattgtggtttatgtttcctattatgcatatttggcagttgaattatgacattagattgagacatggtgagagggggcaggatacggggtaggaggaggggagcaagttacaaaaggccccagttccgggaagctgggctgagttgttctgtttaacttcttcttcctttattcctatggttttatgattgcaaattggcagtggcagggcagcctctgactttatttgctagaagcagatgtccacattaatttagattgtctaggggattaaaaatcataga

SEQ ID NO: 10047 - DNA, 396 bp, Homo sapiens
gccgaggtcccactattttaacatccaaaaaaatttgaggagttctagggcaaatgtaaagagataacattccttgcatacctgaagagaagaaatatggacagactgagaaaatgatttttaaaatgacaaaataggctgggcagagtagctcacacctgtaatcccaacactttgggaggctgaggcaggcagattgcttaagctgagaagtttgtgactagcctgggcagcatagcgagatcccatctctacaaaaaaaaccacaaaaattagctgggcatggtagtgcatgcctgtagtcccagctactctggaggctaaggtgagaggatcgcttgagcctggaaggtcaaggctgcagtgaactgtgatcgtgcaactgcactccaggct

SEQ ID NO: 10048 - DNA, 378 bp, Homo sapiens
aggtacaacccagaatatgtcccacagggggttatgtggggcacagtatatataacagggggatatgtgtggtccaggaggtgagagaagcagggagagaagcaattgttgcattcctttgcttctgctgggcgctctgtgatgctatatataaaataaggtaagtgtgcagttgagtgggtagggagaaaagtgaggcatcttaaggcctggtggagggtgactgatttcatcctgtctttgttatgtatctgagaagcaggtttataaccagtaactgtcagtgttcaatatttaacaaactccagttacacaggtaagaggtcagcagtagcttataggtctcacttatattatccacgtgcccaactgcagcca

SEQ ID NO: 10049 - DNA, 426 bp, Homo sapiens
ccgggcaggtactttattttttttttttttttttccgagatggagtctcgctctgtcgcccagctggagtgcactggtgcaatcttggctcactgcaatctctgcctcctgggttcaagcgattttcctgccttagcctctcgagtagctgggactacaggcacgccccaccatgcccagcttatttttgtatttttagtagagacagggtttcaccatgttggccaggatgatcttgatctcttgacctcatgatccgcccctcttggcctcccaaagtgctgggatcacaggcgtgagccaccacgcctggccctctggttattctctttaaagaggagagaaaactttgagaggccaaaattatttaaataaatctttaccttagccccagggaaaaaaaggaatttgcctaaaataggggag

SEQ ID NO: 10050 - DNA, 497 bp, Homo sapiens
ccgggcaggtactttatagtttaggctggacattggaaaaaaaaaaagccagaacaacatgtaatagataatatgattggctgcacacttccagactgatgaatgatgaatgtgatggactattgtatggagcacatttttcagctaaggagggggaaaatacgtcatcattttttggcccagcagttgttttgattcactaaatcatcaatggccaggaattacctcagctaatacctttatttagcttctttgaagaaggtcataaggtcccggtgggcaaatttattttccctgggcagattttttaatttgggaccccccttaatgttgaagaagccatgcgggcgtaaccccaatcttgggggttttgttgggagattaaacacccggtatacttagttggtatccatgcttatggggcattataacttcactttgattaaacctttctatttactattctaaaattctgtcatatacctctttttctatcc

SEQ ID NO: 10051 - DNA, 863 bp, Homo sapiens
  misc_feature 456, 608, 616: n = A,T,C or G
ccgggcaggtacactctaaaagccaaaaacagcatgagctgaggcaatacagagcataagctggtatcaccaatgcatcctggaaataaaacctgtgctacctactatcttgggaatttcactgagagtatagcacattctaaatgaaaaaaagaaacgaaaaggaatggttataaattgtttaaatgtgtaaacaaacacaatagatgtaagttacaaaaatgttcagagtaacagaatgcactgataacatttaaattaaatataaagaaaagcagatctacttccaacaaatacatggatacatctttgtttcatacagcagatgcagaaatgtagcttctattttaaaaagtctgaatgtccataaactgttcccaagatttgtctttaacttatatattaaaggaaaatttcttctcttgcatattcagaaaaggtaaaggttattatatntagagagagggggagagagaaaaagagtgagaaatggcagaaatgcaagagagagccaaaatttcagaaaacaaaagactgagttataccatattccaaactgctttggagaagcatcactgagcagtgcactcacccaaccaggcattcgncagccatncaaattatatgcattcataagacacaccgacgtactttgaccatatgcaccaattctactaaaacacagttgcatatatgagctatgaagaacattaggacgagtgagaaaccatgtcttgttggtcaatgaggaagcacaagttatatattttctaataaggaagcccggaggtatactggaaaatggggttgctggccaagtgccgtggatataagggaacgcatacctctgcggcccgggcgga

SEQ ID NO: 10052 - DNA, 409 bp, Homo sapiens
aggtacatttgttgggggcgtgacattaacatataaccacttagagtggacatgcagttagagaaaagtcaatgagctggaaccaagctgggaattccaacatgtagaagttaaacacaagaggaggagccagcaaaggaaacagaaacagagcttccagcaggtggggggcatttggaagaaaacgatgccatagaagccaagatgaaatagacatcaaggagaaggaagtagtcaattgttttgaatgctatgaagaaagataagaataggtaaatagtccttatatttgataacagaggtcactagtgatcttgatgagggggtttcaatagaatggtggggattatatacctccctggattcaactgaggtaaggaaggcatacagaatagagacaggcactata

SEQ ID NO: 10053 - DNA, 425 bp, Homo sapiens
aggtacaaaggagcatatcatttaaaaataaataaataaatatcacagggagagaaagcatacgcgctcacctgagtcttttctttgttttcaggttcctcattccacattcagtattagccagtatacccagacctccgtcttctatgtctacaatccttatttctacatctaactgtagaattcttgacctgttttgtcaagctgcctactgatagtctctatcaggataataacctgtctcaatcccacactggagacaaaataaattatcttctctactccaaaccaattcttttttgtggtcccaatctcaatttatcttctcaatcacccaaaaaagaagccatgagattgccttgaccacagctcctcccttaccagtatatgtagcctgttactaaagcctgttaattctactgcat

SEQ ID NO: 10054 - DNA, 415 bp, Homo sapiens
ccgggccggtgctcagctaagaagaggattgcttcgggcatatgaagcagaatgacgagttcagtcttgctcagtagttggagcacagttttcaaagcccatcaacactttggaatggatttgttgttttatttatgccatcaagggagagttgatatttgtgtattgctaaaaactactaaagtatgtctatgcttacgtaggaacatacaaaccatatatcctctgggatctggccaggtttctgtataaggcttgacctacgtaagatcctatgatgaagaccagaaaactttttttaaaaggcggtaaagtaaaattaaaatcacgagtttgttcacatttgtcccataggttcctagtgcaaaaatgcagggtgatgaaagcaaacatttgaactcattgaagtgagagg

SEQ ID NO: 10055 - DNA, 390 bp, Homo sapiens
ccgggcaggtaccatggacaataccatcagagtttccaaaaggctggttctcactcttctcctgccacatgctttccctcacacccctggtgtggaataaatgttaaggaaagctaagacacagttgggaggaggggacacaggcctttccactcaagcgcaaatacttgcaaaatgcctgggtgccaacaaaggaatttggcagagaacctgtatcagcggcagcggcgcatcaaaaaagaatgtctaccttacaaggtgaaagaaatggggggtccaaagatggttttgggtgggaaatctggcacattagacacggaatagcctgtggctgagattcatattatacaacatcctaataaaaaaattcaaatcaaccaaatttaagag

SEQ ID NO: 10056 - DNA, 456 bp, Homo sapiens
  misc_feature 3: n = A,T,C or G
gcncggggattcgactctatacgcatatcgggcgaatagtagctgcaacagtgctggcggccgcccgggcaggttcttttttttttttttttttttggggagtgacaaggtttcaccatgttgtccaggctagtctcaaactcctgacctcaagtgatcctcctacctcagcctcccaaagtgctaggattacaggcatgagccaccacgcctagccctagttcaaccattttaattcctgtatagtattccattgtttgaatatattgcaagtttattcattctcatttagtctgtttctaaattttgttacaaacaattatgtaattaatattcttatacacacctcctattcataagagtttctttaatgatatgctcctatcaagctgtggggaatacacagctttatgagatggtagcacattgttctccaaagtagttaaaacaatttac

SEQ ID NO: 10057 - DNA, 418 bp, Homo sapiens
ccgggcaggtacctaggggaatttctgagttcatgatatcgtaggtggtgtggaaacaagtcccagcataaacccacacagctggctgaatgaagttcaagtgaaggtcatgcagcatcaaagtagatgtgtgtcactgaaacttaatggcaggggagtgagaataattttgaaattacttagattgtgagaaaatctggctgatgattagaagtgttgatataagaggtcagtttggagttccactcaaaattcatactaattttaatgttatggtattctaaactactagatgggtaagggggaagttataggattctgaacaataccattaagaattaggataggattttctactgtggtgtcacagaagaatcagagctagcaaattcataaaaagaaaatttgattccccaag

SEQ ID NO: 10058 - DNA, 404 bp, Homo sapiens
ccgggcaggtactgggaactctggcaggatccttgatgtcctcttaatctcttttaattttcataatactgtgatgcaggtatcattatcccccctctccactaccttgttttatcccagagggaagtaaagctcagagaggctaagacactttctccaggtgacagactctggaaggggcaaggttaggatttgattgtctgtcagattccattatgctgtgtgcctcaaatgcctggtgatcctatacgctaccatgggcactatgtggggcagtgccactaagctctgctgtgacctctagggtacctctaaagttttatcagccacttgtcaaatgctttaggtgaggctgatctatctatcctagttctcgtgtataaaaaccgcccccgggttgcatg

SEQ ID NO: 10059 - DNA, 395 bp, Homo sapiens
aggtacttgtccttcaattttgggaaatgctattatttgataatttctctttttgtattttctttgtttctctagattcttagttttcaattttgtctttcaaaccttgtatttaatttttatttctgctttcatatgtatatataatttgtcatctgaaatgttcttttttcataaccttacttatatttcatggatgcagtagcttacctctttgtgataatagttttaattgacaaataaaaattgtgtatattggctgggcttggtggctcacgcctgtaatcggagcaactttgggcgagccaaggcgaggtggattgtccttgatctcaggaagttcaatgaacagccttgggcaacacagtgaaaaccccattactttacttaaaata

SEQ ID NO: 10060 - DNA, 385 bp, Homo sapiens
aggtacccagacctgcaagagttgtctcaaacaataacaacagtatacaaatgttaacccaatcttaattcagaacagcttaaatgtaataaggtaaccttggaaactatggcgagctctcaggtagaagctagaactctgtttcacgtgacagaagcagacagattgttaagaatctgttatgagtggagtcccatgccagggcttaccctggccaccacttactagcggaagccttgagcaaattctgcagccgttgtgagcgtcacagagtggtgattgtaaagattatataacattatctatggtcagtgtctccgcatctagcaccctaaagaaaatccaaatgccaactgtttttgtgacagggacaagcactgggtgc

SEQ ID NO: 10061 - DNA, 376 bp, Homo sapiens
ccgggcaggtacaatccccagattttttcatgtgtagcttcttatcacatagggagtccaaacatcactttctctgtgagggctttctctccaaagcactgttctgcggtccaaccctaccactgtcactgtcaactcatacacaggcatacacatacacaacgcatacacatgatcactattcaaaatgaccattttccttatttattgtttatcatctacctctcccacctcgccacaccttccccccaaggcgaaggtaggcttcgtgaaatcttaaccttgcctgtcttattcactgctgtattctggtatagcgtctccaacatacttactgatgaataaatatctgtttaacaaataaactctctctcct

SEQ ID NO: 10062 - DNA, 397 bp, Homo sapiens
aggtactgtgaggcactctttccccactctcccacaaccctcagcttaacacaactgtggtgattgctttgtccgttttcccatgaggaccctgagatttcaacaaggttcagtaactcacacatcgacacttccagggagctgggttgccagggaactggcccaggtctttccctcctgggcccatcttgtccttaatctctgctgacattgatgggtttagttaccttgtcgtatttcttcagtgttttatgccatacagtctcccttgagtagatgttctgtataggggatatcacagcttcctgagagaactgtggttaagtccagcaggatgcctgggccttagtggcactggagtagtggggaggttcttgatcccccatgcagttccttt

SEQ ID NO: 10063 - DNA, 400 bp, Homo sapiens
aggtaccatactcttttggttgctataattctgtggtataatatgaagtcagaaaatataattcctccagttttatttatttatttatttttgcttaggatagtattatttcttatagtgaaagcattctatgttatttattattagtctaattttgtagttttacaatgctatcctcttttacaaagctatgatcaactcagtgtgtccagatcaggatcatttgcagctatttgcaaaagtagcaatattctggctgggcatggtggctcatgcttatattcccagcactttgggaggccaagacgggcagatcacctgaggtgatctggtcaacatggtgaaaccctgtctccaataaaaatacaaaaattagccggggatgatggcagatgcctgt

SEQ ID NO: 10064 - DNA, 379 bp, Homo sapiens
ccgggcaggtacccagtgtctcatttcaggccctcctcatctttattggaccattgcagcagtctcctaactgggcttaatgctctagtctctccttccttcagtgtgccctctacactgcagccagtttcaggaacactaattgagtcatccccctgtttaaaatcattcagtgaccaggtgctgtggctcacacctgtaaccccagaactttgggaggccgaggagggcaaatcgcatgagtccaggagttcaagaccagcctggtcaacatggcaaaccccatctctacaaaaaattagccaggcatggtggcatgcatctgtagtcccagccactcaggaggctgaaatgggaggatcacttgagctgaagaggg

SEQ ID NO: 10065 - DNA, 410 bp, Homo sapiens
ccgggcaggtaccctaggtgatgcctgttcttttgaaacagcagagattttattttaaaaatacgtttttgtgtttattacctaaaggagctattctgaaatttttatgtagaaaaatcttcttctgctccatccacagaagattttttatccatagatatttttgccatctcctttctcctctttcctttgttgtagatgatatgaaaagactgcttttttcaaaaattgtgtttttaaatttggggaatttttgccatgtcctaaaagtagatcttctgaagatattccttacttttcggtgtataaaacatatttcttgttaaaatggttggtaaaagaggcttttctattttataataccaccagttaggacttgtaatttaaatttgttattcttcccctctctt

SEQ ID NO: 10066 - DNA, 877 bp, Homo sapiens
  misc_feature 148, 174, 385: n = A,T,C or G
aggtacaaatatctatgagaagtcagattcagtggaaagtctgtgattatggttttgttttttaaatgaaattgaacatttaaactgcaaaacgtggggaatgaaaaagccatctgtcaggcactatatccacaaaagaatcacccancttaccaaataatccctgaatgtcanccactcttctttctattcatcatcctggtgttgtaaatggaatactcacaataaagctgccattagcagagtatccctgtgatctatccttaccaaccatgttgatctaaagttggaggtcactgtgattagaaaactcaagacaccaccccctgccccaccagggttgaaagggactgaaaagtagatttttaactgatgcaaagcttgngctcaggctctggaagtccccatggtagtggggctctgccctagtcccccaactctttctttcgagcttcacaggattttaatgtcatttgccctctctttatgactttggtgagcaaaagactttatacaatttcacactgttcatcccagagggcagtcagttcaggaacaaaaagaagattagagataattccaatactcaatgggtgggaaggccagaacatacaaccacatgaatgaggaaaggtcaccccatgaaaccaaacttgaatggtccgcaatgccactgtcccacattcttaagaaccccgggaaggtaaaatggctccttctaccttttttttgctgtgacctaactgtccggccggccgttagaactagtggaacccccggccggaggatatcaattaagctttttgaaccgggaccctcagggggggccgggacccaatttgggtctcttaggggggtaatggcgccttgggaatca

SEQ ID NO: 10067 - DNA, 426 bp, Homo sapiens
ccgggcaggtaccagcttttgcactttcctcactgtaaagatgttgtatgggttacttaaccagttggggtttaatttccttggctgtatagtggacttagtgtcacatgcctacctcaggatttctgtgacaattaaatatgatattttaaggcttctaacttactggatctaaataaattattcctggaaaaaaaaagtttgctgtgtaataaagcacctaaacagtaatgaaaaagcaggtatagaactttaggtgttttgtcaccctccctcccccagtggtgtgtgtaggaaaactttgcttctttttgtaaatctgatgtctaatctcttctgactttacgttcaatcagttgattattttcattcagcagatgtgatcggtttgcagggttttcagtcaagtaggattgagaaaacatg

SEQ ID NO: 10068 - DNA, 928 bp, Homo sapiens
  misc_feature 145, 146, 160, 161, 186, 196, 236, 365, 738: n = A,T,C or G
aggtacatgagatgggagctcgacacattttatttggagaataaaagaaaatatgccgtcatcaaactagagcgtgttggggggcatctggtttacagaactaagtcaaggagaagaactctcaagcaatggtgacatctgccanngctctgcaaagtgnnggccctgccttgtcacacaagtctnccttgggcanaatgttttctatgtagaattttagacacttttcctgtganctttctcaagggtcttttggtgacacatgcagcttgaagcttttgcaaggggctggagtctaatctcttcttgcccagcttggctgcaggagaagaagggagatatgttaggacttggctttgactgangtggtgtagcctgtggttgcaagggctgttgccaatgctttctggtggcatcacatgcttcaggagttggatgaattttcttgaatctttaggaactatgccgcctcaagatcgctcgtatttgttgcatcgcaaagatatatgtagtctgggttacgctatgccgtctcgaaaagtgccagagatgccagacgacatttccaagtacttgttataaatagacctattgtcttacgagttatttttgtgcacacatttctttaagtcgtttatctataacgcaatcttttatcgatctaacgatttaacaaatcctatttttatacgggtaccactcacttgaacctatcactgcatctgaacaatgtagganatatctgcgaatgcggtgattctgtaacacatacaaagtcttaataagctactaattaatcgtagtgcatgatactacactctgatacttaaatatttaataaacctcacatacactactcacatatactgtaactacaaatgttaatacgctttgtgtatagaatcgtaggatcagcgtatgcatatct

SEQ ID NO: 10069 - DNA, 415 bp, Homo sapiens
ccgggcaggtaccctttatgatctagataaaccattgtgttcttctatagtttttccaactatatttgaataggtgaagttaatatgtttaatcataaaatgctctcagatgcttgcaaaaacaattactccatcagataagaacacatcaaaaatttggaaaatttaaaaaaagtcattccagctatatgcaaataacttttagtatatgcatctgaaaagctaccaaacgtaacaatgaaactctaaacttgtagtagaaaggtaaatgcactgtgatcagctttcacatcacttcagagtatattctaaaacttcttagattctacattatttatagagtgaactctaaattcaaacatttctcaagaacaaaacgactcccatccaattatttaattagggaagaaaagat

SEQ ID NO: 10070 - DNA, 849 bp, Homo sapiens
  misc_feature 454, 455, 456, 457, 458, 459, 460, 461, 462, 463, 464, 465,466, 467, 468, 469, 470, 471, 472, 473, 474: n = A,T,C or G
gctgggtcccgcactcttgattcccttgcattcaatgccttaccactctacaactgtcttctaacagagctctattccttaatcaccagtgtaatctatccaccttctgcatccctgtcactgagtagctgggtgatctgggaaaaacaaatgctcagagttgtcttcccaaaacccagctgagctcccaacacaccttccaatccctctcagtttcttcagcaatcatcataccctaataccatgaaattcactatgcacaactctttcccctaactgcagcccaagaaaagctgaaaaactcaaaatcctgttatagcttcccactaacctcatctatatccacatctttccagacctctttcctgtcaggttcagaggatttttcctctgcttgctctttattctatccctagggagaccctctgcacctctgctcatccccgcgtacttnnnnnnnnnnnnnnnnnnnnnttttggtaagaccactctgccgcccttttcaagatgttcacttttgcaccatttacagtaaatagccagacattggtcaattaaaggcacaaccacaaaacagaattctaggtgatcattcaaaacggagatctacatatgcaatcttagaagtatgtccaggatattatggtaaaaaccaagttgcagaaaaaaggctggcatttttcataaaaaatcatttggagagtgatattttattgtcctaggaaaaaagtactccctgttaatagaaatgagaaatatctaactgcgcctggttctgataaaactttttcttacaaagtatcctaaaccaatggcggcctgccattataaataaaaaagaaacttagg

SEQ ID NO: 10071 - DNA, 406 bp, Homo sapiens
  misc_feature 354: n = A,T,C or G
aggtacttacgttgcctcgtgtcaccaaaattggtgtggctgctgtggtgcggggggctgcactgatggcaccccttcctgtcttcatcaagcagctgcccttctgccgctccaatatcctttcccattcctactgcctacaccaagatgtcatgaagctggcctgtgatgatatccgggtcaatgtcgtctatggccttatcgtcatcatctccgccattggcctggactcacttctcatctccttctcatatctgcttattcttaagactgtgttgggcttgacacgtgaagcccaggccaaggcatttggcacttgcgtctctcatgtgtgtgctgtgttcatattcattnaactggcccgggggcggccggccgggcagggtcatgggactacaggcacgcc

SEQ ID NO: 10072 - DNA, 463 bp, Homo sapiens
aggtactttttttttttttttttttttttggagatggagtcttcctctgtcgcccaggctggagtgtggtggtgtgatctcagctcactgctacctctgccttccgggtttcaagtgattcttctgcccttggcccttcttaaatagcttgggaattacagggcttgcgcccaaccattcctcagcttcattttttgtaatttgtaatttaattttatttttaattttttttgaggacagaagttcttaacttctggacgcccccacgcctgggaatttccaagtggtaaaccgaattctcaagcttcacctggtaaacccttccggcctttcttgggttttcacccaatttttttcctggcccttcaaccctttttggaaatttgcttggggattttaccagggccttaaataacttacccacaaccccggggttaggtttttttggaatttcttttattta

SEQ ID NO: 10073 - DNA, 375 bp, Homo sapiens
aggtacatttattacaaaggagtgaatattgatatattattaactaattttatagtttactttgtgttatgtattctatggactttaacatgtgtaatgacatgtatcccctattaccagtatcatacaggatagtttcacttccctaaaaatctttgatgttctacccactccttcctcgttccctctcctcactcctccctccctccatcttaagcccatggcaacccctgatctttttactgtctccatcgttttgccttttccagaatgccatgtagttggagtcatatagtatgtagccttttcaattgacttctttcacttaccagtgtgcatttaaggtttctccatgtctttttgtaatttgagaag

SEQ ID NO: 10074 - DNA, 407 bp, Homo sapiens
aggtactgcttcaaaaggcatgtataactaagtcatatcaaaactaaaatgacaaatgggttattttcaacagaacactttgaaaggaaaaagaaaacaaacaagaactttaggatattctttttgaaggcaactgcatgatgctagattgtgtccacggactagatttctaaaaggccatctaaaatacatttttaaatacttattcctttcacaggtaatatcttacgaagtttgattatttttgaattgtcataatatggacttaatatgggaggaaggtagttccaaaatgacagaagtaatcgcttccacatcacttttgtttttctatttacatatacaaacacatttttctcttgtcacaatagtatctgaaacattaagaggtgctcataaatatttga

SEQ ID NO: 10075 - DNA, 352 bp, Homo sapiens
ccgggcaggtacttttctcttcttggccaaattctcctcttatgggtatggagatgacatgctctaaatgctttgggagcaagcactcattagagaagacttttgatgtatccttatcttgttagtagtttaagcttgtcagatccttaaagaatgacaggcttaggaccatatcccctagacttaagaggattctcattgaccatttgttcagtgtccatcactgaatcacttaccaaatacagtcgacactctgtatccacaggttccacacccatagattcaaccaaatgctgattggacatattcaggaaaaaaatgcattaacactgcaacaataaaaaataataca

SEQ ID NO: 10076 - DNA, 373 bp, Homo sapiens
aggtaccaggagggtattgatgtttgaggtccaaactgaaaacccatcacctccttcccactgctatagcagcgttagccctggggttcattatctagccagttcacaccttctaaagtggggctctgaaaatgtcttacttccctcacagacaaagcaattctcaagcctcctgagatcacccaccaaccagagcaactgctgtcacttggaggtgcagctgaattcttctaattgtgacacaaactcttgaaactgtaaatgctgaaagattaaatgaggttataacactcagaaggttttacaagtaaaagtaagtcaaatcaataggtctttatttcatatctgtaatggtttagctctgcgggaagtg

SEQ ID NO: 10077 - DNA, 402 bp, Homo sapiens
ccgggcaggtacacaaatcaaaggaataccatatttagcaccataggtgactaattaggcaaatgagcaagttttaagagtctggcccaatttttaaagtgtgtgtgtgtgtatcacaatctctctaatgctatatgtagtctaggcaatctggcaacagattcctaactattgttaggaaaatgcaagtatgatcctgttattgctactgctttcaacccagaggtaatgaggaaaagtccaagttccttaacatagacttcataggcctgcatgatttaggactggttatcaccaccacctcagagaaactcctgacctttaatcaaaatgtgccttgtggtaaactacttttaatttaagccatgattgcgatttataattccctatcttgtgattaat

SEQ ID NO: 10078 - DNA, 383 bp, Homo sapiens
aggtacgcggggacagagagaaggttaagagcaacaagatgggaggcagctgcatggaacctgtcccactgaggaagtaaaacagagttttactcttgttgcccaggctggagcgcaatggtgcgatctcggctcaccgcaatctctgcctcctgagttcaagcgaggagcaagtgagtagctgggacaacagccctacctgatggactggacttctgcctggattggagtttgatcatgcctccatatgggtgtttaccaggcgtatgcattgaacctgagtttgtctcttcaatacaaggaaaatctctgccgcttagtgattttccaagaaacatgagcttctgcctttcaatgaggaagatactcaaaagtcatgttcg

SEQ ID NO: 10079 - DNA, 398 bp, Homo sapiens
aggtacttttttttttttttttttttttttggatttttagtaaggacagggtttcaccatgttggccaggctcgtcttgaactcctgacctcatgatccacccgcctcggcctcccgaagtgctgggattacaggtgtgagccacgcatgccaggcctggccaagtttctgaagggctggcgggcatctctgcttcttcccgactttactgaaaatgtttccaacaattcatcactgagcatgaaactggctaactttgggaaagcgacagatttccttactttgaagggtgccactaagagtctcctgtcctaaggatttttaatcaagaattatttttataaaatatatttttaacacataaggagacagatgattgaatgttttttatttgagca

SEQ ID NO: 10080 - DNA, 433 bp, Homo sapiens
ccgggcaggtactgggattacaggcgtgagccgccgcgtctggcctctaacgagatatttctaaaggttaggccttcagtcaagaattttaaagctggatcttagaggttatctaaactaacctctccatttcatagataaggaaagtgagtcccagaaaagcactggtttggacaagttcagaaagctaaacagtgactgtggatgtatgattctgtctcttaactcctaatccaaatgtcttctcactagataaggctgtgccttctacatttgaaggctcaaaccccatggatggatggagggaaggatgggtggagggatggatggatagattggatgggatgattaggtcttttttacccgtacaataattgcctgattgtttgggcctcctttattttttacatgagtgctaaatagataaaaagcg

SEQ ID NO: 10081 - DNA, 437 bp, Homo sapiens
ccgggcaggtactactggcttcccagtggttgggttgagtataagcccccaaatatgagtaaaagaagaaaaagttaattcaatcaccaagtcttgctcgcatattaaaaattggatagatgaatgttcaatcatatgttttggctttggccagccagacgagggtcatttttagatttgaactgcttagaattcttcaggcaagtcttgatggagcacttcttggatagttagaactttaccaggttcacaggagagctcagatgaagcgaacacctcatccacactggtttcctttggagacctttactgttgagaggtggttttcatagccgcaaaatgacaagtgcaagttgagtagatcagtgtttatcaaccaggtgccacattgtgccccaggagacatttgacaatgatggggtgttactggcatctag

SEQ ID NO: 10082 - DNA, 450 bp, Homo sapiens
aggttctacttatagcttatctgtttcctaatgcatatagaaggcaaataaatggacaagcagcatttgagcatgagcgaaatactctgagactcactagccatgcttcatttggcagctttgtaagcatacaaatgttcatggctatgattttcatattccacaccttctaagaaaatttgttttatagtgctttgaaaaataaaaatattccttaaaacaaaccaacgaaccaacctacaattatccagtgccctttacccatagtttgacaatcactgtatccaggaaatctattttaatggttctcagttgtgcaaaagtgaaaggtcataatagcaagtttaatttcaacaagagaaaaatatcattttatgataactaggactgccccactgggaatagggatgtagaaccaaagttgaaacagcatttcccatctttatagta

SEQ ID NO: 10083 - DNA, 857 bp, Homo sapiens
  misc_feature 123, 324, 478, 542, 567: n = A,T,C or G
aggtaccccttcactagactagagaagtgtacccatctatttcagtgtattcaatcacatatcattatcaacactcgaggccattctagtagtcagtgcatgaaagtcctcaccatcattgtnttcatgcttctaagtatcttcaatctatacaattaaaaacatccgtctctagttgctattctcatatgtacatagccattcggtttggcaaaagttttggggtggaaccacaaaatttttgtgtatattattaataattagtctccttggttcactctacctgtcctcctttatatattaacacacatgttttatcgaggntacctagttggtatcattttttatcaaccagtattttatgtatagcccatatcattccactaagaaaattatatttatattttacgattattaatatcgaggcggctctattttaaacagcaataaatattatactcacaacctatccttattntattcggttgtgtttcaatccaacaaagaggttaagagatggtgtgttctctttataaaataanactaccccaagagtctcactctgtntttttctcttctgtaaagtaaagatgggtttcttctatttataacgaccgtagtactctttttcctttattggtggtggtaacaatccctctattatacaccaataatgttggctcctttatggttttaagagacccataaactctttggcaagagattcccctttcttcttttattaacgtgaataagaggaaacctcttgggtttttaaaaaaccaacacctcatctatatggacatactatatataagacgtacggttatggtttaatacatactacaaactccttg

SEQ ID NO: 10084 - DNA, 396 bp, Homo sapiens
aggtactgtttttacagtcattttggattcctgctgtcttatacaccaaataagtagttaaagtgacacagttcatagaataaaatgaatgaaaacacagacatggaaatggaaggaaagtgcagagctgctttctaaatcaaccaaattaattaaatcctgaccacaaatactgaaatgcagagatgcaaagtcctttttgagtagcctggatcaattgtttcctaagagcagatgggcactactttagctgtgttgtctacaaagaaatccagttggcgagaaaatatttcatccacagaactatgattcacagggttagttcctagaggtatctgccccaaggccacctgggatgattaccagagtcactttaaaccaagattctaagcctaa

SEQ ID NO: 10085 - DNA, 481 bp, Homo sapiens
ccgggcaggtactatatggctaacttatttggggagcaaagctgacttaccataagtctatctcaaatagaaatgaaacactcaatttgtgaaatatgctgagttttaatgcgtgtgggggcagggtgaattaacatttgtgatgcaaggagaagagcaatctatacttaccactgtctatttgacattggggactactgctacactctaagtcattttaccttataacgcagagttgtaacacgctactctgagcagctcatgacatctgtttgaaatttaagttggtgccctaatatgggtttattataaagattttgatgctgcttttcagagatgggtaacctactttacccccctaagctaatgtttcccaaatacacccaaacccacagaaaggaaaactatttcttattaactcacagccaacattataaaacattttatatcttgaagctgtgatacagtccagtttttaccg

SEQ ID NO: 10086 - DNA, 386 bp, Homo sapiens
ccgggcaggtccgggcaggtacatagaatatgagcacagcacacacatgagagacgcaagtgccaaatgccttggcctgggcttcacgtgtcaagcccaacacagtcttaagaataagcagatatgagaaggagatgagaagtgagtccaggccaatggcggagatgatgacgataaggccatagacgacattgacccggatatcatcacaggccagcttcatgacatcttggtgtaggcagtaggaatgggaaaggatattggagcggcagaagggcagctgcttgatgaagacaggaaggggtgccatcagtgcagccccccgcaccacagcagccacaccaattttggtgacacgaggcaacgtaagtacctcggccgctcta

SEQ ID NO: 10087 - DNA, 397 bp, Homo sapiens
ccgggcaggtaccactgcactccagccagggcgacaatgagactccgtctcaaaaaaaaagattattaatttaaaaatattttaagtgatcagctgttactctaccccaatctcattggagaataagattctactgcggttctaagtcattgtgtgctgagtaaagtggttaactagtgatttgaaagaatacaggagagagggtaggagagtgagtaacaggtggagcccctgttttctttatagcaaaaaagttaacatctctttgtttagtttagagagcacttaattttaggatgggctttcactggtgggttaaatgtgctcattacccaccctccctgaattttggaggcctaagggctctaagtgtctttcacctttttttcctattgtt

SEQ ID NO: 10088 - DNA, 400 bp, Homo sapiens
ccgggcaggtactgggaccttcttggtctcacttactgctgcgtcccatgcacctaggcaagtctggcacattataaaccatcaataaacatttgtttaatgaacaaatgaaggaagaaacaggaggcacggggcacagaaagatgatacaactgcccctctatttaatccagtccactacccttactctgaatgcttcacatcacattgctcgtcttaattgttttcaaacaaacaagtccagacgcctgctcacaggggtccctagtgggctcctgctgtccagccttgctccacgtgaagatgccctcttcacagagcagtggatccccctctcctggttccagctctaggagtctcaccacaatcccaccagcaaaacctctatctcctgcctcaa

SEQ ID NO: 10089 - DNA, 543 bp, Homo sapiens
aggtacgcggggaaaaaaagggtggggagtgccctttcttgaaggaatcccttaagtgcacgtctcccgttttcttttcacatcaatgcagagtcgcctctgtgaatttacaacacccaacacccatgattgcagttccttatgaaaaggaaaattggagccaggtattttaatttggttttggacatttgcattaaaagtagggtccactattccaggtctaaactgctaagaaaatttttatttctcaaaaactttagtttgggcctttcttttttcttcttgctcagaagagacccatatctttaagtggccaactggggggaaaattcttgggcatcgccagtatggaatttcaaactgtcgcttcaactgtataaaatttaccatttgggcctaccatttgggatttttgtaataatgaagaaaagggatccccctgttattttttggaagccttgtggcttattggaaaaaaattctttttaaccctcctgatattgtgggttccaattccccaaaagaaaaaatcccctgggtgaa

SEQ ID NO: 10090 - DNA, 417 bp, Homo sapiens
aggtaccctgagaacagcaataatgcacaaacattactattccaacagctgcattgaaacacccttggtaggattgggaaaaagatggattattagccatttggacactccaggactgtccattaatactcctgactaatggaagatgataaagattgggcaagaaaaatgactgcagcaaacgccttggcatcttcaacttgtcacctttagcaagaggcctcttcaacagttcttggactgtgtttggcagccaggcactctcagaacggcaaggagacacagctaacatgatctttgcaatgcaacaaaacaagcgatcttgaggcgacagagtccaaaagatgacagaaaattcatccaactcctgaagcatgtgatgccaccagaaagccttggcaacagcccttgcaaccc

SEQ ID NO: 10091 - DNA, 404 bp, Homo sapiens
aggtactttttttttttttttttttttttttagtagacacggggtttcaccgtgttagtcaggatggtctcgatctcctgaccttgcgatctgcccgcctcggcctcccaaagtgttgggattacaggcgtgagccaccgtgcccagccccacctcaattttataatataattttctacacagagaacacagaaaatagttgtcttttgtttacaatagagaatcaacgttttttttttactacttatagtttagaactaaagtttcagcttcacaactattggtgatgctatgtaaatgtctcaaattactgaatttgtgaaaacctctcatgtttctttcacatgtgagttacaagaagattatttttaaaaacttgcaaaaagtcaatcttggtttctcgt

SEQ ID NO: 10092 - DNA, 417 bp, Homo sapiens
aggtacgcggggaaacagctaagatttctccataaagaaaaggaaaattaactctagttgcagagtgtaaaaaagtatttccaaagatagaaaatgtcaagcaaatatgtttctattgtaggttctgggaaatatcttgctgtagcatcccatgacagctttatagatatatacaatgtaatgagtagtaaacgagtaggaatatgcaaaggagctaccaattacataacccatattgattgggatattagaggtaagaacttaaataacttaatacttgataaaagtttcatttgatttagtatagctatattagagaaacggaaaagggattcaacagatgattttaaaagaattgggaaaaacaacccttattctcaaaattattttttactattttacatctgaagataaatc

SEQ ID NO: 10093 - DNA, 376 bp, Homo sapiens
aggtacgggacttgtctccaggagacatgtctgggaagaagagctagactggagaaacatgagcatgttcaggtgaaaacatgtgagtggataagagcaagagggtgagaacacagaccaaggggctaagggacagactgtgttcagtatttgggtatggaacttgtttttgctacttgctagttctaagaccaggctcagactctaacttctctgtaatgtgggaataatgacagcacttaccttataagattttacaaagattaaaatatcatatataacagcacttaacacaagtaagaattcagtaaatgttgactgttattactattgtctgggtcgttataagtttgaagacacaattgcataaactgtt

SEQ ID NO: 10094 - DNA, 406 bp, Homo sapiens
ccgggcgggtactttggcttttgtttctagaacaccaatgagtatatgctcattaagatagtttgatgcaataaatccttattttacttgcctctattactgcattgtaaactgttgtctactttgtcttcttgaaatcctacacctcccccagcccccacatttggcctatggaacattactttatcctgattttccccctaaccttctggcaatgcctctcagactccttccagaactacttttctctgttttccttttaatgatgacagtttatgcaattgggtcttcaaacttataacgacccagacaatagtaataacagtcaacatttactgaattcttacttgtgttaagcgctgcaatatatgatattttaatctttgaaaaatcttataaggtaagg

SEQ ID NO: 10095 - DNA, 404 bp, Homo sapiens
  misc_feature 150: n = A,T,C or G
aggtactttatatttttgcatataaacttgcagtatttgttcaaaaattaatagtttttgacattggcttttctgagaagagaaattgaaagtgtcacaaaataaaaaaagatgaaatgaagcatatataattgtcaattttttcaattntctagccaacagagaatcgaaggattctgttcaaatattagtaaaaattgaaaataaacttgtgcttatattttgtttgcaacacactagtcaatttaacctgtgactagttatctctaccgaaggtggatgtgtagtttctggttttaaaattcaagcaaactggaaaataatccatctaattatgctttctttcccaagaagttttttaatgatatgccagcttcctaatttggagacaaaagccttaattg

SEQ ID NO: 10096 - DNA, 377 bp, Homo sapiens
  misc_feature 269: n = A,T,C or G
aggtacattccagctttgacctacttcccaagctgtatttgaattggcttttatagagagttaactgttggcaatatttttgcaatgtgagctttgctgcttaatcctgatactatttattctttaatgatgaattcactaaaaaaaattgagtgccagacagtgttgagaacaatagaaatgtggcagtgaacaaagtccctgccttcatgagcttaccttccagtaaatatgaataaaaatctttcccttactttacttagaaattntactttttttttttttttttttttttgagacggagtctcactctgtcacccaggctagagtgcacaatcttggcttgctgcaacctccacctcccaggttcatgcagt

SEQ ID NO: 10097 - DNA, 353 bp, Homo sapiens
aggtactggttcatgtgtaactcatacatcccacaagcatctactgtgtgcagaatgtctcgtatgtgaaagacactgtgggcatataactgtggcttagatgggcttctaacccctgagaagataatatatcagcagaaaaaaaggaacatgtatatgaactgccatcacacaacctatccagaattccacaagaaaagtatggtcaaagagctaggaggtgttgaaggaaagattacctgcaggagaggcaatgcgagatgatagaagattctgagctatagagcgaggcggacccagatgggaatttcaggttttctcgggatgtgggaccctaaccaagcttcttatac

SEQ ID NO: 10098 - DNA, 594 bp, Homo sapiens
aggtacatcaaccctaacttattataaaagatcgttaaacctttgaaaggtcaatgtatatactgctatctatcacaggcgggcaccattcattatgtcctgtcagtggctctccactggccaacccttcaaggtgtcaaggccgaggacgcttcaaaaggccattgttgggtaatgaagggggccccaaaaccttcacttcccccaaaaatataggtttttttattttttaccaatgctccaattactttattttggccctttggccctttatttttttcttaacttttttggggtttttacttcttttacccttggcgttttcacccttctaaaattttttgaggaaaaggtttcttccttccaattttttccccctccaattgtataatctcaacccaagaaactcaatttttctttttccaaatttaataacaccaaaaagtttttataagtgggggcaccaattggccccctatttaatggggggtggggggctttttaatttttcctttttttaagaccctttacctttacaaatttgccacctttctatggcatttttttggttaggaagaattttctccaattttt

SEQ ID NO: 10099 - DNA, 498 bp, Homo sapiens
aggtactaagttgccatttaagaacctcttcaggttccccgtctccttgagctatgaaagttttcatgaacacttcagttttaatggcatgccaaacattttgttccatgagcaacacaacagttttaaaaattgccattgagtggtttaattagaaattaatcccagtctgtttttaaaatataattttctatgaccccaagggctttaccaaaaaatgttattaaaagagggaaagtgcccccagaatattaaaagaatgcttttgaaaaatggtttggcttgatatgccatccttttaaaaaattcattcatttaaaaccaatccttttccaaaacctagttcaagatgacatttgggctttcagttacatttttaaatccaaaaaatttttgataaaggaaaggttaggcctaggaaaatgcaaaccaaatatagtgaattggaacaattgggccttttttgcaaacaagcaaaagaaaaaaagtccaggtgga

SEQ ID NO: 10100 - DNA, 400 bp, Homo sapiens
aggtacacttccatcccaccagctttgttgctgttgaaccgcccccaaattgttgcgcaccatccacaagctgagctgctgctacatcctatttcttggggccaagctgcagtggagatgctccacccacccctccaagttgcttttggccctgccccgtgaaggcttgagctgaaatggcactcagcctcctaaagaattggctccttggctgctcagggcagtcatgcacccccattcctgaatggaagcagcaccttgcctccaggaaatcagtgtcatggccaaacccaatcagttgcacatctcagggatgagatgacatggtattttacatcttaactaaacagagcactgactgagctgggtcacctcaccctacaggttgaataattgtagt

SEQ ID NO: 10101 - DNA, 392 bp, Homo sapiens
aggtactctggcttcttctgaaatcagattccagctcctagtcaccataaagtatgcctgacccttactttatcattggaaactaggtattccagagcaagaaattcatgtattcattatttattatgcactgtatctgattcctaaattactcctttttttgcaaaaaaggaaaaaaaattatttttccatcacatgtgcactctcataaaactgaggttatatttttaaacactgtatgtattcaagaaaaatatatcatttataaacctcatgttttatatatttcatgaaattcagggtcctgtgcttgaactctgaccaggtgggaaatactgctcttataaaaactatgggaatttaaattaaaaccagtgaagtgttcagttcta

SEQ ID NO: 10102 - DNA, 442 bp, Homo sapiens
ccgggcaggtacatgccttaactgggagttcaagctaattcttgatttctttctcaaaagacgatttaaatataaggcaaaaaaaaaaaaaaaatttccgatactgtaactaccttaactgtttgagtatatagaaatgagtatgttttatgagttaacaatgaatcatagaaggcaatttatgaagaactagaatgattctgtctagctgccttcagggatcagaaattcaaattaaacttctggcagacatttaaagaatgctagcatacaaaactgaatttaaaaaaacgcacacagttaacactcctcagtggagtttcaagaggaaatcatgaattaaaaaaacacacggcatgatacactgttgactgataccaactgggtgtggtcgatcccaggtgcacccaaacctgcgggaatggcagaaatacagctgtgc

SEQ ID NO: 10103 - DNA, 395 bp, Homo sapiens
ccgggcaggtacagtggcatgaccataacttgctgcagccttgaactccaggattcgagtgatcctcccacctgagcctccaagtcgctgggattacagacctgtgtcaccatgctcagctatttcacatcttttgatgtgatgtgacacaaagtatacaacatcacctatgggtgtccatgccaaaaacgggaaatgtttaacagtgagttattatatgtaacatccagcttacaggaatgataggaagagaggaactagtgaaatgatgccacaaggaagcacacagataaatccagaaagttagaaattctgtaggacaaatggcctggtctcttcaacaactgttgctgataatatgacaaaaaagagagtaagaagagcatgaggcatgg

SEQ ID NO: 10104 - DNA, 368 bp, Homo sapiens
ccgggcaggtccgggcaggtacgatcttggctcactgcaacctctccctcccgggttcaagtgattctcgtgcctcagcctcttgagtagctgggattacaggcgcgtgccactgcgtccggctaatttttgtatttttagtagagatggggtttcaccatgttggccaggctgatctcaaactcctgacctcatgtggtccacccaccttggcctcccaaagtgctgggattacaggcgtgagccaccgcgctcagcctacaagcaattttttaaaaactgacacctattactgataaaattctctgtttaaaatcctatttactattttaaagataagtattagtttttttttaaatacaataatt

SEQ ID NO: 10105 - DNA, 374 bp, Homo sapiens
gccgaggtccctgaacaaatcccatcaaggacagattctcagtcttgaagaggcagcacagtaaaggggaaagatcatgagttttggggccaggttcccttggatattgtggggtccccacacttctggatgatgttggataactctttgagacttaggcttcacatctgtaaaatggaaatacttatttttcagagttgtcataaacactaaatgatttgacttatatcaacctaattcctactggctcattgaactcagctcagctgtcccctctgttcggatgccttccccagtggggccttattaggtatccctgctggataccctgccaagctcttacacattccctctgccataacacccattctttg

SEQ ID NO: 10106 - DNA, 859 bp, Homo sapiens
  misc_feature 333: n = A,T,C or G
aggtacatctgaactttagaaatttacatttgagtaaacctcaaactccaaaatgtatccctcctccccaaaaagggacattttactgaaataaaatctgttgctggttgcttctggtatgttatgtcaaagttgttaaccggatacagcaaaggcagctgcattgtatttcagaattagtttgaggtagattttattgttataaagcaagacgcaattgaagccacactctgggaaaatagcagtaacacaaaacatagtaatttaggcagaattacttagccacagatgtccagagaggtataggaaaaggtccatatgcactttttgtangcaaacaagtcaaggttaaataaaagccctattttgagtcttaagctggatgtcaagaaattgcctcacaggtgaaacaggtccaaccacagaagaggctctgttgttacttgagtcactaaaccatttggatggaagccagtgcagccttctcctctttatgtcaagtttccatctgtgagaaatatggcctattatgcctggtgacataacaggatcactgttgagtcaggtgtgagtttaggcttatgcacaaaatattgggaaacactcttcacctgaccgaatttcgaataccaatggaaaatgctgccctggctgccggatattctaagccaacctgtcctgtcaatctgacgtcataaccgactaacatccccggttatgttcaacttagtagaataagagttgcgactgacagacatctatggagtactgcggttgatagaaaatcttgaaatgagtaaatactacattgacatgtcctatcttctatgtcaaaggggttaaacataagaatgtatgt

SEQ ID NO: 10107 - DNA, 404 bp, Homo sapiens
aggtacagtggcgccatcttggctcactgcaacctccgcctcccaggttcaagcgattctcgtgccttagcctctcaagtagctgggattacaggcgcctgccaccacgcccagctaatttttgtattttagtagagacggggtttcaccatgttggccaggctgatcttgaactcctgacctcaagtgatccacccgcctcagcctcccaaagtgctgggattacaggcgtgagccactgcacccggccttcagtgaaaatcttttacatgtccaataatgtgttaaatgtgggatacaattgtgagcaaaatggatggttcctgccctcttaatactcattctgatggacatttatcacaagatagggaattataaatcgcaatcatggcttaaatgaaaag

SEQ ID NO: 10108 - DNA, 368 bp, Homo sapiens
aggtaccatactcttttggttgctataattctgtggtataatatgaagtcagaaaatataattcctgcagttttatttatttatttatttttgcttaggatagtattatttcttatagtgaaagcattctatgttatttattattagtctaattttgtagttttacaatgctatcctcttttacaaagctatgatcaactcagtgtgtccagatcaggatcatttgtagctatttgcaaaagtagcaatattctggctgggcatggtggctcatgcttatattcccagcactttgggaggccaagacaggcagatcacctgaggtgatctggtcaacatggtgaaaccctgtctccaataaaaataca

SEQ ID NO: 10109 - DNA, 360 bp, Homo sapiens
aggtactttggcttttgtttctagaacaccaatgagtatatgctcattaagatagtttgatgcaataaatccttattttacttgcctctattactgcattgcaaactgttgtctactttgtcttcttgaaattcctacaccttccccagcccccacatttggcctatggaacattactttatcctgattttccccctaaccttctggcaatgcctctcagactccttccagaactacctttctctgttttccttttaatgatgacagtttatgcaattgtgtcttcaaacttataacgacccagacaatagtaataacagtcaacatttactgaattcttacttgtgttaagtgctgtta

SEQ ID NO: 10110 - DNA, 406 bp, Homo sapiens
ccgggcaggtacctttgagaccagatgctgcttatccaacagcccttatctcctttcttgctagtagacatgactgaactttctagtctacacgactcaaaggataattcattaatctaagccactcctgatggatgatcttacttgctttgccaatgacaggagtgagatgacccatttctagcaaagccatgaggccgtatctgctggagcttccaggggaagacttccttgctttagaaggacacagaaaaatctgtctctcttttgccagacacggttctgtcagcatttccttcccagaattacagtagccatattgggaccatgaggcgaactggcgtgaggataaacatggaggatggcagagcaaaaaaatttcaagaaactgagtctttggtgttat

SEQ ID NO: 10111 - DNA, 543 bp, Homo sapiens
ccgggcaggtacttccccaccgcatctggagtctgtaattacatgtatatttggctgcttgaagtagtcatacaactcactgatgcactgttatgttttttagtcatttgattctctttgttttgggtagtttctactgatcttcatttcactagttctttattctttcccatgttaaaatctgttactccttatccagaaattattaccttttttatcccttaaaaaattacagtttatttttctctttatttggagaacgggagttctcaattcctgttcaccccagtgcttggaagttggcagatgtgcaatggatactttaggcattcggcttgcaaacacttccggttttctcccatggttccaaggccgatttattccttgctcttcaagcctctttcacaagataagtctggtggaattaaccagggccatggcattcaaccaatggtcctgggctaaggtattttagtaatttttttaggttagaagaaccaagaagctttcaacccattgtttttggcccagggcttgggatcg

SEQ ID NO: 10112 - DNA, 383 bp, Homo sapiens
ccgggcaggtactttttttttgtttttttatttttcctttagtgtgagtgtatatttcatgctacctaagttattaatttttttgtaatattagttatttttcaaatacctaagaattgcaaaacatttcccaggcacaaaagaaacatacaaacaaaactcagcagccttttcaactatgaacaagaaagaaagaaagaaagaaagaaagaaagaaaggggacatgcattctttcctatttacccagctcagatttcaaattcagcatgggtatttagcatctgtagaggatatgtataatcaggagtaaaatggttcatctctcaggctttgctgatcatttttccagggaaagggggataactgcgaaattcaaatgttg

SEQ ID NO: 10113 - DNA, 396 bp, Homo sapiens
ccgggcaggtacaaagcgcaaataggcaatttggttcaatatctcccaacttaaacccactgctttttcaacagaaatgttttttacatcaagtgttgcctctgttctcactctccctccttcttgatcttttaatctaaccctgtcttcttgacttctttctagcccctgccccattgccattggtttataggtcaaattgcttgagttaaatgcatagaagatgcaactatttcagacctcactttaaacaatgtggtaagtgttaagacagaataaaagataaaccaaaatattgtagaagatgattctaatggcatatccaggagctaacctgctctgcattgatgagtttagctatcataattccaaaggaacactatgattgagaacaac

SEQ ID NO: 10114 - DNA, 429 bp, Homo sapiens
ccgggtaggtactttggcttttgtttctagaacatcaatgagtatatgctcattaagatagattgatgcaataaatccttattgtacttgcctctattactgcattgtaaactgttgtctactttgtcttcttgaaatcctacacctgccccagcccccacatttggcctatggaacattactttatcctgattttccccctaaccttctggcaatgcctctcagacttccttccagaactacttttctctgtttttccttgtaatgatgacaagttaatgcaagtgtgtctttcaaacttataaccacccaaaacaatagctaataccagtcaaaaatttactggaattctttacttgtgttaaagagcttgttattttttgatatttttaatctttggtaaaaaactttttaaggtaaggttgcttc

SEQ ID NO: 10115 - DNA, 419 bp, Homo sapiens
tttcgttcactacttagcaatgagctccccgcggtggcggccgcccttcgggtcccatagcctaatctgtgcctggcatcgcctgtagcaggcattaacaggacttgcatacaccgttaaagatgacctgaaacagaacgaagtgcatactatataacgcaatacccctaaaacgttatctcaaggaagcatgcccatcgcaagggacacacactaaatggctcgctatttgacatacctacactagacaaattgacatactcacaaagcataagcctccccacctgggctgaagaaacgcggggctgagggtcaggattctggccctgctgcctaaactgtgcgttcataaccaaatcattttcatatttctaacccttcaaaacaaagctgttggaatattctgatctcttacggtt

SEQ ID NO: 10116 - DNA, 392 bp, Homo sapiens
ccgggcaggtacctgaacaaatcccatcaaggacagattctcagtcttgaagaggcagcacggtaaaggggaaagatcatgagttttggggccaggttcccttggatattgtggggtccccacacttctggatgatgttggataactctttgagacttaggcttcacatctgtaaaatggaaatacttatttttcagagttgtcataaacactaaatgatttgacttatatcaacctaattcctactggctcattgaactcagctcagctgtcccctctgttcggatgccttccccagtggggcttagttaggtatccctgctggataccctgccaagctcttacacattccctctgccataacactcattctttgttactgaattataatt

SEQ ID NO: 10117 - DNA, 418 bp, Homo sapiens
aggtaccaatttaacatttaatcatcaaggagaactggatgacaaaggcaatgccaggcatgagtcgagtgtgtcccttaactttccaaatggtatttacttagagaaaaggaatttgtttactttcaacagatactacatctcaattgtcttgaccttcctcaacacattaattgtaaagtgattaatgaagtttgaatggaggctctgcttacaccaaaagacaactatacacctctgcaatgttttaattaacagctaacacttcaaattagtttgttgttgccacagtaattacctgattcaatgactgcatggaggaagcatttttatgagatatttttagtgcttggtccttgagtgttccattttgtttgtgaccagcacaggccttctgggaacagtctcagcccttaaa

SEQ ID NO: 10118 - DNA, 381 bp, Homo sapiens
ccgggcaggactgaggtgggtctagaggattagtctgtgaattgcagcctggattctgcagttgtggggtctgcctggtgctgagttttactgtggtggactcagtgttgggatccagcggaaaatcctgtgcttactttcctctcttcctgccaagtggagagtatgtcttttcatgctctgctgcctggaattggaaaagaggtgatttggataatgtaaaactgtccttcctatcctcttcaacgtatcttttattattattgtgctacaaccagacactgtgatctttcatctggttttcttagatgttgtaaagatattgtgtgcatggaccaggtatggtggctcatgcctgtaatcccatttttgggaggccac

SEQ ID NO: 10119 - DNA, 382 bp, Homo sapiens
ccgggcaggtactttaggctgagaaataaatagaaggtgagaaaaaagaacagtctttatagtcagtaagagtgaaaagagaaagatggtagttggggaaagacagatggggagaaaggttggctggttgctaataaaacagtagaggatgagcatgtattataaatgctggtgggaagaaaccttgtggcaaggagggtggtagtgttggagaagaaagagaggatatagtagaaagttaaagaggaactggaagcaggtgggatccaggacataggaaggggaagagccttgggcagaggtgagacatctgcaggagggaaaggaaactgagagaagggaaaggtgtgcaaaattgttggcaggagggagttttgagtta

SEQ ID NO: 10120 - DNA, 527 bp, Homo sapiens
aggtacagtttggggttactgccttgatttctgctaaggcaccagccatttggcccacgtgcattgaaaatggcaaataatatattattatgaaaataagtctgaaattgcagaccacctgaaatggtctcagggactcctaaggggcccagggaccacacttttgagaatgactaccccttaaagaattatggtgctttcccaattattttcacccaggttattctcacctctatcaaggttagtttcaaggggtgcaggaataaatttaattcttttaaaaggtttcttgtttaattacaatcttaagagttgaacttgtgaaggaaaatttaagaatttttcttcacctttcattaaggttataatttagcaatttttatcaacttcatttaggaaatttttagaaaaattaagaaattttcttcacctcaattaaggttattatttaattaggctaacttataccttattattatttttccccttttttttgtcattccaaaggtaagggttgcctttttttt

SEQ ID NO: 10121 - DNA, 356 bp, Homo sapiens
ccgggcaggtacaaatctaaaacacaaacatcacctttacaaaacaaaattgttgattaataattatctttttcataactatctcataactttatgactacaggcccaccatttaacaactacaaccttcacataaactaacatgtgcttttaatgctgaccttagtttaaaaagcctgccagtatggaatgacattcaaataaaataaaaccaaatttaaaaagaacagaaatgcaaactcaacaatattcccatcttttgaatcctgacaatgtagaagtcaaattcataatcatcctaaaaaccaagggagtcatacgaccactgtatgtctcttcagtctaggaataatgca

SEQ ID NO: 10122 - DNA, 478 bp, Homo sapiens
ccgggcaggtactttaaaagttataatgctgatgaacaaaaaggtatgtaaaaactcaggatttaattaattagatatattttccaccattagaacatttctgctcagaggtcttattacaaagctacatttctgatagtctactacggtgcagcttctgccaaagccactcaatactaacctcttacatagcaactctactaacatgacctaaagggtttttcatcctttccatagcccaaaaaagaaaaagaacccccccgggtttttttttttcaagggttcttaaccccccttaaaaaaggggccctttttttttttccccctcccccgggcccccttgtggtaaaaaaaattggggggggaaaaaaaaaaaaaattttctttccccccttttttttccccccccccctattggggggatttcccccccccccatgggggggtttttttttttaggggggggcgggcgggaaag

SEQ ID NO: 10123 - DNA, 400 bp, Homo sapiens
ccgggcaggtgcacgccaccaggcctggctaatttttttttttttttttttatttttactagagacagggtttcaccatgtcagccaggctggtctcgaactcctgacctcaggtgatccacccaccttggccttccacagtgcagggattataggcatgagccaccacacccggactttaattttaattcaatccattttcctactgtcaggacctttactccttttatatacctaccctccaggcttggcctaaggttggctattcacacgtgttataaagttagaaagcacatttgatgatagaagtagccctgtctgcaagtttttatcgtatatgagattttgtgtctgcgggctccccatcaattctgttggacattcttccaatagattcctt

SEQ ID NO: 10124 - DNA, 395 bp, Homo sapiens
ccgggcaggtaccccaggcctctgtccagaatggagcttgacatctatgctaaaacctttcttaaggctccaattaactgcctaagagcactagcaaatctttgcagcagttcaacatctatttagaaatgccctttggtctccctgtttcagatacacatcatagcaggtgactttcactttcccaggactcaaaatggagactggggaatccttgtcagaataaacattaatggagggccgggtgcggtggctcacgcctgtaatcccagcactttgggaggctgaggtgggtggatcatgaggtcaggagatcgagaccatcctggctaacatggtgaaaccccatctctactaataatacctaaaaaaaaacaagctattttcgtaccttg

SEQ ID NO: 10125 - DNA, 416 bp, Homo sapiens
ccgggcaggtacagttaaatagtgcatcttaaatagtggggtgatattaaatggttatattctggaggctcatgcccacactgcctttgaagttcaggctgcccagccacattcaggcattgattcaggaaactcccttggcctttcagtaagagagagctcccttatgccagaactgctttgaaatagaatgtggcagagctgtaaagtgggtccaattctacaagtcagcacactctgtggattttccattgtgaatagttctcagatctatatcttcagaccctccaccaatagtatatttcagcccttaggtatctctcatctatagcattggaaaaaagcctcctaacaggcctccccaattccatacttgcctacgtaaaatatttcttacttgcacagtcagaatattt

SEQ ID NO: 10126 - DNA, 380 bp, Homo sapiens
aggtacttttttttttttttttttttgctgaattgtttctgactaccattatgcaagtaggtgaggagatacatatacaggagtttctgagtgttctttcctaaaacttgtgcacattatgtttgtatttgaaatagaggcagtgtttaaaatgaacgtggctgtgctatacttcttgatttaagtgttacaacaaagattagattaaaggaacaacaaacagcatgttacaagaagcattccaattttccagtaagaactgagtcatgcaagatgagaccatacaggtttccacaattaattctaatgccaaacttttaaaaggaatatagggacttcccagacctttgaagaaaacattgaagccacaatattttgta

SEQ ID NO: 10127 - DNA, 375 bp, Homo sapiens
aggtacgttcatgtgataaactataagattgtataatgtcgtctttcttgtgggtaactttaataagctttttatgatatgtggattgttctcaattggcttattacagcctgcagccatggaatgttcctgatgctgacatcacagtgacaggcacacttgtagttgaggtgtttgttgggatatggatttttttttttttaagtaacaaaggtgcaccagcattcagctgtctgacagaacgatgtcttcattacaagcaaccatcactaaatcaactttaaaattatttgacaaaacaaaactaaaatggcttatttcaaactttctctcttatcaaagtccaaaacaaagtagtaacttaggaatttaacg

SEQ ID NO: 10128 - DNA, 387 bp, Homo sapiens
ccgggcaggtacttttatctgacagaggcttcatttttctcaaatattcctttgaatcaaagacatccatcatattaaaaagagtaaaatcatttcagggaggattgctagaggatacagagggcagggatttagccttccaggtgacctctgctggggtcccaaggggtgggacagggtttttagtcactaatttaaaagtataaaaaggtttccaatgctttataagttaacaaacccatatcctgagaattcaaagaatactgaatggcaacattataaatagtaacatttgctattaaaaaaggcagtaagactctagctacctgaaaccaaaataagcagttaaggccgggcaccgtggctcactcctgtaatcccagcact

SEQ ID NO: 10129 - DNA, 417 bp, Homo sapiens
aggtaccttctgctgttccctgggtcttcaatgactcaatttcccaccagcagtatcctttaaagccatcctgcatcctgagacaagagattgacaattcattgataagtagtcttaattgtcactattacagggctgtaggtcctttggccagccatgcctttcagtcctaaatggtcttcaaggttgggctgtgttgtccatgagcagatgaccttacatattattgagtccacatttttaacggtcttatactgattatttgtgagctctactccattcttgttctcattagattttaccttccttttctagtcttcccttcttttgttttcactacattatcctctcatcacttgtcatatcatctctttttatttttctatattttacatacctatctactctatttttttc

SEQ ID NO: 10130 - DNA, 376 bp, Homo sapiens
aggtacgtttgacggtgtctacaaggcaccaccttatacctttctgaattcttaaaaggttgtgcagtttcaccctgggtttgatttttgctctgaaaccatttcttggctcaagaattgtttgatgtgtggagagattgggaatgagaaacaggtttatatttaacagtttattctttagctcatctctctctgctcacattttataggcagtgagcagaacccatgtgtcactttaagtggctgcctggaaatctctttagatagatcattgacttcattaggtgcatttccgcttcccactttactgcatatgttagtgttgctaaactctctgtcactgcccaacagggtccgccttgcctctatctcccac

SEQ ID NO: 10131 - DNA, 387 bp, Homo sapiens
aggtaccaggagggtattgatgtttgaggtccaaactgaaaacccatcacctccttcccactgctatagcagtgttagccctggggttcattatctagccagttcacaccttctaaagtggggctctgaaaatgtcttacttccctcacagacaaagcaattctcaagcctcctgagatcacccaccaaccagagcaactgctgtcacttggaggtgcagctgaattcttctaattgtgacacaaactcttgaaactgtaaatgctgaaagattaaatgaggttataacactcaggaggttttacaagtaaaagtaagtcaaatcaataggtctttatttcatatctgtaatggtttagctctgcgggaagtgttagcagctatatg

SEQ ID NO: 10132 - DNA, 509 bp, Homo sapiens
ccgggcaggtaccaagtattttatctcagtagaaagtcttgactgggtataattattaacttgaaaatgaccttttctctggctcgggtctcaaggtagacttagtcttcattctgggagggccttgtgctggtcttccttggccttgaaattgggttgtgcttcttcctagtggggcctggtaagcactccaagttgtcttgttcccctgttcaacaataaaacaagttttggtcattttggaatttttcctatttaggggtggctttattataccctgtatgaaacactttatcctattatgaaattattggttctttttacactatctcattacgaaaatgatcccaacttcttttcgtatcagctattacaaactgggactttgtattacaaattttatgtcctttataagaggttttaatctggattattctttaatgtagtagtagcgaccatatattgtttataaatatcactttgtgcttttgtggtatttataatatttt

SEQ ID NO: 10133 - DNA, 408 bp, Homo sapiens
tgaggtaccacaatgtctctggctaatttttttttcttttttttttttggtagagacacggtcttgctatgtcacccagactggtctcaaacttctggcctcaagcaatcctcccacgttggcctcccaaagtgctgaaatttcaagcctggacccactatgcctggccaaaagcttgtttttaatacagctccatttttaagtggaaatgattatttgtcctataaaagggagataatcctgttttatctgatgaaaatgcagagaatctaaaataatatttggaaatacgttgtataatcaagataagatggtagaaaggatgcttactttgaaagcatggaaagagagtgtctaagaacatggcaacatcttccactcaagtcacatggtaagaaggaacctttg

SEQ ID NO: 10134 - DNA, 413 bp, Homo sapiens
  misc_feature 265: n = A,T,C or G
aggtacacacatgagaactgaaatggcccaaacccagaaagaaagcccaactagatcctcagaagacgcttctagggacaataaccgatgaggaaaagatggcctccttgtgccaccgtctgttatgatttctctccattgggaccaaaaggccgttctttctaagcagacagcaaggtgaatgatgggccaaaatgagaccacaccttcatttggcattcttttgaacaattgtctttggggatccattgtgatgacatctggnctttattggaggaaagaaaatttctttgatcaactccggtttttatttattctccatgttctggacgaatacatcctgtggttctttgacccagtggaaccttttctggccaccccgttaaaccagcttaaattttcatggtatgtgg

SEQ ID NO: 10135 - DNA, 409 bp, Homo sapiens
ccgggcaggtacatctgtaaagatcaggcctcaggccaaccaatgaattactctagagaaatgtagctgaagaaagcactgtagatctgccgggatagcctgctttgtggggaatgaatgacttttggacagatcgtgtaataataatgtaaatagtatgtttgaacgggcagaattcatgggatagtgtccaatcatgactttgtttttgcttttcattgttcccgtgaaatttattctctaggaacctttaaatctgactccagcacggtttgtgactcttcttaggagaatagaaaatcttaacaattgtcatatttgagaaaacatcatctcagtttagaaataggaatgtgtggccaggcgtggtggctcacgcctgtaatcccaacactttgggaggcctagg

SEQ ID NO: 10136 - DNA, 804 bp, Homo sapiens
  misc_feature 21, 22: n = A,T,C or G
gttttgagcgtatacactcannctataggggccggaaattgggaagccttccacacgcgccgggttgtgcgcggtctcggtccccgtgcgcagggttcacccctattcaccgttgccccagaaacaacgttatattcttgagaagaatgaggaggaggtaaaacaaggaaccagaggtttccctggctctcaaaggcaaaccccacccaattcccaagttaagggccggagaaagaaccaaggaaccttaattaaaaattcaccatttaatattggcaaaagaataaatttttcctggaatggggtgggccaaaaggtcgcctccccaaaagaaccaatttttggaccaggtttaaaatattaaaaaggccaaacccttgaagtttaagaaagggggtagaagggggaaaaaaaaggccaaacttggggggaatagggtaaacattttttaatgggcctgaagaaggattccagggaatagggcctttcttttgggcccggaaaaaaagcaaccaaccttgggaaagcccttggaaagcccccttgtaaagcggaaaagcaaaaggggccttggaaagtttggggttggcccggggccataggggggccctgggggggtgaagcttttgggccaatggggaaaagggaagagcctttgtaatcccagggtccaataaggcccccccccgcgcttttttgtgaaattgggggtggggggggaaaaaggacccttggggattcggtataaagggggaattagtggggcacaacgtaagttttatccctaacgctggccaatggggg

SEQ ID NO: 10137 - DNA, 382 bp, Homo sapiens
ccgggcaggtacgatcttggctcgctgcaacctctccctcccgggttcaagtgattctcgtgcctcagcctcttgagtagctgggattacaggcgcgtgccactgcgtccggctaatttttgtatttttagtaaagatggggttttaccatgttggccaggctgatctcaaactcctgacctcatgtggtccacccaccttggcctcccaaagtgctgggattacaggcgtgagccaccgcgctcagcctacaagcaattttttaaaaactgacacctattactgataaaattctctgtttaaaatcctatttactattttaaagataagtattagttttttttaaatacaataattctgttattgataaaatttaaggcat

SEQ ID NO: 10138 - DNA, 414 bp, Homo sapiens
ccgggcaggacgcgggggagttacccagaactagcaacagtagtaagcctcattactcagttgtgagggggaaggtagactctttccagacctttgataaaggggctgctcaaaaaagccacgaccttgggcctctgctaaaaccatggctttaaagtaaggagggagcagatatataaaaaaccttatccctctttctaatctcttatgtcctgtgagtgtcacccattgagtaaacccaagtggaagtcagcaggaaagtagctgggatgatgcagtctttacagggtctctctgtcacccaggctgaagtgaaatggtgtgatctcggctcactgcaacctctgcctcctgggttcaagtgattctccagcctcagcctcccagatagataccagtaaagatgtcatctgg

SEQ ID NO: 10139 - DNA, 378 bp, Homo sapiens
ccgggcaggtacaccccaccccatgtcattttaaagggcaatgtgacttgcaccaggaagcaaaagactgggagcactgctttccatcgctctgtggcatgatttctagtggtgcccttctcacccccagacacccccatgatgcaggaggtcccttcccctggctgctcctggaccaggccacagctcaggctgaaaccaggctgtctctgaaaatagaggacgtaggcagagaggtggctggattccttccgcgccaagcaggcacagtgccgccccctccttgaagaactctgcctattttccttttctcctcgacccagtgggcgaaagaagttgaggtcttcaggcaaattcttcattgcttgttgaagaccg

SEQ ID NO: 10140 - DNA, 493 bp, Homo sapiens
aggtacggagtctcactctgtcgcccaggctggagtgcagtggcgccatcttggctcgcagcaacctctgcctccctggtttaggcaattctcctgcctcagcctcaagtagctgggattacaggtgtgtgccaccatgcccggctaattttttttagggaatttttttgagtaaaagacgggggtttcaccaatgttggtcaaggtcttggtcttgattcttcctgaccctccgtgaatctggccccaccttcaatccttcccaaaagttgcctggtgaatttacatgggcattgagtcacaactcccgtccctgacctcaaagtttacctttttttaattagcttttaaaaaaaaacctgccgttgcccaaataatcagattatccgtggaaattcaattattaaaaatttaccttgaactcacctctgttccaccaaggcaattttttaacaaaaagtaggccttttcatacattttttaggaaaaggat

SEQ ID NO: 10141 - DNA, 449 bp, Homo sapiens
ccgggcaggtaccaaacacaattcctgctctcagggaaacatggataagacttaaacaagtgaaatgttaaatagccctgtgagacaggagggaatgcatatcaagcaagacagtgtggtcattgggttttgagggggaaaatgagggaaaggcctttgtgtgtgaggtagggtaaagtggatgaattagaatcacatattagaaaggtcttttatggtgggagtggttgttctattggtttcaattgtttatattattagaattttttttattttaaaattttttactattatttagctattaagagtgtttacttatttgataccttttttgaatgtttattacatttttaaatagtttgtacatttatataacctttttttggtattttaaacttttttgtaagggtaatagttttttttagatttattattactttttttatatt

SEQ ID NO: 10142 - DNA, 642 bp, Homo sapiens
atataatatgtatacgaaatatttaatattactttattacattaatataatatattatatatatatataataaatttctattacttatataattattaattatattagttatgtattaaaattatgcgaattgagctccaccgtgtggcggtcgatgaacgcgggggaaaattctgataattatactgcccttcccctttataggttttctgtaggagttaaaatacactttttcaattgcttgacataatgctcaacactggtaggggagctaaaaatgtcagctattgtcctatgtgccaaaaaaaaaaaccacacagacagaaacacacaccacacaaagacaccacattggagggaaaaggaagttaaagattagaaaagcagcaacatagtgtattcggtaggcaaatggtgaccacttagtgaattttcataattctttttttaatttacttctttaatactgcttacattttatcagtgtttatataattgagccatgttatttactttctgtaaatcagaaagaagggtggtattaaaacctgacctttaattttaaataaaaacaaatattacttggccaggccacggttgtcttaatggcctgttgatccctgcaactttggaaaggtctgg

SEQ ID NO: 10143 - DNA, 821 bp, Homo sapiens
ccgggccggtacctatagaaatgccttcctcaggaaccccgccattgttaaacaagagtgagcgcctagtgggcagaaatgtagtgattgtggaacaaccttttccaagaaatcaagcctttgtagttaatcaggaatttgacagagaataagcctcacaaatgaagtgaatgtggccccatcagtaataaattatatcttgtatcttacagatattgtatcagaataaatcttctgataccagaaaggtgggaaaatctttagtaggaatcctccagccattatattccagagagctcatttagggctgaaacactgtggaggcagtggttgtggaggacatttctgtgagaagtcaaacctgttaaacaccattgaaatcatgttgggtagaaatgcagctgttatgaggaagtctttacctggagatgatatctcaattggtatcaaaagaattcttacaggaatatttatgaaagattgtgatggtgctattagcgctaaattgtgcctcgtgtgccaaagaaacatagacaactgtagaggcaatggatatggaaaaacattttcgtaaaatatgggaaaatttatggaaaaaagaactcttgaaagtaagaaatgatggcaactcaccaaattaactcatgtatcataactttatggcttgaaagtcttggaaggacgtgtttaatgaaatcttgacccccaagaatagttttttggaatgaaaacctatgaatataccaaatatggagtaaaatggggttagttcttaagaatggtgcaccaaactacacaaatttaagggcttaaaccacact

SEQ ID NO: 10144 - DNA, 399 bp, Homo sapiens
ccgggcaggtactggacttgcctaatttctaggcatggagttggggcttgtaacaatggtgggagatgggcagtgctttgggaatgtagctgaccactgcatgggtgctaactagcccagggatcttaaagaatttgtgtaggccatgaaggatccactccagccactgaatagtcatagaattgaatctaggacatcaccgtatgctactaccatgcagttttatcccttctaagaatccaaatgccctagtttaatttctaaatttttgttttgtttattttcactaaagcaacatgttagtggactgcggagggaagtgaatttcatggctggtcctcattttgatatcttttaataggatcatgaagcagttgtggttggaagaaaacctttgta

SEQ ID NO: 10145 - DNA, 779 bp, Homo sapiens
  misc_feature 754: n = A,T,C or G
ccgggcaggtatcttctatctaaatctcatttttattaatagtttcattttattaaatttcttgactcatgtttcatgcattaactggattcctcctcaaaggacgtgtgcacttgatccacatcatcgtaatgcctgtgccatcttaactacatttttctagcttgaaggtcaggattagggggaggaacaccttccgagttgtattaaccgggttggtgaggtggttcgtcatgatatccatcctgtgtttcaaaatcaagaaaaaatgaaaatctctttccacaagcagtagcagaagatattgtcagggcagggctgtcgcaagagtgtccacctgctgtgagctcatcacagataaccgtcacctctgctccatctccagcctactgttcagtctggagagctgagcaaagttaggagtggatgctggtcactgatgcaagcaaattcttccaaaaagagatttggaaaggcagcaagcagattcttccaaaaagagatttggaaaggcagtaaagaaaagcaaagttggaaggagctctagatattgaatgggctctggctaccaagggctccttgttcatgtctttaggccatcttcctgacattgggaactggctttactgtttttcctattttaatagtgaggacattaaaactcaattaacttcctaagaatattgctaggaattgtatgtgatgggtcacaaatgggaagaaaatgccttttacctgtggggggaggctgganaatgtaatggatttataggccactg

SEQ ID NO: 10146 - DNA, 403 bp, Homo sapiens
ccgggcaggtacccagcacaacctcacacagttatcaacccgggcagttggactctcgaatccatgcttgcgactgtgatgctacactgcccttttacccagcacttaacttcacacacagaggcacctcataaatatgtattaaataaaagattgatcacacattcctttttacaatcctgaaaaagtcatctccgtgtttggatgaggggaaatacaaaatcactcctctgggaatgaggcagcagaatgaaagaggttgttctgaaaaaacagagttttctggaaagaagtgttctttttcagacagcagtgcttgactctgaagaaaaatgccccatacatggttcacacaagtcctaatgtttttaatttttctgaatgcagaaaggcgtatggaatg

SEQ ID NO: 10147 - DNA, 348 bp, Homo sapiens
ccgggcaggtacaggttctttgaatgcagtatttattcacatagttttcattttctgtcctgacaaaaacttggtgatgtttgaatggttacagaacaaataggattgtggtttatgtttcctattatgcatatttggcagttgaattatgacattagattgggacatggtgagagggggcaggatacggggtaggaggaggggagcaagttacaaaaggccccagttccgggaagctgggctgagttgttctgtttaacttcttcttcctttattcctatggttttatgattgcaaattggcagtggcagggcagctctgactatatttgctagaagcagatgtcca

SEQ ID NO: 10148 - DNA, 836 bp, Homo sapiens
  misc_feature 417: n = A,T,C or G
ccggcaggtacaacaccaatgtagcctcaaaaaagaacacagcagagcaccgcaggggatccctttctgaacacagtcttctcccacttccctcagtcaccactcagtgtttatggtaatgacttcctcgattttctttcctgttgatcatttaagacaaaatacgtccctaagcagtatcacttggttttgtctgttttgaattttatttaaatggatcatgcttcctgaatttttttttttgttgttgttgttcgagacagagtcctgctctgtcgcccaggctggagtgcagtggcgtgatttcagctcactgcaacctccgcctcccgggttcaagcacttcttctgcctcagcctccctagtagctgggattacagatgcccaacaccatgcctgactaatttttgtatttntagtagagacaggttttcaccatgttggccaggctggttttgaactcttgacctcaggtgatccacctgcctttggcctcccaaagtgttaggattacaagtgtgagccaccgagcctggccaagatagtttaaaaaaaaaattatatctacattaaagcccacagtcaccctttgctgaagtcagtattagtagttggaagccgtgtgttattcttgaccccatgaagtggcacttataaggtagcttgcttttccaataatatggcctaacttttaaaacctactatgaacaccacaagcataagttttccaaaagtcaagaaggaaaggaaccaatattctgaatacgtagatcttaaccgaaaaaatagatgtttaatagcctttattaactttttccagaacaaaactttgcta

SEQ ID NO: 10149 - DNA, 432 bp, Homo sapiens
ccgggcaggtaccccatatatgctggtggtttctaaacctaaattgttgtcccagcccattcctacttgcagctcggatgtgccttgctagcctggcttctctacctggcacctcacactcaggatgccaaaaaaagttctgttttctttccccgaaatcctgttctctgctgctgctccactgccacctgttttcttttcttttggttgctggttcccaccagccattcagattccagccggacacacgggattgtcctggactcctctgaattcctcatcctcttcccctggcccacatccagtgggaggacccccgtcctccctcgttcacctcctgatgacataaattcttgaccgtgggctctttgtatctcaccgaaacttctgcgcccgcatattccccaactggtctccttaacttcacttgtg

SEQ ID NO: 10150 - DNA, 399 bp, Homo sapiens
aggtacagactttcattcaacaaatatttatgcatcagctacatgccaggatctgtaatagattctgggtgtgcagtagtgattactgcagaatgcagacatggtccctgcattcttgagagggagacagcaaccaaataaacaattacaaaaaagtatgtaactaattaacaagtgggagaagggagtgggattacacagcataagtggaaggaagggcccacttagagtggtcaaaggcttcttgaaggtaacatgtaagctgagacctgaagaaggatgcaaaagggccagcatgtaaggaacagagaataaacatcccagaaatagaaaataacacacaaaaacctaaagtcattaaagaacatgatcatctttcaagaactaacccttgagatc

SEQ ID NO: 10151 - DNA, 410 bp, Homo sapiens
aggtacacttagattgatttttttctaccagaagaaatttctatgtaaaatgcttaaaaacctgtcatcaatttgatttctgtagcattggatatagagtgtgagcttttaaggtttttaatgtgttgccaaatgttatttcccaaaaggcttcatcggtttcataccctgctggtgagctctgtcctgttttactagctttcagcatgtgtgtgtgtgtgtgtttgagatggggtcttgctctgtcacccaggctggagtgcagtggcgcaatctctgctcaccgcaacctccgcctaccccagttggagcaattgtcctgccttagcctctgagtagctggcattacagctgcctgccaccacacccaactaagttttgaatttttaatggagatggggtttcccggc

SEQ ID NO: 10152 - DNA, 399 bp, Homo sapiens
aggtacttcagggctctggatttcttttctgtaatgctgaagtctcaaagcttcacaggaaaaatttggaaaagtatgacagttctctgtctggcatctgcttcaatgtcatttctactagggatacccctgagcattctaatgcttataaattaccttacaatatagccaacaaagctttagctattgccaaactcatgtctcaatcgcctgaatatgagtctagtagtcacaattacagaagctttctagcaatctgcaagctctggagaaagtaaatttccaacccaaagaaaaaggatgccatcttccagaaaatactgcaaattacactcttattcaatgatcattgttttttttcctctaaaggttaaattgtctttccctaaaacctggatg

SEQ ID NO: 10153 - DNA, 390 bp, Homo sapiens
ccgggcaggtactttaggctgagaaataaatagaaggtgagaaaaaagaacagtctttatagtcagtaacagtgaaaagagaaagatggtagttggggaaagacagatggggagaaaggttggctggttgttaataaaacagtataggatgagcatgtattataaatgctggtgggaagaaaccttgtggcaaggagggtggtagtgttggagaagaaagagaggatatagtagaaagttaaagaggaactggaagcaggtgggatccatgacataggaaggggaaagagctcttgggtcaaaggtgatgacaatctgcagtgagggaagggaactgaatagaagggaaaggtgttgcaaaatgttggcaatgaaggagttttgagttaa

SEQ ID NO: 10154 - DNA, 346 bp, Homo sapiens
ccgggcaggtacagtaaaacctgttgtaatgttggttactgaaaatggtctttagagctagtgttggtttaaatggagttttgtaattatttgagctgcaactagagtgacaattctccatttttagaatctgtgcctcttgtctggcagcacttttagttatttcctttctattgctttttgttccacactcaataagctttggttggtgtgtgctttatcagaccttcatgtttacttgccaaatgaatatggggttttgttactaaagttagtatttttaatctatttattttatttttctttctttagaaaactcagaatggactcgttttctagtcctgaa

SEQ ID NO: 10155 - DNA, 489 bp, Homo sapiens
ccgggcaggtacatgaaaggagattgagggcagggagctcacagaaccaagacagcaggacccaggattcagacctggaaaatttttatttcctggctggtttgtgtgccctcatgcatgttatttacagtgccatgttctttcacatgggaacactgacacaagtggaaatgggaaggttccatagggatgataagtgcaaaaacattaaatgaacaatcctagcagtatgcagttgagttcaaggggaggagtccttgttggagtaaccacgaaagggcctgtgttgtgatgagattgtaatgaagaatctaaaatgccctgcaagaataggttgagcttgtcttgcaaacttaacccacaaaaggcaaaaaatccatggggccgaataaacttccccccaagggttaggggattcttgggcccttgaaggcatttccccaacttggggaagaatggggaagggttgaattggggccttcttgtaat

SEQ ID NO: 10156 - DNA, 866 bp, Homo sapiens
aggtactaacaaatgcagtagccaacaagattaccatgcaatcattaaggagaaccaaagtaagagagccactcaaaccagattttgaacgctactaaaattaaagtagttctttgatgaatatgaatgagtagcggaaaggattctttgtgatagtgatacctctgaggtaagagaagggtggtatgagatttagaattttttcactggttgtgtgtttatttgcgatattgtttaggttttgatttgtatgattaaatagtattctagttgtagaagtagtggataaatcttttataagtttagttgagtaaaatattgtgatagctgtcatcgttaagtgttgttatgggaggttggttgtaattggtaattattttattaagagtgagtggtttggatttttttgtaaagtatatgaatgataggtattgattgtatcagtttttgtaatatatcgatggatatttgtgcaatattctatttagtgatgggaatatttttttcatattcttcttatagagtgttattgtagttgtggtagcttgtgatttaatactatgtaatattatataatcttatttcggtgagtggtatatctatttttattagacgcgttagacagctgattcatgtactaatttgtgtacttacatatcttgttgtctgcgaattattctagtaagtatgtttaattatactattcttagtttttagttagtgattatatttaaatgtggtgtaggactgttataattgtgagattgagctagttgttagtgatatagtcgaacgtatattgtagtatatagatgtttagctgttgttggtgtacttatatattagtctttcgagattttgttcta

SEQ ID NO: 10157 - DNA, 399 bp, Homo sapiens
ccgggcaggtaccctaggtgatgcctgttcttttgaaacagcagagattttattttaaaaatacgtttttgtgtttattacctaaaggagctattctgaaatttttatgtagaaaaatcttcttctgctccatccacagaagattttttatccatagatatttttgccatctcctttctcctctttcctttgttgtagatgatatgaaaagactgcttttttcaaaaattgtgtttttaaattggtgaatgttgccatgcctaaagtgatctctgagatatcctccttttgggtataaacatttctgttaaatgttgtaaagagctttctataatagacacagtagactgtatttaatttttttctcccttcttggtagatctcttttggttaaaagaa

SEQ ID NO: 10158 - DNA, 351 bp, Homo sapiens
  misc_feature 320: n = A,T,C or G
ccgggcaggtacctgaagcttgaattcctgaactttttttttttttttttttgtatttttagtagagacagggtttcaccaaattgaccaggttggtctcgaactcctgacctaaagtgatccgcccaccttggccccgcaaagcgctgagattacagacctgaaccactgtgcctaacctccctgaacttctcaacattctgagttagtcactttccctttggtttaagccagctcgggttacttgcaaccctagttatacagccacttttctacaacacaaacaaaccacctagaataaaattcattttcctcctttnttttttttttttttaatggaaggtggggaat

SEQ ID NO: 10159 - DNA, 432 bp, Homo sapiens
aggtacaccccaccatcttggtatcaggtccacctggatatgccgaatttcatctatctttattcatcttgagcagagcccctactatatgtaagaaatcaaaaatcttagccaggcacagtggctcatactgataatcccagcattttgggaggccgaggcaggcagatcacttgaggccaggagtttgagaccagccttgccaacatgtcgaaaccccatctctactaaaaatacaaaaaattagctggtcatagtggtgcacgcttgtaatcccagcttactcgggtggctgaggcacgagaattgcttgaaactggaaggcagaggttgcagtgggttgagatcatgccactgcacttcaggctgggtgacagaacaaggctctgtcttcataaaaataaacaaacttaaataagtacctgcccgggc

SEQ ID NO: 10160 - DNA, 533 bp, Homo sapiens
  misc_feature 111, 494: n = A,T,C or G
aggtacccctgaacctaaaagttaaatttttaaagtgggtttagtatgacacatacacatacacacatttatggtttcaaattaaatgtttctggtctctacttagtgttncttttcaattttaaagttccccctaaaaactcacaaattttaaaaaaaggccaaaaaagcccaaaaaaaaagaagcaaaggatgttttttttaaaaaattaatatccttcaaaggttattctccaaaaaacaaaatttacccctggctttaaccattttcaaaacaaacttgaataaaaccattaagttttgaaaaaagataattttttcttaattttttaagaccttgggtggcaaattttgggttggagtccttccaactgacaccttgtttaaaattccttccaagaccaaccttttttgggggggggccttgaaagtgcccggggggccaaggtaatccaaactcctggtaagggcttcaagagggaagttttttccgnaagtaacccccaaaacccctttggggccccaaaaacaat

SEQ ID NO: 10161 - DNA, 374 bp, Homo sapiens
  misc_feature 308: n = A,T,C or G
aggtacgcgggctgtttgttcactgtcatccactgagtgcttgcctcatgttctgctgagcacattccctgtgtgatttcttcttattctcaaaactgcatttggaataccttgttgttttaaagaggagggaacggaagcattgccatttgctcaagatctcacggctagtgggtaagagagcccactccagcaccaccactgcgtgtttgcattttcacagacatttggaggtgggatggagaatggatctgaggagacaagactggaggtggaaggaacagcatatttaagttctttttctgtgngaaaactcagaaatttgagtctgtggggaagcacctcgaggacagaacatgttgggatgggtggag

SEQ ID NO: 10162 - DNA, 378 bp, Homo sapiens
ccggtcaggtactttttttttttttttttttttattttttggtagagatggggtttcactatgttggtcaggctcgtcttgaactcctgacctcaggtgatccacccgccttggcctcccaaagtgttggaattacaggcatgagccactgtgcccagcatacagagggttttgagtgcctttcagaaggacaggaaaccctggccacttaggggaaaatgggggagggagaaggctagaggctcaacacatgacatttggttctttcaaatttagggatttttccaaaactttacctccaagaagacagatggcctttctctaacatcgagagggaagacaatacccttcccaggtaattctgcaaaataatttttt

SEQ ID NO: 10163 - DNA, 381 bp, Homo sapiens
aggtacgcggggcagacagattacctcatttcagctcaataaaacatcaccaaattcccttaggcagaaaaagggtggggagtgccctttcttgaaggaatcccttaagtgcacgtctcccgttttcttttcacatcaatgcagagtccctctgtgaatttacaacacccaacacccatgagttcagtccttaagaaggaaaattgagcaagtatttaattggttggacattgcataaaagaggtccatatccaggctaactctagaaattttattctcaaacttagttggcctcttttttttctgtcagaggaccattcttagtggcactggggaaatcttggcacccagaagaattcaactgcgctcactgcaaaaata

SEQ ID NO: 10164 - DNA, 398 bp, Homo sapiens
  misc_feature 326, 337, 343, 344: n = A,T,C or G
ccgggcaggtactgggattataggcgtgagccaccgcgtctggcctctaacgagatatttctaaaggttaggccttcagtcaagaattttaaagctggatcttagaggttatctaaactaacctctccatttcatagataaggaaagtgagtcccagaaaagcactggtttggacaagttcagaaagctaaacagtgactgtggatgtatgattctgtctcttaactcctaatccaaatgtcttctcactagataaggctgtgccttctacatttgaaggctcaaaccccatggatggatggagggaaggatgggtggaggggatngggattggatngatggnntggggttgattggttttttttttttcattttgagttatggcaaggaaaagaatg

SEQ ID NO: 10165 - DNA, 428 bp, Homo sapiens
aggtacaaggggactgggaaatgtggggaggcttcccacaggaggtgaagctggagcagaggcctgaagggtgaaaagttggtatttacaggcaggcaaaggcaggcagtggaaaggagagttgatattctaggacaggaattctttcagcctaccttccagaaagattttcataaccacttggctctcactggtcagcatcccttaatcatagctagttacccaaattgtagcacataacttagaagtttgagatctctatcgtgctgtattattcatgcttatttttctaatgtttggctttattctctaagaagatgaagtcagtggtgcaaagtgagagcaattcctacctgtgtaatattgggttaagaagttcacctatttaaggcttaccttttttattgaaaaggattgctgggaaaaat

SEQ ID NO: 10166 - DNA, 377 bp, Homo sapiens
ccgggcaggtacactgacagagatcgaccactaaaatcttctgaggcgcatttatctttctctttgagagagaaaccccattttccttaagaaaaggcaaagctgttccagcacatgttttaaatgattcatattatctgacaatggaaagggtaattctctcccaggatttagggtataattctcagccatctgagaattctgtttatcccaccttgtctccttgctcagagaattacaattagatggaaacatctaatgtcaaggcatctgatagctccagcataggatactgtgactgctccagatagattttctccatgaaaaccaaagttgatggttaattaccatgtccccttctcattatggcactatca

SEQ ID NO: 10167 - DNA, 370 bp, Homo sapiens
ccgggcaggacagcagccggatctcagctcactgcaacctccaccccctgggctcaaccgatcctgccacttcagcctccagaggagctgggaccacagacacgcactaccaagtcaggctaagtttttggttttttttggtagagagggggtttcatcatgttgccaggccggtcttgaactcctgagctcaagcgatcctcaggctcccaacgtgctgggattataggcatgagccactgcacccagccaaattgcttcattttttattactccatacttcctacataagatacttcctacacctggccaaattgcttcattttttaaaaatatattttatttaatgtgagtctcacttctgttgccc

SEQ ID NO: 10168 - DNA, 382 bp, Homo sapiens
aggtaccaggagggtattgatgtttgaggtccaaactgaaaacccatcacctccttcccactgctatagcagcgttagccctggggttcattatctagccagttcacaccttctaaagtggggctctgaaaatgtcttacttccctcacagacaaagcaattctcaagcctcctgagatcacccaccaaccagagcaactgctgtcacttggaggtgcagctgaattcttctaattgtgacacaaactcttgaaactgtaaatgctgaaagattaaatgaggttataacactcagaaggttttaccagtaaaagttagtcaaatcaataggtctttatttcatatctgtaatggtttaactctgcgggaagtgttagccgct

SEQ ID NO: 10169 - DNA, 391 bp, Homo sapiens
aggtacagagactaccattaatattgcagtgtgtgtcttttgtattaagttggtttctgaaaatatctctgacagatgctgctaggccaaagtgcctcccacagctgcagctctagagaaatccgcggtggatgttctcctctaacagttttctggtccctgtgacagtgcccactgcttcactactgctctcaggtggtgtgcttggtggcagtgccgtgggcatgggaggttgcggagggggctgggctatgcaaactgctgagccagaaccatccctgtggttggagcctgggaccccagcaccccagcacaagcatccagcccaggagctggagctgggcaattggagaaaagaaacggctgaaaggggaatggtttgccctggccg

SEQ ID NO: 10170 - DNA, 433 bp, Homo sapiens
aggtaccctggcaaggtttgtcctgtcttggtagcagaaagaacttctcaaagtaagggcttcacactaggggagagttcaatggcccaacccagccatggccaccctgacaccatgccctgatgctagtccctgtggcctggcccacactgaaaatactgtggggacaaccaaaagggatttgcaagttaccactatctctcaccagctgtaagaccctgggcacattgttgatcctaagcctcagtttcctaatctgtaaaagggtgatattaattgttcttgctcacagaactgttatgagaattaacagaaatagcatattcagactatagcagagtgtctggcatgaaacagagactcaataaatacaggaacaatttggttattggaaacagtgaggcttggcatggtggctcacacctgtaatcct

SEQ ID NO: 10171 - DNA, 424 bp, Homo sapiens
aggtactccagcctggatgacaaagtgacaccctgtccggtaaaataaattaccacgggcagataaagtgctcagcgagcccacactaatttgccacagaagggtggaagcaaattcaaggctgaaatctagctcttcatttcctgaaatcattcatgcccactctctcctggcatgaaatgctgataacctggtttcaattttaagcttaaatttacagcaaacagtgcaggtatctcagttcaatgccttggaacctcctctaaagatgattctactaacactcatttcagaagtgagtgcaaaataatttttacataaacaaccaagtaatcccacagcgcctgcatacctattataactcaaaaactaccctgcacacctgaacatgatgtttaaataccaagcccctggtatgtctgga

SEQ ID NO: 10172 - DNA, 494 bp, Homo sapiens
ccgggcaggtacaataattagatcatggtatcaattcaaacaaagaaattgatgtcctgggaactggttatacaaatacattatttcttctctttgaaatgagtagaaggaaagggaactaataataaaatatcacattattgctctacccactaaaggcagccctgaaatttttacaaaaccagtctttcctgggggtcgttctcgatgtgtgagtattataacttgcccttttcataattactagtaagcttcttgagactagaaagaaggagggcctgggtacaccaatcttggaatttgtgctgttatggttaaaatttttgttttgtagcttggggggcatgtcgtttgtggaccttgctttgatcgcaaaaatacaccaaccatttgtgtcttgagttcccgaggttgttctccatttttgattatttgggtgcccctggggaacttggccctttgcctttccctgattttcccttgggtttcatgtg

SEQ ID NO: 10173 - DNA, 396 bp, Homo sapiens
ccgggcaggtacaaaaagcagggaccaagataaagcatcttgactcagtgagcttacaatctttgaaagctagggaggggagaagcacttagatcttatgctgcccccacgcaaccactatagcaggatgtcattcagcagaaagcactttcagattcatcaccacaggtgtgtggcagtggtgcttttttttttttttttctaaatccaatgatcaaggaaacatttacttgtaaatctttccgcctcttttccacatcactaaactgcatgactgcacttttacccaaataaaacctgtcttccctaaaccacaggtttagacctaggatttatgattagggaatctgataacaaaacactgatttttttgaacaattcaccagcctttcaagg

SEQ ID NO: 10174 - DNA, 404 bp, Homo sapiens
aggtacaccagtttgaaccttagtattatcactaatgcaaatatgagcctaggctcaatttttccagttatgaaatggggctggcattattccgtgatgtgcatgttaagagaggggaaagctcacatttttgaggtcctcttgtgggttctattttgggtaggaactcacgctttgtttattcagcaatcattcctccagaaataaccttaatagcaacaagaaaaaagaataggtgttttttgagctctatctgccagtttctctatatatgaacattatatattgcaacataacactcacaatgcctttaaacatcatccccgttatacagattagaaaacagaattttcaagaaggtaggggacttgcccagggatacatatcctagcaagtggcagcgc

SEQ ID NO: 10175 - DNA, 512 bp, Homo sapiens
ccgggcaggtacagaaagctactatttatgtaaaaagctaaaatataaaaaaggtatactcacacacatagagtttggtcacagtggctatccctggagagtgaaaatggtaggagggagacaaacatttcactacattatttgttaaaaccttttataaattgttgtcatatttttgcatattatttattttgtttaaaaatataacattatttacaactttatgactacactactacacttctacaatcatcacaccacttccaacacttcctaaaagatttataccaatttttatgttcttctagggctttgtttcactttttctgaaggtcctttaccaaaagtctttaaatttttttacaaaataattttcccacccccttgttcttatacattggccacttgagttaccttttgtttaaaacacccttctaatagtggatattatcaagaaaccttccaatataattctttaaacacttttaatttttcctactctaataccactt

SEQ ID NO: 10176 - DNA, 461 bp, Homo sapiens
ccgggcaggtactctggctatctgggataaacagaaacaagatgctgggcaccagctgtctccagcaggcaggaaggagggggctgtgcgaggatggggatgtgagaaactaccaccaacaatggggtcaaggctacctgccccaacctccagtctccatcccacatgaaaaatttagggggaggcccctcaatgggatgtgcagaagtaaggcttgacaatgcaagggcagcggccctggggttccatgcagtcctctacatgatggtgccattgaaggcaacactctgatgcatgaactgctcccgtggttgaaagaggaacaggctcagaaaccagtactgcctgggtcccacattctggcaccacaactcactagccctgggcaaagcatcttctttcctgcaccttagtctctcttttataaaccagggaatcacaggagttcctaccctataagg

SEQ ID NO: 10177 - DNA, 391 bp, Homo sapiens
aggtacagttcagtagtgttaagtatattcatattgttgtccaacagatttctataactttttcatcacgcagcactgaatcgctatacccactaaacacaagttctccctcctacctcctctgggcccttgggaaccacctttctactttctatgattttgactactttagacacttcatatgagtggaatcatacagtatttgtccttttgtgacttttattgtatacttttatttcacttagcataatgtccttgaggtgcaaccacgttgtagtatgtgacaagttttccttctttattaaggctgtataatattccattgttaatttcattctttttaacggcaacatatttcattgtatgaaaggcctagtaactttttatttca

SEQ ID NO: 10178 - DNA, 416 bp, Homo sapiens
  misc_feature 402: n = A,T,C or G
aggtacaaattcaatcacatttattgggtaaatattgcactggctccaagagacagcaatgtaataagtcccaagcctactcctcctaacactctaatggaggtgggagacacccccgcaatcatccctaactcatacttaataaagatcagcagtgcacatggtgccagagattggcgccactgctgtaattatctccagggaacttgagtttctttatgaggggagtaatcagaagggttgttgaatgagtctcctgattttgagaagtcacttatttgagctttagtttccacatttgtcaaattaaattgctagagtcagtagatgatccccaagctctcttccagttctgagagtcatagaacatgcacattaacagagatggctgcagacaatgancttgtacctgcccg

SEQ ID NO: 10179 - DNA, 378 bp, Homo sapiens
ccgggcaggtacaataaatgtttgataaatactggttgacttagtgacagaatgaatgaggacagttaggatctaaaataggatagagagcaccatggagaggcaggaagggcctgaaaggaaccactttcagctttatagttttccattagtctttaagttgaaggcaaagtagagggtatacatatatggttttgtcctctgcagttataagctttattaaatagaaatattgcccttgagctctctggcccaggacaaaactactgtatgtaattgaaaaacattttaaaatctaagtgacagaggaattttactctgtgaggatggttaatggagaaatcactacaatctaactaggaattttcccatccttca

SEQ ID NO: 10180 - DNA, 470 bp, Homo sapiens
  misc_feature 134, 292: n = A,T,C or G
aggtacgcgggaaaaaaagggtggggagtgccctttcttgaaggaatcccttaagtgcacgtctcccgttttcttttcacatcaatgcagagtccctctgtgaatttacaacacccaacacccatgagttcagntccttaagaaggaaaatttgagcaagtattttaattggtttggaacatttgcattaaacagaggtgccatatttccaggctaacctctagaaaatttttatgtctccaaactttagtttggccctcttttttcttcctgtcaagagggacccatcttncttagtgggcaacctgggggaaaattctttgtgcaacctcatgaaggaatttcataccttgcgccttcacctggcataaatataccaatggggccttaccatttggcatttttggtaagagggaggaaaagggaagcccctagttatttgctggagactgttgcctgttgcagaaaaa

SEQ ID NO: 10181 - DNA, 400 bp, Homo sapiens
aggtacaatggcttcattattgccaacttggaataagaagtagcagaggctcaaaatagtaatgtgaatgctcaatgttacataataattcaatggcgaggccaagattgggattccaattctcacatttctagccactgctcttcttttacacaataaagatggggaaaaaacatttaagcaagtttgacaggagagtgccctctccaccaacaaaaattattgaggctcaaaagttcagggatttgcagagaccattcaaatgggaaagggcaagtctcttcaacatggtggtggaaaaactggatatccacatgcaaaagaatgaagttggacccttaccttataccatatacaaaaattaattcaaaatagattaaagatctaaacagaagatcta

SEQ ID NO: 10182 - DNA, 405 bp, Homo sapiens
aggtacttgcccccaggcccagataatttatttaaaaactttttttgtagagacagggtctcactatgttgcccaggctggtctcaaactcctggcctcaaacaatcctctacctcaacccccctaagtgctggcattacaggcatcagctgccatgcctggctacaaatcttaatgttttccccatggctactttttctggcgttcttttctcaggtaatggaagtgggcagagaatgatcctttccctaggctccagtgtgttagaattaaagaaagaggaaagaaacacaatggcttgatggtcgaggacaggtttattttaaagaaaacaaaccccacagtggcttctggctgagttagatcagaggcatgctctcttacagactaagagtttttaaggat

SEQ ID NO: 10183 - DNA, 345 bp, Homo sapiens
aggtaccagttaagatctagcttctcggttacatttcctcctccatttacagtgacatttagcatactttgtttgtttgcccagtatgaaagccaccaatcttgaagcacataggcaacctgagctgcagtgtttaggagaataaggaaatggagacatcccgtgagcaccagctctgaagtaattcttataggcctgaaaaccaacttttccttcagaacggttctcctctgatagtgtaactgggacattctctgtatcttggctctccagagcaccatctttcaaggagggtctagaagattgttgagaccaaaccgaagactctgagaaggtacctgcccg

SEQ ID NO: 10184 - DNA, 388 bp, Homo sapiens
ccgggcaggtactgaatccctcaaacgagatgattccttccatgtgtttctttttgcctgctcattcccaaatttagtgacaagaacacccaacttttcaagccaaatagatatggatttgaatcccagattgaccacttatcagctaagtgattctagagttactgaacaaggcttcattttctcatcagaaatacagtaaccactttgaaaggctagtgtgaagattaacaataatatgcacaacgcatgcctgctatcagcattattattcattatgtgcctgacacattcttttttgatgttgctgctgtttgtaatatcactattaaatagcataagaaggatactctgtttctcactggcaaattggaagccggcaacaaac

SEQ ID NO: 10185 - DNA, 395 bp, Homo sapiens
aggtactttgcatacagaaacatttttcatcacttactaagtgagaataggaccctggcctagggggaaaaacaaccacagacaaaccatacttccctgagaagcaggagcatagtgctggctagtgaattgctttcacaaaccgacctcataactctgtgccttagaaaaattagaaatgggaacatttggagatcacttgggaaaacttgaaattatgaatgttaatctgtgattgctaagggaacgtggtatttcctgcctattttggctgtagtttgtctctttctcttctaattcatttttaaaaactctgctagattaaattttgctaaaataaccgttttgcacctcctcatttcctggtttaaaaacatgtaggtgaactcaccatt

SEQ ID NO: 10186 - DNA, 413 bp, Homo sapiens
  misc_feature 38, 39: n = A,T,C or G
ccgggcaggtaccttccatgatgttgaggagagactcnntcctatcctcaccacaccagagagtaggtatgcaggttgccaccagtgttctcctccctacccactccctcacttttcttttcattggttcagtagaaggaggggctgtgcagtaagtctgccgcttgagcacagggacagccgtcactgcagtgctggtctcctgttcttggaggcacctcagtctccttgacctcttagacaccctcctacccccaaggtggggaaggagcaagcagaggcaaaatcccagccctccttgttaagactacagtgactttcctcctctcccttctccgtgtccgtaatgcatagctggaaggaagtgtctgggtgggtgatgccagtagctgggctggtgccatgcccggtgc

SEQ ID NO: 10187 - DNA, 415 bp, Homo sapiens
ccgggcaggtactaaaaatacaaaaaattggccaggcatggtggcacatgcctgtaatctcagctactcaggaggctgaggcaggagaatcgcttgaacccaggaagcggaggtggcagtgagccgagatcgcgccattgcactccagactgggccaccaggagtgaaactccatgaaaaaaaaaccaaaaaacaaaaaaaaatgtgtatcttattacagttgagtccttttgtgagacgaacattcagtgtttgctagattattctaattagctacctttgtatggttaggttagcatggagctgaagataaatgtcccgtttgaaaaaatgacagcccttcagaaaactctggcagtttacagaagaaatacaaatggccaataggtatataaaagttcctaacaagtgaata

SEQ ID NO: 10188 - DNA, 409 bp, Homo sapiens
ccgggcaggtaccctgagaacagcaataatgcacaaacattactattccaacagctgcattgaaacacccttggtaggattgggaaaaagatggattattgccatttggacactccaggactgtccattaatactcctgactaatggaagatgataaagattgggcaagaaaaatgactgcagcaaacgccttggcatcttcaacttgtcacctttagcaagaggcctcttcaacagttcttggactgtgtttggcagccaggcactctcagaacggcaaggagacacagctaacatgatctttgcaatgcaacaaaacaagcgatcttgaggcgacagagtccaaaagatgacagaaaattcatccaactcctgaagcatgtgatgccaccagaaagccttggcaaca

SEQ ID NO: 10189 - DNA, 412 bp, Homo sapiens
  misc_feature 252: n = A,T,C or G
ccgggcaggtacagtagtgcactcttggctcactgtagcctcgacctccggggctcaagtgatcctcctgccttagccccacaagtagtgggactataggcacacagcaccatgcccatctaagtttttgtattttatgtagagacaaggtttcaccatgttgcccaggcttgatcttgagctcctgagctcaagtgatctgcccaccttggactcccaaaatgctgggattataggcgtaaaccaccatgncctggcccttaaatccaactttagaagtcaacaatctctttattcacttggaagctttctggaagaaaacttccattcaacggtggtggctctctttttcctggatggtgttttgtgccccaaaaatgggctttgtttcgtccatcaagatggacctttt

SEQ ID NO: 10190 - DNA, 384 bp, Homo sapiens
aggtacgatactacatcatgtgtggcttgagtaacagctggcatagttggacttttccttctttgtgccaccaactccatctttggataatattctttaatcttattgttctttatttacctttttttgtttgttttttgttttttttcttgaagagtgcaggcttctgaatctctgtcctcaaaccacctgaaattttctaaactttttctaattagagcattttagaattcttttttttttaagtaaagatgttgctgggtgtggtggctcaacctgtaatctcagcactttgggagtctgaggcaaacagatcaccaggtcaagagatccagaccatcctggccaacatggtgaaacttcctctttactaaaaataccaaa

SEQ ID NO: 10191 - DNA, 423 bp, Homo sapiens
aggtacttttttttttttttttttttttttttaaatagagatggggtctcactttgttgcccaggctggtcttgaactactgggatcaagcaatcttgctacctcggcctcccaaaatgctaggattacaggggatgaactactgtgcctggctaatcaactattttttgtcaatcaactctttgagttattgaagataacctgatatgaagattatccaaaaccatctacatgttctgatgcctgctccaagcatccagtgcaatcccctcccttctggagactgaattccctttttaaacagaagcaaagcatgcacagccatccccctgtttctaaccccccacagagcttattcctccaggtgaaagatgggaagctggatctcaatgtgaaaaactttgaaccattctgagaatttaa

SEQ ID NO: 10192 - DNA, 471 bp, Homo sapiens
gcacgtgattcgaaccgttcgaaaacggcaatgttgctgcaacacgctggcggccgcccgggcaggttcaagtcagtgcttttttggtttccctatgtcagaggctgcctccagatgtcccatatctctgcaaggacaaccaaccttgggcgacagagtgctcagaagcccagccaagtgagggaggagctcatccttcatctcactcaagccactgctggtgtttacatggcacatctgctgacacccgtgggaagaacacagaatggagttcctggggagggttaaaggggcctggccatccacagcagcagttctggctgtggctctactacaggtggctggagctaaattggcccttctgagcttcagtctcactgttgggaaaatggggagactgtgctgaatcacctcgtcactctttttccccacaaactttttgcacaaaaaagtgaggctggtttaactagc

SEQ ID NO: 10193 - DNA, 389 bp, Homo sapiens
aggtactgtgttgtaagagatgcaggttagcagaaaccctccacatgagatctgctttaagactgacccaagcctgaaacgctctctccctaagtgatccatgtccctgcggtaataccataaccactaagctaacacactcactgtaaaagtgttgcttctccatgaagcaccaagacttgatgaccatttgcagttctcattaactccactaagaccctaaaggctaaatgacaaccaagcctctgtcactctgcctgagtggatttaccacaaatatcaaatctgttcaatctattataagagctaaaaaggagaagcacatgaaatcacatttcattcttagctcttttattttcccatttttcatttagacattgaataccatt

SEQ ID NO: 10194 - DNA, 447 bp, Homo sapiens
  misc_feature 13, 16: n = A,T,C or G
gccccagtcttcnccncttctacgcaatttctgaatatcgggcgaattgtagctccaccgcgccggcggccgcccgggcaggttcccagaggacacagttgaaatgaggctcttttaggaaaaactaggctgtttaatatccatattgagtagctttgcaagttactttcacaaacttccctacagaattggttctaacagaactgttcaaggccaaggatttgttttttctgggtctgggggagtcatctttataattttaatattccattagaatgccttgacgctagaaggagggtccatctcaatcacatcaataaattgatcccaacctttataaaaataagcttggatagaaaggaaaatccgaagactaaggtagtctggtagaatactagaaggagacatcttttaagaggaggacaagaaaaggcatgaaaacagaga

SEQ ID NO: 10195 - DNA, 407 bp, Homo sapiens
aggtacttcatgtccatcatttctatttcacatttggatcttgctgggttgaaaaggatctgtcaatcttttgaattctttaacagtggtttcgatttcaacttggcctactgaaatcaaagccaagtgtctgcagagacagcgggctctttcatgactgtgaagggatgataaagggaaacctgtcattttacctcttataaatggaaaaaacagatgaatctggccttctcttgtttatccattctttcttttcattcctcacgtccttttgcttcacttcacaacccaggaattcctttccctaaaggggaaagtgtgatcatgggagacagtgtttcttgggggttcaggatgggatctctggagacaaactgtttgggttcaagtccagcacggctatttac

SEQ ID NO: 10196 - DNA, 390 bp, Homo sapiens
ccgggcaggtacaataattagatcatggtatcaattcaaacaaagaaattgatgtcctgggaactggttatacaaatacattatttcttctctttgaaatgagtagaaggaaagggaactaataataaaatatcacattattgcctacccactaaaggcagcctgaaattttacaaaacagtcttcctggggtcgtctcgatggtgagatataactgcctttcataatactagaagtactgagacagaagaagaggctgggacccatctggattggctgtaggtaaatttgtttgtgctgggggctgcgttgggactgcttgacgcaaaaacacaacattggtctgagtccgaggtgtcccatttgatattggggcctgggactggccta

SEQ ID NO: 10197 - DNA, 509 bp, Homo sapiens
aggtaccaagtggagagatgggcagctatagagctattttaagcaaaacaaagtttccctccaaaatgtccgcatcctaatctggaacctgagagcgcgttatgttatagggcatagaggaattgaggttgcagatggaattaaagttgctaattaagctaaccttaagatcagaagaggaacccttggattttctgaggtggagcccaggctaatcacaaggggtctttgtaacaattaatagacaagacgaccagagctgtcatctagagttcaaagaaagggagggtgctgaatgtgcaggaaaaagggagaatttggtacataaaatgggaaaagatgttgcacaaagctttaaatcacttccacctggctgagcaacatgccttgtccacacgaaaaagagaccttttaagaaggcttggcaaaaagggccaagggaaaaaacaaattacctccccccttgggagcccctctaagaaaaggggaaagttaggtctcttgctcga

SEQ ID NO: 10198 - DNA, 853 bp, Homo sapiens
  misc_feature 280, 291: n = A,T,C or G
ccggcaggtacctttctatatttagattctatctttgtcaagcaagatgacttgtttgacagggctctggtttttcatctctgaaaagctactcatccacagagcttgggattgaggggagaggaaagggaggagatctgcttctctccccaactctgaacagatgggatcagaatagggcccttctacatccctagccaagatgcctgggccttggcagttgtcccaggacatagacaatggggtctgatggcagcttctcagacctggctttccctgngcaaggggctnttcctgaggctggcaatgccatttcttcagactcagaaaagggatttagggagagggaaatggtgactgcaatgaggcaactcttgacagcttaccctggaaaactatgacacagcttgtgggagcccagcccagcagctctgccatctgacccttcttctgcctctgccaggactacctgtcctgaagacaggcaaaaaatgccccagggacactgttctcctgggtgctgaaaaagaaagacagggtctggtaaaaggggttaagaatgaagggagaaaggacaggtttctgggatgggccacgtactaatcgggaatttctctttttgggaagccaggctttggggataggccggacccggtacctttttaaccccgccccccttgaaaggattaaccttaggtttgggaagaagttttatgcccatacattttagaacccaccttaaaaagtgaggggtctgacctcaaagggcttttaggtgcgttgcccccacctcggccttgaaaagataatttaaaccccccaggtgggtctgtgacaaaattttcattttttt

SEQ ID NO: 10199 - DNA, 413 bp, Homo sapiens
aggtacatgtcacccagtaattccctgcacagttaagattgcagcagaagaagccagggctgagactgggccctctgagtatctgctgtgggacacaggctagcatgcccatcacaccgacccagacaaatgcatgtatcttttgtgagacatagtgagtttgagggattctgtggcatatccaggtgatgtttacttactaggccactggaaatacaagaataaagcctatagtagatctttgagtgaacgatgtaaattttgaaatcatcaatatatgagagataggtaaaacagtataagcagaggagaccactagggaataaatgatagaatcagaagaatagaaagacattgcttaaggcaaaacaacttttagtggatagagagagaaaaagaaagctcaagaaaga

SEQ ID NO: 10200 - DNA, 414 bp, Homo sapiens
aggtacctctggaagtgtgggtgaagaaggcagctaaaataaggaaagctagttaaacctatttaaaagccagtcagatataatagtaaaattgtataattagtatactcagagataaaagatcacgtatccatgaagcaagaacagactactttaaaatagaaattcagggtgggcgcagtagctcatgcctgtagtcccagcactttgggaggccgaggcaggaggaacaaacacttcagctcagaagttcaagaccagcctggtcaaggtggcaagaccccgtctctacaaaaaaaagaaacaaagaaagaaaaatagtagggcatggtggtgcttacctgtggtcccagctacttaggaggctaaggtgggaggatcacttgaggacaagaagttgaggctgcagtgagc

SEQ ID NO: 10201 - DNA, 411 bp, Homo sapiens
ccgggcaggtactaagattctatggtaactgcttgtatttaagtttttctcccacctgaaagagtataaagaaatgttggctctaggtttatctttttgctgattatatcatacactcattcatttaaaacatttttaacagtatacattggagcaccttattttctgccagacaccttttaaattcttcaggttcttcagtgaacaaaaagaccaaaattcctgctctggtgatgtttgtggaggcagagaaaaaacactacaggccaggtggggtggctcacgcctgtaatcccagcactttgggaggctgaggtgagtagatcacaaggtcaggaaatcaagagtatcgtggccaacatggtgaaaccccatctctgctaggaatacaaaaattagctgggcatgggg

SEQ ID NO: 10202 - DNA, 655 bp, Homo sapiens
  misc_feature 655: n = A,T,C or G
aggtacatcagcgccacaccgcagggctgtccacggtgagctatgaggctggagatggttctggagcagtgaactgcagaggaaagaaggctgccctacccctgggccaccaatcactagcagtgtgacctccggcagcttcttctcctgccaaatggggatgtttgcttcactgacagaaacacagtgggtgaaccgggagtgagcggcccacttggctgaccacttaccagcatttcggcggggcctcgtgctgagacctctccccaccctgacggaacagtcagttggaaaacagccagtagttccattcccactaacatcttatagtgaccaataatactctaccataactgtcgaaaatcctaaaaactctttcaaccctgagattctacttctaagagttctgggccaggttcggtggctcacatctgtaatcccagcactttgggaggctgagatgggtggatcacctgaggtccggagttcgagctcagactgaccaacatggtgaaaccccgttttcactaaaaatacaaaaaattagctgggcatggtggcgggtgcctgtaatcccagctactcaggaggctgagacaggagaatcgcttgaatcagttgcagtgagctgagatcatgccactgcactgtaacn

SEQ ID NO: 10203 - DNA, 409 bp, Homo sapiens
aggtactgatgctattttcgtgcatatgtctagtgtatatgttttaaggcaaactttctttgtgtgttgggtgtgtatgtgacacgaatggggacagcatctgtatttctgagcatggattgatgtgtggtgtctgtatgtatcttggaatggaggagggagattgaagaagtctggttgtgagcagcagaaataatttccaaagttgagtgacatgactctaagatgcccagtttctcggcctggggtcagcctgggtgatagctcagtctgtcagaatgaaaggaaacacggtgcttccttgctccaccttttcacaggccagaccacacctttttcatcctgaacacaaggatttcaagggcttttgttacctcttcctacatttcctgcctctgctttccgaggc

SEQ ID NO: 10204 - DNA, 430 bp, Homo sapiens
aggtactttttttttttttttttttttgagacagagtgttgccgtgtcacccaggctggagtgcagtagtgtgatcttggttcactgcaacctctgcctcccaggagaatggcgtgaacccgggaagcagagcttgcagtgagccgagattgtgccactgcagtccgcagtccagcctgggcgacagagcgagactccgtctcaacaaaaaaaaaaaaaaaaagatgaagggttttgtaaagatgttcactttaaaagagtgtttctttaaaaggtagttaacatattagtaacaaggaaattttagtaagacttaacccaaagaagtaataaaaaatttttattggaaacatttcccagtctatcttaattagcttttacctttaaagcccctgccctacatagttcctgatagaatgaatagactgca

SEQ ID NO: 10205 - DNA, 391 bp, Homo sapiens
  misc_feature 256, 266, 270, 271, 309: n = A,T,C or G
aggtacattttacactgtcagctatgggttcagtcagatatgcccataaattcatttatgaagaagagctccctaaacttctaatgattttttcctggtggttttatttagctccaaaaacttatgtttttttttcttaaaaaaatcccataaaaatattcattatcaatacatcatattgatgatatcactcaagaaggagatgtctcactctaagcattattataaaaattcacaggccagtccacttttctangaaaaatatngccnnagtgatccttctagcctttttgcatttcctgggattantttaaaccaggcttgcctgagcaggcccttgacaacctgcctctgtggaaccaaatgctcccaggcctgttttatttttggg

SEQ ID NO: 10206 - DNA, 418 bp, Homo sapiens
ccgggcaggacacatacatgtccttactttacagggagactttcagcatatttgttagccaatgtagcacctcattgatacttcaaactaggaaataattatgctagcactttcatatctatgaaatgttttgtgcttaaactgaagttactgaatgtttataaacaaaaacaaaaagttcagtaaggggtgaagatcctattgagatgtcttaagcaattaagaatatgtctttgcagaacacttcaatttttttttttttgtaaaaccgcgacccgacttaaaactcaattctctcataatgcattatcaatagattgttacttgttactcggctctccctttaataaatatgggatgggatggggcttttctcaacatcactatattccctcatctccttgtacattaacaaacc

SEQ ID NO: 10207 - DNA, 445 bp, Homo sapiens
ccgggcaggtactaagttcaggagacactgatttgtatattgaaaaataaagtattattgtctacaatggtagttgtgaaagttggcagctgattggaatcactgagggcattttttcaaatagtggtgcctgggtccgagcccccttcccctcccaattttgattcttattggcattttcaaacacctccccacggtggatttttttggtctaagtcctgggtttgggatattccccctctttcaacggattttttgtattataaccttttacccttttctttaatgggacccctttatttggaccacaccatagggtttttttaaaaatccttttattacccggggtttttttctcccacataaaaaaaaccccctttttctgcgtgtttagaaaaaaacatcaccttttaacatttgtattcaccttttccctcttgagggc

SEQ ID NO: 10208 - DNA, 384 bp, Homo sapiens
aggtacctgaacaaatcccatcaaggacagattctcagtcttgaagaggcagcacggtaaaggggaaagatcatgagttttggggccaggttcccttggatattgtggggtccccacacttctggatgatgttggataactctttgagacttaggctccacatctgtaaaatggaaatacttatttttcagagttgtcataaacactaaatgatttgacttatatcaacctaattcctactggctcattgaactcagctcagctgtcccctctgttcggatgccttccccagtgggtgcttagttaggtattccctgcttggataccactgccaagcttcttacacaattcccttctgccattaacactcatgtcttttgttat

SEQ ID NO: 10209 - DNA, 407 bp, Homo sapiens
ccgggcaggtacatcattagaatcctacctcaaacatgcaatggtgggaaaagatttacaatttaaaatttaaatagtagttaagctaaatttattttggaataatttaggtttccctggataatttttccacgttcatctcaacattatataaattcattcacagtcactcaggatgagtaagtaatgcctccaaaacagcctggtcgtgggttcttctgagtccatctggcttctggctagaagactggaatgactcataaaaatgaagcaacctgaggtcacctactccaggtcttttaaacagaattgccaactgcttaccaggtggttccaatttccgagaatacttaaaataagggagaaactcattctagatacaccattttattttcatattgtctctg

SEQ ID NO: 10210 - DNA, 926 bp, Homo sapiens
  misc_feature 622, 727, 750, 769: n = A,T,C or G
cacgatgcacgtactactacgtcatataggaccaacagcgccgtggccgccgaggtactctatggtctgttagtgtttctctgtgttttcctattgtgctgatgtgagcttgcactgcttttgtaattaaggataaattttatttatgcatttatgtatttatgtatgtatgtattaaaaaaataagggttgattaaaaatagttattaagtggagacacttaagaataatacacacttctctaaataaaacggaaaagcctacttgctgcttgcttgttgcaggtagaattgacccgatcccctgcagaaatccctgccctctcctctctgtcccaggaatgccacgctgcccttcacgctggcatgctgcctgtcggttctgtgctattccttagtgacctgtagattcattatctgtgtcgccacaaccttgtccttttagatttgcatatgcgttaagtccaatcattaaatccagtgatttttcaaaatagcaaaagtaggtgtataagtttccaacatgtgtataatttgaagctgaggaatgactaagaatgaaagaaactcagtttgttccactcagtgggctgcatgtgcctatggagtttcactttgagcanactctctcgaggcaaacctgctggcctcaccacctcagaccccgccttgatgttcatgggagagaactggtggtgggtccagttttgagcttttttgaaggacanggagaagccttgaatatgacttnctttaaaaacaaaaggaantggtaggcaaggcgggtttttttttgattttctagaataaaatttatatttttttagatataaactgcttttccttgagggcaccagtgactaattgactgctttggaactgtgcttaaacatgcacacagcttggttgctattaagctgcagaaat

SEQ ID NO: 10211 - DNA, 409 bp, Homo sapiens
ccgggcaggtactacgtcaggtgctaaggttaagatagtattttccttcactgactcctcactccgagaatccattttacagcttcattggtttgggttattccaattttttgatgtgagtaaataaatgacttctatttgcccaaaataaagcttatataggccttataaccatgcaaatgtgtccattaagttggactcggaatgagtgaatgagtattactgccagtgtgtgtgtgtgtgtgtgtgtgtgtgtgtgtgagcctctgtctgtttggatggctggtacttcggccgccttccttcttgcggtgccctcctggctgtctgacttgcttgtctacctgtcttgataccctgttctcttagtgtggcccctgagctcgatttctgggccctttatctgggg

SEQ ID NO: 10212 - DNA, 378 bp, Homo sapiens
aggtactgggattataggcgtgagccaccgcgtctggcctctaacgagatatttctaaaggttaggccttcagtcaagaattttaaagctggatcttagaggttatctaaactaacctctccatttcatagataaggaaagtgagtcccagaaaagcactggtttggacaagttcagaaagctaaacagtgactgtggatgtatgattctgtctcttaactcctaatccaaatgtcttctcactagataaggctgtgccttctacatttgaaggctcaaaccccatggatggatggagggaaggatgggttggagggaatggatggatagattggatggataagacagtgtacctatgtgattcagttttgccaatag

SEQ ID NO: 10213 - DNA, 446 bp, Homo sapiens
ccgggcaggtacatttgttgggggcgtgacattaacatataaccacttagagtggacatgcagttagagaaaagtcaatgagctggaaccaagctgggaattccaacatgtagaagttaaacacaagaggaggagccagcaaaggaaacagaaacagagcttccagcaggtggggggcatttggaagaaaacgatgccatagaagccaagatgaaataaactttaaggagaaggaagtactcaattgttttgaatgctttgaagaaagattggaattgggtaaaaaggcccttatatttgaataaccaaagggcaattggtggttcttgattgagggggttttaaaataaaaggggggggaataatttaccccccccgggaattcaacctgagggtagggaagggccttccaaaaattaaaaaaccgggcccttttttaaacagct

SEQ ID NO: 10214 - DNA, 446 bp, Homo sapiens
gaccaggttcgtccatctctattatcgggcgaattgtagctctcaccgcggcggcggccgaggtactatttttttttttttttttttttttttagagatggggtcttgctgttttgcccaggctgatcttgaactcctggcctgaagcaatcctcctgtataggcctcccaaaatgctgggattataggcatgagctactgcaccctgcctcttgtttttaagatagattcctcatgctaacagaataagctattagccacatttctacaaaggggattttaagtcaggtttattctctaaaaatgagaggcattaaaacaaagatagttctttaacaacaacaaactaataatttaaatttttttgctgtttactttatgaaaaggggagaatgtcaacatttaatttttatggctaatagtctatggaattaataataagagat

SEQ ID NO: 10215 - DNA, 374 bp, Homo sapiens
ccgggcaggtacgcggggaggctcctggggtggagtccaaatcactcattgtttgtgaaagctgagctcacagcaaaacaagccaccatgaagctgtcggtgtgtctcctgctggtcacgctggccctctgctgctacccagccaatgcccagttctgcccagctcttgtttctgagctgttagacttcttcttcattagtgaacctctgttcaagttaagtcttgccaaatttgatgcccctccggaagctgttgcagccaagttaggagtgaagagatgcacggatcagatgtcccttcagaaacgaagcctcattgcggaagtcctggtgaaaatattgaagaaatgtagtgtgtgacatgtaaaaacttt

SEQ ID NO: 10216 - DNA, 422 bp, Homo sapiens
ccgggcaggtacctcctttctgtgggttttcccttgactagaatacccttgccctagcttcttgtcccaccttgcctggatatgtggactactcattcttcacttccaggatgctcctacccaataaactgacagcagttgtgcctgttaaaccctctcacagcacatgaacctttctttcaaagcatttatacgagtttgtaattgtcattttggcctccatcattagatataagcttcacgaagaaagaaaccatttcattccacactgtcactgcagtgcctacacggtgcctacatcccaccaccgtaaccctggtgcctacatcccaccactgtaatcctggtgcctacccagtgcctacattccaccactgtaaccccagtgcctagcagggcacttggcatacatctaccactgg

SEQ ID NO: 10217 - DNA, 430 bp, Homo sapiens
aggtacacaggccgggcacagtggttcacacctgtaatcccaacactttgggaggctgaggcgggtggatcacaaggtcaggagatcgagaccatcctggccaacatggtgaaactctgtctctactaaaaaatacagaaaattagccagtcatggtggcacgttcctctagtcccagctactcgggaggctgaggcagaagaattacttcaacatgggatgtggaggttgcagtgagccgagatcgcgccactgcactccagcctggtgacagagcgagaccccatcttaaaaaaaaaaaaaagttgtatgtgacagctaaccataataaaaaaaaaagaaagaaaaaaaagagagagaaagtagggacaacactaaatcattagtaatttgagcacatttcctccaaggcatatgctatttttcaact

SEQ ID NO: 10218 - DNA, 398 bp, Homo sapiens
ccgggcaggtacgggacttgtctccaggagacatgtctgggaagaagagctagactggagaatcatgagcatgttcaggtgaaaacatgtgagtggataagagcaagagggtgagaacacagaccaaggggctaagggacagactgtgttcagtatttgggtatggaacttgtttttgctacttgctagttctaagaccaggctcagactctaacttctctgtaatgtgggaataatgatagcacttaccttataagattttacaaagattaaaatatcatatataacagcacttaacacaagtaagaattcagtaaatgttgactgttattactattgtctgggtcgttataagtttgaagacacaattgcataaactgtcatcattaaaaggaaaa

SEQ ID NO: 10219 - DNA, 389 bp, Homo sapiens
  misc_feature 16, 45, 80, 91, 95, 98, 99, 144, 155, 156, 174, 231, 236,241, 242, 264, 268, 280, 301, 307, 308, 309, 311, 320, 325,343, 345, 348, 366: n = A,T,C or G
ggtcggcgacacgacncacgaagggggaaacgagctccacgcggnggcggccgaggggggtgcgacgcagcagtagtccnacacccgaagnccanganngggcccaccacgagattgaaaagaaaaacagcaaggccaaaagancgaaagacganngagagggggccaacaccncacaaagaaggttgaaaaaaaaaagcgtttgcaggagcggcaccccctctaaaaaanaaaangaagnnggggagggaagaaagaacccanacanaagaaaaagganaaaggagcagggaaaaacccnacaccnnngnaaggcaccngaggnggagcgaggagagacccnancgnaggcagccccacaacaanaaacacaggggacgcagcgcacc

SEQ ID NO: 10220 - DNA, 431 bp, Homo sapiens
acgtacacctaaactccaccgcagagcaagcaaacccaatctggcacacagcttttgggggtttcctctcctactatggcccctagccctgtgcccaggacatagtgaagggtcagtaaatgtttggctacattgatctgaaaaatcctcactaacactcctccagcacatgcacaggtctgttgaacaaacatatcccatagaacccaacggatctgcgcctaaagtcccatagagcccttgggccccgtcaccttattttgggaatcattctttttccaaaaaattaccactcatcttttcaatagggaaacttcactcctggagaaaatggtgggctgggtaaagttcatcaattgccatattatttttctgcttcctggcctattggtttagaaacgtattgggttattaatggccatcttatcttg

SEQ ID NO: 10221 - DNA, 491 bp, Homo sapiens
ccgggcaggtacaggccaggtgagccaccgcgcccggcctacacagtttgcattttaaaagattactttgtatacccctagagaggttcccccccatggaattctatattgtctaactgttttctgatgacataaaatttcttcctgagttctttggaaattcaatttgaaagtgaatggaaagaaattgtcaatgtgccattcaagatatcctcttcaaccattttggtattagggatgtgtttctgtaccactttttaaccatttttttatgtttgaattctgattcatgagagaatgattggcatgatggaatttagttaaacaagaaaaaccctggtatataactgttaggttgggaccttagtgttttaagaggcaagggacaggtagaagaccatgaaccaccttgagtttttggaaattcctggccttacaactggtctaaattcttctgttgccttcagttttccctttttcttgtaaaaggc

SEQ ID NO: 10222 - DNA, 411 bp, Homo sapiens
aggtactgggattataggcgtgagccaccgcgtctggcctctaacgagatatttctaaagggtaggccttcagtcaagaattttaaagctggatcttagaggttatctaaactaacctctccatttcatagataaggaaagtgagtcccagaaaagcactggtttggacaagttcagaaagctaaacagtgactgtggatgtatgattctgtctcttaactcctaatccaaatgtcttctcactagataaggctgtgccttctacatttgaaggctcaaaccccatggatggatggagggaaggatgggtggagggatggatggatagatggatggattgatagattcctaatatcgttcagctttcgcaggagagatggagccacctacgcattttacaaagtgctaatc

SEQ ID NO: 10223 - DNA, 434 bp, Homo sapiens
ccgggcaggtacttttttttttttttttttttttttttaattttttgtagagatggaggtcttggtcttgccattttgcccaggctggtctcaaactcctggcctcaagtgatcctctcgccttcgtcttccaaagtgttggatgggattacaggcgtgagccatcatgcctggcctacgcattaatatttaaactgtttttagttctgttggtcacttccataaagattaatatggttgtatctatagctcatgagataccagctttaagagctcttagttcccctttccttccaacttttatttaatttaattcttttagtggttaccttcgtaacattagatattatgttttcggccaacaaacagaatatcatatcaacagttttctggcagtccagcttccatgcctattttttccccgcgtaccttgg

SEQ ID NO: 10224 - DNA, 387 bp, Homo sapiens
  misc_feature 219, 234, 242, 243, 272, 273, 290, 291, 300, 307, 308, 323,325, 326, 363, 364, 369, 370, 387: n = A,T,C or G
aggtacaagaaaaaatcaaacaatcacatcaaaaagtgggcgaaggatatgaacagacacttatcaaaagaagacatttatgcagccaacagacacatgaaaaaatgttcatcatcactggtcatcagagaaatgcaaatcaaaaaccacaatccgggaggtcttgccaaagaccacctgggctttccgggcaacgtgctagagcttctgggaagcagntcgtggcccctttgngagattcnncacggcttcggattcctaccctgcagganntgctccactgttgtctnngccggcctnctggcgnnttttgcttgaggggntnnaacctcggaatgggctttagaaaacaagaaccactgnnagatnnggcccagttcgtggccn

SEQ ID NO: 10225 - DNA, 444 bp, Homo sapiens
gtcggaccccatttcgtacttcgggcgaatagtagctggcaacgaccgcggtggcggccgggcaggtacgcgggagaataacaaaagcactcgtgttacttttaaacaaggtaaaacttaaacagttttttcctccgtttctttttttatggaaataagaggcaagtgatagcaagtgggtaattcaatggcagtggtaactgaagcactgacctgttacaagagagacggaagcttctacttgagcagatacaaatactgtcatccgtggagatttgaaagaagtctttctatcactgggtagtttgagagctcattagtcttctttagaatgggtttaaacttggaaacatcaaagccagttacaaggaaacttaattttactgtgttggcagcctaagcgccagaattttgttattaaagtgtctgaaagtggcacaggtt

SEQ ID NO: 10226 - DNA, 385 bp, Homo sapiens
ccgcccgggcaggtacttgcccccaggcccagataatttatttaaaaactttttttgtagagacagggtctcactatggtgcccaggctggtctcaaactcctggcctcaaacaatcctctacctcaacccccctaagtgctggcattacaggcatcagctgccatgcctggctacaaatcttaacgttttccccatggcttctttttctggcgttcttttctcaggtaatggaagtgggcagagaatgatcctttccctaggctccagtgtgtaagaattaaagaaagaggaaagaaacacaatggcttgatggtcgaggacaggtttattttaaagaaaacaaacccaagagtggcttctggctgaagtagatcagaggcctg

SEQ ID NO: 10227 - DNA, 356 bp, Homo sapiens
ccgggcaggtactttggcttttgtttctagaacaccaatgagtatatgctcattaagatagtttgatgcaataaatccttattttacttgcctctattactgcattgtaaactgttgtctactttgtcttcttgaaatcctacacctccccagcccccacatttggcctatggaacattactttatcctgattttccccctaaccttctggcaatgcctctcagactccttccagaactacttttctctgttttccttttaatgatgacagtttatgcaattgtgtcttcaaacttataacgacccagacaatagtaataacagtcaacatttactgaattcttacttgtgttaag

SEQ ID NO: 10228 - DNA, 410 bp, Homo sapiens
aggtacgcggggacagtcacagttaacatcctcattctcaatcctacccatgatgcagacagattgcctcatttcagctcaataaaacatcaccaaattcccttaggcagaaaaagggtggggagtgccctttcttgaaggaatcccttaagtgcacgtctcccgttttcttttcacatcaatgcagagtccctctgtgaatttacaacacccaacacccatgagttcagtccttaagaaggaaaattgagcaagtatttaattggttggacattgcataaaagaggtccatatccaggctaactctagaaattttattctcaaacttagttggcctcttttttttctgtcagaggaccattcttagtggcactggggaaatcttggcacccagaagaattcaactgcgc

SEQ ID NO: 10229 - DNA, 396 bp, Homo sapiens
ccgggcaggtactctcaggctggccacagtgactcatgcctgtaattactgcactttgggaggccaaaggaggaggatcacttgagcccaggagttcgagaccagcctgggcaacatatagagaccatgtctctacaaaaaacacaaaaagtagccagatgtgatggaggctgagatgggaggatcatttgagcctggaagtcaaggctgcaataaattatgatcatgtcactgcactccagcctggatgacagagcaaagctctatcccaaaaaactctcaagacaaccacaaacatctcacaccatctatatatgatgaagtaatacatataaaccagttgtttaaaacaatttcaaaattttgggtaatctctgattgcctggattatttcca

SEQ ID NO: 10230 - DNA, 413 bp, Homo sapiens
ccgggcaggtactggtttggagaacttagttctctagtatcatcttcatcatcctcagttacaaatgctgacagagcatctacaacctgtgacataccatccaaacaccaatcccaaaaatgtgctatcccaaggatataagacacggtccttgcaaactaggtaaagagacaggacttaaacaatgatgtaggccggacactgtggctcacacctataatcctaccacttttggagactgaggcaggaggatcacttgaggccaggaatttgagaccagcctgggcaacacagtgagacgccagctgtattaatccattcttacagtgctataaagaatcgctcaagactgggtaatttatcaaggaaagaggtttaattgactcacagttccacatggctggggaggcctc

SEQ ID NO: 10231 - DNA, 384 bp, Homo sapiens
ccgggcaggtactggagggtagactgctataacaacttttggttttggatgggaataaacagaaaaagtctcatctccagttcatttctggggagggtcaggaggtggggggtgcttggctctactcccttcatatgattttcccttctttatctccaggatcttccccatttcacggagagacatggatgagaatgaaggctgctgagtgggacgggcttatggggccagttttgaagaggcctcataccttttggccacattccattggccagaactttgtcatatgactgcccctaacttcaaggaagactgggaaatgtagtcaagttgcctgtccgggtagaaaagggacccttttctgtggaataacttgcctgtttg

SEQ ID NO: 10232 - DNA, 437 bp, Homo sapiens
aggtacttttttttttttgctccagctgtcaggacctgtttattgttgaaactggtcagactatcagtctatgggttaattttctccagcattatttagtagctccagaaggagaatggataaagtaggcattgaaataggcttaaactttggttctgctggtggattcaagaaaagggaaaaattggaagagttgagagaatgggcaagaaggaggtccaaacgctggagcataaacagagaaaaaagacagaagaaagagggggtgtggataaaaacaaagggagcaaaaaattgtagatcctgatgaggttgaggaatagtggttgtaaaaactagaaggataagagtttgtgatccaaaagcaggttgtaaatatttcagaaaagggacactttctgaagaaaacatggtctgggttggaggttgggaagttt

SEQ ID NO: 10233 - DNA, 519 bp, Homo sapiens
aggtaccccaaatgaaatggctttaaaaagataaaggacagaaatcatgtgatttgctggaacaacttccagggcagcacagtctaaatatggccaggcagagtgcgccaggtccccagccatgaacaccaagggcttccaggcacgctggctcccttggctcccagggtgttttatggtgagaaggcaaaacccgaaaagaaacaagaagaaaaacgacacccgacctgactttaccttcccgggcatcttttggtccctattgttatacgtgggcccaacaccatttgtgctgctctgcttctatcctcccattccactggagaatactgaggcaattattgggcccaaaaatggtatgaggaaaatcctttggggcctaataccgcctccttgcccacaacaatttcctattagtctttttccggccttcccatagggagacccccccaaatgtattgaaggggtttaatcctttagggccacctttgggccaccagggcccaccagacgagccca

SEQ ID NO: 10234 - DNA, 396 bp, Homo sapiens
aggtacctttaggtatttgaagaactgatgatatgtagctgtgactctgtttctgaaggttgagaacctcctttttctgaggacaattcgtgccccctttcaaattgtaattgtaatcacccaaagtgctgggattacaggcgtcagccaccgtgcctggccgttattttgtctttcattcatgatattggttaatctgtatttatcaagtttgttaattttttttttttttgagatagggtcttgctgtcacccaggcttaagtgcagtgatgtggtcatagctcactgtaacactccaacttcctgggtctcaggcaattcctcacacactaacactcctgagttagctgggtactacagggcgcacaccaatgtgtgcctgggctattaaaag

SEQ ID NO: 10235 - DNA, 390 bp, Homo sapiens
ccgggcaggtacccagaggacacagttgaaatgaggctcaattaggaaaaactaggctgtttaatatccatattgagtagctttgcaagttactttcacaaacttccctacagaattggttctaacagaactgttcaaggccaaagatttgttttttctggggtctgggggagtcatctttataattttaatattccattagaatgccttgacgctagaaggagggtccatctcaatcacatcaataaattgatcccaacctttataaaaataagcttggatagaaaggaaaatccgaagactaaggtagtctggtagaatactagaaggagacatcttttaagaggaggacaagaaaaggcatgaaaacagagaacatggtcctacaca

SEQ ID NO: 10236 - DNA, 361 bp, Homo sapiens
  misc_feature 198: n = A,T,C or G
ccgggcaggtacaaaattatctttattcagaagatcacatagcagcatgttcataatcaaaaacattttaccttagcaataaacaccagtcatttatgcaagagcttcccagggttggtagatatttttattgcttcattttgctctagttaaagaaatggaaaagatgcttttaacttattatcaatcctacttcangtgtcaagaaatgcaaagcattagaaagagagagggaaagagggatcttcaatattctctgtaaaggagcaaattctgacatggtcatctcagacaccctcttttaattccaaagtctaaccttacaaaagcagagaaaggccgggcacggtggctcatgcct

SEQ ID NO: 10237 - DNA, 427 bp, Homo sapiens
ccgggcaggtactctgctactgaacgatgaactttagggcctaggttacacctatccactttatctcctcagacctaattctatgccttatgatatacaagggctcaaataactagagtgtcatatatgaagagcaaatataaagcactcaaaaaagccaagcgctacctctttagaacttggaacactgctgtgatctttctccattatcagccatctgagaacatttggaatagaggggtttttccatgttggccacggattcacaaatctcccatcttttcctttcttggatttagttacatcttcttctagtctataatccagtttgaagcttttcctagaaaacctagaagaatcacttgctccggaattccgtgctgaaatttgacggtttcttaatgcttctttaagatattggctggct

SEQ ID NO: 10238 - DNA, 810 bp, Homo sapiens
  misc_feature 582: n = A,T,C or G
aggtactgtgaggcactctttccccactctcccacaaccctcagcttaacacaactgtggtgattgctttgtccgttttcccatgaggaccctgagatttcaacaaggttcagtaactcacacatcgacacttccagggagctgtgttgccaggaactggcccaggtctttccctcctgggcccatcttgtccttaatctctgctgacattgatgggtttagttaccttgtcgtgtttcttcagtgttttatgccatacagtctcccttgagtagatgttctgtataggggatatcacagcttcctggtgagaactgggttaagtccagcaggatgcccgggcttagtggcactggagttgtgggtggccttgagccccaagcagtcccctgagagccctttccgatggatgtttgagtcactgagtgtgttccttcttctttctggtcaggctgtcctggccgctgcacttacaattgcaccccatccccctacccactctgatcccagaggagagtgcttctgcttgaacctctaaggcacaagtgggccccaaagtccttaaatatggaaggatgtggngaaacaatggtgaagattgcagccatagggttacaggcaacactggttttgttgtaggtaccctcatctaaagattctttatattctttccagatttattttctaaaaactaactgggttggaaatttaccagcttgaattttttctttaggggatttggacattccgatacctacatacttgagctggtggaaccaccagagggtttgaactcttaagtggtaattt

SEQ ID NO: 10239 - DNA, 412 bp, Homo sapiens
ccgggcaggtacagtagctctagcatttcatcacaaagtgtcaggggagagaatagctttcacttttttgtcatccctctcactttctggcctgtctttacggatgctgtcttacagctgcttatccaaagataagtgggttgtggtgatactgattacagctgcttatcagaagataatgggttgtagtgatactgattagcctacggcataaattaagtaaaagggggaggaaaaacagttttgtcatgactcaggaggaagatgaggcacactgtcacttttgagctctgtgttttggcaggtctgccatgacccacgtgggaaataaagggctcccttccgcttgtgtttcaggactactcaccaggggattctccaccagggacaccgccagcgtccccaccgtcct

SEQ ID NO: 10240 - DNA, 416 bp, Homo sapiens
aggtactttaattttttttttttttttttaagcagagatggggtttcgccatgttgaccaggctggtcttgaactcctgacctaaggtgatccacctgcctcggcctcccaaagtgctgggattataggtttgagccaccacgcccagctgtgttatgttttaacacatgtgctatgtcgctaagtggttggaaatatgaaaatgagttgatgtgttcttataataagacatctgctttagtatacattattagcatgctcttccactttggaatttttattttatattttcacttaggcaaaaatactttcaaccattaaagtgggtataaaagcaacagttgcttttagaaatttactcttttcacttgctgggctggtttggtcacttgttagactataaaagtgataaatta

SEQ ID NO: 10241 - DNA, 420 bp, Homo sapiens
ccggccaggtacattttattcatccgtcgtttgggtcagggtctgcgggcagacacaggtagctactgccctgttgtgagaagcaatacctcaattggtgccccatgtgaggagagctgtgtgaggacagtcaggggtctgcagaaacagaccttccgcagtcggagcccctttgtaaggcaagctttgaaggaagtgtaaggaccgctttcatgaggaaagctgcaaaggaagcctgaggaatgcgacgggcccccgggaaacaaaggtgaagaaaaaccgcgtggtcaagtcagtgagtaactagtaagtcattggtgcccactcaaggttaccaagttctggggaaagttggttcaagctgagatttcattatgggacaacagttattagcacagcagaaacattatataaaaggtt

SEQ ID NO: 10242 - DNA, 394 bp, Homo sapiens
ccgggcatgtactcttctctcctcccccaaaagccctgtatgagtgtgtctctggctgcgcatatttaagtattaactgagataaagcatgagctcagcaggggctttctaatggctaatccacagtaacccatttaaaaaatcttttttttcccacaagaaaaagaactagtagggaaaggacattttggtggttgtttgaaagaagtgtcactcgggtatttgggggaggaagagtggtgtctcaccattgagttttttgtttggtggatgcctcttttccaggtccagttgctgaatccaggacatggagtggagacagggagtgggtacggaggtgccattaaagttctaagcaagttcagcagtgtttaaagaatttaaacccactctg

SEQ ID NO: 10243 - DNA, 520 bp, Homo sapiens
ccgggcaggtacatgggactacaggcacgccccaccatgcccagctcatttttgtatttttagtagagacagggtttcaccatgttggccaggatgatcttgatctcttgacctcatgatccgcccgatcttggcctcccaaagtgctgggatcacaggcgtgagccatcacaacctggggccctctaatttaattcctctttaaaagagtagagtaaaaactattgatagggccaaaaattattttaagttaaaatctttttacctttaatcgacaagggcaaataaaatggtaatttttgccttaaatattaggttgattgaaagtcattaccacaaattggaacaagtaatatcatatcaccattttttaggtaaaaaaggccaataaaattttggagaactttataaagcctattatgggtaggctttatttttttggggtggggggaaagaaaattgagtaagaagaaatatttaacaatctctttaactgggcaatgaacaccattttttgatg

SEQ ID NO: 10244 - DNA, 654 bp, Homo sapiens
ccgggcaggtactttttttttttttttttgagacggagttttgctcatgttgcagtgagctgagatcatgccgctgcaccccagcctgggtgacagagcaagactgtatctcaagcaaacaaacgaacaacaacaacaaaaaacctctaagtaataagtctgtaactttacaccaaaggggatttttcttcagtaattctataggatttttgggttctttacattaagttgaatacaaacataacatgagttacaaaagattaaaacacagaagtaatattaaggagcaataaatgtcatatgaaatccctaagtggaaaataatagatattctattttaccattattttaaattagaaattatttacattaaattattttaaaacaattattaccactaccagtatgactcgactgcctatgatcagaaaggacagaaaaaagatgtctgaaacaactgctgatttagacttccattctttttgagttatattcctgctaatgatatgtgtttaacattatatgagtaagaactaaggaatttaatctaagaaatggaagttacaggtgcattaaaagaaattagtaggtgttttttcagcctaaaaaaaaaaggccttatgagataagttattcggattttatttggtttgg

SEQ ID NO: 10245 - DNA, 434 bp, Homo sapiens
ccgggcaggtacacacagtggcagggcagccggaaaggaggatgtggttttccttttccttttggaagaaaagggctcagtcagcctaattgtcccttgaagtgcttccaacttttcttttacgagctttaattggtatgtttgcatgcagcatctgggagtttctttaatatctacatttatgttggactgtctaattatagtcctctgaaagttttcattttggttggctccattagcgcatcttatgaattatgtgaacttttttctgaatttttgatctatgtagtataaactttattgtttcatcgataagcttgtgaactagattctttgacttattctatcacctgtttttggttttttctctattttatgtaattattgttatactcatctataatgtctccttttctgaatgcctatcttcttta

SEQ ID NO: 10246 - DNA, 387 bp, Homo sapiens
aggtacctcaggaggtctgcaagtgtgtggttaggtaaaaactgagctgtgcaaactcactgtatccaagctcttctcatgagagagcggaacaacctggcaagcttaaaggcaagtgttttcgttcttttaattaaaaagggctttgaccaaattttaccatttaaacttagccccagaaaccaaccagtcccgggtaagtgttcgttgcaaaatcttgcagttaacaaaaagaccattctgataagactacacgtttggtctccagtcctagcaagcgtcccattctctccacattcttatcaattgtagcttgacatgttatctccttggcacattccatagggaagccagcctctttctccatctcgtaatcgttccccctca

SEQ ID NO: 10247 - DNA, 392 bp, Homo sapiens
aggtacacttgaggaagcttgggctcagaggctttatgttaattccaacagtttttgcaacaggaggaggagaatatctgtccaggagccctaatcaagactcagcaggaagctggtggcttcctttccttccttcttttgcttccttcctgttcttcctgtgcttcctttcagtccttccttctacatatggggcccatcgcattcccactgactcagatgctgaggggccagactgaagggacagtggccattgcatcaagtcagagaacggatctgacccatctagtagaagcttattgttttggcagaagcacaagctcttagaggtgcagctgcagggtgtgacctattggggacattgagctcagtgaccatgggccctgagagtc

SEQ ID NO: 10248 - DNA, 406 bp, Homo sapiens
ccgggcaggtacacaaatcaaaggaataccatatttagcaccataggtgactaattaggcaaatgagcaagttttaagagtctggcccaatttttaaagtgtgtgtgtgtatcacaatctctctaatgctatatgtagtctaggcaatctggcaacagattcctaactattgttaggaaaatgcaagtatgatcctgttattgctactgctttcaacccagaggtaatgaggaaaagtccaagttccttaacatagacttcataggcctgcatgatttaggactggttatcaccaccacctcagagaaactcctgacctttaatcaaaatgtgccttgtggtaaactacttttcatttaagccatgattgcgatttataattccctatcttgtgataaatgtccat

SEQ ID NO: 10249 - DNA, 361 bp, Homo sapiens
  misc_feature 286, 287, 300: n = A,T,C or G
ccgggcaggtacgcggggaaaaagggtggggagtgccctttcttgaaggaatcccttaagtgcacgtctcccgttttcttttcacatcaatgcagagtccctctgtgaatttacaacacccaacacccatgagttcagtccttaagaaggaaaattgagcaagtatttaattggttggacattgcataaaagaggtccatatccaggctaactctagaaattttattctcaaacttagttggcctctttttcttctgtcagaggaccattcttagtggcactgggnngaaatcttggcancccagaagaaaattcaactgcgcctcactttgcaaaaataccaatggggcctacattggat

SEQ ID NO: 10250 - DNA, 872 bp, Homo sapiens
  misc_feature 540: n = A,T,C or G
ggtactaaccttagctagtaagtaggaaggcttggaatcgaccccagctcttctggcttcaaagctcctatacatggtgccaggacatataatccagtcctcctatcttcccacccagtggctctttgctgttataatgtccatcatccctaccctgtctttccttctccaccttctacttaggctggattcagtcctaattatttaccaagcaacagtgatgatgaagctaataatcatcatacatgtttgtgtgtagcctagttcaacctttaattactgctctctccccagcacctagaatagtgcccagcccattattgggctgataaatatttgttgaataaatgaatacatgaatatattcgtatgccttttgcagacccctcttctcccccagtaggccttactcagaacaagaggagcggtagctaaattaggggaaggaatgccaagggctgaaaatcctctgggttggcaattgtaatcctgtggacattggtaatacccgaggatgcaaaatttccccaaaacaagcgnaacattttccatgaattgctgctataaagcttaattcctgtccccaccccaacattttataaagagccagtgacttttacagcccttggttattgcccaatagcgatctggaaacaggccgctcttcgttaaatgactggacacacaggtggggatctggtctgaaaggtggagggtgcccggcttgggaatagggacattataaattcttggacaattgtaaggcatatttctgaagtgtaaaatgtttgcattggaataaaaaaacccatacggcccctggaagaaatttttcttccaagtccttactgaaaaatgtcccccaaactgga

SEQ ID NO: 10251 - DNA, 377 bp, Homo sapiens
aggtacagttttgtaagtaagatgattgaaagatctactgagtgccgtggagtcacagagaggaacaactaccctcaggctatggagttcagtgaaggctgcctaaagagaggatgagttgtcagctgagacttacagaatgaaagaaatgtcctagttgtttagcttgactgtaaacaaatggggcttattacaggattctgtatgcatttttaagtctgacgtatttttcctcaaaagatgaggatggtaaggatgatatggggggaagggcactaagcagaaggttccttattcttcttactgccctgtttctcccctgctgtcttatttataacctcttgtttaatgacaagaatttctatagaacaaattat

SEQ ID NO: 10252 - DNA, 495 bp, Homo sapiens
tggaattgaccctaacaattcatatagggaaatgggccctccccgcgggggggcccgcggtccaggtccggttgtaagtgcctgttagtaggtaattcagccgaccttttctgattctgctttgctgcctgatttcaaaagagttgccctatactggctttcagtcacagcttgatgtaaccactgcttgtttgcatgcatccccatcaattttcaattggcttctttttttttcttcttcaagttaggaagcaaaagaatcaggagcatttttatatgatcaaagatttatataaggccagctagaatcaagccaaatgaaattcagctggaagggatggtaaaaaggctcacagaacttgtggctgccatagaagtgagtgttctttaaattaaagagggttcagctagcagcggcaactctgactttgcattcatattgaagcaagctctccagccattctgggcaggcagagccttaaaattagaggtgac

SEQ ID NO: 10253 - DNA, 422 bp, Homo sapiens
aggtactattgatgtttttttcagtatttcagtcaacctttctttctttccttctctccttctctctctctctctctccagcctgggcaacacagcaagactctgtctcaaaaagaaaagaatttccatcccctaaaatgtttccttgtgccctttgcagatgatctgtgcccacacgctatagtttgataccacctgtagtgaacacagcaatatgtgttcgcaaaatgaaaagggtgcaacatgtaaacaaaatggagaaaaggccaaaaagtcagtcagggaatggaggacttgaggtaggaaaacttgtgtgcaggccagcaaaggacgatggcaatgaaggcagagttgaatagcgcccagaggaatgtgggaggctgctgcatacacagaaagcagtgatcctcaatgggaaggag

SEQ ID NO: 10254 - DNA, 423 bp, Homo sapiens
aggtacaaatttgatcattttattatatctgaaacagactaaaggcaggttgactgtgaggggtggcaggaagcttttgggtgatagatggtgagtggtctgtagtgctggttattccatatagacttttgtcaaagctcatggaagtgtttgtttaaaatgggtaaatttattacatatgttatacttcactagtgaaatctttaaaaactatgctggtggcttcctgtcatcttctgaataaaccctgattcttctttttcaaggtaaacaagaacttctggtgtgccttccaccttttccatacctccccccatcctcacctctaacctctccacttcaaattgccatctgcacctcagttgcgagctgccccctactcgtgtgctcttgcctctgggtctaaagtctgcagcgccctca

SEQ ID NO: 10255 - DNA, 493 bp, Homo sapiens
tgggaaatatccgcgccgtctaccgactactctgtacgggcgaattctacctcgcgggggcggccgaggtactgcctgtccttctattcacagcacatgtggcagcaaaccccatattacagtgatacatccctgcatcccttataagaatatatataagctttgcttcctcattgaagcaacaagacatggtttctcactcgtccttatgttcctcatagctcatattatgctactgtgtttttagtaggaatggttgcatatggtcaaatgtatgtctgtgtgttcttatgtatgcatatatatttggatggctggcggatggctggctgggtgagtgcactgcttagtgatgcttctccaaagcagtttggaatatggtataactcagtcttttgttttctgaaattttggctctctcttgcatttctgccaattctaactctttttctctctcccccttctcttttaaatataataaacctttaacctt

SEQ ID NO: 10256 - DNA, 383 bp, Homo sapiens
aggtactgtgaggcactctttccccactctcccacaaccctcagcttaacacaactgtggtgattgctttgtccgttttcccatgaggaccctgagatttcaacaaggttcagtaactcacacatcgacacttccagggagctgtgttgccaggaactggcccaggtctttccctcctgggcccatcttgtccttaatctctgctgacattgatgggtttagttaccttgtcgtgtttcttcagtgttttatgccatacagtctcccttgagtagatgctctgtataggggatatcacagcttcctggtgagaactgggttaagtccagcaggatgcctgggcttagtggcactggagttgtggggtggccttgagccccagg

SEQ ID NO: 10257 - DNA, 444 bp, Homo sapiens
gggggggggtggtaggacgcgtttaggactatcgggcgaatattagctgcaacgccgtggcggccgcccgggcaggtatctgttcattcaatttttctgaatattttaaaaattttaacataaaatcttgagaaaaagtaaactgtagatgctaatagcatacaaagtgcagtcagtgtggagaacagaagagaaagatgaatttccaatgaagagattcagcaggtttgtggaggagatgggattgagcagaaacttaacagatttgggccttttaggtggaggagacaatataggaaaggcacaaacctggggaaatgcacaatgtatgctgaccaagaagtggtctggcgggtagagtaaggctggaagagactctgggagaggaacatgagaggtcccagggctctgaaccagggcaaccaacagaaaaggaaggacaga

SEQ ID NO: 10258 - DNA, 430 bp, Homo sapiens
aggtacacattaatccaatacagacaccaaaaaactcatctggtctgagtctacttccatctccggaagcacaggtggctgaccttaaatgggaccagctgtcactaggatgtttttgtgtcgaacccagcaacagaattagagagatgccagagttaacttgcactgaggatactttccagccaggtgtctggctggaaagtcacagagctacgcatctagcaagaatcaaagcctggcctgtgagaaccacgcacagtgtggactcaggtcagggacactgcatgatggacaagggctttctgaattcctgaattcaccaggaattatgtccttagtccacctttcccacacacagcaagggagggagttggtgagctgaaagcacagctactcaccagcccgccaggctgattgcaataagtgtcct

SEQ ID NO: 10259 - DNA, 404 bp, Homo sapiens
aggtacacccaagatactcaataaatgcttctcaggtggatgaagataaagcctctatcttttccacctctgcatactcagcatatagtaggagctcaataaaaagctggtgggaaaaaaaaataaaaaggaagacatgtaataagaatgacacgtattggccaggcgtgatggcgcacgcctgtaatcccagcacttttggaggccgagacgggcagatcacttgaggtcaggagttccagaccagtctggccaacatcgtgaaaccccatctctactaaaaatacaaaaattagacaggcgtggtggtgggtgcctgtaatctcagctactcgggaggcggaggcaggagaattgcttgaacccaggaggcggaggttgcagtgagccaagatcgccccact

SEQ ID NO: 10260 - DNA, 480 bp, Homo sapiens
  misc_feature 32: n = A,T,C or G
gtgcttgtcgcaattcgtaattcgggcgaatngtagctccaacgcgctggcggccgaggtacgcggtctgtttgttcactgtcatccactgagtgttttgcctcatgttctgctgagcacattccctgtgtgatttcttcttattctcaaaactgcatttggaataccttgttgttttaaagaggagggaacggaagcattgccatttgctcaagatctcacggctagtgggtaagagagcccactccagcaccaccactgcgtgtttgcattttcacagacatttggaggtgggatggagaatggatctgaagagacaagactggaggtggaaggaacaacatatttaaattcttttctggggaaaactcagaaattgagtctgtgggaagcaccttgaggacagaacatgttggatggtggagcaccctttctatacgacttacaggacaacagatggggaattcatggctgttggaa

SEQ ID NO: 10261 - DNA, 455 bp, Homo sapiens
  misc_feature 324, 333, 413: n = A,T,C or G
ccgggcaggtacaagaaaaaatcaaacaatcacatcaaaaagtgggcgaaggatatgaacagacacttatcaaaagaagacatttatgcagccaacagacacatgaaaaaatgttcatcatcactggtcatcagagaaatgcaaattaaaacccacaattcctggaggtcttggccaaagaaccaccttgggcctttccgggcaatggtgctagaagctttctggggaagcaagtcgttggccccttttggaagaattccacgggcttttcggaatccccttacttggcaaggatggcttccaactgttggtctggcttgggcncttcttgcngcgtttttggcttgaaggggggtaaacccttccggaaatggggcttagaaaacccaagaaaccacttggaagaatggccnccaaagtccgttgcccccccaaggccaattttcccgcaacac

SEQ ID NO: 10262 - DNA, 408 bp, Homo sapiens
  misc_feature 224, 243: n = A,T,C or G
ccgggcaggtacgcgggggccgttagctgtgtctcgatgcaaaagagaatttaaatttaaattctttttatttaaataaagatcattctattcttacattttcttttattagtcaatctgttcaaatgactgactttttattttattagtcaattttttaaaaaatcttccatttcaaaatatttgtctcctaaagcttatagaaaaaggcaggccaggcatangtagctcatgccctataantcccagcacttttgggagccccaagggttaggaggatttactttaagccccaaagaaattcgaagacccaagccttaggccaacaataagtgaggaacagttatcctcttacccggaaaaaaaaaatataataaatattaaaaggttacccttggggccgcttct

SEQ ID NO: 10263 - DNA, 393 bp, Homo sapiens
  misc_feature 39: n = A,T,C or G
ccgggcaggtacaccaattttgtttattcattcattcgntcggtgggatgcctgggttactcctaggccattttaaagtaggtcttcattattctcttagaaatatcttatttttctttaaggcctttatcacagattataattctaatatcaagttgtttcatatctcttttgttcaatattttgtttagtctctatctctcatcacactctcaacaaccccataagctccctgaggggaagggcatgtctgctttgctcctcactgtgtttactgccagcacctggcaacgtagtgggtatttaataagtaattgttgaatcactgaatgaaagaaaatcactaggccacctgaaggccccttgtctttagagtccactgtggaccatgta

SEQ ID NO: 10264 - DNA, 395 bp, Homo sapiens
aggtacgttcatctacctactttgcacttggatggaagtcctagattgggtcttaaaaggagggaacattctagaacccaccaacccttcctgatactgtcacaagatttttttcccttaattcttttaaaatcagggccacatttcaactccctgcccgctgccatttgatgatatttttgtttctctttaggtatcgtcctattttctttttctttaccactgacagcggcttatttcatatgaataatatattaaatacatatgcatttaaaatattgttttgatttgtttgcgaattgtttctcttaaagggtctatctggggaaatgagtaatttttcatatcctgttcttgcaggaagaattttaaatcgtttctccaaagacattgga

SEQ ID NO: 10265 - DNA, 370 bp, Homo sapiens
ccgggcaggtacaggggacaaacagaagaggagacatatgtatactctcaatgtgtttatatgcctttgtgagacatcgagtcatcactgtgaagtagctagaataacagatatgaatgcataaatatgggaagggaggtagcaaaggggaaagtttttgagaagggtgggtggtgatgaagaaaggctgaagtgttgccttgtaaaatggagacatattctcgggaagctaatattctaataaagcagaaaaaaagagcagcaatctaaaggtcccatccttgccttgttaggaaagctatccccatatcagctaagaacacaccaggcaaccagtttccactcaatgcaatctgaaaatcagcattat

SEQ ID NO: 10266 - DNA, 398 bp, Homo sapiens
aggtactaaaaattctatttaaaaaagatactgtgatattagtatcttaaacagccattatgtatcaaatatctgctattcacagacccctgacaaattattatttgtttagtcactgtaacaatgaaataacaccgaagcctgtcctgttttcagtatgctactttgcttctatatgcacataaagtgtattgaatatttgtccagacaaatgctataacctgtaacaaattaatataaaccagagaattgtatttatttgtatgaactagggctgtttctttgagtttactgggggaaagaacctgagtttcaatcagatacagatttataatttatgtaagagacacttgatcttggactagcatcccttctcagcctgagtttcttcatctgtg

SEQ ID NO: 10267 - DNA, 376 bp, Homo sapiens
ccgggcaggtacgatcttggctcactgcaacctctccctcccgggttcaagtgattctcgtgcctcagcctcttgagtagctgggattacaggcgcgtgccactgcgtccggctaatttttgtatttttagtaaagattgggggttttaccctgttggccaggctgatctaaaactcctgacctaatgtggtccacccaccttggcctcccaaagtgctgggattacaggcgtgagccaccacgctcagcctacaagcaattttttaaaaactgacacctattactgataaaattctctgtttaaaatcctatttactattttaaagaaaaagtattaattttttttaaatacaattaattctgttaattgataaa

SEQ ID NO: 10268 - DNA, 440 bp, Homo sapiens
ccgggcaggtactttcatcctccaatggcctcccattacatatggaataaaaccccaaacacttaccattgcctaaaaagccctacataatttgaaccatagctgcctctacgagatcattttctctcactcttgctttcttataccagtgcctcacaacttccctgcctccttgctgccctttattattgtggtaagaacacttgagatctaccctcttcacaaaattgtaaatgcacaatacagtattgttaactataggcatgatgttgcacagaagatctctacaacttattcatcttgcataactgaaactttattccttaaataggctaagcaaatgcccgtgtcatggcctttgccctttattctgttggaatactctggccttatatacaaatggctcactgcttactcatttagatttctgtgcagaaatt

SEQ ID NO: 10269 - DNA, 364 bp, Homo sapiens
aggtacagtagtgcactcttggctcactgtagcctcgacctccggggctcaagtgatcctcctgccttagccccacaagtagtgggactataggcacacagcaccatgcccatctaagtttttgtattttatgtagagacaaggtttcaccatgttgcccaggctgatcttgagctcctgagctcaagtgatctgcccaccttggactcccaaaatgctgggattataggcgtaaaccaccatgcctggccttaaatcaactttagagtcaaccatctcttatcactgggagctttctggagaaaacttccatcaacgtggtggctctctttcctgatgttgtttgtgcccaaattagcttgtt

SEQ ID NO: 10270 - DNA, 385 bp, Homo sapiens
aggtacagaccatgaagggtctgaacagctcatgagctgagtctgacaaattctgccaagtaacaagctaagttacaggcaagctacccaccctcttcaaggaccagtttcctagtttctataatggggtaacacctaccttataaattgtgaagaattaaatcatataatcatgtctgcctcgaactgggtggctcgtcaatgctctgctctgttccctcctcttccctctcctacatcaagcaagaacgtccgcacagacttgacctgggcacctcattattacaatgcatccctttgacatgattctttatgaaaaaggggaccagcaattcaagcctttttcagcattctccttgacagaagactaccactgcagaaccct

SEQ ID NO: 10271 - DNA, 381 bp, Homo sapiens
ccgggcaggtacgcggggctctcgagtccgggccgcaagtcccagacgctgcccatggaggcgtccagcgagccgccgctggatgctaagtccgatgtcaccaaccagcttgtagattttcagtggaaactgggtatgggctgtgaagcttcaaacaccttgcagatctcttaagtatccttacgttgcagtgatgctaaaagtggcagatcattcaggccaagtaaagaccaagtgctttgaaatgacgattccacagtttcagaatttctacggacagttcaaggaaattgctgcagttattgaaacggtgtgaagacggattctttggttgataaattgctatcattctaaaggcatggacttcactttcggcaacaa

SEQ ID NO: 10272 - DNA, 773 bp, Homo sapiens
  misc_feature 479, 480, 481, 483: n = A,T,C or G
aggtacgtaaatcgtgccaaaaggaattggatgttgcatgccttcaatctgtttttgaattatttgtagatacaggcaacatctgttccactggacagagatatactacaagtgctaataacttggaaagacctgactttaaaagtttgtgcttgggagttaaatatttttaaacatatacattttgaagttctcttctacataaacttaaaaattttaaattgcaaaataataaagaaaatatttcacaaagtaaaccaaagtctgaaacttaaggaatttttttgaatctatttaattatgtgttaagtgtgcctactggcaaaatatattattgcagctccactctgttaaacatagatggggaggggagaagaagaactaagagacctatctgtaactatgtaaaaagaaattcatttggggcaaaagctgtgtagtcttgtgaggagatgaatataagtaaaactaaaatccgnnntnaaaaaatttaaatatttataaaaggtcctgcccgggcggccgcccgggcagggacgcggggacatcaatgcagagtccctctgggaatttacaacacccaacaccccatgagttcattccttaagaaggaagatggaacaagtgttttaattggttggacaattgaataaaaaggtccattttcaggcttactctagaaatttaatttctaaacttagttggccttctttcttttgggagaaaacctttttttggggcactggggaaaatttggccccctagaaatttaa

SEQ ID NO: 10273 - DNA, 438 bp, Homo sapiens
ccgggcaggtactagagccagtaggtatctcagcaatcagaagactgtagatcctcaatatgtgttaaaatgagaataatgtagctcccaagaaaacataagatctaaaatgtaggctcattggccatattaaatttagaatattcagtggcactttgaaaatgccaaaatccttctctggccctagatatcaaattatttgttacatgggttatattcttctctggttgaattccatgactgaaaagattagatggcaaatgccagcgtatagcaaacatcatctgttgccaaatcataactgattcatttgtaactatgggcttcaaagaggaaggcaggtgaaggctctcattcatttgaaggcaagctctttgtgcctttttttcttttaaaatctgaattgcttacctgttcctgttccttacctgttcatct

SEQ ID NO: 10274 - DNA, 990 bp, Homo sapiens
  misc_feature 257: n = A,T,C or G
ccgggcaggtacagcacacctgcagtaaggaggcagaagtgggcacaggagtgtgctgcctgatgaatgctcacttgcacataagctcatgcaaccagtgcccagatggaaacggggagcatgctgtctcccacccacgacatacttatggataacagtcgtgttgctggccactcagttctcaactccttactgtgccagcattggcctgtccacggcatccatgcattcccaaccctgttggcgccctcttggangaatctgttttgatgcataatttcatgatgtttttctcagccctctagccctacagaccttccagggctgggatcattccgggatagccttctaacctctctaccttacttccttgaacttcaagcatttggttgtttcaggggcactcacagtagactagacatgataggacacgcatgtcgtactagagacatgaccagatgatagacttgattagtggcactggagacttcccattcgtactaggagacgtaacaactcatgatgacctgagaccataccctcttggacatcatggtatcacttaaggatcagctactaagaaactatgatgtgattctctccgtggccagcaatggaacttctgaatattcaaagcttgatcggatacatggtcgaacacttctaaggggtggggcaccgggttcccaaacactgttagtttcccgtactaagagaagggaataaatagcgcgctcttgtggcacaatacgatgggataatgatatgtattgtctggagaagatattatgttgtagatgtgtacaacgaaatgacatgacaacatgatgataatgtgtgaagtcttaattgattatatgacgatatggtgatgcgatgaagtaaatgtgaacgtagaaatgatgatgagattggtacgtagatgtcgatgatggacatgatgtacatgacgatttaataatgtggctatcatgagtatatatatattaa

SEQ ID NO: 10275 - DNA, 360 bp, Homo sapiens
aggtaccaagaaaattagccagccatggtgggacacgcctgtattcccagctacccgggaggctgagaggcaggagaattgcttgaacccgggaggcggggcttgcagtgagccaagatcccaccactgcactccagcctgggtgacagtgagactctgtgtcgaaaaaaaaaaaggcaactagtcacaaataatttgttttcttctattaaaaattttaagaccattattgaaattgagagtattattctcctaatccctttaattgatcagttaagagttcctagaacaacttgatattccgattaaaatctttgggttaagtcctaccttttgaaatagggataatgttttgaaata

SEQ ID NO: 10276 - DNA, 397 bp, Homo sapiens
ccgggcaggtacatgagatgggagctcgacacattttatttggagaataaaagaaaatatgccgtcatcaaactagagcgtgttggggggcatctggtttacagaactaagtcaaggagaagaactctcaagcaatggtgacatctgccagctctgcaaagtgggccctgccttgtcacacaagtctccttgggcaaatgttttctatgtagattttagacactttcctgtgactttctcaaggtcttttggtgacacatgcagcttgaagcttttgcaaggggctggagtctaatctcttcttgcccagcttggctgcaggagaagaagggagatatgttaggacttggctttgactgaggtggtgtagcctggggttgcaagggctgttgccaag

SEQ ID NO: 10277 - DNA, 404 bp, Homo sapiens
ccgggcaggtactttatgatattctaccaataggacagatcccatttatagtattaaaatgtgaaaaaagtatatattactagctaataaaatttctaattatttcatccctgaacggtctgagaaaagaaggaaaaattcctaatatttttatttgctcatttgcaactttactggagtttaatctttagaaaaagaaattttaatttaatatcagaatacaatgtttaatatattcaagttaagtttttgacaacttgacagtttatttttaattcatgtgtttcagagaagtttttgttacctaggcttgggcttttaacataatatcaaatttttatatatggattttatatttttttactttaggaaaatgggttatagattgcacatctagcacaaat

SEQ ID NO: 10278 - DNA, 458 bp, Homo sapiens
ccgggcaggtactccagcctgacagcctgggcaacagagtgagaccctgtctaaaaaacagaaaagtaaagaaaaaaataaaataattaattaagatggctgagtgctggctggtgttgtctcctcagcaagacagaagctccctgagggccagcgcccaccctgatttattcctcctagtgtccttgggtccccagctgcctggcacagagctttggtccttggtgctcggtagaagtgtctggctgatgtataggagggagcctgagttacaatcccccctcccctgccactcagtcttcgtgtgacattggaatgtgtcaacttctttctttcttggggctctggggcccattgaaaaccggggggtccttggggcctatgaatggtggacccttttgaatttcagaacttctctgcctggtcatgggtgcactcatggagttcaagtgtagaaa

SEQ ID NO: 10279 - DNA, 339 bp, Homo sapiens
  misc_feature 339: n = A,T,C or G
aggtacctttttacattcccatcaacaatgcacagagactccaatttctgcacatcattaccaacactaaactttctgttttcctgatagtagccgtcctaatgtttgtggtttataatttgattaagatagcatatctgaatattttcttattttttccatctttgaaaattaaaatagactgaatttttgttacattgtctttaataactaagttgcttgcctttttactaagcagattttttttgaagggatttatgtgatagtctctgtctttttatcttgctggaagtttgatccactcaactgacagctttatttttctttcctcaaaagctn

SEQ ID NO: 10280 - DNA, 381 bp, Homo sapiens
ccgggcaggtacaaaaattagctgggcatagtggcacttgcctgtagtcccagctactcaggaggccaaaatgggaggatcacatgagcccagggaggtcgaggctgcagtgagctgagattgcaccactgcactccagtctgggtgacagagtgagaccctgtctcaataaagaaataaagaaatagaagacaaaatcgtggtgtaattattttgtccctccctatgcaatttacctcttctcatatactgtatattatttctcataggagtctaaatcagaggtcatatctctgctctttcaaaattcaaaacatcttgaaaacagccagatttccttctcaaaaagttacatgatttggccagatgtggtgactcata

SEQ ID NO: 10281 - DNA, 399 bp, Homo sapiens
aggtacctacctgcggtatctgatcagtttctgcctagtcagatgtgccctgttgctgagtctgcttgggtggggagcataggaaaatggggcaagtgcttcatgagggagctgttctcagccgccccctctcccaactccccagctctctctccttgttctgtctcctgtttctgggctctaatcctggtcaggcccaatgccccttgcctgtgatgctgggtctgcagttttgctcgccgtcctcgctttgccttcttgcccgccacttccagcattcctcctctgctcagcttctgagctggtgtcaggtttctacctgcctggccactgagcccacctgaagatgtctggccaattccttttagcctctgccttctcaccatgccagggatgctt

SEQ ID NO: 10282 - DNA, 440 bp, Homo sapiens
  misc_feature 18, 29, 97: n = A,T,C or G
gaatcgagctaattgcantactgcgaatnggtgctccgccaaggtcgcggccgcccgggcaggtactgcatggacaggagttgcttacatctgatgngaggaaatccggagatgaatgttttgtttacctcatgggattgtggcattgttagccactcaatccaaccagattataatgtattaagaatttgaaacatcagccattgtggtttcacatacacagatgtatattattttgttagccaggtaatgacagtcattgtcaagtggaagatctaatcagactgaatattcattcatgccttgctttgtcaatagggaaaaaaatttcaaggacaatcggatattctctcatgactgaacctttctttccatctacctgaaggcgaggaaaggaggagggagggaggcttggacagcacatcctccccgattagatc

SEQ ID NO: 10283 - DNA, 386 bp, Homo sapiens
ccgggcaggtactttttttttttttttttttttttttgtatttttagtagagatggggtttcatcatgtcagccaggttggtcttgaactcctgacctcaggtgatccatccgccttggcctcccacagtgctggcattacgggtgtgagccaccgtgcctggactgataagcacaaattttagacagtggtcatccctgtgggagggggacagaggataaggatggacacccaaaggagtgaaaggtgtggtgagttatagactaggtagtgagggtccacacatatccactggatcttgagttaaactttaaatactttatgcatatcctttaggatcaacttaaaaaacaaaacaatacaaaaagattatttcctccattttt

SEQ ID NO: 10284 - DNA, 401 bp, Homo sapiens
ccgggcaggtaccagctagctggaaaagcacctacaatgatctagtggatttggcatggatatggcctacagatctgtagtggggacggagaaagggacgtggtgtcagtgtgagctgtgtggaagctggggctcttcacttgctcaagaagtctaccctactgtatgttctcttatgtgatgtgagctgtacttttttttaaagatgactattcttacttcattgctaagaattggacacaatattttcatttcttcactcatcatgatgacatgcattatactaataagttgtaatttttgatttattagcagctttaagatttatttatcatttataatgctaagtaggccatcattaggtgaattgttttatgtgtggccacggttttttttaagct

SEQ ID NO: 10285 - DNA, 402 bp, Homo sapiens
aggtacttttttttttttttttttttttttttttttattttttttctggagtaaccagtgtgacataagatctgtttgtgttcccccattttacaaaagaaaatttaagtctgcaacttcccctaggcatctgcagcagagagtggatttgtcaacatgcaaagctgctgatctgcccctgcatgctgctccctgccctaagtgtgaggaggatgaactgccctcttttcacctgcacctccctggatggaacagagcatctccataatactttatgcagaagtatcacttttatttaacaccagaaaccccaggcaccaactttaaattttaaataaaggaaaatgtggaccacttgcaatgttacaaagcaaaaagaaacacaagaggccaatatttcaa

SEQ ID NO: 10286 - DNA, 369 bp, Homo sapiens
ccgggcaggtacagcattattagctggggctttcactgaaaaccccagggtctctttctattgtccccatatggttggagtcacaagagtgggagagatggccaagctctctgcagaggatcctggcagcagcctgaaccctcttgctacttccatcaaaggaaaaaaaaaatcaaatatttacccccacgagcttataatattacagagaactccaccatcctgccctgcaaaatatcctgggatttgactaatactagagctgcttttctagtccttgagtgactaggaaggaagaaccaaaagcttgactcccctgcagcagtgagttctctggctttggtttgcacaggaaaccatagggttcac

SEQ ID NO: 10287 - DNA, 435 bp, Homo sapiens
aggtacctgagaataatccatgacattttttcctccctagtccccatagccagtccatcaacacatcctattggttattacttaaataaattagatatattaaatatctataaaaatgtatcttgaatttttctactacattttggactgcccccatcctacttcaaacccatggtcaccttctcccatggtctatgaaggcagccgttaacccatctctttatttgcattgttacctgcttttcattaactctttgccacatccctatcctttttataatcctccagtggcttcccttgaacttaaaataaagtctgaagtgtatcattctggcctgggtagggcttgaaggattctgatttcacctccttttcctgccatgcccactcccttctcctacacttcaactatgacacatttcagttttctaattt

SEQ ID NO: 10288 - DNA, 388 bp, Homo sapiens
ccgggcaggtacttctctgcagccttaaactcctgggctcaagcaatcctcccaccttagccctccaaatagctgggactacggacatgcaccattaaattaaaaaaaatatatatatatatacacacacacacacacacacatagtggagggggtctcactctgttgcccaggctggtctcaaatccttggccttaagctatcctcccaccttggcctcccaaagtgctgggattacaggtgtgagccactgtgcctggcctgataaggtgatatttgagcagagacatttaaaaagtgagagaagcagccatgtggttatctacagtccaatattccagcacaagggacagagggggaacatacttggtgtgtgtgagtaacatgg

SEQ ID NO: 10289 - DNA, 456 bp, Homo sapiens
  misc_feature 21: n = A,T,C or G
ccccatgtatgagctacatcngctatacggcgaattggtgctccaccgaggtggcggccgcccgggcaggtactgggattataggcgttagccaccgcgtcatgcctctaacgagatatttctaaaggttaggccttcagtcaagaattttaaagctggatcttagaggttatctaaactaacctctccatttcatagatagggaaagtgagtcccagaaaagcactggtttggacaagttcagaaagctaaacagtgactgtggatgtatgattctgtctcttaactcctaatccaaatgtcttctcactagataaggctgtgccttctacattcgaaggctcaaaccccatggatggatggagggaaggatgggtgtgggagagtaaccataaaaagtgtcttttctccatgggaacttattttcaaacctttcgttgggcattttctctttga

SEQ ID NO: 10290 - DNA, 381 bp, Homo sapiens
ccgggcaggtaccgggccttgtgccaaacaccttagatgggttatctctgaacttcacatcagtcatatgaggtgggtaatatcattatctacattttacaagtatggaaactggggattactgaggttatttgcccaaggtaacacagatggtagattctggagccagagttggaaactgggtagtttgctccagacccaatgatctagcatcctagatgtggtccattagggctctctcttttcatccgtttgtaaaagagaagttttcactttcttctcaaaccattgagaaacaacttggaactgggaagtgcaaagggaagaattctaaagaaagccgttttaaaaagggagaaagaacaagaaagcaggacaccc

SEQ ID NO: 10291 - DNA, 401 bp, Homo sapiens
ccgggcaggtacacaattagtaaaattcaacctaaaaaaaactgtcgattttattgtatataaactatacctcaataaaaatagatagggtaaaaaaaatatgacactagaatttcattcccatccctttggccatgttcaggcagaggttgggcagtgtatcaatacacaaccataacgctaagagatgatctcctcaggtgcattgagggtgggaaagggcaaatgtgagaactaatggtaaccagcccatgtgccctagaacaaaaatggctcctgatccatgtttgatacgtgtcccataggtggctggccctctgctgcgatgcacaagcggcactatcggcttcgtgactcaacgcaaatgagagagaacactaagtcaatgaacccagggaaag

SEQ ID NO: 10292 - DNA, 382 bp, Homo sapiens
ccgggcaggtactgctgttagtggctgctagtaggttattcagccgacctcttctgattctgctttgctgcctgatttcaaaagagttgccctatactggctttcagtcacagcttgtaaccactgcttgtttgcatgcatccccatcattttcatatgggctctttttttttttcttcttcaagttaggaagcaaaagaatcaggagcatttttatatgataaaagatttatataaggccagctagaatcaagccaaatgaaattcagctggaggggatggtaaaaaggctcacagaacttgtggctgccagaaaaatcagtgttctttaaattaaagagggttcagctagcaacgggaactctgactttgcattcatatt

SEQ ID NO: 10293 - DNA, 402 bp, Homo sapiens
aggtacctacctgcggtatctgatcagtttctgcctagtcagatgtgccctgttgctgagtctgcttgggtggggagcataggaaaatggggcaagtgcttcatgagggagctgttctcagccgccccctctcccaactccccagctctctctccttgttctgtctcctgtttctgggctctaatcctggtcaggcccaatgccccttgcctgtgatgctgggtctgcagttttgctcgccgtcctcgctttgccttcttgcccgccacttccagcattcctcctctgctcaacttctgagctggtgtcaggtttctacctgcctggccactgagcccacctgaagatgtctggccaattccttttaacctcttccttcttaccatgcccaggatgcttatt

SEQ ID NO: 10294 - DNA, 441 bp, Homo sapiens
aggtacacttctaaataaacccctgggtcaaagaaattaaaaagaaaatgagaaaatattttaaactgaattataatgaaaacatagcatgtcagtatttgtgggatatacataaagcagtatctagaaacttacggctttgtagcttaaatgtttatattccataagaagaaacattacacaaaatccctatcaaaacattggcaaaaattaaatccactaacatatgtaaaaggataatatattatggtcaagtggcatttatccctggaatgcaaggctggtttatatttgaaaaaatcagttcatataattcttcatattaacagaatgaaggtgaaaaaccgtatgattatctcagggaccacaggaaaaagcatttgacaagatccaatgtgataaaaaaaaatctcagcaaactaggactagaggggatcttcc

SEQ ID NO: 10295 - DNA, 804 bp, Homo sapiens
  misc_feature 9, 10: n = A,T,C or G
aggtacttnnttttttttttttttttttttaatagagacagggtttcaccatgttagccaggatggtctggatctcctctgacctcatgatccacccacctcagcctcccaaagtgctgggattacaggcgtgagccaccgcgcctggccgggtcaggctctttctaatctgtttaaaaccatatcacccagaaggtattcagtatatacttatttaaatgaattgaaagtcatatgagcagcatggacttactactttaaaaaccacattattagaaacctaacaccttggaagctctgcatattctgaatgaagaatatactaaaccactcagagggaaatagttattaaccattttaccacagacgactaaacaactaccatggcccttcccttgtttcagctggtctgggtcttaaaaagactttggaaaacccaatctaccctcctctagcagcaaatcaattcccacagtcagccaggaggttctaaccactgccctacctctttcaccaaggaacaagccctagatttttgctgtttctaaaaatatgcagcttttaaatatatccatcattttggtgctctctactgcagagcttaataaagcaaagccacttgaattcaggagatgcccagcttaagtacctgcccgggcggccgaggtactccgtgagaaaaaatccagtgccggaacttgcattaaaaaacgaagggagattgtgtggttcccccaaggagaaccagagaattgttggcggagggcactgtgaatcaaagggagaaaaaaaaaggttgtgttt

SEQ ID NO: 10296 - DNA, 393 bp, Homo sapiens
ccgggcaggtaccataatttagttattgctcagtggttgaacatttaggttgcctctagatttttctatttattagaaacattcagggtttctagatttttcagttttataaggaacattccagtgaacactttcgtggaagacttttgcaggaatttcaacacctaattttgttacaaccctaactttctccatttgttttgatgagtagtaaatttttattttgaaaaagtcttaaggcaaaataaatgtaatgcacttatatttcaaaaatataattgccatatactacctataaaataggagtatttcaggaaatcaaacaaaaacaatgatttttctcaagcataaagaactatgcctggtatgacctgctccttttgaattattaag

SEQ ID NO: 10297 - DNA, 419 bp, Homo sapiens
aggtactttttttttttttttttttttttcgcaataattacttttattgtatactgcacaatataaacagcatgttgcaaagaaatatatatatttgtgtgctttgtgtatgatataaatccatttctgcaaaataaaatacaaaccgatttatcttacaaatatgaaactcaatgaaaaaacaaatcccaaaataatactatttatgtaaaatatagaagctaaacaataaattaataatacatacataaatagcaaaagagtaaagcatagtaaaaaataataagcacccaagtaaagaaaagaaataacgtaaaatttgggatggagtgatttctatgacggggaatagaaaagagatgtggccacgcatgagaatattcaggctcattggtaatgttctgtgtcttaggcttaga

SEQ ID NO: 10298 - DNA, 398 bp, Homo sapiens
aggtacatttgttgggggcgtgacattaacatataaccacttagagtggacatgcagttagagaaaagtcaatgagctggaaccaagctgggaattccaacatgtagaagttaaacacaagaggaggagccagcaaaggaaacagaaacagagcttccagcaggtggggggcatttggaagaaaacgatgccatagaagccaagatgaaatagacatcaaggagaaggaagtagtcaattgttttgaatgctatgaagaaagataagaataggtaaatagtccttatatttgataacagaggtcaactactgatcttgatgagggggtttcaataagaatggtggggattatataccttccctgggattcaactgaagttaaggaagggattaccgat

SEQ ID NO: 10299 - DNA, 391 bp, Homo sapiens
aggtacatgagatgggagctcgacacattttatttggagaataaaagaaaatatgccgtcatcaaactagagcgtgttgaggggcatctggtttacagaactaagtcaaggagaagaactctcaagcaatggtgacatctgccagctctgcaaaagtgggccctgccttgtcacacaagtctccttgggcaaatgttttctatgtagattttagacactttcctgtgactttctcaaggtcttttggtgacacgtgcagcttgaagcttttgcaaggggctggagtctaatctcttcttgcccagcttggctgcaggagaagaagggagatatgttaggacttggctttgactggggcggtgtagcctggggttgcaggggctgttgccaa

SEQ ID NO: 10300 - DNA, 397 bp, Homo sapiens
ccgggcaggtacttttttgtctgttagtgtttctctgtgttttcctattgtgctgatgtgagcttgcactgcttttgtaattaaggataaattttatttatgcatttatgtatttatgtatgtatgtatttaaaaaaattaaaggttgtatataaaaatagttattaagtggagacacttaagaataatacacactcctctaaataaaacggaaaagcctacttgctgcttgcttgttgcaggtagaattgacccgatcccctgcagaaatccctgccccctcctctctgtcccaggaatgccacgctgcccttcacgctggcatgctgcctgtcggatctgtgctattccttagtgacctgtagattcattatctgtgtcgccacaaccttgtcct

SEQ ID NO: 10301 - DNA, 382 bp, Homo sapiens
aggtacatgcatccatggctcacctggggtcctacctgttacacagtaatgactcaagcagccaaggtcatggggggctgtagaggggggctgcactagctgctcaagttgatgttacagaacctgctcccgtctgagatccggactccacagccctgcatgagggccgctcctccatctcagcatcctcaacctggtagaaaccggtcaggtggtctcctaaccaaggctaaggcaggctcagtccctgagaaacctgtggggtattctttgagtcctggcaccactaaccaaggggtctcaagaggatacctgttagcaagcttgtccccagcgcctatggactgaaggcagagattagagggacggtgcgctgggcagc

SEQ ID NO: 10302 - DNA, 400 bp, Homo sapiens
aggtacattcactctgtgttttattaagttaaacattaacaacgtcaccataaaaagcatttgctagcataaatgctgatctaccataggaaaaaatattcacttttctttgttattggccaaaccactttaaactatatgttaaaaaaggcctttcaaagttaactttgtgaaaaaacatttgcaggtttcccattgcagaaggacatagcaatccaataaggactgagatatatactaaaatggtcatttcttgggggctactgagctacagatcccagaggagctcaggcttaaagtcatgaaatggcttccgtggaaccaggcctcaattttatcctgattaaatttactatatctgagaacacaggtggactgagtgggaggccacccagaaatg

SEQ ID NO: 10303 - DNA, 390 bp, Homo sapiens
aggtacaccaccaggctctgagttggttaacaattcgctgagaagacagctctagaattgcttctgcctacgaagggtgaggatgggtatatataagagatttccaacctgacaaatccatttgggaaggctgaatttgcagtttgaggagggagtttgttcaaagagcatctgcatgaacattctgctggagcagcctgtgggccgaaatccacaaggctggcactttgaggttcaacttgattctacaggctctgcggtctcatcccaaagtcacagcccacacaactggcatttcccctggtggtttggattagacaacagtccccaagctctactttggaggcaagatttaaaaaaaaaaaaaaaaaaaatttgggggtgggggcc

SEQ ID NO: 10304 - DNA, 393 bp, Homo sapiens
ccgggcaggtactccctttccctgactcagtcttttattgatgaaggcagggatgggatggggagagctcacctggcaaagactccacacaggtgtgcagcacaccctgatggggccagaaaatgtcactgtgagccctaggggtgaaagacacagtgatgggctgctgggcaactaccaagtgtagagatcctgagtgcccagagagttaccaaccacttcccttccctgtgcagatcagtggaggcagatacatacacaaaatgggaaggggaaagaaaacggctttcagaactccccaccatagagactataagattattccagaatggccccaattttttcactgcccactctgggccaaacagtgtccatacactacgtcattcttat

SEQ ID NO: 10305 - DNA, 866 bp, Homo sapiens
  misc_feature 338, 344, 345, 350: n = A,T,C or G
aggtactgggattataggcgtgagccaccgcgtctggcctctaacgagatatttctaaaggttaggccttcagtcaagaattttaaagctggatcttagaggttatctaaactaacctctccatttcatagataggaaagtgagtcccagaaaagcactggtttggacaagttcagaaagctaaacagtgactgtggatgtatgattctgtctcttaactcctaatccaaatgtcttctcactagataaggctgtgccttctacatttgaaggctcaaaccccatggatggatggagggaaggatgggtggagggatggatggatagatggatggatngacagnntactnattcatacagatatgcaagagagatggagccaccttcccatcagacagggggcttattgctagcattgcattatgacagctgtttatagtgcctggatctcattttgtaaggcttccttacctccggtgaattcagggagtgttattaatccagcatttctttgaaaccccttcattcaaacacttgtgaccctttgtattaaaaataagggcaattgaccgattcacaatgttcttctatgacgttcaaacagatggacacattccttctcctggagaatatgcaattctggggtcctatggcttcttttcattccaaagaccccccacctgctggaaactctgttactggttaccttgcgcgcctccacccttggtgggagacttgtcaccatgttgagatccctctgtgatcgccactaatgcgcttttctttaactgcagacaaccctttaatggtttaatttaatttacccaacccaataaattctcgccccggcctggcgagaaaacaaa

SEQ ID NO: 10306 - DNA, 435 bp, Homo sapiens
  misc_feature 435: n = A,T,C or G
ccgggcaggtacgaaaaaaatcaagctactaagccaactgataatatagacgcaaaccaattgttaaagaacaggtccaaattggagcaccattaaccaacaatcagtgatgcataatgaggctattgaacaagtaagggctatttgcctcagggcctggggaaaaattcaggacccaggaacagctttccctattaattcaattagacaaggctttaaagagccatatcctgactttgtggcaagattacaagatgctgctcaaaagtctattacagatgacaatgcccgaaaagttattgtagaattaatggcctatgaaaatgcaaatccagaatgtcagtcggccataaagccattaaaaggaaaagttccagcaggagttgatgtaattacagaatattgtgaaggcttgtgatgggaatggaggaactn

SEQ ID NO: 10307 - DNA, 420 bp, Homo sapiens
ccgggcaggacccagaggacacagttgaaatgaggcacaattaggaaaaactaggctgtttaatatccatattgagtagctttgcaagttactttcacaaacttccctacagaattggttctaacagaactgttcaaggccaaggatttgtttgttctgggtctgggggagtcatctttataattttaatattccattagaatgccttgacgctagaaggagggtccatctcaatcacatcaataaattgatcccaacctttataaaaataagcttggatagaaaggaaaatccgaagactaaggtagtctggtagaatactagaaggagacatcttttaagaggaggacaagaaaaggcatgaaaacagagaacatggtcctacacaaggcaactggcttcagtgctaccctacaattt

SEQ ID NO: 10308 - DNA, 468 bp, Homo sapiens
gcccctgcttcgattccattcgaataacgggcgaattgttgctccaccgcggcggcggccgaggtactgtgttaatcactttacataaattatctcattttttcctcaagacaacccaaagaggaagtataatttttgcctgttactggtgaggacctcatgctcatagaggttaggcagcgtgttcgttaatacacaacttttttaatgaagggagggatgtcagcccacgtgagctgtctgcagagcctatgctctgatattgctccagctaccacttttaacatttagtgttctgacttactattataatggaagccctaccctatcttctgtgtatttgagaggatttgtttttttattcatatctaccaatgtctgtgaatgactctgacctcaatcctgtgtgtgtctggacctctactagaatgcatttggcatatgggttgcttacccaacacaaggatt

SEQ ID NO: 10309 - DNA, 390 bp, Homo sapiens
ccgggcaggtacaagaactacaagtcctaaaacttctgtccaaaagagagtcaagaagcagctggacaaacttagggttaaggatgactttgttttgccctatcccttggctctatccttttgcttagcaagggctagcagtcaaatcttcctattgccctttctgagtagggaaacacccacatgcaataaacaatgtaaatacttcaggcatggacatttttaagttttcttcaaaaacgccttagcaaatcaatcattataatcaggcactttgaaaaacctcatttttgagtttttcctcaaatactatatttcactcaaaaatattaaggcggccaggcgtggtggctcatggctataatcccagcactttgggaggcagagatg

SEQ ID NO: 10310 - DNA, 380 bp, Homo sapiens
ccgggcaggtacacctttttgaggcagcagcccagagctatgaggtatgctggttgtggaaacgctgtgaagctaatgagggttgaagccgtcattaggatctaatgaacactccgtttgattcagctgagcccagctgaccaccggaagcccagtcagtatcctgtgttcacgcccgatattgcttatgtaggagaaccaaatgaatctacttctgaggtttgaattttgaaggattctctgagagaggtaaaggaatctactagaaaaggacatgggaattttagtgccaggctgacctgaatttgaatttccgttccatctcttcctggttcctacttatactgtgcataagtaacttcctactaagttacgtcccc

SEQ ID NO: 10311 - DNA, 405 bp, Homo sapiens
aggtacttctctactacttttacattttagaaaatagcaactcttataagggtgagtctctgtgccatttctaaattctaaatttgagtttgctgcagtgaagaataactactaattagaaaccaaatatagtgttctatcagttactaattttcataagggacgcttaatttacattctagcaatggccaaacctactgaatacacgagtttagaagtgaaaaccttaaataagtctaggattagactgtattcctaggaagaagtcacattaaaactaactctgactccaagtctaaagatattataaacctcagaacacttattttgcaaaatatattccaaaactctaagttgtccccaagcctgattccattaaataagtgccccttcttctgactatac

SEQ ID NO: 10312 - DNA, 841 bp, Homo sapiens
  misc_feature 307, 364, 454, 455, 456, 457, 458, 459, 460, 461, 462, 463,464, 465, 467, 468, 469, 470, 471, 472, 473, 474, 475, 476,477, 478: n = A,T,C or G
gctgggtcccgcactcttgattcccttgcattcaatgccttaccactctacaactgtcttctaacagagctctattccttaatcaccagtgtaatctatccaccttctgcatccctgtcactgagtagctgggtgattctgggaaaaacaaatgctcagagttgtcttcccaaaacccagctgagctcccaacacaccttccaatccctctcagtttcttcagcaatcatcataccctaataccatgaaattcactatgcacaactctttcccctaactgcagcccaagaaaagctgaaaaactcanaatcctgttatagcttcccactaacctcatctatatccacatctttccagacctctntcctgtcaggttcagaggatttttcctctgcttgctctttattctatccctagggagaccctctgcacctctgctcatccccgcgtactnnnnnnnnnnnntnnnnnnnnnnnnggggaagaccactctgccgcccttttcaaatgttcacttttgcaccatttacaggaaatagcaggacctttgtcattaaagggacaaccacaaaacagattcttggtgatcattaaaacgggagactacttatgcaatcttaaaggtaggccaggattattttgaaaaaaccagtttgaaaaaaaggctgcaattttattaaaaaatatttgagagggaatattttttgccatagaaaaaagtttcccccttaaaaagaattggaaataatctcctgcacccccttgataaaatttccttttcaaaagtcctaagccaaggctgctggccttttgtttaaacgaaaaatttgccgttttatgg

SEQ ID NO: 10313 - DNA, 392 bp, Homo sapiens
ccgggcaggtaccactcacacttcaaggagagatggaagaaactaagtcaagccgacaggagccatgtctttcaagcaagaaatacagctgccagagaacacaaatgcggactttatataagcgtaaagccagcagggtgtctgaggacatcaaatttcattgcttttgtctgtttactacaagatgtaaaaacagtcatttgccaccggggagatgtttcatgaattgaatgttataatttcataatcagatactatgactttaggggactaaatgaacttttcaggaagattattttttttcatcctgtgttcctagaacaggttctagttgtctttcaataagtgaatgttaattgcttaagtagctcctgttagtcctttctggcctc

SEQ ID NO: 10314 - DNA, 410 bp, Homo sapiens
aggtacgcgggtgcttctacttattaagccatccatctacccatcctgctcacgtatgtgtcagacttttagtgcccactgcgtgtgtggctctgcactgtgttcttggggtctaacataatgtaggcaatctgaaggttactgtccaaggggggaaagcaaaaggaaatcacggtataagttttgctttctttaatagcagaaggggctacatcctactgtgggaatgcagaaaagggagtgataagctgccttcatagactgtgctttcattttttgcaaaagtaaatgtaatcaatatgaatttgtggaaagtgtagcatatattgccatgtgttatgactttgagcttattttaaaataaagatggatgcctgtttctgcctaacatgttagtcagtgttatcaaa

SEQ ID NO: 10315 - DNA, 379 bp, Homo sapiens
ccgggcaggtactgctgttagtggctgctagtaggttattcagccgacctcttctgattctgctttgctgcctgatttcaaaagagttgccctatactggctttcagtcacagcttgatgtaaccactgcttgtttgcatgcatccccatcattttcatatgggctcttttttttttcttcttcaagttaggaagcaaaagaatcaggagcatttttatatgataaaagatttatataaggccagctagaatcaagccaaatgaaattcagctggaagggatggtaaaaaggctcacagaacttgtggctgccagagaagtcagtggtctttaaattaaagagggtttcagctagcagcggcaactctgactttgcatt

SEQ ID NO: 10316 - DNA, 372 bp, Homo sapiens
ccgggcaggtacaaagaaagacagacccaaactcctatcacagacccaaattcctatcactctctgattaaaggaatcctttgagtaaataggatttgaaaaccaaggctatgtctactcttggaatatgtcatgattttgtgaatttaaatcatattgactcttggtccttgtcttctcaaacaagcaatccagactttttgtgcatcactgggatatatcagtgaatgttagttttaagacattgcaaattaaaacctggttttagaattagtaactaattttatgggcattagattaacctgactatctaaagcatcagttgctcaaaatattttatccttaaataaaatgctatataaagatccacat

SEQ ID NO: 10317 - DNA, 385 bp, Homo sapiens
aggtactgcatggacaggagatgcttagatctgaggtgaggaaatccagagatgaatgttttgtttacctcatgggattgtggcattgttagccactcaatccaaccagattataatgtattaagaatttgaaacatcagccattgtggtttcacatacacagatgtatattattttgttagccaggtaatgacagtcattgtcaagtggaagatctaatcagactgaatattcattcatgccttgctttgtcaatagggaaaaaaatttcaaggacaatcggatattctctcagatgactgaacctttctttccatctacctgaaggcgaggaaaggaggagggggggaaggcttgggacagcacatccttcccgattagatcc

SEQ ID NO: 10318 - DNA, 371 bp, Homo sapiens
aggtacgcgggggtagctgggactacaggtgcccgccaccatgcctggctaattttttatattttttagtagagacagtgtttcaccgtgttagtcaggatggtctcgatcttctgacattgtgatccacccgcctcggcctcccaaagtgctaggattacaggcgtgagtcactgcactcagtcaggttttcaggtgctggttccatggctcttcctgagccgaaaataaggaaactccatagaccttgtccactggaactcgttcccatctaccctccactctatccagggtgatggatctctgcagtaagtggaagagttcttcatggcccccaaggttatatccatctagaacttcagcacgtaatt

SEQ ID NO: 10319 - DNA, 383 bp, Homo sapiens
aggtactttttttttttttttttttgtttgttttcaggcctatatggctgatgctcagtaagcagtgagatgagctgcaagatgagtcaggagccagctgatatcagacctttgcaggacacagaaagatctggattttatcctaaatacaaggagcgtccattaaagaattttaaacaaaaagaaaagaagggagcagacgcacacagcgagagtggaacgtgcacaaggccctcagagagagacagacatagacaaggagatgttccggtcctcctggcctgctgggtcccatgaggcctgtgtttcctttagtttttctttatgtctccattaaacttctttctctacttaagattctgttctttataaccaaaatatct

SEQ ID NO: 10320 - DNA, 850 bp, Homo sapiens
  misc_feature 358: n = A,T,C or G
atgtactaatattcagtgtcttgaactttcatataataaaattactcgaattggtaagaacaatgaaatcttaatatttaaagatatatttctcataatttattgtgttttatttattcctttgtaggagtaggccccatcacaaatctgcatattttatttatgttatacttttaaaatttagattaaaaaaataaaattacttttaatgtctataaaaggaatatgctctcccaccactggcaactctgtagatcttagcagttagtatactcacttctctgtttcttttcctacaaccaatagtaatttgagctctatgggaatataacaacttgatattgtgccatgatatttntatggatcatctgcttcccaaatgcctcagcaattgctgtaactatttgctggtaaacctttttcatcaccactctcattaactacatacatcacttggacttatctttccttctttaaaataagttgcttaaaccccatgaagatttattaggcttcatttccctaaccttttaacccttcagaactttatctacatggaactatattggcctcctttcctatattctaataattgggtagggtggccatgaaaattttttttctaacctagggacacgccctttatttttggttaacccatttttttgggcccccactcttaccctaaatttaaataattaattaaaacccgggaaggggcttgcttttgcccaagcttggtctaaactctgctcaacacattgcccacccaatttcccaaacccctgcccgcggccaccgggaaagactttttctctatttttgtttatccgaaaaaacttccgtctag

SEQ ID NO: 10321 - DNA, 709 bp, Homo sapiens
aggtacagctgaactaagttgggctaacaaggcagatgatgggctccaaactgtgctgcatctgtctttatggtggccctctttattacaccaagatccccagacacaacctgctggcccagaacactgcctgctgccaactagagcataacctgctcattctctccaccaccaagtgctttatgggccaggacacagcctcctgggcagtggtccttgaccttggaatctgaccttgacactgacatcactggaacattaggaaaaacccatgagccttggactccctagagaccagctaaatcagaattgctgcagtggtgctggggcattttccaatgacaaagtctctttctactcaagaaataaactcaattctgactgagtcagggtttcatgaatcaagcttcatgaatacttatcccaaattatttcacttatatgttgtaagatgttcccatttttgtgagttttatattattaactaagttaatgggaaatgaagtgtatctgttaaaacctaatcaatattaacttgttataaatattccgcaatctaaactgcttttacatcattgaaaagttataaaaattagcaaatctgatagcaccaattcaataaagcaatttaaaattacctagtagcacattctgtgaaactttgacaatatgatgttacttggctatgatataatcatgtacctgcccg

SEQ ID NO: 10322 - DNA, 411 bp, Homo sapiens
aggtacttgcaggtggtttggcctggaaaatctagatgagtggtttttaaatttagttgcttattagactcaagaaagaaatttaaaaaacaatactgattactgagaccagcttttctagattcttcattcagtaggagtaaggaaaggccaatgaatgtgtattgataaaaaggttcctggccgggtgcggtggctcacgcctgtaatcccagcactttgggaggccgaggcaggtggatcacctgaggtcaggagttcaagaccagcctggccaacatggtgaaaccccatctctactaaaaatagaaaaattagtcacgcgtggtggcaggggcctgtaatctcagctacttgggaggctgaggcaagagaattgctggaacctgggaggcagaggttgcagtgagc

SEQ ID NO: 10323 - DNA, 408 bp, Homo sapiens
aggtactgatttatgagatttagtaggtggaaggaaagcagagactaacttctgctatttcatctaccatgcagagggttatggggatatcttgttgctttgctttcagcactggcacaagtccagggcccatttgctagcagtgtgggtgttaagaggcaggatgtaaggtatcacctgtgctggtgaggaacacagtgaggagtgtatgatttgggagctgagagcagtagcagtggggtcagcagcttcctgattgggtggtcccaggatcaaagtggttagtgatccgctggcttccttgctggggtttgctttctaactgtggcaaagcactgtggttatggaactggccgtgacccaaggtggcagggagcttcctgatcccagaagaagcagcaggtttca

SEQ ID NO: 10324 - DNA, 849 bp, Homo sapiens
aggtacacacttgcatgagggatggggctggtttacaggaatggaaccagcttggaaagaagacagaaggtgagaagtgaatacttgttggtatcatgtaagaacagagtgaagaaaaaggacaggccggcccttggttatttttaaatttcaggaaaatggattggccaaataatggggatcaaaaataaagggtgtttttattatgagccaagtgaaaattaaatttaagataggtatgttgatatggtttgattgtgtcctccaaagttcatgtgtaggaaactgaagcgccagtgcaacagtattgagaggtagaaactttaagaggtgatcagtgctgggtgcagtggctcacgcctgtaatcccagcactttgggaggccaaggccggcagatcacctgaggtcgggagtttgagatccagctgatcaacattgaaaaaaccctgtctttactaaaaattccaaattagctggggggtgtggcacaatcctggaaatccagcttactaaggaggctgagggcggaaaaataccttgaccccacaaggtggcggttgcaatgacccctaaattgcgcattggacttcaaccttggccaacagaaggaaaattttttttttctaaaaaatgcattaaccttaggtccttgccggcaggccgttttaaaacttggattccccgtgctgcaggatattgattaaacttatcgatcccttcccctcggggggtggccggtccccatttttgtcccttaaggagggtaatgtccccttggcaaataagggcaaatggtttctgggtaaatttttccctaaaattcccaaaaacaaccgggaacaaaggg

SEQ ID NO: 10325 - DNA, 409 bp, Homo sapiens
aggtacatgccaccatgcctagctaagttttgtatttttagcagagacagggtttcaccatgttggccgggctggcctcgaactcctgaccttaggtgatccaccctcctaggtctctcaaagtgctggaattacggtgtgagccactgcgcccggcccttagtagcatcttttaatggaggtagagttgagatttcagtgactaacaactaaaggtattaaaggtaggggtttatatgatacatttgcattttagaaaactgatctaagcttcaatgtgaagaacagattgaaatggaagggggagaagactagaagcagaaacattactcatttaagtaatctggaccatgaaactgaaaaaaagtatagggactccaaaagtcataaagaagtgaaagcaagattt

SEQ ID NO: 10326 - DNA, 408 bp, Homo sapiens
ccgggcaggtacatgtggcaattgtttgccattccctttccatcattaaaagggccacaaggaaaacttagtaacggagtgtgaaatccaagcttttttacaaggaatcctgtgcaagagctcaggagctacttgttttccatatgtagttaatcctgtctgtgcaaagaggttgtcaatctgatcccagttctctgccaactcgtttttgtgattttgagcaaacccctttctaaagcacaagggatctatctactgtgggcctgagctctgggactcttcttctcagcaggctgttcactttggctcaagagtgcctccatccatgtagggtgactttgctaatttgcacaaagtcgccctatgggctagcagcgggcctatcccttcccgtttctgagcttcagt

SEQ ID NO: 10327 - DNA, 189 bp, Homo sapiens
  misc_feature 38, 39, 54, 55: n = A,T,C or G
ccgggcaggtactctggtaagcttgttgttgtccaagnntgaagctcccttcannatgaagcgtgttggccagagagccattgtcaacagcagagagctgttgaactcaatcccacttaccaaatattcagcctttagctagctgatcactttctgatttgtggcatcagatgtaattctaagggaagg

SEQ ID NO: 10328 - DNA, 466 bp, Homo sapiens
cgcccatggtcgacgcaatgctgatatcgggcgaaagtagctgcaaagcgctggcggccgaggtactcagtttactgagcatgttttattctactttataataacataagtcagtctacattttataaggacgtttacatattaggtagtataccttgtgtgcttgacgcaaatgtggccaatttagggtgatttagtggaaaatggaatcatctggtatagtaaacagcttttgttttctgttacagacataatgttaggaaaattgaaataaatacaaggggtagttatggtgaaccctgttaaactactgttttaaaaacagtgaatttcagaaaaatctcatctgttctgagtgatttcattcctttgagaagttaaactggctctttttaaaacaaatgcatccaggcgtgcctggttattgctttatttaaagctggaagcaaggctcctttcggttctt

SEQ ID NO: 10329 - DNA, 369 bp, Homo sapiens
aggtaccatgtctatatgactatatgggcaacagaaattatcaacagcaacaggaaatcaaaagaacaggaaaggaagatgataaatttaactggggacatgctaaatctaagttcatgatgaaacatccaagggggactaatagccagaaacacaggatacaagctgggaaaatacgaatttgatttagaggggagaggcactagagctaatcattagattcatgagtatagatgaattcaaaatgtgaatgctcaaacagaaaagccaaggataccagtgaaggaatatttacatttaggttacaaggaaggaagaggaaggccaggcatggtggctcataccctcaatcccaccactttgggaggc

SEQ ID NO: 10330 - DNA, 405 bp, Homo sapiens
aggtacatttgttgggggcgtgacattaacatataaccacttagagtggacatgcagttagagaaaagtcaatgagctggaaccaagctgggaattccaacatgtagaagttaaacacaagaggaggagccagcaaaggaaacagaaacagagcttccagcaggtggggggcatttggaagaaaacgatgccatagaagccaagatgaaatagacatcaaggagaaggaagtagtcaattgttttgaatgctatgaagaaagataagaataggtaaatagtccttatatttgataacagaggtcactagtgatcttgatgaggggtttcaatagaatggtgggattatatacctccctggattcaactgaggtaaggaaggcatacagaatagagacaggcccta

SEQ ID NO: 10331 - DNA, 456 bp, Homo sapiens
aggtacacgatgtccagtagacctactggatatgcaggcctgcagctcaggggagagctgggttaagaaccgccaaggcagtaatcatctgcatttagatggcgagtgaagccatgacaggggctgaaatggcccagcaagaataaatcaaaccatgagaaacacatacatttaagaataaggagatgtggtcaggcgcggtggctcacacctgtaatcccagcactttgggaggccgaggcgggtggatcacttgaggtcagtagtttgagaccagcctggacaacctagtgaaatcccgtctctgctaaaaatacagaacttagctgggtgtggtggtgcgtgcctatagtcccagctgcttgggaggctgaagcacaagaatcgcttgaacccgggaggtggaagctgccatgagccgagatcacaccaccgtactctattctgggcaacatt

SEQ ID NO: 10332 - DNA, 437 bp, Homo sapiens
ccgggcaggtactactgcaaccactagcagctaccatttatgaagcacttatgtgccagctactgtgaaagggactctctttaaattactttgcttacttctcacaaaaatcctgcaaagtattattttaaggaaacttaccagtgtagccattcagtatttgggatgaataataagaaactttttagaaccatttataaagcactctaggtcattctttgagaaatgctacaaactagggaaccaggagattagagatgggctcacgtcttgattttcagaaggaaaatgtagtggattgtgaatgctgtatcattaagcttgacatggattctatgcaaaattcaaaaggatttttttttttttaacaacttacttcttttccatagtcttaccagcactcactggttgcctgccatggattctttaagaacagt

SEQ ID NO: 10333 - DNA, 376 bp, Homo sapiens
ccgggcaggtacctcattcattccctctttgttcgggcctctctgcttttcgttaattttctcctggccaaccagccaactctggctccctgtggttataggaaattatccgtgcaatgaacttaatttagaaaaactctgctgcataaagaggtggcagaattattcttctcatagtccagtctatgttgactttcatgctacagcatttcaacagtcattgacatagaaatagatgcttaatttaaaatgtttttgcaaaagtcattggacgattgataaataaagccgaggttagactccaaataaagtgcttaaaaaagtaaaattctggcattcatcttccttatcccttaatgggggaaaaactctcatg

SEQ ID NO: 10334 - DNA, 439 bp, Homo sapiens
aggtacatcagcagtatgtaattatattgtgagaacaaggaatattgggcaaaaagcaagtggttaaaacatgcaaacaagcaagggcctgatcagaattttcatttattcagtccttaagaactgcagaatgctgaagtctcaaggggcccggttacaaggctattggaagtttcgtcacccctttaaaatgcccttaaatagcttttttgttttgttttttaaaaaattgttggcccggcgcggtggcttacgcctgtaatcccagcattttgggaggctgaggcaggcggatcacctgaagtcaggagttctagaccagcctggccaacatggtgaaaccccgtctctactaaaaatacaaaaattagccgggcgtggtggcacgcgcctgtaatcctagctactcgggaggctggggcagaagaatcacttgaac

SEQ ID NO: 10335 - DNA, 485 bp, Homo sapiens
tttaggtacacagtgtttagcacacaagtgtttagtaaacatttccttttgataaatgcatgagcagacgttcagtctgaagtggagtcaggagtagtcatgtttctgcttgctgccgtgcacagggagcttggcctgcatgcatgaggcatttaattctcaaaacacttaatgatgggaggaggtccatgctctatggggaggtcagaccctaagcgaatctccatgccacacttttctgcttaaaatccgcccaccttttgggcagaaaatcagtgactctagtcaacaaggatgacccagttccttctacacaacctattcgtgatttttcccttgaagaaaaatgggctttacctactgggacctcactggccttgcactggagggtatggggtttctttattttcctataacgccttcagaaaccaattccacgaaatggaaaaagaaaaacctttcctttagggttgtaggcggttttg

SEQ ID NO: 10336 - DNA, 422 bp, Homo sapiens
ccgggcaggtacttttttttttttttttttttttttttagtagggacagggtttagccatgttggtcaggctggtctcgaactcccgacctcaggcgatccgctcgcctcggcctcccaaagtgctgggattacaggcatgagccatcgtgcccaaccaatacatttgattttgatctatcagcaaagaggctccaaggtttagtatgtttccattttgtattcagggtttcatttgtgtgctaggtcgaacatctttctgtattcaagccgaagttagagatccaaattgctaaaggacttcagcaggccagagctcagtgaaaggaaggtccacagaagggccactaattagtaatgaatggctaaaagacaagggactttttttttttttttctttctgagatggagcttcgctcttgg

SEQ ID NO: 10337 - DNA, 389 bp, Homo sapiens
aggtactgggattacagtcctgagccaccacaccgggcccttcattgtgttttctaaaaacaatttctgatcacctggggattattacaacagatctaactttaggaaagtaagtattaaatttgaataagattatataatagggggatttaaattaaatgcctaacagagtttcatccaaaattttagaatgtgaattcaaggaactcttgacccttctgaagtaaattgatagcatttccacagtgttcacactaggatgtagctagccaactcacagctgcctgtcctcttttagcttccaatgaaaatgctttggaaaacatacacatagaaaaagaaattctcacagtaatacttaaacctaagaggctaagcaatcaggcttt

SEQ ID NO: 10338 - DNA, 495 bp, Homo sapiens
ccgggcaggtactgtatctttaaattaaggagttttagttataatgaaattgatttgtagtctgttttgccgtaaacttgtttttctttaaattgttcttacagtgatatcttactatttttaactgtctggggtttctgatatggggatttcagcccctggttaatcagtcttgtccctacaagtccctgatgcagtatgtttatttgtgatgtttaaagaacatttcttggctgggcgctgcggcttgcgcctgtaatctcagtactttgggaggctgatgtgggttggatctccttgaggttgggagtttgagaccagcctgacaaaacatattgaaaccccgtctttactaaaaatacaaaaatttttcttttgcgtggtggttggtgttctgtattctatttatttttttggcttgtgcatggataatttatttaaccctttagtcgtaggttttaataattttatcactctccttttttttccttcttt

SEQ ID NO: 10339 - DNA, 387 bp, Homo sapiens
ccgggcaggtacatctgtctccttactctctatacctcctgaacacaaaaattttagtttattctcatttatatctccaaatcttaaattgtctgatcagaagtaaactaaaataaaaattaggttgttttccttttaagacttttcctgaaactaggttgatcaaaaaatacaaatgtttttccatgattattctcagtaagagtcagtaattcaggccaggtgcagtggctcaagcctgtaatctcagcattttgggaggctgaggcaggtggatcacgaggtcaggagttcaagattcaataattggcaaggtataagctccactagaggagaaaaaaaagtattatgctaaagatggactatttgggttccattttcactcta

SEQ ID NO: 10340 - DNA, 455 bp, Homo sapiens
  misc_feature 33: n = A,T,C or G
cgccttattcgagcacttctgcatacggcaatngatctccagcgaggtgccggccgaggtacttttttttttttttttttgtatttttagtcgagacagtgtttcaccgggttagccaggatgggctcggtctcctgacctcttgatccgcccacctcggcctcccaaagtgctgggattacaggcgtgagccacccatccggcctaacgagacttatttttactcaactagatggcggtcattcatttgcttactcagctgtgccaggaattaagttgggcactgggaattccaaaaccaacaagacattctctgtcatcagggaactcacagcctagtttgagagataaacaaatgaacatgaaattataattcagtaacaaagaatgagtgttatggcagagggaatgtgtaagagcttggcagggtatccagcagggatacctaactaagg

SEQ ID NO: 10341 - DNA, 381 bp, Homo sapiens
aggtacatggcacagagtttatttaattcatcaaactcaacatataactttaaagtaatattgatattttaatatgctctgaattcagaggtaaagttgcaaagagggaaggcaagcattaaatgtgttttcaagtgagggtatctcttagtaacgtgcagtagaccgcaaatagttgctacctttttttaaaaaaagggaacttttataactcagtatttgaaaagtggtcatcagtttttcatattaattatggaagttgaggagcagctttagccacagttagaacttaagtttctggggaaattggagagttttgtttttattaagtggacagaaaccatatcccatccttatactctgatctgagtatagagaaac

SEQ ID NO: 10342 - DNA, 447 bp, Homo sapiens
aggtaccatactacccctttcagagtcatattgcacagtggatggatcatggcattccagagaacagagtgcttactgggaccagttacagaatcgtatggaatggacccttgtttagggaccccacaggctttcagtgaccgtccagatgaccaggcttcaatgggtgtcccgccccagctggaggcgatcagcccgatgggatactgcagagtgtcataaaggtgacgtccaaagagccagcacactgctgacatgtacctgcccgggcggccgaggtactttttttttttttttttttggttgtttttttttttttttttttttttttttttttttttttttaagtttaaatttagtttattttatttttgattttatatattaatttgattatattttaagttttattttaattttattttatttttagggttttaatttatg

SEQ ID NO: 10343 - DNA, 415 bp, Homo sapiens
ccgggcaggtacttgacctccacagcaagagcttgcacacattagactatctgaaacaaatgcttttttggaaactagtttcttcctacaactcaatgcctgtaggaattatgatgtgaacataatatttgtcactaaattagtttccttgtcttctgagttgaaagaggttacctaggatggcaaagttttggtagttctagactgaacattcttgattgtcaccttcctttagattgatttcctgtgacataatacctcacccctgccagtccgttcagcctgcctgcctccctgactctctccctccctgcctccctccctctctgtgcagctactgcttctggttgtagtcttttgtctctccacgttttgaattacctttgtcagccacctgcacttttcgtatagttgg

SEQ ID NO: 10344 - DNA, 421 bp, Homo sapiens
ccgggcaggtaccgtattattttagcttttattaggttacagattattctcaaatatctcattacctcttcaaaatcctatgtagttggcattgctgttatccccaatagacaaatgagaagtgacagtcttaaaggtgaactcatgttcaaacaacagaagaataatgggcctataagccatgtctcctgacacacagctgagtgatcttttcatgtcactatgttgctagtgtgcagcctaagtcccactagctggatatgaaaacagaaatagaatctgtgcgctctgattcttcaatccattgcttttttttttttttgagacggaatcttgctctgtttccctggctggagtggagtgcaatggtgcaattttaacacactttaaccttttcccttcaagcttaaatgatttttca

SEQ ID NO: 10345 - DNA, 373 bp, Homo sapiens
ccggccaggacccggggaaagtcctaagtaaaatactggcaaactaaatccagcagcacatcaaaaagcttatccaccacaatcaagtcggcttcatccctgggatgcaaagctcattcaacataccaaaatcaataaatgtaatccatcacatgaacagaaccaatgacaaaaaccacatgattatctcaatagatgcagaaaaggccttcgataaaattcagcaccccttcatgctaaaaactctcaataaactaggttttgatggaacatatctcaaagtaataagagctatttatgacaaacccacagccaatatcatactcagtgggcaaaaactgggagcattccctttgaaaaccggcacaagaca

SEQ ID NO: 10346 - DNA, 674 bp, Homo sapiens
  misc_feature 152, 473, 474: n = A,T,C or G
taatcctatcaaactaatatgattattccaattaacaaaagacttaattttattcatattaaatattcacttaaactaatttacctaatctaatcttatttataatctatcaatttcattaatataataataagattatattgcgacctctntacacttattatacggcgaatcgaagcttaactgcaccgcggtggcggccgaggtacacatgctgtgaacatagctcagtgcagcctcaaactcctggcctcaagcaatcctcccgccttagcctccccaaatgctgggattacaggcataagccaccgtgcctggcctaagaaaagctttttattgtaagtcaactaaccaaggagacaggtattccacgcttaaatatgtactccctgtcgttgggcattacgcggcagatccttttatttagaaaaggttttaagggggcccagagtagtgcgcggcttcacaatctnnataatgcctaaccacttttggtaggctcagagagcagtgccaagaatcaacttcagtgttcaaggaggtttcgaagaagcaggcaatgggccaaacaatgggtgaaaaatccccattcttctttctaaaaaattacaaaaaaattaagcctggtctttgcctggacattttttcaaaaaatttttgttaaagggattttt

SEQ ID NO: 10347 - DNA, 984 bp, Homo sapiens
  misc_feature 207, 238, 266, 267, 282, 283, 310, 311, 336, 337, 351, 366,432: n = A,T,C or G
gtgagcctaataccactcactaactgactatatggcagacatccaccgctgtgccggccgcccggcaggtactgggattataggcgtgagccaccgcgtctggcctctaacgagatatttctaaaggttaggccttcagtcaagaattttaaagctggatcttagaggttatctaaactaacctctccatttcatagataagaaagntgagtcccagaaaagcacctggtttggacanagttgcagaaagggctaaacagtgactnnggtggatgtatgatnntctgtctcttaaccctcctaatccaannatgtcttctcacttagatgaaggcnntgtgccttctacantttgaagggctcagnaaccccatggatggatggaagggaaaggatgggtggaagggaatggatggatagatgggatgggtngatagtatgacttcattcatttcggatttgcaatgaaaggatagagccaaattgaacatcaaaacaggggagctaaatagctaggaattgctggtaatgagaagctgcacaatacaggccctgagagttgttattgtatggcccgtcctttaccttcccccgaaaccacaggaggttatacaaccgccacccatgcatattggaacccccggcaatgccaatcactagttgaccttcgggttatcaacctgtaagggacaaattaaccctatccttaaaattacgttaataggcaaccaaaagccaggggaatcaccttccatactccctgaattctcaattcaaaaaatagggttccattggcatttgtttacattcaaagagaccccccacctttctaaaaaccgtcactgtggggaccctaggatgggctctcccccccttgtagaaaacttcaaacaagagacaccccccctcggggggggcacccaggggcatatgaaaacagcggagccccaaaggaggggatatagtttgtgcgcgccccccact

SEQ ID NO: 10348 - DNA, 614 bp, Homo sapiens
  misc_feature 74: n = A,T,C or G
ctacgtaatcgcttacgttatttctctcataccactctatctacttattactatcattttacgtgatcatctancattactactttttctttcattattatatcaacgttatctactctatttttttgctctttcctcttctttcataaggtgtggccgcgtctcactcactatactggcggagtgggagctccaccgcgggggctggcggccgaggtactttgttcttttactactcaatgagactgagagcctgctggattcactaagaccaggtgaacccggagggctctcggtctcattgactcaattgggtttgaatctcaattctgcaacctacgtggctttgggcaggtttccttatttttaaaatttacaattatatttaccttttaaacttattgaaggattggaaagctgtaacacctagcatgctgtcgtggcataaggtgggggttaagtaaaaagtagctactattaacatttttgaaaaagtgcttcttcattttccctgctccctttcatactcttcatcctactttcctggtagttcatttcttcttagttgggctgttgactttctcttttctttccaagaatttggcttatgccac

SEQ ID NO: 10349 - DNA, 365 bp, Homo sapiens
aggtacttctgtaagctaatcataaaacggaataaaatttctcttggaaaatgcattcagagttccacccttgaatgcatgggggggcatgtcttttttacaatagccatttgccacaggagtgggaaattccacttttcctgatggatatctatgggagctgctcctccaaagtcctggaagtaagaatgtgacaaaataggggaaataaaggagagaaaagaggattgtaagccatcagcagtgcaaagttttccacccctccttctcctaactttcctgcttcacccaagtagcaactgtaagttcttccaataactaccatcacctgggtgagctaaaaagtgggaagagaagacaatgcc

SEQ ID NO: 10350 - DNA, 482 bp, Homo sapiens
aggtacttaacactatattgagattgttattttaactggaattctaagatttgtgaactgtaaatgaaaaacatactcattaaattttattttttcttgatactcaaaatcatatttataaaaaaaggatttttttttttttttttttttggaaatggaagtcctgcttttgtcaccccaggcttggagttgcatgtggtcccgattcttcgtgctcacttgcaaagctaccgctctctccggtgttcaccgcccatttcttaccttccctcaagccttccttgagtatgcttagggaactaacaaggcggcttttgctcaacctacggcccacggcataaaattattttttggtattttttttaagttaagaaagaatgggggggtttttcaacccaatggttttagccccaaggaattgtgtcctttcaaaatttttccctggaccccctcgttgaatccttgcccccacccataagggc

SEQ ID NO: 10351 - DNA, 403 bp, Homo sapiens
aggtacatttctcaagggtaaggactatgtcttatgtctttgaacacccttaaaggaacctaggctagtagttgacattgaatagtttctaagtaaactcttgccgactggaattgtatttacggcaaagctacttgcaaattacttgcattgagaccaaatgtaaacactagaggagccagacatggttttctttggacacatcttggacgtgcctgatgtcctccccacctgccttgggcatccctttatgataaaactttaattcagtcaaactggtatcactgcatgtttttaagagacttgcccactttctgaccaaattatccatctacccaaggttcttagtcagggtcggtgtcactctatcaaggggctatatggaaatagggagggtttggtc

SEQ ID NO: 10352 - DNA, 465 bp, Homo sapiens
ggaaaatctgggaccatatagtactactgggcgaatgtgagctccaccgccgtggcggccgcccgggcaggtactaaagcatatcatcagattgggggttccacttgttgttttcaatttaataaacacttattgagctgctacaggaactgtttttaatgcttttccaaaaaaagtgaccttctcaacatgatagaaaacatttccgaaaaactgatagctaaaactatacgcagtggagaaagattgaaggctttccccataagattaggaaaagacaaacacactaaaatcacacacagctagtgtatagttgtgtttcttacattaacaatgaacaatccaaaaaagaaattaaggagcaatttcacttacaataacatttgtattattccgttttcacactgctatgaataaatacctgaaactgggttgtttataaaggaaagaattttgattgactcc

SEQ ID NO: 10353 - DNA, 388 bp, Homo sapiens
ccgggcaggtacactctaaaagccaaaaacagcatgatctgaggcaatacagagcataagctggtatcaccaatgcatcctggaaataaaacctgtgctacctactatcttgggaatttcactgagagtatagaacattctaaatgaaaaaaagaaacgaaaaggaatggttataaattgtttaaatgtgtaaacaaacacaatagatgtaagttacaaaaatgttcagagtaacagaatgcactgataacatttaaattaaatataaagaaaagcaaatctacttccaacaaatacatggatacatctttgtttcatacagcagatgcagaaatgtagcttctattttaaaaagtctgaatgtccataaactgttcccaagatttgt

SEQ ID NO: 10354 - DNA, 429 bp, Homo sapiens
ccgggcaggtacctcagactcccaagtctccatattctgtaaagtgctcctatgggtgttgatttattcagctgaaaaactgaaaatccattttaggattgagttgatcttcactgaggaaaaatatcaattttcagagctttgtctaggaccctgcaaagaacttaagaattcttaacagaggttcacgaatggtcccaaggagtccacaagtaccatgaaattgtatgtatacaagtgagagggagagaggatgagagcctctgagaatgtaaattttttggcatgaagatccataactttcctcagatccttatggggttctgtctttcccaaaccacaaagaatctgagctgagagataacgcaagcctcttgtttgttgtgcagccagctttcacagccatgctggcttagccagagaggcaat

SEQ ID NO: 10355 - DNA, 430 bp, Homo sapiens
aggtaccactgcactccagtcgggtgacagagcgagaccctgactaaacaaaaaataacaaaaaaggaggcaggggtttagaaaataccatgattgttaacaggaccatcagatttcattttttctaaaatattagatattgtcagtgtggtttttatataggtgctgattctgttctgctcgtcttcaagtaacaaatgcctgcagtggagatatcttattttgatgattaacaggaagcttttaagctttgaagaaagcaaacaacattttccatggacctttaagagctgggctaatatttttgcccacacagaactctaattcatttcagagtcaagggcaacaatagaatactttttcaaggaccttgcatttgttaatacaggttttcataatagaaagcaatttaaatattcagaactaacgt

SEQ ID NO: 10356 - DNA, 363 bp, Homo sapiens
ccgggcaggtactttgagaaggaaatactgggttgtaatcatggataaaatatgcaggggaggggaggagattatagatattaatatagagtttagggtggcattaggcaaggatgacatctgaatatctaacttccattttacattgccatgtaagtctttttgcccagtgggtttgggggacattgaggcagaactcctggaaaatagaaggaagtgaaaggtcactggtctctccaataatcttgatgggaaggactagacaacaccattagcaaaatgtgcctcttaaaaactcaagacacaagcattatcttcatctcactgaaataacagctacatcctttattaacatgagaaaat

SEQ ID NO: 10357 - DNA, 485 bp, Homo sapiens
ccgggcaggtacctcattcattccctctttgttcgggcctctctgcttttcgttaattttctcctggccaaccagccaactctggctccctgtggttataggaaattatccgtgcaatgaacttaatttacaaaactctgctgcttaaaaagggggggagaaattagatcttctcatagtcccagtctatgatcgacttttcatggctacatcaatttccaacaggtcatttgacaatagtaaattagagtgcgttaatcttaataatggttgtttcgcaagaagtaccattggtaccgatatgtatagaaatagaagacacgaagggtctactatcatcccaataatttaatgttgcgtttaaaaacaaggttaagaatttccttgcgccatatccattcttttctctttatacccctatgaattggaggaaaacaaaactttctttatagtaaaaccactcaaacccattattagtggtaccc

SEQ ID NO: 10358 - DNA, 390 bp, Homo sapiens
ccgggcaggtacatgagtctcttttttttaagaattttaattttcctagttccttatctttttaatgattattctttaagtggacatttaagacgtgagcttttaagagcagctgaaaattattggttgtttactatgggttttatccatttgtatactgttttttttttttaagctatcttcaaaatagccataggaggtagattccattattattttactctaaaaagagaaaactgagttttaaagtgttaaagtggcaggaccaagatgaagatacgaggtgaaagtaactaaaggttgttagcataacaattcaaccaaagatgcaatttgaaacaatatgtcctttggctgtcatgttctagacaatgagatggccagattgct

SEQ ID NO: 10359 - DNA, 857 bp, Homo sapiens
  misc_feature 339, 459, 478, 558, 561, 567, 568, 607: n = A,T,C or G
ccgggcaggtactacatcttaaactagactgttatcaaataagctaataatactttacaaataaggacggtatttcaaacttcaggaaccatcgtttttaaatgattcatgtagtatttaatcacttggcggtcttcataatttaaccctgtcataaagggaacttttacaaagattaaaatagaatggttacaggggacacacaattgcaatctaagtgcgggatgtaggctattcaacagtatccagactttatctacaacatatatatatatatccacacataaatatgcgtagggaaaaagacttgtgggggtttgggggtggagctaaactatntgctgtgtaagagacataaactagaaagaagggcctgaataggacagatacaaatggaatcaattagctgggtgtggtggcgtttgcctgtagtcccagctactcaggaggctgaggtangagggtcttggtagcccangagttggaggctacagtaagccgtgattgcaccactgtgctccagccaatgtgacaaaaccagacccttgtttaaaccanaangagaannaaaaaaaaaaaggaaccagaacaaagacaggaccccttnttccctttggtttggcacctactctctaaggaaaatgaaactgtgacctattttcctttatctggcccttatcatttaagggacctgggaggtaaacctcttggtattattgcccggaaattgcccaataccaggctgggccctgttaaaaaggcctggtttctggttcccttaattttaaggtcccttggcggtttataatcttggatccccggctggagaattcaattcagcttttttttccgcgacc

SEQ ID NO: 10360 - DNA, 405 bp, Homo sapiens
aggtaccaagcctagagagcactaaataaatgtcaattattatttttatccattctggcatttagaaataaaagttacaaaattcactattaaaaataccattgatacataccatattccagccacactggcctcttttctgtgacaaaatgccctttgcttcttttgccctcaacacctgatcctccctatgcttggaattttcccccaactcctgcacggccaactcattatggtccttaaatctcaagtccaatacctctcaattcaaatattccccctttagagagccttcattgagactgctatccccaaaagtctaactttcttataatcttgctttaattatgtcatagcttttacaaacatctgtaattgtcttatatacactggtatggagagctg

SEQ ID NO: 10361 - DNA, 359 bp, Homo sapiens
aggtacatcagcagtatgtaattatattgtgagaacaaggaatattgggcaaaaagcaagtggttaaaacatgcaaacaagcaagggcctgatcagaattttcatttattcagtccttaagaactgcagaatgctgaagtctcaaggggcccggttacaaggctattggaagtttcgtcaccctctaaaatgcccttaaatagcttttttgttttgttttttaaaaaattgttggcccggcgcggtggcttacgcctgtaatcccagcattttgggaggctgaggcaggcggatcacctgaagtcaggagttctagaccagcctggccaacatggtgaaaccccgtctttactaaaaag

SEQ ID NO: 10362 - DNA, 399 bp, Homo sapiens
aggtactttttttttttttttttttttttttgtttggttttgttttgtttgtttgtttgtttgatgccgttatcaagtagagcagacctgggaagactggtgcatccttatttctgtcatcttagaaaataacatatataagaaaatatttatatctagggcagaagaaaattagagatatatttttttcctttcagcctcttctctcctccatttttactactgaaaaattatccaaaggcatgaaaatatttcatagaaatgtcttctgagttgtgagggaattcttgcccatttgaacaaatggaatagacatttgaaagcaaatcagaatgccccttactgcttggccaatgtgcaaggatttggagctgcttatctgtgctgccatgtccttat

SEQ ID NO: 10363 - DNA, 432 bp, Homo sapiens
aggtacttcaaatgggtcactgaatatcttcaaattgtatgtaaattttggaggggaagtggtatatgcagattttttttttctggaaagaagaccaatcacttttgccaaattctcaaacaggcccatatttctctcacacacatgcgtgcgcatgcgcacacgcgcgcgcacacacacacacacgttaagatgcgaagaatcactgtcataaaatgtcatatttctaatttctgtaaatggggagaattcctcaagcttatataaaagtgatgtaaataattcagttacaattataaaagaaatggtatcacagcaaatccctttggcaccccactgaaaatttctctctgatgtttaaaacaccatttctatgcttactcttacagctgtattaataatcagataaggggtttatttcttgtctatttt

SEQ ID NO: 10364 - DNA, 439 bp, Homo sapiens
ccgggcaggtactgtaaggcctctaactttgttgttcttaaagactgttttggctacctcttttggttttctatagagattttagaatctgtaaaaccattttctataaaaatgtcctgcaggtcttttgatcaagattgtgttgaatctatagatcaggatgagaaaaatcgagatgtcaacactatcaagttttccaattcatgaacgtctctccatttagttaggttttaaatttctctcaaagatgttttgtaattttcattatacaagtcttacacttctttggctacatttattcagtttttatgttttttatgtcagtttaaatggaattgctttttaaatctcattttccaattgtttattgttgataaatggaaacacaatagatttttggttattgacctttataagtttacttactgattctagtagt

SEQ ID NO: 10365 - DNA, 810 bp, Homo sapiens
ccgggcaggtacaaagcaagaggagctatcagagtcatggagtaggtcagggcacttcaagttcatagaatctttacacgaaaggattattttagagctcatctacccactcatattgcagcagaaagaattgaagctctgggggataaatgacttattcaaggtcacagtgagccaaagctgagatttccagatcctaaccagcgttaaatttctaagctgcattttagcattccacttttcctcattttgcctattaaatcctccaaggcctagttcaggttctttctggtccagaaagtgcccccagtcttctccaattctacagagatgccttccttccctgatgctacagaatgtatcatctccatcactcattggcaccaataaataaaatgccctttgacatccaagagtcatgaaactttgagctggaagggtcattggatgtcatttaactcatatttcagtttcaaacttacataagtcagctcaccaaggtagctgaagttcctttggagaaaagctcttgtctaacaatcttgatgattggtatccctctctattcagcaccataacctgcataaacttcatatttggttcagaaatccagtttagccacctacaagaatgtaggtgtctggcagaccgggattccaggtcaggtctgccatggattccggcatgactttggatacgcgttggaccttctaaaaatcttctcatctggcaaagggagtacagtgagcccactcattatgtgtgaaattaataaaccaggccggaagaagtttagcttaccttaaggag

SEQ ID NO: 10366 - DNA, 451 bp, Homo sapiens
tgggcggattcgccgcctctactactactagtctaaggggagctgcacctccgcggcggccgccgggcaggtaccttgaattagagcctgaaatgggggaaaagcagccataaaagacattctcagacaattggagactttcctgagttgtgataatggagttatgaatatgtaggagaatgtctacatagattttatgaagatgcatgtggcaacatatctgcagcttattccaaaaaaggtccaagaaaaaaaggaagggaaagaaaataggattacaggtgtgagccaccatgccaagcctcactgtttctaataaccaaattgttcctgtatttattgagtctctgtttcatgccagacactctgctatagtctgaatatgctatttctgttaattctcataacagttctgtgagcaagaacaattaatatcacccttttacagatt

SEQ ID NO: 10367 - DNA, 407 bp, Homo sapiens
ccgggcaggtacatgccaccatgcctggctaagttttgtgtttttagcagagacagggtttcgccatgttggccgggctggcctcgaactcctgaccttaggtgatccaccctcctaggtctctcaaagtgctggaattacggtgtgagccactgcgcccggcccttagtagcatcttttaatggaggtagagttgagatttcagtgactaacaactaaaggtattaaaggtaggggtttatatgatacatttgcattttagaaaactgatctaagcttcaatgtgaagaacagattgaaatggaagggggagaagactagaagcagaaacattactcatttaagtaatctggaccatgaaactgaaaaaaagtatagggactccaaaagtcataaagaagtgaaag

SEQ ID NO: 10368 - DNA, 419 bp, Homo sapiens
aggtacgtcacaccaatggtctcagtgtggtccttaaaccagctgcagcagcatcacttttcccaggtgcccatcccagacctgctgatttggaaactgactatggagcccaggaagctgttttagcaagccccctaggcgattctgacgcagttgatgtttgagaaacactgcactatctcagactcttttaaatcagagatctggagtcaaattcaaactctactacatctcagctatgtgacctttggcaattgatacacctttctttcttttctttgcttttttttttttttgagacagagtcttgcactgttgcccaggctggagcacaatggcacgatcttggctcactgcaacctccacctgtcaggcgatcttggctcacggcaacctccacctctcaggttcaagcaatt

SEQ ID NO: 10369 - DNA, 413 bp, Homo sapiens
aggtatcttttacatactccatgtgttcccacctcgtgtcctaacaagaattgactgtgaatatcttatgcacacagttttcagctcctgctttgcttcagaagaatcagcagtctgttgtgcaaaacagttgaaggaactaccaggatttgtagacccatttagtggttgttgttgatgacagaggctgacctgtggaggaaatggtcggtgaagcactgggctaggagattgtggctgctgaaactgcatttcttgactttttctgcctcactctggcttagtcttaactgatggtgttaataagtttcttacaaaggttatctggccttcaaatgcttgttttcttaacactagcttatatttggattaaaggtgttaattggttttttttgttaagctgttattcttgt

SEQ ID NO: 10370 - DNA, 511 bp, Homo sapiens
gccgggcaggtactatatggacaccaacatgtagcagaaaatgattgcagcagtgaccaatctcattccaggggagaagttgcacagtgtccaataggtgcatacatcaccttagtaagtagttgtgaattaacaatggaaatacaaaatgaaaaaaaataatttagtctatataatgacgcatatataattttttcaaggcagctaaataaaggttggataggaacaataaatattttaaattacgcttggggggaccctaaattaatttaataaaatttgagaatggatatagaataattatcctttatggcccctaagacccacccattgtaaaaaaaaatcaccttgagggtcgcctcaatggggaaaacattggaacctaaatgaaagccccttcctggaagtacaactggatttttcctccaacttggtatagtaatgaaaagaaaacccctggcatcccacgctttcccttttttgccgaaataggtttgaaaccgggcagtat

SEQ ID NO: 10371 - DNA, 441 bp, Homo sapiens
ccgggcaggtacgcggggggccaagaaccaacaagggcagcacattgtgggtctgatgatttggtgcaagatggataactggacaggatatgccagaattatactttggatagtgactaaattcatgatcagggcaggtatggctctcagacttgtggactcagatatctaaattttcactcagaaatgttaatgttcacagacaatttacatcctctgaccagtgttttctcttcctagagttgaattgcctgagaagcccagttatactgaggttacttggtaagcctaactagagcatatattctttagatgtttaggacatcaaggcatcgagctaaaacagcctgatgtaaatgtcaacacaatagggattccactgccctcaaattaggataaataagtgtccttggctaggacctcctccccaactgtcataac

SEQ ID NO: 10372 - DNA, 377 bp, Homo sapiens
  misc_feature 16, 327: n = A,T,C or G
ccgggcaggtactttntttttttttttttttttttttttttaggagagacagggtttcaccgtgttagccaggatggtctcgatctcctgaccttttgatccgcccacctcggcctcccaaagggctgggactacaggcgtgagccacccatccggcctaacgagacttatttttactcaactagatggcgttcattcatttgcttactcagctgtgccgggaattaagttgggcactgggaattccaaaaccaacaagacattctctgtcatcagggaactcacagcctagtatgagagataaacaaatgaacatgaaattataanttcagtaccaaagaatgagtgttaatggcagagggcaatgttgtaagagc

SEQ ID NO: 10373 - DNA, 782 bp, Homo sapiens
  misc_feature 332: n = A,T,C or G
ccggcaggtactgggattataggcgtgagccaccgcgtctggcctctaacgagatatttctaaaggttaggccttcagtcaagaattttaaagctggatcttagaggttatctaaactaacctctccatttcatagataaggaagtgagtcccagaaaagcactggtttgggcaagttcagaaagctaaacagtgactgtggatgtatgattctgtctcttaactcctaatccaaatgtcttctcactagataaggctgtgccttctacatttgaaggctcaaaccccatggatggatggagggaaggatgggtggagggatggctggcttnatggatggatagacagtcgactaattcatttagccaggcaagaaagatagagcgcccaaacgctcagacagggggcttgtgggttgaaagcctttaagggcgctgaataacaacctcgtggttatacagggcccaaagttaacttctgggaaaccacagctgaatgtagtaccaccatttattccgagaccccctggtcaagaacacgtaagaaccctggtgccaaaggtcggggctatgccccgaaccctaactaaggtccaattgcttgaaaatatttgaatactttcccccccgggagggctatttcaaaatggccttctaagggaataaggttgttgtacaaatgtgccggcctttttgatggaaaacccggcgggttattttcgcactccgccctaaaagaaggatttttggtggccattatttaacaatgcgtcccacccgcct

SEQ ID NO: 10374 - DNA, 499 bp, Homo sapiens
ccgggcaggtactgtcacgattcaacaacctcttaaaaaatacaatatatgcttaacaaggcttctgttgacctctttctggaagcctgatttctttcctccacttatgttaacagattaaaaatttaaaaaaaaaacataatttttttaagtaaacacaaattagggaattttggccccccaaaatggtaaaatcttccaaaaaaatctgaagtggcggcattcacagcccaaagtgaatgccaattcctggctctactttactacttgcccccttccaacttgagaaccaagcaatcttcacaacagggcttcaggggcattaagactattgtgtaaggggtggttcctaagaaattgtttgagaagccctgggacttcctaaccttccttaaaaggaaaaaggaatgttgaaaaacttgcacatatgggattattccaccacttcttcatcaatgcacccttacttgccacaaagccaaagctttgcttcaaagta

SEQ ID NO: 10375 - DNA, 405 bp, Homo sapiens
aggtacttgtgttgtcttcaggattagggaatgctgctttgatcatgttgaaaggaagatagaaaaaagattgaaaagctgggtctctaaggtaggaggtctgggatctgtttattctacttagttcaagttggaattgatgctgttaaacatgtgaaatgaccctaaactactcttcagggttaaggcaggtctgaggcagatggatgaattacgcaaatggactataatgtgtaatctgtgcatgtgtgtaacaataaaatacagttctatcaagattttggttgagaaaagttaatgataaaagggctgggctggaagactgggtcgaggaaggagagtgatacttaaggtttactcacatcttatctaggcaacttttctggtcttgatttgggctttaag

SEQ ID NO: 10376 - DNA, 399 bp, Homo sapiens
aggacactatttttttgctttggaagaaatgaatcctagttttggttcagaaactgtcaacagcattgtgcctcttctatgactactaaatttcaagcaaagagagctgagttgggggtaaaagcagggctattccccgccttcagacaatgctgtcccttatcagggcagactgctgtctggtttcctgtctccagctcgggcatgactgcttaagatgagaaacatggtctaagaaaggaacagagtggtcttgaaaatgagaatgctagcgaccaccataaccctcttccaactcactcccaagaggaattctgactagaatatcacatactagcaaactagatatcaattgttttaagattctagggatttgcttttttaaaaagctagaaccaa

SEQ ID NO: 10377 - DNA, 374 bp, Homo sapiens
ccgggcaggtactttgcacatatcatagtggacttgtcctaggagaatcagaactctagccgaactcatgtaatccttaaagctcgtactgtgattattgattaaaagagaacagctgagacctttgacacttcagaggccagtggtctgtgcagtcagtctggcttctctaacagggaaaggcatgtaaggaaaaggaaatgagacagcctgggacacaagttcaagtatgaacaatactatcacatgttccatagtgcctatcaaacaagtgtatgtcgtcatattagtcgcctccttagcctctggccctcccataatactcaaagccatctggctatctgctcttatttgcaagtaatcaggaaaagtaa

SEQ ID NO: 10378 - DNA, 857 bp, Homo sapiens
ccgggcaggtacatatattttaagtgaaagtgacaggaaagtggaatgagcacttatttttctttatcatttaaattattactttaacattttaatactttgaaattaattttgttatatagtagaatgtaaggtctactgaagtgtatcattttctaaatgacagcatttttcaataccattttaaacaaatgctttcttttaaggacactctaaagataatgtgcactacactagttttcgtagaactattcatgtgtaggcactcaccttgagaagtaggattttttttttacttaacgcttttgtctcttaaagtattattatatatagttaactgtaaaaacattgagatatattaaaaatattataggacaggtaatacatattcatggtagcaagtgaaataatacaaaggtttatgaataaaaagttactactctcctaggtagccaatgttaccagtcttgcatatccttctgctgctttttctctgctcatacaaacatgaacttactcatgcatacacataagtgtttcaaagttttattcttgatacatcacgaacacaaagtggtataattacatatatcaatgtaatatataaacatgttatgaatataaatgttaaatgaaccctatttaaacatcactaagcctaagacccagaccttacccatgagcctggatattcttatgcgtggccccatctcttttctattcccgtcataaaaatactccatcccaaatttacttatttctttttttacttgggtgcctaataattttactatccttacttcttgcctttatgatgaataataaataatggtaagctctatatttacataaatggt

SEQ ID NO: 10379 - DNA, 359 bp, Homo sapiens
  misc_feature 359: n = A,T,C or G
aggtacatcagcgccacaccgcagggctgtccacggtgagctatgaggctggagatggttctggagcagtgaactgcagaggaaagaaggctgccctacccctgggccaccaatcactagcagtgtgacctccggcagcttcttctcctgccaaatggggatgtttgcttcactgacagaaacacagtgggtgaaccgggagtgagcggcccacttggctgaccacttaccaacatttcggcggggcctcgtgctgagacctctccccaccctgacggaacagtcagttggaaaacagccagtagttccattcccactaacatcttatagtgaccaataatactctaccataactgtcn

SEQ ID NO: 10380 - DNA, 802 bp, Homo sapiens
  misc_feature 37, 577: n = A,T,C or G
ccgggcaggtacaaaaattctgttatgaatgacctgngtcattctccctgcctgactgacatcctggagtgtgtcattgaaaaccttcactttgctggcatcttcccaaatttctcagacaccctctctttgaacctggagcctcctggggaagtattaagagccaaccagctatgaaaacaatgtgctcttccctgtgctaagtgcctcttcttaggcagtaaaatgcttcagtggtatgaacatatggcatcaacatggcctctgaaaaccatgctgggtgtttaacaagcatggagggatgtggacaggctgtgatgagctctggaggcttacagaacaggacctcccctcccccaggagcagaggttcctcagggatcttgactccacatagaccaaggctatgtgggaaagagagctagtgccttgaagctattgcattttttttcctttaataaaacaccctgcagaccctgacatatgccacagacagaaacagagcagccatgtgacccagtgccagctcttacctctgactccagacaggcattctgctgaagtccaacctctattangtaagaggatgtgggcagcttcccagtggacccactgcattctgtgtgcattcccctccttcctgaggcagggcccatcaccttgagaggtattgggccaaataaacagcctgaacattgggcacaaaccggtgttagggtggtcacaacccggttaataattccagaaccaaaggttaaaagacactgggctattttttaaaaaggaccgcccggaattttaaa

SEQ ID NO: 10381 - DNA, 402 bp, Homo sapiens
ccgggcaggtaccatttggaacttatttttatttaagttttagctcaaggttctccagaatctgggagttgagaaaatgccaatggaaataggaaatatgaaatatccaggatcaatggtagacttttcttcttactgtaacagtgctctggggcacatttcttaccttgctattttttggagaccaagaaaatattgcatctatgtccatccctacatagacctcacaaagcataggtcaaattctaataggcagccatgattctccaattttttgttcacaaataagtcgactgacttcctaattggagtcattgggggtaaggagcaacggacaatgtcagagaggaccacctcacaggtggacttgtgaggggctgggaaaagaaaagacatgttcat

SEQ ID NO: 10382 - DNA, 409 bp, Homo sapiens
ccgggcaggtacttatttctttttcttttttttttaactggtggatttctttaaatgatatatgtatacaatggagtagtgatataggctacaatatggatgcatctcaaaacattatgcttagtgaaagaagtctgatgcaatatcccacatatggtatgtttccacttacagtccagaaaaggcatatactaaattagcagttgcatgggtctgatgtgaaaacatggattgcctgcagatgggcacaagggatcttttgggggtgacaaaaatgttccaaaactaagttgtaatttttgcacaacttttatgtgtgtgtgtgtgtgtgtgtgtgtgtgtgaaatgggagtttcacttttgttgcccaaggcttggaattttaaatttttccaattttgtatttatt

SEQ ID NO: 10383 - DNA, 381 bp, Homo sapiens
ccgggcaggtacatttctgcattttctgaatttccacaagttgggtcagtctaaaggctcattcttcacactcccacaaactatttattactctatgccctttccaagcaaatcgagataggcagttatcaaagcagatgcattatttgggtccacctgaaaacaactggttctgcccccccctttctcccaatctgcaagcttctgttcatccctgtgaataaaaatgcagaatgacaaaaagtctgggtgacttacattattctccttatctcaacataaatgtgaaatctgggggtgtcagctagtcaatctccaggtcctcgtaaaagataatgtgcctggtggttttgttttgcttttcacaaacatggaaaaggg

SEQ ID NO: 10384 - DNA, 435 bp, Homo sapiens
ccgggcaggtacatgggactacaggcacgccccaccattcccagctcatttttgtatttttagtagagacagggtttcaccatgttggccaggatgatcttgatctcttgacctcatgatccgcccctcttggcctcccaaagtgctgggatcacaggcgtgagccaccacacctggccctctatttattctctttaaagagagagaaaactatgagaagccaaaattattttaattaaaatcttaaccttaacacaagggaaaaaaatggaaatttgcctaattataggtggatgaaagcattacaccaatggaaacagaaaacaatccccatgttttaataaaaaggcaaaaaatttggaggctttataaagcttatattggtaaccttaatttttggggtgggggaagaaaattgagaaaaggaattttaac

SEQ ID NO: 10385 - DNA, 381 bp, Homo sapiens
ccgggcaggtactttggcttttgtttctagaacaccaatgagtatatgctcattaagatagtttgatgcaataaatccttattttacttgcctctattactgcattgtaaactgttgtctactttgtcttcttgaaatcctacacctccctcagcccccacatttggcctatggaacattactttatcctgattttccccctaaccttctggcaatgcctctcagactccttccagaactacttttctctgttttccttttaatgatgacagtttatgcaattgtgtcttcaaacttataacgacccagacaatagtaataacagtcaacatttactggattcttacttgtgttaagtgctggtatatatgatattttaat

SEQ ID NO: 10386 - DNA, 375 bp, Homo sapiens
ccgggcaggtactttttttttttttttttttttttttttttagtagggacagggtttagccatgttggtcaggctggtctcgaactcccgacctcaggcgatccgctcgcctcggcctcccaaagtgctgggattacaggcatgagccatcgtgcccagccaatacatttgattttgatctatcagcaaagaggctccaaggtttagtatgtttccattttgtattcagggtttcatttgtgtgctaggtcgaacatctttctgtattcaagccgaagttagagatccaaattgctaaaggacttcagcaggccagagctcagtgaaaggaaggtccacagaagggccactaattagtaatgaatggctaaaaga

SEQ ID NO: 10387 - DNA, 399 bp, Homo sapiens
aggtacttctccagttgagcctctcatttctttcttaaatggctattgaattctgcctgttctcctgcatgggctttgactttgtccagctttgctacagattaacatcacaagggtttctgagttggttctcagccatcatcgtatcctgacttggcacactgtccttcttttacaaggcctttacacctccattctctttagaacaacaccttcattgtccacattcatttgtttacggatcctgttgggaacagctgctccttcatctttgctctaagagaaatttcttcaaacctctcttattttactatattatcctgaaattccttacatctttatcttattatctatttacctttatctccttgccatggtaaccaacacaaagtagcacca

SEQ ID NO: 10388 - DNA, 386 bp, Homo sapiens
aggtacttcagttgaaaagttgaccaaagccaaaaaatgtctatctggtggtcagtagtttgataggttcaaggagttgaaagaagcctaggatggctgggacatgtagatcatagtgctaagagatggaaagcaccttgtgctatttggccgtttcagttgtgatgttttttaagtagagtgttgtgatcagaagggccctttagaaagattgtggctagaatatggagaacaaagaggagaccaccagagtggatgtgggaggccaatatgtaggttattctagtagcctttgcagtggacttacacaaagggcagtttttatgcggaacttggttcatgaagttccctattgaggattaaaatttgacagggactttgtgcaa

SEQ ID NO: 10389 - DNA, 419 bp, Homo sapiens
ccgggcaggtacttttttttttttttttttttttttctttatgtttgagggggaatgctggaaattgtaatgggtatggagacatatcatataagtaatgctagggtgagtggtaggaagttttttaataggagggggtattaaatttgttcataaacggaaaacagggggtatcaccttttccaaattcataagaaacagggtaggtttaaaaaatagggttcttggtgaacaaaaatattttgtgtaaaattaaggggaaagagcataaaatattgttcctaagaaaaatgtaatgtgaaaaggtgtttattataaaaaaaggataaatgaaaattagggcttattaaaaaaataagggtaaaaaaaggaaaattcctataaaaaaataaaattattaaaaacatttaaaaattata

SEQ ID NO: 10390 - DNA, 410 bp, Homo sapiens
aggtacttgagggcatcattaaaatcagccagtgttcagtgagagacttaatgatggatttaatagtattaaatgggcaaaaatgcccttggcctttacatgctcatttaaaaacatacaaaagagcagtaattcaggcagttatacttctctcaaagattttgctctaaatcacagatggcagcgggaggccacggctgtgtgctggctcacaccccactcactccaaccgaagccagaagtgctcgttgggtcataattagcaaaccacccgcaaactcgactctttaaatcagaggccagtgactgccaggctggggcatagacgggagaaaacaagcagaaatggtcaaggtgctctctggagcctgcctttcgatagctgtgacccccacgttaggcatcaagac

SEQ ID NO: 10391 - DNA, 417 bp, Homo sapiens
ccgggcaggtactgggattataggcgtgagccaccgcgtctggcctctaacgagatatttctaaaggttaggccttcagtcaagaattttaaagctggatcttagaggttatctaaactaacctctccatttcatagataaggaaagtgagtcccagaaaagcactggtttggacaagttcagaaagctaaacagtgactgtggatgtatgattctgtctcttaactcctaatccaaatgtcttctcactagataaggctgtgccttctacatttgaaggctcaaaccccatggatggatggagggaaggatgggtggagggaatagatggttcttttcattgatagtcttttccattttaatcatttttaacttatttcttttattgagtttttaactttttcaagtttgttgggg

SEQ ID NO: 10392 - DNA, 308 bp, Homo sapiens
ccgggcaggtactgggattataggcgtgagccaccgcgtctggcctctaacgagatatttctaaaggttaggccttcagtcaagaattttaaagctggatcttagaggttatctaaactaacctctccatttcatagataaggaaagtgagtcccagaaaagcactggtttggacaagttcagaaagctaaacagtgactgtggatgtatgattctgtctcttaactcctaatccaaatgtcttctcactagataaggctgtgccttctacatttgaaggctcaaaccccatggatggatggagggga

SEQ ID NO: 10393 - DNA, 429 bp, Homo sapiens
aggtactttttttttttttttttttttttttttttttaatttttagtagagacagggtttcaccgtgttagccaggatggtctcgatctcctgaccttttgatccgcccaccttggcctcccaaagtgctgggattacaggcgtgagccacccatccggcctaacgagaacttattttacctcaactagatggcgttcattcatttgcttactcagctgtgccaggaattaagttgggcactgggaattccaaaaccaacaagacattttctgtcatcagggaactcacagcctattatgagagataaacaaatgaacatgaaattataattcagtaacaaagaatgagtgttatggcagagggaatgtgtaagagcttggcagggtatccagcagggattcctaactaagccccactggggaaggcct

SEQ ID NO: 10394 - DNA, 412 bp, Homo sapiens
ccgggcaggtacataaggggcccaatacaagcaagcataaataatcttgaaaataagagaaatctgagaatgcataattttttagttgatgataaacaatagttttagaacttaaaccataattttcagatgcttgaaaaaattctgatcatcttcaaccatggtatttacatgaaccacaaaaacatacaataacatacactctccaaataacaaattgcactcctacttactcctatttctctactcagtgcccatttcctcaaaaaacttttcccaattagcaccaatgaaggacaacactcagactaccctattctttaaacagacatgaatttgtccaatatacatatatgtatttcctggactattaggtcctaaaatactttagtaaagaaagcaatgacggggc

SEQ ID NO: 10395 - DNA, 297 bp, Homo sapiens
aggtacatccaaaatcatttcaccatataacctgtaaagactgcatcatcccagctactttcctgctgacttccacttgggtttactcaatgggtgacactcacaggacataagagattagaaagagggataaggttttttatatatctgctgcctccttacttaaagccatggttttagcagaggcccaaggtcgtggctttttttgagcagcccctttatcaaaggtgtggaaagagactaccttccccctcacaactgaataatgaggcttactactccccgcgtacctgcccg

SEQ ID NO: 10396 - DNA, 401 bp, Homo sapiens
aggtacaggttctttgaatgcagtatttattcacatagttttcattttctgtcctgacaaaaacttggtgatgcttgaatgattacagaacaaataggattgtggtttatgtttcctattatgcatatttggcagttgaattatgacattagattgggacatggtgagagggggcaggatacggggtaggaggaggggagcaagttacaaaaggccccagttccgggaagctgggctgagttgttctgtttaacttcttcttcctttattcctatggttttatgattgcaaattggcagtggcagggcagctctgactatatttgctagaagcagatgtccacattaatttagatgtttagggattaaaaatcatagagggtggcgctaggaaatatagaa

SEQ ID NO: 10397 - DNA, 518 bp, Homo sapiens
aggtactatatgctagaaacttggctgaatgatttgacattatcctatttaatgttcatgacaatccaataacgtaaccactcatatctcccttttgtgcagataacaaactgaggcccagagaaatcaaatatgttgtcaaaatctacatcggttgaagaagatgggtttcaaaatccaagggtcgggcttgggccctttgccacgaacttccataaatgaaaattccattgggtgagttgtttacacagtttttctggtaccaatccttgctttaatttcaaggggtcttcattcatctccattccacttgttatcaactttttttttgtttaccagggcttttacttctttttctacccaatggaaaaggacttaatggatatttattttttcttcccataaagctttgtgaaaatatttaatcaattcacccattaaaatttcaagccctttccttctggttaaacctttggaagaaccacttcagagcttttttctttaatttccaagaaaac

SEQ ID NO: 10398 - DNA, 426 bp, Homo sapiens
ccgggcaggtaccatactcttttggttgctataattctgtggtataatatgaagtcagaaaatataattcctccagttttatttatttatttatttttgcttaggatagtattatttcttatagtgaaagcattctatgttatttatttataagcccaattttgtagtttttacaatgctatcctcttttacaaagctatgatcaactcagtgtgtccagatcaggatcatttgtagctttttgcaaaagtagcactattccttgctgggcatggtgggctcatgctttatattcccagcactttgggagggccaagacaggccgtttcaccctgatgtttagaggttcaaataccctctctgtgtttaacatggttgaaacccctggtcttcccattaaaaattacaaaaaattaagcccggggg

SEQ ID NO: 10399 - DNA, 352 bp, Homo sapiens
aggtacaaagaaatgaagtaatgtcaaatatagaataatggtttctctggaggagactggaatgtgggtatgcaatcaacagcttctggactgtcactgtttcactgttttatttcttaaggtgaattattcattattctttatattcttttaaaatgttatataactttatagatcaattaactaatgtttggctccttttattttagagatctccagcattttaggttgcctcatcaatagttggcaaaaagaggccaggcacggtggctcacgcctataatcccaacactttgagaggccgaggcgggtggattactcaaggtcaggagttcgagaccaccctggccac

SEQ ID NO: 10400 - DNA, 356 bp, Homo sapiens
aggtacttgtaggttgtgatttttttttgtcaacctgattctgtctgttttttcttaggaactcatcaaaatttccagcctactgataacactccattattttctagcacagcagcactgttaggaaatttttcttaaatatgcacgtagtaaaagtatatatataatgtatatatacacttaaggacatatattacatatggacacacaggtgtatatgtgtgtatacacacatgtatatattcccagtgactttcaggtggagatgagctagatatacacgttcagcattttaatgcaatacttaattataattcataagtgaccaccactgtatgcaagccattattatgatg

SEQ ID NO: 10401 - DNA, 428 bp, Homo sapiens
aggtactgggattataggcgtgagccaccgcgtctggcctctaacgagatatttctaaaggttaggccttcagtcaagaattttaaagctggatcttagaggttatctaaactaacctctccatttcatagataaggaaagtgagtcccagaaaagcactggtttggacaagttcagaaagctaaacagtgactgtggatgtatgattctgtctcttaactcctaatccaaatgtcttctcactagataaggctgtgccttctacacttgaagacttaaaccccagggatggttggagggaaggatgggtggaagggaattaaatttttattcttttgcattgaaacaaacactcaccttttttttttatatcaactttttcacctattcactctttaaacacttttattttttcacctctttacaag

SEQ ID NO: 10402 - DNA, 433 bp, Homo sapiens
aggtactggtctgtggcccaggggttggggaccactggattagtcaacaagagtagttgttcacttcttcatcctccctagagcactaattagcaagaaaattaaagaataaatttaacatttacccctggaggttcaaggacaagttagaagttaataccttaactttcagtttcactcaaatgtgcataaagctccattagtgctgctattggtttcactaactccatccacaattctcccgaaaacagaaaacctcatacaacaaagccaaacctgaaacacaatcaggtttccaccaggcagaagtatggtgactaagcctagtggcctcggcactgctggacactgaattgcaatggggtaagtgaagagttccaaagccaagggaagcctcccaacagcatagcttggaatggagtgatctgctgtt

SEQ ID NO: 10403 - DNA, 400 bp, Homo sapiens
ccgggcaggtacttttttttttttttttttttttccttctcttcttataagacatctgatttaaaaaaaaaagaataatagatttaagaagaaaaaaattagctaataatgacagcaggcttgtaatattatcataatgtcatttatcatagatatccttattctccagggcagcacttctcaaatccttgacagtatgacattttgggccagctaattccttagggagggacctttcctgaatattcaggccgttgagtggcctgcttggccttgacccgctcactgccagtagcacacctcccccaagcttcagcagcagaacacctccagtcacttagtggggactgggtaggtgggagacagaatcgcaccagttaagtgtctctgcggcagggtg

SEQ ID NO: 10404 - DNA, 854 bp, Homo sapiens
  misc_feature 462, 806: n = A,T,C or G
tgcgtgccgatggtatctattatgactatgaaaacttgtgcttgaattgtatttagacaattaatctctatattatatcgtttcatagaacatattccactataactgtaaacgcacgtacagtaatcgtactccctttttagttgaccaggaatatatcatgaaacttgtatgtgtctcacacggatgcatatatttctaaaaataagttgcttttgtttcaatatatacttacttacctatttcagcttatgtaaaagtactgattgagtagttatattccatataattactcaacgtggtttctgtgacttttcgtggtcactcttctagtcatcatctgcacctttattctatttagaattcgtaaaataatattccgactaattgtggcggtatgctatgatcttgatatattaactaccaacgtatttaattctctatggtgtatacaacaaattncaactatgttagtcactatataattattactaatacaaaggggagtaattcattatcaattactaattatctccccctacttacaccaaactctttgagtgaattatccaaccattttatattttatttcttgattatcaaccaaaagatggccattccataaacactctccctttaattttgcatctaaccgccatattgatgggtaaataaaaagtcaatcattcaacattcggcgattgtaaattttgtattcttaatattcccatttcccacacttaaataaggcacttgtctgtggtaaaacaaatatattattttagtattcataacattttcaaccntccaacatacataataaattattcttcataagtccccttctctcaccg

SEQ ID NO: 10405 - DNA, 379 bp, Homo sapiens
ccgggcaggtacgatcttggctcactgcaacctctccctcccgggttcaagtgattctcgtgcctcagcctcttgagtagctgggattacaggcgcgtgccactgcgtccggctaatttttgtatttttagtagagatggggtttcaccatgttggccaggctgatctcaaactcctgacctcatgtggtccacccaccttggcctcccaaagtgctgggattacaggcgtgagccaccgcgctcagcctacaagcaattttttaaaaactgacacctattactgataaaattctctgtttaaaattcctatttactattttaaagataagtattaagtttttttttaaaatacaattatttcttgttattgattaaaa

SEQ ID NO: 10406 - DNA, 838 bp, Homo sapiens
aggtacgttcagacagatggtgccaggagtgtaaaataatttattgtctaaggaatttcaattttcagttagtggtaaggataatagaatctttaatttggtgcagattttcagaagattctgaaaaacaaaaaaagcccttaaaaattaagagttgtaaggattgaaatttgcagggaggtggatgactttatttttgagtgcattttaaatgaaaattgatgggttttttatgaggtcatgggaacttttgcatgaggtggatagaccagttggccacttcagggggctggcaggggaaccgctggttggtcatacccgcatcttggtgcaactgctttgctgccgtgggtacctgaaaaaaaaataaaaaattataaaacgttcttacagtaaaacacttgagggcttacacttagttgaaaaaaactcgattataaaaagacatttagccgatattttacccttgtaacatttaggggggcaccagaacacaacttttgtatgccttaaaggagggtgaaactgcccgtgcgggcatttaaatgggaatggctagatactcggaggaaaattgataatcggtccaaagatttcacctaacatatacaaacctgggggactaaaagttttaaagacctggtgtgcctaattgaagtgagcttaaattccatataattgcgttggcgcctacagtcccgcatttctagatcgggaaaccattggtgccagcttggattaagagatcggccaacccccgggaaaagggggttgcttattgggacctttatcgcatacttattaaatgaatcactgacatcggtgtttgcagtggcga

SEQ ID NO: 10407 - DNA, 347 bp, Homo sapiens
ccgggcaggtacccctcactgccactacgagtatcttagctcacattggtttaatcagtctttagtaaccccagggtgtctaaacatttccatgtctaaaggtgtctttaagaatgggaaaatagtcccccctgcctttcctcttcacacacacagtataccacttctgcagtgttgactctagacccatagccagcagggcatctgctgttaaacctggacgctgctggctgtggctgaaactgagttatctactggacagtgtgtttgtgtcttatagcaatatcagtagttgaatcatgggccatacttcaaatttcagactccctttcccttgtggttttgaa

SEQ ID NO: 10408 - DNA, 422 bp, Homo sapiens
aggtactttttttttttttttttttttttttttttttattttgagacggagtctcgctccttcgcccagcctggagtgcagtggcgtgatctcggctcactgcaagctccgcctcccgggttcgtgccattctcctgcctcaaccttcccgagtagctgggaccacaggcgccccccaccgcgcctagccaatattttgtatttttagtagagagagatgagtgtatataatgccgtaggaataggtaaaattacctagagagcccaagtctctaggaactccaactttagaagtcaggcagagggaaaaaggtgttccaaattttttttttttaaaaaagagagtatttcaaagtggaaataaataggttgaaactgttgagaggtctaattagatgagaactaaaacatcctttggattt

SEQ ID NO: 10409 - DNA, 403 bp, Homo sapiens
aggtactatgtgtggttcacccactgtcttactctctaggaacactgaagtgatttgtttgcgtgccctgcagcacagtccttggtcccctctcaacatgccaccccacacgtttttgttacctgaaaattctatttgtatcactttctccaaaatggctaggtgcagcctaggtcagaattaatcgctccctttcccgagtttccacatcttattctttgacttatccaaatttctaccacttttgttattgctcctgcttacattctgtcccatattgaacatgtggtatatgccaggctctatgctttctctttattattttattgccttcttatgtaaccctacaaaatgttttttttttttcttataaagaaatggaagcttaaaggaggtgacattc

SEQ ID NO: 10410 - DNA, 375 bp, Homo sapiens
ccgggcaggtacaaaaataaatttgacacagctcttgacctcaaggaatttacagtctgggactatttgacaggacttttatggtcccctttgtggttaagaaagcataaataggttttaaatatcatgtgcagaaacacatagcatgttcctacatgactcacaatttgagcaattatacagacataatccagtatcaaaaatggaataaaaaggaaagaatacagaatgagcttctccaattttcaatttccattgttaagttaggaagtcccaaactacatcagaaaaaaatttagaataaatgaattcactgataaagagaagagagaaaagaaagccaacacaagaaacttactctaagaaaaaagcaga

SEQ ID NO: 10411 - DNA, 393 bp, Homo sapiens
aggtactactggcttcccagtggttgggttgagtataagcccccaaatatgagtaaaagaagaaaaagttaattcaatcaccaagtcttgctcgcatattaaaaattggatagatgaatgttcaatcatatgttttggctttggccagccagacgaggtcaatttttagatttgaactgcttagaattcttcaggcaagtcttgatggagcacttcttggacagttagaactttaccaggctcacaggagagctcagatgaagcgaacacctcatccacactggtttcctttggagacctttactgttgagaggtggttttcatagccgcaaaatgacaagtgcaagttgagtagatcagtgtttatcaaccaggtgccccattgtgccccag

SEQ ID NO: 10412 - DNA, 356 bp, Homo sapiens
  misc_feature 293: n = A,T,C or G
aggtacgcgggggggactacaggtgcccgccaccatgcctggctaattttttatattttttagtagagacagtgtttcaccgtgttagtcaggatggtctcgatcttctgacatcgtgatccacccgcctcggcctcccaaagtgctaggattacaggcgtgagtcactgcactcagtcaggttttcaggtgctggttccatggctcttcctgagccgaaaataaggaaactccatagaccttgtccactggaactcgttcccatctaccctccactctatccagggtgatgngatctctgcagtaagtgggaagagtttcttcatgggcccccaagggttatatccattctagaa

SEQ ID NO: 10413 - DNA, 373 bp, Homo sapiens
ccgggcaggtacactacgcaagataatactcttcaaaaagtgcaattactatgagctatgagctttatctcatctgctacttccagtttatacctttgttatttaataaccattgcttccctcactagttacttcaaactatatttcaaaatcaggggagagaaaacgatgacttgtgaaatcacctaacaaagtgaaaaatagactcaaagttttgattccatttatgtgtattcactggatttaagacctgcttaaaagccttagaaaaatgatttaaaatactgacctctgactatatgtgggctgttgcatcatcataaccacccaccatcatcaacttatattgaatagtaatttctgtgccagctat

SEQ ID NO: 10414 - DNA, 376 bp, Homo sapiens
aggtacgcggggattctcaatcctacccatgatgcagacagattacctcatttcagctcaataaaacatcaccaaattcccttaggcagaaaaagggtggggagtgccctttcttgaaggaatcccttaagtgcacgtctcccgttttcttttcacatcaatgcagagtccctctgtgaatttacaacacccaacacccatgagttcagtccttaagaaggaaaattgggcaagtatttaattggttggacattgcataaaagaggtccatatccaggctaactctagaaattttattctcaaacttagttggcctctttttcttctgtcagaggaccattcttagtggcactggggaaatcttggcacccagaag

SEQ ID NO: 10415 - DNA, 492 bp, Homo sapiens
accgggcaggtacgctgggagtagtaagccacattactcatttgtgagggggaaggtagactctttccagacctttgataaaggggctgctcaaaaaagccacgaccttgggcctctgctaaaaccatggcttttagtaaggagggtagcatattttttaaaaaaacctttatcccctcttttctaatcttattatgttcctgatgaagtgttcactccattgtagtataactccaagatggaaagatcattcaaggtaaagttatgcttggggattgaatgcaatttcttttaacaggtccaccttaacaaatgaaaagtgggtcttgtatttctttggtcataaaaaaacactcatgttttaggagtagtagatttcattgtcattactttatacagaagcctgaacttttgtcaaattaattaacaactgacaagaataatttggactggaaagggtaaacaggccaaaggggtaaaactcttcttgag

SEQ ID NO: 10416 - DNA, 430 bp, Homo sapiens
aggtacgcgggatattaaaaatatgtaatcccagcactttgggaggccgaggtgggcggattgcaaggtcaggagttcgagaccagcctggccaatatgatggaaccctgtctctactaagaatacaaaaattagccagatatggtggcgcgcacctgtaatcccagctactccggaggctgaggcagaagaattgcttgaacccaggaggcggaggtttcagtgagctgagatcacgccactgcactccagcctgggcaacagagccatactccatctcaaaaagaaaaaaaaaaaggtatattcaggtccagtggattatatgttttcttgctactgaactgtatgagtttttttaaaaataaattttgggtattaaccccttatcagatatacagcttgtaaatatttttttcccagtctgtagttg

SEQ ID NO: 10417 - DNA, 369 bp, Homo sapiens
ccgggcaggtacaccattagaatcctacctcaaacatgcaatggtgggaaaagatttacaatttaaaatttaaatagtagttaagctaaatttattttggaataatttaggtttccctggataatttttccacgttcatctcaacattatataaattcattcacagtcactcaggatgagtaagtaatgcctccaaaacagcctggtcgtgggttcttctgagtccatctggcttctggctagaagcactggaatgactcataaaaatgaagcaacctggggtcaacctactccaggtcttttaaacagaattgccaactgcttaccaggtggttccaatttccgagaatacttaaaataagggagaaa

SEQ ID NO: 10418 - DNA, 398 bp, Homo sapiens
aggtacatgagtctcttttttttaagaattttaattttcctagttccttatctttttaatgattattctttaagtggacatttaagacatgagcttttaagagcagctgaaaattattggttgtttactatgggttttatccatttgtatactgtttttttttctcagctatcttcaaaatagccataggaggtagattccattactattttactctaaaaagagaaaactgagttttaaagtgttaaagtggcaggaccaagatgaagatacgaggtgaaagtaactaaaggttgttagcataacaattcaaccaaagatgcaattgaaacaatatgtctttgctgtcatgtctagacaatgagatggccagattgcaggcagcatatttgcagtga

SEQ ID NO: 10419 - DNA, 382 bp, Homo sapiens
ccgggcaggacccagaggacacagttgaaatgaggcacaattaggaaaaactaggctgtttaatatccatattgagtagctttgcaagttactttcacaaacttccctacagaattggttctaacagaactgttcaaggccaaggatttgttttttctgggtctgggggagtcatctttataattttaatattccattagaatgccttgacgctagaaggagggtccatctcaatcacatcaataaattgatcccaacctttataaaaataagcttggatagaaaggaaaatccgaagactaaggtagtctggtagaatactagaaggagacatctttttaagaggaggacaagaaaaggcatgaaaacagagaacatggtc

SEQ ID NO: 10420 - DNA, 397 bp, Homo sapiens
ccgggcaggtacagtggagacagcatgagcattagagtcagaatacttcatccaaattcaagtatttgtttagttataagggacagaaatcgaactcaaactagtttaacatgaaaggaattagttggctcagctggcacacagaatcccaaagggtgagataactgaaccaggagggtccactttgcaaaagggtcttttgtaggcaacaagggctttagctctcaaacttacttccctgttcagaaactgtaatatttctcttcccactgagttaatcttagcacttcaaacgcaggagattgatgcccttcttaactgcttaacccgactagaaaacatcctgactttcccatctcctctgttaagtcactaaaaatttctttaactggggaaa

SEQ ID NO: 10421 - DNA, 518 bp, Homo sapiens
ccgggcaggtacatcattctgcatgattcacggactaggagtccctggtcaaaaacttcaaaaactaagtgatgggtcccaagttactcagtggcagaaacttgattcagtaacatgtcagcttgtgggcttgaaaagtcttaagcgtctctacttcctctaacccttggcccttccccggggactttacacaattcctcccttcccactgggacacattggtcaaatttccatgagtagttatcgggaaggtctgtgtcatcctcttgatcagccattgaaataccttggtgctacaatatcacaccgcctcgcaagtccgggagtatatcctcacctttttttctcaacttgattataacgactggatacactggctgcactatacttacactacgtagttccctttatgtctctttccttttcgaggcatcacattgatagaactttatcgtgatcatcgttgatagaagcaacatcctatttggccattttttcattttcaataaatgggggag

SEQ ID NO: 10422 - DNA, 400 bp, Homo sapiens
ccgggcaggtacacatccctgacctccagagcagacttagctgtcccttcctggcaccctctcggaaacactctcttctcttggcctccgtgattcttctatctccctaaccagtttttgtctctcttttgggacttctcttctaccagctctgaaagaaagttctgtccttgcttcaggtttctatcttcggcctgttgtccttcaacacactccccataagggaccccattctctccaagccttcgttcatcacccagatgctaatgagcccttaacctttatcctgacttctgtgaactctggatccgtttccagtgtcctacaggatttctccacctgaatgtcctcatgacacttccatctcagaatatacaacttgaactcattacttatacca

SEQ ID NO: 10423 - DNA, 460 bp, Homo sapiens
aggtacttctccacccttcttacatttatttatgcctagcactgttactttccagaaatgaattaatacagctatcatcactgagtctcaattacttgatagatgacaggaacatcctctgatctctatgggatgagaaatgtaagctttattaccccttaattcctgctgttttgcaaccagagagtaagcaaaggctaaagtctgagggtgagaatgtaagaaaccctttgcctactatgttgtgtcggaaaaagtttagttggcattaaaccttgtcagaattttaccttactttgtaatgaattgaggaaattatggtgattcaggtaattttggcctcaagaatgggatgaaggaatgaagattttctgtaaggcaaacacactcagcattctaattcctgaaaatcaccctttcttggatcctattttttataaaggttgttaccgctctgcgg

SEQ ID NO: 10424 - DNA, 384 bp, Homo sapiens
aggtaccagggatcggcaaactttaaaggcccagacactaagtattttaggttttgcggccataaggtcttggtaacaactactcagctgtcactgtagctgaaagcagccacagatgcaatacatagacagatgagtgaggctgcattctaatgaaacatttataaaagtgggcagggctgggcgtggtgtctcatgcctgtaatcctagcactttgggaggcccaggcaggtggatcacctgaggtcaggagttcgagaccagcctggccaatatggtgaaaccctgtctctactaaaaatacaaaaatcagctgggtgtggtggggcgcacctgtaatcccagctatttgggaggctgaagcaggagaattgcttgaacct

SEQ ID NO: 10425 - DNA, 479 bp, Homo sapiens
aggtactgggtagcacagagatgagaaataatagaaacctttttgttcggttgtttcaagagctaacattgtcaaaagctcaattcctgttttatgtaaggttttggtttatattttctcaaagaagtgaagtgcagaaaatagaaaactaaaccaaatggatgatcatgcagaaactttgttaaggggctggtgaaatcagacttttcttatactaaggagtgggggagcaaacagcaaatgatcccttgattagacgatgtcaagtgtcacctgatactttgtggggcttaaccttggtgacttcttaaatggaggccaattaaaatttttaaaaattctattttttatattaatgtcaaaagaagacaaaatttttatttgatacgccattataattaaaaaaatggcgtttctacattgtgaaaaccactctttaattggaaattatttatctatctttggataaagatattcat

SEQ ID NO: 10426 - DNA, 404 bp, Homo sapiens
aggtacataataggatattatatattagaaataaatgactaaatacgtatatagcaacatggaataaacaaaagacatacagcactatgccatttatatatataaagtatatatacacagagatatgtgaaaccttgaaaaacagaggataatctgaaggatgtatgttaaaaattcaaaagtgggccgggcatggtggctaacacctgtaatccaagcaccttgggatcacaggcgtgagccactccacccagccacctcttttcaagttacccagcctcagtatttctttatagcaacacaaagaactaacccagccataaattaagaaatatgaacactttaggggtgggtggatcatgaggtcaggagttcgagaccagcccggccaacatggtgaaacc

SEQ ID NO: 10427 - DNA, 413 bp, Homo sapiens
aggtacattttacactgtcagctatgggttcagtcagatatgcccataaattcatttatgaagaagagctccctaaacttctaatgattttttcctggtggttttatttagctccaaaaacttatgtttttttttcttaaaaaaatcccataaaaatattcattatcaatacatcatattgatgatatcactcaagaaggagatgtctcactctaagcattattataaaaattcacaggcagtccacttttctagaaaaatatgccagtgatccttctagccttttgcatcctgggattattaaaccaggctgctgagcagccttgacacctgctctgtgaccaatgctccaggctgtttattttggcctataaactctcaaagttgatgggccctgccctcaggagggaggg

SEQ ID NO: 10428 - DNA, 890 bp, Homo sapiens
aggtacgtttgaaggtgtctacaaggcaccaccttagacctttctgaattcttaaaaggttgtgcagtttcaccctgggtttgatttttgctctgaaaccatttcttggctcaagaattgtttgatgtgtggagagattgggaatgagaaacaggtttatatttaacagtttattctttagctcatctctctctgctcacatcttataggcagtgagcagaacccaggtgtcactttaagtggctgcctggaaatctctttagatagatcattgagttcattaggtgcatttccgcttcccactttactgtagatgtcagtgttgctaaactctctgtcactgcacaacagggtcctcctttcctctagcttgcaggaacattttccctcacttttttttaagccctcactggcaaccctttttaaaaacaacagtgatttccattatcttgcacttgttgctattgtgttagggcatttaaaaaggggcgttgggcttaactccggggtctttcgtgcctgctggttagacattttgtgaagccagattttattgtcaaaagggttaaatggtgggttaaatcacataaatttaggggggattctgttccattgttaaaaaggcctgggagggatttacaatgctgatgtctttttacggccttggtattcctcaaattctaacacattctttggtctggtttcaaaaatccaaatattttatatttttccttgccccaacatgccccacttgaaagcttttcatggtttctccattgttttaaatctaaaaccctcgtcttgggtaaactacccggaggacccccgggaagataaattaataattctttgctatatttgggggggacctgaaatatttatctggggct

SEQ ID NO: 10429 - DNA, 380 bp, Homo sapiens
ccgggcaggtacattattcatacactgtaatggcgtaaaagaaccctagacacatggactcccttgctaataagtgcaccttcaaagcgatagtcattatttagcatttatcggaagaggctggccccagctctggtgaagggcagagaaggtgtgggtggcctcacgtgttctcaatgtcacaaaatgatagcattaaacagacccactccctcatggaaggcaatttgacgaccttctattgatattgcaacatgtgtctctggcagcagatctcaatccttatgtaagggatatgggaagacttcctccactttatgtatatgctttccctaagcagtatccgtctaatgcacctgttatccatagataacaatccc

SEQ ID NO: 10430 - DNA, 397 bp, Homo sapiens
aggtactggatatttttgcatataaacttgcagtaatagttcaaaaattaatagtttttgacattggcttttctgagaagagaaattgaaagtgtcacaaaataaaaaaagatgaaatgaagcatatataattgtcaattttttcaattttctagccaacagagaatcgaaggattctgttcaaatattagtaaaaattgaaaataaacttgtgcttatattttgtttgcaacacactagttaatttaacctgtgactagttatctctaccgaaggtggatgtgtagtttctggttttaaaattcaagcaaactggaaaataatccatctaattatgctttctttcccaagaagttttttaatgatatgccagcttcctaatttggagacaaaagcc

SEQ ID NO: 10431 - DNA, 379 bp, Homo sapiens
aggtacgcgggggatcgcttcctggtcctcgcctcctccgctgtctccctggagttcttgcaagtcggccaggatgtctcaggctgagtttgagaaagctgcagaggaggttaggcaccttaagaccaagccattggatgaggagatgctgttcatctatggccactacaaacaagcaactgtgggcgacataaatacagaacggcccgggatgttggacttcacgggcaaggccaagtgggatgcctggaatgagctgaaagggacttccaaggaagatgccatgaaagcttacatcaacaaagtagaagagctaaagaaaaaatacgggatatgagagactggatttggttactgtgccatgtgtttatcctaaact

SEQ ID NO: 10432 - DNA, 400 bp, Homo sapiens
ccgggcaggtactctgtgttccgcctgctcaagttctagacttctggtgtccatagcaacccagcagaaaacatctgcatagcctttgggctgacgtgagttaaacttgagcagtgaagcagcataagttttatggtgcaaggcacactacagatcctcccttacccctcacatctgatccctctgcctatgctcagagccactgctatttctacaaatctacaaggcccagactgaggtgatgaccgggccaatctctggaatagtgtcagacaattagatactctttcctgtcttcaggagcccatctggaataaagctacttatcaagtttcaaaaacaacagaaaagaaatgagattgaggtggaaaacaacccaagtgttcatcaacagatgaaa

SEQ ID NO: 10433 - DNA, 429 bp, Homo sapiens
ccgggcaggtacaaggttacctgtttgttccagtatgtgtagggaggggctgggggttggggagagagaagggtggcaattagtcaatgacatttatgacccatttataaaatacaaatgaaataattggttacaaaatcatgacaagccttcacttgtcttttacaaacttgttctcaacacactgtgaaacttaatggacaccctttgtagaaagtgaggaacaacagccattctgaagagaccgattcaaagcgttcaacctgagactagctgtggtggcgaagattctctgagttttggttcctcaaatctcatctcataaacccccctttattattaggagatacaaaaggaggggaattttgtagattcctcagcccaggggaattgccccagtattatgttgtaggaagaaccaaacatcgc

SEQ ID NO: 10434 - DNA, 407 bp, Homo sapiens
ccgggcaggtacactgaaaatcggggctcgccaacttggattccaacagcacagaagtgaggagaagaagcacaatgaagcataatgtctggataatggctacaacaaccatccctgagaactgcctggtaatatcagggtgataggatgggcttccactctcctaaaacagccagcagttcttgtatttctaactagaaggcagaaaaaaagagacaatctacattaatcatgatttggggattattaccaaagtgaaaagaatctcatttccaatcaacttagaaagcttatcctactccattaagtgaaagaaagaaatatctctttctaaaataaagcatgtatccactttgccttggcataggacaggacacactgggcccaaaatagctccagtccttccc

SEQ ID NO: 10435 - DNA, 301 bp, Homo sapiens
ccgggcaggtactcagctgccagagttttcctggattactgactttactccctggatccagagagggtgttcccagtatctagtctctgcatcttgtcttctgccttagccttttgtcttgctccttaactaatatgattcttgaggtcctacatctgtccatcttagtggcaatgcctttacaccagaatgcctggtcagtgctaacttactaggacatctgcagagtggggagacgataaagatcagcaccatctagtctgccctgccctctctctgacttggatatcattcttagatc

SEQ ID NO: 10436 - DNA, 402 bp, Homo sapiens
aggtacttgggagtagaaggcaaagtgggagaggaaaccattgatacaatgaatgaaacaaacaaatgaaacacacatcaagcaagtcttacacatggtgctcactagaaactgggattcagagttgtattaccacagaagtgctatcatcctcctcttttctaggatcaccaaatatatttactaaaaaagcaagtttgtgaggcattgtatcttttctacttgcttggcattagacaggaaagataaaagggttccagaccacatttaaagggaactccctctgaagaagttaacaaactatgtttgtggcaaccatggggttaagtagctttttcactcaactgaaccccatgggaaatatcgactattcagtttcccctcactgctatgcttgtgaaa

SEQ ID NO: 10437 - DNA, 433 bp, Homo sapiens
ccgggcaggtactgggattacaggcgtgagccactgcgcccgaccatgctttgtcattttcacagccacgtggtgttgggaaggttgcttcctcatcctggccctctccatcccaaagcctgattagttaccggactgccttgaggctgtaactccagagggtggcgccgcttatgcccagcaggtgggatgtgccagagaaaggcatctcttactgccacggttttattttactgcaatttcatcctcacacatcgcacccattttacaggtgaagaaaccgaggggccccactgggggaagtggttttattcagtgactcagaattggtaagaaatgaatggcctcttaagacccacccagggctcttccttgtcagaacctgtcccctaggtcctgccagggctacgaggcaaggcgagttttccagcga

SEQ ID NO: 10438 - DNA, 414 bp, Homo sapiens
  misc_feature 242: n = A,T,C or G
ccgggcaggtacctaacatttctctgctagaagccactttaaattattgttctttttaaaaggaaaatccaatatagttgaaagcttgtgctttataaatatgtgatgcttccctgcattatctgaaagagggagaaaaaccatgtcttgcttttttgggatttaacctgttttagctgatcacaaaatctttattaattgcatttattagctatatagcactccaaggtcttttgaaattntttttggttgcaaaaattctgatgaaaaaaatttaaattggtattattaatctttgtaaattttttgcaaaaaaagcatgttgaattgtagtttggtgcctccttgctcaaattgacttttttaagtaagccaagagtcaaagccaggttgggttctcttttccttcaaccc

SEQ ID NO: 10439 - DNA, 409 bp, Homo sapiens
ccgggcaggtacaaatggttaagcagatccctcaaattctgctaaaacaagaggaaagataagaaaaccagaaatgtcgcctccatcctggccaatgtagaagagctaataggtgaatgacagcatatttttaatccataacggaatgttggtttcttttcttgtttaatggcttcctttctttaggagaacctgatatgagcaagcagaattctggaaggcaacatttttgagagccctgaagtgacaatgggatatctggggaaaagtcaatttcctggcagccccagtccttttaaatttgcctaaactagtaaatattgatttactaaatggaaacacttctttctggactgcgtgggaaggtctatttacacgagataacacgtggtctttaataataatttcg

SEQ ID NO: 10440 - DNA, 404 bp, Homo sapiens
  misc_feature 404: n = A,T,C or G
aggtacaaaaaattagccaggcgtggtggcaggcgcctgtagtcccagctactcaggagagtgaggaaggagaatggcgtgaacctgggaagcagagcttgcaatgagccgagatcgcgccactgcactccagcctgggtgacagagcaagactctgtctcaaaacataataataataataaaaggtgttagtgtaactgctgtgtggagaatgaattaggatggctgaaagagtgaacactgatttaccaaataggaagttctcacagtagttgaaacacaagttatggtggctaggactgggaggggactatgaagataaaaaaaagcggtctattttgaaatagaaggggatatgttttgaaaatagagaaacaaaagtgactatgaagtaggttgataan

SEQ ID NO: 10441 - DNA, 938 bp, Homo sapiens
ccgggcaggtacatgtatgtgaggaaaaggaggtaaacaaggagttagaaagatgtgatgagaccaggtggtgatggactgaatataaagcaaagacatctggatttttaattctgtagggaatagctgaccaagtatatgattacatgtctgctttttaaacagctttgtgatttgaaatgctgggttgttattgtttttttttgtttttgtctttctttttaaaaaaaaaaaacatggctaactctgccaaccatacacaaatatgcatactggcatgttgagaaggaagacaggaatcgttagaatgattcaatatttttcagcctaccatataacgaggttagtgtacgcctagtaataagaatgaggaagaccgactagattcaataaacatttatcaattattatctgcaaattgttagaggacagttttaaagattattgtacctgaaatatgtgccatgtaattatatgtcgtttaaattaccttactaaaattacctccagtagtattattggtacgtaatatacacctcatccccaataaatcttcggaatattattcagtatatcaacagatacatattacataatgtcgacttattatttgaaataaaatctctggaaatatatattataacgggtaaacaattttcaatgctataaaacttataataatatcgcatacatactgttataaatatttgttcttgtaatcacttgattactatatataactattaatttacaattgttgtttacacaaaataacatctaagtcttataactacgttattcattaatattgtgatcttcacgtattacaatcttatgcttcttatttagtaatttagtcaagagttcatttcgtatttcattatctaaaacattatatctcattagtatattgatttcgacatctgatgactttcaag

SEQ ID NO: 10442 - DNA, 471 bp, Homo sapiens
aggtactaacaaatgcagtagccaacaagattaccatgcaatcattaaggagaaccaaagtaagagagccactcaaaccagattttgaacgctactaaaattaaagtagttctttgatgaatatgaatgagtagggaaaggattctttgtgatagtgatacctttgaggtaagggaagggtggtatgtgagtattagtctacagaattatggcaaaattcagtgacaaccaattaaatgtgtctaagaattgacagatatcaacagattttacttctgttgaagggtaatgtttcaggaacaaaaatttcaaataaaaactatgaaaaaccatatcttttacaggctgaaaaatcttttccctaaacccattgttaattttccaactttttaaagtccctcaaagagaatggataaaaaaggggaggttaaggccttcccttataacaatttttcttgcacaaatgaaaac

SEQ ID NO: 10443 - DNA, 395 bp, Homo sapiens
aggtacctcttaattagccaagaataagtgccgtggaagaaggcaggatgactttttagaacccatttttagctcgaagatcactgagggagccatcaaatccatccacctgttcaatcaatattcagccagcaagtgggtgtcaaggtgagcagcttacagtgctgagcacactggaaacacaggtgtgtaagggacagccacggtctcaaattacattctgaaagggaatactaggtaagtgatcccaaacatgcaaatatcattccttggtcctgggatgtgggggaagcattttggagggaattgacattgattggcgaggtcttaaaatttgaccttggtttaaattatgaaaattattgggtgcttttaggtatttgtgaattatatgg

SEQ ID NO: 10444 - DNA, 384 bp, Homo sapiens
ccgggcaggtactatgcacttcccatgctcctagggttaggaatagtttcaaacatgattggcagacataacaacggcaaatactcggactggggcataggactccagagtaggaaaaggacaaaagatttggcagcctgacacaggcaacctacccctctctccagcctctttatgaaactgtttgtttgccagtcctgccctaaggcagaagatgaattgaagatgctgtgcatgtttcctaagtccttgagcaatcatggtggtgacaattgccacaagggatatgaggccagtgccaccagagggtggtgccaagtgccacatcccttccgatccattcccctctgcatcctcggagcaccccagtttgcctttgatgtg

SEQ ID NO: 10445 - DNA, 411 bp, Homo sapiens
ccgggcaggtacattacagagcatatgatctttcaaggttttgttccacatgtgttatgcatagtaactgctcatttctattaaaaatactcataaattgaatcacattacaaataagtgccatatacttaactgaacaatatacacacatacgcgttcctgataggtgatacaaaggcaagaaattctgagaaattctaagattgtgatctgtatcatttggatggtatatcaggagtggcagagggaggaacgttccctaagttcttcacttactggctcctgcacttaggtaggatcatgtcactagtgctggccaatgagcagaagtatggagtgccattcctggagtaagggaaacgtatgtgcaatactctaatttattttttgtcttccatcgatactgaggag

SEQ ID NO: 10446 - DNA, 406 bp, Homo sapiens
ccgggcaggtaccattctcttttggttgctataattctgtggtataatatgaagtcagaaaatataattcctccagttttatttatttattcatttttgcttaggatagtattatttcttatagtgaaagcattctatgttatttattattagtctaattttgtagttttacaatgctatcctcttttacaaagctatgatcaactcagtgcgtccagatcaggatcatttgtagctatttgcaaaagtagcaatattctggctgggcatggtggctcatgcttatattcccagcactttgggaggccaagacaggcggatcacctgaggtcataggttcaagaccggcctggtcaacatggtgaaaccctgtctccaattaaaatacaaaaattagccggggatg

SEQ ID NO: 10447 - DNA, 431 bp, Homo sapiens
ccgggcaggtacaatccccagattttttcatgtgtatcttcttatcacatagggagtccaaacatcactttctctgtgagggctttctctccaaagcactgttctgcggtccaaccctaccactgtcactgtcaactcatacacaggcatacacattacacaacgcatacacatgatcactattcaaaatgaccattttccttatttattgtttatcatctacctctcccacctcgccacaccttccccccaaggcgaaggtaggcttcgtgaaatcttaaccttgcctgtcttattcactgctgtattctggtatagcgtctccaacatacttactgatgaataaatatctgtttaacaaataaactctctctcctctactgaaactattgttggcagtcaccaaggacctattcaaaacagaatctttg

SEQ ID NO: 10448 - DNA, 403 bp, Homo sapiens
ccgggcaggtacattgtgacaatttgatacatgcatacattgtgaaatgatcaaatcaggttcattaatatattcatcacctaatatatttgtcatttatttttggtgagagcatttgaaatccactattttatgacatcagtaagataacctaactagaagctcccaatactcaccaccaccctcccaaagatagccaaaacaataagtaagcaactacatttagaagaaaataactaagggaggatgttagaatacattaaaggtgtattacaaactctgtagtgtgcagaaacccaagatggccacatagacaacagaaggaaacaccttacctccaccaccctatccctacattaggatcagttggaaccagggggaaattctccttgcagggaaaagg

SEQ ID NO: 10449 - DNA, 857 bp, Homo sapiens
  misc_feature 563: n = A,T,C or G
ccggacaggtacctgaagcttgaattcctgaacttttttttttttttttttgtatttttagtagagacagggtttcaccaaattgaccaggttggtctcgaactcctgacctaaagtgatccgcccaccttggcccgcaagcgctgagattacagacctgaaccactgtgcctaacctccctgaacttctcaacattctgagttagtcactttccctttggtttaagccagctcgggttacttgcaaccctagttatacagccacttttctacaacacaaacaaaccacctagaataaaattcattttcctcctttttttttttttttttttaatggaaggtggggaattcagagagcagaaatctgtcctgaccagagaagagttcttaacaggttccactggtatccaggcaagctaccctccagactcaaggtgtgaggcttacatagctgctcctcctcgctgaaacccatgattgccatggcctccacggtttcctggaacatctcatcatcctgggctgccgggatgggcacaaagccattggagaggaaggtgtanttgttgaaacccttccaaagcaggtcacttctcatcttctcctttgcttcagcaatcatgtagtaaaagaagtggaatgtcctcttcgctctggcttggcgaaatggccgtgaattttctagcacaaaggtcttaatgttggcttccacgaggaacccctgacgtcaaattgatgcggttaatttggcctgcaacaggaaaacacagttaaggcttgctgccaacattagccgtaaacccagctggggcaaccagaaggaaaggtacttcgccgtttaaaacaatgatcccccg

SEQ ID NO: 10450 - DNA, 407 bp, Homo sapiens
ccgggcaggtacaaaaagcaaagaccccttctccatctctggattttaaaaactggaaaaggatgctgagaggattgagccaaagagccagtcctgggacagtcactgtggccagctagtggtgtgctttgtctggccacgctgggtcctgctgctcgctccaaaggggcaacatacttgatttgcagccctggcagaatcatatgattaaagtgtgggagggcggtggtgagggaagtatctccccaaaggaaagaaggggtatggaacaggtaaaattaacagatgtttacaaaattgtcttaattattttccccaaaatgcatagccagttttcccaatcctagtttttctctatttacttaaaatgccatctttattatttatcatatagtaaattatctgtc

SEQ ID NO: 10451 - DNA, 431 bp, Homo sapiens
ccgggcaggtacgatcttggctcactgcaacctctccctcccgggttcaagtgattctcgtgcctcagcctcttgagtagctgggattacaggcgcgtgccactgcgtccggctaatttttgtatttttagtagagatggggtttcaccatgttggccaggctgatctcaaactcctgaccttatgtggtccacccaccttggcctcccaaagtgctgggattacaggcgtgagccaccgcgctcagcctacaagcaattttttaaaaactgacacctattactgataaaattctctgtttaaaatcctatttactattttaaagataagtattagttttttttttaaaatacaataattctgttattgataaaatttaaggcattttcattgccttttgcaaatttaccttatactacctaacaagggag

SEQ ID NO: 10452 - DNA, 437 bp, Homo sapiens
ccgggcaggtactgcatggacaggagatgcttagatctgaggtgaggaaatccagagatgaatgttttgtttacctcatgggattgtggcattgttagccactcaatccaaccagattataatgtattaagaatttgaaacatcagcccattgtgggttttacatacacagatgtatattattttgttagccaggtaatgaacagtcattgtcaagttggatagaatctaattcagacttgaataattcatttcatggcctctgctttttgtcaaatagggggaataaaaaatttttcaaaggaacaaatccgggaatatttctacttcaatggacatgtaaaaccttttcctatttcccatccttaacacttgaaagggccgaaggtaaaaggcagtgtaggtgaggtgggaacgtcttttgggatccagtcaccc

SEQ ID NO: 10453 - DNA, 417 bp, Homo sapiens
aggtacgcgggagaataacaagcactctttggtatgggtagcagcagtttcagtgtcttcctgtggtctgtgaagaagagaaacttaacaacaagaagagggaaagggaaggtcgcctaaggagaagacacaggagtaatgagaagacacaggaggtagagcagcacttgctgactcagaagcattaacatgaaacttattccactgattgaaatctgtgatacttaatagctcttatgtctaatcatatcaatatgcagctggattgatacactcctgcaggtggttggggctccttcactgccatgtatgtcccttttgttgcagatatttcaagattcagcatcatttcagaccctgaaaaatccctgaaaattgaattctcaatagataatgcaactccacataatatctgga

SEQ ID NO: 10454 - DNA, 397 bp, Homo sapiens
ccgggcaggtacccagtgtctcatttcaggccctcctcatctttattggaccattgcagcagtctcctaactgggcttaatgctctagtctctccttccttcagtgtgccctctacactgcagccagtttcaggaacactaattgagtcatccccctgtttaaaatcattcagtgaccaggtgctgtggctcacacctgtaaccccagaactttgggaggccgaggagggcaaatcgcatgagtccaggagttcaagaccagcctggtcaacatggcaaaccccatctctacaaaaaaattagccaggcatggtggcatgcacctgtagtcccagccactcaggaggctgaaatgggaggatcacttgagctggtgaggtggagattgctgtgagct

SEQ ID NO: 10455 - DNA, 388 bp, Homo sapiens
aggtactaagttgccatttaagaacctcttcaggttccccgtctccttgagctatgaaagttttcatgaacacttcagttttaatggcatgccaaacattttgttccatgagcaacacaacagttttaaaaattgccattgagtgttttaatagaatttagccagttgtttttaaatatatttctatgagccaaggcttacaaaaatgtataaagaggaagtgcccagatataaagaagctttgaaatggttgctgttgcctccttaaaaatcatcattaaacaatctttcaaacagtcaagtgtttggctcaataatttaatcaaaatttgtaagaaagtagcttagaatgaaacaaaaggatggacatggcctttgaacagaagat

SEQ ID NO: 10456 - DNA, 412 bp, Homo sapiens
ccgggcaggtactttttttttttttttttttttttttttttttgtatttttagaagagatggggtttcaacatgttggccaggctggtctcgaactcctgacctcaagtgatccgcccaccttagcctcccaaagtgctgggattacaggcatgagccaccatgcctggcctgaaatttgtttttaaatactatattgccaattattgccataaaaaggaataatccttttacacatctatactgcattgcccaatatttaatgtattattcttcaagatgaaagaaatattatatttgaataaactgccttatcttcctgagtattttccaactcttttctgctaatgggttaaagagaaaagcccacagcattcaaaattaaaagtcttctaagcttatttgaaatcctt

SEQ ID NO: 10457 - DNA, 380 bp, Homo sapiens
aggtcccagaagggtattgatgtttgaggtccaaactgaaaacccatcacctccttcccactgctatagcagcgttagccctggggttcattatctagccagttcacaccttctaaagtggggctctgaaaatgtcttacttccctcacagacaaagcaattctcaagcctcctgagatcacccaccaaccagagcaactgctgtcacttggaggtgcggctgaattcttctaattgtgacacaaactcttgaaactgtaaatgctgaaagattaaatgaggttataacactcagaaggttttacaagtaaaagtaagtcaaatcaataggtctttatttcatatctgtaatggtttagctctgcggggaagtgttagca

SEQ ID NO: 10458 - DNA, 301 bp, Homo sapiens
  misc_feature 1, 2, 43, 257: n = A,T,C or G
nncggccgcccgggcaggtaccaggattatagttagaatttancggactgggtaggaagactggatagaaatctaaagattgctgactcaaacacaatgtggtttctttgctttattgtcacagctctgaattcacaattattagttaaattcataggcactataactttagaaagcaccttccaaaccaagtttagtgatttattataattcttactttttagattgacttcagtgttatgagaatattgagaatntgctacatagtatcatctcagctgtgtccacatgagctatctgt

SEQ ID NO: 10459 - DNA, 379 bp, Homo sapiens
ccgggcaggtactaaaaatacaaaaaattggccaggcatggtggcacatgcctgtaatctcagctactcaggaggctgaggcaggagaatcgcttgaacccaggaagcggaggtggcagtgagccgagatcgcgccattgcactccagactgggcaacaagagtgaaactccatgaaaaaaaaaccaaaaaacaaaaaaaaatgtgtatcttattacagttgagtccttttgtgagacgaacattcagtgtttgctagattattctaattagctacctttgtatggttaggttagcatggagctgaagataaatgtcccgtttgaaaaaatgacagcccttcagaaaactctggcagtttacagaagaaatacaaatgg

SEQ ID NO: 10460 - DNA, 408 bp, Homo sapiens
cccgggcaggtacactttatctgtctctttgcttctttcccaccctctttcccagctctctctctgtctctctcttgtaccctgacccttttttcttcctatgcatacttttttctttccctttttaatctctatatcttaatcctaccaatggccctctgagaatttattagccatgatagggattcttaggcctgagatttcttatcaaaaaatatttttaaagcattaaccgtgtgctgagccctgtgctggatactttacgagattcaaaaataagaccagtctcttctcttcagaagtttccagtagataaaggggtaacatcactatactatatgaaagagtttttagtggaggtaaaaactaccaatggtgaaagtgtttatagtttggggggagaacatc

SEQ ID NO: 10461 - DNA, 388 bp, Homo sapiens
aggtactatatgctagaaacttggctgaatgatttgacattatcctatttaatgttcatggcaatccaataacgtaaccactcatatctcccttttgtgcagataacaaactgaggcccagagaaatcaaatatgttgtcaaaatctacatcgttgaagagatgggtttcaaatccaggtcggcttggcccttgccacgacttcataatgaaattccatgggtgagtgttaccagtctctggtccatccttgcttatttcaagggtctcatcatcccatccactgtatcactttttttgttacaggctttactcttttctaccatggaaaagactaatgatatttttttctccataagcttggaaatattatcaatcaccataaaatt

SEQ ID NO: 10462 - DNA, 450 bp, Homo sapiens
gcctcatggagctcattagaacactcgatctcatcgcggtgacaggccgaggtacgttcatctacctattttgcacttggatgtaagtcctatattgtgtcttaaaaggagggaacattctagaacccaccaacccttcctgatactgtcacaagatttttttcccttaattcttttaaaatcagggccacatttcaactccctgcccgctgccatttgatgatatttttgtttctctttaggtatcgtcctattttctttttctttaccactgacagcggcttatttcatatgaataatatattaaatacatatgcatttaaaatattgttttgatttgtttgcgaattgtttctcttaaagggtctatctggggaaatgagtaatttttcatatcctgttcttgcaggaagaattttaaatcgtttctccaaagacattggacacttg

SEQ ID NO: 10463 - DNA, 401 bp, Homo sapiens
ccgggcaggtgggatatgggcagtgattatggcaggtgggataccgcaatgaatgtggcaggtgggatacggcagtgattatgacaggtgggatacagcagtaaatatgacaggtgggatacagcagtgattatggcaggtgggatacggcagtgattatgacaggtgggatacggcagtgattatgacaggtgggatacagcagtaaatatgacaggtgggatacagcagtgattatggcaggtgggatacggcagtgattatggcaggtgggatacggcagtgattatgacaggtgggatacggcagtgattatggcaggtgggatttggcagtgaatatgacaggtgagatacagcatgaatatgacaggtgtggttccagtccacaagagcttgtat

SEQ ID NO: 10464 - DNA, 487 bp, Homo sapiens
ccgggcaggtacacatagctcaggaactactgatgcactgccttccattttagtggcagtttgaatttaagaatttctagtttgtcttaagcttttctgtaatctctcacatatatattcttaatttcaactgataatttctttcttaatgtctaaataaatagccctaatttgcccctttgaaacaagcattggagaatgcttggaaatttttaattgcccaaaaaaggttggccttttggttaagggtggctttttcattttcttgcagttagaaacccaatggtttgaaggcttaatgggttcccatccaagcattaagcaaggccctatttggtctatgttgcaacaagtaaaactggcattgtttttcccacctagttaaaaaggagaataacccctcaacaggtttttagggatttaatggcctgaagttgttagttgttatcttttggggatatttacaggattttttttttctattaaa

SEQ ID NO: 10465 - DNA, 823 bp, Homo sapiens
  misc_feature 160: n = A,T,C or G
aggtacaaattgctgaggagaagcaggaaacctgtttccttagtggcttttatcccctcggcatgcgatggggctgatgtttctatgattgcctcagactttcacatttactagtagggctgagagagggctttagtgaggaaggagatattcagaatanaaacggttgagaaagctgagaagaccattgagttttgatcagttgtgaatagagtgcaaagccatggccaagctgtttttggaaacgctggccggcgtgtcttcagtggaaaaagcaaatcaaaatggagcgagagcaaaggggcgtcctcagtcctcaacctataatcactgtatggaatcggtcctggcagctgaacataggaagtcactggaacaagtgatagtgcagattggctttcaaacatcctcctggcttgagttttatcagctacaatgtgggtcctctttttgaagccttaattcacaacagcagctttttgggggtggggctgggcgggtgttgacattgttctttccctcctggaaatggcgctaggttgttgcctcgaatataagttttttctctggttttgagaaaagggaccattttttgaccccggagggacatttctgttttccttggggggcctttaaaaaccgcctcagaattgttttgttttaaccaaacccgatttgtttggtgggataatacccccccaaactctactgattgtcgcaaaaatattgttatgtagggggtgtaaatgaaacgaataagaggggcaccccgcatttttatattccgggaaaggcctgtaaaacaaataggctatatatatat

SEQ ID NO: 10466 - DNA, 438 bp, Homo sapiens
gccgcccggccaggtacccttccatgatgttgaggagagactctcctatcctcaccacaccagagagtaggtatgcaggttgccaccagtgttctcctccctacccactccctcacttttcttttcattggttcagtagaaggaggggctgtgcagtaaggctgccgcttgagcacagggacagccgtcactgcagtgctggtctcctgttcttggaggcacctcagtctccttgacctcttagacaccctcctacccccaaggtggggaaggagcaagcagaggcaaaatcccagccctccttgttaagactacagtgactttcctcctctcccttctccgtgtccgtaatgcatagctggaaggaagtgtctgggtggtgatgccagtagctgtgctggtgccatgccaggtgctcttcatgagcaccaaaggagg

SEQ ID NO: 10467 - DNA, 400 bp, Homo sapiens
aggtacgtgaaagcgctttgaagatcacaaacccatttagaaataggtgggttgctcttcctcaaatctttgaaagctgtctactactataaattcattcattcatatctttccctcattcctttcagttttttaaaaatgtattctatccaacttacatgtaagcactttgcaaacactcactcatttactatgaataacaatcctactatattcacaattatcatttccccgctttacagaagaggaaactgaggcacagagattagacagtgtaggcaggattcaaactcaggtggtctggctctactgtccttgctcttaacctaggcccacctacagttatccaggtttctgtttactaatcctcagccatcttcctctgatcagaatcaacata

SEQ ID NO: 10468 - DNA, 356 bp, Homo sapiens
  misc_feature 356: n = A,T,C or G
ccgggcaggtaccattcttatctcagaatgctgtaaaccatcagtagaagcagtttagatttggactgcatggtaaaatgaaaagtaataaccctccaaccacaacctagtcagggtattaataattatatgtagcaagaaaacaaagaagaaaataatattgaaaaaatggagattccccaaccagtttcatatttgaaggatctgagttgtatttttattaaggaaattttttttctgaatactgtcttccaaaatgttaacattaaaatctgaatcagaggactctgaatggaaaagaagtttgatcactgacacctagggctctgaagcgtgtggggccacatggaaaagtn

SEQ ID NO: 10469 - DNA, 553 bp, Homo sapiens
ccgggcaggtacctaggagctttttgaccctgtgttgagatgcctaaacagcttcctgattgacctcctgatatttctgcaaatgtggactaagaggccaggattcctcaaggcccaggtgactcaggttattccaaaattatatttggaactaccaaatccttatgcttgaatttgggattgcaaatagggggacattcttttccctaaatcacttaaagttagctttttaaaatgttcctccctcttcatttaatggttaagtagtactctattttttttgagtactttcattttctttttcccattgacctttattgtttattggcttttgggattagaagtttgtgatttcaagtacagtaaagtagtctttggcttcatggtgcatttggttatttctcaagggggataaagttgctttatctggaagggcgaatctgagtttcttgttcttgcattttacatggaaagtttaccttttgttccggtttttagttacataagtaggtatcactcccgtgtttgttgccccggtggattataaggatgg

SEQ ID NO: 10470 - DNA, 419 bp, Homo sapiens
aggtacaaccagaaccaacaattgtatttctctatagttattttaaaatagtaatcaatgctatgtatttgatgtatatgtttctaaattagaaatttcttttggctttgtgtttttttaatgtgcgttaaatatgtaaactgaacctgttccctaaaatgcattaaacttgaatgctgtgtctatccaatgccaaaattgctcaggaagaaaaagtgaataaattccagtcattcattctggatgttagttttctgttgtagcactccaaatatgctgaagcgattgaaaacaaactaaggtctgcttgaactattgtattcatttcctctattgccgaactgtaataagcattccatacatgcctcgattttaaaatttccagtaattttgtttaacactttcaaaatattcccctc

SEQ ID NO: 10471 - DNA, 382 bp, Homo sapiens
gctgggtcccgcactcttgattcccttgcattcaatgccttaccactctacaactgtcttctaacagagctctattccttaatcaccagtgtaatctatccaccttctgcatccctgtcactgagtagctgggtgattctgggaaaaacaaatgctcagagttgtcttcccaaaacccagctgagctcccaacacaccttccaatccctctcagtttcttcagcaatcatcataccctaataccatgaaattcactatgcacaactctttcccctaactgcagcccaagaaaagctgaaaaactcaaaatcctgttatagcttcccactaacctcatctatatccacatctttccagacctctttcctgtcaggttcagagg

SEQ ID NO: 10472 - DNA, 375 bp, Homo sapiens
ccgggcaggtacaggaacaaacgaaaatccaaacttaatggttttcttggaggaaagatgattctagttccttgcagttactaggaactcaggggagagttgccatgaagtaaattacacagaactaaaatctgtgttagataacaacagggagatgtcagtttgggactctcctccagggagcggaaggagtttaaacttactagaatgaaggcaattttgaagagtgaagggcacagatgagaaaatggagaacgggacctttggagaacctaagaataaggaaaaagagaagcgaaggaagccaaggcacagcggaaagttccaggttttaccctgagggaaagccacattccatcacagggtgagggtgtt

SEQ ID NO: 10473 - DNA, 815 bp, Homo sapiens
ccgggcaggtaccctaggtgatgcctgttcttttgaaacagcagagattttattttaaaaatacgtttttgtgtttattacctaaaggagctattctgaaatttttatgtagaaagatcttcttctgctccatccacagaagattttttatccatagatattttggccatctcctttctcctctttcctttgttgtagatgatatgaaaagactgcttttttcaaaaattgtgttattaaattggtgaatattgccatgcctaaagtgatctctgagatatcctccttatgggtataaacattactgtcacatgttgtaaagagctttctataatagacacagcacactggatttaattttcttctcccttcttggtagatctcttctggttaaatagaaaatgcgggacttgcctcctattatagaagcttgtatgaactgccaggggtgcactctggagggaacgcttggctcatggaagtgaaccttggtccaatggagctggcttaacttcttgtggggttccaggaacaccaagtgctttccgcctaatgaggtgaaaataagtggggagaattcacatatggcgaaaattttgcgggaaaaatagatgcttaatttttcttcttaaaattatggaaaaggtaaatactttgggttaaatacatgattgttaccctcttaaaaacagatggttaaaatcgggaaataacactctcttagtttacagggccatgaatacatctggccgcattttgtagtaaatcaaaggagagggtattctaattgaattactggccttggccgtaaaaaa

SEQ ID NO: 10474 - DNA, 375 bp, Homo sapiens
accgacgacctgttggccggcggcgcgaacgacgagcagtccgaccggggcttccagggcggcggcaaccgccagtccggtcctgcggggaatggccagggcgagcgccaggccgaggcgggcgcagccagcgccgatggcgacgaatacgaccaggggacggcgcgcagccagtcctgatccccaggtcgcgcccggcgctggagggccgccactgttcatgaaaccgcgcacataccgacattcgtcgctttttgataactgagggcaagtttgtgtcaaaatgtggcaatgaaccatgagctttccaatacacccgcgctcacgcggtcctaccgcggccagtcccaggagcagcggcgcgccgagcgccgc

SEQ ID NO: 10475 - DNA, 378 bp, Homo sapiens
ccgggcaggtacattatctctggaccaggaacacaacacagcggaacaatgagtttagataccccacaaggtgggttctctggaggctgggtatgttgtagatgtggctcatagaatcacagagttaaagggcaactggaactcatctaaccaacttctcatccaagcagtttccctcctataacattatacatagccagtctcctaatatccatttacatactttgagtgacaggaagcctgccacttaatgaagtgatccatttcattttaataaagctcatttttatgtggtaaactgtttcaatatcccaggtaagcagtagcatttgcacagaccaagaaaaagcgtgaggattgcgttcagagtgccaaccc

SEQ ID NO: 10476 - DNA, 388 bp, Homo sapiens
ccgggcaggtacgcgggggactctttccagacctttgataaaggggctgctcaaaaaagccacgaccttgggcctctgctaaaaccatggctttaagtaaggagggagcagatatataaaaatccttatccctctttctaatctcttatgtcctgtgagtgtcacccattgagtaaacccaagtgggagtcagcaggaaagtagctgggatgatgcagtctttacaggcacctacaatgaagtggtttgtttcttggctaaaaacaccagtttagagagagttcgtgcatacttcacgagctgactctgcaataatacactgcagatcttgctggaaggaacagcaaagataccagtaaagatgtcatctggccaatttgtgtgaaaa

SEQ ID NO: 10477 - DNA, 362 bp, Homo sapiens
aggtgctggacatgatgggagacactggaaagtcccaaacctagtttagggtgttaggggacttcctggaatcggggacatctaagctgagccctaaagtaggagacagtcagatgggagagagtaaaagaagaagacatttcaggccaaatgcctgaataccataccctggagtggtcaggttggttctctggtgggaacacgaagattctcctgatcttctcctccctactctcaacactctcaacattcgtagtttttaccttcactaaatactctttcctatattatagtgatgttacccctttatctactggaaacttctgaagagaagagactggtcttatttttgaatcttctag

SEQ ID NO: 10478 - DNA, 757 bp, Homo sapiens
ccgggcaggtacaatccccagattttttcatgtgtagcttcttatcacatagggagtccaaacatcactttctctgtgagggctttctctccaaagcactgttctgcggtccaaccctaccactgtcactgtcaactcatacacaggcatacacatacacaacgcatacacatgatcactattcaaaatgaccattttccttatttattgtttatcatctacctctcccacctcgccacaccttccccccaaggcgaaggtaggcttcgtgaaatcttaaccttgcctgtcttattcactgctgtattctggtatagcgtctccaacatacttactgatgaataaatatctgtttaacaaataaactctctctcctctactgaaactattgttggcagtcaccaaggacctattcaaaacagaatctttggccaggcactgtgggtcacgcctgtaatcccagcactttgggaggccgaagtgggcaaatcacttgaggtcgggagttcaagaccggcctgaccaacatggtgaaacctcgtctctactaaaaatacaaaattatctgggcatggtggcacacgcctgtaatcccagctactctagaggccgaagcaagaaaaatagctgaactccggaagcaaaagttgcaatgaaaccaaaatgtgccactgcgctccaccctgggcaaaagaacaaaactctgagtagaaataggtaatgttgtggaaaaggtcccttggccgttttaaaacaa

SEQ ID NO: 10479 - DNA, 442 bp, Homo sapiens
  misc_feature 331, 333, 334: n = A,T,C or G
ccgggcaggtactgggattataggcgtgagccaccgcgtctggcctctaacgagatatttctaaaggttaggccttcagtcaagaattttaaggctggatcttagaggttatctaaactaacctctccatttcatagataaggaaagtgagtcccagaaaagcactggtttggacaagttcagaaagctaaacagtgactgtggatgtatgattctgtctcttaactcctaatccaaatgtcttctcactagataaggctgtgccttctacatttgaaggctcaaaccccatggatggatggagggaaggatgggtggagggatggattgntnnatttgataggatttgatagtttacttattttatttcgtttttccgtgattgattgcattgattctcccttatttgtatttttgtcgcctcttaaccaatttttgctct

SEQ ID NO: 10480 - DNA, 381 bp, Homo sapiens
ccgggcaggtacgcggggattgaaaaaataattgcttgttctctgtcagatgcacttcgtcttagtaacatgtgccatggggaagacgaccacaggccagatagtcaatctgttgtccaatgatgtgaacaagtttgatcaaggggacagtgttctaacacttcctgtgggcaggaccactgcaggcgattgcagtgactgccctactctggatggagataggaatatcgtgccttgctgggatggcagtttctaatcattctcctgcccttgcaaagctgtgttgggaagttgtaactcatcactgaggagtaaaactgcaactttcacggatgccacgatcaggaccatgaatgaagttataactggtataaggataat

SEQ ID NO: 10481 - DNA, 382 bp, Homo sapiens
ccgggcaggtacattggatattcctaaggatacacatttttaactgtggagtgtaacaataggaactaacaataaataattgggttggcattaagttttatgggattcactttgactttaataattttttttgagacaggatcttgctttgtttgcctagaatttcttaattttcctttccttaataaatatgatatgaggagaaccttcttcattgcttatattggataatagtattaaagttagaaatagcctaagggaaatttacttgattttttttttcaaggaaatatactaaagaaaaagctgatataggatgcttttaaatttataaattgtttcctcataatcttaacagttataggaaatgaataaagagtat

SEQ ID NO: 10482 - DNA, 433 bp, Homo sapiens
aggtacctattttataccactcaatgaaatctccacctatccattgttccaagacaaacacactgtctttgttagtttctcatgcaaccttgtgcctcacataaatcaatgagaaacaaactacaacagggacttctgatataatgtgccctaaagaaaatttgtttctggcctgttttaataaaaattaaatagcttccttaaattgtgaatattttccattatagtgatattgtaggaacaccagaatttttttttttttgagacagtctcactcttatcgcccaggctggagtgcagtggcactatctcggttcactgcaacctccatgtcccaggctcaagcgattctcctgcctcagcctcccaagtgctgggactacagagtgagactcttgtctcaaaaaagaaaaataaaagaaaaagaaatgct

SEQ ID NO: 10483 - DNA, 433 bp, Homo sapiens
aggtccttgaagaagacttagatctagaagcagctatgttagatgatcagacctcatacactgccacttggaagatgaggtgtggtcatggggttcagtttcagaaatgtgttctctctgttgatcgtttctggaggaagaaacatggggatgtgtttagaggggaggatatgccagctacttatcataggaagtctagaaaaggcagccatagtgaggtcactatttgaaaaggagtaagaaggaatgtattgggcaggaaagagtgtgcatagactcttctaggtgaatcaggtgagctgtgttctatctgcggagaactagtgatggtggggcagaccaggcatcttcccctccacttgtcataggggtctgagaagggaaacatggggcagaattgggaatcaatctgtaacactgcttttaaactaag

SEQ ID NO: 10484 - DNA, 405 bp, Homo sapiens
aggtactaggaactgagtaatttggaaataacattaaccactttcatataccacacacctatcttgttaagtccaaaatgtcagtagtaataaggcttaatcattaagattaagaatattgttatatgtttggaatatgctaaatttatatgctcttctttgaccaaattcagtgtcaaacaaatgtcaatcacgtatctgatttattccctggtcggcattactgaaagaaaaatgtttatttaaatcagcatgtttcaatttattttattatttttttatactttaagttctgggatatatgtgcagaacttgcaggtttgttacataggtatgcatgtgccatggtggtttgctacactcatcaacctatcactacgttaggtatttatcctaatgctatcc

SEQ ID NO: 10485 - DNA, 378 bp, Homo sapiens
ccgggcaggtaccccatatatgctggtggtttctaaacctattttgttgtcccagcccattcctacttgcagctcggatgtgccttgctagcctggcttctctacctggcacctcacactcaggatgccaaaaaaagttctgttttctttccccgaaatcctgttctctgctgctgctccactgccacctgttttcttttcttttggttgctggttcccaccagccattcagattccagccggacacacgggattgtcctggactcctctgaattcctcatcctcttcccctggcccacatccagtggggaggacccccgtcctccctcgttcacctcctgatgacataaattcttgaccgtgggctctttgtatcta

SEQ ID NO: 10486 - DNA, 405 bp, Homo sapiens
aggtactttttttttttttttttttttttttgaagagacagggtctcacaatgttgcccaggctggtatcaaactcctggcctctagtgatcctactgccttggcctcccgaagtgttgggatgacaggtgtgagcaaccacacctggccaataattttgtatttgacatgtatatataatatcatgttatacagatattacaactggctaaggggctgactccagatttgctcaacggtgtctaagaaggaaattaagtgaagcacacagaacaacaaagatactgtccagaagaattcagagaagacagacatagcacagaaagacagaaaaccaactggtgaaaggattactaaatgggtaatttccccgtatatcacacttctctgtattacatattacat

SEQ ID NO: 10487 - DNA, 407 bp, Homo sapiens
aggtaccacaaaaagataaaaaaagctaaacagataaatgctttcactaaaattagacaattcctaggaaagagatatataggaggctatttcctgggaggaaatttataccaccatttcagcctgctgtaaggtggagatggtagacagctaaattagggtcctctctataatattgactgatgatggggggtgtggtttcttacttggctgagtgccttgccaatcatttctgcacctgcggggcctggagattgctgatgtgcttcaggcataagcaaaccacatcaaaggctcagctcactggcatacctgacggtcaaggacagagacctgctctgaccaaggaataccccaatgagactggcctggaggatccaagccagttcggcaatgttttatggagt

SEQ ID NO: 10488 - DNA, 362 bp, Homo sapiens
  misc_feature 164: n = A,T,C or G
aggtacccccgaatctaaaataaaagcagaaattatatgaaaaaactggggtgggagttggaaggaactttagatatgtaataaatttgtttgaaaactgttaatttctcatgctttcattaaaaaataattttcctcaagaaaccccaaattctccacctcangaatgaaaagtgcatttgaatttcaagaaggtatgggcatgagaaccttgcagttttctaatttgtggagacaaaataatttttataacaccaaccagaggtttcctctacaaaccccttgtaattcctttctgagctctcttccttctagaatcttggggcatctgaaaaactcaaagctatgtaaacacaacatat

SEQ ID NO: 10489 - DNA, 516 bp, Homo sapiens
aggtactaaccttagctagtaagtaggaaggcttggaatcgaccccagctcttctggcttcaaagctcctatacatggtgccaggacatataatccagtcctcctatcttcccacccagtggctctttgctgttataatgtcccaatcatccctaccctgtcctttcctttctccacccttctaacttaggcctggaatatcagttcctgaattattttaccaaagcaatctagtgattgattgaaagcctaattacatcaatcaatacaatgattatgatgttgtaagtcgctatatttacaacacttctaaattcactagactgctcttcaccccagtctaccttagaaaataagttgcccccagcccccatttaatttggggccttgaataaaataattttggtttggaataaaattgaaattaccattgaaatattatttccgttattgccctttattgcaagaacctccttcttttttcacccccagtttggggcccattacttacacaaa

SEQ ID NO: 10490 - DNA, 440 bp, Homo sapiens
ccgggcaggtacatgccaccatgcctagctaagttttgtatttttagcagagacagggtttcaccatgttggccgggctggcctcgagctcctgaccttgggtgatccaccctcctaggtctctcaaagtgctggaattacggtgtgagccactgcgcccggcccttagtagcatcttttaatggaggtagagttgagatttcagtgactaacaactaaaggtattaaaggtaggggtttatatgatacatttgcattttagaaaactgatctaagcttcaatgtgaagaacagattgaaatggaagggggagaagactagaagcagaaacattactcatttaagtaatctggaccatgaaactgaaaaaaagtatagggcctccaaaagtcataaaaaagtgaaagcaagaattggcaattaactgttaggacagggga

SEQ ID NO: 10491 - DNA, 806 bp, Homo sapiens
  misc_feature 406, 736: n = A,T,C or G
ccgggcaggtactttttgttccctgctgtggatgcttcttggataggttgataagcaaagaagttcacgttggcgacaacacttccattaaagacgcgtgcagtaaatcctatgatgcaatctcctgcagcttaactagcagacccaagctggtctggcatgatctatgcaccagcttgcagaagcagtcagatgagtcactgtgtggccctccagggagaagcaagtccatactctaaaaaaaatataaatttttattctagaaaatacaaaaaaaaaaaacccgaccttgcctacaactaccttttgtttttaaaggaagtcatattccaggctctccctgtcccttcaaaaaagctcaaaactggacccaacaccaagtctctcccatgaacattcaggcggngtctgaggtggtgaggccagcaggtttgcctcgagagagtttgcttcaagtgaaactccataggcacatgcagcccactgagtggaacaaactgagtttctttcattcttagtcattactcagcttcaaattatacacatgttggaaacttatacacctacttttgtattttggaaaatcactggattaatgattggactaacacaatatgcaaatctaaaggacaaggttgggcgcacaaaaaatgaatctacaggcactaaagaatagcacagaacccacagccccatgccaccttgaaggcaacgtgccttccttgggacacaaganagggccggaattctggagggaacgggtaaatctacctggacaagcaagcacaagtaggctttccggttat

SEQ ID NO: 10492 - DNA, 390 bp, Homo sapiens
ccgggcaggtaccacatttgtgaatttatgccacagacttatttacgtagtgcactaaaattataaatagagataatgattgcagcatggtttagagtagtaaaggactggaaacaatctccatggcactgataaggcaagatgtagggaggagaaatggggagtgactgctcagatacagtgcctccttttgggggtgatgaaaatgttttggaacttgatagaggtgctagttgcacagctttgtgagttttctacatgtcacttaattgcacactgaaaaatgttaaatgtgggctggggacaatggctcatgcctgtaagcccagcatttttggaagccaaggtgggaggatctcttgaggctagcagttcaagaccagcctgagc

SEQ ID NO: 10493 - DNA, 516 bp, Homo sapiens
  misc_feature 391: n = A,T,C or G
ccgggcaggtacaacatttaacctctaagccccacccccgaattccttgagcaatgactcatcttgtttctctgggcaccttggcttcatgagtcagtctcagatttgggtagagacgtagtcatttaaatcctctcctaggacagtctttgatagccaaaactttcctggtcaattccggaccccccagaaataaccttctagttcaaaaatgggctcttaaaacacccctgacccattgtttcttcttctgggcagccagttgcaagcccctgcaacacttaaacttgttgcccaaggaagagggtgtccagcattccagttggaaaaaacacttcctcaagggctcttgcgggggaagccttcaaggggccaagggggcttggctttntttcaaccattaaggcccaaggttttaattattggcctttaggtggaccctcccccccgttgaaaacttttggggctggaaattggcccaagaagaattttcccaaaatttttaatttttgattt

SEQ ID NO: 10494 - DNA, 371 bp, Homo sapiens
ccgggcaggtacaaatctaaaacacaaacatcacctttacaaaacaaaattgttgattaataattatctttttcataactatctcataactttatgactacaggcccaccatttaacaactacaaccttcacataaactaacatgtgcttttaatgctgaccttagtttaaaaagcctgccagtatggaatgacattcaaataaaataaaaccaaatttaaaaagaacagaaatgcaaactcaacaatattcccatcttttgaatcctgacaatgtagaagtcaaattcataatcatcctaaaaaccaaggggagtcatacgaccactgtatgtctctttcagtctaggaataatgcaaacagcaagaaga

SEQ ID NO: 10495 - DNA, 411 bp, Homo sapiens
ccgggcaggtacaagcgattcccctgccctcctgagtagctgggattacaggcatgccatcacgcctggcttatttgtatttttagtagagatggggtttctccatgttggtcaggttagtctcgaactcccaacctcacgtgatccacccacctcagccttccaaagtgctgggattacaggtgtcagccaccacgcccagccccagaatacaaatttttaacatttagtataattagacagtcatggcattttaaggtcagagcttcttactcaaatgcagctcttttctgtaaggacaataaaatgttaatttttactcagttaacattctaaattagtgttttaaggtcatctcttttacttagaagacagttgttggccaagaaacgtttactgaaccagctttag

SEQ ID NO: 10496 - DNA, 452 bp, Homo sapiens
  misc_feature 28, 29, 46, 109, 113: n = A,T,C or G
ggcatgatcgaataatctgatatgcganngatctccgcgaggtgcnggccgaggtacttagcagttttgtgacctagagtcagtgctttgagtatttgagccttagctnctgngtctataaaatggggtttacacaactcaccttacagggctgtaagattagattgcacagaaaatatattttttggctgtgggggctggaagtgttgctgattagcatttgaaaattccatcctgtgggtgagaaaaccccaccttatgacttggtgggaaacaaaaccaacctcccactgatgaagctggaggtagcagaaccttgtttttactgccttcctttgcagcttagaggccggcacaaggactagcccggcaattggaatgcaaatgcctccaggcccttgaattcacaaccttggggactttggaccccaaagtttattacttattgggct

SEQ ID NO: 10497 - DNA, 375 bp, Homo sapiens
catcttgggtcatcgatgagcctcgccctgtgcctggtcccgcttgtgagggaaggacattagaaaatgaattgatgtgttccttaaaggatgggcaggaaaacagatcctgttgtggatatttatttgaacgggatttccgattttgaaaaggaagttcccaaagtgagcctttaccaatggagaggaaaacagacgagaaaaatcttgatggctttacaaggcatgcaacaaacaaaatggaatactgtgatgacatgaggcagccaagctggggaggagataaccacggggcagagggtcaggattctggccctgctgcctaaactgtgcgttcataaccaaatcatttcatatttctaaccctcaaaacaa

SEQ ID NO: 10498 - DNA, 412 bp, Homo sapiens
ccgggcaggtacaatggaggaatacaaagagggacatgctgcagcctgtctaggttaaggtgtttgatgcttatgatgtggccagttgatgctggttctagaggcttgtccctgaaagcagctttcctctttatgtgtcccacttggatttctttgagctaaactttcatgaagacaggagaaatgcttacatcttaataacttcaagaggacattttggttggcaagagacattgggttgatgcaaaccattggttacttccgagtatggtaaggagtctgttgtgtggtgtgcaggtcccgtcactttgttcttcactgaaggattccctcttactgagaaatctataacattacctgctgcaacagctgtgcccttttgttttcctttggataatcctggctttctttt

SEQ ID NO: 10499 - DNA, 482 bp, Homo sapiens
  misc_feature 5: n = A,T,C or G
tgttnttagcagccgcgcacagaatacttagggcggattggttctacctccacggggcgggcgaggtactgagttcattcagatagaattaaacatgaagaaataaaacaaatagtttgacaagcagtgggggtcactaaacacaacattcctaagtaattcagttgtcagaagtgcagttcccaaatgcagttagtatctttagaggagttagaagttctgattatcaggctctgtagaattttttttcatcctgagagagatgagggtgatcccatgatagagcagagaaaacactcaagaggtggagttctagcctagctgtgccttttactagctctttgacttttggacacttcgtttaatgtttggggctttaagttactgggcagtggaatgaaaagtcaggggggaataatccctacatttcctaccagtttcaaaattctttaattcaaaataatttaaggtcattaaaaaag

SEQ ID NO: 10500 - DNA, 359 bp, Homo sapiens
aggtacttttaaatgaaattcatataagttgatttatttctctttggcctttagatagcatttgagggttaggtaatgaagataatcactcaaagtttctgtagaaatctttattcttaccagttgttgggtttttattcatgaggaaaatatttcctcttaatgtctgattcatcatcctaccttttctggttgaataactattattctaattctggccaacatcaaacttgaacattgccatcattctggctggccttccttccttagtgcctcttctgttttgtttctttcagatattattgtcagtataattttaggatgatgaaataaaaatgttaatgctagagaggatgttt

SEQ ID NO: 10501 - DNA, 396 bp, Homo sapiens
aggtacggggaggaacagagtccctcctttacttctccattagaaagaatgagatggcaagacaatgaaacaggcaaagtgaacagagatgcaagacaaaattcaggtgagagagccagagcatcactcagccattccttacatgtaaaaacaggcacctataaatttgcagaaaggaagcgaagtctccataaagatgtttttaaagtgaagcttgaagttatttgggagacaatttcattgtttacaataaaaacttgccaaattcttttgggataaaggaaagcagagattcccgagcatggggaccaaatggaagcctcaaaagtgggaagaagacagagaagaccagggcagaatgcatctcttcctttctcttggctttcctggataaga

SEQ ID NO: 10502 - DNA, 387 bp, Homo sapiens
ccgggcaggtactaacatttgtagagaattttgtagtttacagagcactttttcctcattttattatttgtttttcacaaccatctggtgacattaaagggtagcagagaaatatggggaagtgggtgggggatgagactaatggcagagactgtgtgtgttaggaggagtggttgtcggagatacttaaagggatttgaatgcaacagttcattcatttgattgaacaaattgaaaattcataaatattctggaaccatcaaaagatttcaggtaaggaagcatcctgttctctttttggatgatcttaacatttttaaacttgagcatctgtattcatggataattttatgagccatgattgaggaatgtaagctggcgcttttg

SEQ ID NO: 10503 - DNA, 418 bp, Homo sapiens
aggtacctaaagtaggattcaagccctattagattttgagatcacattttaagagaaagaatacaaaattaggcacgaaagtgagtatttattcatgtagagaaaataaaacatagcaaaatatgaattttaaaaagttaacaaataccacacaaaattataaactgcagaaaaaagtaactatattggtgttttgtaaataacatgatcctctagagttttttcattttttaatccatttttggctatatattcttcaattgcctctgcacatgacttcaatttggtaatatcacacaactaattacacggtaaaattattttgggtaataaccccagtattgttctcttccagccctgcagtgaaagctgcccatcagactctgaggaggctgcataattaaactctactgtttca

SEQ ID NO: 10504 - DNA, 379 bp, Homo sapiens
aggtacaggttctttgaatgcagtatttattcacatagttttcattttctgtcctgacaaaaacttggtgatgcttgaatgattacagaacaaataggattgtggtttatgtttcctattatgcatatttggcagttgaattatgacattagattgggacatggtgagagggggcaggatactgggtaggaggaggggagcaagttacaaaaggccccagttccgggaagctgggctgagttgttctgtttaacttcttcttcctttattcctatggttttatgattgcaaattggcagtggcagggcaggctctgactatatttgctagaagcagatgtccacattaatttagatgtttagggatttaaaaatcataa

SEQ ID NO: 10505 - DNA, 389 bp, Homo sapiens
aggtacctttgggaccagatgctgcttatccaacagcccttatctcctttcttgctagtagacatgactgaactttctagtctacacgactcaaaggatcattcattaatctaagccactcctgatggatgatcttacttgctttgccaatgacaggagtgagatgacccatttctagcaaagccatgaggccgtatctgctggagcttccaggggaagacttccttgctttagaaggacacagaaaaatctgtctctcttttgccagacacggttctgtcagcatttccttcccagaattacagtagccatattgggaccatgaggcgaactggcctgaggataaacatggaggatggcagagcacaaaaatttcaagaaactgagtg

SEQ ID NO: 10506 - DNA, 503 bp, Homo sapiens
gccgcccggccaggtcccagttgtaaaattaccaggaaccgccatgcctcaagatcgccctgttttctggcttcatcaatgactgcatgcagtgcaccaccctgtccactacgtgatgctgtaggattaagtctcacagtgggcggctgaagatacagcgcccgcgtcctggggttgctggtgaaattagacgcccttcgcttgtggggttgcttggtattgggtgcccgtgtctattttggtcacagggacactaccgctttgagggtcttgtaatttgaactcttcttgaagggagggctcgataactttgaaggcttcggtttggccagacccggttatttgaataaaacttacctagcggtttggggtctttattttttcatactcggcctgtatatatggtgggatacctgtaattcttgagtttggccatttgccccgggataagaagactcctgtccccttttctactttgatttttctctttggggttttgtggc

SEQ ID NO: 10507 - DNA, 375 bp, Homo sapiens
aggtacgggacttgtctccaggagacatgtctgggaagaagagctagactggagaatcatgagcatgttcaggtgaaaacatgtgagtggataagagcaagagggtgagaacacagaccaaggggctaagggacagactgtgttcagtatttgggtatggaacttgtttttgctacttgctagttctaagaccaggctcagactctaacttctctgtaatgtgggaataatgacagcacttaccttataagattttacaaagattaaaatatcatatataacagcacttaacacgagtaagaattcagtaaatgttgaccgttattactattgtctgggtcgttataagttttgaagacacaattgcataaactg

SEQ ID NO: 10508 - DNA, 403 bp, Homo sapiens
ccagcgggcggcggccgaggtacatgagatgggagctcgacacattttatttggagaataaaagaaaatatgccgtcatcaaactagagcgtgttggggggcatctggtttacagaactaagtcaaggagaagaactctcaagcaatggtgacatctgccagctctgcaaagtgggccctgccttgtcacacaagtctccttgggcaaatgttttctatgtagattttagacactttcctgtgactttctcaaggtcttttggtgacacatgcagcttgaagcttttgcaaggggctggagtctaatctcttcttgcccagcttggctgcaggagaagaagggagatatgttaggacttggctttgactgaggttggtgtagcctggggttgcaaggggctgt

SEQ ID NO: 10509 - DNA, 410 bp, Homo sapiens
aggtacctggctggagtttggcttcatccagaagacaatgaggtcatcttgtttgagaagatgatgagtggctcagatgtcaaatctacagacaagcccacgctgtaaaactgtgtctgaacattttttctttttgagatggagtctcgctttgtcgcccaggctggagtgcagtggcacaatctctgctcactgcaagctcagcctctcgggttcacgccattctcctgcctcagcctccccagcagctgggactgcaggtgcacgccaccacgcctggctgattttttgtgtttttagtagagatggggtttcaccaagttagccagcttgggcccaatctcctgaccttgtgatctgctttgcttaacctcccagagtacctgccggtgcggacgctgaagttagag

SEQ ID NO: 10510 - DNA, 385 bp, Homo sapiens
aggtacttaacactatattgagattgttattttaactggaattctaagatttgtgaactgtaaatgaaaaacatactcattaaattttattttttcttgatactcaaaatcatatttataaaaaaaggattttttttttttttttgaaatggagtcctgctctgtcacccaggctggagtgcagtggcacgatctcggctcactgcaagctccgcctcccgggttcacgccattctccttcctcagcctcctgagtagctgggactacaggcgcttgccaccacgcccggctaattttttgtatttttagtagagatggggtttcaccatgttagccaggatggttctcaatctcctgacctcgtgatctgcccacctaggcctc

SEQ ID NO: 10511 - DNA, 373 bp, Homo sapiens
ccgggcaggtacctttagactagcatcagccatacagaatgcagtaaaatatgaggctggctatgtaggatgaagagtaattgcttgaccctaccttacagttattcttagtctcaaaaaagtgaaggtcttatcggtcctggcaagctactagtaagctagcaaaattacaactttttgtgctggatttagtaaaaaaatgtttaacttcttcttaggcaaagaaaaaaatccctacataaatgcacagacatctataatttataacagaaaggaaagaaatgattcagtgtgtttcatgcaaaatttttcaaaggcgtctaacgtctccatttaatagaagccataaaatactcctaaactgagatttcat

SEQ ID NO: 10512 - DNA, 413 bp, Homo sapiens
aggtacattgcttctgttctctgtcactctgtttctgtgccagaagacacattgcttctcctcattctcttatgcagtgctgtttaagtggtggtccacaaattgttgctggatggtgatgagatcgattaggagtttatacctcaatgtaaattaatgcacttccttccttccttaagaatgtcttgccatgaaaatatcagcatgcctgtggatgtcattgatttaaatgagggcacaagttccgtatttccttgcagatgggtccagactgtttgcagactggccatggtccttgggccacactggaagaagaactgggctaagtattttttatgcctgtgatttaacttctccaataaaccgcagctcttgtaggatatgatggtcgctgtcaggcaaggactagattt

SEQ ID NO: 10513 - DNA, 388 bp, Homo sapiens
aggtacgcgggattctcaatcctacccatgatgcagacagattgcctcatttcagctcaataaaacatcaccaaattcccttaggcagaaaaagggtggggagtgccctttcttgaaggaatcccttaagtgcacgtctcccgttttcttttcacatcaatgcagagtccctctgtgaatttacaacacccaacacccatgagttcagtccttaagaaggaaaattgagcaagtatttaattggttggacattgcataaaagaggtccatatccaggctaactctagaaattttattctcaaacttagttggcctctttttcttctgtcagaggaccattcttagtggcactggggaaatcttggcacccagaagaattcaactgcgc

SEQ ID NO: 10514 - DNA, 509 bp, Homo sapiens
  misc_feature 378: n = A,T,C or G
ccgggcaggacgcggggaaagtcctcagtaaaatactggcaaactaaatccagcagcacatcaaaaagcttatccaccacaatcaagtcggcttcatccctgggatgcaaagctcattcaacataccaaaatcaataaatggtaatcccataacatgaaacagaaaccaattgaccaaaaacccacatgatttatctcaattagattgcagaaaagggccttcgaataaaaattcaagcaccccctttcatgcctaaaaaacttctcaataaaacctaggttttttgattgggaacattattcttcaaagttaattaagtaggcttatttttattgacaaaacccccacaaagccaaattatcattacttcagatggnggcaaaaaaacctggggagacaatttccacttttgaaaaaacccgggcatcaaagaacaaagggatggcctgttcttcttcaactaacttttggaattcaaaccataatttgtttggaaagtttcctggcc

SEQ ID NO: 10515 - DNA, 379 bp, Homo sapiens
ccgggcaggtacagctaaactccaccgcagagcaagcaaacccaatctggcacacagcttttgggggtttcctctcctactatggcccctagccctgtgcccagacatagtgaagggtcagtaatgttggctacattgatctgcaaatctactacaccctcagccaagccagtctgttgaacaaacatcccccataaaacccaccggatctgccctaaagcccaaagagccttggccccccacctattgggaacatctttccaaaaataccaccactttcaaaggaactcccctgagaatgggggtgggaagtctaatgcatatattttgctctgctatgtgtgaagcatggtatatccactactttattcagcctttg

SEQ ID NO: 10516 - DNA, 429 bp, Homo sapiens
ccgggcaggtacatcccagctgattcagtatctccttctctttgaaaactctcacagaaactgccctataacttctactgacatctcatctcaatggctagatcagtgctatataacaaaactttctgcagtgatagaaatgttctatatctgaactatccaagaaggtagcctactaacccacttatgactgtttagcatttaaaatgtcacttgtggaactgacaaaatcaacttttaattttacttgattttaataaatttaaatttaaatagatacatgtgtctagtggctaccacaataaatagtgcagggctagaccttaatcacatcactaccccatctgcaagaaaagctggaaaatgaaagtttggagctaaacacgttgctaccctccacaaaattatgtttttcttagtaaggaaaaa

SEQ ID NO: 10517 - DNA, 776 bp, Homo sapiens
ccggcaggtacttggttctcgtcctcagttctctttgcactctctctctctttacagatatatgaagtcaacttgccctcttctgatgccaccaatacttccagtgctaacctctcatgtaagtctgagacccttgtctaactgctccctaccttctccacctgcgggtctcattcaaccttcatttcaaaggttctaaaatggaactcattaatttcctactaaacttgtccctttgccagagcccttgggacctagctaatatcctctgccactccaggtcttgttggacccacgttccatcaaccagtcatttgttgtctgcttagtcctgatgtttatattgccttaattcttctcacatccatctccctccttcccatcctcatctcttacctaagccattaattaccatgtttatcccacctgcaaagtcctccattcattctattctaagcaaggttaaaagttcaaatcatcctcctattcagaagtctttaacagctttgcatggcctgcgattagtccgttttcacattgctataaagaactaccctgagactgcgtaatttataaagaaaagaagttaaattgactcacgggtctacatggctaggggaggcctcaggaaacttattaatcaaaggggaaaggcaaagggggcagccaaggaccatttttataatgggggcccggggagagaaaaaaagcaaaagttttttaggggggggggggggggtaaaaatttttttaggccccccccccacaatataaaa

SEQ ID NO: 10518 - DNA, 386 bp, Homo sapiens
ccgggcaggtactgaaacaggaggctgatacaggacttgtgcttagctgactgagcagcccatgaagcagtgacccgtggttcttcctctatccctccctatactcaactcctctcaaagtcttttgttctatgtcattttctcccttcacttttctcatgccttctcctcctctgctctgcctctgctataagcctgtctgtgcaatccaggctcactgcaaggtcttcatgttgggacaccgagctactagggtttctcatctttgacagagaaaacggggatgattgacatatagcaactttaaactggggcctccccaaagtccaaatctgaatgtctttaaaaacaatgaagaatcaagttaatgagtcaagtctgtctaa

SEQ ID NO: 10519 - DNA, 402 bp, Homo sapiens
aggtactatggatccactcaaccagaatttctagggtctggataatttgcacattatcaagtctcctgggtgatcttatacaacccaagtttgagaagcatcaatataggtcataaggaattactaagctttaagcagatcaattttgtattttagggtgattattgtaatagcagtgtgaaagcagtgttaatctccccccagtctcttccatacagcctatttataatagcacacacacaaaattctgctatttacctgacaatttttacagcagtgtggaaagtaaaagaggagagtagaaaggtagaaggacaggtagggacagtaaagtgaaatgagaaaggaataaactaaggcagtgattatgagaaaagatggggctaaagtccagagacattt

SEQ ID NO: 10520 - DNA, 428 bp, Homo sapiens
aggtacacacttaatgggttttcaagaagatgggattgttttttcttggccatataatataaatgtataataaatttgctctctttgtaattaaaattaagagacagtagctcagctaggccttttaaatgtctatataacccaacaccaccataagtccagctcaattttttgtgacctgtttttctcatgggctagctcaaagatttttttttttaaggcagcagcaagatgaggttttaaaaaggctttgttagggcaattagacattttcatttttcaagctgattatagcatttatcacttacattgaaatttagtatttgcattttgcctctacgcttagaatgttacccaacaatatggtcaccacacaagttgattcacagggtgtgtttgcacatttctccagttttttgattaagata

SEQ ID NO: 10521 - DNA, 390 bp, Homo sapiens
aggtactttaggctgagaaataaatagaaggtgagaaaaaagaacagtctttatagtcagtaagagtgaaaagagaaagatggtagttggggaaagacagatggggagaaaggttggctggttgttaataaaacagtagaggatgagcatgtattataaatgctggtgggaagaaaccttgtggcaaggagggtggtagtgttggagaagaaagagaggatatagtagaaagttaaagaggaactggaagcaggtgggatccaggacataggaaggggatagagccttgggcagaggtgagaacatctgcaggagggaagggaacttgatagaagggaaagggtgtgcaaaatgtgggcaggaaggaagttttgagttaaagtttccatt

SEQ ID NO: 10522 - DNA, 419 bp, Homo sapiens
aggtcctttttcttttgggtagttttttttaaatatggagttttagattgcattttaaaaattgcctattgttactacattcctaagctctttcaatatctcaaggatactgatacacctatggaatcccttgatatctccttgcagattcgcccctcctgttagctcctctcttccctatgttgccctcctgctttacgagactgattgctttccacatcactgcacagtggacattctggcattgactttcattgtcatcctgcgttggagaccatatatctctttttttcttagttaattccctcattttgcttatcacactgtcagtaactttgtataaaaggacaaattaaggttaaaattttttggagtttttttttttggccccagcttttctatatatatttttttcatgc

SEQ ID NO: 10523 - DNA, 416 bp, Homo sapiens
aggtacaggttctttgaatgcagtatttattcacatagttttcattttctgtcctgacaaaaacttggtgatgtttgaatgattacagaacaaataggattgtggtttatgtttcctattatgcatatttggcagttgaattatgacattagaatggaaacatggtgagagggggcaggatacggggtaggaggaggggagcaagttacaaaaggccccagttccgggaagctgggctgagttgttctgtttaacttcttcttcctttattcctatggttttatgattgcaaattggcagtggcagggcagctctgactatatttgctagaagcagatgtccacattaatttagatgtctagggattaaaaatcatagagggtggcgctaggaaatatagaaaatgccaatgaaag

SEQ ID NO: 10524 - DNA, 361 bp, Homo sapiens
aggtactatggatccactcaaccagaatttctagggtctggataatttgcacattatcaagtctcctgggtgatcttatacaacccaagtttgagaagcatcaatataggtcataaggaattactaagctttaagcagatcaattttgtattttagggtgattattgtaatagcagtgtgaaagcagtgttaatctccccccagtctcttccatacagcctatttataatagcacacacacaaaattctgctatttacctgacaatttttacagcagtgtggaaagtaaaagaggagagtagaaaggtagaaggacaggtagggacagtaaagtgaaatgagaaaggaataaactaaggca

SEQ ID NO: 10525 - DNA, 378 bp, Homo sapiens
aggtacgcgggcgagaaattttattctcaaacttagttggcctcttttttttctgtcagaggaccattcttagtggcactggggaaatcttggcacccagaagaattcaactgcgctcactgcaaaaataccatggcctacattggatttgtgaggaaaaaggagccctgtattgtgagctgtgctatgagaaattctttgcccctgaatgtggtcgatgccaaaggaagacccttggagaagtcatcaatgcgttgaaacaaacttggcatgtttcctgttttgtgtgtgtagcctgtggaaagcccattcggaacaatgtttttcacttggaggatggtgaaccctactgggagactgattattatgccctctttg

SEQ ID NO: 10526 - DNA, 662 bp, Homo sapiens
ccgggcaggtactgacacaatatgaactggagtttagaaggagagggtctcattctgaatggtgaaatagaacaaataactggctactgaaaaatagagttggaaattgtatgtgattaggtgtgaatattttgggaaattagttctgaaataggccatcttcagaggaactgatgtcctttggaggcttattggtgaagggagagaaggaagtaaatgaaggtaagtgtcgtttaacaagatatcaaagaatccaaaaatatcctccataaaggtgtgtgatttttttaaaggaaatcgtgatttattttacaaataaagcactgtgctcctgaatgaaaaaaacagcccccctacacttgtccataagattgtttactattgtaacgtgaatagtttataccacatgtgaaaaaaaaatccacacaaatttactctcaaaacgtttctttgaacatacaaaaacacgctaggccaggtgcagtggccagttcctgtaatcccaacactggaaggcccaggcaagaggattgcttgagcctaaaagttcaagaccaacctgggccacataggaagacccccatctttacaaattatttaaaaattagccgggcatggtagcacattcttgtggtcccagctactttgagcaggaggattgt

SEQ ID NO: 10527 - DNA, 768 bp, Homo sapiens
ccgggcaggtactttataatagtgatagatctgtttcattgtggatttttttttggttaatctttattactattcagtaatattatctgtgactagaattattcttctgtagaaaaaacatcatttgtgataagggatcaaatagtttttttgaaaaagactttttaaaaatttagttttaaaaaaatataacttaaaatgtgtagacatttaatgcttatctttctccatattcctgctgatctgatatgtatgttttaatttattcacttatcgaacatgtgttaatcatttagaggtgatggaggttcagagttggaaaggcatcatcatagtctagacaatgaaacccacataattaataatgtataacccaattattgttagtttagcaaataggatttcaagaagccagtgcatttctcgtgacatgttactggaaatcaaatacttccctcatgatggatatcctttctaacggccaggaacaagaaaaagatggggtatatatatacctatatatatatatttttttggtggagggctgatgaagtttgcactgtcaccctggctaatgtgcaatggtgcgattttagcctgctgcaatcattggcctatagtgttcaagaatatttggtgctataaaccgaacatgtgggtaaggataacgggctcctcctcgcctggcgtaggtaatttttggtggattcataggagtaccgggtcaattattagtatgcaccacgtagtacagtttgatcgactatc

SEQ ID NO: 10528 - DNA, 437 bp, Homo sapiens
ccgggcaggtacctttctatatttagattctatctttgtcaagcaagatgacttgtttgacagggctctggtttttcacctctgaaaagctactcatccacagagcttgggattgaggggagaggaaagggggaggagatctggcttctctctccaactctgaacagattgggatcagaataggccccttttacatccctagccaagatgcctgggccttggcagttgtcccaggacatagacaatggggtctgatggcagcttctcagacctggctttccctgggcaagaggcttttcctgaggctggcaatgccatttcttcagactcagaaaagggatttagggagggggaaatggggactgcaatgaggcaactcttgacagcttaccctggaaaactaggacacagcttgtgggagcccaccccagcagctc

SEQ ID NO: 10529 - DNA, 617 bp, Homo sapiens
ccgggcaggtacatgagtctctttttttttaagaattttaattttcctagttccttatctttttaatgattattctttaagtggacatttaagacatgagcttttaagagcagctgaaaattattggtgtttactatgggttttatccatttgtatactgtttttttttctcagctatcttcaaaatagccataggaggtagattccattattattttactctaaaaagagaaaactgagttttaaagtgttaaagtggcaggaccaagatgaagatacgaggtgaaagtaactaaaggttgttagcataacaattcaaccaaagatgcaattgaaacaatatgtctttgctgtcatgtctagacaatgagatggccagattgcaggcagcatatttgcagtgactctccaaggcctgcaaggttagagctggtctaggtagatgtttgcagctggaagtgggaaaacatccaggcaagcagggggttaatcctggtattcttgcaaaagttcagatccatggtatgaaggcagtatgaaaagatatgggcaaggatagtggccccagaaaggcttaacaattgtttacagggcccagtcatggcaactgtaacctc

SEQ ID NO: 10530 - DNA, 407 bp, Homo sapiens
ccgggcaggtaccatggtgccttatacctaccaggtatccagtaaacagcaatggctggttgactggttggttggtgtgtatcagaaggtgaggagacgggtcaaaagtcctccacttaaaaaaaaaacctttttattttggaatattagagttacaggacagctgcaaagataatgcaaaggtttcctatacagcctcacctccacctttgaaaattggtgatggtagaagaaaaataaccctgaaccagtgtgcccttgggcaggtcacaccaccttagcaggctccagttttatcactgaaagcaagataacagggttcgcctcactgtcttagtcagcttgaactgctataacaaaataccatagctgggcacggtggctcgcctcgcggcgcccgcgtacct

SEQ ID NO: 10531 - DNA, 392 bp, Homo sapiens
aggtactgaggtgggtctagaggattagtctgtgaattgcagcctggattctgcagttgtggggtctgcctggtgctgagttttactgtggtggactcagtgttgggatccagcggaaaatcctgtgcttactttcctctcttcctgccaagtggagagtatgtcttttcatgctctgctgcctggaattggaaaagaggtgatttggataatgtaaaactgcccttcctatcctcttcaacgtatcttttattattattgtgctacaaccagacactgtgatctttcatctggttttcttagatgttgtagagatattgtgtgcatggaccaggtatggtggctcatgcctgtaatcccattttgggaggccaaggcgggaggattgtttg

SEQ ID NO: 10532 - DNA, 396 bp, Homo sapiens
ccgggcaggtacattttaatcccattagtagatatgtggtgactatcatttttctattttgcatatgctttatgtaagattatataactacagattttagtgacttaaggaaaagaaaagggaaaacactaaaagaaaggccttaaagtcagaagacctggttttaaattccagtccctccatgtgaggtcctcaatttcctcctttataaaacacagatgaaaatgagatgtccttcaagtctacagtggatctgaagggagggctattattttctgtgagacgaaaaagaatgtcactgacatggccatgaatccgcacaaaacaaagcgctgtgtgtacatgggggacattgcgcagtctcacaaagaaaattccacttaaagggcttaaaaa

SEQ ID NO: 10533 - DNA, 416 bp, Homo sapiens
gccgaggaactgttttttttttttttttttttttttggagacacagacacagtctccctctgtcgcccaggttggagtgcagtgccacagtcttgactcactgcaacctccacctcctgggttcaagcgattcttgtgcttcagcctcccaagtagctgggattacaggcatgcaccactgcgcccagcctgcttcacatttctttatgggatctttattttcagtgttgatgaattgcaagaggatgtgctcatgggcggggcccttccttcatcctcttctggggtgagctggttccaactgagccttacctgcctcagcaagggcctgctcttcctttccttgggttgctttcccagtcctggacttcacagacctgtcttctccctcctttcaactctgtttgcatatgttc

SEQ ID NO: 10534 - DNA, 433 bp, Homo sapiens
aggtacattttcttttgggtagtttttcttaaatatggagttttagattgcattttaaaaattgcctattgttactacattcctaagctctttcaatatctcaaggatactgatacacctatggaatcccttgatattctccttgcagattcgcccctcctgttagctcctctttttccctatgttgcccttctggcttttacgagactgattgcttttcacatcactgcacagtggacaattctggcattgacctttaattggcatccctgcgttggaaaaccatatatcttttttttttcttaatttaattcccctcatttttgctttatcacacttgtcagtaaacttttgtaataaaagggacaaaattaaaggtttaaaaatttttttgggagttttttttttttgggcccccagcttttttttatat

SEQ ID NO: 10535 - DNA, 359 bp, Homo sapiens
ccgggcaggtacgtgccaccatgcctagctaatttctttcttatttttgatagacacagggtgtcactgtgttgctcaagctaatttcaaactgtttatctgaagcaatgtccctgcctcagcctctcaaagcggtggaattataggcatgagccagagctctattattctaagctgcgggctgaattagttggatacaatagtgatgactgtattcagggcaaagaagaaagtaattgcagaattattcaataaaattttatgaagggttctcatacagagatatcatgattaagagatggagaattatctttactattagtgaccttggcgtttttccaaggcttggaaaggcatct

SEQ ID NO: 10536 - DNA, 386 bp, Homo sapiens
ccgggcaggtaccacattgtttggatcgccatagctttggactaaacttccccattaaactttttcaaaacttgcctagtatattgtgcaggccgggcatggtggctcgcgcctgtgatcccagcactttgggaggccaaggtggatggatcgcctgagatcgggagttcgagaccagcctggatagcatggcgaaaccccatctctactaaaaatccaaaaaaaaaaaaaaaaaaaaaaaaattagctggctgtggtgataggaacctgtgatctcagctacttgggaggctgaggcagtgaacccgggaggcggaggttgcagtgagctgagatagcaccagcctgggcaacggagcgagactctgtctcaaaaaaacagaaaa

SEQ ID NO: 10537 - DNA, 407 bp, Homo sapiens
aggtacaaaaggatccgctactgtgtgcctttctctagctagctcattttattcttgttatgcatttcccagacaatgcatgctgagggcctactatgcatgagacactgtcctaggaacagaggtggttccctggtggccctactacgtcattatcattgtggattttggattgcagaatattgaactgacacattttttgatggcacatgtcttgagggagagactgcagtagggcaggtgaatctttgccacctgtgcagaccctaatgtttgccacaatgttcgtatttggttgacagctgatcgtgagatttgtcctggacattcaggagaaactgggttatgtagcctctggacttttaaaatgagatggccagtggcggatcctttttttccttgagaaa

SEQ ID NO: 10538 - DNA, 384 bp, Homo sapiens
aggtaccatactcttttggttgctataattctgtggtataatatgaagtcagaaaatataattcctccagttttatttatttatttatttttgcttaggatagtattatttcttatagtgaaagcattctatgttatttattattagtctaattttgtagttttacaatgctatcctcttttacaaagctatgatcaactcagtgtgtccagatcaggatcatttgtagctatttgcaaaagtagcaatattctggctgggcatggtggctcatgcttatattcccagcactttgggaggccaagacaggccagatcacctgaggtcaagaggttcaagatccagcctggtcaacatggttgaaacccctgtctccaattaaaa

SEQ ID NO: 10539 - DNA, 410 bp, Homo sapiens
aggtactagacctccctgtctcattctcattgaaacattttcttttggctttcataaacctttcagaccaatcttccctcctccttctacttgctccttaaatgtcaatgttttccagggttccattcctacattttgctcatttcttcatccaaccctcattcgctcttgactaaaatttgaccctctcagaatcaagaggagtttgagatcctctttgctacccacacttgttttcaaaccattacttcccctcatcttaaaaagccctctgggctgggcacagtggctcaacactttgggaggccaaggtggcagatcacttgaggccaggagtttgagacaagcctgggtgacagagcaagattctgtctcaaaaaaaaacaaaaacaaaaaacctttgtttcttt

SEQ ID NO: 10540 - DNA, 409 bp, Homo sapiens
aggtaccttcctccttaaatccacattccacatgagtttgtcatctttttagatgtatatttgggaagttgctccttgctgacaatccttgaaaagtgcccagttctcaggacccagttgaaataatttccgcctggggctgggcgcggcggctcacgcctgtaatcccagcactttgggaggccaaggcgggcggatcacgaggtcaggagatcgaaaccatcctggccaacatggtgaaaccccgtctctactaaaaatacaaaaacttagccgggcgtggtgggcgggtgcctgtagtcccagctactcgggaggctgaggcaggagaatggcgtgaacccgggaggcggagcttgcagtgagcccagatctcgccactgcactccagcctgggcgacagaaggag

SEQ ID NO: 10541 - DNA, 394 bp, Homo sapiens
ccgggcaggtactttttttttttttttttttgtatttttagtagattcagggtttcaccgtgttagccaggatggtctcgatctcctgacctcttgatccgcccacctcggcctcccaaagtgctgggattacaggcgtgagccacccatccggcctaacgagacttatttttactcaactagatggcgttcattcatttgcttactcagctgtgccaggaattaagttgggcactgggaattccaaaaccaacaagacattctctgtcatcagggaactcacagcctagtatgagagataaacaaatgaacatgaaattataattcagtaacaaagaatgagtgctatggcagagggaatgtgtaagagcttggcagggtatccagcagggat

SEQ ID NO: 10542 - DNA, 427 bp, Homo sapiens
aggtaccggaattgacggaggcttttgtcattgtcgcgatctggaagcaggtggagggttatgggaaggatgtaagtcactggatatatcttcatatgcaccgcgaaaccatagaatacagctgcacacgcgacgagtcttttctttatcaagtagaggaccatcaggaccagggaggcgacaatagagtccgcattaccgcggctggatactgccataggcagggggttaagaagccaaaagacacagtagccacaagcctggcggcgccccagccccttcagcagcagcaggcggtataagaggaaagcggtgaggaggtcgcagctgatgaagagaaactttccaaagagctcgctgaggtagaagttgggagtgaggagccaacccagcagcggggtgtaacggtacctgcccgggcggccgc

SEQ ID NO: 10543 - DNA, 914 bp, Homo sapiens
  misc_feature 638: n = A,T,C or G
aggtacacaagtagaactgttaaaaccgtgtggcttccaactgctctaataactttaagattcacagtcttcaactttcttacagtggaagccatgggggcattgtcctgttgccttctctctcattcctcataatgagaaaagatgttaagcttcactgtacgtaagtcccagtgaacgtcttcttctgatactcataagggccataaatagagagactaagggcacgaggtgggagttattcaccatgcgttgactaaactaagatacctccataagttttgtcttctgcaaattatctctaaactgcggatgtctctcgggtgctcctatgtgcttccgattcttccttctcttaattatatctctacggcttatctgattgtatttatgtcctacattctttcttaataaatacctggatatttttattaaatgaacaaaattacgcaaatgaattttatattctttatttctgttctctcacttttactctacctctttatatacactactgacgaatttcctccataccgataattactttttctcttcctcattcgttatacctatcgtcttactttataatttccctattttatacattattcattcttgacattattcatattagtttntcaatcactctcattgtcactttgtttctcggttcgtagacattgaccctacacggctattagctttcacatcttttctctcactaatatctatctttattttctttcttatatattactcacatagtatattattcaatatgtttcgttttaacctccttttgtagattttgtgtatattcaactgtcattctcttattctctaaattcttacttcacactactttcgcgattagttgtattcgatcacctactcactctcatatacctcctatg

SEQ ID NO: 10544 - DNA, 383 bp, Homo sapiens
ccgggcaggtacatatattagaacgatatttttatatgcaagaaaaccgagactgagagaggttaataaacgcgtttgaaagcacataactggtaagtggcagctcaggattcaagagggcccatgttctttctgctacataacactgctttaagtcctcattatccatgggattgaaaaagtgaaaaatagatcctttaaattactctccacactcctcccacccataaattttttttttttttttttgagatggagttttgctcttgttgcccagtctggagtgcaatgacacgatctcagctcactgcgaccttcacctcctggtttcacgcgattctcctgcttcagcctcccgagtagctgggattacaggtgcccac

SEQ ID NO: 10545 - DNA, 400 bp, Homo sapiens
aggtacctacctgcggtatctgatcagtttctgcctagtcagatgtgccctgttgctgagtctgcttgggtggggagcataggaaaatggggcaagtgcttcatgagggagctgttctcagccgccccctctcccaactccccagctctctctccttgttctgtctcctgtttctgggctctaatcctggtcaggcccaatgccccttgcctgtgatgctgggtctgcagttttgctcgccgtcctcgctttgccttcttgcccgccacttccagcattcctcctctgctcaacttctgagctggtgtcaggtttctacctgcctggccactgagcccacctgaagaagtctggccaattcctttaacccctggccttttaccatgcccgggatgcttat

SEQ ID NO: 10546 - DNA, 494 bp, Homo sapiens
aggtacagtgacaacagtaaggccagaaatccagtttggaatcaatatgttgttttcaaaatgactgattataatcaaaatatttcataaaaattgattctaatgtagctaactaagattctagaggatgttaagaagtcttttttttcttttctttctttttttttttttggaaagaggtgtctttggctttagtacgcccaggcctggagttgccggtggctccaattctcaggctcaactgcaaccctcccgccatcctgggtttgcaagcaatttcttcctggccttcagcccttcccaagttagcttggggatttgcaggcaatgttgccaaccacaaacccagcctgattttttgtatttttttagttatgagaacaggggtttcaaccatgtttggcccaggcctggtccttgaacttcctgaacctcaggttgattctgccccggcctttagcctcccaaagtgcctgagaattacaggcaattag

SEQ ID NO: 10547 - DNA, 415 bp, Homo sapiens
aggtaccgcagtgcctgagtcaggtatccatttgcattgtgaaaggagcctgaggtgtgaaacagttctgggttctttgcgcacccagctggctggcttcctgtgaactggctgcatttcagatttcattctctagccagaagctgaaaggcaggagccctttgaagagatacagggaagcaaagagggttatccagatgagaaggaagggaaagggggcgtgacaactccttggagggaatttccccagtgggaactgcctctggaggagcttacacagggcacatcaatgggaaaccacgtcctggtctgctcggaagccctggggggcctcttgcaacatgcaggcaggctccccaaactcaaccctctctctctaccagaagcgcatggactgggcctgcttcccccttct

SEQ ID NO: 10548 - DNA, 398 bp, Homo sapiens
  misc_feature 398: n = A,T,C or G
ccgggcaggtacacacacacgtgcacaaatacacagctaaagagggggaattcatcaatggccttctgaaatacttcgcacaccaagaggaaagaagaggcagcccacagcaaggcaatgtatcttcctctgccttctctgaagtttgctcccaaatctgaaggctgaccttgaggagggccaacctcaaggctgtttgtgaaacccagggaggcattctgggggaaagacagggctcataattagtgttcagtgggttcctttcaaagtccaggccacagaggcagtgtggggccgggcactggttctgcccttttccccactgattgtaaacaaccgagcactgcgcgtagtgtcagaccagctgctgtaaagtctattaacttaatttcaaactn

SEQ ID NO: 10549 - DNA, 459 bp, Homo sapiens
ccgggcaggtacattatttgcctaattacctatgtcgttgagtcattgagaaaattaaatgaaatgatcagaactcatcttaatgacagaggagactctccaaacataatgcaaagaagatataatccactgataaataattttaaggtgacttttatttttttttaaccgggaagtatttgtggttttttcgaattggcatttgttaaataatacccacataaggggtttccttttacacatttaattatttgagggggggtaatagaacatatatcagaaatattggcgtggggctggatttgcattatatgtgatattttaccagaaggggaaagaaatgggatttttttttgtggtgtggtggtgtgtgaagaatggttctcttctgttcacctcagggcttggaagcgcaattggttggcgaaccttcgggttcacttggcagcccttctggcg

SEQ ID NO: 10550 - DNA, 489 bp, Homo sapiens
aggtaccactgcactccagcctgggtgacagagtgagactccgtctccaaaaaaaactttgcttgtatattatttttgactcacagttaaattgaatagacagcccacacatgggaagagaatgtttttaaaccatatctcaggttagggggttaatcccaataattttgtaaggaactcaaacccagaaattgagaaaacaatgctttactaaaaaaataaagtaaaagggagttggaattaggaacatttttcttaaaaaaacatgaacattacaataaagggcccaggattttttttattcaaaaaacatggtttggattaaacataaaaaccatttcaaacaatttttccttaaatttaatttcaggaagtaaaattaaggaattggttccaaataaacacccttgtgaaagaaattattttaattctttacccaaaggaaaggttttaccccttgggagggggtttaattttaattaaaaaaag

SEQ ID NO: 10551 - DNA, 390 bp, Homo sapiens
ccgggcaggtacctaagatagagctgttagaatttagatagacattagatagacagtgaaaatattttagtctacagttgaaactgtaacaatattggtattgttctcaactacccctggtctagttaagggctttcaagtatgtgtttggacccagtattttcatgtccaccatctagatagtccttggtctatttcccaccccatgtgctttctggtgggatgatcacatctgcacctctagtccccaagctgttcctgagctctgtgtcctcactgtctccacatggagtgtccccttccacctcaaacttgacaagggattgtgttttccacaccaccctgctcctcctggattccagcccagtctgtccttccttttctgggtgg

SEQ ID NO: 10552 - DNA, 606 bp, Homo sapiens
ccgggcaggtacagtgacgtgatcccggctcactgcaacctccgcctcccgggttcaagcgattcttctgcctcagtttcccgagtagctgggactacaggcatgtgccaccatgcccggctaattttttatttttagtagaggtaaggtttcatcatattgaccaggctggtctcgacctcctgacctcatatccacccaccttggcctcccaaagtgctgggattacaggtgtgagccaacgcacctggcctaaaaaaatagatttttaaagagctgttttaggcccacagcatctgattccattgtaagcctgattttcccagtctgctctgaagcggaaccaggtaactctaatatgacttttaaaataaatgcatgctaacaggcaaaaatagatgttgcttttgaagctaaaatttgtttcacgtctcccttctagactgaaagcttcacaagggcagggttgcaatctgttttagttacccctgaatccccagagttcacctgtgcctggcacacaagcactcagtatttgatgaatgaatcaaagtagcaaggaattttttgtcaaagactcatgttgcatagccttcaagagtacct

SEQ ID NO: 10553 - DNA, 433 bp, Homo sapiens
ccgggcaggtacttggaatacctctttcctctagaatacagtgatcctattccccaaagtgcaagctttcatgtggaagcatcctaagtgatcgtcctgggtgatgccatatttcactaaagtgggaaaagaagaggtgaactttgctctttcaacaaggcttgcactttatactttgggcagtgcatgggagaaggggggcccttagaggtgagcaggatcactgtagctagaggagaggtctcactgaaacagaacgcatctgtgactgtagcttgcatggagagcctagacagccaaccatggatttgcctttatgttttgaatggaaacatctatttcaattgggatagaaacctttacctatgtcatatctgtaagagaatttagcttatagatatgtagatacgtgtgtgtgttgctgggtggggag

SEQ ID NO: 10554 - DNA, 379 bp, Homo sapiens
ccggccaggtcccgaaggaaggccaggtgcagtggctcacgcccagcactttgggaggctgaggtgggaggatcccttgaggccaggagttcaaggttacagtgagctatgatagtgccactgcactccagcctgggtgacagattttgtcttaaaaaaaaaaaaaaagttgatatgagttttattttctgtccgtttgaaatattttgtaatattccctgcattctctgtcgtctgccttttccacacaatgtcctttgctttcatgtttgttatcttctttttctgttcactcagaggtcatcaatttctttctttccgtccttaattggattatttttcttttggcctttgggcacagagtctgacctttggacca

SEQ ID NO: 10555 - DNA, 866 bp, Homo sapiens
aggtaccagccgctaagcatacaaagattcaaggttaaaaaaatcctctcttcattcaaaaagttcagcgtctagtaggatgaataaatgaatgaatgaataaaccaagtgaaacactgccaagtgctattgtttagatctaaccaagcctgcagagggaacagtggactctacctgggaagattaagaagatcttacccaagtggggacagggaacaaggtctcaaggtgtgagatgtcttccaggtgaagaagcgagagagggccattctaggcaaggagaaccccagagatgggtcaaacaagaggttggaagtaagtaggaaaaaatagtgaagggtgaaaagatatctgtcattttaaaatattaataaaagacagattatgttggattgagaaatgggtgacagtttaagatgtcgggcaggaagtgtacgctcctcttttaagaaacatgaagtgcctgtagtcccagctactcgggaggctgaggcaggaaaacggcgtgaacccgggaagcggagcttgcagtgagccgagattgcgccactgcagtccggatttccacctgggcgacagaacgagacttccttttaaaaaaaaataaaaagaaaaagtccctgcccgggcgggtcgtttatgaaatagtggaatcccctggcctggcaggaatttcaattaaaagcttattttatcccgtgccccttcgagggggggcccccggaaccccaacttttgtgtcccatttaaggagaggttaatttgccccttctgtcgtaaaaacgggtaaagctgtgtactgtggaaaaaggttttatcgatctaatttctgaccgtattatctattggagtgcatacgtggaaag

SEQ ID NO: 10556 - DNA, 386 bp, Homo sapiens
ccgggcaggtacatctggcaaggggcacttttactctgatgtcgggtgttttagggatatgagttcagtgaataagtagctagagggaggagctagttaggtcttgattttaggcaaatgctaaatctacctcattttccatacctgtcttttgattgggatagctaaagaatttataccagatgaaccaagcaagccaccttcttacgacattaaatttggtggaccaagcccccagtagaagcgctggggcccagcacggccaggctctcaccttttagagcagcacccccgactaatccagcgaatggaatctggctatgaaagcagtgagaggaacagcagcagccctgtcagcctggatgcatccctgcctgagagctcaa

SEQ ID NO: 10557 - DNA, 383 bp, Homo sapiens
aggtactccttttataaaacttggagttgatgtaaaggcacagacaacacaagttaccttaataataaatgcacttttctttgtaattttgggtaattcagtgtgatttgtaattcttttaaaagacacacaatcacttgtatttttgcatggttctttttttcctaatttcccactatagtgaaatatctgtttttccttctctattgggtttggattggaatgatcaggtagaattaaatgtaaaataacaaaaggaaaatactttatagatcttctcaaaatactttgaagggtataatctctttaagatggctttattcatatttaagccaaaaacaaaaagcaaccaaaacactactgtttatacaaaaagcagctta

SEQ ID NO: 10558 - DNA, 409 bp, Homo sapiens
acgtacaaggcttcctggttttttccatatgcctgaaactgtacatcattaaacactggagagaaaaaggctattcacgtatctgcctagtccctgttgtgatttgcttttacaacccctgctcagaacatacacacatacacccattgaaaatctcccacgaaggagctacatcgcacagcaattagtgttactttaacacatttaatacaaccgttattcctccagccccggaacaactcatggtacgtctgtgaaccatgcatgtagggagcattgtagacactgcgtggttgaccctcatgatccactccaaatctctcccactgagtagaaacacaggtagaagcttgggggagttaattcatctgcttgccacctgaaaaataaatatatgacaaatgaatgg

SEQ ID NO: 10559 - DNA, 353 bp, Homo sapiens
aggtacgtgaaagcgctttgaagatcacaaacccatttagaaataggtgggttgctcttcctcaaatctttgaaagctgtctactactataaattcattcattcatatctttccctcattcctttcagttttttaaaaatgtattctatccaacttacatgtaagcactttgcaaacactcactcatttactatgaataacaatcctactatattcacaattatcatttccccgctttacagaagaggaaactgaggcacagagattagacagtgtaggcaggattcaaactcaggtggtctggctctactgtccttgctcttaacctaggcccacctacagttatccaggtt

SEQ ID NO: 10560 - DNA, 439 bp, Homo sapiens
aggtaccaataattttatgccctcatcgagttactttaattgattttttattgatttattcaatcaatcaatcaacatgtttattaagtgcttattgtgttaaaggcaatgagtggaagtagctgaaaaatacccttaaacatatttgaactgccttgggccacattctatctcttgactgtcgtgggttctcaaaggtatggcatgtttctcataatgaagttaagtagattaagggatttctgttacagttaacttttagccttcagaagatttgactatgattaaatgggtgagcagtataaattctggaaggcagaactgcatagtaaagaataaaaactctggtatcagagacaactgggtttgagtcctcggtttgctatttggatgtaacctcaggtaaaacatttatcttttttaagcaccgatttcctgt

SEQ ID NO: 10561 - DNA, 426 bp, Homo sapiens
ccgggcaggacccagaggacacagttgaaatgaggcacaattaggaaaaactaggctgtttaatatccatattgagtagctttgcaagttactttcacaaacttccctacagaattggttctaacagaactgttcaaggccaaggatttgttttttctgggtctgggggagtcatctttataattttaatattccattagaatgccttgacgctagaaggagggtccatctcaatcacatcaataaattgatcccaacctttataaaaataagcttggatagaaaggaaaatccgaagactaaggtagtctggtagaatactagaaggagacatcttttaagaggaggacaagaaaaggcatgaaaacagagaacatggtcctacacaaggcaactggcttcagtgctaccctacaattcttattg

SEQ ID NO: 10562 - DNA, 402 bp, Homo sapiens
ccgggcaggtacaaatctaaaacacaaacattactctttacaaaacaaaattgttgattaataattatctttttcataactatctcataactttatgactacaggcccaccatttaacaactacaaccttcacataaactaacatgtgcttttaatgctgaccttagtttaaaaagcctgccagtatggaatgacattcaaataaaataaaaccaaatttaaaaagaacagaaatgcaaactcaacaatattcccatcttttgaatcctgacaatgtagaagtcaaattcataatcatcctaaaaaccaagggagtcatacgaccacagtatgtctctttagtctaggaataatgcaaacagcagaagttactcaatgaggctttacaggaaaggatcatat

SEQ ID NO: 10563 - DNA, 389 bp, Homo sapiens
aggtacctgctcccttcactgagtgcttcctgtgtgcctggcaccattgctcagggctttacatggacttactcatttcattttcactgcagcctagagcgtaagtaagtatttgctttatccccatcttatagatgaggcatttgattctcaaaaaggtttcatagcttgcccatgttctagcagctagtaaaaggagaagccagagttttcatttaggtgggagtcctcaacctgctttcttaactgctgtgatctgcactgtggcatgagagtttgtcttaatgtaaatgcacatgtaatagcattattcacattgcctgagactgtggaagctcctttggcaaccagatgccacaggggactcatttcatgcttttagaagactt

SEQ ID NO: 10564 - DNA, 484 bp, Homo sapiens
gggaatttgacccgaatcgcatacttagggcgatttgagctaacctcggtggcggccgaggtacaatgtcactaggctcacatttaaagatataaattataaccaaactccatacttgttcttgaagcaccctcagccagtgagggaccttctgtgtgatgagttttccctctctcaacacctatacacacacagacaccaaaagctcctggaccacccaaaaaacagtttgactctgaaagtcatctcaatagaggtgccactaacacttcatagcatggagaggcaagagtgacccacacacactccttgctgttagaaaagtgtgtcgcgtgtatgtgcgcatgcctgctcatttaggaagaaggtggcttcaaggaggagtagggagggaaaggcattgcaggcagagagaacagcaggcaccgcctaaggatgctgtgtcacatgagaggacaccgagtggtcagtgatggctagtgtg

SEQ ID NO: 10565 - DNA, 411 bp, Homo sapiens
ccgggcaggtacctagctctgggccgttttgccatatttggtcagaagcgaccctgccagattcatctcaggggactccagtggattttctgcagccaatctgaattactccaaccatgtgctcttaatttattcgtattgtaaatcatggtcttcagattaggagagttaaaatgaaaccaaaacaaaaaagtatgcacatacatgcatgcacacacagacttctataaaacatctagggtccttctgtcactttctttgctgatcagggccctcagagatcatgagctaaatcctagattgtaattgtgcatttcagaaacttagagtgtgacaaatactgaacaaataaagagggatgaggaccttattgtattgagtatgagtcataaacctgggtgaaaatacaaa

SEQ ID NO: 10566 - DNA, 374 bp, Homo sapiens
  misc_feature 322: n = A,T,C or G
aggtactccagccagggcaagagagcgagaccctgtctcaataaataaataaataaataaataaataaataaataaataaaaacaaagttgattaagaaaggaagtataggccaggcacagtggctcacacctgtaatccttgcattttggaaggctgaggcaggaggatcactttaggcctggtgtgttcaagaccagcctggtcaacatagtgagacactgtctctaccaaaaaaaggaaggaagggacacatatcaaactgaaacaaaattagaaatgtaattatgttctaagtgcctccaagttcaaaacttattggnaatgttgagaggtgtggttacgaaattacgttagggaggacaaaaggaatgt

SEQ ID NO: 10567 - DNA, 544 bp, Homo sapiens
ccgggcatgtacctggagaccattaactggaccaactttatagaaaaaaaaatacaacttatatttagtcttcctgaacagtgttagtatttctcagatgtgctggtttatcatttaggtattgggaaattgaaaaggaagaatacctattacttaagttttggggaaaattgaaaattgaagaaatggaaagaaaagaggggagggaaaaaaaactgtgtggtgttttttattggagaacaaccatttggtggccccttggacttttaggattttcaggtgggggacccctacaaaaaaaggaaaaaaattggaaaagggtgaaattacttgaaagttcttaaaagggtgggtgcttatcttgaaaagattgtgaattccacttggggttgaaaaaaaagaattttttattaaattattttaagaattgaactttttgaaggagaaaacctcaaattggtggaaattttaaaaaagtcttggaactttgggcttttaaaaaaaaaaaaattttaaaaccactcaatctcaaaaaattttattg

SEQ ID NO: 10568 - DNA, 367 bp, Homo sapiens
ccgggcaggtacgcggggacataacagggatttttttttatgccttggggttctgtttctgattttctttctgtgtgtttctccattatgttgttgcatttttctctatttacgttatctccctttccctttttctttctgtccctccctccttcttcctctctattcttcccctccccttgtttttatgcctgattatgtggacacagacaaggattaaaacagggcacctgcccttgaggagtttacaatctgctgggctgaggatcaacacatgttcaaaaagagaggaaagaagtcaagggagatcatgccagatggacttaatttcaatgaagaacaggcatttccatggaaagagacaagt

SEQ ID NO: 10569 - DNA, 424 bp, Homo sapiens
aggtactgttcattcaatttttctgaatatttgaaaaattttaacataaaatcttgagaaaaagtaaactgtagatgctaatagcatacaaagtgcagtcagtgtggagaacagaagagaaagatgaattccaatgaagagattcagcaggtttgtggaggagatgggattgaacagaaacttaacagattgggccttttaggtggaggagacaatataggaaaggcacaaacctggggaaatgcacaatgtatgctgaccaagaagtggtctggcgggtagagtaaggctggaagagactctgggagaggaacatgagaggtcccagggctctgaaccagggcaaccaacagaaaaggaaggacagactgggctggaatccaggaggagcagggtggtgtggagacacaacccttgtcaagtt

SEQ ID NO: 10570 - DNA, 406 bp, Homo sapiens
ccgggcaggtactttggcttttgtttctagaacaccattgagtatatgctcattaagatagtttgatgcaataaatccttattttacttgcctctattactgcattgtaaactgttgtctactttgtcttcttgaagtcctacacctcccccagcccccacatttggcctatggaacattactttatcctgattttccccctaaccttctggcaatgcctctcagactccttccagaactacttttctctgttttccttttaatgatgacagtttatgcaattgtgtcttcaaacttataacgacccagacaatagtaataacagtcaacatttactgaattcttacttgtgttaagtgctgttatatatgatattttaatctttgtaaaatcttataaggtaagt

SEQ ID NO: 10571 - DNA, 407 bp, Homo sapiens
aggtacctcctaatttgctcaaagatgctgtccgtatgccaagcgtgctgccttgggatgacatcagctcagaggagctgccatttctaattttcccacaggtgccttagggtctagctgcagccctgcctagtttgggaagattccccataccctttcccactggtttgaaaagaaacatccaaggccgggcgtggtggctgacacctgtaatcccagcactttgggaggccatggggggcggatcacctgaggttgggacttcgagaccagcgtgaccaacattgcgaaatcccgtctctactaaaaatacaaaattagccgggcgtggtgatgcatgcctgtaatcccagctactctggaggctgaggcaagagaattgcttgaacctgggaggcagaagttgg

SEQ ID NO: 10572 - DNA, 451 bp, Homo sapiens
aggtacctgtcagtgttcaatatttaacaaactccagttaaacaggtaagaggtcagcagtagcttataggccttggttctattatccatgtgcccaactgcagccatcgtgggctggtgttaaaattttcctttcaattgtcatttttctaataattgcattcagtgagaggagaagaaaaagttcaagggaatgacctggcctttcaccatcctacacaggattatgacttgatgacatggatatcatacatcttaatgttataatcgtataattctttacaaagatccctcaataatatcaccaagtaatttttttgaaaaaatctcttgtaattatcaataatatttgttaaaattatattttctttcaaatttcaatagttttacaaattttttgaataatttttataccttttttaacattttttatttaattttaaactttgtg

SEQ ID NO: 10573 - DNA, 402 bp, Homo sapiens
ccgggcaggtacatcagaatttcagatctagagcctacatctctgcattatttttatgcaaaagatttgtgatctattaaatctattttgagttctgcccatgaagatatatattttaaataaatattcttcttttacattggagtatctcccagatcccccacaccaaaaagagaactgtgagatataccagttattaataccagttattaaatcaacaactgggccaggcatggtgtctcatgcctgtaatcccagcactttgggaggccgaggtgggcagatcacaaggtcaggagatcaagaccatcctggccaacatggtgaaaccccacctctactaaaaatacaaaaattagctgggcgtggtggcgtgtgcctgtaattctaactactagggag

SEQ ID NO: 10574 - DNA, 451 bp, Homo sapiens
aggtacatgagatgggagctcgacacattttatttggagaataaaagaaaatatgccgtcatcaaactagagcgtgttggggggcatctggtttacagaactaagtcaaggagaagaactctcaagcaatggtgacatctgccagctctgcaaagtgggccctgccttgtcacacaagtctccttgggcaaatgttttctatgtagattttagacactttcctgtgactttctcaaggtcttttggtgacacatgcagcttgaagcttttgcaaggggctggagtctaatctcttcttgcccagcttggctgcaggagaagaagggagatatgttaagacttggctttgactgaagtggtgtaacctggggttgcaagggcctgtgccaaagcttttctggtggccttcacattgctttcaggatttggattaattttctggcaatccttt

SEQ ID NO: 10575 - DNA, 369 bp, Homo sapiens
  misc_feature 124: n = A,T,C or G
aggtacctgacatgtggggcactcaatgaacatttatcagaggggagcatatcaaacagtattggggcagtgactgccaaagaacagactggatctacgggtggggaaaccaatagtggtggtngaagcacagttggtattgaaactgggtcatcattggcacacacacaaaaacaaaacaaaaaacacaggtgggcacggtggctcaagcctgcaatcccagcactttgggaggctgaggaggatggatcacctgacgttgagagttcgagaccagcctgatcaacaaccttgctaaaaatacaaaaaaaaattccccaggtatggtggcgcatgcctgtaatcccagctactcaggaggctgaggca

SEQ ID NO: 10576 - DNA, 382 bp, Homo sapiens
ccgggcaggtacataaagacagatatatagattaatgaaataaaattccattaatatagaatatagagcacacaaataagctcatgagcttatacaagtcagtcaagtgatttttttacaagggtgccaagacactcacaggtgaaggaacaggctgaaagaaacagtgctatgtcaactggatagtcacatgcaaaggagtgaaggtggaccccctatatcacaccatattcaaaaattaactgaaaattgatcaaagacctaaatgtgagagctaaaactataaaacccttagaagaaaacacaggagtaaatctttgtgactttggattacacaacgatttcttagctatgtgataccaaaagcatgagtaaaaaaaga

SEQ ID NO: 10577 - DNA, 370 bp, Homo sapiens
ccgggcaggtaccaggagggtattgatgtttgaggtccaaactgaaaacccatcacctccttcccactgctatagcagcgttagccctggggttcattatctagccagttcacaccttctaaagtggggctctgaaaatgtcttacttccctcacagacaaggcaattctcaagcctcctgagatcacccaccaaccagagcaactgctgtcacttggaggtgcagctgaattcttctaattgtgacacaaactcttgaaactgtaaatgctgaaagattaaatgaggttataacactcagaaggttttacaagtaaaagtaagtcaaatcaataggtctttatttcatatctgtaatggtttagctctg

SEQ ID NO: 10578 - DNA, 388 bp, Homo sapiens
aggtactttttttttttttttttttttttttttttttttatttttagtagagacagggtttcaccgtgttagccaggatggtctcgatctcctgacctcttgatccgcccacctcggcctcccaaagtgctgggattacaggcgtgagccacccattccggcctaacgagacttatttttactcaactagatggcgttcattcatttgcttactcagctgtgccaggaattaagttgggcactgggaattccaaaaccaacaagacattctctgtcatcagggaactcacagcctagtttgagagataaacaaatgaacatgaaattataattcagtaacaaagaatgagtgttatggcagagggaatgtgtaagagcttggcagggt

SEQ ID NO: 10579 - DNA, 445 bp, Homo sapiens
tgcaggattcgttgtaactcctattataaggccaattggagcataccgcggaggccgccgaggtacactctacaagttgaagtggggcatttatggactgggatggcaggtcaggagtagcccaaggtatgcatgtgcaagaggaaaacttgataaactcaagtttatcaagaaattgttgatttcttgttcaactgttgatttgaaccaggcttctggttcaaagggccaggccatagctacagctgctctggtgggccaaaccaaaagcatcactgagtttgggcacttgaagtttcagacagctgggagtctccatagaaccggaagggaaaacacttccaaggatatgagcatgtcttgtccctgcctttgggccacccatgcacaccagctccacagcagctgaagcagagcagatccagaggaggctgtcggagggacc

SEQ ID NO: 10580 - DNA, 705 bp, Homo sapiens
  misc_feature 217, 230, 403, 445: n = A,T,C or G
ccggcaggtactttttgtagagacagggttttgccgttgcccaggctggcctccaactccttgagctcaggtaatccgccccccttggcctcccaaagtgctaggattacaggtgtgagccaccacgaccagcatctccatgtgtcttctaccttttacatttatgtctttaatctacctaaaatgatctattgtatagagactgagataggcatcnaatttaatttttncatttgcataactaattgtgccagtataatttattgaaaaatccatcctttctctactgatctacaatactcccgctgtcatatatcaagtgtctacatatgtggttagtctgctgctgactctctattctgttccatgatttatttgcccagatttgtgccaatatgcactnttaaatgttcaagtcttaattgaagcttaagcaaaaaaattnttaataccttgattgaaatatttacaaataaaatcaaacttttaacatcactattttctaccagtaagattttaaagtttcttttaaaatcctatttaatatcattaaaaattaattgccatgccttgttaggatagtggttagtaaaagaaaaaaattaattgccacaatgaaagcctttaaactcacctttctttcagtaatatcatagaccttattggttttgtagaaattttatatttctggtttggaaccttggg

SEQ ID NO: 10581 - DNA, 362 bp, Homo sapiens
ccgggcaggtacagaggagaaaaataataataacagtaatacctgacaggttgggagagattgtgctggtgtcacagagtctgtgacggcacttgtaagggagtgctgcataaatgagagtggctgctgttgttgtattattatttgttttacatggttataaaactttcctcaagccccgtttgaaaagagaaatcagtagttggcaaacaaattcgaagaacaatggtttctttctttttttcttttttttttttttttgggacagtcttgctctaaaatgcagtggcgggatcctggctcactgtaacctcacccttctggattcaaatggttctcctgtcttaaccttctgagtagct

SEQ ID NO: 10582 - DNA, 412 bp, Homo sapiens
aggtacctcaattatctctcataacacacagggtcccatgttggccattgcctcagcacatagtcaggtagccagcctctctgaatgcctggtagccaggattaaaataaataccctaggtattatctgcatatctcagggtcaggatatatcccatgactaagcccacaatcacagtaaattctttgagccagaccacattttggactcacatttaatgtaaatccacatcactccaatcctgcatgatggcacaggtagatttttgggagctggacaataaacaactattgagtgcatccccacggaccccaaaattcaattttataagaagtatctcaaggcattaataagtgcatcaaagatggtcaatgtggcattatttggtaaatcagaagcagggaacaaccga

SEQ ID NO: 10583 - DNA, 411 bp, Homo sapiens
aggtacgacatgaggcaggggttaagttttatttttgtctccacataaacagccaccaccacttattgaaatggccaccctttctccagagctccatagcgctgcctctgtaatgcatcaagtgtccatttatgcctgggtctgttttggtctctgtatcctgcttcattcacctatttttcctctatttttctatctgctatttctatctatctatatttctatatttcatctatatttctattattcacttatctattttttatcttaataactgcagctttataataaatattgatagagcaagtctgaccaccacattcttttacaagagaaaattgtctattcttcgcctttggcatttcccttttcggggggtttggtcttgattttgaaccaaggtcttgttct

SEQ ID NO: 10584 - DNA, 416 bp, Homo sapiens
ccgggcaggtacctaggggaatttctgagttcatgatatcgtaggtggtgtggaaacaagtcccagcataaacccacacagctggctgaatgaagttcaagtgaaggtcatgcagcatcaaagtagatgtgtgtcactgaaacttatggcagtggagtgagaataattttgaaattacttagattgtgagaaaatctggctgatgattagaagtgttgatataagaggtcagtttggagttccactcaaaattcatactaattttaatgttatggtattctaaactactagatgggtaaggggaagttttatgattctgaacaattccatttagaattaggataggattttttactgtgggggtccagaagaatcatagctatcaaattcataaaaagaaaaatttatttcccaag

SEQ ID NO: 10585 - DNA, 804 bp, Homo sapiens
  misc_feature 651: n = A,T,C or G
aggtctatatgctagaaacttggctgaatgatttgacattatcctatttaatgttcatgacaatccaataacgtaaccactcatatctcccttttgtgcagataacaaactgaggcccagagaaatcaaatatgttgcaaaatctacatcgttgaagagatgggtttcaaatccaggtcggcttggcccttgccacgacttcataatgaaattccatgggtgagtgttaccagtttctggtccatccttgcttatttcaagggtctcatcatcccatccactgtatcactttttttgttacaggctttactcttttctaccatggaaaagactaatgatatttttttctccataagcttggaaatattatcaatcaccataaaattcagccttcctctggtaactttggagaccctcagagcttttcttatttccagagacaggcggtttggatgagaattattctcttttttcacacaaattggccagatgacatctttactggtatctgtaaagactgcatcaccccagctactttcctgctgacttccacttgggtttactcaatgggtgacactcacaggacataagagattagaaagaaggataaagattttatatatctgctccctcttactttaagccatggtntagcagaggcccaagtcctggctttttgagcaaccctttataaaggtctggaaagagttaacttgcccttacaactgattatgtggcttactactggtgcaggtctgggtccccggtacttgccggcgggcgttttaaactagggatccccgg

SEQ ID NO: 10586 - DNA, 481 bp, Homo sapiens
  misc_feature 5: n = A,T,C or G
ggggnaggttcgcctaatacactactatatgtcgggtggaagctagctcgacggggggggccgaggtactgtaaataaacaggagagaacggagaaaagtcatgactcaggggtcttcttctcacagggctgagtaatcacaggagctttggatgcaggcaggctggcgctctgatcctgactctttcaattacagactgtgttaccttggacaatttggctaagtccttatgcaaaaaaagtatgatgccatctacttaataggattgtgaggattaaatgagataattcatataaagcccatagcggaaggcctggcaggtagcaagggcccagcaaatgagagctattcacgttgccattaatgcatcatcatcgttacaattatcatcttttttttttacgttccaaagattcttccttctatctattatctcatcatatctcatctcatcatatcatatctcatcattttatccag

SEQ ID NO: 10587 - DNA, 250 bp, Homo sapiens
  misc_feature 250: n = A,T,C or G
aggtacgaaatgttttggaaagacttgctaaaggtgagttctttcaaaaagtgtatgaaattagctgtggaagaaacaactacaaattatttggggaaaaactgaaaaatcaagaagtttatgttgatattactttaagggtgtttaagtctccattctacttggaaaatcacaaataatattattaaaattagagtgttactttaaatggaaagcttagggccagccacagtggctcatgcctgtaatn

SEQ ID NO: 10588 - DNA, 396 bp, Homo sapiens
ccgggcaggtactagacaacagctgtttccctggtgtatgatggagccaacaccagtcaggggtatattattacatctgattatcagtcaggataaggtaggcaattctctggtaacaaaccatcctcaaatctcagtgcttatataggcactatttcttgctccactagatggttcatacttgctcacactacccatcatgggtcgttaggagatctctgcttatggtcactcaggaattcatctgacaaaggagccaccaccttgaatattatgggtcactgtgccttgagggactgaggcacctctatctgtgagaaagcttgatttgcaacttgggcttggcctttttattcttcttggacccacttgacttctcactttacttgttcctcg

SEQ ID NO: 10589 - DNA, 495 bp, Homo sapiens
aggtaccaaggcccaatcaccccaaacagtgacaggaacataatttcctgttgggaccagttctcggaattttgcaccaacatgatcccatagttccacatctaacgttcccttttcaggaaaccaaggacagtgttccttccactggcccttaaaaaggggtgactatatttttccatgggaaaccctgaactcgccccatttttaacaggaaatgttaatattagctagatgataagccataaatgttttacgacctctgccgttgactcctatagtttactcccggtacaaattacacaggaccaaactcaactcaattcgtttcggggggaagcctgaaacaaaagcaattttacttgttggtacttggcacccgaattgaaatcaatttttcttaccgcaacactacccaaaaaggggaaaattctgggttttccccaacattgtctacctttagggaaaaaaaagaataatactccactgttttggggt

SEQ ID NO: 10590 - DNA, 401 bp, Homo sapiens
  misc_feature 401: n = A,T,C or G
ccgggcaggtaccttcaattccagtcacatggctcgacctatcctcaaacttcttaaatgtgtagctttcttcttcaatagtgagaagtcttgctcctattgtctttaatatatttatatgttttcttattctactttacaaaaccaatattttgatacacatgccataaccttctcagctttaacattgctagtcatctctaatcataccctcagatttgactctgaatggtccttgttgtctcttcagccccagttgtttctttggcactggccgtcctcctgacctctactgtctccttggccctcaccctgaaagtccttccagactcacttgcctctggctctataagatcctgggtatcaccagggcctctgctccctccatagaacccgtgtcn

SEQ ID NO: 10591 - DNA, 408 bp, Homo sapiens
ccgggcaggtacttttttttttttttttttttttccttctcttcttataagacatctgatttaaaaaaaaaagaataatagatttaagaagaaaaaaattagctaataatgacagcaggcttgtaatattatcataatgtcatttatcatagatatccttattctccagggcagcacttctcaaatccttgacagtatgacattttgggccagctaattccttagggagggacctttcctgaatattcaggccgttgagtggcctgcttggccttgacccgctcactgccagtagcacacctcccccaggcttcagcagcagaacacctccagtcactcagtggggactgggtaggtgggagacagaatcgcaccagttaagtgtctctgcggcagggtgaacggaaa

SEQ ID NO: 10592 - DNA, 389 bp, Homo sapiens
aggtactgggattataggcgtgagccaccgcgtctggcctctaacgagatatttctaaaggttaggccttcagtcaagaattttaaagctggatcttagaggttatctaaactaacctctccatttcatagataaggaaagtgagtcccagaaaagcactggtttggacaagtacatagagctaaacagtgactgtggatgtatgattctgtctcttaaactcctaatccaaatgtcttctcactagataaggctgtgccttctacattagagggctcaaaccccatggatggatggagggaaggatgggtggagggatggatggatacatggaaggattttgataaaatttgaaccccccaaccccttggaactaaacatttgccaca

SEQ ID NO: 10593 - DNA, 437 bp, Homo sapiens
ccgggcaggtactgggattacaggcgtgagccaccgcgtctggcctctaacgagatatttctaaaggttaggccttcagtcaagaattttaaagctggatcttagaggttatctaaactaacctctccatttcatagataaggaaagtgagtcccagaaaagcactggtttggacaagttcagaaagctaaacagtgactgtggatgtatgattctgtctcttaactcctaatccaaatgtcttctcactagataaggctgtgccttctacatttgaaggctcaaaccccatggatggatggagggaaggatgggtggagggattggatggattagatggatggatagaatgtgtactcattcattcagttttgcaagaaagattgagccaccttcccatcatacagtgtgctaattgctagaatgcatttatgaga

SEQ ID NO: 10594 - DNA, 394 bp, Homo sapiens
aggtacagtaggtggggccctgattacggagcatcttgaaggctggactgtggtatcgatactttattctgtggtatgggatgctggcgagaactttgagctagggagatgtggggtttgagtggtgctgtgaacacataagggccaaaatatatatgtgtgggaccgactgggccccatagaccaggatgtgggttggcagatgcttcttgttatccagctgggagaccgtggctccatgtaggaaggtagggaaggcagggatgaatgtggagactgagaatgaatgtgggtgaatggggactgttgagaatgagtgtaatgtgtaatgttttgcaggcagaaagtttaaagagaaattctgcataggctcagtagtgtgacatttgtcaat

SEQ ID NO: 10595 - DNA, 440 bp, Homo sapiens
ccgggcaggtacatgagatgggagctcgacacattttatttttagaataaaagaaaatatgccgtcatcaaactagagcgtgttggggggcatctggtttacagaactaagtcaaggagaagaactctcaagcaatggtgacatttgccagctctgcaaagtgggccctgccttgtcacacaagtctccttgggcaaatgttttctatgtagattttagacactttcctgtgactttctcaaggtctttttggtgacacatggcagctttgaagctttttgccaaggggcttggagtcttaatctcttttttggcccagctttggcttgcagaagaagaagggaagaatttgtttggaacttgggcctttgaacttgaggtgggtggaacctcggggggtgcaaggggccttggtggcccaaaggttttctgggtgggag

SEQ ID NO: 10596 - DNA, 445 bp, Homo sapiens
aggtactcaaggagagagtttcaggagtgcagccatcaacactcaagattccatgaaactttcagcctaactgatggtcccactgattactcactcagaacaaaacatatttcaccaaatatcactttcaggacttcattcctgatccttctggggtagaaggtgcaaaaacctggtttgtattagagacattaggaatatttcaataaggccaacagatttccatgctgaagggcacaagaaatggaagagctaatcccattccctttggagttcagtttagatagtttaattgtcataatcctatttgttaaacaggtttccttccctaaatccatagtatacccttgttttttaaatcccatgtgtcaagtaagaacccaaaggagccttgctttcagctttaaaataagcaataaccaggcacgcctggatgcatttgttt

SEQ ID NO: 10597 - DNA, 405 bp, Homo sapiens
aggtactttaatttttttttttttttaagcagagatggggtttcaccatgttgaccaggctggtcttgaactcctgacctaaggtgatccacctgcctcggcctcccaaagtgctgggattataggtttgagccaccacgcccagctgtgttatgttttaacacatgtgctatgtcgctaagtggttggaaatatgaaaatgagttgatgtgttcttataataagacatctgctttagtatacattattagcatgctcttccactttggaatttttattttatattttcacttaggcaaaaatacttttcaccattaaagtgggtataaaagcaacagttgcttttagaaatttactcttttcaattgctgggctggtttgggtaactggttagaccataaaagg

SEQ ID NO: 10598 - DNA, 400 bp, Homo sapiens
aggtacggaagatacggcagtgagcaaaaccaatcatgttccttgtcctcatggggcttacagtggggggagaaaattataagcaaaaagaaaatacaaagaaatacaacacagaaagcacaggcatgaggaaggagggcacggttctgggaaggcttcttggccgaagcaaccagacagcaaaacaggcttggccaggacagacatgggcctgttatccagctggctaacggtggagctacaagtgccttcgcctccagaatcatggaggtgggtaatgagccatttaccctccagtgaagcccatcctaaaattaagtgctctctaactaaacaaagagttgtttacttttttctataaagaaaacagaggctccacctgttactcactctcctacct

SEQ ID NO: 10599 - DNA, 458 bp, Homo sapiens
ggtaccctggagccttgagcaacgttcttttgcattatgccaggaagaactgctggcaaatgtaagtgggcttagaattcatgactgcagtcagcagcagttgtgtaaatctagggagagactggtatttgacacctgcaaagtcctaaagtttaacagaaagttcttaaaatgccccaagccccaaatttttgtaataatacattggttttcaccccacacctaatcaaatgtgtacctaagaataacttgtaaaggtggcaattaagacgatactaatatttctaaattctagcattcaattatgttcccatatttgcactttatttcaacattttttcacattcctctttaatgttcttccagctttcccatttacaaatttttttgtatttaaacattctccctatttcgaatattttcaaatttctatatactttaaatttgttcctcatttc

SEQ ID NO: 10600 - DNA, 386 bp, Homo sapiens
ccgggcaggtaccactgcactccagccagggcgacaatgagactccgtctcaaaaaaaaagattattaatttaaaaatattttaagtgatcagctgttactctaccccaatctcattggagaataagattctactgcggttctaagtcattgtgtgctgagtaaagtggttaactagtgatttgaaagaatacaggagagagggtaggagagtgagtaacaggtggagcctctgttttctttatagaaaaaagtaaacaactctttgtttagttagagagcacttaattttaggatgggcttcactggagggtaaatggctcattacccacctccatgattctggaggcgaaggcacttgtagctccaccgttagccagctggatc

SEQ ID NO: 10601 - DNA, 426 bp, Homo sapiens
gcggtggcggccgaggtactgggattataggcgtgagccaccgcgtctggcctctaacgagatatttctaaaggttaggccttcagtcaagaattttaaagctggatcttagaggttatctaaactaacctctccatttcatagataaggaaagtgagtcccaaaaaaagcactggtttggacaagttcagaaagctaaacagtgactgtggatgtatgattctgtctcttaactcctaatccaaatgtcttctcactagataaggctgtgccttctacatttgaaggctcaaaccccatggatgggtggagggaaggatgggtggagggattgggatggatagaatggaatgatatgatgttattcaataaaatatttatatattatcctgtatggtttaatcgaaactatctttcttttgatcg

SEQ ID NO: 10602 - DNA, 411 bp, Homo sapiens
  misc_feature 411: n = A,T,C or G
aggtacagttaattgatcaattttaaggagaaactgttttcttgtaaaatgtttctaagcccaaaaattatttgatcgcaaaatgttcgtattgaaatataagtgcctaatttcaaaaaggaagctctttagcaacaaagttgtttccttttttttccaatttaagatatttccatctctatttcaaatgcttgcttctaaaaaaaagtttagtgaaataagaggataaattttatgtttttattgattcgaatgacattttcccttggatgaattatgaaatgtctggttaactttagcattagtgaagcttgaatagattttaatattaagcaagtgtttagttgcttgacatgatcagtttacactattgcagagccttaattaaagttttattaaactgtgtaaacn

SEQ ID NO: 10603 - DNA, 425 bp, Homo sapiens
ccgggcaggtactactggcttcccagtggttgggttgagtataagcccccaaatatgagtaaaagaagaaaaagttaattcaatcaccaagtcttgctcgcatattaaaaattggatagatgaatgttcaatcatatgttttggctttggccagccagacgaggtcaatttttagatttgaactgcttagaattcttcaggcaagtcttgatggagcacttcttggatagttagaactttaccaggttcacaggagagctcaaatgaagcgaacacctcatccacactggtttcctttggagacctttactgttgagaggtggttttcatatccgcaaaatgaccagtgccagttgagtagatcaatgtttattaaccaggtgccacattgtgccccaggaaacatttgacaatgatggggtggt

SEQ ID NO: 10604 - DNA, 432 bp, Homo sapiens
ccgggcaggtacttttttttttttttttgagacggagtctcgctctgtcgcccaggctagagtgcagtggcgcgatctcggctcacttcaagctccgcctcccgggttcacgccattctcctgccccagcctcccgaatagctgggactacaggcgcctgccaccgcgcccggctaattttttttgtatttttagtatagaccttgcttttttatccattctggtaatcttttccttttattcagtgtgtcttgttccattaacattcaatgaagttattgatatgattagattcaggctctatttactttttggtttctatttgttccttctgttttttgttcctcctttcctgctttcttttggattaaatgatccaaaatgatttttagaaataatggcgtaatttatctattaacttttttagcaagt

SEQ ID NO: 10605 - DNA, 353 bp, Homo sapiens
aggtactattaaatttaatgagaggtaacccatgcaccggcaggaagttcaaggggacagaaggggcttgctccactctggagccctatctcctctcacctccttccttctagtttgacatgcgatcttgtctctctcttttataaagtgcttgcaggcccttttgattaggatgctgtcctaaatccttgctaaagagaggttttggagccaccaacactgcttcactgtggaataaactttccttattaagattcttcattcactcatactcatctcctttgatcctcactgctcattcatttatggagatacgcacccatatcatagctacttggtcaaatcatggtgat

SEQ ID NO: 10606 - DNA, 358 bp, Homo sapiens; identical to SEQ ID NO: 1437

SEQ ID NO: 10607 - DNA, 401 bp, Homo sapiens
aggtacaaactggaggtagggaatgggcaggaacactagctacattaaaaataatttcattaaacttatacagaaaacattattaatatacttaggattcccagagtaacttatttccctttccagtattggtatatcaataataataatattttatttactttatcgtggtatttcatattaaaaatactttttaaagcatgactaaataaacacatgtatatgtttatgaacataaacactactgaaacaaaagtttcagaaaacgtttttcttactgcactctgatattttttatcatatttctttttttttttaaatgctagtaataactcactaaatagattttatcatggagttatcaaatactaccttaggttatgtgatacttagtaaataat

SEQ ID NO: 10608 - DNA, 365 bp, Homo sapiens
aggtactggacttgcctaatttctaggcatggagttggggcttgtaacaatggtgggagatgggcagtgctttgggaatgtagctgaccactgcatgggtgctaactagcccagggatcttaaagaatttgtgtaggccatgaggatccactccagccactgaatagtcatagaattgaatctaggacatcaccgtatgctactaccatgcagttttatcccttctaagaatccaaatgccctagtttaatttctaaatttttgttttgtttattttcactaaagcaacatgttagtggactgcggagggaagtgaattcatggctggtcctcatcttgatatcttttaataggatcatgaggct

SEQ ID NO: 10609 - DNA, 811 bp, Homo sapiens
aggtacttttttttttttttttttttttgtatttttagtagagacagggtttcaccgtgttagccaggatggtctcgatctcctgacctcttgatccgcccacctcggcctcccaaagtgctgggattacaggcgtgagccacccatccggcctaacgagacttatttttactcaactagatggcgttcattcatttgcttactcagctgtgccaggaattaagttgggcactgggaattccaaaaccaacaagacattctctgtcatcagggaactcacagcctagtatgagagataaacaaatgaacatgaaattataattcagtaacaaagaatgagtgttatggcagagggaatgtgtaagagcttggcagggtatccagcagggatacctaactaagccccactggggaaggcatccgaacagaggggacagctgagctgagttcaatgagccagtaggaattaggttgatataagtcaaatcatttagtggttatgacaactctgaaaaataagtatttccaatttacagaagtgaagcctaagtcttaaagaagtatccaacatcatccagaagtggggggatcccacaatattcaagggaacctggccccaaaacctatgatccttcccctataccggccggcttttcaagactggaaattggccctgaggggatttggtcaggtacttggccggcgggcgtttaaaactaggggaccccccggctgagggattcgaattaagctatcatacggcaaccctaagggggccccggcccaattttgtcccttaggggggtaatgg

SEQ ID NO: 10610 - DNA, 378 bp, Homo sapiens
aggtactttggcttttgtttctagaacaccaatgagtatatgctcattaagatagtttgatgcaataaatccttattttacttgcctctattactgcattgtaaactgttgtctactttgtcttcttgaaatcctacacctcccccagcccccacatttggcctatggaacattactttatcctgattttccccctaaccttctggcaatgcctctcagactccttccagaactacttttctctgttttccttttaatgatgacagtttatgcaattgtgtcttcaaacttataacgacccagacaatagtaataacagtcaacatttactgaattcttacttgtgttaagtgctgttatatatgatattttaatctt

SEQ ID NO: 10611 - DNA, 412 bp, Homo sapiens
ccgggcaggtacacgccaccacaccagctgatttttttttattttgtgtggagtcagggtctcgccatgttgtccaggctggtctcaaactcttgggttcaagtgatcctcccaccttcgccccacaaagtgctggaattacaggcatgagccactgcacctggccatgttgtcttctttttcattacccacctcttaatcctacacatgcacatgtctagatagtatacagagataaacgtgtataaaacaacacaaatagaaaaagtatgcatatgtataagggatctacaaaaacagaaaagtcagaaaacccaaattaagagcacagtgtggctcacaggctaatccctgcagaggcagctttgggtttcagaaccaagtgaagctgcctatatgttcaaccaactga

SEQ ID NO: 10612 - DNA, 430 bp, Homo sapiens
aggtacttttttttttttttttttgtatttttagtagagacagggtttcaccgtgttagccaggatggtctcgatctcctgacctcttgatccgcccacctcggcctcccaaagtgctgggattacaggcgtgagccacccatccggcctaacgagacttatttttactcaactagatggcgttcattcatttgcttactcagctgtgccaggaattaagttgggcactgggaattccaaaaccaacaagacattctctgtcatcagggaactcacagcctagtatgtgagataaacaaatgaacatgaaattataatttcagtaacaaagaatgagtgttatggcagagggaatgtggtaagagcttggcaggggtatccagcagggatacctaactaagccccactggggaaggcatccgaacagagg

SEQ ID NO: 10613 - DNA, 390 bp, Homo sapiens
aggtacagaccatgtcagaattcctagtcttttacttctaaattttattacatcgtgtgaaatttagaaaaatataagctgtttattttcttgatcaagataggtgaagaaatacagaaaagaaagaaataatgaaagcaaaccccaactttcagatttggacacacctttgctaaaaactatcaacattttccccttgaaattctgagtggaaagatatgtgcttccctaagtcaggagctgtatatgcactccccaccccgaaacattttttgggcaaatggaatcattaaaggaatgagaggtatctactcttcagttcccacttcttgacacaaacagaaaacgctactgcagcttttagaggtgacagctactgtcttcaagggg

SEQ ID NO: 10614 - DNA, 403 bp, Homo sapiens
ccgggcaggtaccttcaattccagtccaaagccacatggctcaacctagcctcaaactttttaaatttgccgctttcttcttcaatagtgagaaatcttgctcctattgtctttaatatatttatatattttcttattctactttataaaaccagtgttttgatacacacggcataaccttcccagctttaacattgctagtcatctgtaaccataccctcagatttgactctgaatggcccttgttgtctcctcagccccagttgtttctttggcactgccaccctcctgacctctactgtctccttggccctgaccctgaaagtccttccagactcacttggttctggctctgtaagaccctgggtatcaccagggcctctgctccctccatagaaccctt

SEQ ID NO: 10615 - DNA, 387 bp, Homo sapiens
  misc_feature 387: n = A,T,C or G
aggtacggaagatacggcagtgagcaaaaccaatcatgttccttgtcctgatggggcttacagtggggggagaaaattataagcaaaatgaaaatgcaaagaaatacatcacagaaagcacaggcatgaggtaacgagggcacggttctgggaaggcttcttggccgaagcaaccagacagcaaaacaggcttggccaggacagacatgggcctgttatccagctggctaacggtggagctacaagtgccttcgccttcataatcatgagaggtgggttaatgtagccatttaccactccaggagaaggcccaatcctaaaattataagtgctgctcttaactaaacaaaggatgttggttaactattatttctataaaagaaaacn

SEQ ID NO: 10616 - DNA, 385 bp, Homo sapiens
aggtactaagttgccatttaagaacctcttcaggttccccgtctccttgagctatgaaagttttcatgaacacttcagttttaatggcatgccaaacattttgttccatgagcaacgcaacagttttaaaaattgccattgagtgtttcaatagaatttagccagttgtttttaaatatatttctatgagccaaggcttacaaaaatgtataaagaggaagtgcccagatataaagaagctttgaaatggttgctgttgcctccttaaaaatcatcattaaacaatctttcaaacagccagtgtttggctcattaatttaatcaaaatttgtaagaaagtagctagaatgaacaaaaggatgacatgggctttgaacagaagaaa

SEQ ID NO: 10617 - DNA, 377 bp, Homo sapiens
aggtacctacctgcggtatctgatcagtttctgcctagtcagatgtgccctgttgctgagcctgcttgggtggggagcatgggaaaatggggcaagtgcttcatgagggagctgttctcagccgccccctctcccaactccccagctctctctccttgttctgtctcctgtttctgggctctaatcctggtcaggcccaatgccccttgcctgtgatgctgggtctgcagttttgctcgccgtcctcgctttgccttcttgcccgccacttccagcattcctcctctgctcagcttctgagctggtgtcaggtttctacctgcctggccactgagcccacctgaagatgtctggccaattccttttagcctctgccc

SEQ ID NO: 10618 - DNA, 400 bp, Homo sapiens
ccgggcaggtacaatgaaaggtaaaagtaatgctctcagaggaaatgtttccattctagttctatttggaagtccttgggacaatttgtgttttgattatatttagaaatcttcagtattttgtcttggccaggtgtagttgctcaggcttgtaatcgcagcactttgggaggctaaggcgggtggattacctgaggtcaggagtttgaatcaccctggccaaaatggtgaaaccctgtctctactaaaaatacagaaattagctggatgtggtggtgggtgcctgtagtccaagctacttaggaagctgaagcaagagaatcgcttggacctaggaggcgaaggttgcagtgagtcttgattgcgccactgcactccagcctggtgacaaagagaaact

SEQ ID NO: 10619 - DNA, 442 bp, Homo sapiens
ccgggcaggtacatcactgaagcattggttcttcaagctcacttggaagccactgcaaatctcaggcttctccagaaatctcttctgcaactgtcctgatatgtagcatttaagtgagaggtttgcaaagggccactttaaagctgcagtgaatcttatgtctgctcatgcatatggctgcatctgcctctgggaaattatgatctttccttggcacttgtggtcatcttgtaaaaatgagatgtatcctccaccccaaatttgatttgaatatcaagactaatgatatcccaattgcagggtattcaagagagtattaaaaggtttgttacataattgagactttttggagagagcatggcatgctttccaagcaatatccaaaaaatttgctttgaaggagaatagagacttgtttggcttttattgtggttaggaggta

SEQ ID NO: 10620 - DNA, 388 bp, Homo sapiens
aggtaccttctgctgttccctgggtcttcaatgactcaatttcccaccagcagtatcctttaaagccatcctgcatcctgagacaagagattgacaattcattgataagtagtcttaattgtcactattacagggctgtaggtccttttgccagccatgcctttcagtcctaaatggtcttcaaggttgggctgtgttgtccaagagctgaggaccttacatttattgttccaatatttattggctataatgatttctgtggagcagtcagctgtcagaaaattttgtctcctttgtaggtaacctgtcattggtctttggatttttttatagtctccctttgtatctggtgtaatttagtttcaatctgttgtgcctacgtgtagac

SEQ ID NO: 10621 - DNA, 396 bp, Homo sapiens
ccgggcaggtacttttttttttttttttttttgtaaagacggggtctggctttgttgccctggctggtcgcgaattcccggactcaagcaacctttctgcctcggcctcccaaaatgctaggattataggcataagccactgtgcctgtccaaaactttatttttaatgacaaaacctattttcctatagctctgcttggaatgctgtatttatcctaagcaccagttttggccctagctggcctgtatacagctttaggtaggctcttgatctagttttgctataggcagggtagatctcagtatttcatattttacttgtggcagagacagtgttaacctttctctcatggatagcggattcattgagacagattttaactaagagctatgatg

SEQ ID NO: 10622 - DNA, 465 bp, Homo sapiens
aggtacctcattttgtcccttgactttagtgtagtggtgctctctgcttttcgttaattttctcctggccaaccagccaactctggctccctgtggttataggaaattatccgtgcaatgaacttaatttagaaaactctgcttgcataaggaggtggcaggatttattttttctaatagtccagtactatggttgactttcattgctaacacaattttcaacagatccattgacattagaaactagtatgccttaattttaaaattgtattattgcaaaaagttcatttggaacgaattggatacaataaaaagccgtagagctccgatcttcacaaaattaaacgtggctttaaataaaaggtttaaaatatcttgggccattttccatcatttccctttattctcttttttaatgtggggaaaaacatacttcattcattgtaaatccactccaaactccat

SEQ ID NO: 10623 - DNA, 471 bp, Homo sapiens
ccgggcaggtacgcgggcgtctgctaattttttgctttctctaaagcgcttctgctcactgccatatggtaaattcctcagtgaattattcagggtcttgtcctgatgcaaaagacactttaaaaaaaagcagaacattccttatccctcttggaaaaagaaataacaaataattaaggccacagcgctcagggacccaagtttattggcaataaaaggtagctgtgctgacaacgctaccaattaatctgccaaaagcgagctcagtggtgttgccataaagatcatgtgttggaaaacaggactggagacatccagggatctatataaagcatagacaacagtcttagcgatcatggggcagcaatgtgggcaccctaccttcagcagatatggtagcggtctgcgttctttctgtaacaaaactcctcactacgtggagaacccctcaatcccaagtcagctgtacct

SEQ ID NO: 10624 - DNA, 350 bp, Homo sapiens
tccacaaatgtctgcagctacgatggaccctcagctgctggacaggaaagaggatcaagctaagaaggcccagagtgtgcaagcagagagagggtgtggacagaaaaccttgccttctccagggctagtggcgaaagctatctcaggctggctcaagtggagagaaaaaagcatgagatcaagcaatggacagctggggaagggctggcttttatttcctcagctcccaagctcagtccctggcactgggccgttgcctttgtaggtccctctgcgcccaggtcttgctatgggggttgttttttggcattaagggctcatgttaaacgccccccggctgcaagaagccg

SEQ ID NO: 10625 - DNA, 440 bp, Homo sapiens
ccgggcaggtacatggcatcaggtgtgatcagatggtgtccatctggctttaggctttgccgctgaagattttaattcagtagtcagagtctcctctttgttccttctctcttctcatgacttctgcaggtggatatgctgggtgacaagaagagcatttgcagggtttctggttctagtgccttcattcttcccaccctggtaattgagttttctcttcaaccctgatctgggtagcccctttagctgctctaaagaaggaagtgagaacttctccacttgctgggagggtatcatctctgggggacaagggcaagacgcccagcttgcctgatccctttgatgccttctttccagtttgtctaagggctccagcgatctgagagttggtaagaaatctttgtgactactggcatctacagatagatgtcagagctgtt

SEQ ID NO: 10626 - DNA, 496 bp, Homo sapiens
aggtacctgggtgacgtttacgttctgggatttcgggagatgcggttttctgcacgccaggggccaagcctgagacgtatatggacggcagggataggagctctctccgcgccacaaacgcccttgctcatacctgggtttccttgattttcctgcctaatattaacccaagccttcccattggccggtgcttctgagtctcttattcctgcgggacttgggaacaaaagggtgttaaacatgttgattgagtcttttgtattatacccccagtgattcttgtcactttgcccacaagtggcgaatggctgccataattcataaatacttacttcaaccaacctgtaacaacctgagtattcaaggttggagtttccttgaagttgttctttaacgaacaattaaaaaatttctttaacgtaatttttaaacatagtaggtttgtaatttttgttggcataatccacctgttttaaacttgtaccaaaacggccat

SEQ ID NO: 10627 - DNA, 696 bp, Homo sapiens
  misc_feature 651: n = A,T,C or G
aggtacgcgggatactatgactaattatttttgttattattaccacttgtattgcatatatcagctcagtatgaatttatccactacttgctgaataatccctgaatgaagagacaatatagtgcaatatttgacaatgtgtgctctaaatcacactttgttttaatcaagctcactcagtatttattagctgagggatgtcagcaagtaatttaaccagtctgatgctcaatttttctcatttgtaaaattgtgatgttaatcctaattataatatgggattgttgagaatcatgtattttgaaagaatccaaaacatttttaatcagtaatcaatcaaataaaaaactagagcctggccgggcgcagtggctcacgcctgtaatcccagcactttgggaggccgaggcgggtggatcacgaggtcaggagatcgagaccatcctggctaacatggcgaaacccccgtttctactaaaaaaaaatacaaaaaattcgccgggcgtggtggcgggtgcccgtagtcccagctacgcgggaagctgaagcaggaaaatggcgtgaaccccggaggtggagcttgcaatgagcggagatgcgccactgcacttcagcctgggcaagaaaaagagactccgttttaaaaaaaanaatctttataacaaaaaggtcccttgccgggcggcccgtttaaaa

SEQ ID NO: 10628 - DNA, 410 bp, Homo sapiens
aggtacgacaatggaaagtttttaaacaagcaaatgtcactatcaaattcctgttttagaaagataattctgagaaggcacatcctgagacagcctggggccaagatgctgtggcgtaaacagatcgctgagcgatgataaggtcctgaatccaaagggcattggtagaaaccaaaggtgaagggacacattcaagaagcttttcccaaagagaatgcctgggtgaccaattagataaagtagatgaaggaaacagaagaaacaaagatgattccacagtttgttcttggacaggagggtagatggcaaagtcattaactgagaaagtgaagataggaaaaaaagagcaggtttggcagagaatgtgacaccctcagtttggacctgctgaattctgagtatgttggaga

SEQ ID NO: 10629 - DNA, 412 bp, Homo sapiens
aggtactgatctaaccaagatattttgtttttctcatccaccagtcactttctcagtcctttctgtatcccttgcaatttgaacaaagcttggtgaatagtgtgcacacaaaaagcacactaggtgaaagacagatacataaaaagggtaaagtcaggatattttaacaaacctatcaagctctaaatataagcctccttggtagttttctctttaaccctctctccactgttggatgaaatttgctgcattcaattccagttcccaccccaacttccttcttaacacaaggtcagggttaagccttcggtgctttaatccagaggaaaattacttattttaaaaagcagtgaaaaacaccgcattcctttggcacaggatgaagaccagcttagcttttcagttgttgatt

SEQ ID NO: 10630 - DNA, 342 bp, Homo sapiens
aggtacgcgggggagccagcgatgggtccaccttgcctttgttgttgttgttgtttttgtttcttgttttggtgactgagtgaagggacttgaccctggttctcccagcttgagcaggagcgtcactgcggtgatcagggaagctgcctggaccagctggcctggggcagccaccaccccattctctcgcccctcttgagaatccagcctgtggacccaggtgtgtcagcctgcagtcagaccacagtctgtctcgggctggtgctgggggtggcagaaagggggtcctgacgcaacccctgctcccccgagtctctcagtctcctggggaagagatgacag

SEQ ID NO: 10631 - DNA, 107 bp, Homo sapiens
gctctccgatgcccagccctcctggaaccacctcgcctgtgacgtaggtggagcgcgcactgcctccgggcccgtctttctcaattgggaccggaaaacgttgtcgc

SEQ ID NO: 10632 - DNA, 314 bp, Homo sapiens
ccgggcaggtacgggggagataggcaggggacatctcccactgctccagcatccccaacccccatcccgggcagccccatcccacacccggaggaaaccctgtgtgcctgttcacagagccgacaacagtagccagcgtccaggcagaagctgacgcacagggaactcgaggaactttccataaggctagtgtgcagcccctggggacgggccaactgtgggctggtggttggtgaagcctgtctttgcaagagccctggcagcaaggtggtgtgtaagccaagaccatcttcctaagttctccttcctcgtct

SEQ ID NO: 10633 - DNA, 356 bp, Homo sapiens
gggctcaggctccttgcagattcctaaccagcataatgctggagccgggagccaccaacctgcagtcttcagaatggccgtgttggacactgatttggatcacattcttccatcttctgttcttcctccattctgggctaagttagtagtgggatcggttgccattgtgtgttttgcacgcagctatgatggagactttgtctttgatgactcagaagctattgttaacaataaggacctccaagcagaaccgcccttgggggacctggtgcatcatgacctctggggcatagattgaccaccacaacaagcaccagttcttacgggctcttaaacggtcctagctttaagaatat

SEQ ID NO: 10634 - DNA, 371 bp, Homo sapiens
aagcccgcttttaagtgagctcagcatattataaaggaatgaaagcaattagagcgtggactctaaaggtaggtgagacttgctgttccacttagaaacatataaacataggaaactaaggactcgatggggacatcaatagtaggatggcttttaagagggctgaagtgtgtaaatatacacattaagctttgcagcaactctgtgccaaatcgaagttgttgcagacctgtaattttagtttggtaaaggataactgtagttattttttaaataaaatgattcattagaattctttggttctatcatgataatttagcaagtttgtctctttcagaaagaaaagtttaagtggggttaatgggtacctt

SEQ ID NO: 10635 - DNA, 436 bp, Homo sapiens
ccgggcaggtacaggccctcatgttctctggacacagcatggatggtgaatgttctcgtggtgtgagacagaatggagtcaaggagaaaccaagtataggcacagggtgggtgagactttgtttccgctaagaaggtcatgctggagccctccatcacctcaaccacctccccactggcaacaccagactccaatttgatttcaacaggatcaggaccatacttcacatccaggaagatggggtcgctcctctggctcagaagggcatctcgagcttcacattggtaagtccctgagtcctcccgctggacaatgagaatggtgaggatcttgccatccgtggacagctgcatgcgctcatggaacacaatggagaggttgttggaaacccagtggatggtaatgttgacgtccttagtggtgcagtagaaggtca

SEQ ID NO: 10636 - DNA, 475 bp, Homo sapiens
aaaccagcttttaagtgagctcagcatattataaaggaatgaaagcaattagagcgtggactctaaaggtaggtgagacttgctgttccacttagaaacatataaacataggaaactaaggactcgatggggacatcaatagtaggatggcttttaagagggctgaagtgtgtaaatatacacattaagctttgcagcaactctgtgccaaatcgaagttgttgcagacctggaatattagtttggtaaaggataactgtagttattttttaaataaaatgattcattagaattctttggttctctcatgataatttagcaagtttgtctctttcagaaagaaaagtttaagtggggttaatgggtactactcgattgtcaacgtcaaggagtcgcaggtcgcctggttctaggaataatgggggaagtatgtaggagttgaagattagtacgccgtagtcggtgtacctgcccg

SEQ ID NO: 10637 - DNA, 354 bp, Homo sapiens
aggtacatcaataagtgactggttaaatacgttactccacctacaaataatgcaatgttgtgtggccataaaaaaaaagaataaagtagatatttagttgcagatatagaatgagctctacaatatattaagaggctgaacaacgtgctgtttacagaaaatatgctctagttgtatataaaggaaaaaggatttaaattcacatttaaacttggtaacacattgaaaaattgcagaaaggtaaataaaaaaatccaaagctaggccaggcagagtggcttatgcctgtaatcccagcactttgggaggccaaggcgggcagttcacaaggtcaggagatagagaccattctgc

SEQ ID NO: 10638 - DNA, 203 bp, Homo sapiens
acgtcggatgacatgttaccatgacacaaaacgacaatgaccacggcaccacaccaagaatcatctacctctattacaaccagacatttgcactcaaataaggaggtgctgccgtatacttatccgttgctggaggcagcatgaatgggaaccagacacagctgggaaagcaatcggtttaacagagcgccaaccctgtacct

SEQ ID NO: 10639 - DNA, 349 bp, Homo sapiens
tccacaaatgtctgcagctacgatggaccctcagctgctggacaggaaagaggatcaagctaagaaggcccagagtgtgcaagcagagagagggtgtggacagaaaaccttgccttctccagggctagtggcgaaagctatctcaggctggctcaagtggagagaaaaaagcatgagatcaagcaatggacagctggggaagggctggcttttatttcctcagctcccaagctcagtccctggcactgggccgttgcctttgtaggtccctctgtgcccaggtcttgctatgggggttgtttcttggcattaaggtctcagttcaaacgccaccgtctccaagaagccc

SEQ ID NO: 10640 - DNA, 318 bp, Homo sapiens
  misc_feature 318: n = A,T,C or G
ccgggcaggtacgcggggaattaactggaacttaccattcattctgctttgctaaattactatgctactgcttagtgatttttctaataccattataaatgctttgaattctcctgcccctagaaaagataaattgatctgaatctcttatagtttgtttgtgcctgtatctgggaagttctggatgacctttgactgtatcaacgtagattataatcgagaatataaattacagctgagggggaaaagtggttactcctggtagatcaatctggatgcaatcaggaggacagaaatcacaaaataacttagagtctn

SEQ ID NO: 10641 - DNA, 430 bp, Homo sapiens
aggtacgggacttgtctccaggagacatgtctgggaagaagagctagactggagaatcatgagcatgttcaggtgaaaacatgtgagtggataagagcaagagggtgagaacacagaccaaggggctaagggacagactgtgttcagtatttggggttgggaactggtttttgctacttgctagttctaagaccaggctcagactctaacttctctgtaatgtgggaataatgacagcacttaccttataagattttacaaagattaaaatatcatatataacagtcacttaacacaagtaagaattcagtaaatgttgactgttattactattgtctgggtcgttataagtttgaagacacaattgcataaactgtcatcattaaaaggaaaacagagaaaagtatttttggaaggggtcttgaaggct

SEQ ID NO: 10642 - DNA, 488 bp, Homo sapiens
  misc_feature 414, 415: n = A,T,C or G
ccgggcaggtaccctggagccttgagcaacgttcttttgcattatgccaggaagaactgctggcaaatgtaagtgggcttagaattcatgactgcagtcagcagcagttgtgtaaatctagggagagactggtatttgacacctgcaagtcctcaaggttaacagaagtctcaaaaagcccaagccccagaattttgaaaaatacatgggtttcacccccaacctaattcaatgtcaccaagaaaaacttgtaagttccaataaggacaaaccaatagtttaagtctgcaaaaatattttccatatagaattttagaagtattatttaacctctttaattctctgcttttcaatatcaaatttgttttttgaagccctttttctttgggttaaaagtttaccgaaatgcctttnntttcaaaagtaagtctttaccggtgaaacttaattttaaatgtatttacaaaacaggaactcagtaaatggct

SEQ ID NO: 10643 - DNA, 419 bp, Homo sapiens
ccgggcaggtacccaaattaactaaccttaaatgcaagacttagcagcaggtattatccatgttgaaccacagagttgtggttataggatgatctatccaggttgaaaaagaattctggccagcagtttgaagaagtgaaaatcaagattaggcacagaggcagagggtggtggggccacagggcggggaaggattccaatccatgagactgcagaaggggaagtgagcagcctctacccatacagactagggtctcatggatgccactggagagcattccagtctcactggatattggtagttcactaacttgtgtcagtcatgattgtgacctctgatatattggctttatttgggttttcatttatacaaaagctgggtctctccttgatcccagtgttttggtggtcttttgtgc

SEQ ID NO: 10644 - DNA, 342 bp, Homo sapiens
ccgggcaggtacgcggggagggcatttaacttcaaggtaagacccattccaggacggcagagatcatgtctgtcttgcgtatccctgtgtgaattttgcctgacatgttgcaaacactccgtatggaagtcttgagggtcttctgccccagtcagaaaacctctgggagaacagttatccccagacctcagacgctcgacggatacatgagaagctttctttgatggattcgatgtcaggatctccatgtgaacttccacttagaggtgtcatgctatggggcctcagcgtcaccacatcgtttggacgtctgaccagtttcctgactttgagaggctctta

SEQ ID NO: 10645 - DNA, 316 bp, Homo sapiens
  misc_feature 316: n = A,T,C or G
aggtacatatactactctcttctttagtaacaaggttgtaagtttcccacaaggacaagacttttatgttgaagcagtaactgggacttctaaggagtgcaaaatgtaatagttctttaattgggtaagttacaacatcatctatggtttttctttttttttttttttagcgactcatgagcagatattcgccccatattacagacgggggaaaaaagacttgcacaagctcaaaatgtgcgagctggaattaccatgaaaaccttggcatatagctattgtttgaggccattgtcttggcaggattcctttgggn

SEQ ID NO: 10646 - DNA, 355 bp, Homo sapiens
ccgggcaggtacaatcacgcagtagtcagagcaggagtatgaggaagagcaagaacctcccaaagttgaaagcaaaccaaaggtcccccttaaaagtgccccaccacccatgaacttcactgatttactcaggctggctgagaaaaagcagtttgaaccagtggaaatcaaggtagtgaagaaatcagaagagcgacctatgaccgcagaagaacttagggagcgagaattccttgaacgaaagcataggagaaaaaaacttgagacagatggaaaactacctccaactgtgtccaaaaaggcaccctctcagaaagaaagtgtgggcacaaaacttatcaaaggttctggagac

SEQ ID NO: 10647 - DNA, 201 bp, Homo sapiens; identical to SEQ ID NO: 1478

SEQ ID NO: 10648 - DNA, 458 bp, Homo sapiens
ttgtgctatcactacttagggcaattgagctccccgcggtggcggccgaggtacttttttttttttttttttttttttggagacagtgtctagctctgtagctcaggctggaatgccgtggtgcggttatggcttactgaagccttgaatttatgggctcgagtgatctcgcctcagcctcctgagtagctgggactacaggcacataccaccacgtctggctaattttaaaatgttgttttaaagacaaggagtcaactttgttgcccaggctggtctcaaactcctgggctcaagctgtcctcctaccttagcctcccaaagtgctgggattacatatgagaatcactgtgcctgtcctgtcctgtcattctttaaacaaaatttcattgaatgcacatcttattatacaaagactataatttcctgaccagttgctacttcacatagatttaacc

SEQ ID NO: 10649 - DNA, 401 bp, Homo sapiens
ccgggcaggtacctccaagaagcttacaggatggaaccagggaaggttttggacactccacatcactcaaagttccactggctcgatccctgcagattagtgaagaactactgagcagaaaccaattgtccacagctgccagccttgggccatctggattacagaatcatggacaacacttaatattatccagggaagcctcttgggcaaaaccacattacgagttcaacctcagccgtatgaagttcaggggaaatggtgcactcagcaacatcagtgaccttccttttcttgcagaaaactctgcctttccaaaaatggcacttcaagcaaaacaagatggaaaaaaggatgtgagtcattcatctcctgtagatttaaagataccacaagttcgagga

SEQ ID NO: 10650 - DNA, 201 bp, Homo sapiens; identical to SEQ ID NO: 1481

SEQ ID NO: 10651 - DNA, 333 bp, Homo sapiens
aggtacttttagtagagatggggtttcaccatgttggccaggctggtcttgaactcctgacctcaggtgatccactcgcctcggcctcccaaagtgctgggattataggcatgcgccaccatgcccggccgaggtacagggttggcgctctgttacccgattgctttccagctgggtcttggttcccattcatgctgcctccagcaacggataagtatacggcagcacctccttatttgagtgcaaatgtccggttgtaatagaggtagatgattcttggtgtggtgccgtggtcattgtcgttttgtgtcatggtaacatgtcatccgacgt

SEQ ID NO: 10652 - DNA, 351 bp, Homo sapiens
aggtacactgaagtaggaaggagggacagaaatagcaagtcttaggaaatgcctgggtataaaataaggagaaaaattacacttaatagcatatcataataactgcatttaaaggtgggaggagagtcaacatgtagtaagtgttatttgatttaagtatttctattgctaaatttaagtgtagttaaaatttcatagtttactttctttacataatgcactatccgcatcattgaaaatttctgtgaatatgtttctaataacattataatttttcaatgtgtagatatttcataatttgcataaacaatgccatgatattgaaatcagttacttacaatgccaagggac

SEQ ID NO: 10653 - DNA, 535 bp, Homo sapiens
ataaggcagccaccggaagcacccgggcggccgcggaaatgctggtggtctgcatcaccaccggatcaacttcgacaaataccacccaggctactttgggaaagttggtatgaagcataaccacttaaagaggaaccagagcttctgcccaactgtcaacccttgacaaatatgtggaacctttgggtcaggggaacaagacaccggggtgaatgcctgcttaaaaaaccaagaacctggggggctggctccccaatcaattgaatagtaggatgcggaaatcggggcctaactaacaaaaagtttctagggaaaaaaggggaaaaagacttcccaaaaggccaggcctggttcattcggtggaaagcgcccaaaatatccttccagccaggaaagaagcttgtagggaggaaagattataggagtggtttgggggggggccactgtggtccctggggggggctttggaaaacccacaatgggagggggaaggtttcaattaaaaatggcttgaacttaccttttaaaaaaaaag

SEQ ID NO: 10654 - DNA, 541 bp, Homo sapiens
cgggcgctgactcctgtgagacgcagccgaggcgagcagaacccgaggggaagggatgcagaccagagccgagagctactaagttcctggcctcccccgagtgagtgactggcgatggacggagagcaggacttcccttcctgcattcagaatgtgtgtgcaggtcattattcatcaacacatgtcaagataaaacatacagagctcttcttggaagggctgggtttggtccatctcaaatgacacttttgtcacctccataaattccaagatggaatgtcagtccactggggttgttatagacggctaggctagactaggcagtccggggcggggaggggagttaagtaggtaagtgttcttccttccacgaggctgtcttgttgaggtcatttctgcctgagtgtgacacagtcctctgtaaatatacctgtaaggaacgttttccttgcaagatacaacaggtctccgtttttttcccgatttcaacacgtgtgttctgagtgtgaactcggtcacagaaaggggcccccgcgtacct

SEQ ID NO: 10655 - DNA, 355 bp, Homo sapiens
aggtacacaataaacacacaattttatctttcaattcaaaaataatgtttaatgaaattaagaaatgaaagaaaaacagtctgatgaaagattacatttgattatgaagaaagtaaatgacctactgtcgttcactatgacctatccgataaaacggtctgctttttcttgttgctgttcttaacttagggtgtattgcctcttgtttccttttcttaaacaatttttcattttcactctatattcagtgtgctggagttgcaaatttgtcatgtagccatactgttcatttatttatttatttttttttgagacggagtctcgctctgtcacccaggctggagtgcagtggctc

SEQ ID NO: 10656 - DNA, 298 bp, Homo sapiens
aggtacctgcgatgtcaggaagaggaacccactagatgaccatccttgggaaagagtcaaccatgccagcccagacacatatagccagctgctggcattggattctgcatataacctaccatgacagaggtttctacaggcctttttccctacttccttatgcaggaatattcatctggataatgaagatcccctgtcctaaatctgagatttggcttgcatttaaacatgaaattaaacatgtatttaaactgaaaatctgctgcaaactgtttctctcatcccgcgtacctgcccg

SEQ ID NO: 10657 - DNA, 360 bp, Homo sapiens
ccgggcaggtaccattctggcctgctctacgttgccatttttaatccaacttgttaattctgcctttagactctcttcatatttcctagcatccatctttttaatgactaatttattgttaaaatgaatgaagttttctgggcacagttcctgggcccgaggccaacttttccaaatttgaaacatggcatcatacagctggatgctttctcgaggtgaaagggtaagatcaggagggaatccatacctttcaatatgatctgttgttagtgcagcacatgggtgaaaatgatcaaaatgaatgtcaccatgttttattgaacatacatgcttctctagatcattatacctctctccatc

SEQ ID NO: 10658 - DNA, 336 bp, Homo sapiens
ccgggcaggtaccatcaaaagaatatattccaagaaggttagcatctaactgaaggaaacttaggtgtgacactgagagacttcatagcaggagatgaaagctttgaaggaaggcattctgctagaggggcagcaaactccagcctgagagccaagtgcagtctgccacctgttttggtatgactggtgaggaaagaaaggggaaaatgattttatacttttaaatggaaaaaaaaattaaaagatacttcataacatgtaaaattgtatgaaattcaaatttcagtgtgcagaagttaagtttaaggattgtttaggtattggctgtctacggct

SEQ ID NO: 10659 - DNA, 414 bp, Homo sapiens
ccgggcaggtacaagctcagtttctatgattatgtccatcagctcatccatgaaatcaagtcccagatggcagttctgcagaagtgcccatcctccgttcgccatggtctgctgcaagagcttccgagcatggacttcctggccctggcccatggacacataacgggtttctatttttaatctcttccccaaggcaatgatggaatctggggggtctgagcccataaacgggaaacaaataaggggcgtcggggaatcaaattcttccacctctttttccagtcttaaataacaacttccgcatatttttcttccatgggagtccaccaatggtccctgggcccgttttaaactaatgggattccccgggctttcaggaattcgaaattcagcctatttgaatcccggccaccc

SEQ ID NO: 10660 - DNA, 465 bp, Homo sapiens
aggtacctgcggtagtagcctggctttgctctgacggcgatctcgcggcccgagagccttttatagacagctccttcagtgtctctgtttccaaaccgcaaccgagaagagacagacggagaaaagagagttacttttccaggttgcttttcccggggatgtgaaggatacagaaatgactgtgaatcaacccatatcatcaaggagctgataatctagtggaagagttagacgtgtgcatacttcactatgatatgaggcagtctctgagcttatattctctgtggaagatgtgacatatccaggcggaacatcatgatgcagggaaacacatgtcacagaatgtcgttccacccgggacgagggtgttcccgaggacgaggaggacatggagccagaccctcagcaccatcctttaggccccaaaatctgaggctggtttacccttaacagcctcctgtgcag

SEQ ID NO: 10661 - DNA, 201 bp, Homo sapiens
aggtacagggttggcgctctgttgcccgattgctttccagctgtgtctggttcccattcatgctgcctccagcaacggataagtatacggcagcacctccttatttgagtgcaaatgtctggttgtaatagaggtagatgattcttggtgtggtgccatggtcattgtcgttttgtgtcatggtaacatgtcatccgacgt

SEQ ID NO: 10662 - DNA, 179 bp, Homo sapiens; identical to SEQ ID NO: 1493

SEQ ID NO: 10663 - DNA, 446 bp, Homo sapiens
aggtactttttttttttttttttttttttttggaaatgaacaaatatttatttatcttttataacaagtaaggcattgttgcttaaaggaagacaaacaaacttaaaagattccgttgacaatgcattttttcatttgttcggcacaatgcttttggcataattggagatgtgacagcaaactttccaggacattcagtcttcggcggcagcacttagggcagatgactggccgctcaaattctctatcttgtttcaggacagtggaaaagcttatagatgaggccaaagcaccaggtaggtggaaggttcttgtatcggttcgaaccccgacagcgcgccaacagacaacacgaggcagtggggagcaacatgctgttttaatgagcgcctgggtacaggcgtgctgaggctgaaaatggcattagcccccgggtacctgcccgg

SEQ ID NO: 10664 - DNA, 425 bp, Homo sapiens
aggtacgcgggggcccctttctgtgaccgagttcacactcagaacacacgtgttgaaatcgggaaaaaaacggagacctgttgtatcttgcaaggaaaacgttccttacaggtatatttacagaggactgtgtcgcactcaggcagaaatgacctcaacaagacagcctcgtggaaggaagaacacttacctacttaactcccctccccgccccggactgcctagtctagcctagccgtctataacaaccccagtggactgacattccatcttggaatttatggaggtgacaaaagtgacatttgagatggaccaaacccagccctttcaagaagagctctgtatgttttatcttgacatgtgttgatgaataatgacctgcacacacattctgaatgcaggaagggaagtcctgctctccgtcc

SEQ ID NO: 10665 - DNA, 490 bp, Homo sapiens
aaaccagcttttaagtgagctcagcatattataaaggaatgaaagcaattagagcgtggactctaaaggtaggtgagacttgctgttccacttagaaacatagaaacataggaaactaaggactcgatggggacatcaatagtaggatggcttttaagagggcttaaggtggtgtaaatattccccataaagcttttgcgggaaactcctggcgccaaatcggaagtttgttgcatgaccttgcgaatttttaggttttggtacaagggatagacttgtagcttatttttttttaaaataaaaactggattacatgtacgacatgtctgttaggattcctcttcatggattgaattttaagcaacgatctctgtgcttactttttcacgagaagcacaacagtttctaaagttgaggggtttaaatgggggtacacttgcggcacgccttctaagaaacctaagttgggatcccccccgcggtgcttgct

SEQ ID NO: 10666 - DNA, 790 bp, Homo sapiens
  misc_feature 10: n = A,T,C or G
aggtactttntttttttttttttttttttttggggggggttgggaattattacaatacacatcatagacaaatgaaaatagttaattattttactttgtatgagagagaagatttatcccatataagattcatttcaagatgtgtcccaacataggttgtttgaagactttaagatttacaaaaatatttttgcgtgtctacagcaaagatggcgaaggactaagctataataagtgataatggagggccccttagtagaaaagacttgcactcaattctcaacaaatttaatttatcaagttcttaggctatgaaccatatttcccctaccactaaagtgagaaaaactatgttaactagtagggttaaccacattaaattaatcaacctgtgtaaagtgactctcatataatagtgtctatgatgtggtccactaaattttctgtaaaatttttcagttctttaagtcaccgtatcagtgatgccttactaccatagaacataaataatgttggctctttttgcgtaagtaatctatgaggtgtctattcaggtaatacagaaaggcttcttgtatctaaatattctatgcactgctacatgctatacagcattgccattatttcttctttaaaataatatattgaaaggtcctgtaaaaataagtatgcattatgtagcataaaccaaacataaattcaggataaaataatggggtaatttagttgaaacagagaacagaggtaataattccttacctttattaaaaattcaaaccacattaggttg

SEQ ID NO: 10667 - DNA, 410 bp, Homo sapiens
aggtacctctttttctatgctgaaaagttatgtaaaaaatccctaagctttgttggatagtctgtcatcaccccagttgctcccaaatcaaaagctcttttgtattcttgttcttcatttaatacccaaatatacacttgaatgcctcgagcagttaggtggtcaaacaaagctttcctcattagtaagagatcagaaagccagatgagaaacttttgacttctggacatggtgtgtggttcttttagcttcagtataatagaaggcattgggatttcaaaaaactgttctcgaatgggcacaaagggcaagaggccagtgaagaaaaggccaagaatgagcaggacacgttgtaaactgaagagtataggaatatctgaattcttttcgtagcacttttctacaatttg

SEQ ID NO: 10668 - DNA, 318 bp, Homo sapiens
aggtacacgccgccacgccgggctaattttttgtatttttagtagaaatggggtttcaccgtgttgtcaatgctggtctcgaactcctgagctcaggcaatccgcccgcctcggcctcccaaagtgctgggattacaggcgtgagctaccgcacccggcctgcatatattttttaaacatttattttagcgttaccaaattgtcttgaagcattcatttaaaaacacaaaaactcactgcagctgtctgaacacttttctacttcaccaaagagtgccgaacaagttaaaatgaatctgtttttaaacacttctccta

SEQ ID NO: 10669 - DNA, 768 bp, Homo sapiens
  misc_feature 182: n = A,T,C or G
ccgggcaggtactgggagagtgaacgaccacattaagaactgggcaatgaccagcctgggcaacatggtgagaccctatctttacaaaaacaacagtaaaaaaaaatgagccaggtatgggggcacaaacttgtatttctagctactctggaggctgaagcaggagaattgcttcaactcangaggtggaagttgtagtgagccaagatcatgccactgcactccagtctgggcgacagagtgggaccctgtctcaatgaaataaaataagataaacatgagaacaatagaaaactgaaggacaacaaaaggaggtaaggagataagggggtagaggctgaaaaacttcctactgaggactatgttccactgaggactactgaggactatgttcaatactagtattgacaatatcaatagaagccttagcatcacacaatagacccttgtaacctacacatgtactcaagatatacttgatatatgtagttattggaagaagggctttaacacatgcttctcaagtgaaagaatggaaaagacagacaaaaggaaagaaggaaggaaaggatggaaggacatatttagaatagcagggtcatgtctttataacaatctacttgagaattgtaacttggaaaaaggaagaaggaaggagtttggcagtcaccaaaggaaaagtccttcggcgtttaaactagtggacccccggctgcagaattcatttcaagctatcataccgcaactgaggggggccggtcccagttt

SEQ ID NO: 10670 - DNA, 253 bp, Homo sapiens
ggtctggaccatctctactatagggcaattgagctccccgcggtggcggccgaggtacagggttggcgctctgttacccgattgctttccagctgtgtctggttcccattcatgctgcctccagcaacggataagtatacggcagcacctccttatttgagtgcaaatgtctggttgtaatagaggtagatgattcttggtgtggtgccgtggtcattgtcgttttgtgtcatggtaacatgtcatccgacgt

SEQ ID NO: 10671 - DNA, 353 bp, Homo sapiens
ccgggcaggtacttttttttttttttttttttttttggagatgggagtctcactatgttgcctaggctagtctcgaattccccagctcaagcgatcctcctgcctcagcctcctgagcagctgggactacaggcacgccccaccatgcccagcccttaaactattttggattaggtttctattacttgcagccaaaagttctgaattaacaaagggcctcaccctggctcttccttggtatatattactatggggatgggatgaccgaggtcccatagaaatctcaactgatccattcttcccatctatttttccaggtctcatgaaaagttgccattttccctcctcaattt

SEQ ID NO: 10672 - DNA, 201 bp, Homo sapiens; identical to SEQ ID NO: 1478

SEQ ID NO: 10673 - DNA, 467 bp, Homo sapiens
  misc_feature 193: n = A,T,C or G
aggtacccacagcattggctgttcttcataggagactcagagaagacttcataggagactcattattgtttactggacatcaggtgctatattgtatagcattcacattccacaggtgaggaaacaggctcagaggaataagtggcatgccaagatcattgagtatatcagtagcagaataggattcagactntgttaggcctaactccaaagccctggcttttttttttgagatggaatcttactctgtcaccgggctggagtgcagtggcatgatctcagctcactgcaatctctgcctcctgggttcaagtgattcccctgccttagcctcctgagtagctgggactacaggcatgcaccaccacgcccagctaatttttgtatttttagtagaagggaggtttcaccgggttggccaggatggtctcaatctcttgaccttgtgatctgcctgcctcggcctc

SEQ ID NO: 10674 - DNA, 448 bp, Homo sapiens
ccgggcaggtacccaaattaactaaccttaaatgcaagacttagcagcaggtatcatccatgttgaaccacagagttgtggttataggatgatctatccaggttgaaaaagaattctggccagcagtttgaagaagtgaaaatcaagattaggcacagaggcagagggtggtggggccacagggcggggaaggattccaatccatgagactgcagaaggggaagtgagcagcctctacccatacagactagggtctcatggatgccactggagagcattccagtctcactggatattggtagttcactaacttgtgtcagtcatgattgtgacctctgatatattgctatatttggttttcatttatacaaaagctgcgtctctccttgatcccagtgttttgttggtcttttgtgcatccaggaaagtaaggcttgaggaaaagaag

SEQ ID NO: 10675 - DNA, 450 bp, Homo sapiens
tgccgtcgactctattctgtaaggcgaatgagcttaccgcggaggcggccgcccgggcaggtactgtgttctcaccgtcgcggaggtttgtggatattggataaagcttcactttgatgggtattctgattgctatgacttctgggtgaatgcagacgctctggatatccacccagttgggtggtgtgagaaaaccggccacaaacttcaatcctccaaaagggtataaagaagaagaattcaattggcagacctatcttaagacatgtaaagctcaagctgctcctaagtcattatttgaaaatcagaatataacaggtgcatcccagtcgcggcttttcgaggttggtaatgaagtctttgaggcagttacgacaaaaaaggaattcccttcattcattctgtggttgctaacgggtaaccagatattggtgcgacaaatcgtttttc

SEQ ID NO: 10676 - DNA, 405 bp, Homo sapiens
  misc_feature 61: n = A,T,C or G
tactgtggggcgcagctgtgtttaaaggaattggtccaactccgcgggggagaaggcgggntttgcggttatgggcggcgtctttccgctgtcctctgtttaatgaacttcgctatcgcctcggacagtatcgggttgtgggcggggcgggtttcaaagattactccaaaagagggtgaattacgggtaatatcacaaaaatcagggggagtaaccgcagggaaagaaacactgtggagcctaaataggccacttaaaaggcccatgaacacggtataaaaggggcccgtttgcttgggcggtttttcataaggagtcgcgcgctctctgtcggggaattataaaagaaatgtcgtcgtatatctaagtgtgtgcgaaaaccgaacaggcctcttaataatccct

SEQ ID NO: 10677 - DNA, 370 bp, Homo sapiens
aggtacccattaaccccacttaaacttttctttctgaaagagacaaacttgctaaattatcatgagagaaccaaagaattctaatgaatcattttatttaaaaaataactacagttatcctttaccaaactaaaattccaggtctgcaacaacttcgatttggcacagagttgctgcaaagcttaatgtgtatatttacacacttcagccctcttaaaagccatcctactattgatgtccccatcgagtccttagtttcctatgtttctatgtttctaagtggaacagcaagtctcacctacctttagagtccacgctctaattgctttcattcctttataatatgctgagctcacttaaaagctggttt

SEQ ID NO: 10678 - DNA, 360 bp, Homo sapiens
ccgggcaggtactttttttttttttttttttttttttttggagtagaatattgattgtcctatatcccattttcttgaagagattctggcttctaatatatgttcctaaaaaaaaatttatcgtctagtagtgatgtcttcatgtttcacccagctgtctcataggcatgactaagcatctatttcatcacctggctctggatgcctcctctctttaccatttgggaaaggcatttgctgattccttttgatatacctgaagtattgatgctagagaaatcacttccaatataaacagcatcgtttgcagatcttcacttctgtgctgcctcaaaattatggtcagtgagcgaaaggaaa

SEQ ID NO: 10679 - DNA, 545 bp, Homo sapiens
ccgggcaggtactaaactaagccgtcaactaccagcaagcagaatgaaaaacagggacagatcagcatccaattagtatgtctaagtttttaaacaggaaaagggttgaggggaatcagtaaaactggaaactcatacttcacaattttgcaaatcttactgattaaaaggacggaaattgtgtgctttatcaaatcttgctgtgaagtgcacagtttcattttgtgaggtcctgtataacaattcgtcctgggctggcccacttttcaaaatgcaatgttgaaaaatcttgggagaattcaaaagcaatcattatttcaggcaatgcaaagggtcatttacttaagtgattgcccctttaaacaaaggtttccaaaaaagcctcaataggagtatactttcaaaccttcaattaacctttcaacaattatgggtgtaaccctcagggcccgcttcttaggaaactaggtgggattcccccccggtgcctggcaaggaaatttccgaatattcaaaggcttttattcgtataacccgttcgaacc

SEQ ID NO: 10680 - DNA, 633 bp, Homo sapiens
  misc_feature 523, 539, 583, 603: n = A,T,C or G
ccgggcaggtacacgtataagccaccacacccagcccttaacatgctttcgtagctttccattacccttagaatcaagactctattgaggcaaatgcaccatgacttgcctcaagcccagcactttcctattcttgccaggcctccagcttttcctgagccctcgcctctccctcacctccctccagctacataagccttctttcagttcctcatctttcccttttagtgatcttatggaatcaaatatttatttgcttattttttcaatgtctgtctctactagctaaaggcagtggaaagtttgttccacacagcttacctagcatttgacagagcctctggtatgtcgcaggcacttaaataaaataaatataactgatgaaaaagctccttttccccaagtcctctctcttcatctaaaatggacccttggcggctgagaggctggagcacgcagagcaggctggttagactgtccctggaggcttgctcttgccactcagcagctataggaagttctncagggcccatcacctncctatcgcctcatctgaaaaggggcaatattaaccaatatcttncttaccacgctacccaccgnacaagtttaataagaagaaggtaagtacct

SEQ ID NO: 10681 - DNA, 424 bp, Homo sapiens
aggtacttttttttttaattttaattttagtagcctgtctttattgaatcctagttgtctttccttaatgcctcttcacatttgaaccactgtcaaccttctcagacataaattttagccactccccttcccccacaaaagaatctaagaaaagatacacttgctgtctgtttttgttagtttacatattcagttgactacagcttaccgtttttcaacttctgagaaattagttcttaattttggaaaatgtagtaattcagttaatacatctctaactttttttttatggaaattttctgacataccaaaagcagaataaggccaggggcggtggctcacacctgtaatctcagcactttaggaggccaggcgaatcacgtgaggccaggagttagagaccagcctggccaacatggtaaaa

SEQ ID NO: 10682 - DNA, 462 bp, Homo sapiens
ttaaacatgtgtcactgggcaggcggtgcctctaatactggtgatgctagaggtgatgtttttggtaaacaggcggggtaagatttgccgagttccttttactttttttaacctttccttatgaggcatgcctgtgtttgggttgacaggtgaggggtaaattaatgaacttggttgggttgaattggtagaatatttggggcctgtttaattgtcagtttcagggtttttaaatctgaccgcaaggctttattgcgggaggaggaattgtttttcatgtttactttataacctaacaatttagtttcctttctattaggggtgaataggaattgggttcccaattggtgtttgtgaagggaggttttcaaattttttttggttttgggggatttttttttagggttaagtggggttttgtttgttagccttttgatacccccttttgttcctaaaaccggt

SEQ ID NO: 10683 - DNA, 455 bp, Homo sapiens
ccgggcaggtacgcggggagctgacctgtggttcatttattcccagttaggtgaagaggcactctcaggggaaagaaaatacagtggtctagtccaatgctgctgtagcctgataactggacttcaagttttcattcaggatgctcttattgaccaaaaactaattgtcaagtccacaatctcaacaaggggactgttttggagaagtcttacttgaagggatctattaagatgggagttcttggcttgtgctgacccaggttttgggagattttacttttataattatactcctaacacctatttatttattacttttcttctcaattcttcttagttaatcaacttattattaatttctatatttatatttaatgttatatactcttaatttattagctttttaaatatttcggcttatattttcttcttttattcacttctttattaaagag

SEQ ID NO: 10684 - DNA, 404 bp, Homo sapiens
agatgctgaccggcggcgtgggcatcggcttctgggtgtgggacgagtggaacaacctgaacgtagcgaacatcatcatcgccatcgtcgtcatcggcgtggtggggctgctgctcgaacaggcgctggtggcgctggcgcgggcgctgacgcacgaacaagtggctaactgattaaggagcgcgatcatggaagaccttcaaaccaggttcatcgacatcaccggcgtggagatggcgtttcatacgaagaagggcgtgttccaggcactgcagggggtcgacctggcggtgcgcaagggggagttcattacgctgatcgggcactcggggtgcggcaagtcgaccttgctgaacctgattgctggcttgttgaaaccgacggcgggcgtgctgttgtgtgcc

SEQ ID NO: 10685 - DNA, 417 bp, Homo sapiens
aggtaccagtggccagaggacctgctcaaacctgaccttattctgctgctcactgtgagtactgaggagaggttgcagaggctgcagggccggggcatggagaagaccaggaaagaagcagaacttgaggccaacagtgtgtttcgtcaaaaggtagaaatgtcctaccagcggatggagaatcctggctgccatgtggttgatgccagcccctccagagaaaaggtcctgcagacggtattaagcctaatccagaatagttctagtgaaccgtagttactctggccaggtgccacgtctaactagattagatgttgtgtgaaacatctacatgcaccattggttatgcggtgttcccaaatttctgttctacaagcatgttgtgtggcagaaaactggaaaccaggcatcttaatt

SEQ ID NO: 10686 - DNA, 766 bp, Homo sapiens
ccggcaggtacgcgggtatttcctactggattttgctttcactggtgtttagaaaataaacttgatttctctaggagcactcctttggttagagggatgcaagaaggagaggtgaaggtggcgtgtggtggctcatgcctgtatccacactttggggaggccgaggcaggcggatcacttgaggccagcagtttgagaccagcctggccaacatgatgaaaccccatctctactaaaaatacaaaaaattagctgggcatggtggcaggcacctgtaatcccagttacttgggaggctgaggcaggagaattgcttgaacccaggaggtggaggttgcagtgagctgagattgtgccactgcacttcagcctgggcgacagagtgactctgtcaaaaaggaaaggcaaaaaccggaccctggagctctgtgggccctgattgcaggcccctccctgtgtgatgagggatgagtcagcttggggagccacttggccagcctgcatgcctggtcatcaggaggttgagaaaagccttgaaagttgtgaagcactgagcagatacaagtgtttgttaattttgtagaaataactttcccatttggccttatcttcaagttggtattggtgcttcacgcaaactgaagtccgtttcttattgtgactttgacaatgcaaaggcaaaataggaagaggccctcccaccccactattccacccctggtgacccatttaatggtaaccattgcacgtacctcgggcggtctta

SEQ ID NO: 10687 - DNA, 249 bp, Homo sapiens
attggcgtttgcgcctcacctggcccggcttttccaggtccgggaaaaccttgttcgtggccagtcttgcaatttaatggaaatcgggccaaccgccgcgtggtgagtagtgcgggttttggcgtaatttgggggcggcttcttcccgcctttccttcggcttcacctgaacctcggcttgccgtcttcgtgttcgtttcgggcttgcgggcggaggcgtgtattcagtcttttacttcaaaaggccgg

SEQ ID NO: 10688 - DNA, 524 bp, Homo sapiens
cgaacgtgaccgctattagtatatcggcgaatgagttcaccgggggcggcgccggcaggtgcgcggcaggtaggttttagactcctatgctttaattttatgtaatttccttgtctcttaaataaccataataaaacaacagttttgatataggacagtaaagagccctttgatatactactggttttgaatgtgtatagagacctcatatatactcttcagccattaagaaattgtagtaatattttgctcccaaattgtggagtctgtaaattttctcaataacatcatctttatgaaaatccacagaggccagggatggagtaggaacagaactaagtttcaaaggcaaatggtgatctgggcttgaggaagtaacagtgaggtcagagggaagaagggaaggagagagggatggccagcagacccaagtgcagagttcagaggggtagggaacaaagggagacatggggaaagactggatgtggccacagcagcagtgtactgcaggccgagtcgcacca

SEQ ID NO: 10689 - DNA, 855 bp, Homo sapiens
acgcaccaggtacatcagacaaggaagtcccacggcactgagagctgaattgtgggctctcattatgaatatttacagccaacctgaggatgtcttgtattatgagcagctcaagaccaatgtgatctacatgacctttggggacagtctaatctataaagatgtgaagttgacagcaagcaatgatgattattattttgtatttgaagattatttatatcaggtattactttggttttcccgggatacatctgtgttgagtcactttgcattcaacaagtgcctcgccaccaaaatcatacataagatgaaaactaagactggaagaatatgctgtcttttacccaccaaatggtgttatcccttttcatggattttcaatgtatgttgcacccacttgatttttataccatgaaccttccaaattggattagatatttcgggagaagtatgtacattttttttttaaactacaattaaatatttctgaatattcagggaatagatcactattgtatctttgttgaaatattttttaaatctaaaatgaccaacttctttttataggaataaaaataagggttatttgctttagatatgggatatatcattagtaaaaattttcgtggaaatttactcaacaaattgctcttgattattaaggtattaaaatttacttatacttaagttgaaaattatattggcttgtaatctgtgcaatcacttatcttgtctgtaactgacgcaaagaaattaattttatttatgctactaaatttattaaatctaagggaaatagtattttataaataattgcatatacattatattatagactaaatggctttaagtcag

SEQ ID NO: 10690 - DNA, 352 bp, Homo sapiens
ccgggcaggtacgcggggggagactgaggcaggagaatcacttgaacccgggaggcggaggttgcagtaagtggagatcgcgccactgcactccagcctgggcgacacagtgggagtctgtctcaaaaaaaagaaaaaaaaaagctactgagaaggagccaccattttgctttaaaatagtgggtttttttcctttttaatgaacactggagctgaggatgcagattacatgagttatttaataagttgattcaagagagagagggtatattagaaatggtaagatgatttggtgggcaaaaatgctttctataatttgaatatgggtttaatttaattattaactatagac

SEQ ID NO: 10691 - DNA, 402 bp, Homo sapiens
ccgggcaggtacgcggggggtattaaaatgttctttcagttagggccaaagggcatttaacttcaaggtaagacccattccaggacggcagagatcatgtctgtcttgcgtatccctgtgtgaattttgcctgacatgttgcaaacactccgtatggaagtcttgaaggtcctcctgccccagtcagagaacctctgggagaacagttatccccagacctcagacgctcgacggatacatgagaagctttctttgatggattcgatgtcaggatctccatgtgaacttccacttagaggtgtcatgctatggctctctctgttgaaaactgaaaacctgtgtggtggatggcaccagtcctgttgaatggtgcaaacgtcccctgcacaaaagcactattat

SEQ ID NO: 10692 - DNA, 471 bp, Homo sapiens
aggtacgacaatggaaagtttttaaacaagcaaatgtcactatcaaattcctgttttagaaagataattctgagaaggcacatcctgagacagcctggggccaagatgctgtggcgtaaacagatcgctgagcgatgataaggtcctgaatccaaagggcaatttgttgaaaacaaaatttaaaagggacacatttaagaaagcttttccccaaagtagaaatgcctggggtgaccatatttagaattaaagtacgatgtaagggaaacaagaagaaaacataagatgatttccacaagttttgatttctttggaccaggaggtgttagatggacaaaagtcattaaacttgaagaaaggttgaatgattaggaaaaaaaaagaagctatgttttggtccagaaaaattgtgacaaccctctttagtttttggaaccctgcttgaaatacttgaaggtaatagtttgggag

SEQ ID NO: 10693 - DNA, 427 bp, Homo sapiens
ccgggcaggtacccactccctgctataaacccaaagagaaacttccagtcgaggccaagttgccatgggttcaaacaagctcaagagctagaagaaggagctgctgtgtcagaggagccctcgttcatcccagaggcctggttcggcctggcacaggtcacctgtgggtgtgggggaccccaggggggcgaaataggtcaaggtggccagggtggctcctgtctttctctcagtccgtggctgacctgcctattgacgagtgtgaaggggcccaagcccagcatcccagcgtgccctgtttattgcagggcccatgccagcggggggaaattccctgagttcaaacccaggaacgagaccagatggggctcttttgggtgggccctgcaggaatttccgacgaagcctgtaattgactgggggagtt

SEQ ID NO: 10694 - DNA, 327 bp, Homo sapiens
taataccttaacggtattataattaatattgtatcatttatacgatcattaatttgatctttaatgtaattataattatttgtgtgtctggaaatttaattttataatttatttttacgttgcgtatctctagatatggtttatggaataatatatatttaatacgtgtggcttcacgagtacctgactgattctaaccaaccttttttttgggcttctatttcgaccgcgatgatgtggctctggaaggcgtgagccacttcttccgcgaactggccgaggagaagcgcgagggctacgagcgtctcctgaagatgcaaaaccagc

SEQ ID NO: 10695 - DNA, 468 bp, Homo sapiens
ccgggcaggtacataattgttcaaagcagttttatttacaacaaaaatccgtatacaacaaaaagcttcaaccaacaatggtgaatggttaaaaaatattatggtgcatacatccatgaaatcctagttagctgtaaaaaaggaatgaaatattgacatacacaataatctggatggatctcaagagtgttgtgctaagtaaaaagtgtctccaaaggtcatgaatggtttatttcatttacacagaatttcagaaatgacaaatttattgaaatggagaactaatttatggttgccctgggtgaggacaccactggactggaagcagagggatggctgagcccacgaggttagtgtgagggagatcctcacagtagtgcaacagttctgcactttgactgcgttgatggtgataggaacccatatttaagatgaaataacacagccccatgtgcacacactgtacct

SEQ ID NO: 10696 - DNA, 399 bp, Homo sapiens
aggtacaggccctcatgttctctggacacagtatggatggtgaatgttctcgtggtgtgagacagaatggagtcaaggagaaaccaagtataggcacagggtgggtgagactttgtttccgctaagaaggtcatgctggagccctccatcaccttaaccaccttcccaactggcaacaccagactccaatttgatttcaacaggatcaggaccatacttcacatccaggaagatggggtcgctcctctggctcagaagggcatctcgagcttcacattggtaagtccctgagtcctcccgctggacaatgagaatggtgaggatcttgccatccttggacagctgcatgcgctcatggaacacaatggagaggttgttggaaacccagtggatggtaat

SEQ ID NO: 10697 - DNA, 339 bp, Homo sapiens
ccgggcaggtacgcgggggcgcgacgttcggttcgctgtgtgtgtcgccggctccttgagggtccatgtgatttttacgccagtgctgctgaactgtgcagggtagggagctggcacagtccgattaattgtccttgggtcgaggtgtctcgtcggaccctttggggcgtacatgaaaaattaaggcagaggtcactgaaattatttctaataccaattccaaaatagtgactcttggacaatagtgcaattatatggaattatggctggttataagcctgtagctattcagacatatcctatacttggtgaaaaaatcacccaagatacactgtacct

SEQ ID NO: 10698 - DNA, 625 bp, Homo sapiens
ccgggcaggtacaaaagaaatgagtatcctagaaattgattataatattgatgtctcaaattttatgtaagttacacataaatataaaatcccaaaaacatgcacctaccaaaacaggtggagaaaagagtgttttcaacaaatgatgctggaacaactgcacatccatatgcaataaaaggaagctggacacagactttaccctcttttaaaaaaaactgacccaaaaatggaacacagacctaaatgtaaaatgcaaaactatgaaactcctagaagataacacaggagagaatctaagggaccttgagtttggcaatgactttttagatacaacaccaaagacacaatccatgaaagaaataagaagtaacctggacctcacctattagaatggccaaaacccagagcactaacaccagcatatgctgaggaggatgtggagcaacaggagctcccattcactgcaggtgggaatgcaaaatggcacaggcacttcagaaagacagcctggcggtttcttacaaaagctaaacatactcttaccatatgatcaagcaattgcaacctttgttgatttaccaaaaggagttgaaaacttacgttcacactaaaacctgtacct

SEQ ID NO: 10699 - DNA, 344 bp, Homo sapiens
ctcctttcacggtaaagtgagaactgtggtctgggtgtgctcagcgggcacaggcctgtggttttgctccccagtgccctgcctctcacagacctgcttgcttagacatccccccaccccaggaggctgaggctgattccaggtgaccctttgggatgcttggaagcgctcgcggtgatttaaacagaattaaccagcagaaacaatcctttgcggaggtgcaaaagggcagcgaggaaaaggctagagcacacctcagattggacccagatgactaggacctgccagccgcagcagagggattgggatacaacagagacctaagaagcatcagtacctgcccg

SEQ ID NO: 10700 - DNA, 275 bp, Homo sapiens
aggtactttcgtgctgccgccggggagtgacaaagagcatgcgggtggggcgggcactactggcatctgggtgggcactccaaggcttggcatagctatgatccagaaaaaccaggtccagctcccgttcatgcactgaaagctggaagagcagcgaggtgcccatgccttgagctgaagtctggaagtccctctccccaccccggtgggccatgtcagtggaggggcagaaagtcagagcatgggtatctgcatgctagtcacccgcggtctta

SEQ ID NO: 10701 - DNA, 440 bp, Homo sapiens
aggtacttccatcccctcatctgtggtagtagtgaaggctaggtgagtaagcgtgggctgttctacccaccagaagtccaggagctgttgtatacctcatttctaactcgtgaccgagtgacttgctttaactttctcgaaatcctacagagttgccaaagtctgcccctcccttctcagtcattgttaaactctggcctatagcatcatgggacctgtagcctagggtgggaccccctaaagcctctgaatgtcgctgcttaaaagctactgcaaactgagggcaaattgcaatcttctattcctttttgttgcaaggggtcttcacaggtcttttaacatctgctttccctgccaccctgcctttagggggctggccagctatccacacccctaacccaccctgtgtttttgaacagctggccacaccttaacttctg

SEQ ID NO: 10702 - DNA, 668 bp, Homo sapiens
ccggcaggtacgcgggcgcacgcacatacacaggatttacacattcagagtagaaaatctcaacgttaagcagtgaccatttcttggtaatcacatctatgtttatttcagcaaagcaataaaaaaaatttgatgtttttgtacaagcatttcaaaatcaatcaatttgaccaggagaaaaaccattctgaccaaacaaggattctgagtctttaatttgatggtagctctgtcatgtgtgttagataattaatgttaacaacacaggtttctaggctatcaagtcttttggaacgctgaagtgatccactttttattctgttaccctccctccctctatgctgcctgtatgattttgaaatccagtcctttcttcggagcatctggcataaatctccatcagacatgaagaagaaggggcgaattctatggtctgcatgggaacagcctgacagctgcctgtttaatcccttgacaatgcaaaaatttcttcaaggagggaatctcacttaacatgcaaacagagaggcccaacacatttggtcccgttccatattagtgatattaattagaatggtataaaactgcattttttttttctggaaaagcagttcaaatgatagaaaatgaattttcttatgtcggcttttagatttacatagtacctt

SEQ ID NO: 10703 - DNA, 201 bp, Homo sapiens; identical to SEQ ID NO: 1534

SEQ ID NO: 10704 - DNA, 184 bp, Homo sapiens
actgcctagacgactactatcgggtgaattggggctaatcggagctcgcacggcggtggcggccgtctcctcagaggacggaaagacgatgccggcctcacgcttcaccgccacggccgccgcctagagtagcactcgtcgacccgaacagtcaccgtctctcattcccccgcgtacctgcccg

SEQ ID NO: 10705 - DNA, 515 bp, Homo sapiens
ccgggcaggtacgtatcaattcatggctaaggtgaacagctcggaagtatgttaagctgcagaaaacaaccagcttcaatattagaatatagcactgacaatctacttagacacataagcattaatagttgcctatcactgttgatggaatgttaggcttactcttaatttttctacatatagaagacaatgtggacactttattaaaaccatcttacagataagtttccctggtctgcctgttggttgtttctcatgcttatatagctatatttcattaaaaatcaaaaatcaataacaaaggcctatgtgccagctgtagggaatgagtgagtggctaggggtgtgaggatagctcagagactatttcaaacaacaggaaaccttcaacttccctggtgctctttaaataatagaaaagttaataggaaaaaatccagtggcgcaagatttgtagaataattttgacatttcccgaaccagccatctgcagaagtgaatttggatgtgaccct

SEQ ID NO: 10706 - DNA, 703 bp, Homo sapiens
aggtacttgactcttccccttaagtttgattccatttcctaacattatccttgcctcttgcttctcagcaactagtcttctaaattagaacttacacacaatgaccagatatgaccctgcaacagagcatgcccttctgcattgagcatgcaatcatgtatcacaggtataagaccccttgaacagacatggttttggtgattctgtgtaggacttattgcttttacccaagaagatgatcaggcatcctaagtagatcaaaaagttttctggagctcttgaatgtgtataggcaagaaagattcagcaacctgttgccttatatgaggcaaactatcttctcatattttcttttgaattcaggatttcaaggttggggaaggaaggtcgggcgcggtggctcacgcctgtaatcccagcactttgggaagcccaggcgggcggatcacgaggtcaagagatcgagaccattccggctaaaacggtgaaaccccgtctgtactaaaaatacaaaacattaagcccggcgtaatggccggcgcctgtacttccagcttctcgggaggcttacgcaagataatggcctgaaccctggaggcggggcttgcaatgagaccagatcccggcactgcactttaacctgggccaaagaagtaagactccgtttaaaaaacaaaaaaaaagtcccttgctgggccggcgg

SEQ ID NO: 10707 - DNA, 275 bp, Homo sapiens
aggtactttcgtgctgccgccggggagtgacaaagagcatgcgggtggggcgggcactactggcatctgggtgggcactccaaggcttggcatagctatgatccagaaaaaccaggtccagctcccgttcatgcactgaaagctggaagagcagcgaggtgcccatgcgtcgagctgaagtctggaagtccctctccccaccccggtgggccatgtcagtggaggggcagaaagtcagagcatgggtatctgcatgctagtcacccgcggtctta

SEQ ID NO: 10708 - DNA, 30 bp, Homo sapiens
ccccgccagtgttctggggctgacagagat

SEQ ID NO: 10709 - DNA, 346 bp, Homo sapiens
ccgggcaggtacgctggcatttattctgactgtttcaagtcagagcaaatactcctggaatgaccctctcctgtttcctgagtttgagccgatcctatttggcactgcagacagtgagaagtggatgtttgaggacagatgggaggtgcaaagtggagacaagtattggttctttcttccactatgagactagcagggcccagttctcttagctattgtctctattttgtagattaggaaatttcaagtttagagaagttgagttaactcaccgaaggtctcggggcttggtgggaagagggacggaaaattaaattcaggtctgtgtgtctccaccaccatgttc

SEQ ID NO: 10710 - DNA, 608 bp, Homo sapiens
ccgggcaggtacgcgggagagctacaggttagatattaacagaatcttactctagagtaaaatcactagtaaaaaaaaaaagaaagaaagaaagaaagaaaaagaaaatgccaaagcatttaaataatcctatcacgtaaactgacaacaaaaaatggtatctggattcatgtagcagcatttaaaattcagttgtggccaggtgtgtggctcacccctgtaatctgaatgctttggcaggttgaggcaggaggattgcttgagcccaggagttcaagaccagcctgggcaacatagtgagaccctgtctctatttttaaaaaataaaggccaggtgcggtggctgacgcctgtaatcccagcacattgggaagccaaggtgggcagatcacgaggccaggagttcgagatcagcctgaccaacatggtgaaaccctgtctctactaaaaacacaaaaattagctgggtgtggtggcacgtgccagctactcaggaggccgaggcaggagaatcgcttgaaccggggaagcagaggttgcaatgagctgagatcgcgccactgcactccagcctgggtgacagagtgagactgcgtctcaagacatag

SEQ ID NO: 10711 - DNA, 438 bp, Homo sapiens
ccgggcaggtacccaaattaactaaccttaaatgcaagacttagcagcaggtattatccatgttgaaccacagagttgtggttataggatgatctatccaggttgaaaaagaattctggccagcagtttgaagaagtgaaaatcaagattaggcacaaaagcagagggtggtggggccacagggcggggaaggattccaatccatgagactgcagaaggggaagtgagcagcctctacccatacagactagggtctcatggatgccactggagagcattccagtctcactggatattggtagttcactaacttgtgtcagtcatgattgtgacctctgatatattgctatatttggttttcatttatacaaaagctgcgtctctccttgatcccagtgttttgttggtcttttgtgcatccaggaaagtaaggcttga

SEQ ID NO: 10712 - DNA, 533 bp, Homo sapiens
  misc_feature 363, 364: n = A,T,C or G
aggtacttttattctttaagaatatagtctttagccaggtgcagtggtgtgtgcctgtggtctcagctatttgagaggctgaggtgagaggatcacttgagttcaggagttcaagaccagcctgggcaacatagcaggtccctggctcaaaaaaaaaaaggttcccattcaaatttaacttcattttttttaaaaatgtcattgatttaccaaagtgaaatagaatttggccttttcttaggaggcttaaatctacaggagggtgaaaagttgacccttgggaaaattcattattacttctaatccccctatggtttacgacaagattttagaaaaaacctggagtgtttattggacacctgnnactttagttcgacccctccaggctaagggcaaaacccaggggaacttacaaacttgtgcaaattccccaaacttccctgggggcttaggggcatttttttctaaccttttttttttgcatttgggtccttctttaaagaagggcaaattgaaattacctaaatttccct

SEQ ID NO: 10713 - DNA, 346 bp, Homo sapiens
aggtactagataaaggaaagagcaaaacaaagtgcaggatcgagagaaaatcgattgcttgaaaaactgggtattttacttgctgcaagtcccgactgtgtcagccgatgagtttaacactatgacagcacagtcctcacctgcctgctcgctgctgtaatccccacactgttgtgtgccctatagcacctggcacacgggaagcgctcaagagatgtgtgtgaatgaaggagccacatcttgacttgcgacgcggagcagtaagctgcagttatttggtagcggtggaagaataaattctacctcctgcttgcctcgctgcagtggggatgagggagaggggact

SEQ ID NO: 10714 - DNA, 557 bp, Homo sapiens
aggtaccgataccccacatgcaggcttcaatcctaacttttgagatgatacttgccacaaagtaaaatgggttgccttgcagttgtcccttcttcatgctgggacaagataagtcttgatcagggataggggtggtttcggggaaaaatttaacttgtaattttgcatttcattaaagccaggccttaaatgttaaacttgaagggccttaattatgttgggaacccccaggaattaaaaaggccagtaaaaagggtgtgcaggcccctgtttccaaaggccccaaacaggaaaggaccaaaaatgtcccttaaagccctaatcccaagttagggcatttacaaaaaaggaaaacctggggttgcttcctattaacggtttggcatcattacctggttggaatggcaacctcccctttcaaaccattaaattatcggtatggcttaattttagatcatcatagcttaagggcctgcccagtttataaaaaaaaaagggaccaaccccagcaaattgggcttttttcgcacccggaattggcccacattaaaactttc

SEQ ID NO: 10715 - DNA, 807 bp, Homo sapiens
  misc_feature 685, 780: n = A,T,C or G
aggtacttttttttttaattttaattttagtagcctgtctttattgaatcctagttgtctttccttaatgcctcttcacatttgaaccactgtcaaccttctcagacataaattttagccactccccttccccacaaaagaatctaagaaaagatacacttgctgtctgtttttgttagtttacatattcagttgactacagcttaccgtttttcaacttctgagaaattagttcttaattttggaaaatgtagtaattcagttaatacatctctaactttttttttatggaaattttctgacataccaaaagcagaataaggccaggggcggtggctcacacctgtaatctcagcactttaggaggccaggcgaatcacgtgaggccaggagttagagaccagcctggccaacatggtaaaaccggtctctacttaaaatacaaaattagagagcatggtggctcaggcccatgatcccagctacccgggaggctgagacacgagaattgcttgaacctaggaggcagagtcttgcctggcagaacaagactcaggggaaaaaaaaagaatttagtgttcatgctaaaaagatatcctggacatattaattacatggagaaacctagcagacatcaccttaaccaagtggtcaaagttaacatcactagtaataataggacatncaatattacaaacctgctgatatgatgcaatgagaacacttctgtggtgtcctggccaagggataaacttgggttaatcatgagaaagaaatcanaaagcccaaaatgggtcctgcccggcg

SEQ ID NO: 10716 - DNA, 442 bp, Homo sapiens
ccgggcaggtacgcggggggtattaaaatgttctttcagttagggccaaagggcatttaacttcaaggtaagacccattccaggacggcagagatcatgtctgtcttgcgtatccctgtgtgaattttgcctgacatgttgcaaacactccgtatggaagtcttgaagggccttctggccaagtcagaaaacctttgggagaacagttatccccagacctcagacgctcgacggatacatgagaagctttctttgatggattcgatgtcaggatctccatgtgaacttccacttagaggtgtcatgctatggggcctcagcgtcaccacatcgtttggacgtctgaccagtttcctgactttgagagtctcttactttaaacatgagggatcagccctagaaaggaaaggaaagacacacgcaagagtctgcctctgactcc

SEQ ID NO: 10717 - DNA, 425 bp, Homo sapiens
ccgggcaggtaccagcgggctgtcctctaacagcgacggctgcacgctgggcacgctgggcacgctggcgggatgcacgggcctttgtcctgctgcctctgaggtagcagagtcggcacagggtggactgaggggcgtctcgcttttctgtccaccctctgagacagcagggacaggttcatttggcttctccaggtgcagcagcttgagtttgctctttggccctgatgctccagtctggttcttaatcttcttctcatagtccaggagttggcccagaaaattgaagtttggagatatagtaggtcttttttctttcacaaatctgtaagcttcatctaaagacatgtccatcctcttcatgatgtaggcgatagcgatggtggcggagcgggagatcccagctaaacagtgcactagaacat

SEQ ID NO: 10718 - DNA, 427 bp, Homo sapiens
aggtacgcgggaaagagatgaaaaacagagaagaatcttaaaatcagtcaggaggacaaatcatctttaaaagataaattaacagttgacttccccataccaacagaaggtgttagactaatagtgttaatgtcttgaaataaaatcattaccaacctagaatttcatatccaatccaaatattcctcaacataaaaggtaataaacttacctgtatattatgttaaaattataatccacgtaacaagaagaattaattcaacagactttagaacatggtgttttgactatacgttcttagcaggatatactctaaggatgaaatggaagtccaaagacctcttaaaatttattcagtggcatgattgttagtaataatattggtattttatattggaattattgtatgcatacttatgataaataa

SEQ ID NO: 10719 - DNA, 370 bp, Homo sapiens
aaatcagcttttaagtgagctcagcatattataaaggaatgaaagcaattagagcgtggactctaaaggtaggtgagacttgctgttccacttagaaacatagaaacataggaaactaaggactcgatggggacatcaatagtaggatggcttttaagagggctgaagtgtgtaaatatacacattaagctttgcagcaactctgtgccaaatcgaagttgttgcagacctggaattttagtttggtaaaggataactgtagttattttttaaataaaatgattcattagaattctttggttctctcatgataatttagcaagtttgtctctttcagaaagaaaagtttaagtggggataatgggtacct

SEQ ID NO: 10720 - DNA, 355 bp, Homo sapiens
  misc_feature 326: n = A,T,C or G
tccacaaatgtctgcagctacgatggaccctcagctgctggacaggaaagaggatcaagctaagaaggcccagagtgtgcaagcagagagagggtgtggacagaaaaccttgccttctccagggctagtggcgaaagctatctcaggctggctcaagtggagagaaaaaagcatgagatcaagcaatggacagctggggaagggctggcttttatttcctcagctcccaagctcagtccctggcactgggccgttgcctttgtaggtccctctgtgcccaggtcttgctatgggggttgtttcttggcattaaggtctcagttcanacgccaccgtctccaagaagccctcactg

SEQ ID NO: 10721 - DNA, 417 bp, Homo sapiens
aggtcccttcctaactggtctccttgcctctgttcttactctatttttcacacagcagtcggagtgatttttacttattctcctgttccagtggattctcattacactaagaagtaaatccaaactttatctgcatgtcagcgaattgtttatttttattttattttatttttaaaatagagatgggatcttgctatgttgctcaggggtcttgaattcctaggctgaagcaatccacccatctcagcctttatttatttttattaaattttcctttatctgtcataatctgtttgagtgctaaaaaaataaataaaataaaaaaatttggccggacacggaggctcacgcttgtaatcccagaactttgggaggctgaggtgggcggatcacctgaggtcaggagttcgagaccag

SEQ ID NO: 10722 - DNA, 347 bp, Homo sapiens
aggtacctatttactggtttatatccccattgcttcctccttcaaactctataccatggttcacaaaatcctgcattccattattcccaaattaatccatattattctttgcctcttcaaagaacatttctttaccaactcttaacagctgaaactagattttccccaagccctgggctttccttgtgccttgtgggtgatggttccttacagcacttgcccactgcctggggcagatactgcgttcatcaggactgcatttttgccagagaggagtgaaaaaagaaaaaaagagcttagggttttgacaaggacatccctgcaacaatacatgatgtacctgcccg

SEQ ID NO: 10723 - DNA, 438 bp, Homo sapiens
ccgggcaggtacaattataactgtttttgtatattgggttattttttcagaagtaggccagtagctctaacaggagcctctttagcctgaattcatccaagtagtgcagtgttgcactagttgtccctcgggacatgctccccaatacgtaactcacttgcaggttgcaactggacacttactggtagtcagaaatagctattgcatggagcttaaaatgaacttgatcttcgtgaaagatgagtctgcagctaagagactttactgtatatcatagtgttttttttgttttgttttgtttttgtttttgtgacggagtctcactctttcacccaggctggagtgcaatggcgagatcttgactcactgcaacctccgccccctaggttcaagcaattcttctgtctcaccctcctgagtagctgggattacaggcgg

SEQ ID NO: 10724 - DNA, 426 bp, Homo sapiens
aggtacacacacctatggtgcccacaggtccagctaggaataaatgcacaaagagctccaccatctgagattaccactcaacttttaaagacaaattcttatttcatccctccaaagataaacatcacatggaaaaatgtttcacatcaattctttattatgccagtgaaggatgcctttcttcaggagatgcaacatggagaaagttttaaaggcaggcagtgaagagaaggacaagacgtctcaacccagctccttagatggagaataagtctgcccatccccacacacacatgcagtgggaatgccagccgctgcctgttcctcggtataatctcacctgtgcttcaagcctgattattaacaaccttagctcagatcatgaggccgagcctaattttccgacgttgcactccaggtcacttg

SEQ ID NO: 10725 - DNA, 427 bp, Homo sapiens
ccgggcaggtacccggctgtgcggtatcggggggaatacaaggacaatgccctgctggctcagctaatccaggacaagctcgatgcctataaagctgatgatccaacaatgggggagggcccagacaagggcacgctgcccaggctcctgaatcctggattcgagggctttgaacccccagcttccccctggggcctccatggaaatgacttttcaggctatgagttatgatctgctgcctatcgaaaatgaatgtatacaaggtatgagaacccagcgggcatcgggggagggcacggggtgaagggagggtgctcctgggaacgaggacgaacgaaccttgtgggattaggcacctgccgttcaacaaggcaccattcgcaagaagggtggtccccaagggaaggtccacccccgggtccttctg

SEQ ID NO: 10726 - DNA, 409 bp, Homo sapiens
aggtacccattaaccccacttaaacttttctttctgaaagagacaaacttgctaaattatcatgagagaaccaaagaattctaatgaatcattttatttaaaaaataactacagttatcctttaccaaactaaaattccaggtctgcaacaacttcgatttggcacagagttgctgcaaagcttaatgtgtatatttacacacttcagccctcttaaaagccatcctactattgatgtccccatcgagtccttagtttcctatgtttctatgtttctaagtggaacagcaagtctcacctacctttagagtccacgctctaatggctttcattccttaataaaagcctgacctaattaaaaacctggtttgggcggttttgaactagtgggttcccccggctgcaagaa

SEQ ID NO: 10727 - DNA, 450 bp, Homo sapiens
tccacaaatgtctgcagctacgatggaccctcagctgctggacaggaaagaggatcaagctaagaaggcccagagtgtgcaagcagagagagggtgtggacagaaaaccttgccttctccagggctagtggcgaaagctatctcaggctggctcaagtggagagaaaaaagcatgagatcaagcaatggacagctggggaaggggctggctttaatttcctcagctcccaagctcagtccctggcactgggccgttgcctttgtaggtccctctgtgcccaggtcttgctatgggggtttgtttcttggcattaaggtctcagttcaaacgccaccgtctccaagaagccctcactgggtaccctatctaaagtaaccctcactcctaaggacaaacctgttttttcttcctagcatagaccactctctgaaatcaccttggtctcccag

SEQ ID NO: 10728 - DNA, 370 bp, Homo sapiens; identical to SEQ ID NO: 10677

SEQ ID NO: 10729 - DNA, 435 bp, Homo sapiens
aggtacacagaaagggaggtgtcaacaaaagaagataagcccatacagtgcacacctcagaaagccaagccaatgcgggcagctgctgacctggggagggagaagatcctcaggccaccagtagaaaaatggaagagacaggatgacaaagacttaagagaaaaacgttgttttatttgtggaagagaagggcacattaaaaaggaatgcccacagtttaaaggctcttcaggtagcctttccagtaaatatatgactcagggaaaagcctcagcgaagaggacccagcaggaatcatgagggaaggaaaatgcagcactctaaatggccactcaggcgttcctattcactcggaaaattaggttcatttcacaggacacagcagtgtagatcaggcttcaacttaacatttaagggaaatgtcagatttttttt

SEQ ID NO: 10730 - DNA, 365 bp, Homo sapiens
aggtacctccccgtggagctcacacccttttagaggagatacaataaaagccaggatggggcagagcagtggggaagaaggggaggtaatgttgaaccacctgcccatggttacagaggcagcaggcctgggactcccgacgcttccctcctgccttatacctgatctaagaaggccctgctgggcacacagtagatgctcagcaaatgttcggttgaagggctggagcctcacaaaaccctactgatgcaaacaggctcagcgaggctgagtgacttgcccaagatcctaagaggtggtggaggaatcgcctttcacaaaaaagaacaagcgcttcggagccgccgcccccgcgtacctgcccg

SEQ ID NO: 10731 - DNA, 370 bp, Homo sapiens
aaaccagcttttaagtgagctcagcatattataaaggaatgaaagcaattagagcgtggactctaaaggtaggtgagacttgctgttccacttagaaacatagaaacataggaaactaaggactcgatggggacatcaatagtaggatggcttttaagagggctgaagtgtgtaaatatacacattaagctttgcagcaactctgtgccaaatcgaagttgttgcagacctggaattttagtttggtaaaggataactgtagttattttttaaataaaatgattcattagaattctttggttctctcatgataatttagcaagtttgtctctttcagaaagaaaagtttaagtggggttaatgggtacct

SEQ ID NO: 10732 - DNA, 598 bp, Homo sapiens
  misc_feature 128, 198: n = A,T,C or G
ccgggcaggtacttttttttttttttttttttttttttttatacaaaaaaggcttgtatattgccacttgtggtgccacaggggcttgttttagggataagtgtaagaaaaaggctggctctatttgngtctggtaaggggagaagagctttagaggcagaaagcccccttattttactttttggcagagggggggcnccttttccaaaaagattcgccgtgggggccttcaaaaaaggggcctcctttaaattccggtggctttggagaaggtgaagccccttttcgaaaggagaattaccttcggcccccaagccccaagactcttttctgggggcccaacccccagactccttgttgggaagagctttgggtttccaggggtggggttccaccccccaatatctttgcctttggaataataggccttttccacctttttcgcttccaatttttaagggaagagctttgaagagttcttctccatggggaaaagtttcccaccaagtatgaattgggggggtggtttccccctttggccgggggggcaagataaaactcccccagggtggcccattgtgaaacctaatccccccct

SEQ ID NO: 10733 - DNA, 440 bp, Homo sapiens
aggtactgttttagtagcttacttgtgttttttaaagttcatttctccacccacaggatagctccatatcttccagcaccactaatgagtaagtattagggccaagctggtatctgcagagtgctgactggccaagagtctgcctgtgactcatgcgttaggctgtccagcattggggtgctggggggctgtagccataacatttgcaggatttggaaattccacctcaagctccaatcccagggtgttgattctggctaaccatgtttatgcaaagcaatccaagcactttgactcactttgggaatctggcattcttgggcttttgatattgagacagtggaacacttttgtatcagtttaggtcctgccaataattgctatccatttaagcacttgattttttacatatttaccagcaatttccaaggctttaatgg

SEQ ID NO: 10734 - DNA, 349 bp, Homo sapiens
aggtacctaacaaagggcactgtccaaaccgagctggtgccacacaactccctcaggtgtgcaccacgggcagttcacccacagccccttgcatgcgtgtggacatgcccacgtgacgtgccaacgtgcccatgtgccgattccagacaccggcctgccggcggcccccccacctacaccccgggccactgtttccgtcacgctaatcctatcacctggggatgaagagatcatacagtgtgcaccccttgaaaccagcttcttcactcgccatcatgctgccgagatcacccagggtgtggcagggacccagcgttcatgcctgttgctgaggaggacaccgaggggg

SEQ ID NO: 10735 - DNA, 536 bp, Homo sapiens
ccgggcaggtacacaaaaccaggactgtctgagtgtaaagcctgccgtctttcactaagttacactggggctgagtgattgccctgccactcaggtgtctttgctgtggaggaattaacgggtctgaagactgaagctgggaagaagcagcagggaagactgatctgagctttcagggaaaagagtgaagttggactttaaggtttttatattgtcaagacaatttacaaacacaggaagagaaagaatgacaaagaggagaactcctagctggaaagaagagaaaaaaaaattggatgcaagtgactgcatttatatatcttgagaatttaaataatcagcaacagttagaggtgcaaatgcaacagaagctaaaagaaacttagtatctggaatagttgacaagataaaaccccaaaatctgagagctgcaatcaaagagccatcttctctactaaattgaattagctcagttatatagcgcttctcaacaataaatagtcccttttgtaatctggctggggaaaagttccttc

SEQ ID NO: 10736 - DNA, 426 bp, Homo sapiens
ccgggcaggtacatatgcattgagcacctgtgtgccagtcagccgagctatcacattgcacaattctaagaagcaccattcatgtctcatcatatttctatgctctgggagttgcctttcacatagaatatgtgtgattgttatccctagaattgtgcagtgaggcaattggctaggtgctgtgctgctttttctttctttcttttttttttaagagacggagtcttgctgtgttgcccagtctggagtgcagtggtggcatgatcttgcctcactgtaacctctgcctcctgggttcaagctgttctcatgccccattctcccttgtagctgggattacaggcttacaccatcgcacttggcaaatttgtgtatttttagtagagacaggaattcaagacagccaggctggtcttgaactcctga

SEQ ID NO: 10737 - DNA, 480 bp, Homo sapiens
ggaatgaccaaatagaaaccttacggcgaattgtagctccaccccggtggcggccgacgtacatttccctgctgagggatttccaggacaagtgtctccacactctacaaaggcagtcaactacatgacacattccgcttctgcctggtcaccaacttgacgatggactccgtgttggtcactgtcaaggcattgatctcctgcaatttggaccccaacctggtggagcaagtctttctagataagaccctgaatgcctcattccattggctgggctccacctaccagttggtggacatccatgtgacagaaatggagccatcagtttatcaaccaacaagcagctccagcacccagcacttctacctgaatttcaccatcaccaacctaccatattcccaggacaaagcccagccaggcaccaccaattaccagaggaacaaagggaatattgaggatgctctcaaccaacttttccga

SEQ ID NO: 10738 - DNA, 409 bp, Homo sapiens
ccgggctggtaccgcaaacccagtcaatgaagggagcatgctgggaaaatcagagtgatgaattgtgagagcagcagatgaatcaaatactggtgacctacctctgtgtttccaggtgtggatatggtcaaaagccaagttcatcaataggaaattcctaatgcaggaactttaccagcgctttctagatggagatcacggccctgtggctcgagatgacgaccctttctgggatcctgtcgaggtcgtccgcttgggctcagctcacatctggctccagtcgctggcctactgcatgaagctgacactggagctgggcgactgggatgttcctttctttgactgtgtctctccccattacagaaggctgcaccgagctgagctgctctcagctgggcctcatggtcac

SEQ ID NO: 10739 - DNA, 429 bp, Homo sapiens
ccgggcaggtacccaaattaactaaccttaaatgcaagacttagcagcaggtattatccatgttgaaccacagagttgtggttataggatgatctatccaggttgaaaaagaattctggccagcagtttgaagaagtgaaaatcaagattaggcacagaggcagagggtgggtggggccacagggcggggaaggattccaatccatgagactgcagaaggggaagtgagcagcctctacccatacagactagggtctcatggatgccactggagagcattccagtctcactggatattggtagttcactaacttgtgtcagtcatgattgtgacctctgatatattgctatatttggtttttatttatacaaaagctgcgtctctccttgatcccagtgttttggtggtcttttgtgcattcaagaaag

SEQ ID NO: 10740 - DNA, 406 bp, Homo sapiens
aggtactatggcttatttctgacagaatgaaacttttgtatcaaaggagcttcagctaaagttgaatgtttttctttctcagtttttatggccttattaaacatgtttagctagccaaagcttcctcctcctcaccatgctcagtgttagcatggtggtgaggctataaagaggcaccacaggaaggagcctgcacttcccccatgggatttaaaaaagaaccaatttgggccatgcttggtgcatctagcataatcttgggacaaatccacatgattcaggtcaaagttttggagttaattctcccattattatttgctcctttccaaagccttaatgtgaaattcagtcagggtctggccatggtggcaggtgtccctacactctttcattcagagaaggagca

SEQ ID NO: 10741 - DNA, 306 bp, Homo sapiens
ccgggcaggtacctggggtctcagggttgctctgggcctgatcatccactcagatctgtaaggaggatttgcaggatccatttagaaagatcctcccttacttccacaagcatggcctttggctcttaaatacctgtgctggggttttgtaattatagaaacaacaggaaccaaaactcattaatgttgagctacaaaccagagggaagcttctttctcaaaacagggctcaggcctagaaaaatctagttttctgaaatcgctagccagcaacagcactgagatggccatcccagaaacaaggcc

SEQ ID NO: 10742 - DNA, 125 bp, Homo sapiens; identical to SEQ ID NO: 1573

SEQ ID NO: 10743 - DNA, 349 bp, Homo sapiens
  misc_feature 347: n = A,T,C or G
aggtacctgcggtagtagcctggctttgctctgacggcgatctcgcggcccgagagccttttatagacagctccttcagcgtctctgtttccaaaccgcaaccgagaagagacagacggagaaaagagagttacttttccaggttgcttttcccggggatgtgaaggatacagaaatgactgtgaatcaacccatatcatcgaggagctgataatctagtggaagagttagacgtgtgcatacttcgctatgatatgaggcagactctgagcttatattctctgagggagaagcgacatattacaggcggagcattttggtgctgggaaacacatgtgacagaatgncg

SEQ ID NO: 10744 - DNA, 346 bp, Homo sapiens; identical to SEQ ID NO: 1575

SEQ ID NO: 10745 - DNA, 387 bp, Homo sapiens
aacatgatgaaaccccgtatctactaaaaatacaaacattagctgggtgtggtggcatgtggctgtaatcccagctactcgggaggctgaggcaggacaatcgcttgaacccgggaggcagaggttgcagtgagccgagatggcaactactggcacctgcaaccctgagcaacagagtgaaactccatctcaaaaaaaaaaaaaattctaagtgtttatgcacctactaacaaatatctgaaacaaatcctggtataacccgtaaataaacaattcttatggtatagcacaaaatttgcaatttattagcccagcgaatcttcaacaccttttctcattaacttaatggcaacaaagtagacagttaaattctgttgagcgacatgg

SEQ ID NO: 10746 - DNA, 418 bp, Homo sapiens
ccgggcaggtacgacctgtctcaggaacggtgccatgtgtgtgactaggactgcaaagcagcttgtgttcgtgggggaaatgacaggcacaggaaggaaaagctgagaacactgaaacggttcctaatcgtgcagtggggaaaggagggcgactgccgcgcagagtggcacgttggctggaagaggggattgatcagcagtgctggcaggaacagcataggcttgtcgtgtgatctaacagaagaggcagcaatctggaggcgccccagatcagagaagagacatcaagccccaggagaaatggatttcctttctccccacccatcagctgggtaggaagcccgaaggagcctttcatggaactatgggaagggctcctttgacgcagaggggatgaactggaagcaagatgctggct

SEQ ID NO: 10747 - DNA, 431 bp, Homo sapiens
acgtgcccggggcgggacaggccaggcctcacaaccaagagccccgggaagagctgcatgcacacggctggagagaggctctgcacccgagcacagtctgctgcgactcctcatagacccggaaaactgattagaaggcagaggtgagtttctgagggtggctgtgcacaaaattcagagtcaggaatcagcatctttcaaattcaagcacttccagttaggagagacaatgaagaaagaaaagggaccattcccaacagcaacaaaaattgtaaatttctaggagcaaacggcgggcacatctatacctgttatagagggtctgaggcctgactgaggaccacagaccatcaacaagcccggtctgtcctgggcgtaacgaggtgccgtcccttgtgctggccggctgccacagcggggccaatttaaag

SEQ ID NO: 10748 - DNA, 413 bp, Homo sapiens
ccgggcaggtacataattggagatgaataatgattctcttagataaagaaacttgtccacccacctctaccacaaatgaaaatcctttttcttatagaactttttggccaagcaaaggctcatgatatctgtaatatctgtgatagagaagcagtgaggatagttcttattccacagtccagcatgaaattctagaatgatgattggccttttctgttcactttcactctcttggagggaaggaggaatgtgaataattgaaaaacgagttacaactcaaacaaaacacatatgaatttggctttgctctgtggtgaatcccacaactcgatagtgccctccactcttttctgtctatccttaactcaaacctctgtctagttgaccaagacccaactgggaggaggatccag

SEQ ID NO: 10749 - DNA, 350 bp, Homo sapiens
aggtactagataaaggaaagagcaaaacaaagtgcaggatcgagagaaaatcgattgcttgaaaaactgggtattttacttgctgcaagtcccgactgtgtcagctgatgagtttaacactatgacagcacagtcctcacctgcctgctcgctgctgtaatccccacactgttgtgtgccctatagtacctggcacacgggaagcgctcaagagatgtgtgtgaatgaaggagccacatcttgacttgcgacgcggagcagtaagctgcagttatttggtagcggtggaagaataaattctacctcctgcttgcctcgctgcagtggggatgagggagaggggactcagc

SEQ ID NO: 10750 - DNA, 436 bp, Homo sapiens
ccgggcaggtactttgcctcccaaattcacttttgtgcaaaacatgcacataacacacaaatatgaatatatgaagtattaatttgctcatcttctggctcctttcccgcaaaagccctttttatttaggaaaccacatattttactcattcctttctgaccataccgttagctagaagcttagaacagcttctagtcacaccttcaaaccttcgggtcacactgtcaaacctcagtggtttatcatttcacagcagcacactgctcttcctgccccagactaaaatgaaggatgtctggaaaaacccctagcatgcagggaagatggtctgaatcacttcactgggaggactaacctcacccatacaagttgccatctccttttttatttgttctaaagcctaacttttatcccactgcatgacacttaacttcc

SEQ ID NO: 10751 - DNA, 424 bp, Homo sapiens
aggtactgttttagtagcttacttgtgttttttaaagttcatttctccacccacaggatagctccatatcttccagcaccactaatgagtaagtattagggccaagctggtatctgcagagtgctgactggccaagagtctgcctgtgactcatgccttaggctgtccagcattggggtgctggggggctgtagccataacatttgcaggatttggaaattccacctcaagctccaatcccagggtgttgattctggctaaccatgtttatgcaaagcaatccaagcactttgactcactttgggaatctggcattcttgggcttttgatattgagacagtggaacacttttgtatcagtttaggtcctgccaataattgctatccatttaagcacttgattttttacatatttaccagcaatt

SEQ ID NO: 10752 - DNA, 346 bp, Homo sapiens
ccgggcaggtacgcggggagcggcggcggctccgaagcgcttgttcttttttgtgaaaggcgattcctccaccacctcttaggatcttgggcaagtcactcagcctcgctgagcctgtttgcatcagtagggttttgtgaggctccagcccttcaacagaacatttgctgagcatctactgtgtgcccagcagggccttcttagatcaggtataaggcaggagggaagcgtcgggagtcccaggcctgctgcctctgtaaccatgggcaggtggttcaacattacctccccttcttccccactgctctgccccatcctggcttttattgtatctcctctaaaaggg

SEQ ID NO: 10753 - DNA, 371 bp, Homo sapiens
aaaccagcttttaagtgagctcagcatattataaaggaatgaaagcaattagagcgtggactctaaaggtaggtgagacttgctgttccacttagaaacatagaaacataggaaactaaggactcgatggggacatcaatagtaggatggcttttaagagggctgaagtgtgtaaatatacacattaagctttgcagcaactctgtgccaaatcgaagttgttgcagacctggaattttagtttggtaaaggataactgtagttattttttaaataaaatgattcattagaattctttggttctctcatgataatttagcaagtttgtctctttcagaaagaaaagtttaagtgggggtaatgggtacctt

SEQ ID NO: 10754 - DNA, 492 bp, Homo sapiens
aggtacagcctttctcacatggtagtctaagggctcctgtaatccaagcactttgggaggccaaggcgggtggaccacttgagctcaggagttcaagaccagcctgggtaacatagtgagaccccttctctgttggcagtaattccctctacacagcaggtgctctggcagctctctggagacgaggaaggagaacttaggaagatggtcttggcttacacaccaccttgctgccagggctcttgcaaagacaggcttcaccaaccaccagcccacagttggcccgtccccaggggctgcacactagccttatggaaagttcctcgagttccctgtgcgtcagcttctgcctggacgctggctactgttgtcggctctgtgaacaggcacacagggtttcctccgggtgtgggatggggctgcccgggatgggggttggggatgctggagcagtgggagatgtcccctgcctatctcccccgtacctgcccg

SEQ ID NO: 10755 - DNA, 107 bp, Homo sapiens; identical to SEQ ID NO: 10631

SEQ ID NO: 10756 - DNA, 353 bp, Homo sapiens
aggtactgggattacaggcgtgagccaccgttcccggcctaagcgtgttttaaaattatatactgaagcccctatggagacatagaatatggccattgtcacagcaagctcccaaatgcacctgcccagtcacatcttgcctttactcccctggaggctaccactcttctgatattattattttttcactatagactaatttcaactgttctgggacttcacgcaagcagaatcataaactctcagaaaactgaactctcctctctggcttcttccactcagctcaaagtttctgagattcacccgtgctgctgtgtgtgtccacagtccgttcattttcactgcggggcagg

SEQ ID NO: 10757 - DNA, 310 bp, Homo sapiens
aggtacctgccaccacacccagctaatttttgtatgtttagtagagacagggtttcaccatgttggccaggctggtcttgagctcctgacctcaagtgatccacctgcctccgcctcccaaagtgctgggattacaggtgtgagccaccaaggagtaattattattaaaaggtaaccagcagcagtcagtttatagataaaggacctatactcattctcagcaccttgcccaaagtaggcattcaaactcaagtgtagccaaggtctgcactagatactaggaaacaacaaacgtgactgtacctgcccg

SEQ ID NO: 10758 - DNA, 19 bp, Homo sapiens
gtcgcctacctgccttcca

SEQ ID NO: 10759 - DNA, 370 bp, Homo sapiens; identical to SEQ ID NO: 10677

SEQ ID NO: 10760 - DNA, 432 bp, Homo sapiens
ccgggcaggtactgtattcttcactgttacacacttagagttaaagacagtttcattgaagagtgttgttgatgagggagtaaaaaatatttattgaatttcaacctgtgactacacaactttaatctgtatgatgaaatgggaagtatgtataaaacacttctgctgtgaactttgtttttttttcttgatattaacatgggtgaagacaaaacaaggatttatttgcctttgcgggccttgattttcctaagatggaactccaactctttggcctttagcacatagccatctgctcggccacactgtacaggccttgaagcgattcacgcaagaagcttgccctgctggaactgctccttcaggagactgctgattttggcattctttttcctttcatccccgcgtaccttggccgctttataactagtg

SEQ ID NO: 10761 - DNA, 320 bp, Homo sapiens
  misc_feature 320: n = A,T,C or G
aggtactgttttcctgatcttactgtttaattcgaatcagataagagaaaaataaagaccctgactatctccatctctatcatttaggtttaactgcgtaagaaacaactgcaaaaccagtggctaaaaacaataaagaattattaggtaatgatgtgggttggaaattttcctgggatctgctggaccttgctttgctgctgttgccttgactcacttgtgcagcgccactctgcttggaacttccctgataagctagcagatggcttgggcattcatgaaactgagccatgagtatccaaatgcaatgagaaaggacn

SEQ ID NO: 10762 - DNA, 404 bp, Homo sapiens
ccgggcaggtacatattgctatgttggatgatttggagcatgcagaggcagatacagtagtagaatcagctttctgcctccatcttttactccgctccctgtcgctctttaactcagcagtttttctctctcagtctcccaacttgtgtgagtgttttatattctacataaattgagggtggagggcaacttctggttgtgttgaatgaggagattggcagaattgacaaaagcaaaatgaaacaatctcagcattctggaaaaactgagcaggggcatacaacaatctgagaagtatttatgcctgtaactgctgaatttcaggtgagaacagtgagactgtatggcatttggcctggagctattcctatgccctctcccatctgtttggtaaagaggttctg

SEQ ID NO: 10763 - DNA, 819 bp, Homo sapiens
aggtacgcggggttcgagagagaggagaggcccagggcagacactctaggagaaaaacttgagtggtataagtggagttttaatttttattctgtgaatgtagtgaataatacatgcaaattagaaacgtgaaagtaaaatggaagtaaaactttccatttggaagcctgttggatgttgagcaggtctgccaggagttagaagaccattccggaagagctgactccagcctgtccatgcacggctacaatgtttaggattgggaggagacagctctggaagcagagcgtcactcgagttttaacgcaaagactgaagggagaggaggaagccaagcgggctcttttggatgcgaggcataactacttatttgcaattgtggcttcctgtttggacctgaacaaaaccgaagtggaggatgccattcttgaagggaatcagattgaaagaattgatcaactttttgctgttggaggtctccgacacctcatgttttactatcaagatgtggaggaagcagaaacaggacaacttggctctctaggaggggtaaatcttgtttctggaaagattaaaaaacctaaggtgttcgtgaccgagggaaacgatgtggctcttactggggtatgtgtgttcttcatcaggactgacccttccaaagccatcacccctgacaacatccaccaagaggtgagttttaacatgttaaatgcggcagatggaggcctgctcaacagtgtgagacgtttgcttgtcgacatcttcatttctgctttcagaagccacaaccatggctggggccaagctgagggcctttat

SEQ ID NO: 10764 - DNA, 351 bp, Homo sapiens
aggtacccaaattaactaaccttaaatgcaagacttagcagcaggtattatccatgttgaaccacagagttgtggttataggatgatctatccaggttgaaaaagaattctggccagcagtttgaagaagtgaaaatcaagattaggcacagaggcagagggtggtggggccacagggcggggaaggattccaatccatgagactgcagaaggggaagtgagcagcctctacccatacagactagggtctcatggatgccactggagagcattccagtctcactggatattggtagttcactaacttgtgtcagtcatgattgtgacctctgatatattgctatatttggt

SEQ ID NO: 10765 - DNA, 406 bp, Homo sapiens
aggtactcaggcttgcaacataatggccatttttccccctttggttcctggtgctaattaaacacagcacaacccaatactctaaaagtgatttcaaatataagggaggaaggctattagaactgggcaagcctcagggactttagtctgatgcttccgttttgcaaattgaagcccagagaggtaaagtgaccagcccaaagtcactcagccaactcatggcagaacaggactatcatccactcccaatccagtgctctttcttttcacttcacagtgaatccccaactcatttgtcattcacaaaatcatttcacagaaagagtatgggtcacagctgcaaggataagagatctctgttattaaatacacagcacatcatcactctcacatttcagaaactgta

SEQ ID NO: 10766 - DNA, 317 bp, Homo sapiens
aggtacctcggtgaggaggcacagattttgcctcctgttgaccagcctggtttcataccgaaaagacattgaaggactgcagaaatgtatgggtgcaccgggccgagggaagggtggctgagtgagaggcgtataaaatggggctgtgtgcatgcaggcccatgtttcagcctcagcccacgccaggtgaaaggatcagcaatgctctgttgccatcgtgctgggacgacaccagctctattgccaccgatgagtagctgaggtcagtgtgcacagagtttgaaattaagttaatagactttacagcagctggcctg

SEQ ID NO: 10767 - DNA, 406 bp, Homo sapiens
ccgggcaggtactaggtaacattgtttcgactatgtgtgttgtattaataatatgtatctcatgttatccagactggtgactggacatggttgaaagagttttatcaaagactcattgatcagaagtggcagaggaagaaaaagagcaaagagcactggtatcaaaaggcaattctttccaagtttttatattacagtatcaatggtgatggagccgctcagcctgtctcatccaccgcagaacagcaggaatcgtccagttcagatcagacaaatgattcggaaggggcttcatggcctgctcccttcgaaatgccttctttagtttctgaagatcccagtgctttcagtcaggggaagtgagcctcttgaacccttatacatagtggggcctgtggccttagcg

SEQ ID NO: 10768 - DNA, 457 bp, Homo sapiens
aaaccagcttttaagtgagctcagcatattataaaggaatgaaagcaattagagcgtggactctaaaggtaggtgagacttgctgttccacttagaaacatagaaacataggaaactaaggactcgatggggacatcaatagtaggatggcttttaagagggctgaagtgtgtaaatatacacattaagctttgcagcaactctgtgccaaatcgaagttgttgcagacctggaattttagtttggtaaaggataactgttgttatttttttaaattaattatgattcattttgcaatttctttgtgatcttttcattattaaatataatcatagttttgtcttttcttttgtatttaatatgtttttaattttttgttttattatgtttaattattaaggaatttatttattatatagtatttaattttattttttttttattaatttaatttata

SEQ ID NO: 10769 - DNA, 323 bp, Homo sapiens
aggtactcccacaaatttccatgaaataacataatgctcaatggcttgacattgaaacaatatgtaggaagcatgtgttccaatgggatattgattataggctcaactaaagataacagaatctgctgtagctattttaagaagaaaaacatttaagacatataattaaatggcttagagaatcactggggagggctgaatacatctaagttgagccttcagaaatagttcccaagcaacaccacagaaatgggctgctggaggaactgctgcctcttctgggatcaggaagctacctgccaccttgggtcactgccagttcg

SEQ ID NO: 10770 - DNA, 354 bp, Homo sapiens
aggtacccattaaccccacttaaacttttctttctgaaagagacaaacttgctaaattatcatgagagaaccaaagaattctaatgaatcattttatttaaaaaataactacagttatcctttaccaaactaaaattccaggtctgcaacaacttcgatttggcacagagttgctgcaaagcttaatgtgtatatttacacacttcagccctcttaaaagccatcctactattgatgtccccatcgagtccttagtttcctatgtttctatgtttctaagtggaacagcaagtctcacctacctttagagtccacgctctaattgctttcattcctttataatatgctgagctc

SEQ ID NO: 10771 - DNA, 107 bp, Homo sapiens; identical to SEQ ID NO: 10631

SEQ ID NO: 10772 - DNA, 490 bp, Homo sapiens
ccgggcaggtacgcggggcattttgtagagaaacaagcggagttaaccgaagagggggtcgaggagagccggagtcggggacccaggagtttcctgtgtccagcgctgccggagccgcctgaggtgccatgtttcagaacagagtaagacccctggtaaaggaagaaactgaagatatttttttcagaataccaaattataactcttatttacaaaagaaaggcatttaaccctgccttttggaggtggacttaaagggggaaataaatgggtgattttttgcgaccggtgcttcgggccgtctcttagaaacttagtgggattccccccggggcctggcagggaattttcgaattattcaaagctttaattcgattaccccgtccgaccctttcgagggggggggggcctcggttaccccaagccttttttgttttcccctttttaagtgaagggggtttaaattttggcgccgcctttgggccgttat

SEQ ID NO: 10773 - DNA, 489 bp, Homo sapiens
aggtacgcgggatgttatttattacttctgataaataggcttgcttcatctgaatgcaaagtaatatataacctggaatttttaaagttttttttgtttttggcacgagagtatcacaggaaattcaaaggtttaactgcgtaagaaacaactgcaaaacccgtggctaaaaacaattaaagaattattaggttaatgatgtggggttggaaaatttttctgggaatctgcttggaccttttgcctttgctgcttgttggcctttgacctcaactttgtgccaagcgcccacctcttgctttgggaaacttttcccctgatttagcctaagcataattgggctttggggccatttcagtggaaaacttgaatctcaatgaagttattcccaaaaagccatattgaagtaaaagggaacatttttacccaaattgaagtcaaatttcactttgtccccaaagccctttcttttccttgttcaaccaattg

SEQ ID NO: 10774 - DNA, 324 bp, Homo sapiens
aggtacgcgggggaattctagaggcggcggagggtggcgaggagctctcgctttctctcgctccctccctctccgactccgtctctctctctctctctctctctcccctccctctctttccctctgttccattttttccccctctaaatcctccctgccctgcgcgcctggacacagatttaggaagcgaattcgctcacgttttaggacaaggaagagagagaggcacgggagaagagcccagcaagatttggattgaaaccgagacaccctccggaggctcggagcagaggaaggaggaggagggcggcgaacggaagccag

SEQ ID NO: 10775 - DNA, 358 bp, Homo sapiens
gccggggacctcccagtctgcggccatgaacgcgagcagcgagggcgagagcttcgcgggctcggtgcaaattccaggtggcacaacggtgctggtggagctgactcccgacatccatatctgcggcatctgcaagcagcagtttaacaacctggatgcctttgtagctcacaagcaaagtggctgccagctgacaggcacatccgcagcagcccccagcacggtccagtttgtatcggaggaaacagtgcctgccacccagactcagaccaccaccagaaccatcacctcggagacccagacaatcacagatggagcctcactctgttgcagtgggccgagattgtgtcactgcact

SEQ ID NO: 10776 - DNA, 431 bp, Homo sapiens
gcggcggacgaggtacatatgtccagtagacctactggatatgcaggcctgcagctcaggggagagctgggttaagaaccggcaaggcagtaatcatctgcatttagatggcgagtaaagccatgacaggggctgaaatggcccagcaagaataaatcaaaccatgagaaacacatacatttaagactaaggagatgtggtcaggcgcggtggctcacacctgtaatcccagcactttgggaggccgaggcgggtggatcacttgaggtcagtagtttgagaccagcctgggcaacctagtgaaatgccgtctctgctaaaaatacaaaacttaactgggtgtggtggtgccttgcctatagtcccaactgcttgcgaggctgacgcccaataatcgcttgaaccctccacggggaagctggattttgcat

SEQ ID NO: 10777 - DNA, 445 bp, Homo sapiens
ccgggctggtacaatcacgcagagtcagagcaggagtatgaggaagagcaagaacctcccaaagttgaaagcaaaccaaaggtcccccttaaaagtgccccaccacccatgaacttcactgatttactcaggctggctgagaaaaagcagtttgaaccagtggaaatcaaggtagtgaagaaatcagaagagcgacctatgaccgcagaagaacttagggagcgagaattccttgaacgaaagcataggagaaaaaaacttgagacagatggaaaactacctccaactgtgtccaaaaaggcaccctctcagaaagaaagtgtgggcacaaaacttagcaaaggttctggagacaggcatccttcttccaaaggaatgccccttcctcatgctgagaagaaatcaagacccagcatggccaatgagaaacacctcgctttgtctt

SEQ ID NO: 10778 - DNA, 441 bp, Homo sapiens
  misc_feature 13, 14, 15, 19: n = A,T,C or G
ccggcaggtactnnntaanaaatgttcattcttgttgtaatgaacaaatatttatttatcttttataacaagtaaggcaatgttgcttaaaggaagacaaacaaacataaaagattccgttgacaatgcattttttcatctgtcggcaatgcttttgtcataatggagatgtgacagcaaactttccaggacattcagtcttcggcggcagcacttaaggcagatgactggccgctcagattctctatcttgtttcaggacagtggaaaagcttatagatgaggccaaagcaccaggtaggtggaaggttcttgtatcggttcgaaccccgacagcgcgccaacagacaacacgagggcattggggagcaacatgctgttttaatgagcgcctgggtgcaggcgtgctgaggctgaaaatggcatcagcccccgcgtacct

SEQ ID NO: 10779 - DNA, 356 bp, Homo sapiens
ccgggcaggtacttttttttttttttttttttttttttttgaggaaatatttgcttttaaacatttgattttcatcaatctttggatgatttgactttattgtcaatatctagtaaatttgccaaaatattttttttattccttgctccttttatccaactaaaaactgggcaggtagaattttctgttttcctaaacaggaaggaggcaaagctggtttcaccttgtcgtctaactgtaagcacataaaggaaatattggtccaaaatattgcttgagcaaagttctataaattcattagactcaagaaattaattcaagaaactagaagatgtagtgaaaaaaaaatagtattt

SEQ ID NO: 10780 - DNA, 464 bp, Homo sapiens
aggtacctgaacaaatcccatcaaggacagattctcagtcttgaagaggcagcacggtaaaggggaaagatcatgagttttggggccaggttcccttggatattgtggggtccccacacttctggatgatgttggataactctttgagaacttaagtctaaaaattttgtaaattggaaatactttatttttcagagttgtcataaacactaaatgatttgacttattatcaacctaattcctactggctcattgaactcagctcagctgtccccctctgatcgtgatgtccttccccagttggggctttatttaggtaataccctgctggaatacccttgccaagctttttacacattttcctcttgccataacaacttattcttttgtttactgaaattattaatttccatggttcaatttggtttaatcttttcataactaagcctggggaagtttccctg

SEQ ID NO: 10781 - DNA, 207 bp, Homo sapiens
acgtcggatgacatgttaccatgacacaaaacgacaatgaccacggcaccacaccaagaatcatctacctctattacaaccagacatttgcactcaaataaggaggtgctgccgtatacttatccgttgctggaggcagcatgaatgggaaccagacacagcttggaaagcaatcgggtaacagagcgccaaccctgtacctgcccg

SEQ ID NO: 10782 - DNA, 492 bp, Homo sapiens
acgtcggatgacatgttaccatgacacaaaacgacaatgaccacggcaccacaccaagaatcatctacctctattacaaccagacatttgcactcaaataaggaggtgctgccgtatacttatccgttgctggaggcagcatgaatgggaaccagacacaagcttggaaaggcaattcggttaacagaagcgcccaaccctgtaccttgggccgctcttagaaactaggtggaatcccccgggggctgcatggaatttcgaatatcaaaagcttattcgattaccagtcgactctttagggggggggtcctcggttacactcagcttttttggtttccccttttaagttggaggggttatatttgccggcagctttgggcgttaaatcaattgggtcattagcctggattttccctggtgttggaaaatttgttttatttccggcttacaacaaattttcctaccactaaacatttacgtagtcccggggat

SEQ ID NO: 10783 - DNA, 370 bp, Homo sapiens
aaaccagcttttaagtgagctcagcatattataaaggaatgaaagcaattagagcgtggactctaaaggtaggtgagacttgctgttccacttagaaacatagaaacataggaaactaaggactcgatggggacatcaatagtaggatggcttttaagagggctgaagtgtgtaaatatacacattaagctttgcagcaactctgtgccaaatcgaagttgttgcaggcctggaattttagtttggtaaaggataactgtagttattttttaaataaaatgattcattagaattctttggttctctcatgataatttagcaagtttgtctctttcagaaagaaaagtttaagtggggttaatgggtacct

SEQ ID NO: 10784 - DNA, 297 bp, Homo sapiens
  misc_feature 68, 70, 72, 86, 108, 109: n = A,T,C or G
gtatcactacttagggcgaatgagctccacgggtggcggcgagtacagactggggttgttaacatagntntnccattggggtttgnccccttgcagccccttcatggnntgggggtgccctggttttggccctccccaggataagcaaaatggtaacactggtggcctggctggaaggaacctgagcatggcccgtcattggttactggattaccttccaaactaccttataggtctacctttggaaggtaaaggaggggttagtcaagcccaaacccaaaaaaaaaggtgggggcg

SEQ ID NO: 10785 - DNA, 370 bp, Homo sapiens; identical to SEQ ID NO: 10731

SEQ ID NO: 10786 - DNA, 348 bp, Homo sapiens
ccgggcaggtacgtctgacacagacaataaaaactgcacaagccagaatgcaaaacttcagtgagtggcggaaggaacatttctgcatttgacaagaaacataagcttttttttttctttttttaaatggcggaacaaaaggttaaaaaacagaaaagcaacaagaacaaagcagacccttacatttgacaaagcgcacttcacttggctccatgatctatttcttagaaagactaaacaaaagtcaagtcctacggtgtcgcgaggggtcagagggtttcaccctgtaacgtccggcccttttggtcccccttggggcagcatccctttcccaggtgtgtgctggac

SEQ ID NO: 10787 - DNA, 433 bp, Homo sapiens
aggtactagataaaggaaagagcaaaacaaagtgcaggatcgagagaaaatcgattgcttgaaaaactgggtattttacttgctgcaagtcccgactgtgtcagctgatgagtttaacactatgacagcacagtcctcacctgcctgctcgctgctgtaatccccacactggttgtgtgccctatagcacctggcacacgggaagcgctcaagagatgtgtgtgaatgaaggagccacatcttgacttgcgacgcggagcagtaagctgcagttatttggtagcggtggaagaataaattctacctcctgcttgcctcgctgcagtggggatgaggtagaaggggaactcaaccagatgccgaattcccccatacagctggacaggtttcccaattttccaggaatcagcttggttcagggagcaatcccggg

SEQ ID NO: 10788 - DNA, 530 bp, Homo sapiens
ccgggcaggtactgcatcagctagaataatggagcatatatagcatcacaaagcgtgattgcaacacagcatctaaagatgaggctcaaggatgtgataccgtgtctaccacagatgaatgagtagtgcccatgacagcaaaataacatacctgggaagtccagactaatatctgataaaggatactgctgtcattactaagcatattgaatttggctgaacgctgacatatgagtggaaaacgaccatgaaatgtcatccaccaatcctggatctggggagctctggaggtggagagagaacttttaagatgcattaatgttatgtaagcaacatacgatggtatctggaacttaacaggagtccataattgctgccagaattattagcatagaattcggttttaaacattgactaaattgaatgggcgaggtgggggaggcatggcgccagttaaatagccaggagaggctggactggggacagaaaagtgtgcttgactgcacaagaaatcagagataatggtacct

SEQ ID NO: 10789 - DNA, 355 bp, Homo sapiens
ccgggcaggtacctggggtctcagggttgctctgggcctgatcatccactcagatctgtaaggaggatttgcaggatccatttagaaagatcctcccttacttccacaagcatggcctttggctcttaaatacctgtgctggggttttgtaattatagaaacaacaggaaccaaaactcattaatgttgagctacaaaccagagggaagcttctttctcaaaacagggctcaggcctagaaaaatctagttttctgaaatcgctagccagcaacagcactgagatggccatcccagaaacaaggccaacacagaagcacccataaaggctgctggaggttgggacaaagagatcc

SEQ ID NO: 10790 - DNA, 512 bp, Homo sapiens
ccgggcaggtacataattggagatgaataatgattctcttagataaagaaacttgtccacccacctctaccacaaatgaaaatcctttttcttataggactttttggccaagcaaaggctcatgatatctgtaatatctgtgatagaaaagcaataaaggttagttttcttattctacaagtccgagcataaaatatctataaatgcatgatttggtcctttttctcgttcaacttataaactctactttggagtggtaaggtaggtaaatgttgaatacagttgtaaaaaatctgagtttacaatcctcaatacaaataacaacattatgtaattttggactttttgcttctgttgtgttgaattcaccaacaatcttcggattagttgcccactctcaacttctttttttctggtcatattccctttaaccttcaaaacgcttcattgttctaggtttgtacccaaagaacccacaatcctgtggaagggaagggattctcaagggaaag

SEQ ID NO: 10791 - DNA, 371 bp, Homo sapiens
aggtacaccattaaccccacttaaacttttctttctgaaagagacaaacttgctaaattatcatgagagaaccaaagaattctaatgaatcattttatttaaaaaataactacagttatcctttaccaaactaaaattccaggtctgcaacaactttgatttgggacagagttgctgcaaagcttaatgtgtatatttacacacttcagccctcttaaaagccatcctactattgatgtccccatcgagtccttagtttcctatgtttctatgtttctaagtggaacagcaagtctcacctacctttagagtccacgctctaattgctttcattcctttataatatgctgagctcacttaaaagctggttt

SEQ ID NO: 10792 - DNA, 427 bp, Homo sapiens
aggtacaagccaggtttccttctcagctcaggagagggacttcttcctgcggatcttgggcttcttcaccggtcgcagataagggttatcgatgatgttctcctccccattccggctacccgacaaggaggggttctgctgcaggacagaggtgttctccttctcggctccagaatcctccatgctgatatgaagagcaaggttctctgtgtctgtctgatcatcctgctccgaggaatctgtctcttccatttgttgcatctgcagttcagacggaagaagagctgtcatgtacgggattggtgaaaggtctggcaccacttcaatggaaatgtgcctgacgttcatctttgaaaaagacttctgaggtctcaccctggtcttgggcccatgaaaaccgtttaagaggcccccctctcccatttgc

SEQ ID NO: 10793 - DNA, 348 bp, Homo sapiens
aggtacccattaaccccacttaaacttttctttctgaaagagacaaacttgctaaattatcatgagagaaccaaagaattctaatgaatcattttatttaaaaaataactacagttatcctttaccaaactaaaattccaggtctgcaacaacttcgatttggcacagagttgctgcaaagcttaatgtgtatatttacacacttcagccctcttaaaagccatcctactattgatgtccccatcgagtccttagtttcctatgtttctatgtttctaagtggaacagcaagtctcacctacctttagagtccacgctctaattgctttcattcctttataatatgct

SEQ ID NO: 10794 - DNA, 389 bp, Homo sapiens
  misc_feature 23: n = A,T,C or G
ggaatgccatagtaagcgcaatngagttcacgcgaaaggccgccgcccgggcaggtactggttgtgctagctggattattaggcaagaaagttatataacaagaaataaaagattgggaggctgaggcggttgatcacctgaggctaggagttcaagaccagcctggccaacatagtgaaaccctgtctctactaaaaatacaaaaattagccaggcatgaaggcaccgtgcctgtagtcccagcttcttggaggctgggcaggagaatcccttgaacctgggaggtggaggttgtggtgagccaagattgtgccactgcactccagcctgggtgacaagaccaagactccatctcaaaaaaaaaaaaaaaggaaaaagaaaagtacct

SEQ ID NO: 10795 - DNA, 201 bp, Homo sapiens; identical to SEQ ID NO: 1478

SEQ ID NO: 10796 - DNA, 244 bp, Homo sapiens
  misc_feature 116, 117: n = A,T,C or G
tcatggtgtgcgcctgtaatcccagctaccaaagagatcactggacccgggaagcagagtttcaggaccgaagacgccaccgaccaacctggtgcagacgagagaactcattcaannaaaataaaaaaaaaaaacccctggccgtttaaactaggggccccccggctgaagaattcatttaaacttttgttccccccacctaggggggggcccggtccccattttttcccttaaggagggtaat

SEQ ID NO: 10797 - DNA, 355 bp, Homo sapiens
ccgggcaggtactaaactaagccgtcaactaccagcaagcagaatgaaaaacagggacagatcagcatccaattagtatgtctaagtttttaaacaggaaaagggttgaggggaatcagtaaaactggaaactcatacttcacattttgcaatctcactgataaaaggaggaaatgtgtgtttatcaaacttgctgtgagtgcacagttcatttggagtcctgtaaacaatcgcctggctgcccactttcaaatgcatgtgaaaatcttggagattcagagcatcatattcagcaagcaaggtcattctagtgatgcccttaacaagtttcaaaagctcatagagatcttcaacc

SEQ ID NO: 10798 - DNA, 380 bp, Homo sapiens
ccgggcaggtacccgggtatcctgtcttacggtgtttattcgtggttatctattgacagtgaataacttgaacaagtatttcttgaagatttgcattttatttttctaaaaagcatggttccgaccgggcgcggtggctcacgcctgtaataccggcactttggaaggccgaggcgggcagatcacaaggccaggagaccgagaccatcctggccaacatggtgaaaccccgtctctactaaaaatataaaaattagactgggcgcggtggtcgcatggcctgttaatcccagactcctcgggaggcttgacgtcaggacgaatctgcttgagaccagggagaccgggaggtttggaaggggagccaaagatcgaggcct

SEQ ID NO: 10799 - DNA, 823 bp, Homo sapiens
  misc_feature 668: n = A,T,C or G
ccgggcaggtacaagatgagacagaattagaggatgaaaatcaagaaggcatgactgtgcacagttctgttcacagcaataacctcaactctatgccagctgctgaaaagggtaaagacacattaaaatcagcttatgatgatacagaaaatgacctaaaaggagcagctattcatatctcaaaaggaatgctccacgaagaaaagcctggagagcagattttggaaggtggctcagagagtgaatctgcacagaaagctgcagggaatcaaatgaatgacagaaagattcaacaggaatccctgggtagtgcaccactcatgggagatgaccaccctaacgcatccagagacagtgtggagggagacgctttggtaaatggggccaaactgcacacgctttcagtggagcatcaacgcgaggaattgaaagaggaattagttcttaaaactcaaaaccaacctagattctcctctccagatgagattgatttgcccagagaactggaagacgaggttcccattctgggaagaaatcttccctggcaacaagaaagagatgtggctgccacagccagtaagcaaatgagtgagaagataaggctctctgagggagaagccaaagaggactccttggatgaagagttttttcatcacaaggcaatgcanggcacagaagtaggacagacagaccaaactgacagcacaagaagaccagctttcctttttaaaagtgaaaggatgattattcctctgaagaacttctagaggatgaaaaacgcttaaaatgcaaaacggtctaaaaaaaaaaaccctgggaatca

SEQ ID NO: 10800 - DNA, 500 bp, Homo sapiens
  misc_feature 301, 309, 310, 325, 326, 338, 339, 347, 348, 349, 428, 429: n = A,T,C or G
aggtacttagaattttgtggccagatcattttgttggaaaatgggaaaatctgtgaaaatggaactcacagtgagttaatgcagaaaaaggggaaatatgcccaacttatccagaagatgcacaaggaagccacttcggacatgttgcaggacacagcaaagataggcagagaagccaaaggtagaaaagtcagggcttctggccacctccctgggaagaagtctctcaacggaaaatgtctgttgccggaagcattccagctcacaacaaggagggagggagaaatggaagaaagggctnctcttganngttggaggggtcttnnaccaccacttanncatccaannngcagctggggagggttttacatgggttctctttgcaataaattttttccttccttttggtgggtgggctgaattcggtnncttcttaaaaccgattctttccaggcttttctgggttgggcttggagccttacctgggtttggggaggcag

SEQ ID NO: 10801 - DNA, 350 bp, Homo sapiens; identical to SEQ ID NO: 1632

SEQ ID NO: 10802 - DNA, 422 bp, Homo sapiens
ccgggcaggtaccatcttttacaaatcatgcttcttcttctgcactcattctactttgatccaactgaaccgttcataggcaggtccgggttttatcatccccatttacacataagaaaactgaggcctggaggctgggcgcagtggctcacgccttgcaatcccaacactttgggaggccaaggagggcggatcataaggtcaggagatcgagaccatcctggctaacatggtgaaaccccatctctactaaaaatacaaaaaattagccgggtgtggtggcgggcgcctgtagtcccagctactcaggaggctgaggcaggagaatagcatgaacctgggaggcggagcttgcagtgagccgagattgcgccactgcactccagcctgggtgacagagcgagactccatcagctgccaag

SEQ ID NO: 10803 - DNA, 320 bp, Homo sapiens
aggtacacatagtgacattgcaaagggagactttggggtcgggcggatatcttaggatcaactctggctaggtcgcagaagacaggacttgttcccacagacaccagaaggtggaagttttgtcttccctgataacttgctcttcggtatcttggtttggttcactgggtgtttaatgagaatgtcttaccaacgtgctatgtcgtcgttcatcctgacaacattaaacatcagtatagaaaatactggaaagaacaaaagaaaaaaagaaccagggaggtgatcttgccacccccaattcttttcagtaacatccttgt

SEQ ID NO: 10804 - DNA, 370 bp, Homo sapiens
aaaccagcttttaagtgagctcagcatattataaaggaatgaaagcaattagagcgtggactctaaaggtaggtgagacttgctgttccacttagaaacatagaaacataggaaactaaggactcgatggggacatcaatagtaggatggcttttaagagggctgaagtgtgtaaatatacacattaagctttgcagcaactctgtgccaaatcgaagttgttgcagacctggaattttagtttggtaaaggataattgtagttattttttaaataaaatgattcattagaattctttggttctctcatgataatttagcaagtttgtctctttcagaaagaaaagtttaagtggggttaatgggtacct

SEQ ID NO: 10805 - DNA, 529 bp, Homo sapiens
ccgggcaggtactcttcaaattggtaaattttatttgtctagtaaattatatctctgtaagtcctattttaaaataaactgtaaagaaacctattaagttggtaacagcgattagctttgaatagtgaaattatggtcgatttctttacttttctaaccttcttcttgcattttttccccaaatgccagagaaatggcaattttattttttcataagaacagaacttttaccaatttcaccaaaggggtgaaaaacaccaatttttccaattgaaaaaaacaaaaattagtcccttttggtaatttttcttaaggtaaatcccaaacttttaccaagggggaattgttgaaagtgaacccttcttttcaaagtgaagtatacttgtcataaaccaacttggcttcaaatgtaaaaataaaaaagtagggtattaccaaaatcaaatattatgtaagtaaaccattttcccaagcccttcaatgggtgtttagggaaagtaaaatcaaattattctgttgaaaaaaatgg

SEQ ID NO: 10806 - DNA, 452 bp, Homo sapiens
gagctccccgcggtggcggccgaggtacgcgggggagccagcgatgggtccaccttgcctttgttgttgttgttgattttgtttcttgttttggtgactgagtgaagggacttgaccctggttctcccagcttgagcaggagcgtcactgcggtgatcagggaagctgcctggaccagctggcctggggcagccaccaccccattctctcgcccctcttgagaatccagcctgtggacccaggtgtgtcagcctgcagtcagaccacagtctggctcgggctggggctgggggtggcagaaagggggtcctgacgcagcccctgctcccccgagtcttctcagtcttctgggggagaaatgaccgaccatacattaaaagagaattcttgctttaaggggaaggaaatgcctccaaagacaccggcccctcttaaacataggggggaccccc

SEQ ID NO: 10807 - DNA, 574 bp, Homo sapiens
ccgggcaggtacgcggggatatagacagagttgagatcaggaaatagctgtttggtgtttcttggggttgtcttcttacagttcaggagacccttcctaaagccggtcttttctcacttccagtcattcctgtattccatcaaccacacaatctgcttgcggttggatagcattgaagccaaattgcaagccctggaggctactggttaatgctgggaagaggggcgggaggtgagcaggaacatgcagttcaaacttatccagggtaccatggatgccggctcagttctcatgacactccatactgcttcacttttgccatggctacccatacgccactgttgcttccgcagccgcttacatctttgggatcccctcgtctgtacgtctactatatcatgcttatgtataccttccacctttattgtgtgcccgtaaccccctgttttactcatcttatagggcatactacacgctatatctagtatttgtatatcgtctagctactacaatctattctgtaaccgtttttactcttttgtactacggcccccgaaacatatcctcctcgtct

SEQ ID NO: 10808 - DNA, 319 bp, Homo sapiens
ccgggcaggtaccagcagggcagggacagagttgggagtctacagccgtccttgaatttgtcctcctagcgatgaggaggtttccttgatgaaagccactctatgactctggcgggtgagcatagtcacctgctcgcctgcagatgggtctctgggaagccgctgaagcctggagaagtccacagcccatgccttctggagacccagagctgagtggggaggacaggacgagatatgccacactcatgttgccaaggaatagctagagagcactgtatggggagtgagggcccagcgctggagtccgcagctcatcagc

SEQ ID NO: 10809 - DNA, 354 bp, Homo sapiens
ccgggcaggtacaatcacgcagagtcagagcaggagtatgaggaagagcaagaacctcccaaagttgaaagcaaaccaaaggtcccccttaaaagtgccccaccacccatgaacttcactgatttactcaggctggctgagaaaaagcagtttgaaccagtggaaatcaaggtagtgaagaaatcagaagagcgacctatgaccgcagaagaacttagggagcgagaattccttgaacgaaagcataggagaaaaaaacttgagacagatggaaaactacctccaactgtgtccaaaaaggcaccctctcagaaagaaagtgtgggcacaaaacttagcaaaggttctggagac

SEQ ID NO: 10810 - DNA, 352 bp, Homo sapiens
aggtacttcggggaaagattgcatttgaacagaggagtgtctagaaacagacatctgttgttttggcagcagcattcatttcctgtctttgataaccagatccaggggcctccagggaaactaactcctccctaggctccagggaggcagtgcctcaagcctcacaccccgctggcaacagaaaccgcttgatggatgtgtgcacgacccctaagaactaatgagctacatcgagtcttcagcaaagacttccaggacaaagatgacaagcttctccacctatacttggggaaagagaatcaggctagcacccactttacagccacaaggagagaagttttgagaactcagt

SEQ ID NO: 10811 - DNA, 408 bp, Homo sapiens
  misc_feature 408: n = A,T,C or G
aggtacagggctgggtcctggggacaaagcagtgggcaaggcagagtgccatgttatagctggcgcaacagccaagggcagcagatgactgggagaacaaggtgatttcagagagtggtctatgctaggaagaaaaaacaggtttgtccttaggagtgagggttactttagatagggtgaccagtgagggcttcttggagacggtggcgtttgaactgagaccttaatgccaagaaacaacccccatagcaagacctgggcacagagggacctacaaaggcaacggcccagtgccagggactgagcttgggagctgaggaaataaaagccagcccttccccagctgtccattgcttgatctcatgcttttttctctccacttgagccagcctgagatagctttcgccn

SEQ ID NO: 10812 - DNA, 545 bp, Homo sapiens
acagaaacatgtgtcagtgatgactcagggggctaccgctttattgaaacggggaatctaggtgtttggcaactttagaaaccggtccttttgttgcctctcacatggacttaagtatttcctcttcagcttcagtcacttttgcctttcttatgggttgccccaataaaagctgtgggcaggccgggaaacccagtgattgtcatgaaacccccagccttacagcccaggggaatccttttctgagacccggggggccagcacattccaataacccctgggcccccccgccgtacccttcggcccgagggtacaatttttggggttaccccgaaaagcctttttgcttggggaaagaccgggaaaaacaaagccttgaattggatgccccctaaaaggaaacttccgtaccccttcctggccacctgggaaaaacaacaagcccttggtcaagaagccttcaattcgaatattcaagtcaattcggaaccatgaataatctggcccattcttgggaaggctggttattggcccggcattcaccc

SEQ ID NO: 10813 - DNA, 617 bp, Homo sapiens
  misc_feature 150, 282, 294, 301: n = A,T,C or G
aggtcaacaccgtgcccagctaattttttctattttttgcagagatgaggcctcaccatgtctgcctcagcctcccaaagtgctggaatcacaggcatgaaccaccacacccagccctactgtattttagaactttgttcttgaaaagcnagtcaagttccctgtaagtgcataatatattctcattttcaatgagaacagaagatggtttgtaaaagctatttttaagtgtccctatttgcccagtaattcctcttctagaaatctatgagaataattcanaatatagcccanaacacanaggcattaagtgttcagcaaaacactgagaatctaaataaccaatataaagagattggttaggccgtgcagcgtgctcacgcctgtaatcccggcactttaggaggccgaggcgggcagattacctgaggtcaggagcttgagaccagtctggccaacatggtgaaaccccgtctctagtaaaaatacaaaaattagccaggcgtgatggcatgtgcctgtagtcccagctactcaggaggctgaggcaggagaactgcttgaacccaagaggtggaggttgcaatgagccgagatcacgctattgtacctgcccg

SEQ ID NO: 10814 - DNA, 350 bp, Homo sapiens
aggtacatagtgtttataatattgtaataatatattttacctgtggtatgtgggcatgtttactgccactggcctagaggagacacggacctggagaccgttttaatgggggtttttgcctctgtgcctgttcaagagacttgcagggctaggtagagggcctttgggatgttaaggtgactgcagctgatgccaagatggactctgcaatgggcatacctgggggctcgttccctgtccccagaggaagccccctctccttctccatgggcatgactctccttcgaggccaccacgtttatctcacaatgatgtgttttgcttgactttccctttgcgctgtctcgtgg

SEQ ID NO: 10815 - DNA, 349 bp, Homo sapiens
ccgggcaggtacaggagtctggagttggcacccgtaatctacagagggaggcccatcaggacttcggtcttgatctcagtgggctccatcctcgtccctaaccagcctcatataggcagcagggctgcagtggcagtgatgtttatggaaggacccattattcccaaacacatctttggggaattaccttaccgttagagaaatgggacttctaggtgtctggaattggaacatggggaatttgagagcatagacgatctctgcctctgacctcccccttttctggggaaatgtgttcttggtcctcagcctgctggtgcagcccctcccaggaatccctgccagtgtg

SEQ ID NO: 10816 - DNA, 423 bp, Homo sapiens
aggtacgcgggggcccctttctgtgaccgagttcacactcagaacacacgtgttgaaatcgggaaaaaaacggagacctgttgtatcttgcaaggaaaacgttccttacaggtatatttacagaggactgtgtcgcactcaggcagaaatgacctcaacaagacagcctcgtggaaggaagaacacttacctacttaactcccctccccgccccggactgcctagtctagcctagccgtctataacaaccccagtggactgacattccatcttggaatttatggaggtgacaaaagtgtcatttgagatggaccaaacccagccctttcaagaagagctcttgatgttttatcttgacatgtgtttgatgaataatgacctgcacacccatttttaatgcaagaaaggaagtcctgctcttcg

SEQ ID NO: 10817 - DNA, 403 bp, Homo sapiens
aggtactagataaaggaaagagcaaaacaaagtgcaggatcgagagaaaatcgattgcttgaaaaactgggtattttacttgctgcaagtcccgactgtgtcagctgatgagtttaacactatgacagcacagtcctcacctgcctgctcgctgctgtaatccccaccactgttgtgtgccctatagcacctgcacacgggaagcgctcaagagatgtgtgtgaatgaaggagccacatcttgacttgcgacgcggagcagtaagctgcagttatttggtagcggtggaagaataaattctacctcctgcttgcctcgctgcagtggggatgagggagtaggggcactcagccagatgctgaattccccagacagctgacaggttcccaatttccaagaccag

SEQ ID NO: 10818 - DNA, 822 bp, Homo sapiens
aggtacttttttttttttttttttttttggagactgagtctcactccagcctgggtgacagagcaagaccctgtctcaaaaaaaaaaaaaaaaaaaaaaaaaatggaagttgtggtcacaatgcccaggcttctttgttatagtggcacgctgggttacttgccacacacagatcactcctcccagggctgctggcacacactgattgtggggagttcaagaggccttttccccttgagggtgtggctgtccccctttcaggcgtgtggcgtcattcatggaggaagtgctggctctacgtaacacacgcacagtggcactaggacctgcgtgcctggccctcagtgggtagggcggtgctgcctaagcacacagaaacgcttacgggccccaagtgcctactaagctgccttcctcttccccgctgtcagtctgtgtcctccacgtgcttattccctgtggagagaacagatgtggtgtttgaataccttgtgccttatgaacaaagtgggcccttgtaagaagggcgggaaaagagccgaccaaaatgggcggccttcaaaccctaaaaaaaacccacccggcccaaaaaaataccaaaaaatgggccaccaagttgggctcccttcaaattaaattctttaaaaaaaagccggggaaaaaaaaactatgtggtttttcaccttttattaggataaagagggaaacccctttctcttaaaaaattttaaagttttataaaattcctgtaccgacgggccctattaaaaaatatggaatacaccggcgtcgagaaaattataatattacctattgaaacct

SEQ ID NO: 10819 - DNA, 201 bp, Homo sapiens; identical to SEQ ID NO: 1534

SEQ ID NO: 10820 - DNA, 342 bp, Homo sapiens
tttgctcaacaattatccaatgtctactttacaatactttcgctgttctgttttaagctttttgtgaaaatcagccttgccatcctcagtcatttctacatagtgaaaggcaaccgcaaggaagcggcaaggatagcagctgaattttatggagtaacccaaggacaaggttcctgggcagatcgatcaccactacatgaagcagcaagtcaaggtcgccttcttgctctgagaacattattatcacagggttataatgtaaatgcagtaaccttagaccatgtcaccccattgcacgaagcctgccttggagatcacgtggcatgtgccagaactctgctg

SEQ ID NO: 10821 - DNA, 467 bp, Homo sapiens
ccgggcaggtacaaaaacatcaggaccctgtaggagcatctctctgatggcccgatgagcttctcctcttttctaatccagcatctcttagatttgtaaaggaagccagtgtctgcagagctgaatatgcaatgtcacagcagaggtctaatggacccaccacctaacacactcctgcctcttttccgtggcacttctgtctcactttgaataaactgcctcaaaactgaaacccggaaaaacctgacaacactgtatatacaactggcctggtaggttacaaaagaagttcacaacagaggcaacctggtgccacggaggtctggatgctgatcgagagcaagcagaggcgtgcgcgggggaggaaagagtgtgaatacgctcatgagccttaatacaagaagctttacgggaggctggtgaaattctggaaaccactgagacaactgtctgtaaattgtcatctg

SEQ ID NO: 10822 - DNA, 561 bp, Homo sapiens
gcccgatcgctactaaagtcgattagagctcaccgcggtggcggccgcccgggcagatacaaaataatcttttgtttttgttcccttcaagattctcttttactctttttgttccttatgccatcactccaccacaaccatactacagacttcgcaactgctgtctcagcctttgaaacacctaaacttcaacatgctttgatttccgcctattacgctaattgatattttacaggaacgaacaaacgaaaaggaatgtatgcaccacctccagtttctttattcattaccacctgccaggtgccttttagagcagtatccctgcctgtcacggggcttcttgtattgagcttacctacctagctatgtttttttttcttttaccctctgatgtcgtcatatgttcttagcttctggcctcttcgcatttttcttgtttctataactgttttgaatgtgcccgcagcattttatattttatatgggtagtcccgccccgtgaataagttggattttgtttatctactcctaaggggttttgtgtatttttggttcctctcc

SEQ ID NO: 10823 - DNA, 335 bp, Homo sapiens
aggtactgttgttgactcgcataatgcgagagatgttgcggaaacgagccaaggagccgtaggatcccagcatgtctgcggcaatcaccactccgccctcgaacttaacgccgaggactgaggtcccggtcaccatggggttctgggtccgcgtgattggacctctgtaaagtgcagacgccggatccatgaaggaatcgggagtggatggaatgcggtaaaactgtcctggggccggaccccccgcccaaagtccggaccgcgaccccaaaaacgcttccatcttagtcacggtagcagaaaaaaaaaaaaaaaaaaagaaaagtacctgcccg

SEQ ID NO: 10824 - DNA, 145 bp, Homo sapiens
tctctactacttcttcataataatacatctctatttacttttcctctaaactattttatttaataattatctattatcttttcttttttaatattttatctaatcttttatttatattctttatttttagtgcccctcatcaact

SEQ ID NO: 10825 - DNA, 444 bp, Homo sapiens
ctaagatgtatgagcacataaacttcttcccctacctaatgttaaatcttttctatggtggctgtgctcagaagctacctgctcctgcctatccccaaagccctgcttcaccaaaaagagaaataccagattagctacctgcaccatcccagcaacctgtcccttctcccctcactcctcaccccttttcccagaccctggtctctcttttcagcacccaggagaccagtgtccctgggccatttctgcctgtcttccaggacagtagtcctggcagaggcagaagaagggtcagatggcagagctgctgggctgggctcccacaagctgtgtcctagttttccagggtaagctgtcaagagttgcctcattgcagtccccatttccctctccctaaatcccttttctgagtctgaagaaatggcattgccagcctcaggaaat

SEQ ID NO: 10826 - DNA, 800 bp, Homo sapiens
tgaggtactttttttttttttttttttttttgggatttttagtagagacggggtttcactgtgttaaccaggatggtctcgatctcctgacctcgtgatccgcccgcctcggcctcccaaagtgctgggactacaggcgtgagccaccacgcccggcccaaaagcatttactgttaaggctgcctcatttttcagctttgttgtagttgagattctgatgttcacctaacaaagtccctgacaaaacagacttccttcaatccaggtcataatttgaaacgttatacaataatgagatttaagtgatgaatggaaagaaaagaaggagactgaaaagatatcagaaatttctatttgtttttagattcagaaaaatataattacaggccaacatgggtctgacagaaaggaaggacgtcagcagttacttgaatgtaaccccttcccagcatttccaaagacctgcaatgtgctcattgtgatccaagggccttgttacctagtttctaggtgatctacagaattgaaacaacccagcacaactttatttcttgagaagatgaacccttaactatgaagtgcccaaaggaagctttaactgctcacttaccattgcctccggttttcaatgccacaatcattcaagataaataaaacctgtgagaaaaacaaacaggtgggcaagcaaagccgcagtgatcatactttcagttaccaatggaccagggtgctttctttttaagaagtggtcattggatttggtttttagaaacaaaaagcgcccgtttatgaaagaagat

SEQ ID NO: 10827 - DNA, 406 bp, Homo sapiens
ccgggcaggtactttttttttttttttttttttttttttttggtagagatgggacttcctacgttgctcaggctcgtcttgaactcctgagttcaagtgatccacccaccttggcctttcaaagtgctgagattacaggtgtgagccaccacacctggccaaaataataaaaattttaattcaggtaaaaaaaaaaaaaaaaggaaaagtgtaaatgtgttcatccaacaaagcctttctttcacacatatgaaatataaatagatccatttaaatacgatatccagttgaaccagccctgaagggctttctgaattggacatgttctgtcgctaccagtggggcttcctggaagctggcccaaagctggtccttgtccacgcagaggatctgaaagcaccctgtg

SEQ ID NO: 10828 - DNA, 201 bp, Homo sapiens
acgtcggatgacatgttaccatgacacaaaacgacaatgaccacggcaccacaccaaggatcatctacctctattacaaccagacatttgcactcaaataaggaggtgctgccgtatacttatccgttgctggaggcagcatgaatgggaaccagacacagctggaaagcaatcgggtaacagagcgccaaccctgcacct

SEQ ID NO: 10829 - DNA, 553 bp, Homo sapiens
aggtacgggttgcccctggcttggcactgcagggacgtggtctcgtgtttaatcttgtccattttgcaaggtgtcttggtgggtcatgtggtctttcggtcaatgtttgggtaccatgctggtggtaacccagccatgttgttgagtcaggaccaccccatacatcactccgtagtggcaacaagttgtgttgtcaagaagggaggcggttcttaaatctttttcccagggggccaggggggttgggtagggggatttaaaaggttcatggggtggacccgacttcaacacaagggaactccggcaggcttgtgtacggccttaactgttttccttggtggccaaggaaacttctgctcggttccaacccttcggagtaagttgggcaacctggcaggaaaagaaaggcctggccgttccggttcggtccatcttccttcggggttaggcaattttttaagcctggaaaagttttggaggccttggggcttgggcccccccgggggggccccgcgggggccccggcctttcttattaaaaccttaaggttggg

SEQ ID NO: 10830 - DNA, 440 bp, Homo sapiens
ccgggcaggtacaatagcgtgatctcggctcactgcaacctccacctcctgggttcaagcagttctcctgcctcagcctcctgagtagctgggactacaggcacatgccatcacgcctggctaatttttgtatttttactagagacggggtttcaccatgttggcaaactggtctcaagctcctgacctcaggtaatctgcccgcctcggcctcctaaagtgccgggattacaggcgtgagcacgctgcacggcctaaccaatctctttatattggttatttagattctcagtgttttgctgaacacttaatgcctttgtgttttgggctatattttgaattattctcatagatttctagaagaggaattactgggctaataggggcacttaaaaatagcttttacaaaccatcttctgttctcattgaaaatgagaatt

SEQ ID NO: 10831 - DNA, 435 bp, Homo sapiens
gccccatcgacgcaactctattatcgggcgaatgggaactgcagctccaccgcggggccggcgcgacaggccatcagatctgatttcttgtgcagtcaagcacacttttctgtccccattccagcctctcctggccatttaactggcgccatgcctcccccacctcgcccattcaatttagtcaatgtttaaaaccgaattctatgctaataattctgacaggcaattatggactcctgttaagttccagataccatcctatgttgcttacctaacattaatgcattttaaaagttctaactccaaccccaaagctccccatatccagggctgcttggatgaccatttcatggtccatttccactcagctgtcagccatcacccaaattcaagatgcttagaaaagacctccggatgttttcttagatattagct

SEQ ID NO: 10832 - DNA, 692 bp, Homo sapiens
  misc_feature 59: n = A,T,C or G
tatacaccggatgcacacgtctcactatagggcgtactccacgctctccggcggccgangtacgcggggagagcaaagacagttgcttacatgatgcagagcttatctactgtagagctgggaagcagaaggatttgtagtttctttttaaagtgattccttccttttccctttcatttttcactgtgggtgttattatcctgacaatttgtcatacatttcctgtctttaaaaaataactgtatactaagcaaaactcaggtcttaaaaataaatatgaatttagattccatacatcgattaattgaggaaacacagatcttccagatgcaacaatcatcaattaagtcacgcggcgacatggtggcccctgcctcaccccccagggatacctgtaatacctgcttcccacttcatgggctacaatctcatgctgctcacaatttctgtgctcactcatataacaccaacaaatgggatatttgtgaagaacttcgcctgcgggagcttgaaaaagtcaaagccagagctgctcagatggaaaagaccatgcggtggtggtccgactgcactgccaactggagagaaaaatggagtaaaattcgagctgaaaagaacagtgccagggaggaaggaagacaactccaaataaaacttagagatggcgatgaaagaattgaatacccggcccg

SEQ ID NO: 10833 - DNA, 444 bp, Homo sapiens
aggtacaaacaaagcaaaaagtaggaatcatgatcttaatattggacaaattagaatacaagccaaaaagcaataaccgttagataaagaagaattcttcataatgatgaaatagaaacattcatagaatagaaattacaggagaaacggacagtcacttaaagtttaaaactttaagacaaactttaattgacctatttgagtccacaaaaagccaagaagtatctgaaatggtgggataaatcttcttgtccttaaacttttgtgggtcggtgtgtaggaagattggagtgctactatgctggctacacgggctgatggtgcaggacttacagatcgctaagttttatacgacaagtcagttaggtcagaagggtgctgtgcctgacaccacctgtgggggatctcatcatttgaaaattcacagccatgaagatttgaact

SEQ ID NO: 10834 - DNA, 313 bp, Homo sapiens
aggtacgcggggttggtattaaaatgttctttcagttagggccaaagggcatttaacttcaaggtaagacccattccaggacggcagagatcatgtctgtcttgcgtatccctgtgtgaattttgcctgacatgttgcaaacactccgtatggaagtcttgagggtcttctgccccagtcagaaaacctctgggagaacagttatccccagacctcagacgctcgacggatacatgagaagctttctttgatggattcgatgtcaggatctccatgtgaacttccacttagaggtgtcatgcgtatggggcct

SEQ ID NO: 10835 - DNA, 444 bp, Homo sapiens
aggtacaagagaaattaagataaatctgtcatcatgttgggcaatttcaacaccctttctcaagtggtaagtcaagcagcacaaaaactcagcaaggtcaagatttgaataatgttaacagtagagctttatctactgaataaatgtaaaattccccatccaataattagtccactttcttccaaaatgcatgtggaagatgcataaacttgattatgcactaagcaagtgttaacaattttcaaaaactatgcattgtaaaaattacattatctaaccacaatgcaattaagtcaggtgtctataataaaaaggattaaaagacaaaaacacacaccacttccaaatactgtatagaaaacacactttcaatgatgaaaattataatggaaattaaagacactctgataatgaaaacatgatgaattaaaacctgtcatatgt

SEQ ID NO: 10836 - DNA, 514 bp, Homo sapiens
ccgggcaggtaccagcacttttcaaacctacttatatatacaattcaccaggaatcttgttaaattcaaattctgggttgggggttgggggaagcaagagtctgcatttctaacaacctcatctgtgacgcagatgctgacagtcagcagctcactcttttaagtagcaaagttctagtccgccctagaaaatgatggaaagtggtagcaaccctcagaagaaagcagaatttatcctcagacaattaggctaatgaggaatctagagattatcaactactggtttagaaacaactgcttcttttatgatttcattatttttttatttttaaagaagaaagtcaacgaaatcacctgatctcaggttttgctagtcaatatattaatactattaacttgaaactgtaatacatatcccccaatatggcctttcccacatcaagaaactatttattaatacaaatacccccaaatatctccagtatagattcaatctgaacatacactcttaaaa

SEQ ID NO: 10837 - DNA, 607 bp, Homo sapiens
  misc_feature 131, 167, 168, 183, 185: n = A,T,C or G
ccgggcaggtacgaactggagggcttgtgtgttagcttctgaattggtcaattggtaggtcggttagttgggttcgttgtccctttgtgttgtattcagtaaagggggatgaggtatttctgtgcctgccntgttctgcttcaagggcagttggcagaattcaaccnncttgtggggaaatancncggattgggaaccacgggatagtggaaggtgttttatcaacaacctgggctttaacccccctggatttttaatttccaagtggggttttttggtttttttcaatttctgggaaaccaattaactattcaaaattggggcggaacaagaaccttggttttccggcgccccaacccctcccggtggaaaggttaaaattcaattggcaccccggtggttggaaattaaggttattccaaagggcaggggaaatctggcctttttccattttggttatttgggaaggccaaatgggaaccccaagttcgggttggtaggacctttcaatttttctttggaaccaattttttctaaggaattcccctttaaaaggaaaattttccttataaggaaaccaaactttaatccttaaggtaaagggcct

SEQ ID NO: 10838 - DNA, 466 bp, Homo sapiens
  misc_feature 17, 21, 25, 82, 104, 105, 108, 129, 179, 189, 279: n = A,T,C or G
gaattaacatttttgantcancacngtttttgccacaacggcgccgccggcaggactttttctaaaggagttatcaaacagngtgattaacaaccgcaggggannaangagggggggagttgggacacngaaggagggaagcaaagccggaagcggggaaggcaccggaagaaaacccncccgccgggnggccaaaccccaccgaccacccagggcagaacaccacacggcggaaaaaaggcccccaacacccccccccggcgggaacgacgcaccaancacccgcccggccgggaaggggaagacaacggggcgcccaaaagcccggcgaaaggggaaagacacgccgcgcaacgacaggcgaagggcccaccaccccgcgaaaggcgaaggccccacccagggccccaaaagggggccggaaaaggaggggcccacggcgcaccgaccccaacaaagaaccccc

SEQ ID NO: 10839 - DNA, 406 bp, Homo sapiens
ccgggcaggtacaataataaaactaagcttatgcctaaaatattctcactgagtgtctgtgaatccacgactattagcactgtggagcaatttctccttgcagaagagtgctaactctatccattaaagccttggaaattgctggtaaatatgtaaaaaatcaagtgcttaaatggatagcaattattggcaggacctaaactgatacaaaagtgttccactgtctcaatatcaaaagcccaagaatgccagattcccaaagtgagtcaaagtgcttggattgctttgcataaacatggttagccagaatcaacaccctgggattggagcttgaggtggaatttccaaatcctgcaaatgttatggctacagccccccagcaccccaatgctggacagcctaacgc

SEQ ID NO: 10840 - DNA, 162 bp, Homo sapiens
aggtacagatgggggtttacccttgtgggccaggctggtcttgatttcctgacctcagatgatccacccgcctcagcctctcaaagtgttgagattacaggcttgagccattgcgccagccctacctttgttttcttaatagtaggaaaaatatgcctttat

SEQ ID NO: 10841 - DNA, 435 bp, Homo sapiens
ccgggcaggtacccttttgcacgcaccacccatctctgaatgaagaaccaaagattgtcagagttttgatgtcccaccaggcgaagagcaacacttttcactgacaatcaggacagagcagatggatatagaataacaatctggaatccaaggactgagatgcattgacagcaagacaagtaacgtcaaataacaactgaaaagagaagctagggtagacctattaaaagagagagccagcaaacaggaccaaaatgctggatgaggagtctaaaaagaacagaagaaacaaaaaagatcaggagttactaaaatttgactgtcagttttacaatggagacagacaatttaaagaaggaagcagtttttctgagtgtggcattacttgtgcacgttgagtgtcatatatatagagagagagaaagagagagagtg

SEQ ID NO: 10842 - DNA, 465 bp, Homo sapiens
aggtacacatagtgacattgcaaagggagactttggggtcgggcggatatcttaggatcaactctggctaggtcgcagaagacaggacttgttcccacagacaccagaaggtggaagttttgtcttcctgataacttgctcttcggtatcttggtttggttcactgggtgtttaatgagaatgtcttaccaacgtgctatgtcgtcgttcatcctgacaacattaaacatcagtatagaaaatactggaaagaacaaaagaaaaaaagaaccagggaggtgatcttgccacccccaattcttttcagtaacatccttgttagcacatcttcgccttggcgattgtaaactccaaactgaattcttaggttgttggcagcctggtaaagtggaaagagcagtggcctggaagtcaggaaccttgcatccagtcttagctcttcagaggagctgtgcatgatcaatt

SEQ ID NO: 10843 - DNA, 454 bp, Homo sapiens
ccgggcaggtacaatcatttgaataaataatgctcagtcatctgactgcaagtcttcattacacatgagctatagaaaatagtcactgacagatcaagtttagtagcttcaaaacaaattacgcagaacgatttctatagaatccttcaagtggtttcttcagaggtgatctgaatttcatcttaccgggcattgcacaattttcctttttcatttagtgggcatttctcttgggtcaatattcactttatgtctttctaattcagcaaataaaggctcagatccaaaatggctttgctgtttgtctagcatgttaacagagcaataattacccgcgtacgcgggcattgatttcttcctgggggcctctctcaaggatgaggttttgaagattatgccagtgcagaagcagacccgtgccggccagcgcaccaggttcaaggcatttgttgcg

SEQ ID NO: 10844 - DNA, 621 bp, Homo sapiens
ccgggcaggtacaaattcgtggccagtggagagcccggcctggcagcacccctcaggcttcgccgctgccttgtgtgcatcccaagcaatctttgtcagcatccccatggccacaaaacttccagcaactacatatttgatggtggattttgtaaaccaagaccagagccttccgtttaccattatggactttatcttgtaatatgggctgattcattcagacttttagagatcttctggggttttgattttgcccttcaatgtattagtattccactcattctctgtgtcaccttctttttctttttgaaaattagaattacgtatttcccatctctgtggctcggttatttttcataattcctagagatcatccaaaagatttcccaatcacctccacaaattctttccattttctttactatgaaaatattctcataccatctcctcataggtttgatttgttctttttgatttgaaaaatgttagttctgaaggccgagaagttcaacatcaaggtgccaccggattcggtgcctggtgagggccctctgcttcatacagggcaccttcttgctgcattctcacatggtggaaagaggaaaagggccccgcgtacct

SEQ ID NO: 10845 - DNA, 622 bp, Homo sapiens
ccgggcaggtacaaaataaccttttgtttttgttcccttcaagattctcttttactctttttgttccttatgccatcactccaccacaaccatactacagacttcgcaactgctgtctcagcctttgaaacacctaaacttcaacatgctgagattacgcctattacgctaatgaatttctacaggaacgaacaaacgaaaaggaagtaatgcaccacctcctgtttctcagccatcaccacctgccaggtgcttcccagagcagttccctgctgccacggggctcctgcaggagctcctccctgctaggcatgtcctcaacccctagtcatcaagtctagctcagcctctgcatttcagctcaacgtctaatttcccagcgtagattccaggcagccgccctgtgtcatgtgctcttaacatcctctgcttttctatctcatcttccttcttgacaagttcaaagtcatgaggactggatagagctccatcaaagcagggaatgttgattctatacactggagctgagtgggcagtctggcacagagcaagtggccaggaggattaccgaatgcatgaaccttaattttctattcctttattcctgtcatttcctgtacct

SEQ ID NO: 10846 - DNA, 370 bp, Homo sapiens; identical to SEQ ID NO: 10677

SEQ ID NO: 10847 - DNA, 373 bp, Homo sapiens
aaatcagcttttaagtgagctcagcatattataaaggaatgaaagcaattagagcgtggactctaaaggtaggtgagacttgctgttccacttagaaacatagaaacataggaaactaaggactcgatggggacatcaatagtaggatggcttttaagagggctgaagtgtgtaaatatacacattaagctttgcagcaactctgtgccaaatcgaagttgttgcagacctggaattttagttttggtaaaggataactgtagttattttttaaataaaatgattcaattagaattctttggttctctcatgataatttagcaagtttgtctctttcagaaagaaaaggtttaagtggggttaatgggtacct

SEQ ID NO: 10848 - DNA, 201 bp, Homo sapiens; identical to SEQ ID NO: 1478

SEQ ID NO: 10849 - DNA, 531 bp, Homo sapiens
tgttgcgtctacactactactagtatatggcagaattgcagctcgcaccggggcggcggccgaccgggcaggtacagggtcggcgctctgttacccgattgctttccagctgtgtctggttcccattcatgctgcctccagcaacggataagtatacggcagcacctccttatttgagtgcaaatgtctggttgtaatagaggtagatgattcttggtgtggtgccgtggtcattgtcgttttgtgtcatggtaacatgtcatccgacgtcggccgtccacaaatgtctgcagctacgatggaccctcagctgctggacaggaaagaggatcaagctaagaaggcccagagtgtgcaagcagagagagggtgtggacagaaaaccttgccttctccagggctagtggcgaaagctatctcaggctggctcaagtggagagaaaaaagcatgagatcaagcaatggacagctggggaagggctggcttttatttcctcaactcccaagctcagtccctggcactgggccgtt

SEQ ID NO: 10850 - DNA, 364 bp, Homo sapiens
aggtactagataaaggaaagagcaaaacaaagtgcaggatcgagagaaaatcgattgcttgaaaaactgggtattttacttgctgcaagtcccgactgtgtcagctgatgagtttaacactatgacagcacagtcctcacctgcctgctcgctgctgtaatccccacactgttgtgtgccctatagcacctggcacacgggaagcgctcaagagatgtgtgtgaatgaaggagccacatcttgacttgcgacgcggagcagtaagctgcagttatttggtagcggtggaagaataaattctacctcctgcttgcctcgctgcagtggggatgaggggggaggggactcagccagatgctgaatt

SEQ ID NO: 10851 - DNA, 349 bp, Homo sapiens
ccgggcaggtacgcgggcatttattctgcctgtttcaagtcagagcaaatactcctggaatgaccctctcctgtttcctgagtttgagccgatcctatttggcactgcagacagtgagaagtggatgtttgaggacagatgggaggtgcaaagtggagacaagtattggtgccaccttccactatgagactagcagggcccagttctcttagctattgtctcttattttgtagattaggaaatttcaagtttagagaagttgagttaacttaccgaagggtctaggggcttgggtgagaagagagaccgaaaaattaattcagagtctgtgtgtctccaccaccatgtt

SEQ ID NO: 10852 - DNA, 407 bp, Homo sapiens
aggtactttttttttttttttgagaaggagtctcgctctgtcacccaagctggagtgcagtggcacaatcttggctcactgcaagctctgcctccctcccgggttcacgccattctcctgcctcagcctccggagtagctggaactacaggcgcccgccaccacaccccaggttaatttttttttgaatttttaagagagacggggtttcactgtgttagccaggatagtctcgatctcctgacctcgtgatccacccgcctctgcctcccaaagtgctggaattacaggcgtgagccaccgcgcccagcctcaagtgtctattttgatgttcattcactttttcattataaggaagtaaattacttagcacaagagaaaaacttttttttttttgcaatctaaaga

SEQ ID NO: 10853 - DNA, 472 bp, Homo sapiens
  misc_feature 183: n = A,T,C or G
ggtacgcgggattttgggttatatctctcttactacttatttctcactcgcttcaaatgttgggtggggaagaagggtgctatttgttgagccccccgaaagacctcctaatagagggtctccacttctccagagagattgccacccatttcctcacttacttgtttgcctctttgatacctngttgttctataggtcttttcgcctgttggtgttttgaaatgtagagggaaggactttcacttccaagaaagagtagaagacagcatcacgcaatgcaacgctgcaacaaatagagaaaagacaaacacatcaggaacacattgtgaagatcttagggagctgtggatgcaatgaagcctagataaactgagatatgagagataaagcgataaagaggcagagacccaccaggcattcagtaaaacatctaggagaaactcggctgaggaacaagaatagtaaaccgtga

SEQ ID NO: 10854 - DNA, 337 bp, Homo sapiens
ccgggcaggtacgcgggggcgcgacgttcggttcgctgtgtgtgtcgccggctccttgagggtccatgtgatttttacgccagtgctgctgaactgtgcagggtagggagctggcacagtccgattaattgtccttgggtcgaggtgtctcgtcggaccctttggggcttagtggagaattaaggcagagtcactgtaattatttctaataccaattccaaaatagtgactcttggacaatagtgcaattatatggaattatggctggttataagcctgtagctattcagacatatcctatacttggtgaaaaaatcacccaagatacactgtacct

SEQ ID NO: 10855 - DNA, 346 bp, Homo sapiens
aggtacctccccgtggaactcacacccttttagaggagatacaataaaagccaggatggggcagagcagtggggaagaaggggaggtaatgttgaaccacctgcccatggttacagaggcagcaggcctgggactcccgacgcttccctcctgccttatacctgatctaagaaggccctgctgggcacacagtagatgctcagcaaatgttcggttgaagggctggagcctcacaaaaccctactgatgcaaacaggctcagcgaggctgagtgacttgcccaagatcctaagaggtggtggaggaatcgcctttcacaaaaaagaacaagcgcttcggagccgcc

SEQ ID NO: 10856 - DNA, 541 bp, Homo sapiens
tccacaaatgtctgcagctacgatggaccctcagctgctggacaggaaagaggatcaagctaagaaggcccagagtgtgcaagcagagagagggtgtggacagaaaaccttgccttctccagggctagtggcgaaagctatctcaggctggctcaagtggagagaaaaaagcatgagatcaagcaatggacagctggggaagggctggcttttatttcctcagctcccaagctcagtccctggcactgggccgttgcctttgtaggtccctctgtgcccaggtcttgctatgggggttgtttcttggcattaaggtctcagttcaaacgccaccgtctccaagaagccctcactggtcaccctatctaaagtaaccctcactcctaaggacaaacctgttttttcttcctagcatagaccactctctgaaatcaccttgttctcccagtcatctgctgcccttggctgttgcgccagctataacatggcactctgccttgcccactgctttgtccccaggacccagccctgtacctgcccg

SEQ ID NO: 10857 - DNA, 451 bp, Homo sapiens
aggtacttactgtgcctcttccatgtgatttggaaggtgaggagacaggaatggtccacagagggagagagtgccaggccaagtcctctcatagccacccgccccctccacagaaggggacagcaagagaagagagaggcatggtgaggttccttttgcaaataacccaaaatatttccaggattcaagaccagcccatggttttaggcctctgctgtttattctctgagttctcagaaatgcaaaaagtgtagtttagccccagaggcctcaagaaaaagattggggtgcccccaaatgtgtcaaatacagagggaaacacacagagcttagggaaagggcaactgagaatgacaagactgataggaattgcttggcagctgaagccacatctctggggcagaggagcagacctgggaacacctgaggtggcacctggcagtggagggct

SEQ ID NO: 10858 - DNA, 431 bp, Homo sapiens
aggtacctgaactgtcatcattcctactgtgtttgatagtgaccagtaggacaaagccacgtgccgacttcctggctgcttcacctttgcatagctgggttgcagctgcgaacctcattctgactgtgaactaagcaagctttgaggaggcaggagattcccgggggtccctgtgacatattgcattaagatcgtggcacttgcttttttgtctttcacatcggctgtcttgcaaggagcttgacatttccaaattccattgctctgtttggggaagacttaggacagcactccaggaaacagatgacaatttacagacagttgtctcagtggtttccagaatctcaccagcctcccgtatagcttcttgtattgaggctcatgagcgtattcacactctttccttccccgcgcacgcctttgcttgctct

SEQ ID NO: 10859 - DNA, 427 bp, Homo sapiens
aggtacagggctgggtcctggggacaaagcagtgggcaaggcagagtgccatgttatagctggcgcaacagccaagggcagcagatgactgggagaacaaggtgatttcagagagtggtctatgctaggaagaaaaaacaggtttgtccttaggagtgagggttactttagatagggtgaccagtggagggctttttggaaacgggggcgttggacctgaaaccttattgccagaaaccaacccccatagcaggacctgggcacagagggacctacaaaggcaacggcccatggccagggccttgacttgggagctgaagaaataaaagccagccctttcccagctggtcattgcttgatctcatgcttttttctcttcacttgagcccgcctgagataagttttgccactagccctggagaaggcg

SEQ ID NO: 10860 - DNA, 374 bp, Homo sapiens
atgtactgtcagacagaacaataataaaataacaacagagatttttttcttatagaaatttcagccgagttatttgaaccaattctccccatgaaaacgaccaaagctctaatttaaatattctaaatgtctccttaacagtgtcaaatagctgacaaaattgtaggaaactcccaggccaaagcctatggtgaggggaaacagagaaacaagaggagaggagaagctgcttctgcccggcgtcctttgccaagccaggcaagcctggccttcagttttagcagctttgaggggccagaagttaaggcccagtgctgaccaaaggagggaagtctagcaggataccttctccacataagctgggattccagagg

SEQ ID NO: 10861 - DNA, 364 bp, Homo sapiens
ccgggcaggtacttttttttttttttttttttttttggaaatgaacaaatatttatttatcttttataacaagtaaggcaatgttgcttaaaggaagacaaacaaacataaaagattccgttgacaatgcattttttcatctgttcggcacaatgcttttgtcataatggagatgtgacagcaaactttccaggacattcagtcttcggcggcagcacttagggcagatgactggccgcttatagatgaggccaaagcaccaggtaggtggaaggttcttgtatcggttcgaaccccgacagcgcgccaacagacaacacgaggcagtggggagcaacatgctgttttaatgagcgcctgggtg

SEQ ID NO: 10862 - DNA, 401 bp, Homo sapiens
ccgggcaggtacaataataaaactaagcttatgcctaaaatattctcactgagtgtctgtgaatccacgactattagcactgtggagcaatttctccttgcagaagagtgctaactctatccattaaagccttggaaattgctggtaaatatgtaaaaaatcaagtgcttaaatggatagcaattattggcaggacctaaactgatacaaaagtgttccactgtctcaatatcaaaagcccaagaatgccagattcccaaagtgagtcaaagtgcttggattgctttgcataaacatggttagccagaatcaacaccctgggattggagcttgaggtggaatttccaaatcctgcaaatgttatggctacagccccccagcaccccaatgctggacagcct

SEQ ID NO: 10863 - DNA, 816 bp, Homo sapiens
aggtacatgtcctccctgaggtgggcggaatagggcacagccacaagcccgatgccacgggagggagaggcctcagccgcctggaagtggcagccctggttctgggttgcctcatccctctcatcctgtcagtaggacaccagcattaaatgttcaaggtccagccttggtccagggccgtttgccatccagtgagaacagccggcacgtgacagctactcacttactcagtctcttgtctcaccttgcgcatctctacatgtattcctagagtccagaggggaggtgaggttaaaacctgagtaatggaaaagcttttagagtataaacacatttacgttgcagttagctatagacatcccattgtgttatcttttaaaaggcccttgacatcttgcgttttaatatttctcttaaccctattctcagggaagatggaatttaattgtaaggaaaagaggagaacttcatactcacaatgaaatagtgattatgaaaatacagtggtcctgtaattaaagctatgctctttcttcttagtctaggggctctgctactttatccattgatttttaacatggttcccaccatgtaaggattggtgctttaacatttatgccacatgcgtggatggaaggtaatacacccactaacttaaaagcctaaagtgattctaggtaaaccggggattagggtcacgaaaattgaaagcatgacacattgggaagctttcctttttacttcaaagaaaatatcattggaaagggatgtttagagggatttaaacccgctcctttggcaccttgcctttttgat

SEQ ID NO: 10864 - DNA, 344 bp, Homo sapiens
aggtacatttagcaaacaataaaattgatacctcaattatattttatattcagttgttggacagaacaaccctggccacagccctcaccaggctcacagctcaggacactgcctgccctccttgctctagattttcggaccatcagccgaccaaagaattgtgatatggcagagcatgagaaaattagctggcccaatctcagcacttagaatgatgggaaaataagccaaagaattgtgagagtagaactaaaagtgcacaagacagcactggagatggaaaggccatagcaattatagacaaaccacaatgataaaggaacagaagaagccatgtggaaggg

SEQ ID NO: 10865 - DNA, 438 bp, Homo sapiens
ccgggcaggtacccaaattaactaaccttaaatgcaagacttagcagcaggtattatccatgttgaaccacagagttgtggttataggatgatctatccaggttgaaaaagaattctggccagcagtttgaagaagtgaaaatcaagattaggcacagaggcagagggtggtggggccacagggcggggaaggattccaatccatgagactgcagaaggggaagtgagcagcctctacccatacagactagggtctcatggatgccactggagagcattccagtctcactggatattggtagttcactaacttgtgtcagtcatgattgtgacctctgatatattgctatatttggttttcatttatacaaaagctgcgtctctccttgatcccagtgttttgttggtcttttgtgcatccaggaaagtaaggcttga

SEQ ID NO: 10866 - DNA, 408 bp, Homo sapiens
ccgggcaggtacctaaccataccctctttggactgcagaaaactgatggcaacatctcggggagtggctgcccaccaaagaggaccctgagaaagaaaagagcataacctgggaaatgggctacatgggggcaagggacatggtgagcgggcaaagttgagatggtgggtttccttgagtggaatggtctttcaaaactaacaacatactgtgtagttgtctaacatgctgatggaggaacactgctgggccctgaaatcctagctttgaatccattttttcccttttagtattgggagtaggagggaagaaaatgacccctatggtttttccccccaccgacacaaggtcacccgtcatttatgggcttttcataatcaaggtattccgggtttccccttttgcccg

SEQ ID NO: 10867 - DNA, 445 bp, Homo sapiens
ccgggcaggtacatggcatcaggtgtgatcagatggtgtccatctggctttaggctttgccgctgaagattttaattcagtagtcagagtctcctctttgttccttctctcttctcatgacttctgcaggtggatatgctgggtgacaagaagagcatttgcagggtttcttggttctagggccttcattcttcccaccctggtaattgagttttctcttcaaccctgatctgggtagcccctttagctgctctaaagaaggaagtgagaacttctccacttgctgggagggtatcatctctgggggacaagggcaagacgcccagcttgcctgatccctttgatgccttctttccagtttgtctaagggctccagcgatctgagagttggtaagaaatctttgggactactggcatctacagatagatgtcagagctgttggcc

SEQ ID NO: 10868 - DNA, 432 bp, Homo sapiens
aggtacatcatctctctggaccaggattctgtggtgaagctggagaattggacagatgcatcacgggtggatggcgttgttttagaaaaagtgcatgaggatgagttccgctatcgaatgtaccagactcaggtctcagacgcagggctgtaccgctgcatggagacagcctggtctcctgtcaggggcagcctttggcgagaagcagcaaccagtctctccaatcctattgagatagacttccaaacctcaggtcctatatttaatgcttctgtgcattcagacacaccatcagtaattcggggagatctgatcaaattgttctgtatcatcactgtcgagggagcagcactggatccacatgtcatggcctttgatgtgtcctggtttgcggtgcactcttttggcctggacaaggctcctgtgctcctg

SEQ ID NO: 10869 - DNA, 650 bp, Homo sapiens
ccgggcaggtacccgagagacccggcggtggggaagtcacttcctcccgaagacgctgtttcctagcaaccgccctccgcctctgttattagcccctcctcctcgctcggtccaggaccggctctgcgggcgccgccaggcccagaccaagctactatcagaagttgaattctaataattagctattttataaaggtaacgagaaaaaatacactatgtctgatgaagtttttagcaccactttggcatatacaaagagtccaaaagttaccaaaagaactactttccaggatgagctaataagagcaattacagctcgctcagccagacaaaggagttctgaatactcagatgactttgacagtgatgagattgtttctttaggtgatttttctgacacttcagcggatgaaaattcagttaataaaaaaatgaatgactttcatatatcagatgatgaagaaaagaatccttcaaaactatggtttttgaaaaccaataaatcaaacggtaacataaccaaagatgagccagtgtgtgccatcaaaaaatgaagaggaaatggcacctgatgggtgtgaagacattggttgtaaaacctttctctgaatccccgaaggggaagatgcgtagaagaatgtgggttcctt

SEQ ID NO: 10870 - DNA, 462 bp, Homo sapiens
  misc_feature 14, 15, 16, 23, 24, 25, 26, 27, 239, 243, 244: n = A,T,C or G
ccgggcaggtactnnnttttttnnnnnttttgtcactacctccccgggtcgggaagtgggtaatttgcgcgcctgctgccttccttggatgtggtagccgtttctcaggctccctctccggaatcgaaccctgattccccgtcacccgtggtcaccatggtaggcacggcgactaccatcgaaagttgatagggcagacgttcgaatgggtcgtcgccgcccccgcgtcaagaatgggntttnntaaaggaatttagagatgaatatgttataaattgattttattaaggaatttttttgtttatttttatattagattattaaattataatattattaggtgttattttattaattagaaatttttgattagtttttataaaaaaattagtatatgtatttattatatatataaaataaaattgtttattatgttaatatttagtaattttgttttgtatt

SEQ ID NO: 10871 - DNA, 389 bp, Homo sapiens
  misc_feature 334, 369: n = A,T,C or G
ctattggggatggagctcacgggtggcggcgaggtacctctaggcagattctgaaagattatcttacaattcctgttagctgttcgaaggaacctggggttgtgagatttaaaaaattattaaaaagcaaatgaataacagtaatgaaaaacaaactcatgtagctaggtttagtagtttgcattaattgaaagaaaagagggtgaacaagcattaaaacaagcagaaaccaccctcagcagtcatctgtaagaacacagtgattttaaaatggccaaataaaagtggggacctggaagagtgattactcatctctgtgcccatgacccctcanggcataagaagtctgcacacctgtctgaacatcanacatggttggtcgatggaat

SEQ ID NO: 10872 - DNA, 404 bp, Homo sapiens
aggtacgcggggagccggagaccagcctacagccgcctgcatctgtatccagcgccaggtcccgccagtcccagctgcgcgcgccccccagtcccgcacccgttcggcccaggctaagttagccctcaccatggccggttcaatagggagggcaaccatagtggcatcaaattaccctgccggtttcggaatttaaactttcaatctttctggcttggccgggattgctgtccttgccattggactatggctccgattcgactctcagaccaagagcatcttcgagcaagaaactaataataataattccagcttctacacaggtgaggggacgggggaaggcttcaatgaattcagaccctgggctccaacaaagtttcctggcaacttttgggagggccccc

SEQ ID NO: 10873 - DNA, 414 bp, Homo sapiens
aggtaccactgtaacagtaatatggaaatgccacaaatactcttcagtaggggattggttaaatgtcactttccttataaaataaaattatacaattgttttaaaaaaacacacatacctccttatatattaatagagaatgatctcagggtaaattgttgcaaaaaaagcaaagtataaaacagtgtgggccaggcacggtggctcacgcctgtaatcttagcactttgggaggccgaggtgggcagatcacctgaggtcgggagttcaagaccagcctgaccaacatagggaaacttggtctctactaaaaatacaaaattagccaggcgtggtggcacatgcctgtaatcccagctactcgggaggctgaggcaggagaatcgcttgaactcgggagatggaggttgtggt

SEQ ID NO: 10874 - DNA, 389 bp, Homo sapiens
ggcgcagtggctcacgcctgtaatcccagcactttggaaggccaaggcgggcggatcacaaggtcaggagatcgagaccatcctggctaacacagtgaaaccctgtctctactaaaaatacaataatagtgtattgcacatttttaaactgaaagtaaatttaaaatgtgcttctcacaaaaaataagtatttgaaatgatggattagcttgatgtaattacttcatattgttcataaatcagaacatcactctactctataaatatatgcaattataaattgtcaatttaaaataaaataaaaaataaaaaattgtaaaattgttactaacatgagttacagctgtcaatcatactagtctataacattttttagctatgtggtacct

SEQ ID NO: 10875 - DNA, 412 bp, Homo sapiens
ccgggcaggtacacaatatgagggggatcaactcctctctctttgccaatagcacattgggaacaatgtgtggcaggcagcgtcccagcattaacataacgcttttttcactgtctgcaatacgagacacctcgtatcctaaacgactatctgctgacattcgacaaaaagagagtagtgcttggtggaatgcaggagacaatttcctattaggtttatcaaaatgaactgtctttttacttgatagagaagaaggtggcattccttctctttctctcctggggaatgaatttggggaattctctttaggaatagtggaatcagcttcatctgatattgaaagatggatgtctgtgttttttcccttgtctgaactatttacatctggatgctgtccactgtcctcagagtc

SEQ ID NO: 10876 - DNA, 388 bp, Homo sapiens
ccgggcaggtacagggagttgtaggtgagcagccgttccggcagtgagtatcccagtccatgcttctgggtcagtggggaacgcagcacaggccccagctgccgagggtctcctgccagcaccagctgccctcctggatcacctgtttcctttacttccatcagccctgctatagctaccagactctcaggctccatgcagtggccagcctcatcgatgaagatgtgtgtgaagtgatcaatgggaaactgggccgagaccaacctgccggcagtgatgagggtggtaattaagacccggtattcctgcagcttcttcttggcgggaaatacatactcccccttctttgcgtcccagttgcagcagggcttgatgtcctcaggtacct

SEQ ID NO: 10877 - DNA, 193 bp, Homo sapiens
ccgggcaggtacatccaaaatcatttcagcatataacctgtaaagactgcatcatcccagctactttcctgctgacttccacttgggtttactcaatgggtgacactcacaggacataagagattagaaagagggataaggttttttatatatctgctccctccttacttaaagccatggttttagcagaggc

SEQ ID NO: 10878 - DNA, 427 bp, Homo sapiens
aggtacttctgggtaaactggagaagagcttcaactctgttcacctgcttgcaggtgggtttgctgagttctctcgttgtttccctggcctctgtgaaggaaaatccactctagtccctacctgcatttctcagccttgcttacctgttgccaacattgggccaacccgaattcttcccaatctttatcttggctgccagcgagatgtcctcaacaaggagctgatgcagcacaatgggattggttatgtgttaaatgccagcaatacctgtccaaagcctgactttatccccgagtctcatttcctgcgtgtgcctgtgaatgacagcttttgtgaaaaaaattttgccgaggttggacaaatcattagatttcattgataaagcaaaaacccccaatggatgtgttttagtgcactgtttatctg

SEQ ID NO: 10879 - DNA, 423 bp, Homo sapiens
ccgggcaggtaccctgagaacagcaataatgcacaaacattactattccaacagctgcattgaaacacccttggtaggattgggaaaaagatggattattgccatttggacactccaggactgtccattaatactcctgactaatggaagatgataaagattgggcaagaaaaatgactgcagcaaacgcctaggcatcttcaacttgtcacctttagcaagaggcctcttcaacagttcttggactgtgtttggcagccaggcactctcataacggcaaggagacacagctaacatgatctttgcaatgcaacaaaacaagcgatctttaggcgacagagtccaaaagatgacagaaaattcattcaacttctgaagcatgtgatgccaccagaaagccttggcaacagcccttgcaccccc

SEQ ID NO: 10880 - DNA, 412 bp, Homo sapiens
ccgggcaggtacagtgaaaagagccaaggctgtgtgaccccctcatcacttagccaggcgtatggtcctggtttctgaggctgccagaaagcatcttagcaatttgtgtttggatggtccatgcctgactattctaggctggaggttcctaaagagtaacaagaggaagagaaacaagaatctctgacacttgttgagaatagagcacagtcccatttgtttgaaaagagacaccaggcagccatgtttatgtgccagaaatgcattccacctcaaggaggacttaatttatggacccgtgtgtgccaggctgagctgggcaaggatctttctcaggacaaactctgccatgcagctaaaagcctggaaactaaaggatttcatgtagtaaactatcttccaacccctgtag

SEQ ID NO: 10881 - DNA, 357 bp, Homo sapiens
  misc_feature 77, 102, 112, 113, 131, 165, 166: n = A,T,C or G
ccgggcaggtacgcgggattctattcctgtagtgctttgtcatttacatctttgtatttgattctcccaacacatantttgaccatttggttaggagagcanccggattgtnntttttgtcattttcattnaggaaaaggcttgacatttgaaagagagaaaccnncttgtttgatgtacttctcttaggtatcaaggcaagtggggtatccaagccactgcttctgccaacatcctcagtggcagtgaccttaccatggatacctgtgtgcatgctttcttgggcctgattctttggtatatattagtcatttctctgtgagattttataaagtcatgtttcttttagagaccttc

SEQ ID NO: 10882 - DNA, 321 bp, Homo sapiens
ccgggcaggtatttgtttacttctgtgtattttttttttttacataaatggaattgcactatatagttctgtagctcagtttttaaaatttggtattaaaatgttctttcagttagggccaaagggcatttaacttcaaggtaagacccattccaggacggcagagatcatgtctgtcttgcgtatccctgtgtgaattttgcctgacatgttgcaaacactccgtatggaagtcttgagggtcttctgccccagtcagaaaacctctgggagaacagttatccccagacctcagacgctcgacggatacatgagaagctt

SEQ ID NO: 10883 - DNA, 431 bp, Homo sapiens
tccacaaatgtctgcagctacgatggaccctcagctgctggacaggaaagaggatcaagctaagaaggcccagagtgtgcaagcagagagagggtgtggacagaaaaccttgccttctccagggctagtggcgaaagctatctcaggctggctcaagtggagagaaaaaagcatgagatcaagcaatggacagctggggaagggctggcttttatttcctcagctcccaagctcagtccctggcactgggccgttgcctttgtaggtccctctgtgcccaggtcttgctatgggggttgtttcttggcattaaggacttagttgaaacgccaccgtcttcaagaagccctcactggtcaccctatctaaagtaaccctcactcctaaggacaaacctgtttttttttcctagcatagaccactctctgaaa

SEQ ID NO: 10884 - DNA, 501 bp, Homo sapiens
ccgggcaggtacccagcaagaggtttgcaaagaggagttattcagtgaagacggggtttcaccatcttggctaggctggtcttgaattcctgacctcgtgatccacccgcctgggcctcccaaagtgctgggattacatgcgtgagccaccgggcccagccttaaaagcatcaaaaattggactaagaccatcactttgaactgtcagtgaggttggctggaacacacaaaactcctacaggtcagctctattgcagaaagagaaatcagaaattcattactccttgagagcttaccaagaaacttccatttttttaacttggtgcaagagagcttctcttgctgaaagggttcaaggtgtgaattctggaaattccaagccccaatgtttttccccaatcattcatagcccatgttgaagcttgtcagacctcccaagtcaaacaggaatagtacaaggattttaggaattacttgtgcttctggttatgaaaagcctgg

SEQ ID NO: 10885 - DNA, 201 bp, Homo sapiens; identical to SEQ ID NO: 1534

SEQ ID NO: 10886 - DNA, 692 bp, Homo sapiens
  misc_feature 574: n = A,T,C or G
aggtacttgacttttccccttaagtttgattccatttcctaacattatccttccctcttcctcctcagcaactagtcttctaaattagaacttaaacacaatgaccagatatgaccctgcaacagagcatgcccttctgcattgagcatgcaatcatgtatcacaggtataagaccccttgaacagacatggttttggtgattctgtgtaggacttattgcttttacccaagaagatgatcaggcatcctaagtagatcaaaaagttttctggagctcttgaatgtgtataggcaagaaagattaagcaacctgttgccttatatgaggcaaactatcttctcatattttctttcgaattcaggatttcaaggttggggaaggaaggccgggcgcggtggctcacgcctgtaatcccagcactttgggaggccgaggcgggcggatcacgaggtcaggagatcgagaccatcccggctaaaacggtgaaaccccgtctctactaaaaatacaaaaaattagcccggcgtagtggcgggcgcctgtaatcccagctactcgggaggctgaggcangagaatggcgtgaaccccggaggcggagcttgcagtgagccgagaatccggcactgaactccaggcctggcgacagagcgagacttcgtctcaaaaaaaaaaaaaaaagtacctggcc

SEQ ID NO: 10887 - DNA, 443 bp, Homo sapiens
ccgggcaggtacatagtttgatgattctctcatcctgcttctggctagtaggcccctttagatgagttgctatttttcactatccacagagtcaaggtcaaatctcatggctgtgaattttaaatgatgagatccccacaggtggtgtcgggcaaagcaccctctaaacttactgacttgtagtataaaacttagcaagctgtaagtcctgcaccatgagcccctgaagccagcatcgtagcactccaatcttcctacacaccgacccacaaaagtttaaggacaagaagatttatcccaccatttcagatacttcttggctttttgtggactgaaataggtcaattaaagtttgtcttaaagttttaaactttaagtgactgtccgtttctcctgtaatttctattttatgaatgtttctattttatcattatgaagaattc

SEQ ID NO: 10888 - DNA, 507 bp, Homo sapiens
ccgggcaggtactttttttttttttttttttttgagtctgccagtgaccttcaggcatgggctctgatggaagcctggtggtgataaggtcatccacagatctcattatgctgtgagctacagccgacgtgattataaaattctgaggtggaattccttgagagacaggaggggctgagccaaaaccttttaatgggggttgtgtctgcaagggagtgccttgcccgtccagacagggctctttggcgaggcattaagtcaggtacatcctgagcttgtcgattaaaatgttccctggtgattgaaccaagaaatctgccctgttgctttgggttaaggggaagaggcctacccccgtaggagtctttgaaaacacaagtacattggtaaagcttagggtataccctgaccgcttaggcaacttctcaacatttcctgtgaaatgaggggagtttcttcaacttgagccctaatttctttttaaggggaaaatgttttttcatttcg

SEQ ID NO: 10889 - DNA, 370 bp, Homo sapiens; identical to SEQ ID NO: 10731

SEQ ID NO: 10890 - DNA, 407 bp, Homo sapiens
aggtactttttttttttttttttaaagacagagtcttgctctgtcacccaggctggagtgcagtgagccgagatcgcgccatgcacaccagcctgggtgatagagcgagactccatctccaaaaaaaaacaaaaagagagagagaataggggaagactaagcaggaaggctgtgtctcccttccccacactgtattccaaccagacagctcccttctattttatatgttgggctagtatgaaaaacaattctgctaggaaaaaaaaaatttttttagaagtttgaaagctagtgatttgacccaagttcctcattttacagctggggaaactaaggcctagagagaggcaagtgatatttgtttcatggcagggctgggcttgaaatcctgcttttctgggtctgtc

SEQ ID NO: 10891 - DNA, 354 bp, Homo sapiens
ccgggcaggtaccaactgaagcagcacaatattctggcatctgttggagaagatgaagagggcatcaaccccttggttaagatctggaacctggagaagagagatggtggcaatccactctgcactcgaatcttccctgctattccaggaacagagccaactgttgtatcttgtttgactgtccatgaaaatctcaactttatggccattggtttcacagatggcagtgttacattgaacaaaggagacatcacccgggaccggcatagcaagacccagattttgcacaagggcaactatcctgtaactggattggcctttcgccaagcaggaaagaccactcacttgtttgtt

SEQ ID NO: 10892 - DNA, 411 bp, Homo sapiens
aggtacccaaattaactaaccttaaatgcaagacttagcagcaggtattatccatgttgaaccacagagttgtggttataggatgatctatccaggttgaaaaagaattctggccagcagtttgaagaagtgaaaatcaagattaggcacagaggcagagggtggtggggccacagggcggggaaggattccaatccatgagactgcagaaggggaagtgagcagcctctacccatacagactagggtctcatggatgccactggagagcattccagtctcactggatattggtagttcactaacttgtgtcagtcatgattgtgacctctgatatattgctatatttggttttcatttatacaaaagctgcgtcttttcttgatcccagtggtttggtgggcttttgggc

SEQ ID NO: 10893 - DNA, 314 bp, Homo sapiens
ccgggcaggtacgcgggaggaatgccatgttgatccaaggtgccgtttccctaaacctgtgtgtttgtggggcgctcatgaggcccctctctcctggtaaaaacccaaacgacccaggagagaaagatgtgcgtggcctgccagcgcactccacagaatctgtgaagtcaactggacagcagggaagaacagaagagaaggatggtgggctcgggaacgaggagaccctctgcgacctgcaagcccaggagtgccccgatcaggccgggcacaggaagaacatgtgtgccctccggattctgaagactgtcagc

SEQ ID NO: 10894 - DNA, 431 bp, Homo sapiens
aggtacgtattaccaaagaaaccaaaaactgcctttgactaaggggggtgttgaaagagaacttaaccttattaggaaaccctgacaaaatgatggaagactattgccttattttgcactatttgtgaatcatcttacactgcatttttttatgaatgctttattcaaaaggcagttcgctttacggtgaaaaagccttccaagattcaaagcagattcctctggtcttatattatatccttcttaaaaaccagagttcttaagtaacagtatattgaatggcatcacaaaacattttcatccttaatggatttctttaacaagtggttaaaaaaagtgtccaatcagccgggcgcagtggcttacacctgtaatcccaacactttgggaggccaaggcgggtcaaatacctgaggtcatgagttctcaac

SEQ ID NO: 10895 - DNA, 342 bp, Homo sapiens
ccgggcaggtaccattttagcaaacaacaacaacaacaacagaaactggatttctttttggtttaaactccatttgattgtctgtatcaatgatcacaggaaatgattaaatgtcgtgcatttaatgtaatttgggttatgaagctcatttgggttatgctcttcacttttctctgtaaaattacaacatgcagtatgcactttcccacgacagaattgtttatgtgttattatggcgtctttgcagacttgtaactttatcctagaacctcagtggtatgacccgctagcatgcatacttcatgggtctgtcattatagggcctttcaaatatcacctatc

SEQ ID NO: 10896 - DNA, 364 bp, Homo sapiens
  misc_feature 284: n = A,T,C or G
aggtactttgttaacctgggtccctgaatgagaggacatagagaatacagccaatctgaaaaaatctgacccttttaggctgggcacggtggctcacgccagtaatcccagcactctgagaggccaaggtaggtggatcacttgacgtcaggaatttgagaccagcctggccaacacgggaaaaccccatctctactagcattacaaaatatacagtggtgcatggtgggatgacacctgtgaatcccaactactcgtcaagacttgagggcacgaaaagcgcnaagatccatgggaggcggaaggaggttgctaatgaagccaagatagggcctattggagtgagatcaaggacgaaaaaagc

SEQ ID NO: 10897 - DNA, 413 bp, Homo sapiens
aggtacgcatttcctaagaatccagtagactccttcagacactgctcggataactgatagacagataaaaaatacagagattaccaaaattagtctgtaaactccatgaagaaagaaccgacaaccattttattccctgatgttatccccagtgggaaatgcataaccttggcgtgtaacactgacaagttatggaacagaacatattttaataatctgctatatcaaattgtaagagagtatcaaaaaatcatagctattttaatattaaataccaggcaaatgggtgtccccataagatctattctttttttttttattgagatggagtcttgctctttgacccagacttgagtgcagtggtacaaggtagtgggttcgctgcctgcccacccccaaatgccacacgccgt

SEQ ID NO: 10898 - DNA, 408 bp, Homo sapiens
ccgggcaggtaccagcgggctgtcctctaacagcgacggctgcacgctgggcacgctgggcacgctggcgggatgcacgggcctttgtcctgctgcctctgaggtagcagagtcggcacagggtggactgaggggcgtctcgcttttctgtccaccctctgagacagcagggacaggttcatttggcttctccaggtgcagcagcttgagtttgctctttggccctgatgctccagtctggttcttaatcttcttctcatagtccaggagttggcccagaaaattgaagtttggagatatagtaggtcttttttctttcacaaatctgtaagcttcatctaaagacatgtccatcctcttcatgatgtaggcgatagcgatggtggcggagcgggagatcccagctaa

SEQ ID NO: 10899 - DNA, 344 bp, Homo sapiens
aggtactaagagctggtccaggctcagccccaagtgtgccagctgcttcttagacgtggctccatttactcctcaccgcagaccttcctacagttccgtgggtgggaagtgctcagtgggtctcctcgctgggctgaatcaggggggcgcggagctgcgttgcttctggaggctccagaggaggatgggtttctgttctggactgttggtggacttcacttccttggagctgtgggactgagatcccccttcctggctggctgtctcagccaggggcctctctgcagcctgcacatgacctccgctcagggccagcgtcggggcatggaattctgttcacgttg

SEQ ID NO: 10900 - DNA, 434 bp, Homo sapiens
ccgggcaggtacaatcacgcagagtcagagcaggagtatgaggaagagcaagaacctcccaaagttgaaagcaaaccaaaggtcccccttaaaagtgccccaccacccatgaacttcactgatttactcaggctggctgagaaaaagcagtttgaaccagtggaaatcaaggtagtgaagaaatcagaagagcgacctatgaccgcagaagaacttagggagcgagaattccttgaacgaaagcataggagaaaaaaacttgagacagatggaaaactacctccaactgtgtccaaaaaggcaccctctcagaaagaaagtgtgggcacaaaacttagcaaaggttctggagacaggcatccttcttccaaaggaatgccccttcctcatgctgagaagaaatcaagacccagcatggccaatgagaaacacct

SEQ ID NO: 10901 - DNA, 350 bp, Homo sapiens
aaaccagcttttaagtgagctcagcatattataaaggaatgaaagcaattagagcgtggactctaaaggtaggtgagacttgctgttccacttagaaacatagaaacataggaaactaaggactcgatggggacatcaatagtaggatggcttttaagagggctgaagtgtgtaaatatacacattaagctttgcagcaactctgtgccaaatcgaagttgttgcagacctggaattttagtttggtaaaggataactgtagttattttttaaataaaatgattcattagaattctttggttctctcatgataatttagcaagtttgtctctttcagaaagaaaagtttc

SEQ ID NO: 10902 - DNA, 370 bp, Homo sapiens; identical to SEQ ID NO: 10731

SEQ ID NO: 10903 - DNA, 292 bp, Homo sapiens
aggtacgagtttcgtggcagcgcctccgctctgctagcccggggcccgggtcggcctaacgtcacttggctcggctgactcagatgacccggtttctagtgacgaagcaaaagtggggctttttcccttttctagtctgaagctctcaggaggaaagaaaaaaaaaagtctgtattctccagtctcccggggttgaactttgggtcaggaatcaggagggaggaagcaaagagcaggaggggcgcgagactgggccgcagcccgcgctcggaaggtggcgtgtacctgcccg

SEQ ID NO: 10904 - DNA, 361 bp, Homo sapiens
aggtacatatcagaggcattattgccacagtgaaacacaggaaatgacagacactttcggtgagaagacaatgacttagaaaagcagagcagagtggggacagatcacctgaggtcaggagttcaagaccagcctggccaacgtggtgaaaccctgtcttaactaataatacagaaaattagctgggcattgtggcgggcacctgtaatcccagctgctcgggagactgagacaggagaattgcttgaacccgggaggctgaggttgcagtgagccgagactgtgccactgcactccagcctgggtgacacagtaagactccgtcccacaaaaaaaataatagactaaaggttcctgcccg

SEQ ID NO: 10905 - DNA, 347 bp, Homo sapiens
  misc_feature 347: n = A,T,C or G
aggtacactgctgctgatagcaccaaaaggaggcttctttctctcaagccaatccttgatgtatcttcggacaatctgtccaatgatgagaggaaccacaacagtcataaaaagctgagaaaaaatagatgtgaaaggcacagaagaagatgaaccaagaaaaagcagcaggagcaggggtgttataacgatgcccaaaaaacttccaaaggctgaattaaatattgcagctgcctcatttccaccaactgccttggttaaaatcactgcagaagacacaggcggaggcatgcaacctactgtctgcaaaccttttaaaagccattcgttgatgggtgtgattgatn

SEQ ID NO: 10906 - DNA, 201 bp, Homo sapiens; identical to SEQ ID NO: 1534

SEQ ID NO: 10907 - DNA, 369 bp, Homo sapiens
ggcgcagtggctcacgcctgtaatcccagcactttggaaggccaaggcgggcggatcacaaggtcaggagatcgagaccatcctggctaacacagtgaaaccctgtctctactaaaaatacaataatagtgtattgcacatttttaaactgaaagtaaatttaaaatgtgcttctcacaaaaaataagtatttgaaatgatggattagcttgatgtaattacttcatattgttcataaatcagaacatcactctactctataaatatatgccaattataaattgtcaatttaaaataaaattaaaaaataaaaaattgtaaaattgttactaacatgagttacagctgtcaatcatactagtctataac

SEQ ID NO: 10908 - DNA, 320 bp, Homo sapiens
aggtacgtgggggagccagcgatgggtccaccttgcctttgttgttgttgttgtttttgtttcttgttttggtgactgagtgaagggacttgaccctggttctcccagcttgagcaggagcgtcactgcggtgatcagggaagctgcctggaccagctggcctggggcagccaccaccccattctctcgcccctcttgagaatccagcctgtggacccaggtgtgtcagcctgcagtcagaccacagtctgtctcgggctggtgctgggggtggcagaaagggggtcctgacgcagcccctgctcccccgagtctctcag

SEQ ID NO: 10909 - DNA, 413 bp, Homo sapiens
aggtacgcgggacccggaagcctgagcatcgcatcaccaaacactgcctttattcctatccataacccaggtagtttcccaggctctcctgttgctaccacggaccccatcacaaaatctgcatcccaagtggtaggactcaatcaaatggtgcctcaaattgagggaaacacagggacagtccctcagcctaccaatgtgaaggtagttcttccagcagctggcctctcagctgctcagccaccagcttcctaccccttaccaggctctccccttgctgccggcgtgttacccagccagaactccagtgtgctcagcacagcagcaacttctccccagccagcgagcccaagtatcagccaggcccaagccactgttccttcctgcagttcctaaccacaccccaagccctg

SEQ ID NO: 10910 - DNA, 349 bp, Homo sapiens
aaaccagcttttaagtgagctcagcatattataaaggaatgaaagcaattagagcgtggactctaaaggtaggtgagacttgctgttccacttagaaacatagaaacataggaaactaaggactcgatggggacatcaatagtaggatggcttttaagagggctgaagtgtgtaaatatacacattaagctttgcagcaactctgtgccaaatcgaagttgttgcagacctggaattttagtttggtaaaggataactgtagttattttttaaataaaatgattcattagaattctttggttctctcatgataatttagcaagtttgtctctttcagaaagaaaagttt

SEQ ID NO: 10911 - DNA, 387 bp, Homo sapiens
gagctcaccgggggcggcgaaaccgctttaagtgagctcagcatattataaaggaatgaaagcaattagagcgtggactctaaaggtaggtgagacttgctgttccacttagaaacatagaaacataggaaactaaggactcgatggggacatcaatagtaggatggcttttaagagggctgaagtgtgtaaatttacacattaagctttgcagcaactctgtgccaaatcgaagttgttgcagacctggaattttagtttggtaaaggataactgtggttattttttaaataaaatgattcattagaattctttggttctctcatgataatttagcaagtttgtctctttcagaaagaaaagtttaagtggggttaatgggtacct

SEQ ID NO: 10912 - DNA, 354 bp, Homo sapiens
aggtactgattgctcactgaaagactcagcacccccaatggtgcgcggaagccaggcgggcgattacaatccaattacctattgtcgactcagcccacacaagcttttctcctcctcttgcagggcatggggccaggctccactcccaaatgagactggccccctccacggttcagggtaacagaagggcctgtaggccctggtgaactgaatccagcacaggcctcccctgtaacacaacaggactgagcagaaccaaacacttcttccaactgactctgctccctgccctcaccatctcaaactctgattcccactccactcttcgaggtttctctcagctttttgacctgg

SEQ ID NO: 10913 - DNA, 355 bp, Homo sapiens
aggtactttttttttttttttttttttttgaaacatttgaaacaaatttattgatatagtttttttaagttaagttttacatctaacatttaaaatgatagaactaggtatagctggaaacaatgcctgtttattttcttacacagagaatgaattctttcttcccttaaaacagtgttgggtaatgttccagaaaagtaattacaggccagttagtaaatataccctgagatagtagaatgccagatagcaacagctatatgcctgccactactggttaatcagctacagaacagactgattttttgacttaatatggcatagggactccattaaggacagaatctgcatctta

SEQ ID NO: 10914 - DNA, 179 bp, Homo sapiens
gctctccgatgcccagccctcctggaaccacctcgcctgtgacgtaggtggagcgcgcactgcctccgggcccgtctttctcaattgggaccggaaaacgttgtcgctcatcctatgacgcgaaagtaaccgagactatcaggatccggagacggaaatgtccgaaggccgcagtacct

SEQ ID NO: 10915 - DNA, 441 bp, Homo sapiens
aggtactagataaaggaaagagcaaaacaaagtgcaggatcgagagaaaatcgattgcttgaaaaactgggtattttacttgctgcaagtcccgactgtgtcagctgatgagtttaacactatgacagcacagtcctcacctgcctgctcgctgctgtaatccccacactgttgtgtgccctatagcacctggcacacgggaagcgctcaagagatgtgtgtgaatgaaggagccacatcttgacttgcgacgcggagcagtaagctgcagttatttggtagcggtggaagaataaattctacctcctgcttgcctcgctgcagtggggatgagggggaggggactcacccagatgctgtattccccagacagctgacatgttcccaattaccacgaccagctgttcaggaacatcccggacgagagccaggcacatttga

SEQ ID NO: 10916 - DNA, 414 bp, Homo sapiens
attttcttctaacaccgacattgctgcagaagaatctgcggcggtctttagttggatccaagtctcaaatgtgcctggccctcgtccgggatgctcctgaacagctggtcctggaaattgggaacctgtcagctgtctggggaattcagcatctggctgagtcccctctccctcatccccactgcagcgaggcaagcaggaggtagaatttattcttccaccgctaccaaataactgcagcttactgctccgcgtcgcaagtcaagatgtggctccttcattcacacacatctcttgagcgcttcccgtgtgccaggtgctatagggcacacaacagtgtggggattacagcagcgagcaggcaggtgaggactgtgctgtcatagtgttaaactcatcagctgacacagtcgg

SEQ ID NO: 10917 - DNA, 354 bp, Homo sapiens
ccgggcaggtacatggcatcaggtgtgatcagatggtgtccatctggctttaggctttgccgctgaagattttaattcagtagtcagagtctcctctttgttccttctctcttctcatgacttctgcaggtggatatgctgggtgacaagaagagcatttgcagggtttctggttctagtgccttcattcttcccaccctggtaattgagttttctcttcaaccctgatctgggtagcccctttagctgctctaaagaaggaagtgagaacttctccacttgctgggagggtatcatctctgggggacaagggcaagacgcccagcttgcctgatccctttgatgccttctttc

SEQ ID NO: 10918 - DNA, 518 bp, Homo sapiens
ccgggcaggtactacatgagccagaataattgagcattttaacacagaatagtatttcaaagagctcaaagatgaagccgaggtttgatacctggctaccaggtgaatgatagtgcccctgacagaaaagaacatacagggaaaatccaagctaatatctaaaaaaagatacggaggtcttttctaagcatcttgaatttgggtgatggctgacagctgagtggaaatggaccatgaaatggtcatccaagcagccctggatctggggagctttggggttggagttagaacttttaaaatgcattaatgttaggtaagcaacataggatggtatctggaacttaacaggagtccataattgctgtcagaattattagcatagaattcggttttaaacattgactaaattgaatgggcgaggtgggggaggcatggcgccagttaaatagccaggagaggctggactggggacagaaaagtgtgcttgactgcacaagaaatcagagataatggtacct

SEQ ID NO: 10919 - DNA, 529 bp, Homo sapiens
aggtactctcagccatagccagtgcccgtccaagggctgcttttacttcattcactagggccacctgggcatctgtgccactccctgcagcagccaggcttgcgaggaacaggcgggccaaggcaggggtgtccttgtcttctgcatttctggggtattgtgggaagcaggaaggtccctaaaccaaaagcttagccacacctgcaagtccttctttgaatccagtttcaggaactgggcccaccagatgtaagactcgttagttttgtgcaaaatcaggggttaagcaaaataacccaaccataagtgaacccttcacccaaatcttcttgtctcaggtaaagaacgaaaagcggaataaggttgggtagggttaagtgacaatttaaaaagagttttttggcttgcacccctttgacactttttacttggtttttgtcccttttcccttcaagaagtgcccccgagttaccccccatttcttttttattcgtttttcttttccccaatccttccgaaggaccttccg

SEQ ID NO: 10920 - DNA, 483 bp, Homo sapiens
gtgcgcgatcactactatagggcaattgagctccccgcggtggcggccgcccgggcaggtactgtggtattaaaccatgaaccataagatctggtttacgacaagaaaactgaggtcctgaaaattgatcatgcacagctcttctgaagagctaagactggatgcaaggttcctgacttccaggccactgctctttccactttaccaggctgccaacaacctaagaatttcagttttggagtttacaattcgccaaggcgaaagatgtgctaacaaggatgttactgaaaagaattgggggtggcaagatcacctccctggttctttttttcttttgttctttccagtatttttctatacctgatggtttaatggttgtcagggatgaaccgacgacattagcacgtttggtaagacatttctcatttaaaacacccaggtgaaaccataaccaaggatactcgaagaagccaagttattcag

SEQ ID NO: 10921 - DNA, 370 bp, Homo sapiens
aggtacccattaaccccacttaaacttttctttctgaaagagacaaacttgctaaattatcatgagagaaccaaagaattctaatgaatcattttatttaaaaaataactacagttatcctttaccaaactaaaattccaggtctgcaacaacttcgatttggcacagagttgccgcaaagcttaatgtgtatatttacacacttcagccctcttaaaagccatcctactattgatgtccccatcgagtccttagtttcctatgtttctatgtttctaagtggaacagcaagtctcacctacctttagagtccacgctctaattgctttcattcctttataatatgctgagctcacttaaaagctggttt

SEQ ID NO: 10922 - DNA, 352 bp, Homo sapiens
ccgggcaggtacgcggtgagagaatgcaccctcgcagctctgcctgaataaacattaccaagactacaaggtgcctagcactctgccagaatcatgtgaatttcagaggaaaatactcgttcacacatctcaaggaacgcacaggctcgtgagggagcattcttgccaatgcacatggtaaatgcccaatcgatgtttccggaatgtcataaactgacaactacttcaggccttaacgcagtaggataaggatgataaagaaactcatttcaaattaactaaacaagtgcaaaagcccatactatagtaagttaggagaatcgaatggcgatacaacataatcccttatgca

SEQ ID NO: 10923 - DNA, 355 bp, Homo sapiens
ccgggcaggtacaccgcataggaaggactctcttactagatgagctagatattcaagaactctttatgagatcgtctcagactggtgactggacatggttgaaagagttttatcaaagactcattgatcagaagtggcagaggaagaaaaagagcaaagagcactggtatcaaaaggcaattctttccaagtttttatattacagtatcaatggtgatggagccgctcagcctgtctcatccaccgcagaacagcaggaatcgtccagttcagatcagacaaatgattcggaaggggcttcatggcctgctcccttcgaaatgccttcttcagtttctgaagatcccagtgcttc

SEQ ID NO: 10924 - DNA, 567 bp, Homo sapiens
  misc_feature 434, 435, 436: n = A,T,C or G
ccgggcaggtacctgatgcgctcccctgaaaacaaccttggccagagcaacccaagattacccaaaattgatggggaccttgtcttttgaaggtcccgcctggaagaatattcccggaaacaaagtgttaatcaagcttgaaaaacaaccggtgaatttcttcatttgccaaatgagggttcgaagggtcccatttttcattgaatgggacgggccgttcttaaaacttagtggaaatcccccggggcttgcaaggaaatttctattttaaaacctttatctgattacccggtccaaacctttgaaaggggggggcccccggttacccccaaacctttttgttttcccttttaaattgagggggtttaatttgccccccccctttgggcctttaaattaattggtttctatttagcttttgtttcccttattannnaaaaaattggttatattcctgtttaaccaaatttcccccacccaaattttcccatcccccggggtaacaataaaaaattttctaaagaacccagggtgggtggcatataattggaaggattcttttacctt

SEQ ID NO: 10925 - DNA, 624 bp, Homo sapiens
  misc_feature 473, 602, 603, 604, 609, 612, 613: n = A,T,C or G
ccgggcaggtacgcgggacttgcttatggctctaaccactatcttcatttccttcaagcgttacgactgtaacatgcctcttttctctactgttctttagaaaaccacattctggccagtggctctgtccggattcctaggtcatgcttcttgaatcggggggtctacagatcgcgcccgtcttcatccaggatgccggcaactacacctgctatgcggccaacacagagggctccctgaatgcatcggccacgctcactgtgtggagtaaggagcagccctcgcacgtcggccttctgttagccacggtttaatcatcacgtcatcgtgtgctttggggatgtcagcatgcccttgggcttgctaatttaatcaaaagagaatgattatttttacaactaatttatagaaatctgttgagaaattaaattttcaatgtctaaaagaatacctagaaaatgtattcagagatntaataagggtattgcaggagagacgaaagattgactttggtaagtcagtggagatattacacaaaactagctcaaatcacaaaattgatagggtggttaattttataagcattttattagaaaaaaaannnaatanaannaaaagttcctt

SEQ ID NO: 10926 - DNA, 420 bp, Homo sapiens
ggagaagggccttccaaccctgagctctgtgagaggaaatctcatcagcagcaaaccctcacatgtgacctggaaaaaaggaggtatcttttaatagacaatgtctggatctttagtgagggtgatttagatataatatgtccgtttactttcaaaagggaaaaagtatgggtcactcagaaattcctgctgtagcttagatcatcgatcaagttcacagcgagtccgtaatttccaaaattcagacagtttcatcttagccaaaacatagtgtctgcagtgtgggaacgctgaagacagccggcccaacaccctgctcagggaatcccaaagcctccctgcgatcaggagaaggaagcctagatttctaggttagtgcagcccactagcaagagaattaagtctcggtgtcaagctctg

SEQ ID NO: 10927 - DNA, 771 bp, Homo sapiens
ccgggcaggtacagattagtgtgcacagagatctctgtagaaagagtagctgccctttctcagggcagatgatgctttgagaacatactttggccattacccccagctttgaggaaaatgggctttggatgattattttatgttttagggacccccaacctcaggcaattcctacctcttcacctgaccctgcccccacttgccataaaacttagctaagttttgttttgtttttcagcgttaatgtaaaggggcagcagtgccaaaatataatcagagataaagcttaggtcaaagttcatagagttcccatgaactatatgactggccacacaggatcttttgtatttaaggattctgagattttgcttgagcaggattagataaggctgttctttaaatgtctgaaatggaacagatttcaaaaaaaaaccccacaatctagggtgggaacaaggaaggaaagatgtgaataggctgatgggcaaaaaaccaatttacccatcagttccagccttctctcaagagaggcaaagaaaggagatacagtggagacatctgtgaagttttctccactggaaaactgctactatctgtttttatatttctggtaaaatatatgaggcttcagaactaaaaattaaaacctctttgtgtcccttggtcctggaacattaagttcctttttaagaaaccaaaatcaaactttaccgaaagatttgatgtatgtaatacatatagcagctcttgaagttatatatcatagcaatt

SEQ ID NO: 10928 - DNA, 360 bp, Homo sapiens
  misc_feature 360: n = A,T,C or G
aggtacgcggggagctctagtccaggaggctgagacttcgagagggacttagagaaggcagacgcatcccgaactcgctggaggacaaggctcagctcttgccaggccaaattgagacatgtctgacacaagcgagagtggtgcaggtctaactcgcttccaggctgaagcttcagaaaaggacagtagctcgatgatgcagactctgttgacagtgacccagaatgtggaggtcccagagacaccgaaggcctcaaaggcactggaggtctcagaggatgtgaaggtctcaaaagcctctggggtctcaaaggccacagaggtctcaaagaccccagaggctcgggaggcacctgccan

SEQ ID NO: 10929 - DNA, 535 bp, Homo sapiens
aggtactactcttttccttatatgatatatgaagaaacagaggctcagagaagttaggcactcactctgagtaaaatgccaggagcagacccacgtggtgaggaactgaggcctcttaccaagagccatgggagtgaacctcgtggtggaattctttttgcccccaagtcaaaaccttaaaaattaattgattgccccaattccaaccattcttaatcccaatttttttgtaagaaagaacctctgaaaaacagtaaacccatcttcggggtgaaggctcacctcccatggggttgttcattgaacattttcagtccaaccttgttgttgaacaattaaattaaaattatgttctgacttgtttttaaagttccacttatggttggtttggaaatataaattttaatttaaccaccaggttaaccaggaataaaccttaaataataccttttgttccaccaccaattttaacctaaagaccgggatagaagtccctgggaaacttcaaaaaccctataggctttaattcttgggc

SEQ ID NO: 10930 - DNA, 414 bp, Homo sapiens
ccgggcaggtacaaactcgggcctcactttttttctgggacagctgtttgccctgtgttacagaatgcatgtgaggactagatatttaaacatatgatgcctggccacagagaaggtatttgtaattggattctcctggacagcccagcctctgaagttctagaattaggtgcctcctttgcccaaaggctatcagctattggaggggagggtggcagtatgtccctcactgggtagctgtgaacactaactgacttcaccagtgtaaagtgcctggcacagggcctggcacagaggaagccagagtcaatgttgtctagtatcactttggaaggagaataagtctatgaaatgcattaaactcagcagggaaagtcctaaggagtagtttctccaggggccacagaagaccct

SEQ ID NO: 10931 - DNA, 454 bp, Homo sapiens
  misc_feature 185, 311, 312: n = A,T,C or G
aggtacttttgcttggattctttaagagggtgggggtcgggagaggcttggcagcataaaggcaggccgctctgggctgaccgtgctcctgacctggatgcagaactgtggaagttgcccctcctttgttctgcttcctgcttcccttctttttagcccgttgtggtcccagggggaagaggganttgggtgtttccggtgagccacaatgggcccatggtcaccagtccagccagccctttctgggcagttttccttgaagggaccagcaaagtttttgaacaggatgatatttaccccccaggcttggnnggcttaggagcagtaggaaaccagtttggttttgttgttgcctgccccattttggacagttattcccttaattccctggacccccacttgtgaagccatttaaacagtcccccaaaatacattaatctttctaggacagttt

SEQ ID NO: 10932 - DNA, 402 bp, Homo sapiens
aggtactactgctgtcccacatgctctccaggatcctgaagaaaacttctgtcaatggctccatccatttcctggctcctttttgtgaaaacagggtgactatccattagtcaacacccattgggaggctgaggcagcagaatcgcttgaacccgggcagcggagattgcagtgagcagagattgcaccattgaactccagcctgggcgatgagtgaaattccatctcttccagggtggtgcctcctttccttccctgctggtttcttggcacaaggattctggaagactcaggctgtttctcgttccatacaaaatggctgaccaagtccattactgggagctctgcccatccagaagttttcctctcgctcggaatacagccactgaaggaggtaaaaga

SEQ ID NO: 10933 - DNA, 400 bp, Homo sapiens
gcggcatcttgcgtcatcgatgagcctcgccctgtgcctggtcccgcttgtgagggaaggacattagaaaatgaattgatgtgttccttaaaggatgggcaggaaaacagatcctgttgtggatatttatttgaacgggattacagatttgaaatgaagtcacaaagtgagcattaccaatgagaggaaaacagacgagaaaatcttgatggcttcacaagacatgcaacaaacaaaatggaatactgtgatgacatgaggcagccaagctggggaggagataaccacggggcagagggtcaggattctggccctgctgcctaaactgtgcgttcataaccaaatcatttcatatttctaaccctcaaaacaaagctgttgtaatatctgatctctacgg

SEQ ID NO: 10934 - DNA, 351 bp, Homo sapiens
ccgggcaggtaccccccgaatggccttgtgcctccaaaagcctcacgctgcaactttgctgctcctgtctgttgcccagagaggcctcacacaggcctcagaaatgtttcttgtcacacaaagcttttggtagccgattccaagcgagggatttaatccttacatttttgcccatttggctccaaggaaggcttattagacctgtttttttgttgttgttgtttttttttcttaaaaacaaaatgaatgaatgaatgaaaagagaagcaatggtgagccctctcctgctggggcgccctgggtgggccttgcccgtcctgcagcagagaaatcagtcagcagcgaagagct

SEQ ID NO: 10935 - DNA, 429 bp, Homo sapiens
ggcatttctcccagggatctctgtgcttccttttgtgcttcctgtgtgtgtggatatttaaaggggctggaaatgtgcaaaaacatgtcactacttagacattatattgtcatcttgctgtttctagtgatgttaattatttccatttcagcaagatgtgtggccctcagatgggtaaaagtcagcagcccttttcttaattttctcaaccctatgtattcaatcagggtcccttccccaaccaatggcagaaatcttttccctgggtctttccctttggggcttgccaaccccacaccaaaaatccttcccccctttttggtttttttcttgaattccccaaccttttttttggggtaaactttggacctatttttacttttcttggtcccccccgccgtttaccctttggcccccggggcccggtct

SEQ ID NO: 10936 - DNA, 482 bp, Homo sapiens
ccgggcaggtacataagatttatagatttgatgattgatgatagatagatgatatagttacataatagctaaactagataaccgatgcacaacagagaaataacagatgatatacatagataataaatgatcggtattcatagataagagatagattagctgggtgcagtggctcacgcctgtcatcccagcattttgggaggccaaggcaggcggatcatgagttcaggagttcaagaccagcctggccaacatggtgcaatcttgtctctactaaagatacaaaaaattagctggacatggtagtgtgcacctgtaatcccagctactcgggaagctgaggcaggagaagcgcttcaaccagggaggtggaggttgcagtgagccaagatcacagcattgggctccagccttggagacagggcaagactccatctcacttgataaggtcacgttgagtcccagtgcatctcgtaatacct

SEQ ID NO: 10937 - DNA, 416 bp, Homo sapiens
ccgggcaggtacttttggtgattctaaggtggatccagggttgagaaccactactgtaattttatctggtcattgccaccaacttgactgaatcctctctcttccccacccccaatctattttaaacagcctgtgtcttcccaaggctatagtttcccaagttttcgaatttctgtctatatttcttccaaagtagatttggggaaggaggcagaaaccctggtaatttaccatgttggcaggaactagaattctccctcatgttgtttgtcttcacaggaggtctcagcatgaaacagcagcagtggtgtgggatgactgccaaaatgggcaccgtgttgtcaggggtcttcaccatcatggccgtagacatgtatctcatctttgaacagaaacacctaaggaatggcagttgc

SEQ ID NO: 10938 - DNA, 174 bp, Homo sapiens
ccggcaggtaccacttgggattcctggggtgtattgatatgcggagccagcagggctggcgatactttcaccagcctctttctgactctgtctccatgtcccaaggccacagaggggacgaggcagagagcagaccgggggcactggccctcagaggaacttttggctgcattg

SEQ ID NO: 10939 - DNA, 256 bp, Homo sapiens
ccgggcaggtactcattactcctttgagggaggtctgaggggtgttgtcacctgtgcctcttgtgtccagctaagaaccgggcgccgcgagaggtctgggagggcctgagcccaggggaactgccattcctgagtcagcatgcccagggctgctaatgaaatccagatgttagacagaaaacaatcatcgcccccacccatctggcagctcgggtttcttggagattgcaaaaaaaaaaaaaaaaaaaaagtacct

SEQ ID NO: 10940 - DNA, 666 bp, Homo sapiens
  misc_feature 527, 528, 529, 530, 532, 533, 534, 535, 536, 537, 538: n = A,T,C or G
ccgggcaggtacagagctactgtcttcatcttttattgagagccaaaccaggtcttatctaaatgacaaaaaatattacagctaacaaaagcaaaagtggtgcttttatcaaggaaaccaatatttaaaggttaatttagatagatatataaccggaaagacatttattagcatgctgaaaataacactgatgacactcagaatacacctggtctcttactttatttaacagagaaccatggcatccaggtaaccagttccaacttttcctaccattgattttatggttttctaaacaattatctttttccctaagtgggctagaaactctttcatttgaaagacctgagtttaatggcacctataaataggctcatataaaaatgtagtaaattgcaacaaatacattggcaccacaggaagtaagctctggagttagatgtgaacataataatattgctgtcaccaaaaagggggagaactctactggcagaaaatgtcccttagcatcctttgagatgtactcnnnntnnnnnnntttttttttgagacagagtcttgctctgttgcccaggcgggagtgcagtggcatgatctcgggttaccacaaactccgccttctgggttcaaatgattcttctgcctcaacctctccccgcgtacctt

SEQ ID NO: 10941 - DNA, 349 bp, Homo sapiens; identical to SEQ ID NO: 1772

SEQ ID NO: 10942 - DNA, 154 bp, Homo sapiens
gcgttgcggcgcgcgcggtccatcgcatggcgcaggcggtcgcgcagcaggcgccggttcaggaggcccgtcagctggtcgcgctggaagccgtcggcgccgtccagcggcgcgcgcgcgtccgtcagcggcgcggccagggccctggcgactt

SEQ ID NO: 10943 - DNA, 164 bp, Homo sapiens
ttgtttttctccacatcatagccggcggcagccaacgcttttttcagagcagccagagaaactccgctacgctctttagaggcggccacagccttggtgatgagctctgacaccgggggaccggacgccttacgaggcgtacctgcccgggcgggcggttttaa

SEQ ID NO: 10944 - DNA, 433 bp, Homo sapiens
ccgggcaggtactttttttttttttttttcttttttgggggagagacaaggtcaccctatgttgtccaggctggtctcaaactcctgagctcaagggatccccctgcctcagcctcccaaaacgttgggattacaggctgagtcaccatgcctggcttaaattaacttttaggttcaataaatcccaataaaaatcccagcagactttttttttttgtggaaattgacacgtagattctaaaatttaaatggaaatgaaaggactaaaaagaacaaaagacaaacttgaaaaataggaatttggaggacttcagttaccaaatatcaaggtattacaaagctacggttatttaaaaagtaaaagcaacagcatggtattggtgcaagcataaaaaaatagagaaagaaaaacagttttataccccgcgtacct

SEQ ID NO: 10945 - DNA, 773 bp, Homo sapiens
atgagaagaagaaggggcccaaagtcaccgtcaaggtgtattttgacctacgaattggagatgaagatgtaggccgggtgatctttggtctcttcggaaagactgttccaaaaacagtggataattttgtggccttagctacaggagagaaaggatttggctacaaaaacagcaaattccatcgtgtaatcaaggacttcatgatccagggcggagacttcaccaggggagatggcacaggaggaaagagcatctacggtgagcgcttccccgatgagaacttcaaactgaagcactacgggcctggctgggtgagcatggccaacgcaggcaaagacaccaacggcccccagttcttcatcacgacagtcaagacagcctggctagatggcaagcatgtggtgtttggcaaagttctagagggcatggaggtggtgcggaaggtggagagcaccaagacaggcagccgggataaacccctgaaggatgtgatcatcgcagactgcggcaagatcgaagtggagaagccctttgccatcgccaaggagtagggcacagggacatctttctttgagtgaccgtctgtgcaagccctgtagtccgccacagggctctgaactgcactggccccggtgctggcatctggtggagcggacccacttcccttacattccacaggcccatggactcacttttgtaacaaacttctaccaacacttgccaataaaaaaaaatggggtttttttttttttaataaaaaaaaaaaaaaaaaa

SEQ ID NO: 10946 - DNA, 503 bp, Homo sapiens
aggtaccagtgcgaatcatcgggctatccaggtccgagatcctagtctcctgtcggctctgaggaggatggatccttctgcggatacatgggacctcttctcacctttaatatcattatggataaacaggttttacatttatttggggctttgctgttagcatttagccctttggatttgtgtccagatttgtcatcaaagaccgcagggcaaagaaacttaacaggaaaaaatcttgtttccaaaaagcagcctcaaggaatttgtatgaccaaaatggtttatggtcttccctttaaagaagaaagaacatttttttgtggtctggaaggggaaaaaattttttttttgggttccccaaaaatgggaaaccagtcaaaaagggactcctctcaaacatattttttttttgaaaacaaattaaacacacccttgtgaacatttcttgggtgggccatttttatttattttctaagaaaatattttatccctcccgggttatt

SEQ ID NO: 10947 - DNA, 436 bp, Homo sapiens
ccgggcaggtacattagaataaccttttcaaaaatatgcaatttctgtccttgaagcctagggagtgggatgcagccacattaagactcatgattaagcaccttattgtgttaatcatgatataaagagccttgtataacaccaaaagccgtagatcgcgcccactgcacttttagcactgtggtgacaagaagtgcggatttcctgtcccgctcgccgcccaaaaaaaaaagggaggaagggtctaacccctgtcaaggagggtgtgatgaagagaagactaggtgggctttggaattcttttgtgggttgccacattgtggtaatttgttggggccccacaggtgttcctgggtgaaaaggatagagtgagggcaggggagggcccttttttctttcatcatatgggggggttgaagtggttgggggttgccta

SEQ ID NO: 10948 - DNA, 403 bp, Homo sapiens
ccgggcaggactttatagtttaggctggacattggaaaaaaaaaaagccagaacaacatgtaatagataatatgattggctgcacacttccagactgatgaatgatgaatgtgatggactattgtatggagcacatcttcagcaagagggggaaatactcatcatttttggccagcagttgtttgatcaccaaacatcatgccagaatactcagcaaaccttcttagctcttgagaagtcaaagtccgggggaatttattcctggcaattttaattggaccccttatgtgagagcagcggctacccagctggggtggtggagcgaacccgtcactagtggacatgcagtggcagagctcctggtaatcaccactacagtcaagctgcagtctctgtcaccacg

SEQ ID NO: 10949 - DNA, 472 bp, Homo sapiens
aggtacaaaagaaatggctctcacttcctggattggcaccagacatcctaccagctgcaattacatcattttttatctatcttctgcttttactttgtgtagggtagggatggggacttacaaatgggccaaagacacttcaacctcaaaaccaaagagaaatccctgcttgcagagatacaaagaaagtaactctccctcttatgaaaagcaaccaggaactctactccagttatgagggccactgatggtgtgggagagctatcaagaagattcttcatagacgtggtgcaaagacagtgagaacccgggaaatcacattcatgggacacttgctcttaccgtcatcaccctctattctatctcaactttggccccatcaaatctaatgataaacaaaagaaggtaattacatgtagaaaatcaaagtgaatgggaatgtggtggtgtgaacatcccgcgtacctgcccg

SEQ ID NO: 10950 - DNA, 716 bp, Homo sapiens
  misc_feature 382, 388, 389, 435: n = A,T,C or G
cacccgccggtgggcgggcccgaggtaacgccggggggtttcctttaaaaagaaggttaagaagcaaacggtgcctttaggggaagccagaagaaagaagggaagaaaaggccagccattctttgccctgggaatgaaggcccagggtggaacaacaagaaaagaagaaaagcccccaacttattcctcaaatttaaaatcctttttacaaaccttcttctttggcaaaggggtttcccccttgggtttggtggaaaaaaattaccattggaagaattaaaaattcaatggaaagggccacaactttattcaattccccttcccctttccttggcttatggccaacaaaagtatttttcccttggggggcctttgggaaccnctggtnnttttcaaaccaatggaggaaagggccctttaatttttggaaccttntttatttggccttaggaaaaggaaatggaaggggcctttttctttgggggaaattaaggggcctcaccaagaaaaagttttccccttgggtttggaaactccggccggaaccttattcggaaaggcccccactttccccctttagggggcaccacaaggtgggttggccctccacctttttccccgggcttgggtccaaaaattgggccccaattccttatttcgaaaggttgtgggtttccccaaaggtgggttttccttgtgaatattttggggggttc

SEQ ID NO: 10951 - DNA, 389 bp, Homo sapiens
aggtacgcgggatcactcaatttctctgaggacacagataggatggggtgtctgtgttatttgtgggatacagagatgaaagaggggtgggatccacactgagagagtggagagtgacatgtgctggacactgtccatgaagcactgagcagaagctggaggcacaacgcaccagacactcacagcaaggatggagctgaaaacataacccactctgtcctggaggcactgggaagcctagagaaggctgtgagccaaggagggagggtcttcctttggcatgggatggggatgaagtaaggagagggactggaccccctggaagctgattcactatggggggaggtgtattgaagtcctccagacaaccctcagatttgatgatttcc

SEQ ID NO: 10952 - DNA, 394 bp, Homo sapiens
ccgggcaggtacagggagttgtaggtgagcagccgctccagcagcgagtatcccagtccatgcttctgggtcaggggagaacgcaccacaggccccagctgccgagggtctcctgccagcaccagctgccctcctggatcacctgttccctttacttccatcagccctgctatagctaccagactctcaggctccatgcagtggccagcctcatcgatgaagatgtgtgtgaagtgatcaatgggaaactgggccgagaccaacctgccggcagtgatgagggtggcaattaagacccggtattcctgcagcttcttcttggcgggaaatacatactcccccttctttgcgtcccagttgcagcagggcttgatgtcctcaagtacctcgggcg

SEQ ID NO: 10953 - DNA, 773 bp, Homo sapiens
  misc_feature 107: n = A,T,C or G
caacaatgacaccactttataaaaagaatgagacgaccaataattctttaccaaacagtgttaagacatatataagaccttttaattaataaaatgatgaagtaganacatacacgtaggcgttggaacaattataggagcgcattggagctctaccgcggaggcggccgcccgggcaggtacatgggactacaggcacgccccaccatgcccatctcatttttgtatttttagtagagacagggttttcacacatcgtttggaccaaggatagactctatgatactcattgaaccctcatcgaataccgtccaccatctatgggccatcccaaaaggtggctgggaaaccaacaagccgtgaagcccacccacacccttgggcaccatcaaattgtatttcctacttttaaagagaagaagtaggaaaaaatcctaaatgcaggtaagtgactctacaaacaattataatttcttaaattgttacaaacttctttatgaacccttttaagtcccacaaaagtgggaaaaacaaaaaattgtgcaaattttttgccacattaaataataaagcgcttgtaattgaaaagccaattaacgaaacaaaattggaaaaccagggaaagaaccagagtgccaacaatttttctgagggtaaaaaaaagggtccaaaataaaaaatgtttggaaggaacctctttattaaaagacccttacttaattgcgctcaggccttattaatattatctttgggggttgggggttgaaaagaag

SEQ ID NO: 10954 - DNA, 185 bp, Homo sapiens
atcctgactaccaggatccatgagcttaaacaggccaaaatgagcacagtcatggataccgttggccggaggcttcgggactccctgggccgaactgtggacctggggctgacaggcaaccatggagttgtgcaccccagtcttgcggacagtgccaacaagtttgaggagaacacctactgctt

SEQ ID NO: 10955 - DNA, 422 bp, Homo sapiens
aggtacatagtcttcaagtttcaaaaatctcttcctataatttgattccaaatgcttagcaaaatcaaagtcacagtctcaaatttgaatgtatgtccccagcgtcattcctagtatcacattttatactaatcagaaaatcaaaagccacactaagtaatgtaaagagagaggaattaataccaggacttggttacacggtattgtcaagctgaaggaggaaaaatggaatgctgagctcacacacagataaatgtctgcaggaagcaactcacctgctaagtctgttggcacagaagggaacaggtgggctttatgaaacaaaagagcacagaggagggcgctgtgatgctggagcttaaacttacatagctggtgcttatctcttggagggagagttttttcctgctgatgctgaaaaa

SEQ ID NO: 10956 - DNA, 359 bp, Homo sapiens
aggtacttacgttgcctcgtgtcaccaaaattggtgtggctgctgtggtgcggggggctgcactgatggcaccccttcctgtcttcatcaagcagctgcccttctgccgctccaatatcctttcccattcctactgcctacaccaagatgtcatgaagctggcctgtgatgatatccgggtcaatgtcgtctatggccttatcgtcatcatctccgccattagcctggactcacttctcatctccttctcatatctgcttattcttaagactgtgttgggcttgacacgtgaagcccaggccaaggcatttggcacttgcgtctctcatgtgtgtgctgtgttcatattctatgtacct

SEQ ID NO: 10957 - DNA, 384 bp, Homo sapiens
ccgggcaggtacgggggacctccttcagtggctgtattccgagcgagaggaaaacttctggatgggcagagctcccagtaatggacttggtcagccattttgtatggaacgagaaacagcctgagactactactgctattcagtcttccagaatccttgtgccaagaaaccagcagggaaggaaaggaggcaccaccctggaagagatggaatttcactcatcgcccaggctggagttcaatggtgcaatctctgctcactgcaatctccgctgcccgggttcaagcgattctgctgcctcagcctcccaagagccaggaaatggatggagccattgacagaagttttcttcaggatcctggagagcatgtgggacagcagtaa

SEQ ID NO: 10958 - DNA, 119 bp, Homo sapiens
gggctggcgcggtgcatcgtgggcactgtagtttccgccgcgtttatggccgcgttaagtctgagtgccgctttgagttgttgaatgaagtgaacttcatttgtcagcgttcggtacct

SEQ ID NO: 10959 - DNA, 260 bp, Homo sapiens
aggtacgccaaaggatccgatttgcatagcggagctccagctgttgtgggaagagaggaccagccggcaacttttatccagctctaaactttatttcctcccagaagacactccccagggcagaaatagcgaccatggcgaggatgaagtcattgctgtttccgaaaaggtgattgtgaagcttgaagacctggtcaagtgggtacgcgggataccaagtttatataatttgaaaaaaaaaaaaaaaaagtacctgcccg

SEQ ID NO: 10960 - DNA, 367 bp, Homo sapiens
ccgggcaggtacgtttgctcatacacgcacatccaaaagcctgtgcctcattcctggccatgggtgaggacttggtctgtcacggctgatgaggactcccacaaccggccaagttatgtcttattatacacccccagaaagagagaaagctgccttctggaggactgattccacatgctatattcagctgagttgatttctgtgtctatttcaacccataacctgaagaatgatcaccttattccttattcattaattttcttgattaatagggaaacttgggaatagctataaagtaaaacttgggtggaacctggggccctggcatcacacaagtgtgattaggatggtcaaggtcatcaggagt

SEQ ID NO: 10961 - DNA, 407 bp, Homo sapiens
  misc_feature 407: n = A,T,C or G
ccgggcaggtactgcttaaaaggcatgtataactaagtcatatcaaaactaaaatgacaaatgggttattttcaacagaacactttgaaaggaaaaagaaaacaaacaagaactttaggatattctttttgaaggcaactgcatgatgctagattgtgtccacggactagatttctaaaaggccatctaaaatacatttttaaatacttattcctttcacaggtaatatcttacgaagtttgattatttttgaattgtcataatatggacttaatatgggaggaaggtagttccaaaatgacagaagtaatcgcttccacatcacttttgtttttctatttacatatacaaacacatttttctcttgtcacaatagtatctgaaacattaagaggtgctcataaatn

SEQ ID NO: 10962 - DNA, 426 bp, Homo sapiens
aggtaccattctctaactccgtgtgtgatgaaaacgcctccttttctgaccttcaaagtcccctgtagagaccatgcatgctctaagccttagggagtgagaccaacacccatccctgcccagccaacagtggccggggcttgtcttatgtttccatctgttttctttcgtggcattcaatttcatttttttccttttcattttcatgttattttcattattggcaaagaaaatcaaaatgtttatagccaaataacaaatgtgccatgtaaaagtaagtctggacttaagagtttaaaatttttaaacatcagtttccaagtttatatcatattaatacatttcagtggataatttatttaaaaaaaaaactatgccttaatatcccttatttgcaatattcagtatcaaattagagcattttga

SEQ ID NO: 10963 - DNA, 467 bp, Homo sapiens
aggtactttcacttttgtgaataattttattttccaaccatggaagcatcatcgtgaggttgaaagaggatcattcttggaaaatacaattacttaacagttatgtgacctgggacaagttgaagcctaaatgtcctcatccataaaatggaaacttaagtaaaccctcataaggaatgaacgttagtgttgttggacaacttgtttggacccagaagtgggggcaagtgaaaaaaaattgatggcacatttcttggaaattaatcctttatagttcttctaatgggtgggggaagaatcttgaaaaagcccgttttttctttttcccactttccccattttttggtggttatggtattcttgccctcccacttgattcttgccacagggtgaaaggggaaagttgggtttgggtaaacctcttcttggggcacctcaagggattcttcttaccactttggggtagc

SEQ ID NO: 10964 - DNA, 509 bp, Homo sapiens
aggtacacctgaagccggccctgattttcataattctcactcaggttattcatggccattaaggctttttccttaatgtgtggatcagttttgttgatcatgtttgcaataattgggaggcctcccaatttgcggattgtctcttgattgcatgaataattggcattgttgctcagagtgagcaaagctacctgttggatgaaaggatcatcagatttctgaagcaaggcaaggaccttcctgagatcgcggacacccagaatctcatcaatttcataaggaaaggggcgcttctgcatggcaacgggtcttcttcccctccctctgcgctgggtctcgggctcagagtctgaatctgactctgtgtcagtccacccggactccccttcctcagaatcagggacctctgccaggaaagcctgtccgccattagcagaggctgcagcagctgctgcagccccatctccaggacggaagcccatccccagttcgtctacttcaactttgct

SEQ ID NO: 10965 - DNA, 464 bp, Homo sapiens
ccgggcaggtacttttttatttcagatccatataattgaactattttgtctagtttttcctacctttcttctccacacttctgctaaagggatccttctaaaacccaagtataatgaccccgcgtacttcttgcccttgtagaatttcctgaggttttctttttggagtctgggttaataacatgtgagaacacgggcaatggattttcggacgactcggatcttatagagctttggaggccgcaccgtcctgtcacttttgggcgacgcgcatctggtgacagactccacctttcagggtcgtcccaactggtttcagcagcttccttacttttttttttccccgcgaaagattcttctaggcctttgaatctttggccccatttgttggcacaaaagctcggacaaacgcccgggctggaccgttcccttcgtgttacactttggtccggttttaagaaact

SEQ ID NO: 10966 - DNA, 328 bp, Homo sapiens
ggcatttctcccagggatctctgtgcttccttttgtgcttcctgtgtgtgtggatatttaaaggggctggaaatgtgcaaaaacatgtcactacttagacattatattgtcatcttgctgtttttagtgatgttaattatctccatttcagcagatgtgtggcctcagatggtaaagtcagcagcctttcttatttctcacctctgtatcatcaggtccttcccaccatgcagatcttcctggtctccctcggctgcagccacacaaatctcccctctgtttttctgatgccagcttctcggcacttgctatttctccccgcgtacct

SEQ ID NO: 10967 - DNA, 476 bp, Homo sapiens
ccgggcaggtacgcgggggttctcttaaaaggcagtgtgggaagacacttgacagagtgttttgagaaagaagtggtgggacgtcactgtctgtggaaaatttcaaggaaaactgaaggatcattgagtatgaacagtgtggtcagaatttgagtacactcttgattgttttcaagtgagcttttaattggtagggaaaaaatctgttcatttctcagtgattcatttaatttgttcacaagctcacaagaaattgtttcttaacaggtgattctgcaggccattcaattgatttattttttgggttgtttacttggcttactttccttgggggaatccggattttgaatgttgggctgggtttttttggcccccccttttgtcttgccaaaaagtgggttttaattaaagggtattccctttctacacactcaactcccgcaccccttgcaaccaaaaaaggagtgtaagtaaag

SEQ ID NO: 10968 - DNA, 433 bp, Homo sapiens
aggtaccatggacttcaaagattgggaacaggtgggaattgccttaaaacaagtttgtaaggaaggaaaatttatccccctaacagcctggtcaaactgggctatagttaaagcagcctcggaaccgtttcaatcggaaaatgaggcttatcctccagcagaaagaatttctgcagaggaaggtggtgatgctgctgaaggaggagaggatagtgaagaagattttgaggaaaatacagacaaacctggagatgagttaatttcttttgaggagcacgtgggaccttcagctgctcctaaaatagagaagccatatatgccaagatgtttaaaacaaagaagggccttgaggagcagtcggctccttattgggatcatccggagtggccgtctccaattaaagcaatgtagcttggatccttgtaggtttgaa

SEQ ID NO: 10969 - DNA, 164 bp, Homo sapiens; identical to SEQ ID NO: 1800

SEQ ID NO: 10970 - DNA, 470 bp, Homo sapiens
ccgggcaggtacgcgggatcaaaatgttaagtcaaatctgtaatactttggctaaaattcataaagtaagccctagagaaaatacttgaccaccaaatttttgcccaactatcatcacctcccttcccccgcctctgttcttgccttttgacatctacatggaagacaagttctttacagcaaatggtaagaggcaggtgacctggtgtgtttgctgtgttgtagttcattgcctgtggcttgggactccttttttaatggagagactagctgtgcaggtgtgtgttggatagggataaagtgctcacccctgccctctctacagtagttggtggtagatttctctctcattttgcctcataatcactttcgagtgcatgtatttacctaagggctgtagctctgtgggatgctaccagcatattggactgacagaaattgattaccttgccactccaacctacgtacct

SEQ ID NO: 10971 - DNA, 421 bp, Homo sapiens
ccgggcaggtacaaactcgggcctcactttttttctgggacagctgtttgccctgtgttacagaatgcatgtgaggactagatatttaaacatatgatgcctggccacagagaaggtatttgtaattggattcttctggaccagccccaacctttgaagttctagaattaggtgccccctttgcccaaaggctatcagctattggaggggagggtggcagtatgtccctcactgggtagcctgtgaacactaactgacttcaccagtgtaaagtgcctggcacagggccctggcacaataagaagccctagtcaaatggttgttctaatttcacttttgttaaggttgaatagcttttataaatgcatttattcttcatcatgggaaggtcctaaaggatttgtttttctttggggttttt

SEQ ID NO: 10972 - DNA, 412 bp, Homo sapiens
aggtacgcgggggaaacaaatcaaatgtttgttctcaaattcttactctgtcatttattattctccatgtttttgtaactgcttccttggagatatttaaacataaatatatacagagagggtgaagatggaggagtgctttttacagttcacagttggcttttttcatgtgtgacaggtttttgctgtgttgcccaggctggagtgcaatgccacaatcttggctcactgcagcctcaacttcccgggctcaatcgatcccccacctcagcctcccgagtagcaaggactacaggcgcacaccaccacacctagctaatttttgtatcttttgtagagacagggtttcaccatgttgtccaggctggtcttgaactcttgggctcaattggtcctagcacctcaacctcct

SEQ ID NO: 10973 - DNA, 401 bp, Homo sapiens
aggtacgcgggggagcccacaggtttcccagtcgagtctgaggctgtgatgggaggatggtgctgagacctttggaacaggcattggaaggactgccgtggccacacaaggaagccaggtatgtgatgacatcaaccgacgcctggcaactgctgcagggacagtgggctggaggaaagttgtcaatacctgtaaagaagagaatggctttactggtgcaagagctttcaggccaccggtgggacgcagcagatgacatccaccgttccctcatggttgaccatgtgactgaggtcagtccagtggatggtaggagttaaaagaattaattgcctaaaagagggatcctgttttcagaggaagccagccaatgaaaaagaaatctggacccacagcttgag

SEQ ID NO: 10974 - DNA, 402 bp, Homo sapiens
aggtacgcgggtgactaccagcatccatactaatctgggagatccagggatgtgccttgttatggaggggactgtgactcctttaagacctagaccatcacttgggagatttgttttggtctctgggtggattgtggatggtagacagatcacaggccagcatgacctggctttggccttgctggttatagaatttctattctgcagagctaagagtgcaaactaggaccaacattaccaagaggacagaagctatctggggatcctggctggcagtgctcaacttacagctcaagcctgtgataacaggagaggtggagtgtgttttgtgcttcattgtgcatgtgtttcaagcagaaactagacttgagggcttaaatagaaaacatcttaaacaatcca

SEQ ID NO: 10975 - DNA, 156 bp, Homo sapiens; identical to SEQ ID NO: 1806

SEQ ID NO: 10976 - DNA, 420 bp, Homo sapiens
aggtacgcggggcttgggaagatggcggctgtgtcggtgtatgctccaccagttggaggcttctcttttgataactgccgcaggaatgccgtcttggaagccgattttgcaaagaggggatacaagcttccaaaggtccggaaaactggcacgaccatcgcttgggggggcctataaggatggcatagttcttggagcagatacaagagcaactgaagggatggttgttgctgacaagaactgttcaaaaatacacttcatatctcctaatatttattgttgaggtgctgggacagctgcagacacagacatgacaacccatctcattttttccaacctggagctccactccctctccactgaccggtttcccagaattgtgacagccaatcggatgctgaaacagatgcttttcaggta

SEQ ID NO: 10977 - DNA, 770 bp, Homo sapiens
  misc_feature 10: n = A,T,C or G
aggtactttnttttttttttttttttttttttcccagtataacagctctttatttctgtgagttctactaggaaatcatcaaatctgagggttgtctggaggacttcaatacacctccccccatagtgaatcagcttccagggggtccagtccctctccttacttcatccccatcccatgccaaaggaagaccctccctccttggctcacagccttctctaggcttcccagtgcctccaggacagagtgggttatgttttcagctccatccttgctgtgagtgtctggtgcgttgtgcctccagcttctgctcaatgcttcatggacagtgtccagcacatgtcactctccactctttcagtgtggatcccacccctctttcatctctgtatcccacaaataacacagacaccccatcctatctgtgtcctcagagaaattgagtgatatgtctccaggcatggccagtattccccaggacacagagaggacaaaaattaccccatttaagaaacactctgggctacacctgtgtctgctgaattctttttcctaacaaccctggaccctaaaccctaaggccaagggttcctaaaactggggggggctttatcttgccctgtcatttccagggtccaagtttctcactaaggggtttataggggggcccaggggtgggccccatgggttcccccggttctccccgggggggctttttaaatatgggttccccgggcccgggatttattttaactttttttaccccgccc

SEQ ID NO: 10978 - DNA, 387 bp, Homo sapiens
ccgggcaggtacgcggggagcggaggtgcgtctgtggtgtcagacacctgtgtctcagctctgtcttcctcgggctggctcctgcggatccttcctgggccagaaccgtgcctctaggccacctcccccaagccaccaagcccccgcggtgggccagccttggcccagtgtcacgcaggacagaaatgaccaacagataactgaggacaatggacctgcctgggcatagacttccttaaggtaagtccattttaaaccaacgatttctcgatgacattatttctccgtcgatgttggcagaaatgccagcattgggaaggtaaactaaagagaggtagggaagttgttcaagttaggcctttgtgatgaaatcaccaaggttttggg

SEQ ID NO: 10979 - DNA, 428 bp, Homo sapiens
ccgggcaggtactttcaataaagagaccaatattatttataaaagtagctaaataaataaaagtttctgaaatttatagccaaaagcatacgttcaaaaaataacatttcttcctgattagaagagcccgcgtactttttttttttttttttttttttttttttggagggtttaatgtttcatgactggtaacagattagtttctaggggatccttggagaacctgttctgactttagaagcacttcctgtggacaatggagggccctgccttatctttcttaggcttgcttatccacatctgctggtaggtggatagagaggccaggattgagcccccgtttccagactgtgttcacaaagccaaatgattaatatatgtttttgtgatgtctttagtgacatttttgttctttttccatcttatca

SEQ ID NO: 10980 - DNA, 403 bp, Homo sapiens
ccgggcaggtacgcgggccccagacatcaaccaaaaactgtatctatcctatttggtgcttagttcattattacacatctagggaaggaacagtaaaattgtaatgctcatggtttaagcatagcatattctcagtgtaggaagaaaaaagaacaactgtgcatttgttttggcacaggaccttttggaaggtaaagagcataccatgggcttcttatttttctttatcttgaaacatattttcttacagcattgtgagttaccagatattatgcacctttattatgccctcattatttattatataaatacacatgtttactattttatctaattttacctttaatttctttataacactctaaaccaatttatagacatttttataatattacttttttac

SEQ ID NO: 10981 - DNA, 415 bp, Homo sapiens
ccgggcaggtacttttttttttttttttttttttttttcgaaaagatggggtttctccatgttggtcagggtggtcttgaactcccaacctaaggtgatccgcccgcctcaccctcccaaagtgctgggattacaggcgtgagccaccatgcctggcttaaagagataaataattaagggatccttaaaagaaatggaacagtttgtaagaaagataaatttcaaactttttgctaggagggaaaactattagggctacatactctataattctagaaccatttccttcaaaatgcttctgggtgaccttttcaaattaaatttttaaaaatacagtaaaagatagcagtgtcagttgtttgtgggtgaaaatataaacccaacactggatataatacagatcaaaaaattttat

SEQ ID NO: 10982 - DNA, 453 bp, Homo sapiens
aggtacgcggggaagaacaatgtgaactatcaaaccagcaggacctattactataaatgagagggaggaaggaccaaggatgcttcttatgtaactgccttctattcctgggtgactggttgcacagtctccttagagaatcccggaacagagagaatatataccttccactggaagaatctcaaacagcgctgcttactcaggatcagtggcaccagccaactcaactttgggacaaacccagccaagtgaccaggacactttagtgcaaagagctgagcacattccatcagggaaaccaactccaatgtgcgcccattgtaaccaggttatcaaaagaccattcttaatggcactgggggaaatcttggtaccccaaaaaaattcaactgcgctcactgcaaaaaaaaaaaaaaaaaaaattcctggcccgggccgtcgctcaaagctgag

SEQ ID NO: 10983 - DNA, 406 bp, Homo sapiens
aggtacttttgcttggattctttaagagggtgggggtcgggggaggcttggcagcataaaggcaggccgctctgggctgaccgtgctcctgacctggatgcagaactgtggaagttgccctccttgttctgcttcctgctccctcttttagcccgtgtgtccaggggagaggatgggtgttccgggagcacaaggccatggcacagccagcagccttctggcagttcctgaaggacagcaagtttgacagagatattaccccagctggggctagagcagaggaacagttggttgtgtgctgccatttgacagtatcctaattcctgacccactgtgagcattaacagcccaaatacatatcttctagacagtctggtgcttaaagaaacctctgccagatttactg

SEQ ID NO: 10984 - DNA, 374 bp, Homo sapiens
tgatcactactatggtcaattgaagctaatcgcggtggcggccggccggcaggtactactgctgtcccacatgctctccatgatcctgaagaaaacttctgtcaatggctccatccatttcctggctcttgggaggctgaggcagcagaatcgcttgaacccgggcagcggagattgcagtgagcagagatgaccattgaactccagcctgggcgatgagtgaaattccatctcaggctgtttctcgttccatacaaaatggctgaccaagtccattactgggagctctgcccatccagaagttttcctctcgctcggaatacagccactgaaggaggtaaaagatatctacaagtagaactttgatattatta

SEQ ID NO: 10985 - DNA, 358 bp, Homo sapiens
aggtacttttttttttttttttttttttttttgggatttttttttttctttttttttttttttttttagccacactggtttttgttaagacctcatcagtcctgggtgcttgccctcaattcctccatagctatgttagcatatttaatatcttttgctattaatccttaactagttaatccttaaagggctagttaatccttaactagtcccttcattttgtgcattatcttccagtattctccttctctttttttacttcttccctgctacccatgtgctcttggtgggtagttaccaacatatacagaatctgcttccctttgcagcatttcatttgcataaagactggatggca

SEQ ID NO: 10986 - DNA, 419 bp, Homo sapiens
ccgggcaggtacttttttggatacaattttcatagaaaacagcaaacaacagttttataggaaaatctactgctctccacacttctttgtatttagaagagtcttgatgcttctaatcaggcacccagaattccccaaatactgacaaatcaagcgtagtctatgaggatctggctcttgtccccacagtcagtcctcatggggcggtgggcagggatcatgaggtttactccccctctgatatcaggagaaatgtcacagactttgggggaagggagcaaggatcacttggtaaaccggggctctcaagtggaccttgttagtggaaacgactctcaagtcacccaggggcaaggacggttccctgctggcctccggcctgcttggcctgggtcacctgaacactcacgctgtcctgg

SEQ ID NO: 10987 - DNA, 430 bp, Homo sapiens
ccgggcaggtactttttttttttttttttttttttggagagacaaggtcaccctatgttgtccaggctggtctcaaactcctgagctcaagggatcccccagcctcagcctcccaaaacgttgggattacaggcatgagtcaccatgcctggcttaaattaacttttaggttcaataaatcccaataaaaatcccagcagactttttttttttgtggaaattgacacgtagattctaaaatttaaatggaaatgaaaggactaaaaagaacaaaagacaaacttgaaaaataggaatttggaggacttcagttaccaaatatcagggtattacaaagctacggttatttaaaaagtaaaagcaacagcatggtattggtgcaagcataaaaaaatagagaaagaaaaacagttttataccccgcgtacct

SEQ ID NO: 10988 - DNA, 391 bp, Homo sapiens
aatattggccaggtcttcgtcggcgaaacgcggtggggcgacggcggcggcaaccggctcctgcagcggcggacggtggccggtcagggccgaatggcatagcagggccagttcattcagatcggcgggaatacgcgcgaccaggcagccttgcgcacgcagggtgcggatagtggcgctggagcaaaagcggtacagcacaacgaccgcagccacgccgcttgcctcgcgcgcggcggcaatggccggcatcacccgttcatcgagttcggactgctcgatcaccagcacgtcggcgcctgtatcacgcggtaactcctgcgccatcgcaaggccagcgctgtggccgcgcacatccagtccaagggcgctctgccccatggcggcaact

SEQ ID NO: 10989 - DNA, 183 bp, Homo sapiens
gtcattagcttgttttccttggggtgaaaaatggttattccggcttcacaaatttccaccaccaacattaccaaaccccgggaggcactaaaggtggtataagaccttggggggtgccctaaaatgaaatggaaacctaaccttaacatattaaattgggcgttttgcgctctacactggccg

SEQ ID NO: 10990 - DNA, 348 bp, Homo sapiens
aggtaccatggacttcaaagattgggaacaggtgggaattgccttaaaacaagtttgtaaggaaggaaaatttatccccctaacagcctggtcaaactgggctatagttaaagcagcctcggaaccgtttcaatcggaaaatgaggcttatcctccagcagaaagaatttctgcagaggaaggtggtgatgctgctgaaggaggagaggatagtgaagaggattttgaggaaaatacagacaaacctggagatgagttaatttcttttgaggagcacgtgggaccttcagctgctcctaaaatagagaagccatatatgccaagatgtttaaaacaaagaagggcctt

SEQ ID NO: 10991 - DNA, 988 bp, Homo sapiens
  misc_feature 199, 200, 217, 218, 237, 252, 253, 376, 377, 386, 387, 402,403, 447, 467: n = A,T,C or G
ccggcaggtactataagctcctacctagaagacataatactgaataccgaagcgaatactgcagaagaacaagccagggcagaaatagagaagatggctgagaaaatcaatgacattgcttatgaaatggaaagccgccgaacctatcttcagtcagaggagattgggttgctgagttggtttattagttttctggatnncccagtaggtgcaaaannatactttgtcaaagaaaanagtggagggaacgcnnacagcggaagacatgattctgtgggcagcccatgcagatgcatcgcacagttaccacggaaagggcatggttcaaaaagaaattatactgaggggagagcaaggatgaggggcctcaaatgcnntgccatggnntacttgagaaaagannaactcaaaatgaagaacccaacagctaagattggtgattttttntggtaaaagaagcttgtacnagttcaaaaatatgtggcaagggagggcgtaaggggctttggttcaccactgtagacatgccagtggccatttgcaggggcataccaagggtagtgtccgtgccgcaagaagtaaaccaagcaagctttgggggaagctggggaaggtgggtccgcccatttaagggtcaaggtttctttcctttatcttgagcccaagcaaggaacttccccccctggaagccgcggcgctttcatcccggcttgcttggtaggaattcccaaagaaggaaagcgggagaccttgaagttccctttaagccggcttgaggacccttggaattggtttgggggtgaggccccaaggggcgggaggccgcaaaccccgtgcgtttggtttccaagaaaaatgtggtaataagccgggttacctttgggcccgtttagaaactaaggggaaccccccggctttgaggaaattcgatattaaagcttattgaaccccgtcgaaccttgagggggggggcccgggaccccaattt

SEQ ID NO: 10992 - DNA, 401 bp, Homo sapiens
aggtacacatttgacttactgcacagtatattgatcattttaatgggaaactttagctttctactttttatttttgttttttcactttctatgccattatttttgtattctttttcttagtgtgagctctaaaatcaatgttcttgaaaaagaaattattttgcagaagttggggaatcatgtttgttgaatatgtataaaatagaaacataggctgggcgcggtggctcacgcctgtaatccctacactttgggaggctgaggcaggtggatcacctgaggtccagagtttgagaccagtctggccaacatgatgaaaccccatctctactaaaaatacaaaacattggctgggattacaggtgtgagccgcagcgcccggccaaaaaaaggaattttta

SEQ ID NO: 10993 - DNA, 426 bp, Homo sapiens
aggtactttgggaggccgagacgggcggatcacgaggtcaggagatcgagaccatcctggctaacacggtgaaaccctgtctctactaaaaaaaaataaaaaataaaaaataaaaacatttctgggcatggcggcggaggcctgcagtcccagctactcgggaggctgaggcaggagaatcgcttgaattcgggaggcggaagttgcggtgagccgagattgcgccactgcactccagcctgggcggcagagccagactctgtctcaaaaaaaaaaaagaaaagaaaaaagaaaaagccactccaggctcactgcatcaggatttgcactgcaacagcatgcccagggcacagtcatgtttgagaaatacggaggacctctgaagtgcttgattctgtgaactcacactgctgtaagcagacttgt

SEQ ID NO: 10994 - DNA, 544 bp, Homo sapiens
ccggccaggtacacaataggatatggggatatacaatgaggaatcaaacagagaagtagctctgctctcagagaatttatattttagggggagaagacacaaaataattaaaattaataaataaaacatatagtgcgttatatggggggagagtctttataagggcaaaattaaaggcataaaacgggaaaaaggggcagtggtgatggtaatgaaatgctggttgagattattcaatttttaaataaaagtccatttttaggaaaatgggcttcacctgaaaaactgtgcaccattttgtatccaaaattatcctaaaaattccgctagggtttaaaagaccatacttggcaatgttctcggtgaagcaatgtaaaagggcctccattaaaaggaggggcaaatttaaaatgtcccacaaaggcccactttaaaaggcctggaaaaaccaatagacttttccaacaatgagatttggcaactaaaaaaaaattcacaaaatattgccttttacatgttcccaaaacattgtaacatagccaat

SEQ ID NO: 10995 - DNA, 262 bp, Homo sapiens
aggtacgccaaaggatccgatttgcatagcggagctccagctgttgtgggaagagaggaccagccggcaacttttatccagctctaaactttatttcctcccagaagacactccccagggccagaaatagcgaccatggcgaggatgaagtcattgctgtttccgaaaaggtgattgtgaagcttgaagacctggtcaagtgggtacgcgggataccaagtttatataatttgaaaaaaaaaaaaaaaaaagtacctgcccg

SEQ ID NO: 10996 - DNA, 837 bp, Homo sapiens
  misc_feature 546, 550: n = A,T,C or G
aggtactggggtgagatgatctgaagggtgtttccaatgagaatgacacaaataccaaggactggagaagcccttggaacaattgataaagcttcccacatttttttttttttgagatggagtctcactctgtcacccaggctgatgcaatcgcatgatctcggctcactgcaacctctgcctcctggaatcaaggaattctcctgcctcagcctcctgagtagctgggattacaggctcccaccacacctggctaatttagtatttttagtagagacagggtttcaccatgttggtcaggctggtctcgaactcctgacctcaggtgatccacctgcttccgcctcccaaagtgctgggattacaggcatgagccactgcgcctggtcaatttcccacattttcttaagattaatgtttggcctacaaaagctcaacccaaagctatcttatcaagctggtatggaatctttatttcagcaaggtgatatccccaatatgtaattcaaccttttgtttattcccataattagtacctgccggttngggngttccccgcccattctagaccttcggatctcgcggattggggtacttcgtgtcaatcctttacatgctgtagcctctggggaaggccccgttttcagccattattcccttaatcgggggttattcgcgccatttcggaatactgcggaacttgtgtcaattggtaattatttgcgttcctgttcacacttagtttcacccgggtcaattaggtaatcccgtcgtcctctggataaaccatctaattctgtttacttcaatcttccttcgcatcgcgtaacttatgcg

SEQ ID NO: 10997 - DNA, 132 bp, Homo sapiens
  misc_feature 112, 114, 116, 121: n = A,T,C or G
cacccacattatactttaattttcttactcatccacgcataccttactattttcgagatattccggttttctctttcttcatcctacaccgtcatattttctctttcggacncntnctttntaacaagcctc

SEQ ID NO: 10998 - DNA, 351 bp, Homo sapiens
ccgggcaggtacagagcagagaaagccttaaacagcaataaaatgcagatgctgttgtccctgaaaaaatcactttctttctagaacagtcaaggcttatttcacctcagcccctggttgtatgatactaatacgctctgatactccagggaagcaaccagtgactgagatttgaggattaaaatcaaagcacaatgaactatcatttggctgccccaggcccactaaatccagacagcaaagtgttctcaccattctgagacaccttcggctacacatttctccagccaaaaacctaggaagatgtccggctgacagatgcgcctgttacatgattcagagaagacagtt

SEQ ID NO: 10999 - DNA, 500 bp, Homo sapiens
ccgggcaggtacagtagtgcactcttggctcactgtagcctcgacctccggggctcaagtgatcctcctgccttagccccacaagtagtgggactataggcacacagcaccatgcccatctaagtttttgtattttatgtagagacaaagtttcaccatgttgcccaggctgaatcttgagcctccctgagccttaagtgatctgcccaacccttgagactccccaaaaacgcctgggaattaataggcgtaaaaccatccatgcccctgggccttaaaataaaccttctagagtccaaacatcttctttattcacgtgagagcctttctggagaaaaacttccatccaccgtggggtgcctcttcttttcgctgaatgtggtttgtggcccccaaaatagcctttgtttcctcaaacaagaatagactttaatttggctaatggaatataataatacttcaaaagaagcctgcctattaatgtatttacaataacattc

SEQ ID NO: 11000 - DNA, 442 bp, Homo sapiens
aggtacttctctattttttttttttcaatttctggcatttaaaaatgaagaaaaaggaaaaaaattcaggacaattgaccctttgaccaaaatgctaagatgaaaatatagacaatagaaagaaatccccaaatgatcaagctgtgagaattaccaaagaaggactaaataacagcaatgattgatgttaatattaacaagaagatagacaaaaaatgcataaaagattggataattctgtcagagaattggaattttaaaaaatcaaataaaaattttagaagttaaaaacatagtaactaaagttaaaaacaaatgggttttatagcataattgacatgcaccaacggttagtgaattggaagacaggttagttaaaaaaattcaaatatatccaaaatgaacacgactgataattttaggataaacaggtaccctactt

SEQ ID NO: 11001 - DNA, 426 bp, Homo sapiens
aggtactttgggaggccgagacgggcggatcacgaggtcaggagatcgagaccatcctggctaacacggcgaaaccctgtctctactaaaaaaaaataaaaaataaaaaataaaaacatttctgggcatggcggcggaggcctgcagtcccagctactctggaggctgaggcaggagaatcgcttgaattcgggaggcggaagttgcggtgagccgagattgcgccactgcactccagcctgggcggcaaagccagactctgtctcaaaaaaaaatatgaacagaaaaaagaaaaagccactccaggctcactgcatcaggatttgcactgcaacagcatgcccagggcacagtcatgtttgagaaatacggaggacctctgaagtgcttgattctgtgaactcacactgctgtaagcagacttgt

SEQ ID NO: 11002 - DNA, 311 bp, Homo sapiens
aggtactttttttttttttttttttttttggcaataggagatatgtgagtctgtagacctaggttttattatacaaatatgcagaacaaaatgtgtgtgtccatgtgaactttaaaaattgttatctgttttttaattgtatgctcacatgcggttgtaagtaataatacagggagggtttttgagtatatctctttgtttagcctttttgatgttgctaaatgagtaaagctgtttaagtatttaagtccttattgataagggagccgaggtatttctaagcattactgcatgcccgcgtactttttttt

SEQ ID NO: 11003 - DNA, 434 bp, Homo sapiens
aggtacagttgccatggctgggccctgtagacaattgctaagcctttctggtgccactatccttgcccatatcttttcatactgccttcataccatggatctgaacttttgcaagaataccaggattaaccccctgcttgcctggatgttttcccactttcagctgcaaacatctacctagaccagctctaaccttgcaggccttggagagtcactgcaaatatgctgcctgcaatctggccatctcattgtctagacatgacagcaaagacatattgtttcaattgcatctttggttgaattgttatgctaacaacctttagttactttcacctcgtatcttcatcttggtcctgccactttaacactttaaaactcagttttctctttttagagtaaaataataatggaatctacctcctatggctattttg

SEQ ID NO: 11004 - DNA, 839 bp, Homo sapiens
  misc_feature 124, 135, 179, 339, 344, 347, 348, 374, 414, 430, 431, 433,436, 448, 454, 457, 495, 529, 540, 541, 553, 556, 566, 574,584, 587, 590, 607, 678, 701, 715, 716, 721, 722, 728, 732,735, 736, 739, 744, 748, 749, 787, 797: n = A,T,C or G
gcgtggcgtgccctgcccgggactattttttattgttttttttcttttctgagcacacgagggtctccacatttgcatcgtgtgcacccctacggcttggtatgtggcacgttgggtagccaantaccttcgagnccttctacttcgacacggcgcctgtcgtatcgcatcttcgctangcggcgtactagaaggaagatatttctcgttctcccaatctgcttttcaagtggcctcccccaccaataggttaattcccttggcgttgtatccttttaacatgttggcctatcgagccttttctttatctccagccaagccttgtgtgggagcataganaattnttnntctttatatttagacccttaatattntatatggtaaatgcccaagagaattagccgcggggctctntttattttacctttcnnanccnaacttttgtggnccccgnccnacagccgcccgttttgttaaatctcctttcccaaaacnaatccttttttttcggttggtggccaaacctttntctactacagnngtggggaaattngcngcgtttcctnacataggngctacggttngcngcnaagaccccccttttcgncctacctgggaataaggaatgtggcaccagttgtgtggtgttgcaacatccttaaaccacaaaatttggtngctttctttctggcgtttgcganaggtggtgaaaaannaaaanntttaanttgnttnnttntattnttcnncctgtgcccttattcacaaccattaacaccatttgttntttctatttnacaacacctttgtctgaaatcccttctttggaggggtgcttg

SEQ ID NO: 11005 - DNA, 472 bp, Homo sapiens
ccgggaaggacgcggggattcccaggaggcctcagaccccgtcacctgagatgagagctggatcccggagaagctcaggtctgacccagcattcattgctgtaggaagggctcgtctagactccaagggagccgggtgcggtggcttaaaccttcttaaattttctataattgctgagaaaacaaacatggatccctgctctcatacccaaactttaatcatgaatataatgctttttattgactttcttatttttaaataaaacctaaccttgcctaagtctttattacctgtcatagatatattaacagggaccccttgcccctcttctaaaaaaatacttcgatattttcctttctgaagctgccaatgaattctaataatattcctttgtttcaatctaatatttaccttttaactctctgctgtgagtgcactccgatccccccattttattttttttaaataaaaa

SEQ ID NO: 11006 - DNA, 365 bp, Homo sapiens
  misc_feature 283, 290: n = A,T,C or G
ccgggcaggtacgcgggggacgcggaacccggcgcggcggcggcacgatggtcatggcgtatttcgtcgagaatttttggggggaaaaaaatagtggctttgatgtcctctaccataatatgaaacatggacagatatcaacaaaagaactagcagattttgtaagggaacgagctaccatagaggaggcatactccaggtcaatgacaaaactagcaaaatctgcaagcaattattcacaacttggaacatttgcaccagtatggtgatgtattcaaaacantctacangagaaattacgccaaattgtcactttggatcattgttagaaaaattaccaagaattaataaaaggaagtttcaac

SEQ ID NO: 11007 - DNA, 351 bp, Homo sapiens
aggtacagcatcctggagtggtgtcaagggaaagaaacatgctgcttctgccacagacggaccatgcatgggaagaaactatttgagaatggctctccaaggggctggtcggccttgtctgcccactccctctacctttctttgttctgtttctttctcttcagtgttggtccattttccttttttcactgttgcgtgttagcacatcattactcttatctccatatatttggatgtttcctgcattatggtgagcttcagtaggtcttggatgagttagttgttctcattccaaaatgtaaatttctggtgtttagtaggtgctcagtaaagcttgagaaagatgaaagt

SEQ ID NO: 11008 - DNA, 406 bp, Homo sapiens
  misc_feature 406: n = A,T,C or G
ccgggcaggtactttaacaagtaaaactaagttggttataatgtgacaaaaatacaagcaataataatagcaaaattatccaataggaaccatgcagagagttttatattataactcatgtcccctttcctgcaatgttattaacttctatccccattttccacatcaaggaaattaagtttggagacacagagtgacttacctaagtcacaggtctggtaggtggagagtttctctcactccagggaccacaatctacaaaataaacttgcatattctacaaaatatttgttaccattggaagtaggtaggcagagtgttactagcattaaattatggcaggaataaaaagaaagggtggtgggctggtcttgcttctgcagtttaagggggatccctgcgccgn

SEQ ID NO: 11009 - DNA, 415 bp, Homo sapiens
aggtacgcgggtgactaccagcatccatactaatctgggagatccagggatgtgccttgttatggaggggactgtgactcctttaagacctagaccatcacttgggagatttgttttggtctctgggtggattgtggatggtagacagatcacaggccagcatgacctgtctttggccttgctggttatagaatctctattctgcagagctaagagtgcaaactaggaccaacattaccaagaggacagaagctatctggggatcctggctggcagtgctcaacttacagctcaagcctgtgataacaggagaggtggagtgtgttttgtgcttcattgtgcatgtgtttcaagcagaaactagacttgagggcttaaatagaaaacatctcaaacaatccatgaaatggtaaat

SEQ ID NO: 11010 - DNA, 361 bp, Homo sapiens
ccgggcaggtactggtgctacaccatgcgctcgtggttcctgagggcacaattcattcattcgtgaaacagggcaaatttgagattcagacctccaaggctccaagctacattgctttattggaggcggccactccggatgatcccaatgaggagccgactgctcctcaaggcccttctttgttttaaacatcttggcatatatggcttctctattttaggagcagctgaaggtcccacgtgctcctcaaaagaaattaactcatctccaggtttgtctgtattttcctcaaaatcttcttcactatcctctcctccttcagcagcatcaccaccttcctctgcagaaattctttctgctg

SEQ ID NO: 11011 - DNA, 345 bp, Homo sapiens
ccgggcaggtactgcaatgggcactgaaggagactgtggaggtcatttaaaaatagtccctgaactctccaaagtgggattataagtgcaaaaacagtgcccaggatgagtaggaaagccacattacagattgaaagaaggaagaagttgcatgcgatctggggacaggcaaatgtgcagggagtaggggacatggcaatggactacagaattaggaattttggtaggtaggagtaggtagacatgggataattgaagaattccaggtggaaataataaaatataaaagaaatgggaaaggaggcattttgaggggagagtgagttgtttgtccacagggactgg

SEQ ID NO: 11012 - DNA, 82 bp, Homo sapiens
cacgctggttttgcatcttcaggagacgctcgtagccctcgcgcttctcctcggccagttcgcggaagaagtggctcacgcc

SEQ ID NO: 11013 - DNA, 400 bp, Homo sapiens
aggtacttttgcttggattctttaagagggtgggggtcgggagaggcttggcagcataaaggcaggccgctctgggctgaccgtgctcctgacctggatgcagaactgtggaagttgccctccttgttctgcttcctgctccctcttttagcccgtgtgtccaggggagaggatgggtgttccgggagcacaaggccatggcacagccagcagccttctggcagttcctgaaggacagcaagtttgacagagatattaccccagctggggctagagcagaggaacagttggttgtgtgctgccatttgacagtatcctaattcctgacccactgtgagcattaacagcccaaatacatatcttctagacagtctggtgctcaaagaaacctctgccagat

SEQ ID NO: 11014 - DNA, 421 bp, Homo sapiens
ccgggcaggtactcatacaataagaccctatacaagcatttaagtaacgatgcaatacaatatttaccaaactgacgacatgtccatgttatattgctaagctacaaaaaaaagtcatataatacatactctaagattccctttttaaaataaatataaacatggcccatatacaaaagaataggaagataaatatatcactgcatggtattatagattactattttcttcttttcatttatgtatatcgtctccattttcacagtgaatatatacctattagtaagagaaaatccaatgaatatcttttttctttttttttgagatggaatctcactggctgcccaggctggagttgcagagccgtgatctcagctcactgcagcctccacctcccaagttcacgcgattctcctgccta

SEQ ID NO: 11015 - DNA, 402 bp, Homo sapiens
aggtacatgactccaggaaagtgattctcacccctctgagccccagttcccccacctctggcagggagataataatacctaactcacaaggttgttgagagggttggaaacaaagcctgcagagaacctaacacatgatatacgtttaacaaagggcatccatctaagacattcaaccagcatcggcatttgcaacaagtcaacctttacttttcaggatttcatttggggaaaaattaaacattcaccagcatatttttgtatagtgtttaagaacatgaagttagattattcaaacctcaccttataagttctgtgcatttttcctcttttatgtctctgctccctcactataaaagtagaacaagagtgcttaccttgcatggttgttgtgcatgtgaa

SEQ ID NO: 11016 - DNA, 410 bp, Homo sapiens
ccgggcaggtacattttggattagaattgaagtatcagtctgttgtttcttcatttcttctttttctatgctctgtttacaatttcagctactccagaagctcagattttccctattccaagctatgagatgtgatgccacatttggaattgccttcttgatatccccttctgagaatgcattgcctgctttttaactcattatattcaaaactaagttcatcatcattctctccttacaccagttctgaccctgactttgccatttttccttactaagtacgcgggggttttttttcttgctgcagcaacgcgagtgggagcaccaggatctggggctcgggacgagactgcacggattgttttaagaaaatggcatacaaaccagacatgggggaaatcgcccgcttc

SEQ ID NO: 11017 - DNA, 137 bp, Homo sapiens
gcaggtattcctcgacgatcacgcgccggccatgcttgcgcgcgaactcgaaggcgcgcgccacggcgtcaggggagacgcagtcgacggtcacgcccttgccctggttggcgtccagcggcttgatcgccaccggc

SEQ ID NO: 11018 - DNA, 333 bp, Homo sapiens; identical to SEQ ID NO: 1849

SEQ ID NO: 11019 - DNA, 430 bp, Homo sapiens
aggtacttttgcttggattctttaagagggtgggggtcgggggaggcttggcaacataaaggcaggccgctctgggctgaccgtgctcctgacctggatgcagaactgtggaagttgccctccttgttctgcttcctgctccctcttttagcccgtgtgtccaggggagaggatgggtgttccgggagcacaaggccatggcacagccagcagccttctggcagttcctgaaggacagcaagtttgacagagatattaccccagctggggctagagcagaggaaccgttggttgtgtgctgccatttgacaggattctaattcctggcccactgtgagcattaacagcccaaatacatatcttctagacagtctggtgctcaaagaaacctttgcccgattcactccaagaaaaaagtgttgggtgttgt

SEQ ID NO: 11020 - DNA, 456 bp, Homo sapiens
ccgggcaggtacctaataaatatttttggcatatgtgaatgaatgagtgagtgaataaataatcagattagttgatgaaagattctaagggaagattaggtaatgtgattataagagaaagatcctgaagaatgcttgggaatggatcctttactcatacatgaattttgttcatcaaccttatattgtagggatcacagttcattttggtaaaaatattgggtccatttgaaaaatttattacaattttttccaaaatggatgtacaatcacttccatttattacagggtgttcaaaaagtttagctcttttcatggacttattcaaccaacttgaattcttcatccatgggaaggttttttaaagtaattgggatatgctattaagcctcaacatatgtgcaagttcctaagatatgtgtcaagccggtgggatttgaaaaaagtggtttcttg

SEQ ID NO: 11021 - DNA, 411 bp, Homo sapiens
aggtacgcgggggaaacaaatcaaatgtttgttctcaaattcttactctgtcatttattattctccatgtttttgtaactgcttccttggagatatttaaacataaatatatacagagagggtgaagatggaggagtgctttttacagttcacagttgtctttttcatgtgtgacaggtttttgctgtgttgcccaggctggagtgcaatgccacaatcttggctcactgcagcctcaacttcccgggctcaatcgatcccccacctcagcctcccgagtagcaaggactacaggcgcacaccaccacacctagctaatttttgtatcttttgtagagacagggtttcaccatgttgtccaggctggtcttgaactcttgggctcaattggtcctagcacctcagccttct

SEQ ID NO: 11022 - DNA, 430 bp, Homo sapiens
ccgggcaggtacttttttttaaatacttagtatatagactggggctgggcgcggtggcgcatgcctgtaatcccagcactttgggaggctgaggcaggccgatcacttgaggtcaggagttagagaccagcctggccaacatggcgaaacccccgtctttactaaaaatagagacacgtcactgcactccagcctgggtgacagagtgagactccatctcaaataaataaatacttagtgtatgataaaagctagaataaacatactgttttaagtagaattctgaaacaacttcaaattcatttaaacatacatcaattgacagttaagcaagctaagcttaagcaagttaacttgttttgccatttctatcaacctaagaaatagggaattttacaagacagtaaaactatgtaaaaatatggagttg

SEQ ID NO: 11023 - DNA, 315 bp, Homo sapiens
aggtacagtagtgcactcttggctcactgtagcctcgacctccggggctcaagtgatcctcctgccttagccccacaagtagtgggactataggcacacagcaccatgcccatctaagtttttgtattttatgtagagacaaggtttcaccatgttgcccaggctgatcttgagctcctgagctcaagtgatctgcccaccttggactcccaaaatgctgggattataggcgtaaaccaccatgcctggccttaaatcaactttagagtcaacatctcttatcactggagcttctggagaaactccatcacgtgg

SEQ ID NO: 11024 - DNA, 374 bp, Homo sapiens
ccgggcaggtactagattccagttccccctctcacagctcccctaggtttctgctcgtaagatgacaaagttgtgactgtatgctgacatgattattttattaatgattgctgctcagctgaactgtcagctctgaaagaacagtgacatgtggtctttccattgtatcatcttcactgaaaggaaataaataaacaaatgaagagttctaatatatttggcttaaaatcatattacttcaggccaggcacggtggctcatgcctataatcccagcactttgggaggccgaggcgggtggatcgtctgaggtcagaagttcgagaccagcctggccaacatggtgaaaccctgtctctattaaaaatacaaaat

SEQ ID NO: 11025 - DNA, 663 bp, Homo sapiens
ccgggcaggtactctatttcagatttcctcaaagctgggcagttgttagcgagaatgaccaatttcgctttgccttgtctgatcatcttcagagtctgcttgtaccactgcgaggcgactgtttatacatgaaagcatccatgatgaggttgtaaacagacttaaaaaggcctatgcacagatccgagttgggaacccatgggaccctaatgttctctatgggccactccacaccaagcaggcagtgagcatgtttcttggagcagtggaagaagcaaagaaagaaggtggcacagtggtctatgggggcaaggttatggatcgccctggaaattatgtagaaccgacaattgtgacaggtcttggccacgatgcgtccattgcacacacagagacttttgctccgattctctatgtctttaaattcaagaatgaagaagaggtctttgcatggaataatgaagtaaaacagggactttcaagtagcatctttaccaaagatctgggcagaatctttcgctggcttggacctaaaggatcagactgtggcattgtaaatgtcaacattccaacaagtggggctgaaattggaggtgcctttggaggagaaaagcccactggtggtggcagggagtctggcagtgatgcctggaaacagtacct

SEQ ID NO: 11026 - DNA, 427 bp, Homo sapiens
ccgggcaggtacgggggagggtagagtgagaagcaccagcaggcagtaacagccaacccttagccattgctaagggcagagaactggtggagcctttctcttactcccaggacttcagcacctaagacagcttcaaaacaaaccagaacagttatgtttctggggagcacgactgggtcgagaggcacataaatggacaccataaataaggcccagctccttgtgctcctgactcttctcagtgcgctttttttacagactttggcatggcctttttacagggcaccttctgctctcaggttgggtgacagaataccctttgagggagcaaatgaacctgatcaagtttcattaaaagaagacattgacatgttgcaaaatgcattatctgaaaatgacacaccctattatgatgtatccagaaatg

SEQ ID NO: 11027 - DNA, 468 bp, Homo sapiens
  misc_feature 258, 259: n = A,T,C or G
ccgggcaggtacagtagtgcactcttggctcactgtagcctcgacctccggggctcaagtgatcctcctgccttagccccacaagtagtgggactataggcacacaccaccatgcccatctaagtttttgtattttatgtagagacaaggtttcaaccatgtttgcccaggcctgatcctttgacactcctgagcctcaaagtgaatctgacccaccttcggaactcctcaaaaattgctgggaatttattagggcgnntaaacccaaccattgcccctgggcctttaaaattcaaccttttaagaagtcaaaccatcttctttatcaacttgggagtctttcttgggaggaaaactcccatccaccgttggttggctactcttttttcctggatggtggttggtgccccaaaattatgctttgtttcttcatcaagaattgactttaattttggctaatgaattatt

SEQ ID NO: 11028 - DNA, 383 bp, Homo sapiens
aggtactttattttttttttttttttttttagtagagacggggtttcactgtgttaaccaggatggtctcgatctcctgacctcgtgatccgcccgcctcggcctcccaaagtgctgggactacaggcgtgagccaccacgcccggcccaaaagcatttactgttaaggctgcctcatttttcagctttgttgtagttgagattctgatgttcacctaacaaagtccctgacaaaacagacttccttcaatccaggtcataatttgaaacgttatacaataatgagatttaagtgatgaatggaaagaaaagaaggagactgaaaagatatcacaaatttctatttgtttttagattcagaaaaatataattacaggccaact

SEQ ID NO: 11029 - DNA, 429 bp, Homo sapiens
aggtacgcggggagggtagagtgagaagcaccagcaggcagtaacagccaacccttggccattgctaagggcagagaactggtggagcctttctcttactcccaggacttcagcacctaagacagctccaaaacataccagaacagtcagcttccggggagcacaactgggcgagaggcacaaaaatggacaccacaaataaggcccagctccttgtgctcctgactcttctcagtgtgctcttcttacatacttcggcatggcctctttacagggcaccttctgctctcaggttgggtgacagaataccctttgagggagcaaatgaacctgatcaagtttcattaaaagaagacattgacatgttgcaaaatgcattagctgaaaatgacacaccctattatgatgtatccagaaatgccaggcatg

SEQ ID NO: 11030 - DNA, 578 bp, Homo sapiens
gggacccgagccgaaaagttatcgtcagaatgtcgggcaaagaccgaattgaaatctttccctcgcgaatggcacagaccatcatgaaggctcgtttaaagggagcacagacaggtcgaaacctctgaagaaaaaatctgatgccttaactcttcgatttcgacagatcctaaagaagataatagagactaaaatgttgatgggcgaagtgatgagagaagctgccttttcactagctgaagccaagttcacagcaggtgacttcagcactacagttatccaaaatgtcaataaagcgcaagtgaagattcgagcgaagaaagataatgtagcaggtgttactttgccagtatttgaacattaccatgaaggaactgacagttatgaactgactggtttagccagaggtggggaacagttggctaaattaaagaggaattatgccaaagcagtggaactactggtggaactagcttctctgcagacttcttttgttactttggatgaagctattaagataaccaacaggcgtgtaaatgccattgaacatgtcatcattccccggattgaacgtacct

SEQ ID NO: 11031 - DNA, 501 bp, Homo sapiens
  misc_feature 199, 223: n = A,T,C or G
ctttatcgactactatagggtgacttggggcgacatcgcagctgcaccgcggtgtacgcgcgattacacggaaggtggtctcttagctgggccttaaagataagaaagacttgttcaacaaggaaaaggattttccaaggagtgggaatggcctaggtaaaagtgcagaggtggctgggctacttgaagggaacagcangaagctggtggggctagagctcangcaggagcaaaagtgaggaaaagggtgagcacacgtggcaggtggtgtgggccagcttccagcagctttggctgctaaggggccgggactctattcattgggcggtggggatgcttataggtgcccaagaagtgcaacaatgctgcctgtctgtttgggaagcctctggccattacaacaacagccatgcaggaagctgaagagccaggtggcaacatgaagtgagggttcaaaaagtgcccatggaggcatggaggaagacacgtattcagcagatg

SEQ ID NO: 11032 - DNA, 438 bp, Homo sapiens
ccgggcaggtacgcgggtctgaacaaaatagatgatttgatgcaagagatcacagagcaacaggatatcgcccaagaaatctcagaagcattttctcaacgggttggctttggtgatgactttgatgaggatgagttgatggcagaacttgaagaattggaacaggaggaattaaataagaagatgacaaatatccgccttccaaatgtgccttcctcttctctcccagcacagccaaatagaaaaccaggcatgtcgtccactgcacgtcgatcccgagcagcatcttcccagagggcagaagaagaggatgatgatatcaaacaattggcagcttgggctacctaaactaaaacacatttttgatacctaaattaatgagctatagataaaatataaaaaatgtttttaccaagttcagaagttaacaaagactct

SEQ ID NO: 11033 - DNA, 370 bp, Homo sapiens
ccgggcaggtactcccaagggaacgctgtccacctctatgaacttctgaagaaaatgactggcaaacctgaacccaaggttgtttattttggtgacagcatgcattcagatattttcccagctcgtcactatagtaattgggagacagtcctcatcctggaagaactcagaggggatgaaggcacgaggagtcaggggcctgaggagtcagagcctctagagaagaaaggaaaatatgagggaccaaaagcaaaacctttaaatacttcatctaaaaaatggggctctttttttattgattcagttttgggactggaaaatacagaagaccccttggtttatacatggtcttgtaagagaatcagtacct

SEQ ID NO: 11034 - DNA, 858 bp, Homo sapiens
aggtacgcggtggaaacaaatcaaatgtttgttctcaaattcttactctgtcatttattattctccatgtttttgtaactgcttccttggagatatttaaacataaatatatacagagagggtgaagatggaggaggctttttacagtacagttgtctttttcatgtgtgacaggtttttgctgtgttgcccaggctggagtgcaatgccacaatcttggctcactgcagcctcaacttcccgggctcaatcgatcccccacctcagcctcccgagtagcaaggactacaggcgcacaccaccacacctagctaatttttgtatcttttgtagagacagggtttcaccatgttgtccaggctggtcttgaactcttgggctcaattggtcctagcacctcagcctcctaggtgctgggattacaggtgtgagccgctgtgttcagccaatacttcttaacgttttacttttcacttttaaaaattaactctttttatgaaaaaagtagaattttttaaagagcagagaaaagcacaatgaagacagaaagatcacttgtatattcttaatgaccaaagatgatctatttgggggtaaatctttttttttgagaagggagttttgcttatggtggccaggctggaatgcaagggaccatcttcggttaacggaacctctggcttccaaggttaaccatttttctggctcagccttctgagagctgggaatcaagcatgcacaacacccccggtaatttggattttaaatgagacagggtttttcatgttggggctggctttgaactcaaaacctaaggaatttactgccttggctccaaagtgctgggttcagggcggg

SEQ ID NO: 11035 - DNA, 466 bp, Homo sapiens
  misc_feature 3: n = A,T,C or G
gtntatcacgccgtatacgactactatagggcaattgagctcaccgcgggggcggccgaggtccattggtggggggcgtgacattaacatataaccacttagagtggacatgcagttagagaaaagtcaatgagctggaaccaagctgggaattccaacatgtagaagttaaacacaagaggaggagccagcaaaggaaacagaaacagagcttccagcaggtggggggcatttggaagaaaacgatgccatagaggccaagatgaaatagacatcaaggagaaggaagtagtcaattgttttgaatgctatgaagaaagataagaataggtaaatagtccttatatttgataacagaggtcactagtgatcttgatgaggggtttcaatagaatggtgggattatatacctccctggattcaactgaggtaaggaaggcatacagaatagagacaggcactataa

SEQ ID NO: 11036 - DNA, 312 bp, Homo sapiens
acgtacccggtgcgcgttatggggaggctgcagggtttgcgtgattgactataccattccatgcttgtgggtcactggagaacgcaccaacaggccccagctgtcgagggtctcctgccaccaccagctgccctgctggatcacctgtttcctttacttccatcatccctgctatagctaccatactcttacgcttcatgcagtggccagcctcatcgatgaatatgtgtgtgaagtgatcaatgggaaactgggccgagaccaacctgccggcagtgatgacggtggtaattaagaccccgtattcctgca

SEQ ID NO: 11037 - DNA, 494 bp, Homo sapiens
ccgggcaggttcgccgggctttaaccctttgccttgaaatttggaagggacctggaaaaaaaaggagggggaaagactgccaaagaggaaaagaaaagaaaaggaagaaaacattagaaagaaaaaggaaggaaaacggtataaagagagatcaattacccacccttaaatagctagattggggggggaggggggttggaaaataaagctgtgagggtgtgccccatcacggctgctttagaaagggtttattcaatctatcccgtttggcttatggtgtaaaaatgaaaatggtttactttatcgccctttttttttggaaacccttttgtggcccatcagagcccaagttgtaggtaagcaaatctcacatgcgcattgctgtaaccctccttagggaagtaaattatggatctctaaatggtcccatgttaatcccgctttgccttttttcgcccccccggtagggcccccaaggtgccctaaaactttgg

SEQ ID NO: 11038 - DNA, 646 bp, Homo sapiens
  misc_feature 621: n = A,T,C or G
ccgggcaggtactcgggggagagagatgagggcagggaccactctgcaaagacgagcccagggcgcagcagcgagccccctcctagtccttctcttctccgtgggtgatgatgtgcaccaggttcttgtagtccaagttgccagtcacgtcaggggggaaggcggcgaacatctggtcaacctcctccttggaaaacctctccgcctgcgtggtcagcatttcccgaacgtaatcagccttcagcacccctttgccttcagggtcaaacactttgaatgcgttgagaatggtttcctcagggtccgctcccttaagtttctccccaaacattgtgaggaacacagtaaagttaattggacccggagcctccttgatcatttcatcaatttcttcatttttcacgttcactcgcccaagggcagcaaaggtgtctctcagatcgttcttgtcgatgaagccatccctgttctggtccatgatagtgaaggcctccttaaattcctggatttgggtctgttcgaacatggagaacacgttggagttggcgcccccggctctcttctttgctttcttaggtgccatggtggaaaggacccagcactgcctcccgagaagaattncacactccggccccccgcgtacctt

SEQ ID NO: 11039 - DNA, 447 bp, Homo sapiens
aggtacagtggcacacacctgtagtcccagctacttgggaggctgaggtgggaggaaggcttgagcccaggagtttgagtccaggctgggcaagatagcgagacctcatctctaaaaaaataaaataaaataaaataaataaataaaacaagccttttaatagtctggatcatatagaagattaatattatgatggattgcacattaatgtctcaaaggacaccccccgccaaaatcaccctactaaaaatcacactgggtttctaatcttggggtttagaaattttcttcttatgctttaaaaactcattttacttcctttatcctctgattttttgggaagacagagggtgcttcttcttggactcttgagtcctggacactaaattcctccctcagttctagtgcccaggctaagcagagacactaaatcccttacttcctctc

SEQ ID NO: 11040 - DNA, 309 bp, Homo sapiens
ccgggcaggtacagggagttgtaggtgagcagccgctccagcagtgagtatcccagtccatgcttctgggtcagtggagaacgcagcacaggccccagctgccgagggtctcctgccagcaccagctgccctcctggatcacctgtttcctttacttccatcagccctgctatagctaccagactctcaggctccatgcagtggccagcctcatcgatgaagatgtgtgtgaagtgatcaatgggaaactgggccgagaccaacctgccggcagtgatgagggtggtaattaagacccggtattcctgc

SEQ ID NO: 11041 - DNA, 439 bp, Homo sapiens
ccgggcaggtacttttttttggtcttgatccatgtggcccattagactctacattaatttttattttccacttcttgaatatacaatgatatatcaagatcgagtgttggagagtaattagtattgcttctaattctaagggatacagaggctgacagataccccccttctatatctgaagttcatagcggctttgtctatagcgtcttgctgctaatgttgcatagcaaatgtctaacaaaatatcccaaacttccaaacacactaggaaagattaaaggcctttgtaagtagagttgcattctgggtaatgagaaactgtgaggccaatggcttttaaaatatgattgtgagattactgagggtgtgacttatagaccgctgaacgacttgtcaagcttgagaattttttcccattgactattcaaatgtccaatat

SEQ ID NO: 11042 - DNA, 371 bp, Homo sapiens
  misc_feature 317: n = A,T,C or G
ccgggcaggtacgtttgctcatacacgcacatccaaaagcctgtgcctcattcctggccatgggtgaggacttggtctgtcacggctgatgaggactcccacaaccggccaagttatgtcttattatacacccccagaaagagagaaagctgccttctggaggactgattccacatgctatattcagctgagttgatttctgtgtctatttcaacccataacctgaagaatgatcaccttattccttattcattaattttcttgattaatagggaaacttgggaatagctataaagtaaaacttgggtggaacctgnggccctggcatcacacaagtgtgattaggatggtcaaggtcatcaggagtacct

SEQ ID NO: 11043 - DNA, 437 bp, Homo sapiens
agcgctatacatatactactactatagggtcgagcggccgcccgggcaggtacgcggcgggttacattgaatgtcaatgttatttgttctgcacgtaaactttgtttccttctgaaaaaataacatgtaagtcattaagttatctaaaaacacaaaaagtaattagttgaaattctaaattaccagatgaaataatgttttattgctacataatcaatgtagcaatatcatttgtgaaaaattcactgaaaagtttttgagctgcaatttaaagcacaattaattagcagtcaagacaatatgataaaacttagccaatgaaggtaatcattatgagactttggttatggcttttttaaacttaggccttagatttctcaaatatgaaataaatgtttttcttcatgatattgagattatttccagctatgtctttc

SEQ ID NO: 11044 - DNA, 277 bp, Homo sapiens
aggtacccaaaccctccaatccccaacgcggtctcaagttcagactgggctccagcttctgtccacagccacccccacattttctttttgtatttgtctgccaacttcagaagaacttccagataagaatttctgcctgcagctccagtatcaaggatatggggcagcacagccacaacacagagctggtgctcctcacacgtcctcttggcaatgtcctcgttgataatctcaagcagctcaggaggtggggcgttatcccccgcgtacctgcccg

SEQ ID NO: 11045 - DNA, 429 bp, Homo sapiens
aggtaccaagaggaagacagttgtccctggtttcaagctatcattcaaaactttgggattcaggactcctctgaatcaaaaatcatggaattctagatacagaggaatacagataggttatctaattcaaatcactcaatttacagatgaaaaacctggataccttgaatgaattcactcaactaaatatgtttgacttgttagaaaaacccaaaaaaagttctttaattacagtccatatgttagtttttcttctccaatgtttgtcattacttaactgtatgtgaatcagtaagactagcatgtcacaatgatgtaatttctttctttaatatgccgttgatgttgaactttttttctttccaggaagagagttctcaaccaagaaatgttaacttttgtcaacagcttccatatttgaacttctct

SEQ ID NO: 11046 - DNA, 296 bp, Homo sapiens
ccgggcaggtactccaggaggcccgtgtatttaatgaaactcccatcaaccctcggaaatgtgcccacatcctcaccaagattctttatctcataaaccagggggagcacctggggaccacggaagcgaccgaggccttctttgccatgaccaagctctttcagtccaatgatcccacactccgtcggatgtgctacttgaccatcaaggagatgtcttacattgcagaggatgtcatcattgtcaccagcagcctaacaaaaggcatgactgggaaagaagacaactaccgggcc

SEQ ID NO: 11047 - DNA, 387 bp, Homo sapiens
agtacttctagaattaattaacgcgggttgactttaatagatactaacagttttccaaagtggttacaccagctcttttaccatctccaccttgctcaccaggagagtacgagcgtcttccttgctccacattcagaccagctttgtgttggtttggtttgtcagtctttcaagttttatccattctgtgaggtgtgtacaggtattgcattttgagtttaatttgcatttgtctggtgactaatgaggttgagacatttgtctatctcctgtgaagtgtctgttcaaatctcattttctgttggattatctttacctcgatatgtataataaattttaaaaaccacttatgatttcctcttctctaaattttttaaattcttcact

SEQ ID NO: 11048 - DNA, 390 bp, Homo sapiens
agtacttctagaattaattaacgcgggcattgtgtgcagaagacctggactggaatctaacactgtgagtactccccaggatccgtgttcctctctttagcccaggcatgcagttacattacattttccaaccttccttggcattagctacgatcacgtgactgcattctggccagtggaatgtgtgtggaagtgatgtgggccaattccaggcctggcctataaaaatcccccactttttgttctctttctccatccaccatctgcatggagagctcccagcactagagggagaaaaagccaccagagggaaggagcctgggtccctgaatcactgtgtagactacctgccaaacatacaccctgaattgttatggcaataacaaatac

SEQ ID NO: 11049 - DNA, 375 bp, Homo sapiens
agtacttctagaattaattaacgcgggggcgctaggacctggagggctagtcggcgggctgcgcgtccggccgctagctgagctggaggccaccggccagagccgaccccaggagtgagagagacaggggcgtgcgtgagttccggcggcctgcaccgggcaaaccccgtaccttcccagcatcggctcagcaacccacgtgcatccaggccggtcaatgtcattgagtcacctccgcgccttggccaccctggagtcccgagaatccgaagttccagacaaatgcccaaactacattcctgcatgttcgaaagcgtaaattgcaaagcacaaatccagttgtagattgtggccgggagcagtggctcacgcctt

SEQ ID NO: 11050 - DNA, 454 bp, Homo sapiens
tgggtgatatccccgcgctcttaccctcactaagggatcaatgctaggtccccggcccccccctcaaaagtccttctagaattatttaacgcgggggttttaaaaaaagaaaagaaagcgccttcaaggccatctgtttctctgctactaccctttttggaaagacaaatctccttcccctccctgtcctccttccttctacattcccctagggctgtgtacctctctctcagcgtgccctgcctcggtgcctctgtggcagggccaggtctgacttcccagatgagcttgctctcctaagctgcatcattgcatgactctcctctttcctaacctccctcactcctccagctcccttctgctggtgaatgacatctcttcacgccacacagtcacaggacggctgctccaccaccggcatcacatctcctttccaggcaggaagaagaggaag

SEQ ID NO: 11051 - DNA, 341 bp, Homo sapiens
tttttttttttttttttttttttttttttagatggagtcttactccgtcacccaggctggagtgtggtggtgtgatctcagctcacagcaacctgacctcaggtgattcacccgcctttgtctcccaaagtgctgggattacaggcgtgagccactgcgcccgcgcgtcttttgaatttttttaaactgaagtttaattgcctttgagtttgatcattcactatttggcatttgtatttcttttgttaattatctgctcaagctctaatttcataatggaaatttaatggattaacatataacacccactatcacccgccttaattaattctagaagtact

SEQ ID NO: 11052 - DNA, 588 bp, Homo sapiens
  misc_feature 126, 149, 524: n = A,T,C or G
tttttttttttttttttttttttttttttgaagcgacggggtcttcctatgttgcccagactggtcttgaactcctgggctcaagcgatcctcccatgttggtctcccaaaatgctgggattacanggcgtgagccaccattgcccagnccagatgtaacatatttttaaagtcagtccgtagggttgaatttacctgtcatttctaatttgtcgacattaaaaacatcctagatgtgtttcttggcacacttgcctgatcgtttccataaggtcagttcctaaaaatggaatcattgtgccagggtttgtacatttaaaatattgatccattttgccagactgccatccagcagggctctagcaatttacacatttaaggaggcacttaccctcatatgcccactttgtacttacatggccctgagagtgacagcctccttaaattttgcatccttccttctccccatcttactccaagccctgctaaggaaatggcaaagtttcatgtccactgggctttgnattaatttctttgaaagtgcctattcttttttccccatcccgccttaattaatttagaagtact

SEQ ID NO: 11053 - DNA, 355 bp, Homo sapiens
agtacttctagaattaattaacgcgggttgactttaatagatactaacagttttccaaagtggttacaccagctcttttaccatctccaccttgctcaccaggagagtacgagcgtcttccttgctccacattcagaccagctttgtgttggtttggtttgtcagtctttcaagttttatccattctgtgaggtgtgtacaggtattgcattttgagtttaatttgcatttgtctggtgactaatgaggttgagacatttgtctatctcctgtgaagtgtctgttcaaatctcattttctgttggattatctttacctcgatatgtataataaattttaaaaaccacttatgatt

SEQ ID NO: 11054 - DNA, 869 bp, Homo sapiens
tttttttttttttttttttttttgaggtggagtcttgctctgtcaccaggctggagtgcagtggtgcaatcttggctcactgcaaccttcccctcctggctgagttaacttaggagagcttcctggagagggcacctttgaagataggaaggatttcatgaagtctttactaggccactagagtagaagcagtgggagacttcctggagaagagctcatggaaagaaaaacctaccgctggccctttgggaactgctttgggcctctttagtcctaggctcacacgccccttagaaacaaagtaagaataaagccagggataatacagtgagtggccaagaacacagactctggagccagactacctgggtttgaatcccagttaccagccatgtgactttgatcaagttgcttaacctttgtgtgcttcagtttcctcatctgtaaaataaggggatggtaattgtgacttcccagaactatggtggagagcaaatgggttaagagtgtgccgctgtaaactgtaaagtgctgggctttcattgggaagtattacctttcattgcttgaattgagactggttgctggggcagtttgaagagggagttaaaagaaatggaatcattgtgcaacttaggaatccctggggacctggccgagttgcaacccccagagcaattcctcaggcctggatgtatggcgaccggaccctcagtgtgcccctggggcccttgtgacctggcctttgggccaagagaccccttttccaacacttccctttgacttccaggccaaagagggttccgggagggggaacaggcctttctggtcaccctggaaccccaggtgatgtcggccaacttgcctcg

SEQ ID NO: 11055 - DNA, 357 bp, Homo sapiens
ttttttttttttttttttttttttttttgaagaatcaacagactctatatttgatcacaaagcaaaagtttaagtgtattacttaaaattttaagacaaaatctggaataattataactaacacaaattttgaggtagaggaagagaattctagagataggtgagataaaattttcatctttgataatgagtagacaaaaacactacctttaacaagtgaagaatttaaaaaatttagagaagaggaaatcataagtggtttttaaaatttattatacatatcgaggtaaagataatccaacagaaaatgagatttgaacagacacttcacaggagatagacaaatgtctcaacctc

SEQ ID NO: 11056 - DNA, 616 bp, Homo sapiens
tttttttttttttttttgagatggagtcttggtctgtcgcccaggctggagtgcaatggtgcagtctcagctcactgaaacctctgcctcccgggttcaagtgattctcctgcctcagcctaccgagtagctgggattacaggggcctaccaccatgcctggctaatgtttgtatttttagtagagatggggcttcaccatgttggccatgctggtctcgaagtgctgacctcgtgatctgtccgcctcggcctcccaaagtgctgggattataggcgtgagccactgctcccggccacaatctacaactggatttgtgctttgcaatttacgctttcgaacatgcaggaatgtagtttgggcatttgtctggaacttcggattctcgggactccagggtggccaaggcgcggaggtgactcaatgacattgaccggcctggatgcacgtgggttgctgagccgatgctgggaaaggacggggtttgcccggtgcaagccgccggaactcacgcacgcccctgtctctctcattcctgggggcggctttggccggtggcctccagcttagctagcgagcggaccaacagaccgccactagcccttacagaacctat

SEQ ID NO: 11057 - DNA, 369 bp, Homo sapiens
agtacttctagaattaattaaatgtgaaaagcaaatttgaaagcatcttagtctgtaaaactacttcatgtataaaaaataaacatttgacagaactctcagagcaaagctatctgagggattctttaaagcttccaatttatcaaattacctttttttttttggtcggcagggggaagtagtctcactctgttgcccagggtggagtgcaatggcaggatctcagctcactgcaacctttgtctcccaggttcaagtgattctcccacttcaacctcccgagtatctgggactactggcatacaccaccacacccggctaattttttgtattttttagtagagaatagggttttaatatgttgggcca

SEQ ID NO: 11058 - DNA, 397 bp, Homo sapiens
agtacttctagaattaattaaggcgggcacccagggatcgcaggtggccgaatactgcaggtggcttttgaaggcatcgatgcacactttgagggcctgccttggctcctgcaccccaccacagttcgtgtttccttccttttattctttccacccagaaaggtgacaaatccaagccctggatgtgaggggggtccacaagagtaattctggagagatggggtcaggtgaggaatggttatagacccagggagccaagtcacgggacctgagtgaccccatggctgacctaccgagacctccaatcgccagcatcgggtaggcccacacgtgtgggagaggaaagatagagttactggcccatcagcaagcagagctggcagaagtacctgtgcag

SEQ ID NO: 11059 - DNA, 387 bp, Homo sapiens
tttttttttttttttttgagatggagtcttggtctgtcgcccaggctggagtgcaatggtgcagtctcagctcactgaaacctctgcctcccgggttcaagtgattctcctgcctcagcctaccgagtagctgggattacaggggcctaccaccatgcctggctaatgtttgtatttttagtagagatggggcttcaccatgttggccatgctggtctcgaagtgctgacctcgtgatctgtccgcctcggcctcccaaagtgctgggattataggcgtgagccactgctcccggccacaatctacaactggatttgtgctttgcaatttacgctttcgaacatgcaggaatgtagtttgggcatttgtctggaacttcggattctc

SEQ ID NO: 11060 - DNA, 384 bp, Homo sapiens
agtacttctagaattaattaacgcggggaggattgagaaaagccaagtcctcagcaaatacaacttaacatagagaagaaaccaataaatacacacacaaaagtcagatattaagcccactgcacattcactgccaagaatgctcaggccctgggtctagtaaccaaaacatggcactcactgtgggcctttcactctgtgggtacagccccagctctgccatttccaggatcatgctattaccagtgactatctcctaaagggattgtggggaaagccaaaatacaaaaaaaagggcaatagagttccaagtctgttgctttattcagcacataaagaaacagcaatattgaaatagctctccccaaagaaagactatgaatt

SEQ ID NO: 11061 - DNA, 415 bp, Homo sapiens
tttttttttttttttttttttttttttttgaaggattacttatggaggttttattatttttatttatttttgagactgagtcttgctctgtcatcaggctggagtgcagtggctcactgcaacctccgcctcccaggttcaagcaattcttctgccctaacccctcctagtagctgggataacaggtgtcccccaccatgccccaattaatttttgtatttttggtacagacagggtttcaccatgttggccaggatggtctcgatctcgttgaccttgtgatccgcctgcctcggcctcccaaagtgctgggattacaggcgtgagccaccgcccctggactacttatggagggttttaaaaaatcttttaagtccaggcctgaacgtttagagaaggttacaaaggcggccag

SEQ ID NO: 11062 - DNA, 849 bp, Homo sapiens
  misc_feature 648, 649, 650, 652, 655, 656, 657, 658, 659, 661, 663, 664,665, 666, 667, 668, 669, 670, 672, 673: n = A,T,C or G
agtacttctagaattaattaaggcgggtgatcacaaggtcaagagttcaagaccatcctggctaacatggtgaaaccccgtctctataaaaatacaaaaagttggccgggcgtggtggcgggcgcctgtagtccagttactcgggaggctgaggcaggagaatggcgtgaacccgggaggcggagcttgcagtgatccgagatcacgccactgcacgccatcctaggcaacagagcgagactccatctcaaaaaacaaacaaacaaaaagttaaattccagtgatacagagactgccactgggaatttttagttttctgttattctttttttttccaaaaccaaggatacctaagaaagaatatttaagcagcctaagccaggcgtggtggctcacgcctgtaatagcactttgggaggccgaggctggcagatcacttgagatcaggagttgacaccagcctggccaacatggcgaaaacccgtctataccaaaaatacaaaaattagccaggtgtggtggtgtaatcccagctactcgggagactgaggcaggagaaccgcttgaacctgggaggcaaaagctgcaatgagctgagattgcgccactgcactccagcctgggtgacagagtgagaccctgtctcannnanaannnnnancnnnnnnnnannggcgggccgcaccgggtggaagctcatttggcctatagtgagccgtatacccgccctacttggcgcggtttacaacgtcggaaggggaaacctgtggttcccaataattgcttgggaatatccctttgccagtgggtaatagcaaaaggccgcccatggcctttcaacaatggcaa

SEQ ID NO: 11063 - DNA, 295 bp, Homo sapiens
  misc_feature 264: n = A,T,C or G
agtacttctagaattaattaacgcgggggaaaactgtcttacttaaacaaaatgtattttaggaaaatgcctgtttcaagggtttattactgttttataactaagagacttgggactttagtatacgaaaaggtgtcatttcaaatgggggaaaatgaattattcaacaaatgatcttgggacaactggatagccattcagaaaaaaagtgaagctggaacactataacatgctttaccccacaataaatcagagttaaatgtnaaaaaaaaaaaaaaaaaaaaaaaaaaaaaag

SEQ ID NO: 11064 - DNA, 376 bp, Homo sapiens
agtacttctagaattaattaacgcggggaggattgagaaaagccaagtcctgggaatacaacttacataaaagaaaccataatcacacacaaaagtcagaattagcccactgcacattactgccagaatgctcaggccctgggtctagtaaccaaaacatggcactcactgtgggcctttcactctgtgggtacagccccagctctgccatttccaggatcatgctattaccagtgactatctcctaaagggattgtggggaaagccaaaatacaaaaaaaagggcaatagagttccaagtctgttgctttattcagcacataaagaaacagcaatattgaaatagctcttcccaaagaaagactatgaattacat

SEQ ID NO: 11065 - DNA, 391 bp, Homo sapiens
agtacttctagaattaattaaggcgggggaagggatagcatgatattcatatacagacttgaaacaaagaaaaatcacagaatacataggttttctatataaataagctgtcatattttttctttctttgctagcaaatataccttcttaaaaatgtttgattatcaattcacccaagaatttcttttagacttcctctataaaaggacattactatttatatttccccaatgcaatgtaattcatttaaaaatactgtgaagtctgactatgagtcaggcattatattttgttttaggatgaataagggaactcaaaaaacgaaggcaaataaagatgaatagttagatggataagcatgctgcaaagtcgataagggtacaatgaacac

SEQ ID NO: 11066 - DNA, 294 bp, Homo sapiens
tttttttttttttttttttttttttttttttacataaaactctgatttattggggggtaaagcatgttatagtgttccagcttcactttttttctgaatggctatccagttgtcccaagatcatttgttgaataattcattttcccccatttgaaatgacaccttttcgtatactaaagtcccaagtcttttagttataaaacagtaataaacccttgaaacaggcattttcctaaaatacattttgtttaagtaagacagttttcccccgcgttaattaattctagaagtact

SEQ ID NO: 11067 - DNA, 294 bp, Homo sapiens
tttttttttttttttttttttttttttttttacatttaactctgatttattgtggggtaaagcatgttatagtgttccagcttcactttttttctgaatggctatccagttgtcccaagatcatttgttgaataattcattttcccccatttgaaatgacaccttttcgtatactaaagtcccaagtctcttagttataaaacagtaataaacccttgaaacaggcattttcctaaaatacattttgtttaagtaagacagttttcccccgcgttaattaattctagaagtact

SEQ ID NO: 11068 - DNA, 236 bp, Homo sapiens
agtacttctagaattaattaaggcgggggcaagatttgtccttcctgcggctgcgaacccaccgcgggtttgcgtatttcccttgattcctggaggacagagctgggatggacttgacccaagactcagggatgacgaaagggaaataaacagagtaacgtttaagaaaaaaagaaacacaaaaaaataaaaaaaaaacaatggaaaaaaaaaaaataaaaaaaaaaaaaaaaaag

SEQ ID NO: 11069 - DNA, 358 bp, Homo sapiens
ttttttttttttttttttttttgggatgctcaacctataatacccaaaggctctatttcagtagaatttattggtttgctgattatagcagtgacatagttgcattctagagaccttagaaaatgcagaaaatttcaagaaaaacatttaaattgtgctcatagtgaaactgagaggtgaccactcttaatattttgtggcataagcattccagtcttttatctttctcaaagtttcacataaactttctcaaaggccattaaatacttttccatagcctgattttttgtgaccacatagtatcctattatattgataataccataatttacctaacccatttttatatatttcggat

SEQ ID NO: 11070 - DNA, 617 bp, Homo sapiens
ttttttttttttttttttttttttttggaagaatcaacagactctatatttgatcacaaagcaaaagtttaagtgtattacttaaaattttaagacaaaatctggaataattataactaacacaaattttgaggtagaggaagagaattctagagataggtgagataaaattttcatctttgataatgagtagacaaaaacactacctttaacaagtgaagaatttaaaaaatttagagaagaggaaatcataagtggtttttaaaatttattatacatatcgaggtaaagataatccaacagaaaatgagatttgaacagacacttcacaggagatagacaaatgtctcaacctcattagtcaccagacaaatgcaaattaaactcaaaatgcaatacctgtacacacctcacagaatggataaaacttgaaagactgacaaaccaaaccaacacaaagctggtctgaatgtggagcaaggaagacgctcgtactctcctggtgagcaaggtggagatggtaaaagagctggtgtaaccactttggaaaactgttagtatctattaaagtcaacccgcgttaattaattctagaagtacttttgaaggggggcccg

SEQ ID NO: 11071 - DNA, 389 bp, Homo sapiens
agtacttctagaattaattaacgcgggttgactttaatagatactaacagtttgccaaagtggttacaccagctcttttaccatctccaccttgctcaccaggagagtacgagcgtcttccttgctccacattcagaccagctttgtgttggtttggtttgtcagtctttcaagttttatccattctgtgaggtgtgtacaggtattgcattttgagtttaatttgcatttgtctggtgactaatgaggttgagacatttgtctatctcctgtgaagtgtctgttcaaatctcattttctgttggattatctttacctcgatatgtataataaattttaaaaaccacttatgatttcctcttctctaaattttttaaattcttcacttg

SEQ ID NO: 11072 - DNA, 708 bp, Homo sapiens
tttttttttttttttttttttttttgggaaggagtttcactcctgttgccaaggctggagtgcaatggcgcaattaggctcactgcaacctcctcttcccgggctcaagtgattctcctgcctcagcctcccgagtagctgggattacaggtacccaccaccatgcccagctaattttttgtatttttaatagagatggggtttcaccatgttggccaggctggtcttgaactcctgaccttaggtgatccacctgcctcggcctcccaaagtgctgggattacaggtgtgagccatggtacccagccttcctcagcatttctgtctgtccccacacacaggctcagcagccagagaaagccaagggcatataggcagggcaacaacatctgtgcaccttgcggctggctgctagtttcctagaaacatattcttagacatgcctaagaaaaaaagcacttgtagggtgtttaaacgccagggttccttgggttccagggataaaaccatagagttccaaacaacatttggtccaaaaaagaaaagcacttgtttctgaggacacttaaacggtgttggagaaaattaggaaagggaaaccaggggtaaaaataaaaagttttttagaaataaagggggttcaaaaagttttaggaactggcacgaaaaatttccaattttcggaaggaaaaaaatgtcggtcttttt

SEQ ID NO: 11073 - DNA, 436 bp, Homo sapiens
  misc_feature 212: n = A,T,C or G
gttttggttttttttttttttttacttgaattgttgttatagtgcttccgttatttatttttattttttttattatactttaagttggagggggcatgtgcacaacgtgcaggtttgctacatatgtatacatgtgccatgttggtggctgactcattaactcgtcatttatattaggtatatatacgtgttcattgtacccttatcgactntgcagcatgcttatccatctaactattcatctttatttgccttcgttttttgagttcccttattcatcctaaaacaaaatataatgcctgactcatagtcagacttcacagtatttttaaatgaattacattgcattggggaaatataaatagtaatgtccttttatagaggaagtctaaaagaaattcttgggtgaattgataatcaaacatttttaagaagg

SEQ ID NO: 11074 - DNA, 388 bp, Homo sapiens
tttttttttttttttttttttttgggatgcttaacctataatacccaaaggctctatttcagtagaatttattggtttgctgattatagcagtgacatagttgcattctagagaccttagaaaatgcagaaaatttcaagaaaaacatttaaattgtgctcatagtgaaactgagaggtgaccactcttaatattttgtggcataagcattccagtcttttatctttctcaaagtttcacataaactttctcaaaggccattaaatacttttccatagcctgattttttgtgaccacatagtatcctattatattgataataccataatttacctaacccatttttatatatttggattttttccaattcattattattatgaataag

SEQ ID NO: 11075 - DNA, 389 bp, Homo sapiens
agtacttctagaattaattaatccacccttgaaccagtctacctccagaattcctggtacatgagataataacatttcctttgtttaagtcacttttagttggattttctgttatttccaaccaaaagcattcaattgatagaagtgatgaagtaagactggacagcatttatccacccacatatttgtaaaactatgcctgtctgaccagacgtggtggctcatgcctgtaatcccagcactttgggaggctgctgcaggaggattgcttgaggccaggagttcaagaccagcctgggaaacatagcaagaccttatctctagaataaataaataacaataaaaattttaaaactatgcctctcagacctaaactaggcccatagaag

SEQ ID NO: 11076 - DNA, 617 bp, Homo sapiens
  misc_feature 140, 179, 218, 224, 225, 245, 271, 600, 602: n = A,T,C or G
agtacttctagaattaattaacgcgggttgactttaatagatactaacagttttccaaagtggttacaccagctcttttaccatctccaccttgctcaccaggagagtacgagcgtcttccttgctccacattcagaccncagctttgtgttggtttggtttgtcacgtctttcaagtntttatcccattctgtgagggtgtgtaccaggtattgcanttttgnnagtttaatttgcattttgtnctggtgacctaatgaggttgagacantttgtctatctcctgtgaagtgtctgttcaaatctcattttctgttggattatctttacctcgatatgtataataaattttaaaaaccacttatgatttcctcttctctaaattttttaaattcttcacttgttaaaggtagtgtttttgtctactcattatcaaagatgaaaattttatctcacctatctctagaattctcttcctctacctcaaaatttgtgttagttataattattccagattttgtcttaaaattttaagtaatacacttaaacttttgctttgtgatcaaatatagagtctgttgattcttcaaaaaaaaactnanaaaaaaaaaaaaaag

SEQ ID NO: 11077 - DNA, 391 bp, Homo sapiens
agtacttctagaattaattaacgcgggttatctaaaattagatacttaatgtatctttcagaaaatcagataaaatgccctttggatggacccctgtctaaatgggcacagtaagaaatgttatattcaacttgtaaaagatttggttttattaaaattcatatttgaactccccaataaaccaataatttatattctatattttgttacaagttataatggttccagctgggcgtgatggctcacgcctgtaatcccagcactttgggaggccgaggcgggcgtcacctgaagtcagtgagaccctgtctctactaaaaatacaaaaattagctagggcgtggtggcaggtgcctgtaatcccagctactcgggaggttgaggagaagaa

SEQ ID NO: 11078 - DNA, 295 bp, Homo sapiens
agtacttctattaattaattaacgcttgttaaaactgtcttacttaaacaaaatgtattttaggaaaatgcctgtttcaagggtttattactgttttataactaagagacttgggactttagtatacgaaaaggtgtcatttcaaatgggggaaaatgaattattcaacaaatgatcttgggacaactggatagccattcagaaaaaaagtgaagctggaacactataacatgctttaccccacaataaatcagagttaaatgtaaaaaaaaaaaaaaaaaaaaaaaaaaaaaaa

SEQ ID NO: 11079 - DNA, 314 bp, Homo sapiens
tttttttttttttttttttttttttttttaaagcaaaactcccgacagccgagccccgttcggtgccttttcttttttttttctttaatggagtgaaatctactttgctcaggaagcctgcaaatcacattttcaggccaaacgaggcagtattttaaaaggggtctcctggggcaggattaggaaggctttccactccactcacgcattttcagtgtaggcgaatcgtaaaacggagggcagaacgaaaatgagcggatctgggagtgcaggctgcgcttcgtccccccgcgttaattaattctagaagtact

SEQ ID NO: 11080 - DNA, 415 bp, Homo sapiens
tttttttttttttttttttttttttgagacaagatcttgtcctgtcacccaggctggaatactggggtgcaatcatagctcactgcagcctcaaacttctgggctcaagtgatcctcccacctcagcctcctgagtagctgggaatgcaggcacataccaccatacctggctaattaaaaaaattttttttaatctcactgtattactgaagctggtctggaactcctggccttgaacgatcatctcagcctccccaaactctgggattacaggcatgaaccattacacctggcttgaagagaagaggttcttaatattgaagaagtccatttatctgtttttgttttttttcccctcatgtattgggtttttgggattgaatctaagagattgttgcttaactcaagaccacag

SEQ ID NO: 11081 - DNA, 519 bp, Homo sapiens
ttttttttttttttttttattatatttgaaaaaacaaccgaccttttaatggcataattcttgccaaaattaattatgtacattttaaaagggcaaacaggcccttcttaacattcttttgcattcccaccaataaaggcgagccatttattttgatattataagtaatttggaaaccaagatagaaccagcagtttgcccaatatatccttttagaaaatggtgccttgtgttggcgcactggttgcacaacccgcccctttccccgccctttaaaattaatttcctaagaaaggtcaccttctcgaagggggggggggcccccgggttactcccagaacttttttgtttccccttttagatgagggggtttaatatggcgccccttgggtcgtaaatcaatgggtcattatatcttgttttcccctgttgttaaaaatttgtataatctcgtatacccaaatttccaatacaaggaattccccaggttctggaaatccttaatcatttatttattaa

SEQ ID NO: 11082 - DNA, 374 bp, Homo sapiens
gagctccccgcggtggcggccgcttttttttttttttttttttttttttttggagacagggttttgacatgttggtcaggctggtcatgaactcctggcctcaagtgatccacctacctcggcctcccaaagtgctgggattacaggtgtgagccaccgcgcccaaccctgtgtttattcttaggtctgtactacgctttatgcctcagtttccacagttaaaacacgttattttattcctcacgttataggagcaatttgtattcataaacttggccttcaccttcaacttctgaagattttaatacagcgcaaatgatttggggtctgtgaattcagttttatttatttggctccttcctttaaggagtcag

SEQ ID NO: 11083 - DNA, 294 bp, Homo sapiens
tttttttttttttttttttttttttttttttacatttaactctgatttattggggggtaaagcatgttatagtgttccagcttcactttttttctgaatggctatccagttgtcccaagatcatttgttgaataattcattttcccccatttgaaatgacaccttttcgtatactaaagtcccaagtctcttagttataaaacagtaataaacccttgaaacaggcattttcctaaaatacattttgtttaagtaagacagttttcccccgcgttaattaattctagaagtact

SEQ ID NO: 11084 - DNA, 371 bp, Homo sapiens
agtacttctagaattaattaacgcgggattttctttggtcttatgccaatatttgcaatcagctagtatgatgttttcttattttagtttattgccagtgtgatttagtgcttcattcatcattaattatctttataattttgtctttgaattttccttgtaaaaagagactggtcttactttttttatagtccttactaacaaggacactgtaagacttgtgagttggtgtggactatgccatcagatatatccatcttgttatcccaaagttagatccagttaaggccagctgtgggtagaaggtcaaagtagatgacgggcgaaggataatttttaaaaggacttttgctaaagaagtagatgtatct

SEQ ID NO: 11085 - DNA, 810 bp, Homo sapiens
  misc_feature 24: n = A,T,C or G
tttttttttttttttttttttttnggagagacaaacatgggccacatttttaagacaaacatggaccacaaccatgctgagagaacttagagtgaagtttacatggctatctttcttagtattaaaattttacctgataaacatcaaacatacgaccaacatagcatataaagcagctctacagatattttcctactgcccaaaatatcatataatgcacatgtaggtcacatgtgagtaggcaagagattctggaacacagaagcaagacaacaggatcacagcaatttcagtatgctctgcttgttataggaaatccccagaacattctccaattactgaacaaaaaaagcaataaaactcagatttgtctgcctggggagaaataaacagaaatagaaagtgaatagcaaaacaaagctatctggtgaaaagacattcttacttggaaggagttaagattttgccccttccatgggtgtacttaatgaggcaagcgtcaagcggcctgacagcccgtggcacactgtctacagctgatgtcaatggtacacatatagccagggtgaagcaacctaaaataggccctccttgagccttctaactttttagaaagggcagattacatagccaataagttaatgagttttgaaggtaaaattatgctcaaatttgaattgtgcaatataaaaccttttctcttaaatttgctcaactcaacaaaatctttgggcctttaattttttatgtgtaaaatggggatcatgagagcctttccaagggggtggtatgaatataagtgagatgggt

SEQ ID NO: 11086 - DNA, 360 bp, Homo sapiens
  misc_feature 360: n = A,T,C or G
tttttttttttttttttttttttgaggtggagtcttgctctgtcaccaggctggagtgcagtggtgcaatcttggctcactgcaaccttcccctcctggctgagttaacttaggagagcttcctggagagggcaggctttgaagataggaaggatttcatgaagtctttactaggccactagagtagaagcagtgggagacttcctggagaagagctcatggaaagaaaaacctaccgctggccctttgggaactgctttgggcctctttagtcctaggctcacacgccccttagaaacaaagtaagaataaagccagggataatacagtgagtggccaagaacacagactctggagccn

SEQ ID NO: 11087 - DNA, 358 bp, Homo sapiens
tttttttttttttttttttttttttttggagacagggttttgacatgttggtcaggctggtcatgaactcctggcctcaagtgatccacctacctcggcctcccaaagtgctgggattacaggtgtgagccaccgcgcccaaccctgtgtttattcttaggtctgtactacgctttatgcctcagtttccacagttaaaacacgttattttattcctcacgttataggagcaatttgtattcataaacttggccttcaccttcaacttctgaagattttaatacagcgcaaatgatttggggtctgtgaattcagttttatttatttggctccttcctttaaggagtcaggctaatgc

SEQ ID NO: 11088 - DNA, 850 bp, Homo sapiens
agtacttctagaattaattaacgcgggatatacatattgtcatgctatgttctctaacttgatatcaacagcgtatctctgacatgatataaaatcatgtgcttatgacatgcattaaaaggagaaggctgatctaatatcctaggtctaatggatccactagcagatatacacggctaggtacacacactgggatatctaggtacatgcccatagttcatatacagactttctaaaatcatcgtatttaaaagcagaaaagtgccgggcacagtggctcacatctgtaatcccaatactatgggaggctgacgtggtcgaatcacctgaagtcgcgagctcaagaccagcctggccaacatggtgaaaccccgtctctactaaaaatatgaaaaacagccaggcatggtggcaggtgcctgtaatcccagctactcaggaggccgaggcaggagaatcacttgaacccgggaggtggaagttgcaatgagcaccgatagttccattgtactacatcctgggggacaagagcaaaattctgtgttaaataatctaattttataactaaatatgcgcggtcggcaacgtgcggaacctcaattagccctaactgagttgggttacgcgccttactcgcgggaattaaaaactctttgaatggaaaaacgctgcatataccaaagtaataaactggcataaagcccttttacccatcggtgtaataaccaaaagcccgcccttgggcctttccaccgtaccatactgatggctcaggaaatttagctttaatatttttaaaattcgctttaaatttttgtaatatttgatttttaccataggcgaaatcctt

SEQ ID NO: 11089 - DNA, 356 bp, Homo sapiens
gtttgatataccagttcccttaccctctctactagggaaaaaagctggttaccgccccccctcagagactcttagatatataacgcgggggaaaactgtcttacttaaacaaaatgtattttaggaaaatgcctgtttcaagggtttattactgttttataactaagagacttgcgactctatatacgactaggtgtcatttcaaatgggggaaaatgaattatccaacaaatgatcttgggacaactggatagccattcagataaaaagtgaagctggaacactataacatgctttaccccacaataaatcagagttaaatgtaggaaaaccaaaaaattgatatatttaaaaaa

SEQ ID NO: 11090 - DNA, 557 bp, Homo sapiens
  misc_feature 1: n = A,T,C or G
ngtcgatgcttgcacatcgccaatagtatgatactaggcgaattggagctgcccgcggcggcggccgctttttttttttttttttttttggggttttgaacccagaggccccaaactagcagcctgtcctcctcagtagccccagcatcccttcatcattttgttgcccttctatgggcctagtttaggtctgagaggcatagttttaaaatttttattgttatttatttattctagagataaggtcttgctatgtttcccaggctggtcttgaactcctggcctcaagcaatcctcctgcagcagcctcccaaagtgctgggattacaggcatgagccaccacgtctggtcagacaggcatagttttacaaatatgtgggtggataaatgctgtccagtcttacttcatcacttctatcaattgaatgcttttggttggaaataacagaaaatccaactaaaagtgacttaaacaaaggaaatgttattatctcatgtaccaggaattctggaggtagactggttcaagggtggattaattaattctagaagtact

SEQ ID NO: 11091 - DNA, 349 bp, Homo sapiens
tttttttttttttttttttttttgggatgctcaacctataatacccaaaggctctatttcagtagaatttattggtttgctgattatagcagcgacatagttgcattctagagaccttagaaaatgcagaaaatttcaagaaaaacatttaaattgtgctcatagtgaaactgagaggtgaccactcttaatattttgtggcataagcattccagtcttttatctttctcaaagtgtcacataaactttctcaaaggccattaaatacttttccatagcctgattttttgtgaccacatagtgtcctattatattgataataccataatttacctaacccatttttata

SEQ ID NO: 11092 - DNA, 350 bp, Homo sapiens
  misc_feature 59: n = A,T,C or G
ggcctggatcgacctgatactgagggtaatcggagataatggcaaagtcggccgctcgnttttttttttttttttttttttttttttaccttaaacatatattccttggggggtaaagcatgttatagtgtttcagcttcactttttttctgaatggctatccagttgtcccaagatcatttgttgaataattcattttcccccatttgaaatgacaccttttcgtatactaaagtcccaagtctcttagttataaaacagtaataaacccttgaaacaggcattttcctaaaatacattttgtttaagtaagacagttttcccccgcgttaattaattctagaagtact

SEQ ID NO: 11093 - DNA, 374 bp, Homo sapiens
  misc_feature 353, 354: n = A,T,C or G
agtacttctagaattaattaaatgtgaaaagcaaatttgaaagcatcttagtctgtaaaactacttcatgtataaaaaataaacatttgacagaactctcagagcaaagctatctgagggattctttaaagcttccaatttatcaaattacctttttttttttggtcggcagggggaagtagtctcactctgttgcccagggtggagtgcaatggcaggatctcagctcactgcaacctttgtctcccaggttcaagtgattctcccacttcaacctcccgagtatctgggactactggcatacaccaccacacccggctaattttttgtatttttagaagaatagggggttnncagcatgttggtcaggccca

SEQ ID NO: 11094 - DNA, 394 bp, Homo sapiens
agtacttctagaattaattaacgcgggcgtctccctgccaggccttgggctctgcagaggtgcccactgaaagcttgtcctgtgccctctacacctcagaggggttcagagccaagctccaggacccctgctgtcaaaaagtgttccctgggaacaagtgcagggaacagtcctgcaagcaagggactgcttgccctgctttcggacagccttctgagagccagtgaaggccagcagctgggctgaacactacatcatcctcagaaccaccctgcacagccggtgtgctccccgccatcgacaggaaaaacgggcccttagaggcacaggcaacttgctcggggttaggtgcagcgggtggcagagtcagaatgtgaggacagttgggccactc

SEQ ID NO: 11095 - DNA, 425 bp, Homo sapiens
agtacttctagaattaattaacgcggggaagataattagtggcaaacagagaataaattctctctcagtagtgtgtacttgacgttaatgccgatgataattcatctgatctacagaatattcactttaatagagagagagagttgaatgacgaggaaatagatactaaagccaatatagtcttgataccaaaataaaattaaaatgagaaactaacatgataggttcaaggccttttgggagcctgttttctttgccagatttcacattcttacagcttcatggtctttttcttctaacaaattaatcagctgagagaagctgtctttcagtgcatccatgtcatccagtgagcagggctgtagaatccagcgttttccacgtgcaagtggttcaagttcaaaatattttttgatctcttgtac

SEQ ID NO: 11096 - DNA, 382 bp, Homo sapiens
agtacttctagaattaattaacgcgggtcccggactcaagcctgactaatgtttttactttttgtggggacaggggtctccctatgttgcccaagctgttctcaaactcttgggcttaagcaatcctcccaccttggcctctcaaggtgctaggattacaaatatgaaccactctgcccagcctctaaacactgttttaaatacaaagaaatagttcttgtttctgcatgtcatagctttgtaagtttacctttttctattttatctaatattgatgtatacataggagaaagggtacttcagaacatgaattttagagcaatctaccaagtctcatgattacaatagttgaaaatttggaaaaattgtctacccagaaaac

SEQ ID NO: 11097 - DNA, 387 bp, Homo sapiens
agtacttctagaattaattaacgcggggaagataattagtggcaaacagagaataaattctctctcagtagtgtgtacttgacgttaatgccgatgataattcatctgatctacagaatattcactttaatagagagatgagagtctgaaatgaccagaggaaaatagatactaaagccaatatagtcttgataccaaaataaaattaaaatgagaaactaacatgataggttcaaggccttttgggagcctgttttctttgccagatttcacattcttacagcttcatggtctttttcttctaacaaattaatcagctgagagaagctgtctttcagtgcatccatgtcatccaatgagcaggggctggagaatccaccggtttcc

SEQ ID NO: 11098 - DNA, 359 bp, Homo sapiens
ttttttttttttttttttttttttacttgaattgtagttatagtgcttccgttatttatttttattttttttattatactttaagttttagggtacatgtgcacaactgtgccggtttgctacatatgtatacatgtgccatgttggtgcgctgcactcattaactcgtcatttatattaggcctatatacgtgttcattggacccttatcgactttgcaggatgcttatccatctaactattcatctttatttgccttcgttttttgaggtcccttattcatcctaaaacaaaatataatgcctgactcatagtcagacttcacagtatttctaaatgaattacattgcattggggac

SEQ ID NO: 11099 - DNA, 381 bp, Homo sapiens
agtacttctagaattaattaaatgataatcatattgggcattcatatgtgctaaacaccattctaagtgctgaggcactatgatgaatatgacagacagatacctgttcccagagagtttataatgttgaggtaaagagccacataaaagacaattgtgttatcacttatgaagggctttgggatcaatgaggagggatgcctaacacagacaaaaattcaaagaagcctgcatagaagaggtatcatttaggttgaaatgtgagagaaaaacagcattgtagggagaattccgggcattgtagggagaattctgggcaatgggaacagcatgtgcagagacctagaggcatgagggagggcaagtatgtttgaagatggc

SEQ ID NO: 11100 - DNA, 825 bp, Homo sapiens
  misc_feature 543, 544, 645: n = A,T,C or G
agtacttctagaattaattaacgcgggggaaaaaaaaaaagaaaagaaagcgccttcaaggccatctgtttctctgctactaccctttttggaaagacaaatctccttcccctccctgtcctccttcttctacattcccctagggctgtgtacctctctctcagcgtgccctgcctcggtgcctctgtggcagggccaggtctgacttcccagatgagcttgctctcctaagctgcatcattgcatgactctcctctttcctaacctccctcactcctccagctcccttctgctggtgaatgacatctcttcacgccacacagtcacaggacggctgctccaccaccggcatcacatctcctttccaggcaggaagaagaggaaggaggaagagacaggacaaaggtggtctttcttccagtaaagctttgactttttatctagaaaacattatctctgagcttttcacctacatttccttggccagacctgggtcacgtggtcacctctaattgagaagatgagtatttcagagggacacannttttgtcccttccaaatcagggctgtgttagggaagaaaagcggaatgggtccctgggaaggcagctcgcagtaacttcacacagtctgttcctttgtatncagcactcaagcaggcctttcctcagacacagaaaacataatggtttccaagccaacaggcagaatcccatcttgttccttcaggcaggctttttggaaggtgcagtggggcgcccttggtcttgtgcccttgaaactaaaaacagtttcctgcccacaatctcaggacaatggtggtta

SEQ ID NO: 11101 - DNA, 600 bp, Homo sapiens
ttttttttttttttttttttttttacttgaattgttgttatagtgcttccgttatttatttttattttttttattatactttaagttttagggtacatgtgcacaacgtgcaggtttgctacatatgtatacatgtgccatgttggtgtgctgcactcattaactcgtcatttatattaggtatatatacgtgttcattgtacccttatcgactttgcagcatgcttatccatctaactattcatctttatttgccttcgttttttgagttcccttattcatcctaaaacaaaatataatgcctgactcatagtcagacttcacagtatgtttaaatgaattacattgcattggggaaatataaatagtaatgtccttttatagaggaagtctaaaagaaattcttgggtgagttgataatcaaacatttttaagaaggtatattttgctagcaaagaaagaaaaaatatgacagcttatttatatagagaacctatgtattctgagatgtttctattgttaaggttgtttataatttcatgctatcccttccaacgccttaattaatatcaagaagtactttcgaggggggagcccgga

SEQ ID NO: 11102 - DNA, 429 bp, Homo sapiens
agtacttctagaattaattaacgcgggatcctcccaccacacacacagcagcaggcggtgaggacaggcctcatgcagggagacagggagcggccagacagcctggcactcctctgactgctcagggctgggccctgggacggggctcccgcctcctgaagctggggtcctcaccccagcatctgaggatcgcttctgccaagcaaaccccacacaagctttgcctcctccggaaatgtccctgaagcacacatggagtcagggagagggccagagccaaatccctcacaatgaccaaccaccagggaggaggctccgccagcccaacagcaagactccgcccaggcagcagggacacagtaagcgtttcaggaaggaagcaaggagcaagtcctgtatggctctgctcaccaacacgagatgtcctga

SEQ ID NO: 11103 - DNA, 338 bp, Homo sapiens
ttttttttttttttttttttttttttttaagagggagtcttactccgtcacccaggctggagtgtggtggtgtgatctcagctcacagcaacctgacctcaggtgattcacccgcctctgtctcccaaagtgctgggattacaggcgtgagccactgcgcccggcgtctttgaattttttaaactgaagtttaattgcctttgagtttgatcattcactatttgtcatttgtatttcttttgttaattatctgctcaagctctaatttcataatggaaatttaatggattaacatataacacccactatcacccgccttaattaattctagaagtact

SEQ ID NO: 11104 - DNA, 944 bp, Homo sapiens
  misc_feature 144: n = A,T,C or G
tttttttttttttttttttttttgggatgctcaacctataatacccaaaggctctatttcagtagaatttattggtttgctgattatagcagtgacatagttgcattctagagaccttagaaaatgcagaaaatttcaagaaancatttaaattgtgctcatagtgaaactgagaggtgaccactcttaatattttgtggcataagcattccagtcttttatctttctcaaagtttcacataaactttctcaaaggccattaaatacttttccatagcctgattttttgtgaccacatagtatcctattatattgataataccataatttacctaacccatttttatatatttggattttttccaattcatcattattatgaataatggtgtatctcagtggttattactttgcactgcatttcttatgaaagtattgagtaaaaggaagtaaagccctctcagagtgttttgtaggctgtcacatttcactccataatgtcctagtgtttgttgccaccagtgatatatgaaggtacccactgaaatgtcacacctttttggtttttctttttaaaataaaaaattaaaaagacatttaccatataatattggtcctatatatgatttattataatgtagaatcacaatcttgaggtcattaaaatattgaatttggattctcttcaatttcccttctaatgaaaagctaaagttcggtaagaaattcttcctggaaatttatggaatgagaaacatactggaattctgtacttatggaacagaaccaataaacattaggcaattatttaattctaaagtctcctcggggggggccggtccccagtttttgttccttaagggaggttaaaggcgcgttgggaaacaagggaaaagtggtcctgtgggaaatggtatcgttacatttcaaaaaattagggcggt

SEQ ID NO: 11105 - DNA, 465 bp, Homo sapiens
ggaaagctagagccattgtacatcccacatactatcagtagcttcgccccgggcccccccttgatttgtcttctagatctaattcacgcggggttataaacaaaaagaaaagaaagcgccttcaaggccttctgtttctctgctactaccctttttggaaagacaaatctccttcccctccctgtcctccttccttctacattcccctagggctgtgtacctctctctcagcgtgccctgcctcggtgcctctgtggcagggccaggtctgacttcccagatgagcttgctctcctaagctgcatcattgcatgactctcctctttcctaacctccctcactcctccagctcccttctgctggtgaatgacatctcttcacgccacacagtcacaggacggctgctccaccaccggcatcacatctcctttccaggcaggaagaagaggaaggaggaagagacag

SEQ ID NO: 11106 - DNA, 376 bp, Homo sapiens
agtacttctagaattaattaaatgaaatcatattgggcattcatatgtgctaaacaccattctaagtgctgaggcactatgatgaatatgacagacagatacctgttcccagagagtttataatgttgaggtaaagagccacataaaagacaattgtgttatcacttatgaagggctttgggatcaatgaggagggatgcctaacacagacaaaaattcaaagaagcctgcatagaagaggtatcatttaggttgaaatgtgagagaaaaacagcattgtagggagaattccgggcattgtagggagaattctgggcaatgggaacagcatgtgcagagacctagaggcatgagggagggcaagtatgtttgaagt

SEQ ID NO: 11107 - DNA, 488 bp, Homo sapiens
tttttttttttttttttttttttttttggaccagagaggccccaaactagcagcctgtcctcctcagtagccccagcatcccttcatcattttgttgcccttctatgggcctagtttaggtctgagaggcatagttttaaaatttttattgttatttatttattctagagataaggtcttgctatgtttcccaggctggtcttgaactcctggcctcaagcaatcctcctgcagcagcctcccaaagtgctgggattacaggcatgagccaccacgtctggtcagacaggcatagttttacaaatatgtgggtggataaatgctgtccagtcttacttcatcacttctatcaattgaatgcttttggttggaaataacagaaaatccaactaaaagtgacttaaacaaaggaaatgttattatctcatgtaccaggaattctggaggtagactggttcaagggtggattaattaattctagaagtact

SEQ ID NO: 11108 - DNA, 415 bp, Homo sapiens
ttttttttttttttttttttttttggaaatatgcccacccatttcaggttgagccacggataaggagggcttagctcatgtctcctgtgggaattgaggcatctcaggaaacagtatagagttggtacagttagaatgagaagaagcctggggaaagaaaccaagagtgagaaatgcgtggctattttgacttagctggagcaaccctctcataacaggctgggaagtggacccgcgttaattaacgcgggggaaattgatgaacaaacaaaggtcatagtaaaagacagacttttggggataaaaacagaaactccaagttactgtatcaacaaatgcaagtacaccacaatcagtgagcagtgtggttcattatctggcaatggcactctttcaaatagagcagggcattgag

SEQ ID NO: 11109 - DNA, 377 bp, Homo sapiens
agtacttctagaattaattaacgcgggcattgtgtgcagaagacctggactggaatctaacactgtgagtactccccaggatccgtgttcctctctttagcccaggcatgcagttacattacattttccaaccttccttgcagttagctacgatcacgtgactgcattctggccagtggaatgtgtgtggaagtgatgtgggccaattccaggcctggcctataaaaatcccccactttttgttctctttctccatccaccatctgcatggagagctcccagcactagagggagaaaaagccaccagagggaaggagcctgggtccctgaatcactgtgtagactacctgccaaacatacaccctgaattgttatgg

SEQ ID NO: 11110 - DNA, 402 bp, Homo sapiens
agtacttctagaattaattaaggcgggcgcctgtaatctcagctactttggaggccgaggcaggagaattgctagaacccaggaggcagaggttgcagtgagctgagatcgcgccactgcactccagcctgggagacagaatgagactccatctccaaaaaaaaaagaaagaaagaaagaaagaaagaaagaaggctctattttgatactgggagcctaaactgaatgattctggagaaattcacagatggggctgaggctcaccttcatgacagctgtatcaaaggcctaaatttctaaggctcagaaatcactacaataagcctatcaacagcatgtgatactctccaagcattttgcaaccttaacatttccatcctttacagtactttgatatcctca

SEQ ID NO: 11111 - DNA, 297 bp, Homo sapiens
tttttttttttttttttttttttttttttttacattaaacctctgatttattgcgggggtaaagcatgttatacgtgttccagcttcactttttttctgaatggctatccagttgtcccaagatcatttgttgaataattcattttcccccatttgaaatgacaccttttcgtatactaaagtcccaagtctcttagttataaaacagtaataaacccttgaaacaggcattttcctaaaatacattttgtttaagtaagacagttttcccccgcgttaattaattctagaagtact

SEQ ID NO: 11112 - DNA, 384 bp, Homo sapiens
agtacttctagaattaattaacgcggggaagataattagtggcaaacagagaataaattctctctcagtagtgtgtacttgacgttaatgccgatgataattcatctgatctacagaatattcactttaatagagagatgagagtctgaaatgaccagaggaaaatagatactaaagccaatatagtcttgataccaaaataaaattaaaatgagaaactaacatgataggttcaaggccttttgggagcctgttttctttgccagatttcacattcttacagcttcatggtctttttcttctaacaaattaatcagctgagagaagctgtctttcagtgcatccatgtcatccaatgagcagggctgtagaatccagcgtttt

SEQ ID NO: 11113 - DNA, 882 bp, Homo sapiens
  misc_feature 555, 790, 822: n = A,T,C or G
tatgtacccactcgcaataaccctactaactgatggaacatgagcaccgggccgcccctcgagaagtccttcaagaattaattaacgcgggggaaaaaaaaatttataagaaagcgccttcaaggccatctgtttctttgctactacccttttgggaaagacaaatctccttccctccctgtcctccttctttacattcccctagggctgtgtacctctctctaagcgtgccctgcctcggtgcctctgtggcagggccaggtctgacttcccagatgagcttgctctcctaagctgcatcattgcatgactctcctctttcctaacctccctcactcctccagctcccttctgctggtgaatgacatctcttcacgccacacagtcacaggacggctgctccaccaccggcatcacatctcctttccaggcaggaagaagaggaaggaggaagagacaggacaaaggtggtctttcttccagtaaagctttgactttctatctagaaaacattatctctgagcttttcacctacatttccttggccagacctgngtcacgtggtcacctctaattgagaagatgagtatttcagagggacacatttttgttccctcccaaatcagggctgtgttaggaagaaagcgggaatgggtcctgggaaggcagctcgcagtaactccacacagtctgtccctttgctatccagcactcacgcagccctttccttaaacacagaaaacatcaatgtcttccaaagcaaacaaccagaaatccatcttgctacttncagggcaggcttctttggtaagtgcaagtggngccccctgaggcctgtgaccttgaaactaaagacaagtattctgcccgacatacttaaga

SEQ ID NO: 11114 - DNA, 295 bp, Homo sapiens
tttttttttttttttttttttttttttttttacatttaacatatatttattggggggtaaagcatgttatagtgttccagcttcactttttttctgaatggctatccagttgtcccaagatcatttgttgaataattcattttcccccatttgaaatgacaccttttcgtatactaaagtcccaagtctcttagttataaaacagtaataaacccttgaaacaggcattttcctaaaatacattttgtttaagtaagacagttttcccccgcgttaattaattctagaagtactt

SEQ ID NO: 11115 - DNA, 440 bp, Homo sapiens
agtacttctagaattaattaacgcgggggaaaaaaaaaaagaaaagaaagcgccttcaaggccatctgtttctctgctactaccctttttggaaagacaaatctccttcccctccctgtcctccttccttctacattcccctagggctgtggacctctttttcaacgtgccctgcctcggtgcctttgtggcagggccaggtctgacttcccagatgagcttgctctcctaagctgcatcattgcatgactctcctctttcctaacctccctcactcctccagctcccttctgctggtgaatgacatctcttcacgccacacagtcacaggacggctgctccaccaccggcatcacatctcctttccaggcaggaagaacaggaaggaggaagagacaggacaaaggtggtctttcttccagtaaagctttgacttttta

SEQ ID NO: 11116 - DNA, 383 bp, Homo sapiens
agtacttctagaattaattaacgcgggggaaaaaaaaaaagaaaagaaagcgccttcaaggccatctgtttctctgctactaccctttttggaaagacaaatctccttcccctccctgtcctccttccttctacattcccctaagggctgtgtacctttctctcagcgtgccctgcctcggtgcctctgtggcagggccaggtctgacttcccagatgagcttgctctcctaagctgcatcattgcatgactctcctctttcctaacctccctcactcctccagctcccttctgctggtgaatgacatctcttcacgccacacagtcacaggacggctgctccaccaccggcattacatttcctttccaggcaggaagaaaag

SEQ ID NO: 11117 - DNA, 401 bp, Homo sapiens
agtacttctagaattaattaacgcgggggaaaaaaaaaaagaaaagaaagcgccttcaaggccatctgtttctctgctactaccctttttggaaagacaaatctccttcccctccctgtcctccttccttctacattcccctagggctgtgtacctctctctcagcgtgccctgcctcggtgcctctgtggcagggccaggtctgacttcccagatgagcttgctctcctaagctgcatcattgcatgactctcctctttcctaacctccctcactcctccagctcccttctgctggtgaatgacatctcttcacgccacacagtcacaggacggctgctccaccaccggcatcacatctcctttccaggcaggaagaagaggaaggaggaagagacagga

SEQ ID NO: 11118 - DNA, 339 bp, Homo sapiens
tttttttttttttttttttttttttttttagatggagtcttactccgtcacccaggctggagtgtggtggtgtgatctcagctcacagcaacctgacctcaggtgattcacccgcctctgtctcccaaagtgctgggattacaggcgtgagccactgcgcccggctgtctttgaattttttaaactgaagtttaattgcctttgagtttgatcattcactatttggcatttgtatttcttttgttaattatctgctcaagctctaatttcataatggaaatttaatggattaacatataacacccactatcacccgccttaattaattctagaagtact

SEQ ID NO: 11119 - DNA, 461 bp, Homo sapiens
  misc_feature 23, 35, 45, 47: n = A,T,C or G
ggcctctacgccctcgtacgtcncctaagtaattntaacttcgtncngggccccccctcgagtgtatttctagaaataattctcgcgggttaattatcaacgaaaagaaagcgccttcaaggccatctgtttctctgctactaccctttttggaaagacaaatctccttcccctccctgtcctccttccttctacattcccctagggctgtgtacctctctctcagcgtgccctgcctcggtgcctctgtggcagggccaggtctgacttcccagatgagcttgctctcctaagctgcatcattgcatgactctcctctttcctaacctccctcactcctccagctcccttctgctggtgaatgacatctcttcacgccacacagtcacaggacggctgctccaccaccggcatcacatctcctttccaggcaggaagaagaggaaggaggaagagacagg

SEQ ID NO: 11120 - DNA, 394 bp, Homo sapiens
agtacttctagaattaattaacgcgggatcctcccaccacacacacagcatcaggcggtgaggacaggcctcatgcagggagacagggagcggccagacagcctggcactcctctgactgctcagggcttggccctgggaacgggcctcccgcctccatgaggctgtggtccttaccccagcatcttgaggatcgcttctgccaagcaaaccccacacaagctttgcctcctccggaaatgtccctgaagcacacatggagtcagggagagggccagagccaaatccctcacaatgaccaaccaccagggaggaggctttccgccgcccaacaacgagaatttccccccatgcaatatggggcaccgtttagcggttttaagaagggaaagcct

SEQ ID NO: 11121 - DNA, 411 bp, Homo sapiens
agttcttctagaattaattaacgcgggggatttaaaaaaagaaaagaaagcgccttcaaggccatctgtttctctgctactaccctttttggaaagacaaatctccttcccctccctgtcctccttccttctacattcccctagggctgtgtacctctctctcagcgtgccctgcctcggtgcctctgtggcagggccaggtctgacttcccagatgagcttgctctcctaagctgcatcattgcatgactctcctctttcctaacctccctcactcctccagctcccttctgctggtgaatgacatctcttcacgccacacagtcacaggacggctgctccaccaccgtcatcacatctcctttccaggcaggaagaagaggaaggaggaagagacaggacaaaagtggt

SEQ ID NO: 11122 - DNA, 401 bp, Homo sapiens
ttttttttttttttttttttttttttttggaggaaggcacctacaaaacgaaagtgcctagggcttacaaaagtcatatgtagcctttacaaatattagctcagtcattttcagaaaggtttttccaattatcattttaaagatgaggaaactggaagctcagggaggctaggaaacttatccaaagcctcttaagaggctatgttagtcagactgggctaacagctgtaacaaccccagaatttaaatggcttaacacattaggagtttatttgttattgccataacaattcagggtgtatgtttggcaggtagtctacacagggattcagggacccaggctccttccctctgggggctttttctccctctagggctgggagctctccatgcagatgggg

SEQ ID NO: 11123 - DNA, 401 bp, Homo sapiens
agtacttctagaattaattaacgcgggcaacctacatgtatatgaagacagtgtttaatctctctttgtcattcctatttatgaatggggatagcaactaaaacctcatgagctgagtattaaagaaggttatatgaattttctaatagctccctaatagcatggtggctcacatatgtaagcccaacactttgggaggccgagatgggtggacggcttcagcctaggaattagagaccctcattaaaaaaaaattaaagaaacaaaaccaaaaacatatgctgatcacttgagcccagagtttgagacaagcctgggcaacacagggagaccttcctctacaaaaaaaatacgaaaattagtggtgcatgcctgtaatcctagctattcaggagactgag

SEQ ID NO: 11124 - DNA, 381 bp, Homo sapiens
agtacttctagaattaattaacgctggggaaaaaaaaaaagaaaagaaagcgccttcaaggccatctgtttctctgctactaccctttttggaaagacaaatctccttcccctccctgtcctccttccttctacattcccctagggctgtgtacctctctctcagcgtgccctgcctcggtgcctctgtggcagggccaggtctgacttcccagatgagcttgctctcctaagctgcatcattgcatgactctcctctttcctaacctccctcactcctccagctcccttctgctggtgaatgacatctcttcacgccacacagtcacaggacggctgctccaccaccggcatcacatctcctttccaggcaggaagaaga

SEQ ID NO: 11125 - DNA, 647 bp, Homo sapiens
  misc_feature 632: n = A,T,C or G
agtacttctagaattaattaacgcgggggcgctaggacctggagggctagtcggcgggctgcgcgtccggccgctagctgagctggaggccaccggccagagccgaccccaggagtgagagagacaggggcgtgcgtgagttccggcggcctgcaccgggcaaaccccgtaccttcccagcatcggctcagcaacccacgtgcatccaggccggtcaatgtcattgagtcacctccgcgccttggccaccctggagtcccgagaatccgaagttccagacaaatgcccaaactacattcctgcatgttcgaaagcgtaaattgcaaagcacaaatccagttgtagattgtggccgggagcagtggctcacgcctataatcccagcactttgggaggccgaggcggacagatcacgaagtcagcacttcgagaccagcatggccaacatggtgaagccccatctctactaaaaatacaaacattagccaggcatggtggtaggcccctgtaatcccagctactcggtaggctgaggcaggagaatcacttgaacccgggaggcagaggtttcagtgagctgagactgcaccattgcactccagcctgggcgacagaccaagactccttctcanaaaaaaaaaaaaaaa

SEQ ID NO: 11126 - DNA, 294 bp, Homo sapiens
  misc_feature 264: n = A,T,C or G
agtacttctagaattaattaacgcgggggaaaactgtcttacttaaacaaaatgtattttaggaaaatgcctgtttcaagggtttattactgttttataactaagagacttgggactttagtatacgaaaaggtgtcatttcaaatgggggaaaatgaattattcaacaaatgatcttgggacaactggatagccattcagaaaaaaagtgaagctggaacactataacatgctttaccccacaataaatcagagttaaatgtnaaaaaaaaaaaaaaataaataattaaaaaa

SEQ ID NO: 11127 - DNA, 602 bp, Homo sapiens
  misc_feature 334, 477, 580, 586: n = A,T,C or G
agtacttctagaattaattaacgcgggttgactttaatagatactaacagttttccaaagtggttacaccagctcttttaccatctccaccttgctcaccaggagagtacgagcgtcttccttgctccacattcagaccagctttgtgttggtttggtttgtcagtctttcaagttttatccattctgtgaggtgtgtacaggtattgcattttgagtttaatttgcatttgtctggtgactaatgaggttgagacatttgtctatctcctgtgaagtgtctgttcaaatctcattttctgttggattatctttacctcgatatgtataataanatttaaaaaccacttatgatttcctcttctctaaattttttaaattcttcacttgttaaaggtagtgtttttgtctactcattatcaaagatgaaaattttatctcacctatctctagaattctcttcctctacctcaaaatntgtgttagttataattattccagattttgtcttaaaattttaagtaatacacttaaacttttgctttgtgatcaaatatagagtctgttgattcttcaaaaanaaaaanataaaattaatattaa

SEQ ID NO: 11128 - DNA, 447 bp, Homo sapiens
agtacttctagaattaattaacgcgggggaaaaaaaaaaagaaaagaaagcgccttcaaggccatctgtttctctgctactaccctttttggaaagacaaatctccttcccctccctgtcctccttccttctacattcccctagggctgtgtacctctctctcagcgtgccctgcctcggtgcctctgtggcagggccaggtctgacttcccagatgagcttgctctcctaagctgcatcattgcatgactctcctctttcctaacctccctcactcctccagctcccttctgctggtgaatgacatctcttcacgccacacagtcacaggacggctgctccaccaccggcatcacatctcctttccaggcaggaagaagaggaaggaggaagagacaggacaaaggtggtctttcttccagtaaagctttgactttttatctagaa

SEQ ID NO: 11129 - DNA, 820 bp, Homo sapiens
tttttttttttttttttttttttttttgggaggaaggcacctacaaaacgaaagtgcctagggcttacaaaagtcatatgtagcctttacaaatattagctcagtcattttcagaaaggtttttccaattatatttagagatgaggaaactgaagctcagggaggctaggaaacttatccaaagcctcttaagaggctatgttagtcagactgggctaacagctgtaacaaccccagaatttaaatggcttaacacattaggagtttatttgttattgccataacaattcagggtgtatgtttggcaggtagtctacacagtgattcagggacccaggctccttccctctggtggctttttctccctctagtgctgggagctctccatgcagatggtggatggagaaagagaacaaaaagtgggggatttttataggccaggcctggaattggcccacatcacttccacacacattccactggccagaatgcagtcacgtgatcgtagctaactgcaaggaaggttggaaaatgtaatgtaactgcatgcctgggctaaagagaggaacacggatcctggggagtactcacagtgttagattccagtccaggtcttctgcacacaatgcccgggttaattaattctagaaagacctttcaggggggcccgggacccagctttgggtcctttaagggagggtattgcgcgctggcggatcatggcataactgttcccgggggaaattgtatcccttacaattcccccacttacaaccgaaacataagtgtaaacctggggggccaaggggggctcactccg

SEQ ID NO: 11130 - DNA, 715 bp, Homo sapiens
ttttttttttttttttttttttttttttgagacagggtctcactctgtcacccaggctggagtgcagtggcgcaatctcagctcactgcagcctctgcctcccaggttcaagcggttctcctgcctcagtctcccgagtagctgggattacaccaccacacctggctaatttttgtatttttggtatagacgggttttcgccatgttggccaggctggtgtcaactcctgatctcaagtgatctgccagcctcggcctcccaaagtgctattacaggcgtgagccaccacgcctggcttaagctgcttaaatattctttcttaggtatccttggttttggaaaaaaaaagaatcacagaaaactaaaaattcccagtggcaggctctgtatcactggaaattaacttttttgtttggttggtttttggagatggaagtctcgctctgttgcctaggatggcctgcaatgggcctgaacttggatcactggaagcttccgcctcccgggttcaagccctttttcctgccttaagcctcccgagttaactgggattacaaggggccgggaaacaaagccggggaaatttttggtttttttataaagacggggtttcaccatgttaccccgaagggcttgatttttgaccctgggaaaaccccctaattaattttagaatacttttcagggggggcccgggccccacttttggttccc

SEQ ID NO: 11131 - DNA, 338 bp, Homo sapiens
agtacttctagaattaattaaggcgggtgatagtgggtgttatatgttaatccattaaatttccattatgaaattagagcttgagcagataattaacaaaagaaatacaaatgacaaatagtgaatgatcaaactcaaaggcaattaaacttcagtttaaaaaattcaaagacgccgggcgcagtggctcacgcctgtaatcccagcactttgggagacagaggcgggtgaatcacctgaggtcaggttgctgtgagctgagatcacaccaccacactccagcctgggtgacggagtaagactccatctaaaaaaaaaaaaaaaaaaaaaaaaaaaaa

SEQ ID NO: 11132 - DNA, 386 bp, Homo sapiens
agtacttctagaattaattaacgcgggcgtctccctgccaggccttgggctctgcagaggtgcccactgaaagcttgtcctgtgccctctacacctcagaggggttcagagccaagctccaggacccctgctgtcaaaaagtgttccctgggaacaagtgcagggaacagtcctgcaagcaagggactgcttgccctgctttcggacagccttctgagagccagtgaaggccagcagctgggctgaacactacatcatcctcagaaccaccctgcacagccggtgtgctccccgccatcgacaggaaaaacgggcccttagaggcacaggcaacttgctcggggttaggtgcagcgggtggcagagtcagaatgtgaggacagttg

SEQ ID NO: 11133 - DNA, 416 bp, Homo sapiens
ttttttttttttttttttttttttttttgggagtctcgctcttttgcccaggctggagagtgcaatggtgccatctcagctcactacatccctgattcaagtgattctcctgcctaagcctcctgagtagctgggattacaggcacttgccatcatgcctggctaatttttgtatttttgtagagacggggtttcaccatgttggccagtctggtcttgaactcttgacctcaggcgatccatccacctcggcttcccaaagtgctggaattataggcgtgagccaccgcacccagccttctgggtgtattttcttatgatgtagaatgagtgataaagcaccataggagtcacctagtgttgccttttccatttttgagttgataaatggaggtctcagtctctgttaattagtg

SEQ ID NO: 11134 - DNA, 376 bp, Homo sapiens
tttttttttttttttttttttttgggatgctcaacctataatacccaaaggctctatttcagtagaatttattggtttgctgattatagcagtgacatagttgcattctagagaccttagaaaatgcagaaaatttcaagaaaaacatttaaattgtgctcatagtgaaactgagaggtgaccactcttaatattttgtggcataagcattccagtcttttatctttctcaaagtttcacataaactttctcaaaggccattaaatacttttccatagcctgattttttgtgaccacatagtatcctattatattgataataccataatttacctaacccatttttatatatttggattttttccaattcatcatt

SEQ ID NO: 11135 - DNA, 395 bp, Homo sapiens
agtacttctagaattaattaatccacccttgaaccagtctacctccagaattcctggtgcgtgagataataacatttcctttgtttaagtcacttttagttggattttctgttatttccaaccaaaagcattcaattgatagaagtgatgaagtaagactggacagcatttatccacccacatatttgtaaaactatgcctgtctgaccagacgtggtggctcatgcctgtaatcccagcactttgggaggctgctgcaggaggattgcttgaggccaggagttcaagaccagcctgggaaacatagcaggaccttatctctagaataaataaataacaataaaaattttaaaactatgcctctcagacctaaactaggcccatagaagggcaaa

SEQ ID NO: 11136 - DNA, 284 bp, Homo sapiens
agtacttctagaattaattaaggcgggtggatcaactgtggtcaggagtttgagatcagccaggccaacctggtgaaaccccgtctctactaaaaatacaaaaattagctgggcgtgatggtgggcgcctgtaatcccagctacttgggaggctgaggcaggagaatcacttgaacccgggaggcggaggttgcagtgagccgagatcgcaccattgcactccagtctgggcaacagagtgagattccgtctcaaaaaaaaaaaaaaaaaaaaaaaaaaaaaag

SEQ ID NO: 11137 - DNA, 340 bp, Homo sapiens
  misc_feature 312: n = A,T,C or G
agtacttctagaattaattaaggcgggtgatagtgggtgttatatgttaatccattaaatttccattatgaaattagagcttgagcagataattaacaaaagaaatacaaatgacaaatagtgaatgatcaaactcaaaggcaattaaacttcagtttaaaaaattcaaagacgccgggcgcagtggctcacgcctgtaatcccagcactttgggagacagaggcgggtgaatcacctgaggtcaggttgctgtgagctgagatcacaccaccacactccagcctgtgtgacggagtaagactccatctaanataaaaacaaaagataaaaataaaaaag

SEQ ID NO: 11138 - DNA, 385 bp, Homo sapiens
agtacttctagaattaattaacgcgggggaaaaataaaaagaaaagaaagcgccttcaaggccatctgtttctctgctactaccctttttggaaagacaaatctacttcccctccctgtcctccttccttctacattcccctagggctgtgtacctctctctcagcgtgccctgcctcgatgcctctgtggcagggccaggtctgacttcccagatgagcttgctctcctaagctgcatcattgcatgactctcctctttcctaacctccctcactcctccagctcccttctgctggtgaatgacatcttttcacgccacacagtcacaggacggctgctccaccaccggcatcacatctcctttccaggcaggatgaagaggaa

SEQ ID NO: 11139 - DNA, 614 bp, Homo sapiens
tttttttttttttttttttttttttttggaagaatcaacagactctatatttgatcacaaagcaaaagtttaagtgtattacttaaaattttaagacaaaatctggaataattataactaacacaaattttgaggtagaggaagagaattctagagataggtgagataaaattttcatctttgataatgagtagacaaaaacactacctttaacaagtgaagaatttaaaaaatttagagaagaggaaatcataagtggtttttaaaatttattatacatatcgaggtaaagataatccaacagaaaatgagatttgaacagacacttcacaggagatagacaaatgtctcaacctcattagtcaccagacaaatgcaaattaaactcaaaatgcaatacctgtacacacctcacagaatggataaaacttgaaagactgacaaaccaaaccaacacaaagctggtctgaatgtggagcaaggaagacgctcgtactctcctggtgagcaaggtggagatggtaaaagagctggtgtaaccactttggaaaactgttagtatctattaaagtcaacccgcgttaattaattctagaagtactctcgaggggggg

SEQ ID NO: 11140 - DNA, 381 bp, Homo sapiens
agtacttctagaattaattaacgcgggggcgctaggacctggagggctagtcggcgggctgcgcgtccggccgctagctgagctggaggccaccggccagagccgaccccaggagtgagagagacaggggcgtgcgtgagttccggcggcctgcaccgggcaaaccccgtaccttcccagcatcggctcagcaacccacgtgcatccaggccggtcaatgtcattgagtcacctccgcgccttggccaccctggagtcccgagaatccgaagttccagacaaatgcccaaactacattcctgcatgttcgaaagcgtaaattgcaaagcacaaatccagttggagattgtggccgggagcagtggctcacgcctataatcc

SEQ ID NO: 11141 - DNA, 296 bp, Homo sapiens
  misc_feature 265, 266: n = A,T,C or G
agtacttctagaattaattaacgcgggggaaaactgtcttacttaaacaaaatgtattttaggaaaatgcctgtttcaagggtttattactgttttataactaagagacttgggactttagtatacgaaaaggtgtcatttcaaatgggggaaaatgaattattcaaacaaatgatcttgggacaactggatagccattcagaaaaaaagtgaagctggaacactataacatgctttaccccacaataaatcagagttaaatgtnnaaaaaaaaaaaaaaaaaaaaaaaaaaaaag

SEQ ID NO: 11142 - DNA, 402 bp, Homo sapiens
  misc_feature 314, 402: n = A,T,C or G
agtacttctagaattaattaacgcggggaaagcggtggacactgcagagtgggcatccagccactgctacttccatgctgggatgagcagccagtgtagaataaaccctgtgtgcagtgaaacagtcagtgtgcagtatcctatggtgcatctaaacgtatgtacttgctgcaaatgcacatctacaaggacactcacgactattttcattcttgataccaccttcttatgacttgacaaagaaaattcaagcttttggctgagggtagtggctcgcacctgtaatcccagcactttgagaggccgaggtgggntgggtcacttgaggtcaggagttcgagaccagcctgaccaatattgtgaaatcctgtctttactaaaaatataaaaaatagcccggcn

SEQ ID NO: 11143 - DNA, 293 bp, Homo sapiens
ttttttttttttttttttttttttttttttacatttaactctgatttattggggggtaaagcatgttatagtgttccagcttcactttttttctgaatggctatccagttgtcccaagatcatttgttgaataattcattttcccccatttgaaatgacaccttttcgtatactaaagtcccaagtctcttagttataaaacagtaataaacccttgaaacaggcattttcctaaaatacattttgtttaagtaagacagttttcccccgcgttaattaattctagaagtact

SEQ ID NO: 11144 - DNA, 370 bp, Homo sapiens
agtacttctagaattaattaaggcgggggcacaggactgtacttttggtagcggtgcgggggccgccccggaccttaacccttgattaaaaaggggtaaaccttatttggaacagccattgactgggcacaggccaacactttggaagccgagaggccgaggcaggaggatcgcttgaggccaggagtgccagactgcgagactagcctgggtaacatagtgagaccctctcttcaaaaaaaaaaaaaaaaaaaaaaaagcctgtcacggtggcctgcgcctgtaccccagctactcgagaggatcgcctgagcccagtgaagctgcagcgagctgtgaggatgccaccgcactccggcctgggctaaaa

SEQ ID NO: 11145 - DNA, 439 bp, Homo sapiens
agtacttctagaattaattaaggcgggagcagcccaagtgtccagccacagatgagcagtcaaacgcagggtggccctccacacactggaaagtgacgcagccgtgaacagcagagaggttcggacccaggccacggcgcggatgccccttgaggacagcacacttccggagacaagccggacgcaaaaggccacgcggtgtgtgacaccactcgtgtgaaatgttcaggacaggccaatccagaggcaggaagggaatgcgtgggtgccgggactggggagggaatggggagtgatggctgacagagacggggtttccttctggggtaacaagaatgttctggaagctgatagaggtgatagttgtgcaactctgtcaatgtactatatgccactgaattacacactttaaaaaggtgaactttgccgggtgcggagg

SEQ ID NO: 11146 - DNA, 926 bp, Homo sapiens
  misc_feature 491, 822: n = A,T,C or G
gttttttgttttttttttttttgtagagacagtgttttgccatgttgcccaggcttatcctgaactcctgtactcaagaaattctcctgcctcagccccacaaagtgctgggattacaggcgtgatcccaccatgctcagccattcttttctaatgggagagtccgttgccccacctcctttatgaacagttcttctcattgatgtgaaatgctaccaaataatattttttttctctttgtaatttccgattgaccaaataattatttactgggatcttatataaataaagactcttaagactttagctttttagtaaatattaaaattacttttttttgagacaaagtctcactctgtcaccctggctggagtgcagtggcacgatcatggctcactgcagcctccttcttgcaagttcaagcaatcctcacacctcagccacctgagtagctgggaatacaggtgggcaccgctgtgctcggctaattntttaatttgggtagaggtgaggtgtcactgtattgcctaggttggtctcaaactcctgggctcaagcaatccacccacctcagccctaaattgctggtattataggcgtgagccaccgcacctggtgtaaatatcgaaattattgataaatatttaccaaaactagaaatggtttctatagcttacagttacaaagaaataggactgaaaacacacctaatgtaaatgggacgaatttttaactttatttatttggtggcagttctgagcccaagccttagactttttttaaattagttattaaactaagtatcactgaagaaaagggatnatgtgtggaagagtttatgcccaattaaaacccttgcggtaactttaaacctggtattttccattcttttgcaacctaggcgaggaggtctgcaccagggggag

SEQ ID NO: 11147 - DNA, 386 bp, Homo sapiens
agtacttctagaattatttaacgcgggcctttttctgctgcttcccagctccacatcaacccaaaagggcttcaggaagaggcaaccaggaacccaacaggcttgttctaggtgcctccatccctggggctcttcatggacagcagctgccaaggccatagctctcatacgtgtccttcctgcaggtgttcaagagggcctttcttctctagactgctctcaggtatcctgatgacatctctgctcagaagagtggactgatgagaaattggatgagatcaaaaagcaagcccatagctggaggaagactgagatgagatcttgattctctggttcctggctcaggagcctgcccctcatacgcacccactagctgcccgggtggt

SEQ ID NO: 11148 - DNA, 376 bp, Homo sapiens
agtacttctagaattaattaacgcgggggccactgccagaaccaaagtgacggtgccgacacccctccgcaagcgcaaggccgacttccataagtaattagccagagcaccgtcccgttcctgtcagcaccgagccccagccaggacaccggtattcccagcaccatacaagaactactttttcgatgaggcaacccaaaagctgcgagcggttcccggtgaggccgcccactcacctggccggcgcagacaagactccgtgcgtcaagacataacagcgcttctcagaactttgcttctccagcagaataatcctgcggaagactgagcagttcttgtgagggtgaaaccatggcccatgcattggtgacgttct

SEQ ID NO: 11149 - DNA, 387 bp, Homo sapiens
  misc_feature 272: n = A,T,C or G
agtacttctagaattaattaacgcgggcctgcctggagggagctgccaccctcagctgcagccccagacctcgcggttgctctcatccgtcgttcccagtgtgggcagtgacgcagcaccacggtaagttctgtagagtggacgccactcgctggcaaagcccagcagggcaaggaataagtgtcactcagtctttatccagaaaaatccaccaatgtacttttagtgcagtattaacagatggtagaaaatggaattgcctagagggattntaatctcttgagggataattctggtacttgtacctgtctgatggtcgtgtaagtccatgttaacaaacctgggaccacaggaaaggagaactgatgcgaatacaaacaggtggag

SEQ ID NO: 11150 - DNA, 353 bp, Homo sapiens
tttttttttttttttttttttttttttggaagaatcaacagactctatatttgatcacaaagcaaaagtttaagtgtattacttaaaattttaagacaaaatctggaataattataactaacacaaattttgaggtagaggaagagaattctagagataggtgagataaaattttcatctttgataatgagtagacaaaaacactacctttaacaagtgaagaatttaaaaaatttagagaagaggaaatcataagtggtttttaaaatttattatacatatcgaggtaaagataatccaacagaaaatgagatttgaacagacacttcacaggagatagacaaatgtctcaa

SEQ ID NO: 11151 - DNA, 404 bp, Homo sapiens
agtacttctagaattaattaaggcgggagaccatggggatccccagcatgatcctcctggggcacagtttgggaggattcctggccacttcttactcaatcaagtaccctgatagagttaaacacctcatcctggtggacccatggggctttcccctccgaccaactaaccccagtgagatccgtgcacccccagcctgggtcaaagccgtggcatctgtcctaggacgttccaatccattggctgttcttcgagtagctgggccctgggggcctggtctggtgcagcgattccggccggacttcaaacgcaagtttgcagacttctttgaagatgataccatatcaaaatatatttaccacttcaacgcacaaaattccaatggtgagaccgcattcaaagcc

SEQ ID NO: 11152 - DNA, 402 bp, Homo sapiens
tttttttttttttttttttttttttttggagacagggttttgacatgttggtcaggctggtcatgaactcctggcctcaagtgatccacctacctcggcctcccaaagtgctgggattacaggtgtgagccaccgcgcccaaccctgtgtttattcttaggtctgtactacgctttatgcctcagtttccacagttaaaacacgttattttattcctcacgttataggagcaatttgtattcataaacttggccttcaccttcaacttctgaagattttaatacagcgcaaatgatttggggtctgtgaattcagttttatttatttggctccttcctttaaggagtcaggctaatgcaagaaaatccaataattagatcttttggatttcaaataactggt

SEQ ID NO: 11153 - DNA, 353 bp, Homo sapiens
ttttttttttttttttttttttttttttgaagaatcaacagactctatatttgatcacaaagcaaaagtttaagtgtattacttaaaattttaagacaaaatctggaataattataactaacacaaattttgaggtagaggaagagaattctagagataggtgagataaaattttcatctttgataatgagtagacaaaaacactacctttaacaagtgaagaatttaaaaaatttagagaagaggaaatcataagtggtttttaaaatttattatacatatcgaggtaaagataatccaacagaaaatgagatttgaacagacacttcacaggagatagacaaatgtctcaa

SEQ ID NO: 11154 - DNA, 387 bp, Homo sapiens
agttcttctagaataaattaacgcgggttttttctgcactccaacctgggcaacatagcaagactccatctctaaaacacacacgtgcacacacacacacgcacacacataacaaaatgctcccaagtttttattagacccaaatgtttgctgtttattaccaaaaagataagattttctttttaataaaaagaaaaatggctgggtgcagtggctcacgcctgtaatccaagcactttgggaggctgaggcggggcaggtgaatcacttgaggtcaggagttcaagaccagcctggccaacatggtgaaaccctgtctctgctaaaaaaaaaaaaaaaaaaattagctgggcatgctggcaggtgcctgtaatcccagctactcag

SEQ ID NO: 11155 - DNA, 370 bp, Homo sapiens
agtacttctagaattaattaaggcgggcgcctgtaatctcagctactttggaggccgaggcaggagaattgctagaacccaggaggcagaggttgcagtgagctgagatcgcgccactgcactccagcctgggagacagaatgagactccatctccaaaaaaaaaagaaagaaagaaagaaagaaagaaagaaggctctattttgatactgggagcctaaactgaatgattctggagaaattcacagatggggctgaggctcaccttcatgacagctgtatcaaaggcctaaatttctaaggctcagaaatcactacaataagcctatcaacagcatgtgatactctccaagcattttgcaaccttaaca

SEQ ID NO: 11156 - DNA, 381 bp, Homo sapiens
agtacttctagaattaattaacgcgggatatagttcttctcattctttgttctcttcctttatatcaacagcctttttctgacatgatataaaatcatgtgcttatgacatgcattaaaaaggagaagtgctggatctaatatccttggtctaatggatccccttgcagatatacagggctccctacacacactgggatatctaggtacaagcccaaagttcatatacagactttctaaaatcattgtatttaaaagcagaaaagtgccgggcacagtggctcacatctgtaatcccaatactttgggaggctgaggtgggcgaatcacctgaggtcgcgagctcaagaccagcctggccaacatggtgaaaccccgtctt

SEQ ID NO: 11157 - DNA, 294 bp, Homo sapiens
tttttttttttttttttttttttttttttttacatttaactctgatttattggggggtaaagcatgttatagtgttccagcttcactttttttctgaatggctatccagttgtcccaagatcatttgttgaataattcattttcccccatttgaaatgacaccttttcgtatactaaagtcccaagtcttttagttataaaacagtaataaacccttgaaacaggcattttcctaaaatacattttgtttaagtaagacagttttcccccgcgttaattaattctagaagtact

SEQ ID NO: 11158 - DNA, 397 bp, Homo sapiens
agtacttctagaattaattaacgcgggggaaaaaaaaaaagaaaagaaagcgccttcaaggccatctgtttctctgctactaccctttttggaaagacaaatctccttcccctccctgtcctccttccttctacattccccttaggcctgagtacctctctctcagcgtgccctgcctcggtgcctctgtggcagggccaggtctgacttcccagatgagcttgctctcctaagctgcatcattgcatgactctcctctttcctaacctccctcactcctccagctcccttctgctggtgaatgacatctcttcacgccacacagtcacaggacggctgctccaccaccggcatcacatctcctttccaggcaggaagaataggaaggaggaataga

SEQ ID NO: 11159 - DNA, 407 bp, Homo sapiens
  misc_feature 364, 388: n = A,T,C or G
cttagggagtcgcccacgcgtccggcttgcttgctgcgcttctcctgcagcctggtaggcactggctgctacttcagcttcagccttcgtcgcgacccctattttggctccagtctccgaccctgctccgtcctctctctacttggttgcatcctccctcctagttccagatttgcgccagatcctgctccaaatccggtagccgcatccccaagccatggctggtcccttctcccgtctgctgtctgcccgccccggactcaagctcctggctttggctggagctgggtctctcgccgccgggattctgctccgtccggaatctgtacgagctgccaccggtgaacggaggagactgtatccnccgagcgctgagtacccagacctncgaaagcacaacaactgca

SEQ ID NO: 11160 - DNA, 445 bp, Homo sapiens
agtacttctagaattaattaacgcgggcctgctaacatttagtccatcactatcccttaaggggagaataatgcccatgagacctcaggggcggggtgactacccaagatagccatctgaacgtgacacacggacccaattttcctgtaaccttaaggtggtgtaaaaggggcaaccatctggtcatttcttcgagttttttttatattttgtataactcctgtgcacataataaaatatgtaagcctatttttctgctaatgtgtgtactatcagtttgttttatggactcacccctaaggagaaaaatgtaaatttacctacatgtgaaatttaatttggagcttggctgccgtggacctatctaaaactgggtggcctgggctcttccttcccagataaaacttctttttttttttctttctgaagatggtaagggtggaag

SEQ ID NO: 11161 - DNA, 437 bp, Homo sapiens
ggccaagataatgcagttgcgtaaacactcacaaattaactgaagcttcgtgccgggccccccctcgttatgtacttctagaaataattaaatgaatttatattgggcattcatatgtgctaaacaccattctaagtgctgaggcactatgatgaatatgacagacagatacctgttcccagagagtttataatgttgaggtaaagagccacataaaagacaattgtgttatcacttatgaagggctttgggatcaatgaggagggatgcctaacacagacaaaaattcaaagaagcctgcatagaagaggtatcatttaggttgaaatgtgagagaaaaacagcattgtagggagaattccgggcattgtagggagaattctgggcaatgggaacagcatgtgcagagacctaaaggcatgagggagggcaagtaa

SEQ ID NO: 11162 - DNA, 353 bp, Homo sapiens
ttttttttttttttttttttttttttttggaattattatttaatgagaaaaaaatccacgtgtatacaacatttcaaaacagaagttaaatcattaaatagtactttttatttaaatgtttataaggcagatctatgagaatgatagaaaacatggtgtgtaatttgatagcaatattttggagattacagagttttagtaattaccaattacacagttgaaaagaagatagtatattccaagcagattcaaaatatctaatgatagatcatggcttgaaaatgtctttgtactaattgacagtgggaaatggagtgtgatgggattggtacgtggtgctggatagcgaaaag

SEQ ID NO: 11163 - DNA, 349 bp, Homo sapiens
gccctgtctcgatctattcttagggcaattggagctcaccgcgatggccgccgcttttttttttttttttttttttttttttttttacattaaacttttatttattggggggtaaagcatgttatagtgttccagcttcactttttttctgaatggctatccagttgtcccaagatcatttgttgaataattcattttcccccatttgaaatgacaccttttcgtatactaaagtcccaagtcttttagttataaaacagtaataaacccttgaaacaggcattttcctaaaatacattttgtttaagtaagacagttttcccccgcgttaattaattctagaagtact

SEQ ID NO: 11164 - DNA, 435 bp, Homo sapiens
agtacttctagaattaattaacgcgggcattgtgtgcagaagacctggactggaatctaacactgtgagtactccccaggatccgtgttcctctctttagcccaggcatgcagttacattacattttccaaccttccttgcagttagctacgatcacgtgactggatttctggccagtggaatgtgtgtggaagtgatgtgggccaattccaggcctggcctataaaaatcccccactttttgttctctttctccatccaccatctgcatggagagctcccagcactagagggagaaaaagccaccagagggaaggagcctgggtccctgaatcactgtgtagactacctgccaaacatacaccctgaattgttatggcaataacaaataaactcctaatgtgttaagccatttaaattctggggttgttacagc

SEQ ID NO: 11165 - DNA, 354 bp, Homo sapiens
agtacttctagaattaattaacgcggttttaaaaaaaaaaagaaaagaaagcgccttcaaggccatctgtttctctgctactaccctttttggaaagacaaatctccttcccctccctgtcctccttccttctacattcccctagggctgtgtacctctctctcagcgtgccctgcctcggtgcctctgtggcagggccaggtctgacttcccagatgagcttgctctcctaagctgcatcattgcatgactctcctctttcctaacctccctcactcctccagctcccttctgctggtgaatgacatctcttcacgccacacagtcacaggacggctgctccaccaccggcat

SEQ ID NO: 11166 - DNA, 669 bp, Homo sapiens
  misc_feature 669: n = A,T,C or G
agccatgtgctctaaagagttcagcggcgtcaaacaccacatgcgccgtttcccactcccacgtttccagtctgcggtaaggatggcaacgcatagcctgtactgcatcccagacccctaaccctttaagcaatgataccgaagccgcgctgatcgccgagatccgcacgtccggttggctatcagcgacaaacggcgctggttctgcgtgctcgatcaccgttaccgcaaatccgtgctgtgccagccccagcgccagtgcgccgccgaccattcctgcgccgacaatggcaatttccgttggttgatttgtcatggtcaatcatcctgttagcaatatgctttaagtctacaggatttttacccctaagggctgataacgctcatactggtcacaacggcagcaaagcattacactatgcgccctgcattcctggctactatttcgcaagagcaagtcgatgaccaaaaaactccatattaaaacctggggctgtcagatgaacgagtacgattgatcgaagatggccgatctgctggatgccacccacggctatcaactgaccgacgtggcggaagaagcggatgtgctgctgctgaacacctgctcaatccgcgagaaggctcaagaaaaagtcttccatcagttgggccgctggacacctgtan

SEQ ID NO: 11167 - DNA, 619 bp, Homo sapiens
  misc_feature 619: n = A,T,C or G
ttttttttttttttttttttttttttggaagatggaatctcactctgtcacccaggctggagtgcagtggcatgatctcagctcactggaagctctgcctcccaggttcacaccattctcctgcctcagcctctcaagcagctgggactacaggcgccagccgccatgcctggctaattttttttggtattttttagtacagatggggtttcaccgtgttagccaggatggtctcgatctcctgacctcgtgatctgcccacttcagcctcccaaagtgctgggattacaggcatgagccaccatgcccggccgatttcacctttcaatggcaattactataagacaggaaagttatttatttttatatatttacctaattttaagttaccttatacaaccctcattaatagtctgttagaactagaatttaaactctatgtgaatatggaccttatttaaacaatgtatccctagcacctagacaatgcctaacctgtcacattaacttaatatatattttatttatattttttgtttaattattttttttgagacagactcttgctctgtcacccaggctggagtgtagtggtgcgatcctggtttacttgaatctn

SEQ ID NO: 11168 - DNA, 476 bp, Homo sapiens
ttttactttttttttattttggttttatctttttgagctcccctcagacgcgctactactaatccgtgacgtatagggaactacacgctgggtaccggccgcctccctcgagagtacttctagaattaattaatccacccttgaaccagtctacctacagaattcctggtacatgagataataacatttcctttgtttaagtcacttttagttggattttctgttattttcaaccaaaagcattcaattgatagaagtgatgtagtaagactgtgacagtttttattcacccacatatttgttaaactatgccttgtctgaccagactgttttggcttatgcttgttttttcagttctttttttggtttattgattattgttagttttgtgttacagaattataaagctaatttctgtgtatcattattaagtgtttttttgtggttttagttgtgttgttttttgttgttttttt

SEQ ID NO: 11169 - DNA, 373 bp, Homo sapiens
agtacttctagaattaattaacgcgggttctcatacacgaagcactcagatttttctctccatctctccacctgcttttagaatattggtgcatttttcaataagctcttcccttcatggtccaagataaacgtcaacaatttccaaggtttcatgcatcctcatattcaccccacactttaaaactatcatttatagtccacccatgagatttgctctgattggactagcgttgatcaagtgttcacccctagaacccatctatgcggccaggaaaaaggaacgataggctaggtcatatactccacccttggagcaagggcagagtcagcttctccggaaccagatggagcccccctcaaatatcaggggc

SEQ ID NO: 11170 - DNA, 435 bp, Homo sapiens
agtacttctagaattaattaacgcgggcattgtgtgcagaagacctggactggaatctaacactgtgagtactccccaggatccgtgttcctctctttagcccaggcatgcagttacattacattttccaaccttccttgcagttagctaacgatcaccgtgacctgcatttctggccagtggaatgtgtgtggaagtgatgtgggccaattccaggcctggcctataaaaatcccccactttttgttctctttctccatccaccatctgcatggagagctcccagcactagagggagaaaaagccaccagagggaaggagcctgggtccctgaatcactgtgtagactacctgccaaacatacaccctgaattgttatggcaataacaaataaactcctaatgtgttaagccatttaaattctggggttgttac

SEQ ID NO: 11171 - DNA, 294 bp, Homo sapiens; identical to SEQ ID NO: 11083

SEQ ID NO: 11172 - DNA, 294 bp, Homo sapiens
agtacttctagaattaattaacgcgggggaaaactgtctaacttaaacaaaatgttttttaggaaaatgcctgtttcaagggtttattactgttttataactaagagacttgggactttagtatacgaaaaggtgtcatttcaaatgggggaaaatgaattattcaacaaatgatcttgggacaactggatagccattcagaaaaaaagtgaagctggaacactataacatgctttaccccacaataaatcagagttaaatgtaaaaaaaaaaaaaaaaaaaaaaaaaaaaaaa

SEQ ID NO: 11173 - DNA, 611 bp, Homo sapiens
ttttcttttctttctttctttttttttttttagacggagtctccctctgtcacccagactggagtgcaatggtgtgatcttggctcactgcaacctccgcctcccgagttcaagtgattctcctgtctcagcctcctgagtagctgggattacaggcgcctgccatcatgtgccggctaattttggtatttttagtagagatgtggtttcaccatatcggccaggttggtctcaaactcctgacctcaggtgatcagcccgcctctgcatcccaaactgctgggattacaggcgtgaggccaccacacccagcccggattacccttaagtaggaggtacattctcttccattgaaaaagagagagagcagagaatagatgcacaggcaagcagatctgtatccattttgttgtgggaagttgcttcctctctgatgttctctctctctctctctctctgtctctctctctctctgtttttctctctcgtgcttcaagtagggaatgattagtgagtgatactgtttgctaagtagtaagaaaataaagaaggggaacacagaaagagtgtttcatagaaaaatgctggcaatgtctagagacatattgctc

SEQ ID NO: 11174 - DNA, 449 bp, Homo sapiens
  misc_feature 169: n = A,T,C or G
ttttttttttttttttttttttttacttgaattgttgttatagtgcttccgttatttatttttattttttttattatactttaagttttagggtacatgtgcacaacgtgcaggtttgctacatatgtatacatgtgccatgttggtgtgctgcactcattaacttcgnaatttatattaaggtatatataccttgttaattggacccttatcgactttgcagcatgcttatccatctaactattcatctttatttgccttcgttttttgagttcccttattcatcctaaaacaaaatataatgcctgactcatagtcagacttcacagtatttttaaatgaattacattgcattggggaaatataaatagtaatgtccttttatagaggaagtctaaaagaaattcttgggtgaattgataatcaaacatttttaagaaggtattttt

SEQ ID NO: 11175 - DNA, 433 bp, Homo sapiens
agtacttctagaattaattaacgcgggggaaaaaaaaaaagaaaagaaagcgccttcaaggccatctgtttctctgctactaccctttttggaaagacaaatctccttcccctccctgtcctccttccttctacattcccctagggctgtgtacctttctcttaagggtgccctgcctcggtgcctctgtggcagggccaggtctgacttcccagatgagcttgctctcctaagctgcatcattgcatgactctcctctttcctaacctccctcactcctccagctcccttctgctggtgaatgacatctcttcacgccacacagtcacaggacggctgctccaccaccggcatcacatctcctttccaggcaggaagaagaggaaggaggaagagacaggacaaaggtggtctttcttccagtaaagctttg

SEQ ID NO: 11176 - DNA, 367 bp, Homo sapiens
agtacttctagaattaattaacgcgggactgctaacaattagtccatcactatcccctcaagtcaaaataatgcccatcatacctcaggggcggggtgactaccccagatagccatctgaacgtgacacacggacccaattttcctgtaaccttagaggcggtgtaaaaggggcaaccatctggtcatttcttcgagtgttttttatattttggtaactcctgtgcacataataaaatatgtaagcctatttttctggtaatgtgtgtactatcagtttgatttatggactcacccctaaggagaaaaatgtaaatttacctacatgtgaaatttagtttggagcttggctgccgaggacctagctc

SEQ ID NO: 11177 - DNA, 450 bp, Homo sapiens
agtacttctagaattaattaaatgaaatcatattgggcattcatatgtgctaaacaccattctaagtgctgaggcactatgatgaatatgacagacagatacctgttcccagagagtttataatgttgaggtaaagagccacataaaagacaattgtgttatcacttatgaagggctttgggatcaatgaggagggatgcctaacacagacaaaaattcaaagaagcctgcatagaagaggtatcatttaggttgaaatgtgagagaaaaacagcattgtagggagaattccgggcattgtagggagaattctgggcaatgggaacagcatgtgcagagacctagaggcatgagggagggcaagtatgtttgaagatggcagatagttctggagggcagctagtgggggaggaagtgagaaaaggaatgattgtggagaagtagtcaagg

SEQ ID NO: 11178 - DNA, 367 bp, Homo sapiens
  misc_feature 367: n = A,T,C or G
agtacttctagaattaattaacgcgggggaaaaaaaaaaagaaaagaaagcgccttcaaggccatctgtttctctgctactaccctttttggaaagacaaatctccttcccctccctgtcctccttccttctacattcccctagggctgtgtacctctctctcagcgtgccctgcctcggtgcctctgtggcagggccaggtctgacttcccagatgagcttgctctcctaagctgcatcattgcatgactctcctctttcctaacctccctcactcctccagctcccttctgctggtgaatgacatctcttcacgccacacagtcacaggacggctgctccaccaccggcatcacatctcctttcn

SEQ ID NO: 11179 - DNA, 935 bp, Homo sapiens
agatgttacgccagcgctcatgatcccttctaattggaacaaagcgtgaccacgtgtcaataaatcgagagctcttatggatgcagccaccactgagccttcccttgttattgtgtagccagaatgccgcaaaactaccatgcctaagcgaactgttgagagtacgtttcgatttctgactgtgttagcctggaagtgtcttgtcccaactcttgtgttctgagcattgaacgcctcgcatgccaacatgtatagttgaatgcatcaggtgcgattagcgagcatgatatcataaacgcatctgagcatgctcgtgtcggctattggcgtttgcctagatccgtacgcaaggacttttcaagtctcggaaggtttcttcaatctgcattcgcttcgaatagatattaacaagttgtttgggtgttcgaatgtcaacaggtaagttagttgctagaacccatggctcctttgccgacgctgagtacattctaggtgacgggtggtgacaatgagtccgggtcgagcgctgattctttcggcctttagagcgagatttatacaatagaatatggcatgagattggattgcttttagtcagcctcttatagcctaaagtctttgagtgactcgatgacatctcatgtaagtcgctgatcggtttccagtttcccgtcctaggtctgcatattgcactttgacctttacttggcttaaccagtaccaacccatcttctcaacggacttataccatgggagctttaagccctcattacttacaatgagcggtgggtgttactcggaagaaagcttacaccggccggtgcaaattgggcttagcctgctttgaacatgctctgaaagcgggacgcttcttaataggagtacactaccacgtttttgcaccgaaactggcataccaaagggtttagctccag

SEQ ID NO: 11180 - DNA, 870 bp, Homo sapiens
  misc_feature 450: n = A,T,C or G
agtactttagaataattaacgcgggcacccagggatcgcaggcggccgaatactgcagctggcttttgaaggcatcgatgcacactgtgagggcctgccttggctcctgcaccccaccacagaacgtgatactgcctttattctctccacccagaaaggtgacaaatccaagccctggatgtgacgggggtccacaagagtaattctggagagatggcgtcacgtgaggaatgcttagagacccacggagccaagtcacgggacctcagcgaccccatggctgacctaccgagacctccagtcgacagcatcgggtaggcccacacgtgtggcggaggaagtgagtgtcactggcccatcaccaagcacagctggcagaggtacctgtgcaggcgagtccaatgcccagctctataataaacacgccttgcggtgctggaagagactcanagtccatccaagacagattctgtcttcccactaaactggaagctccttaaagaccgcgatgtggcagttttgctatcagctatgtgcccagtgcttaacacatggcccggcctgcctgagcactcagaaagacacctgacggacaaggaaccaatcaaacagagattggcccactccacccccaagacctgacagtcaaaagtcattaagcacctggcaggcccacaactctctggccatacccatgcctcaatttcccaagcatgggggaactgaatattccaaaatattgccccaaacaccatggtttcacactctctttgacccaaaagtctttttcggaagaaatctgacatgcaaaccccagatccaccacagtttagacaggggggttggaaaggaggctcaaactggattcct

SEQ ID NO: 11181 - DNA, 386 bp, Homo sapiens
ttgtacttctagaattaattaacgcgggtggtggaggttgcagtgagccgagattgtgccactgccctccagcctggcaatagagcaagactacgtctcaaaaaaacaaaaaaaaaacaaaaaaaaactgattttgaccagaatggaaagggtgtgtgtattccatttggtttgttgtttgtaataacttaaaaataacaatttgataccaagttatttttttcaatcaaaaaacataaaacaagttacaattccagaatgccatgatttggccaacattgatgacttgaactaaatgacgcagccaaggaggtagttggtaaaataaaaataattctgtgctagggagtcaagatccctaggctaaagtccttgacactgcttat

SEQ ID NO: 11182 - DNA, 618 bp, Homo sapiens
ttttttttttttttttttttttttaaagaaagcgggttctcatacaacaaccactcagatgtttctctccatctctccacctgctttttgaatattggtgcattattcagaaggctcttcccttcatagccccaagataaacgtgaacaattcccaaggttccatgcatcctcatcttcaccccacactttaaaactatcataactagttcacccctgagatttgttctgattggactagcgttgatcaagtgtccaccccttgaacccatctctgtggccaggaaaaaggaacgataggctaggtcatatactccacccttggagcaggggcagagtcagcttctccagaaccagatggagccccgctcagaaatcacgggctattgggtcaagggaagaaaaaaataaatgctgcaagaggtaaccaataaaggtatgtgcttgatcatacgaggaacatttgaaggaatagtgtccttagcttaaagatgaatagacatgaagaggacaaggtagcttaagatttgaaagtggtatttggaggaagcgtcagatttactgggtgtaattctagtactgatggttaaagggatgcagattttgattaaattaaata

SEQ ID NO: 11183 - DNA, 401 bp, Homo sapiens
agtacttctagaattaattaaatgaaatcatattgggcattcatatgtgctaaacaccattctaagtgctgaggcactatgatgaatatgacagacagatacctgttcccagagagtttataatgttgaggtaaagagccacataaaagacaattgtgttatcacttatgaagggctttgggatcaatgaggagggatgcctaacacagacaaaaattcaaagaagcctgcatagaagaggtatcatttaggttgaaatgtgagagaaaaacagcattgtagggagaattccgggcattgtagggagaattctgggcaatgggaacagcatgtgcagagacctagaggcatgagggagggcaagtatgtttgaagatggcagatagttctggagggcagct

SEQ ID NO: 11184 - DNA, 379 bp, Homo sapiens
  misc_feature 379: n = A,T,C or G
tagtacttctagaattatattaacgcgggtttgcctggagggagctgccaccctcagctgcagccccagacctcgcggttgctctcatccgtcgttcccagtgtgggcagtgacgcagcaccacggtaagttctgtagagtggacgccactcgctggcaaagcccagcagggcaaggaataagtgtcactcagtctttatccagaaaaatccaccaatgtacttttagtgcagtattaacagatggtagaaaatggaattgcctagaggattttaatctctgatggattattcttgtacctgtacctgtctgatggtcgtgtaagtccatgttaacaaacctgggaccacaggaaaggagaactgatgcgaatacaaan

SEQ ID NO: 11185 - DNA, 542 bp, Homo sapiens
  misc_feature 486: n = A,T,C or G
tttttttttttttttttttttttttttggagacagggttttgacatgttggtcaggctggtcatgaactcctggcctcaagtgatccacctacctcggcctcccaaagtgctgggattacaggtgtgagccaccgccccaaccctgtgtttattcttaggtctgtactacgctttatgcctcagtttccacagttaaaacacgttattttattcctcacgttataggagcaatttgtattcataaacttggccttcaccttcaacttctgaagattttaatacagcgcaaatgatttggggtctgtgaattcagttttatttatttggctccttcctttaaggagtcaggctaatgcaagaaaatccaataattagatcttttggatttcaaataactggaagaggaagtggtgtttatctaatggtttaggcataatgcgtgttttttcccgtaggcctgtgtgtatatgtgtgtgtgtggttgntcttaacttgaagaattaaacacttgttttccccgttaattaattctagaagtact

SEQ ID NO: 11186 - DNA, 614 bp, Homo sapiens
tttttttttttttttttttttttttttgagacaaattttctctcttgttgcccaggctggagtgcaatggcatggtctcagctcgtggtctcactgcaacctctgcctcccaggttcaaacgattcttctacctcagcctcccaagtagctgagattacaggtgcctgccatcatgcccggctaattttttgtatttttagtagagacaggatttcatcatgttggccaggctggtcttgaactcttgacctcaggtgatccgcccaccttggcctcccaaagtgctgggattacagacatgagccactgtgcccgtccttgtgttttatttctaaaagataatttttaagttttcattcatatgttattaaaatgccactaaatactagagcaatatatagcaggtatgatagttttgctatttattttattatgccaatggaaaattaaaaatttaataagtttacttatgttatttcagtaccaaataaaaaatgtaaattgactgattttgtaactatagttaaggatgcatttccactttttaaaatgagtactttaaaaataaacagtgatcattgaatgaaaaaaacataatatttaaaatttgtat

SEQ ID NO: 11187 - DNA, 366 bp, Homo sapiens
agtacttctagaattaattaacgcgggttctcatacaagaagtactcagatttttctctccatctctccacctgctttttgaatattggtgcatttttcagtaggctcttcccttcatggtccaagataaacgtcaacaattcccaaggttccatgcatcctcatcttcaccccacactttaaaactatcatttctagttcacccctgagatttgttctgattggactagcgttgatcaagtgtccaccccttgaacccatctctgtggccaggaaaaaggaacgataggctaggtcatatactccacccttggagcaggggcagagtcagcttcttcagaaccagatggagccccgctcaaaaat

SEQ ID NO: 11188 - DNA, 441 bp, Homo sapiens
tttttttttttttttttttttttttttttgaggaaggcacctacaaaacgaaagtgcctagggcttacaaaagtcatatgtagcctttacaaatattagctcagtcattttcagaaaggtttttccaattatcattttagagatgaggaaactgaacctcagggaggcttaggaaacttatccaaagcctcttaagaggctatgttagtcagactgggctaacagctgtaacaaccccagaatttaaatggcttaacacattaggagtttatttgttattgccataacaattcagggtgtatgtttggcaggtagtctacacagtgattcagggacccaggctccttccctttggtggctttttctccctctagggctgggagctctccatgcaaatgggggatggcgaaagacaacccattgtgggggattttaataggg

SEQ ID NO: 11189 - DNA, 353 bp, Homo sapiens
agtacttctagaattaattaaggcggttctcccagggatcgcaggtggccgaatactgcagctggcttttgaaggcatcgatgcacactttgagggcctgccttggctcctgcaccccaccacagttcgtgtttcctccctttattctctccacccagaaaggtgacaaatccaagccctggatgtgaggggggtccacaagagtaattctggagagatggggtcaggtgaggaatggttagagacccagggagccaagtcacgggacctcagtgaccccatggctgacctaccgagacctccagtcgccagcatcgggtaggcccacacgtgtgggggaggaagtgagtgtc

SEQ ID NO: 11190 - DNA, 711 bp, Homo sapiens
  misc_feature 10, 12, 44, 526, 682, 683, 684, 685, 686, 687, 689, 698: n = A,T,C or G
aagtgggatnantccactaagggacatgggcagagtctcggccncccctcgagagtacttcttgtattaattaacgcgggcattgtgtgcagaagtattgtactggaatctaacactgtgagtactgcccaggatccgtgttcctctctttagcccaggcatgcagttacattacattttccaacctccttgcagttagctacgatcacgtgactgcattctggccagtggaatgtgtgtggaagtgatgtgggccaattccaggcctggcctataaaaatcccccactttttgttctctttctccatccaccatctgcatggagagctcccagcactagagggagaaaaagccaccagagggaaggagcctgggtccctgaatcactgtgtagactacctgccaaacatacaccctgaattgttatggcaataacaaataaactcctaatgtgttaagccatttaaattctggggttgttacagctgttagcccagtctgactaacatagcctcttaagaggctntggataagtttcctagcctccctgagcttcagtttcctcatctttaaaatgataattggaaaaacctttctgaaaatgactgagctaatatttgtaaaggctacatatgaactttgtaagccctaggcactttccgtttggagggggccttcctcnnnnnntnagaaatatnaataataataaaa

SEQ ID NO: 11191 - DNA, 585 bp, Homo sapiens
tttttttttttttttttttttttcacttgaattgtttttatagtgcttccgttatttatttttattttttttattatactttaagttttagggtacatgtgcacaacgtgcaggtttgctacatatgtatacatgtgccatgttggtgtgctgcactcattaactcgtcatttatattaggtatatatacgtgttcattgtacccttatcgactttgcagcatgcttatccatctaactattcatctttatttgccttcgttttttgagttcccttattcatcctaaaacaaaatataatgcctgactcatagtcagacttcacagtatttttaaatgaattacattgcattggggaaatataaatagtaatgtccttttatagaggaagtctaaaagaaattcttgggtgaattgataatcaaacatttttaagaaggtatatttgctagcaaagaaagaaaaaatatgacagcttatttatatagaaaacctatgtattctgggatttttttttgtttcaagtctgtattatgaatatcatgcttatccttcccccgccttaattaattttagaagtactctt

SEQ ID NO: 11192 - DNA, 401 bp, Homo sapiens
tagagtacttctagtattaattaaggctttggaagggatagcatgatattcatatacagacttgaaacaaagaaaaatcacagaatacataggttttctatataaataagctgtcatattttttctttctttgctagcaaatataccttcttaaaaatgtttgattatcaattcacccaagaatttcttttagacttcctctataaaaggacattactatttatatttccccaatgcaatgtaattcatttaaaaatactgtgaagtctgactatgagtcaggcattatattttgttttaggatgaataagggaactcaaaaaacgaaggcaaataaagatgaatagttagatggataagcatgctgcaaagtcgataagggtacaatgaacacgtatatt

SEQ ID NO: 11193 - DNA, 388 bp, Homo sapiens
agtacttctagaattaattaacgcgggttctcatacaagaagtactcagatttttctctccatctctccacctgctttttgaatattggtgcatttttcagtaggctcttcccttcatggtccaagataaacgtcaacaattcccaaggttccatgcatcctcatcttcaccccacactttaaaactatcatttctagtacacccctgagatttgttctgattggactagcgttgatcaagtgtccaccccttgaacccatctttgtggccagaaaaaggaacgattggctaggccatatactccaccccttgaaccagggcaaaataattttttcaaaaaacaaggggccccccccaaaaaaaaaggggccttttggggaaaaagag

SEQ ID NO: 11194 - DNA, 463 bp, Homo sapiens
gccccatgtagcagtgatgcaacaaccttagggaatattgtaatttctgcccccccctcgagagtatttttagaattaatttaggcgggctgtttttaccactacactgcagcctgggtgacggagtgagactctgtcaaacatagaagataagatgaacacgcacaagaatgaaaatggactgtgcaatactaaaattaatatgaaaatgtagaaatttaaaataccaaagaaattttgaaaaataacaaagctggaaactggccttgcctgactttgagacttgtaaagctataaaaattaagacagagtgataataatctcaaactatacaaatagttaaatgtgacagaacaggtagacccacatatatatagatagctgatattgaagagacatgcaaagttaattcatgggcaaaaagatagtcttttcaataaatggtgttaaaataatggttatt

SEQ ID NO: 11195 - DNA, 403 bp, Homo sapiens
agtacttctagaattaattaaggcgggggaagggatagcatgatattcatatacagacttgaaacaaagaaaaatcacagaatacataggttttctatataaataagctgtcatattttttctttctttgctagcaaatataccttcttataaatgtgtgattatcaattcacccaagaatttcttttagacttcctctataaaaggacattactatttatatttccccaatgcaatgtaattcatttaaaaatactgcgaagtctgactatgagtcaggcattatattttgttttaggatgaataagggaactcaaaaaacgaaggcaaataaagatgaatagttagatggataagcatgctgcaaagtcgataagggtacaatgaacacgtatatatacct

SEQ ID NO: 11196 - DNA, 401 bp, Homo sapiens
  misc_feature 401: n = A,T,C or G
agtacttctagaattaattaacgcgggatatagttcttctcattctttgttctcttcctttatatcaacagcctttttctgacatgatataaaatcatgtgcttatgacatgcattaaaaaggagaagtgctggatctaatatccttggtctaatggatccccttgcagatatacagggctccctacacacactgggatatctaggtacaagcccaaagttcatatacagactttctaaaatcattgtatttaaaagcagaaaagtgccgggcacagtggctcacatctgtaatcccaatactttgggaggctgaggtgggcgaatcacctgaggtcgcgagctcaagaccagcctggccaacatggtgaaaccccgtctctactaaaaatatgaaaaacn

SEQ ID NO: 11197 - DNA, 357 bp, Homo sapiens
agtacttctagaattaattaatccacccttgaaccagtctacctccagaattcctggtacatgagataataacatttcctttgtttaagtcacttttagttggattttctgttatttccaaccaaaagcattcaattgatagaagtgatgaagtaagactggacagcatttatccacccacatatttgtaaaactatgcctgtctgaccagacgtggtggctcatgcctgtaatcccagcactttgggaggctgctgcaggaggattgcttgaggccaggagttcaagaccagcctgggaaacatagcaagaccttatctctagaataaataaataacaataaaaattttaaaacta

SEQ ID NO: 11198 - DNA, 922 bp, Homo sapiens
  misc_feature 1, 20, 54, 516, 561: n = A,T,C or G
nggaagagtggaaaacgccntctaaagggacctttggctgaagatttgcgccanccctccagagtacttctagtaataattaactcgggtagtgtctaagggatgtcttctattctatcttaggtgtctcaaaccggtagcagagagcgctaattaattctttagtcaaagctcggtattttctctgagccaggccatatgggacactgggaacattgaggtgactcagactctgaacctccgtgagcagctgatggggagggccatgctattccagcccttggagcttctatgaccaggtgaacagagagctggcattcctattgaacacaagaaaaacgagctctgagaggaggctgcatgcactcagccaggccaaccaggactgggtcccgggcctcctgactacagcacagcgacctccttctccttcagccagctccagagtacctggggctggagccatgttcctggagctggtttccctggctttcctgttttgtctctggcgctcantgagctgaaggagctctaggccctgatgggctctctgggcctgangggagggccgggccgggccaggctgaggagaaaggtctgagatccacttttggctccctgcctgtgggtaggtggcacattaatggaaagcacttttagggctgggggaggaagggattctgtcatcaagaggaggctccttcaggaacaacggctcaaggaagtgggaagcagcccctggaactgcgctgcttgtccttttctaaggccctgacttcaccaactgggctaatctggattcttgaaagtcccaacaagagagagatgcttgttgaccccggtgtggtgaaggggcacaaaaggtggtgtgggcctggaccctgcacaaaccttgctggaggcagacccagatgccagagag

SEQ ID NO: 11199 - DNA, 411 bp, Homo sapiens
agtacttctagaattaatgtaaggcgggttttccagggatcgcaggtggccgaatactgcagctggcttttgaaggcatcgatgcacactttgagggcctgccttggctcctgcaccccaccacagttcgtgtttcctccctttattctctccacccagaaaggtgacaaatccaagccctggatgtgaggggggtccacaagagtaattctggagagatggggtcaggtgaggaatggttagagacccagggagccaagtcacgggacctcagtgaccccatggctgacctaccgagacctccagtcgccagcatcgggtaggcccacacgtgtgggggaggaagtgagtgtcactggcccatcagcaagcagagctggcagaggtacctgtgcaggcgagtccaatgcg

SEQ ID NO: 11200 - DNA, 295 bp, Homo sapiens
  misc_feature 264, 265: n = A,T,C or G
agtacttctagaattaattaacgcgggggaaaactgtcttacttaaacaaaatgtattttaggaaaatgcctgtttcaagggtttattactgttttataactaagagacttgggactttagtatacgaaaaggtgtcatttcaaatgggggaaaatgaattattcaacaaatgatcttgggacaactggatagccattcagaaaaaaagtgaagctggaacactataacatgctttaccccacaataaatcagagttaaatgtnnaaaaaacaaaaaaaagtcacattaaaaatg

SEQ ID NO: 11201 - DNA, 440 bp, Homo sapiens
  misc_feature 198: n = A,T,C or G
agtacttctagaattaattaacgcgggatatagttcttctcattctttgttctcttcctttatatcaacagcctttttctgacatgatataaaatcatgtgcttatgacatgcattaaaaaggagaagtgctggatctaatatccttggtctaatggatccccttgccagatatacaggggctccctacacacactgngatatctaggtacaagcccaaagttcatatacagactttctaaaatcattgtatttaaaagcagaaaagtgccgggcacagtggctcacatctgtaatcccaatactttgggaggctgaggtgggcgaatcacctgaggtcgcgagctcaagaccagcctggccaacatggtgaaaccccgtctctactaaaaatatgaaaaacagccaggcatggtggcaggtgcctgtaatcccagctac

SEQ ID NO: 11202 - DNA, 509 bp, Homo sapiens
  misc_feature 65, 97, 100, 101: n = A,T,C or G
ggggagttctttctattcgggcaatgtactgaaaaccgcggcggccgcccgggcaggtctaacangggttaaaaccccccattgaacccggaaaacngannacggaagggggctttttggtgggtataagagccagaacttgctaccagcctgaggagaaatcaaacacatggagaaaggaaagctgacagcccagagacccacggggaaacaggccccgagttactggatacaggcaaccctaaaactgactgtccctctggactctacgtagtgagccaacacatttcctcattattttggatatgttttttttcagttgaaggcattctgattcaatacaggagaaacttttctttgcaaattacaaagtgtgataactgttgctaaaattaggaatgtgcttaaagggaaatcatgaacaccaagacaaaaggcctggatgcaaccaaacacttctgttcaagtgaattttaacaccatacaacctgggggatttcctaaatttc

SEQ ID NO: 11203 - DNA, 500 bp, Homo sapiens
ccgggcaggtacccagaaaaccaaaatgagcttaaacattttgaaagatgtcaacaaagttatgcccttggaaataagtttggtttatgtaagagcattgttcctttaatgtaaagacacaataagtttggctcgcattgtaaaagtttgaaatctcatttaggttttgttatccagagtagaagatatgcaggaaaagattctgatgcatttggtggatatgggagatcatgcctccatatcaagcgtgacaaaactcttactggagttaaataccatagatgtgttaaacccagcagccctaaatcacagctcaatgacctacaaaaaatttgtgcaggagggaaaccacatgaatgcagtgtgtgcgggagagccttctccaggaaagcacagcttattcaacatcagagaactgaaggaggagagaacccccgtgattgtggggatgggggaaactttcttgaggaaattcgcttcctggccttaagagacctacc

SEQ ID NO: 11204 - DNA, 306 bp, Homo sapiens
ccgggcaggtacgctcctgtagtcccagcactcaggaggctgaggcacaagaatcgcttgaacccaagagatgcaggttgcagtgagccgagactgtgccaccgcactccagcctgggcgacagagcgggactccgtctttaaaataaaaaaaaaaataaataaataataaatgaataactgacttctgaagacagactgctgctttcaaactttggttctatcacttactagctgtattatcttgggcaagttactgccctgcacttgagttttgccatctataaagtggaaacatatagtacct

SEQ ID NO: 11205 - DNA, 475 bp, Homo sapiens
ccggccgggtacgcgggctatttctttgtgtgcggctggacctcttattccctttctctttgcctttctgtctcgatcgtaatctttctttttcttcttatctgtcctccctcctccatcttctttccttctcctcctcctcttcctccccctcttctgcttcctccctcctcagaataggactaagctacacaggttattgtggcttacatttaaaatttttttgacatatcctcttgtttttacaaatcaggacatgagtttttttaagtcatgaatctttattataaaaggacctcacttgcgtttgatcttccatagacacagagagcttctgcccttttgtctacagatagaagacgaccaatagcatactagggggtagtatttctgggtgctccataccccacccttcacagccaagaaaagggaaaaacagtggaccagatcaaatacttttaaattgttggcaggg

SEQ ID NO: 11206 - DNA, 475 bp, Homo sapiens
  misc_feature 368: n = A,T,C or G
ccgggaggtactgcatttttaatttttttaactgtttttatgttttcaaatattttcagtctgcagttggttgaatctgcagatatggaactagtgtatacagagggccaacattctttttaattactaattgtctctgccaacacttaccaaaattatcctgaattctatttttttgtcttgttttgtttcgagataaggcctcgctccattgcccaccctggagtgcagtggcgcgatctcagcttactgcaagctctgcctcccgggttcatgccattctcctgcctcagcctcctgggtagctgggactacaggcacttgccaccacacctggctaattttttgtattttttagtagagacggngtttcactgtgttggccaggctggtctcgaactgctggcctcaggtgagccgcctgcctcggcctcccaagtgctgggattgcaggcgtgagccaccacacttggcc

SEQ ID NO: 11207 - DNA, 478 bp, Homo sapiens
aggtacgcgggagggagagagttgaaatggttggcatcctcccactctgttgctccggctgtgtcccctcgctctgttgttccagctatgtcccctctgttgctccaactgcagctcattctgttagagttcctcattcagctggtcactgtggccagagggtgttggcctgctcccttcctcaagtattcttaaagccatggatttttgtggagcatttttcttcctggctctcccttgagttattttcctttcttcgctatcttgggactcttctttgtgcttgcggtcatcggttgagagaaggacttcttcttccttgtctccttggtgttggctcgtggttgctcttcaacaactggactggaggctcttggttttctcttcatcttcaacaagtcagtctctctcaagggtcttacgttgcagcattcttaccagaggccattgggcctggagttccagttccagtgtctgg

SEQ ID NO: 11208 - DNA, 361 bp, Homo sapiens
aggtacaggagaaaacagtaaagcctcaaaaggaggaaattcgtaaagagtccttaaaaaccttaaatgatttccaaaaattatttaggggacgttaattggataagacctactttaggaattcccacctaagcaatgtctaaactgtttgctttgctgagatgggatccaaattcatgtagcaaaagaactctgatgcctgctgcagctgaagagttacaaatgattgaggaaaaaattcaaagtgctcaagtccgtagaagagatcctagtgttccattacagctcttagtgttccctactctccattctcctataggggtgattgttcaaaatgttgacttagttaaattgtcctttt

SEQ ID NO: 11209 - DNA, 345 bp, Homo sapiens
ggggccattgagactgccatggaagacttgaaaggtcacgtagctgagacttctggagagaccattcaaggcttctggctcttgacaaagatagaccactggaacaatgagaaggagagaattctactggtcacagacaagactctcttgatctgcaaatacgacttcatcatgctgagttgtgtgcagctgcagcggattcctctgagcgctgtctatcgcatctgcctgggcaagttcaccttccctgggatgtccctggacaagagacaaggagaaggccttaggatctactgggggagtccggaggagcagtctcttctgtcccgctggaacccatggtcc

SEQ ID NO: 11210 - DNA, 330 bp, Homo sapiens
aggtacctatagaaatgccttcctcaggaaccccgccattgttaaacaagagtgagcgcctagtgggcagaaatgtagtgattgtggaacaaccttttccaagaaatcaagcctttgtagttaatcaggaatttgaacagagaataagcctcacaaatgaagtgaatgtggccccatcagtaataaattatatcttgtatcttacagatattgtatcagaataaatcttctgataccagaaaggtgggaaaatctttagtaggaatcctccagccattatatcccagagagctcatttagggctgaaacactgtggaggcagtggttgtc

SEQ ID NO: 11211 - DNA, 344 bp, Homo sapiens; identical to SEQ ID NO: 2042

SEQ ID NO: 11212 - DNA, 341 bp, Homo sapiens
ccgggcaggtacattcactctccgcctaggagtaggattttctgagaaccggactactgtgaatgctgctgctcctctgggtctagccacctagtggggctgccacactccaggttggtgctgggaaatgtctgcaagggatccagtgatgtgatctgtcctctagtctcctagcagcagataccagcactagctctggtggagatgtcaggggagtgacgtagaccctataaagttccttggttataaataaccttagtgtgttggctttctcaaatgctggctgaagaagtaatgaactggtcacttgggcagactcaggacctcctggttagccatgg

SEQ ID NO: 11213 - DNA, 499 bp, Homo sapiens
ccgggcaggtacagatctcatcaggtatgagggcagtttctgacgcgaacgtctcttcctcgtggtttttattgtcagtattcacacgaagtttaagtctcctagtgggcacccagacgggattgacgatctcctggtaaaacacaagcataccctcttccccacgttataattgttccaggttcccaggtattggtttgggagtttttccatgacactggcttgccttcgtttagggagaattttttgcctgtataatggcatttagctgcagtcagagtattgtttttaggaacatttagaaagcttaaacaatgctaaatataattgggagtggggagtagttaaattatgcttttaaaccagccttgtcttctttttacagtaacttgaagaggtttagtaatttttttcacgttttggaccgagaaccaattctggaaccaaccccatgttttccattatatgtttactgggagcactgtaaaagttatgtgga

SEQ ID NO: 11214 - DNA, 449 bp, Homo sapiens
aggtacagtataatccctattataaatccaagatggtatttttttcttgcagaaattggcaattaatcttaaaattcatatggaaatacaagggacccagaatagccaaactaattttaaaaaagaacaaagggacaggaggagaactcatacttcctgatttaaaattgactatcacaggatactatgttaacaccaaaatatgactctgacataaaaattatttctgggaagacagttaaagcagacaattaacaagcagcagcaaacagagaaaaagctctgtctatcctttcccttttctttatttatatgggcaggatattaataactgctttatacacggggtctctggacccttattagcccagagcatttaacatatcttacttcctttgttttttctcccacatacaggcagtctctgacttatgattttctgattttgt

SEQ ID NO: 11215 - DNA, 500 bp, Homo sapiens
aggtacaagcaattctcctgccttgacctcccgttatgctgggactacaggcacacacaaccacacctggctaatttttgtatttttagtagagacagggttttaccatgttggccaggctggtcttgaattcctgacctcaggtgatccacctgcctcggcctcccaaagtgctgagattacaggcatgagccaccacacccaatctagtttgacagtttttatatcattatgagcacaccacagatttagttttgtgctttgtttttttacttatctttataacaatttttttttttttagttatagtattataatatcaagcagcttaaatagcaatagggctaaattttttttttttaaggagtggaaaaagacttagtatcaatctttttatcaatcttagtatcaaactttgattaattcctgtgagtttgctgttagggatgacctggaaaaatattttaatgccattatttatttattggttggtaagagat

SEQ ID NO: 11216 - DNA, 404 bp, Homo sapiens
ccgggcaggtaccacctgaagaccctcacactcaacttcaccatctccaatctccagtattcaccagatatgggcaagggctcagctacattcaactccaccgagggggtccttcagcacctgctcagacccttgttccagaagagcagcatgggccccttctacttgggttgccaactgatctccctcaggcctgagaaggatggggcagccactggtgtggacaccacctgcacctaccaccctgaccctgtgggccccgggctggacatacagcagctttactgggagctgagtcagctgacccatggtgtcacccaactgggcttctatgtcctggacagggatagcctcttcatcaatggctttgcaccccagaatttatcaatccggggcgagtacct

SEQ ID NO: 11217 - DNA, 486 bp, Homo sapiens
aggtacaatgaggatactggagtccggaatctctgagtgcttctctgtgatggacagaacaatgccccgacaaagatgctcatgccctcctccccagaacctgtgaatatgtcacggtgcatggcaaggggggaataaagttgccggtggaatttaggttgctaataggctaaccctaagatggggagattagcctcgattatcagggtgagcttactgtcatcacagggacccctataagtgagagagggaggcaagagaagtagtgtcagaattagagacgaatttgcagaagctggcttttaagatggaggaagaggccatgagccgaaggatgccggtggcccctagaaacaggaaaaggcaagaaaaaggttctcctctagagcctcctgaggagcacagccttgccaacactttgaactttgccagtagtttgaacttctgtcttccagaactgtgagataataaatctgtacctgcccg

SEQ ID NO: 11218 - DNA, 392 bp, Homo sapiens
ccgggcaggtacgcgggagcacagatttgagtagcaattatcaccaggggaacaataacactgactcctatggtgttgcttcttaaaagactgtcctactgctgcagccacgtgctccaccactcctattgcttttaccctgatgtgatgaagctctcatgcacagacaccaggatcaacagtgcagttgggctgactgccctgattaccactgctggggcagattctgtctttattgtcctgtcttatattttgatcattaagactgttctcagcattgcttccccggaagaaaggaagaaagccttcagcacatgtatctcccatattggggctgttgctgtattttacattccattgatcactctgtcctttgttcacgggtttgggaa

SEQ ID NO: 11219 - DNA, 404 bp, Homo sapiens
aggtaccaaggcccaatcaccccaaacagtgacaggaacataatttcctgttgggaccagttctcggaattttgcaccaacatgatcccatagttccacatctaacgttcccttttcaggaaaccaaggacagtgttcttccactgccctgaatagggtgaccatattttccatgggaacccgaactcccccattttaacaggaatttaatatagcagagataagcataatgtttagactctgcgtgacccatagttaccccggacaatacacagacaactcaccaatcgtcggggagccaaacaagcatttttgtggactggaccgattaacattttttcgcacctaccaaaaggaaatcgggtttccaaatgccacttaggaaaaagaaaaccacgttgggc

SEQ ID NO: 11220 - DNA, 375 bp, Homo sapiens
aggtacaatagagagcatcaatagcaaacttactcaagcaaagaaagataaagagtttgtttggaattaccagtgagagaagaataaataagaatgacaaggagtgaagaaagcctaccagacttattagataacatcaagggaaaaaaatttcatatttttagagttccagaaggcaaagagatgacaaaaggcatagaaaatatatttaacaggtcgggtgcggtggctcacacctgtaatcctagcactttgggaggctgaggtgggtggatcacctgaggtcaggaatttgagaccagcttgggcaacatggcgaaaccccgtctctaccaaaaatacaaaaaattagccaggcatggtggtgggtgcctg

SEQ ID NO: 11221 - DNA, 397 bp, Homo sapiens
ccgggcaggtacccagaaaaccaaaatgagcttaaacattttgaaagatgtcaacaaagttatgcccttggaaataagtttggtttatgtaagagcattgttcctttaatataaagacacaataagtttggctcgcattgtaaaagtttgaaatctcatttaggttttgttatccagagtagaagatatgcaggaaaagattctgatgcatttggcggatatgggagatcatgcctccatatcaagcgtgacaaaactcttactggagttaaataccatagatgtgttaaacccagcagccctaaatcacagctcaatgacctacaaaaaatttgtgcaggagggaaaccacatgaatgcagtgtgtgcgggagagccttctccaggaaagcacaga

SEQ ID NO: 11222 - DNA, 375 bp, Homo sapiens
  misc_feature 266, 277, 288, 294, 295, 317, 325, 372: n = A,T,C or G
ccgggcaggtacccagaaaaccaaaatgagcttaaacattttgaaagatgtcaacaaagttatgcccttggaaataagtttggtttatgtaagagcattgttcctttaatgtaaagacacaataagtttggctcgcattgtaaaagtttgaaatctcatttaggttttgttatccagagtagaagatatgcaggaaaagattctgatgcatttggtggatatgggagatcatgcctccatatcaagcgtgacaaaactcttactgngagttaaatanccatagatgtngttaannacccagcagccctaaatcacangctcaatngacctacaaaaaaatttgtgcaggaggggaaaccacatgaatgcagntgt

SEQ ID NO: 11223 - DNA, 845 bp, Homo sapiens
  misc_feature 845: n = A,T,C or G
aggtataatgaggatactggagtccggaatctctgagtgctactctgtgatggacagaacaatgccccgacaaagatgctcatgccctcctccccagaacctgtgaatatgtcacggtgcatggcaaggggggaataaagttgccggtggaatttacgttgctaataagctaaccctaagatggcgagattagcctcgattatcagggtgagcttactgtcatcacagggacccctataagtgagagagggaggcaacacaagtactgtcagaattagagactaatttgcagaagctggcttttaagatggatgaagaggccatgagccgaacgatgccggtggcctctagacacaggaaaaggcaggagaaacgttctcctctagagcctcctgaggagcacagccttgccaacactctgaactttgccagtagtttgaacttctgtcttccagaactgtgagataataaatctgtacctgcccgggcggccgcccgggcatgtacaaaattgccaccaaaaacgatgttgatgtccaaattgaccaggagtcctacctgcctgaagacatatctgatggaggtgacatctataatggagatcgttaaataaaaggttcccaaccccctggaaaggccggctgatcttcttgcccagcagatgatgccagaaatcggggagccttggtttggtccaaagccacacgggagtttttgaacttacccttcgggaggtggagcttggttcaagctatcctggtgtgatggggaacctattcatttttgaaaaacccgaatgtttgctgaacttccttataacgtgcccattattgctttgatttaan

SEQ ID NO: 11224 - DNA, 470 bp, Homo sapiens
  misc_feature 240: n = A,T,C or G
aggtacttggtgcatttttgaagatttaataattaattaatagttggtgcaggccaggcatggtggctaacacctgtaatcccagcactttgggaggccgaagtgggcggatcacctgaggccaggagttttagaccagcctgaccaacatggagaaacgctgtctctactaaaaatacaaaaaaaattatccaggcgtggtggcgcatgcctgtaatcccagctactctggaagctgangcgggagaattgcttgaacctgtgaagcggaggttgaggtgagccgagatcacgccattgcacttcagccctggggcacaggagcaaaacttcgtctcaaaaaaaaaaaaaaaaaaagttgggggcaaaagcttgaaataatggcctattgggatccccccacctaaaaaaatttttaatgggtttaaaaaaagaagattgggaaaatttttgaagggttttttaaggtt

SEQ ID NO: 11225 - DNA, 404 bp, Homo sapiens
ccgggcaggtactctcatgattaaacatcttcgtttctttttccttttccttaaaattaaaaaaaaaaaaatcccaaagagaatagggagcaacaaccataggataggagtctccctaggactaatactctgcagataactgacgtgcctcaggaattgtttttattttggtttgttgttgttttgttttgttttttagagacagggtcttgctctgtcacccaggctagagtgcagtaagatcacagctcactgcagcctcaaacctctggactcaagtgatcctcccacctcagcctcccaagtagctaggactacaaggcagctaggactacaggcgcacaccaccacatccagctaattctttttcattgagacggagtcttactctgtcgccaggctgg

SEQ ID NO: 11226 - DNA, 377 bp, Homo sapiens
ccgggcaggtacccagaaaaccaaaatgagcttaaacattttgaaagatgtcaacaaagttatgcccttggaaataagtttggtttatgtaagagcattgttcctttaatgtaaagacacaataagtttggctcgcattgtaaaagtttgaaatctcatttaggttttgttatccagagtagaagatatgcaggaaaagattctgatgcgtttggtggatatgggagatcatgcctccatatcaagcgtgacaaaactcttactggagttaaataccatagatgtgataaacccaggcgccctaaatcacagctcaatgacctacaaaaaatttgtgcccgagggaaaccacattaatgctttgtgtgcgggagaac

SEQ ID NO: 11227 - DNA, 351 bp, Homo sapiens
aggtactgatgctttttaaggcatattatcaacatacagccatgacttgtccagagaatctcacctgacaaaaactcagagaagaaagagaaagaagatgaaatggctggttttcagatgtgtattctcattttatggaagacatgttgccagagtaaagcacaatatattcatcttgaaatgtaatactgagaagatatggaagttatggaagttgtggccttcagaattgacacttacggagagactagaacagcgtgggtgagttgtgaggggcaggaagcatgtcttaatggacttaaccaattttcgtcaactattcacagtaaaatctttcaatgtacctgcccg

SEQ ID NO: 11228 - DNA, 505 bp, Homo sapiens
ccgggcaggtactttgtattacaagaatagctttttatttcaaatatttcttctcctttttcgtatccatgtgttcttttatatgcatattttatttcatgtaatcctgttctttgccatgattttaattttctatggttcttttcttttgaaaaattcaaaaaattttaaaaaagatcttttgtcataattgtgctcataaaaaacttgatttttgtcccagtgggggaattttaatgtacacttgattgaattttttcattgagactggtcttttatcttttttaagggtaaaggtggttccaagggggttttaaaaaaaccattaacttaagtcctattaattcaatagggtgtaaattggttattccaatttaatttaaccttttcaaccgaatttcccttcaatttggttccctaaaatttgggtttttccttcaattaaacttttttggttttttacaattttttccttctggtttgggatttggatccttttttttaa

SEQ ID NO: 11229 - DNA, 441 bp, Homo sapiens
aggtacgcgggtctctactaaaaatataagttagccaggcctggtggcgggtgtctataattccagctacttgggaggctgtggcaggagaatcgcttcaacccgggagtcagaggttgcagtgagccagatgatgccagtttactccagcctgggcaatagagcgaggctcagtctaaaaaaaaaagacaacaacaagatctccttctctctctgacctttgcttccattgtcccattgtcacatctccttctctgtctctgagtccttttttctcttggaaggacctttgtgattatattgggcccttcaaaatcatcccggatacttttcccatctcaaatccatacccttaatcacattttacacgtcccttttcccatgggagaatcgcatgtttacaggttcccttgaaggattcggatgccacaagtttggagg

SEQ ID NO: 11230 - DNA, 403 bp, Homo sapiens
aggtactggactactgggctcaaaaggagaaggagggcaagagaggtccaaatccagctttttggtgggtgaatggccaaggggatgaagtaaagtggagcttcagagagatgggagacctaacccgccgtgtagccaacgtcttcacacagacctgtggcctacaacagggagaccatctggccttgatgctgcctcgagttcctgagtggtggctggtggctgtgggctgcatgcgaacagggatcatcttcattcctgcgaccatcctgttgaaggccaaagacattctctatcgactacagttgtctaaagccaagggcattgtgaccatagatgcccttgcctcagaggtggactccatagcttctcagtgcccctctctgaaaaccaagctcctggt

SEQ ID NO: 11231 - DNA, 399 bp, Homo sapiens
ccgggcaggtaccagtgtctgaagcctggggactggcggctgctggtcaaggccacattagtttattgttaagtgcaaggtttctggtaacagaaataaagaattcaattgattcatcatcaagaccaaatatatttactaaagatctaccttaaattcattttttagcaggtagtatggcattgtggttaagaatttacatttgtgaacatttaccagctgatgaccgaggtgagcttctgtttcctcctgcataaacttgagattataaaaatcccctagttggctgggcacagtggctcacacctgtaatcccagcactttgggaggccgaggcaggcatcacgaggtcaggagatcaagaccatcctggccaacagggtgaaaccccgtctttac

SEQ ID NO: 11232 - DNA, 377 bp, Homo sapiens
ccgggcaggtactgtctgatgacgggtgagggcagagtttttattgaagcctctctcacagtgagaacacctgtaaggcttttcaccactgtgggtttttcggtgggcactgaagtgggagctattgttgaagattttcccccacactgcacacttgtatgggctctccccagtgtggatgcgccggtgagcactgaactgggaactgctgttgaatctctttccacagacaatgcactggtcaggcttttccccagtatgggtcctctggtggacaataaggctggaactctggttgaagcttttaccacattgcccacactgatagggcctctcccctgagtgagttcatatgtgggcagtgaggttggagcgca

SEQ ID NO: 11233 - DNA, 343 bp, Homo sapiens
ccgggcaggtacccagaaaaccaaaatgagcttaaacattttgaaagatgtcaacaaagttatgcccttggaaataagtttggtttatgtaagagcattgttcctttaatataaagacacaataagtttggctcgcattgtaaaagtttgaaatctcatttaggttttgttatccagagtagaagatatgcaggaaaagattctgatgcatttggtggatatgggagatcatgcctccatatcaagcgtgacaaaactcttactggagttaaataccatagatgtgttaaacccagcagccctaaatcacagctcaatgacctacaaaaaatttgtgcaggag

SEQ ID NO: 11234 - DNA, 429 bp, Homo sapiens
ccgggcaggtactttgtattacaagaatagctttttatttcaaatatttcttctcctttttcgtatccatgtgttcttttatatgcatattttatttcatgtaatcctgttctttgccatgattttcatttctttgattctttctttgaaaaaaatcaaaattttaaaaaagtcctttgttcatatttgtgccataaaactgtttttgtccaaagggaatttatgtcctgatgattttcttggctgtctttttttattaagttaagtgtcaaaggtgtttaaaacactactatatcttatatcaatggtttacatgtaaatctattacttacatatcacgtattcacctatattgttacaaaaaaagatttctctaaataaacttttaatattatctatcattaactctttttagttttgttccattta

SEQ ID NO: 11235 - DNA, 437 bp, Homo sapiens
aggtaccgtatggagtcctccagctgcagcccagctcaccctcaatgccaacccacttgatgccacccaaagtgaggatgttgttctgcctgtgtttgggacccccaggacaccccagattcatggcagatccagagagctggccaaaccctccattgcagtcagcccaggcactgccatagagcagaaggacatggtgaccttctactacaccactaaggacgtcaacattaccatccactgggtttccaacaacctctccgttgtgttccatgagcgcatgcagctgtccaaggatggcaagatcctcaccattctcattgtccagcgggaggactcggggacttaccaatgtgaagctcgagatgcccttctgagccagaggagcgaccccatcttcctggatgtgaagtatggtcctgatcctgttgaaatca

SEQ ID NO: 11236 - DNA, 346 bp, Homo sapiens
aggtacttctgggtaaactggagaagagcttcaactctgttcacctgcttgcaggtgggtttgctgagttctctcgttgtttccctggcctctgtgaaggaaaatccactctagtccctacctgcatttctcagccttgcttacctgttgccaacattgggccaacccgaattcttcccaatctttatcttggctgccagcgagatgtcctcaacaaggagctgatgcagcagaatgggattggttatgtgttaaatgccagcaatacctgtccaaagcctgactttatccccgagtctcatttcctgcgtgtgcctgtgaatgacagcttttgtgagaaaatttt

SEQ ID NO: 11237 - DNA, 346 bp, Homo sapiens
ccgggcaggtacgggccacaaagtatttcctgaagccagaagtcttacagaagtatatggttgatccaggcagaatttgcatttctggtgacagtgctggtggaaatctggctgctgcccttggacaacagtttactcaagatgccagcctaaaaaataagctcaaactacaagctttaatttatccagttcttcaagctttagattttaacacaccatcttatcagcaaaatgtgaacaccccaatcctgccccgctatgtcatggtgaagtattgggtggactacttcaaaggcaactatgactttgtgcaggcaatgatcgttaacaatcacacttcacttga

SEQ ID NO: 11238 - DNA, 826 bp, Homo sapiens
  misc_feature 721: n = A,T,C or G
acttctacacgcgcaacgatggcttgcagaaccaggccgtgctgtacaccctgaagaacctgtacgaccagccgcgcatgctgctcgacccgaacaccctggcgcttgatggcaccgtcgccctggccgggccgaggtcagccccgacggcaagctgctggcctacagcatcgccgcgtccggctccgactggaacgagatcaaggtgcgcgacatcgacaccggcaaggacctgcctgaccacatcaagtgggtcaagttctcgagcaccgcctggaccaaggatggcaagggcttcttctacagccgctacgacgagccgaaagaagcgaccaagctggccgacgtcaactacttccagaagctgtacttccaccgcatcggcacgccgcaaagcgccgacaccctggtgtacgaccgcgccgaccagaaggaatggggcttcggcggccagaccaccgacgatggccgttacctgatcatcaccaccaccaagggcaccgcgccgaagaaccgcgtttcgtacaaggacctgtccaagcccgatgccaaggtggtcgacctgatcgacaacttcgacgccggctacgacttcatcgacaatgtcggcaccgtgttctacttcagcaccgaccgcaacgcgcccaagaagcgcatcgtcgcgatcgacgtcagcaagccgcttgaaaccaacttgaaaagagatcgccggcgaaaccgncgacaccctggccggcgccgacatcatcaacaaccagctggtgctcgagtacctggaagatgcccaaaacgtgtgcgcctgtgtccctcgaagcaaaccggtgcc

SEQ ID NO: 11239 - DNA, 413 bp, Homo sapiens
aggtacgcggggaactcaaaacccctggagaagccagtgctgagctagggaaacctgaactataactgacaaattgctacagccttttaaatctctttttaagagattaaaaactccaggggaaccaagtcatggggttacccatccacattttttttttttttttgagacagagtcccactgtgtcaccaaggctggagtgaaatgacacgatctctgctcactgcaacctccgcctcctgggttcaagcaattctactgtctcagcctcccgagtagctgggactacagtcctgcaccaccacgcctggctaatttttgtatttttagtggagatggggtttccccttgttggtcaggctggtctcgaactcctgacctcaggtgatccacccgccttggccttcaaaagt

SEQ ID NO: 11240 - DNA, 429 bp, Homo sapiens
aggtactgaggccagcaggtaggacataggcctctgcattgcaggtctgggctacgccgtcagcatcacagtcacacacgcggatggtgagggtgctggtgctgctaagtgagggagatccactgtccacaatgaaaattggcagatagtaaactgattgttcctgtctccggaagccgtttctcctggtcagtattgaggctgtgttgtctttgttatctttcaatgaaaagttgtggttatttgttgcatccgttgttaagctgaagtaaaactggtgtccattggatggctcatctttatccacagcactgattttctggataaccaaactgagattgaactgcacttaattcttagaattgtaagacgcttaaacccggttgggtaaggtaggaaacagcccaatcagcgtacctgcccgggcgg

SEQ ID NO: 11241 - DNA, 351 bp, Homo sapiens
aggtactcggaggatttctgtcaacctccggactttccctgcctcaagcagctggtggcctacgtgcagctcaacatgccaggctcagacctggagtgccgtgcccaccttctcctggcccagctggagcactcggaacccattgaggcagagcctgaggctctgtcaccagtgccagctctaaaaccaactccagagctcgagctagctctaacaccagctcgagcacccagcccagtgccggctccagccccggagccagagccagctccaacaccagctccaggttcagagctagaagtagctccagcaccagctccggagctccagcagactccagagccagctgtg

SEQ ID NO: 11242 - DNA, 354 bp, Homo sapiens
aggtacttttttttttttttttttttttttttggtcaagtaagtgtagtatatttaagaaaataatacaagcacaaagttagtattgaagtataatattgatcacaaaataatatttaatttaccatgagcacattaacaatgaaatgtttctctttaaatgctgtgatttagaactagatgatgtggctttttaaatgaataaatagaatgttagaataaggttggaagggcagatatgacttctcccatgaagaaactacaatacacaggtggttaggatcataggatgcagacagtgaaaaatactaggggagcctgggcacggtggctcacgcctgtaatcccagctttt

SEQ ID NO: 11243 - DNA, 418 bp, Homo sapiens
aggtacttctgggtaaactggagaagagcttcaactctgttcacctgcttgcaggtgggtttgctgagttctctcgttgtttccctggcctctgtgaaggaaaatccactctagtccctacctgcatttctcagccttgcttacctgttgccaacattgggccaacccgaattcttcccaatctttatcttggctgccagcgagatgtcctcaacaaggagctgatgcagcagaatgggattggttatgtgttaaatgccagcaatacctgtccaaagcctgactttatccccgagtctcatttcctgcgtgtgcctgtgaatggcagcttttgtgagaaaattttgccgtggttggacaaatcagtagatttcattgagaaagcaaaagcctccaatggatgtgttctagtgcactg

SEQ ID NO: 11244 - DNA, 354 bp, Homo sapiens
aggtactctgtgcagatggtgcactggtagggcgaggcgccgttgtgcgttctcaggtgcttgatcatggccgagtagtcccgggagcgctggtggcagagcttacactcaaagggcttctcacctgtgtgcaccctatagtgcgtctccagctgatgcttgaggctgaacttcttgccacagccattgcactcgtagggtttctcacccgtgtggatgcgtttgtggctcttgagtgtgctctcatcccggaagcagctgccacagaactcacactcgtaggggtggtcgcctgtatgtgagcgcaggtggcgtttgagagccgtgtggctggggaaggtgcggttgcactca

SEQ ID NO: 11245 - DNA, 434 bp, Homo sapiens
aggtacgcggggaagtctcggtgggttccccgcaaaatcagagatggcatctcactatgttgcccaggctgatcttgaactcctgacctcaagtgatcctctctccttggcctcctaaagtgctgggattccaggtgtgagccacttcacccagccacatttatccatcttgtaaaatattgctttgttttttggtgcatttcaaacccacaggtcctgacttcaggagcaagacacttcaagtgaggtgaggaggaggttccaggacctggataccatcctttgcagggatgtaattcaccagagaccaagatttctagccagaaattgagggcagctcaaggagagactacagacacagcatcctacttactggctatttcccagttacaaaagaaaatgatcaagtcccaggaatcactgaccctggaggt

SEQ ID NO: 11246 - DNA, 699 bp, Homo sapiens
  misc_feature 56, 58, 68, 168: n = A,T,C or G
ccacgcacaactctatagtctacacatatctgtctaacatttgagtgtctcagacnantgagtacatntactaatcgttctatatatagtttgacttattatgagtatatgactctatattatccatctatctaatattatcatcgactattattattatctctatcntcaggaagatgagggcttggaaccactctctataaggcgaatgggagcttcaccgcggaggcggccgccatcttgggtcatcgatgagcctcgccctgtgcctggtcctgcttgtgagggaaggacattagaaaaggaattgatgtgttccttaaaggatgggcaggaaaacagatcctgttgtggatatttatttgaacgggattacagatttgaaatgaagtcacaaagtgagcattaccaatgagaggaaaacagacgagaaaatcttgatggcttcacaagacatgcaacaaacaaaagggaatactgtgatgacatgaggcagccaagctggggaggagataaccacggggcagagggtcaggattctggccctgctgcctaaactgtgcgttcataaccaaatcatttcatatttctaacccttaaaacaaagctggtgtaatatctgatctctacggttccttttgggcccaacatttctcatatatccagccacactcatttttaatatttagttcccagatc

SEQ ID NO: 11247 - DNA, 441 bp, Homo sapiens
gggggtctacgcactcaggacaacggagctccttcgtgtggaggccgaggtacacattgttttgtttcttatatccagagtctagtcctcaactttaaccaaagtaaaggaaactggaaagacacacgctttttcagtcattaatagaaagttgtccaggtaagtttctgatggtatatcagttagaaataatatttagctatttgtaataaaaagctgaaaacagtagcttgaatcaatggaagactttatctttctcctcatacagctgacaataatgttgttgcctttatgatatcaaagccccaggttccttttatctttctgcttaacctgccttggcaaatgcttgctgcttcatagtcacatgatggctgactttactgttaaccttcaggtagaaagaaaggaagaggtaaagagataaaggttacctgcccg

SEQ ID NO: 11248 - DNA, 507 bp, Homo sapiens
  misc_feature 377, 414: n = A,T,C or G
gggggctaacactacttagggcgaactggagctccatcgtggtggcggccgaggtacgcggggacatcaatgcagagtccctctgtgaatttacaacacccaacacccatgagttcagtccttaagaaggaaaattgagcaagtatttaattggttggacattgcataaaagaggtccatatccaggctaactctagaaattttattctcaaacttagttggcctctttttcttctgtcagaggaccattcttagtggcactggggaaatcttggcacccagaagaattcaactgcgctcactgcaaaaatacaatggcctacattggatttgtagaggagaaaggagccctgtattgtgagctgtgctatgagaanattcttttgcccctgaattgtggttcgatgccaaagnggaagatccttgtgaggaagtcattcaatggcgttgaaacaaacttggcatgtttcctgttttgtggtgtgtagccctgtggaaagccccatt

SEQ ID NO: 11249 - DNA, 514 bp, Homo sapiens
ttcgacccaatttactactacagggcgaattttagctccaccgccgtggcggccgaggtacaagggaatggaatggaatggaatgcaatgttatggaatcatccgtaatggaatggaaaggaatggaatggaatggaatggaatggaatggaatggaatggaatcaactcgattgcaatcgaatggaatggaatggaattaacccaaatagaatggaatggaatggaatggaacggaacggaatggaatggaatcgagcggccgcccgggcaggacatattgtatctgtgtaacattttgtatattccaggggtagggccgccccctgtatcatacctagcagaggttggagctggcacatggggaggaggttctaataattatttggggctgggaaacttatttattgatagcataggacagaggaaggaggcggggatgggggtcgtggcgccctggtgatgcgactcctgtttattttgctttttatttcggaataaatggatttagccat

SEQ ID NO: 11250 - DNA, 467 bp, Homo sapiens
ccgggcaggtactcttttttttttttttctgttttttaagatggggtgtcaccatgttgccaaggctggtcttgaactcgtaggctcaagggagccacctgcctcggcctcccagggtgctgggattgcaggtgtgagccaccatgctggtcttttaaattatttttgttctctcatgtcaggcaggtaatgtggggacatggtaacaaggtttgagggaggcacatctcacgcatgagtgtgaaaaaccaataatcatgcttatgagctacaataggatctggatccacatgtttctgactccagggctcatgctcatgccacaaataacattgattccaggacccaaggatgggatcatcaggagcgggaagagcagccagggtttcccatatttttcccttaactttcccatctgttaccagtgggaatcatgtgggtaggagactctggaagaccagcagaag

SEQ ID NO: 11251 - DNA, 462 bp, Homo sapiens
ccgggcaggtacatggtaagattttcatatctcaattcaaataaaataaaaaagaaccaagagcaacaaaatttccatctcagaaacataaagaagaacttaccatatgaacgcccaggacatcttcagatgaagcttcctgcaccaggtcctcatcgtaatctaggaaacacagagtaactgtcatcatgttggttccactgaaggaatcccttaggcaaccttggatgctaaggacagggggctggcatgtgtaaaggaggtgggttaagggtagaaacttggctgccactgggacaccctcctgggtgatgagggaaggcaaatgagaccatcaggaagccacagaagtcaggacctggttctctggctaagcccccacaccactgcaaaaaaggcagagtccacacagggtggcacacaaatgcactgctgatttatgacagtgtcccatcaccccct

SEQ ID NO: 11252 - DNA, 347 bp, Homo sapiens
ccgggcaggtacatggcagggacattgaaggtttcaaacatgatctgggtcatcttctccctgttggccttgggatttaggggagcctctgtgagcagggtggggtgctcttcaggtgctacacgcagctcattgtagaaggagtggtgccagatctggtggagacaaaagccatatgagcctggcagactcccaatggctggaaaattctcattgacattctcatgctgggagagtgtggcaccatgttacacaggatgggatggatctggagaggagaatggtcagccctggaaatttctgattgacatttaaagggtatactccttctcaacagggccccaggt

SEQ ID NO: 11253 - DNA, 345 bp, Homo sapiens
ccgggcaggtactttttttttttttttttttttttatgtttggtgtggatgacttccagcctctggggccagcagtcgcctcctcagtgtatcctcaccctcttgccctgcactggaatgaccaggactctgggcctcctgggagtctgtagtaggtggttcctgagatgctccagttccgtcactcgcttccttagggagggccacagagctgctccctaagtgtgcatctgctcttcctacctggtcacttggagaatggctgggatctggatccaagggttctttacccaaattttctgaagggaggtgatgcccttttccgccatccagaaaactctgctt

SEQ ID NO: 11254 - DNA, 415 bp, Homo sapiens
  misc_feature 49, 65, 66, 67, 68, 69, 76, 236: n = A,T,C or G
cgagttgcgtgaaccactactataggtttgaatgggagatccacgcggnggcggccgagggactnnnnntgctgtnggtttttgtatccttaatggccaggagtgaaccctaaagtggctcacattagggccctatttctttcaattacctacaaggacaaacacatctcaaagttgagataagtgaccagtatgatttgccaaaattctaaagtgtactcaccatttttttgganaaaggttacctttggggatttgcactgcatgaattctgtgaaaagcttgttggatattgtgatagagatagagaaatgaagtatattatataagatactatgaggttccctgcctttgcttcacatcccaggcttacaaacgtgccccataaacattccctctgtggctcttgcattta

SEQ ID NO: 11255 - DNA, 356 bp, Homo sapiens
aggtactacgaagccatcttggctctgtggaaccagctctacatcaacatgaagagcctggtgtcctggcactactgcatgattgacatagagaagatcagggccatgacaatcgccaaggtatgtcctcagggccacttaggctgcctggagggagggcagcgctgccccccgcagtgcctgtgcccaacagttcaaccttcttgctgtgtagcagtgcttttgtgtctcgtcaagcaagtcagctcagccctccttagaggttctggtctgtccaatagagaacgggagggattagcatatggctgattatgagagaaagaagcaatactaattcaggtggcctgacaagcaag

SEQ ID NO: 11256 - DNA, 357 bp, Homo sapiens
ccgggcaggtacatcttgagaataatacctacagaggttcatactgaagggtagtctcaataatgtaaagaatttgacaagcatgatgctattgaaatagttctgtaaggaagtggtgttctttatacatcaattattacaaaaagcagtgaattgtaagtgtgaggcgtgtttacttagatgtgaagagttctccttactgctgtgatggaataacaagggtcagatttcctctcctgccttaaacaactggaagctatacaatacgtataataggtaatggtttttagacataggacaagcacaggtttgtgatcctcaggagactgcagacagagtgaggtgagcaccatggtt

SEQ ID NO: 11257 - DNA, 364 bp, Homo sapiens
aggtacgcgggtgagctaaaaaagaattgcaaaaaaaaatctcataatgtttcaagaaagtttacaaatttgtgttgggccgcattcaaagctgtcctgggctgcatgcgtcccgcgggccaagggttggacaagcttgagttagaggtttctgcaggattacagagatgtgggaacttccagccattgacgtgtggaggttaggatatgaactactgtgaggtgcactttcagaggttgaggctaatactccttttcctacttcccaaggaggtgaagtttcctgaagacagtgcttttttacatgtagagttttttgtggttctgttactctgttgtctccattagtcaaggaacacgtttt

SEQ ID NO: 11258 - DNA, 353 bp, Homo sapiens
aggtaccctgtggtcagcatagtagataacatagttacagaagaattgacaacaggaaagttgttttatagaggagggaataagggctccgtaacatgacatcataatttctagacaaacgcttaacttccctgaagcagattccgccaagagggattgggccatgttggaaagagaccagtttgcctgtaatattcttcctttctctaatcctgggctcccttcaggtagaacccagatcaccatcaggaaccagagaatgagaaaaagtagagagattgtggaacctctaagccatcttctcacagaggaggaaactagagttcaaagatgcagccacctgcccgctctag

SEQ ID NO: 11259 - DNA, 366 bp, Homo sapiens
aggtacgcgggtgagctaaaaaagaattgcaaaaaaaaatctcataatgtttcaagaaagtttacaaatttgtgttgggccgcattcaaagctgtcctgggctgcatgcgtcccgcgggccaagggttggacaagcttgagttagaggtttctgcaggattacagagatgtgggaacttccagccattgacgtgtggaggttaggatatgaactactgtgaggtgcactttcagaggttgaggctaatactccttttcctacttcccaaggaggtgaagtttcctgaagacagtgcttttttacatgtagagttttttgtggatctgttactctgctgtctccattagtcaaggaacacgttttgc

SEQ ID NO: 11260 - DNA, 363 bp, Homo sapiens
aggtacttttttttttttttttttttttctaaaaattaattgttttggtccaaagaacaagacctggttactggttctgatctttcctagttttaaatgaacatccataaaaggcaaactgtcatatcacattgaactttaatttcaataaaatgtgtatctcatgctcttcttcacttccctgtgtaatcctggcacctgcaaggcttgtgcttgcttccgtcattgcagcggcagcagcctcattatgaattgttcataatttcatcaaagtctgcatgtttactaactttgggtctgagctacagcattttcatctgtcatttttatatcaaacatattcaaggatcacacaaaactgat

SEQ ID NO: 11261 - DNA, 358 bp, Homo sapiens
ccgggcaggtacttttttttttttttttttttggctattaggatcattattatttaaataagaatatcactatttcacatatatcaaatcccagcaggaataattaacattagtaatgtctggtgaaaatactatgagaaattttaactaaaaatgataaattttaaaaattgtgacttcgtcaccaattctgttgtattctgaataatattgggttccagacttgattttaatttaaattgttccataatgcctttcaaaggcagctccactgagttaaggcacatgcctcaaaggaataaatggacttttatcagtagatcatgaaatatatgttagatttataagcagtttgtcc

SEQ ID NO: 11262 - DNA, 360 bp, Homo sapiens
aggtacttaatcctggttggtttacccattctaaattatttatgtgagatagctatctatttggaaaaaagtaaagtgaaagtcttacctcaatccacactcaaaaatagtttactatatgacagatctatggcaggcagatttgatggctcaatgaactccaccctcccagtgttcacacctttatgtagttcccacttacagggagccaaaggtccgtgggacgtgaccaactcagcattccactggaggctatatgatcaaacagcaaactgtttatcatgaatgcaggatgtgagcaaactcaccattgctcctgccgacagaaggttttctggaggcaatcactccctggtgctg

SEQ ID NO: 11263 - DNA, 348 bp, Homo sapiens
ccgggcaggtactcttaaggcctgaccgctgaagtaatcccagatatcattttccccatatggtattgggtcaaagcactcccagggccatcccaggttggaggggagggcaaaaagactcagaaatggttggtgttcatctttggagactatttacacagtgattgtatattaaaaaaaacagcaattatatctttgaatttgagtaaagttaaagaaatggtatctgtgaaacttcgaataaacaagtggagcttaaaatatttgattcttgcatattaggttaatgtgctctatgctaatcaggttggagaaatattaagctctgctaggaattctattggactg

SEQ ID NO: 11264 - DNA, 332 bp, Homo sapiens
ccgggcaggtacagtcatgagagattgagaatgaaaaaggcaaatgacatttcagtattgttacaaaaatagttctaacctatagggacccgttgaaaagtgtctcagtgacccatagatgaccctggaaatcactttgagaactaccattctatattttttaatatgagataattccattgtagaaagcatacttcaaaattcgaagttttgatgtatctttcagttacccaaaaattcaacttgacttttaatggtgcaatgatgccgaaatccccctgtccgtgcatcagtttatttttctactgcctatttgcatgatggttaaaaat

SEQ ID NO: 11265 - DNA, 593 bp, Homo sapiens
  misc_feature 4: n = A,T,C or G
tgcnagtgattcgacgccaatactgaataccgggcgaatattagctgcaccgcgctggcggccgaggtacaggtttttaaaagccccacagaagtttatattacgtttaaaaacccatattaaaatttgaaaacttaaaaaaaaaactaagaaaacaatggcatatattccttttcttaaacccgtgaagtccattactttttgttcttgttatattctgccaaaaatgggatggggtgggagagatgcatagaaattgttttatctgccttgttaacaaagtgaactcaaggaccagcttttcttttctttcttcttttcttttttttttgagacttctgtcacccaggctggagtgtcgttaggtggcacttaacacccgggaacaggaccccttgaaattccctttttcaagggtccttttttcttaaggaaaaaatttaaggggcctttttgtcacccccaggctgggaggtttaaaaaggggggggggttttttggtttaaatgggaagccttttgccttctggggggttaaaacaaaaattttttgggcccccaccccctccccgagagggggggaaaaatacaggg

SEQ ID NO: 11266 - DNA, 348 bp, Homo sapiens
ccgggcaggtactttgaaatattaggggcaggttcccctaatatctggcgcccaacgtggttttctttttcctaagtgcatgtgggaacccgattccctttggtaggtgcggagaaatgttcatcggtccagtccacagaaatgcttgttcggctccccgacgattggtgagttgtctgtgtattgtccggggtaactatgggtcacgcagagtctaaacattatgcttatctctgctatattaaattcctgttaaaatgggggagttcgggttcccatggaaaatatggtcaccctattcagggcagtggaagaacactgtccttggtttcctgaaaagggaacgtt

SEQ ID NO: 11267 - DNA, 454 bp, Homo sapiens
ccgggcaggtacgcgggggtggctggacccacgtggcaggtgttaaccaccgaagggaggtagaatgtttttccccaccagaggaggcagcgaccacgtctcctctatggaggcattcaagagccgtccagctgaagcagcatcactgtctgagctcggaaggcacaatccacataggtctgcatggtccaccgagctgcatgcccacggggccagcgggaggtgggcagctgctgggctctcttctgaagcagacaggatctcactctgttgctgaggctggatcacagctccctgcaaccttgaactcttcctaagcaattctcccactctgccttccaagcactagcattataggcctaagccaccactcccatccactgtagtgtaaactgtcttcttcaatgtttccaatagttgcggagcagatcaataagggttctttctgtctgtg

SEQ ID NO: 11268 - DNA, 464 bp, Homo sapiens
aggtactaacagcattatgtgtgttgccttgtgcagttgctccaagagccccacaggtcgttgtattattgtgcccattttacagatgagaaaaccaaagctctgagaggagtgactggcccaaggacacctagggagtggtgaggcagcgattgaaacccaagtctggtgactccagagctcatgctcttctccacttctagaatgtgcctccctgctcagaggaaaggcttggctctgatgagggtctctaaggcagctgtccagcttccagctccatcaacatcctgagataatgcaatgggaggtgttctacaactcacaaacctgccataaaaatgcaatctctgtgataatggtcagaataatggttggtctaacttagacaatcggggtgttaactcattatggttggaagggggcgccttcacagagaatgggagactacgaaacagtcacagggg

SEQ ID NO: 11269 - DNA, 497 bp, Homo sapiens
  misc_feature 1, 41, 99: n = A,T,C or G
ngggcgattgaaattgtggcaaactcgcacatcggtcgaantttagcgccaacgccgtggcggccgagttacttattgactattactgtttttcctttngaattctcctccatttagagaggaacttgcccagccttaactgattgccactgatttaaacttctatttatgccaaattataaatcacatgcaaaagactgtgtttaaaaatctcaaatatttatcaggtaacaatacttccctatctcaaatgctctgaaagcttctatcgcactaatataaaatccaaatgcttcagatcaccttacaaaaaccttttatgacgtaggtcccagccagtctctccaaacccgtctcataacattgtctcctttcctctctaagctccagccttagtggccccttttttctgttctttgacatgccaaactcattcctggattagtaacttagcacaacctcttccctatctggaaaagccattcttatgatcgtgg

SEQ ID NO: 11270 - DNA, 497 bp, Homo sapiens
cggccctttgcaccacttagggcgaacttggagctccttcgcggtggcggccgaggtacgcgggggaaggaatcccttaagtgcacgtctcccgttttcttttcacatcaatgtagagtccctctgtgaattcacaacacccaacacccatgagttcagtccttaagaaggaaaattgagcaagtatttaattggttggacattgcataaaagaggtccatatccaggctaactctagaaattttattctcaaacttagttggcctctttttcttctgtcagaggaccattcttagtggcactggggaaatcttggcacccagaagaattcaactgcgctcactgcaaaaatacaatggcctacattggatttgtagaggagaaaggacccctggattgtgagctaagataaaaaatttctgatgcccctgaatgtggaaccatgccaacgggatatacttggaacctgcccaaatggaagattaaagtgtttgtta

SEQ ID NO: 11271 - DNA, 488 bp, Homo sapiens
ccgggcaggtacttgtgcttatattcgatccttggcacccagcctcctggacggaaataaaactggattgttgggtatattttggaagtgtgccagaattggtgaacggaagagtccttatgttgcagtatgctgtatagtaatggccttcagcatcctcttcatacagtagctggggaaaatgccagaatgtagttgccatcagatttgattgtgaccaaggactggcttgaaaaaataatggaagggatgtttaactttttttatttccaaactttgaattgaaaaaaatttcccaagggggtggcccttattttaaatggtttagggccaaatttttttttttaaaaaaaattaaaagggcccccttttttattttttttttttaaaaaaaaaaaaaccataaatcccccttcccctcttttaataaaaaaagttggggcccccccccggggggggaagaaaaattttccttttttctctttttt

SEQ ID NO: 11272 - DNA, 555 bp, Homo sapiens
  misc_feature 14, 23, 77: n = A,T,C or G
atcacctaatcganacgggcaanattgctgcaacgcgccggcggccgcccgggcagttactatgcccgagtaagacncatctgtggacacttctattcacaatggcaggtagtagccttgccagtgcccccgggttccacattctttttatttttgagacggagtcttgctctgttgcccaggccaggtgcggtgggctcacaacactttgggaggccgaggctcaggagttagagaccaacctggccaacatagtgaaaccttatcttttctaaaaattacaaaaaatttggccgagcacggggggggcatgccctttaaatcccagtttatttgggaagggttgggggaccaaaatttcttttaaaccccaaaagggtggggggttttttgtggggcttgaaaaaaacccacacttgtgccctttggggccgtttttaaaaaaatagggggacccccccccgggtgttggaaaaaattttgtaatattaaacatttttttaggaccccccccccccccccccgggggggggggccccccccccccccccattt

SEQ ID NO: 11273 - DNA, 652 bp, Homo sapiens
ccgggcaggtacttcccaactaggggtgagtttgccacccttacccccactcattgaatatttgcaattcctaaagacgtgttttgattgtcacacctgggtggggaacatgctactggcatctaatgcatagaggcagtaatgctgctaaacatctttcaacgcacaggatagagccccacaaaagagaattatctagccccaaatgtccataacactgctgttgagaaaacctaccgcaggatcttactgggcttcataggtaagcttgcctttgttctggcttctgtagatatataaaataaagacactgcccagtccctccctcaacgtcccgagccagggctcaaggcaattccaataacagtagaatgaacactaaatattgatttcaaaatctcagcaactagaagaatgaccaaccatcctggttggcctgggactgtcctagttttagcattgaaagtttcaggttccaggaaagccctcaggcctgggctgctggtcaccctagcggctgagggactcttcaatacaaaattagtctttgtgcacttgagatgaatatactttaatttgaacatgtgaaaacatctataaacatctactgaagcctgttctgtctgcaccgacattttcattgagtaccctc

SEQ ID NO: 11274 - DNA, 797 bp, Homo sapiens
  misc_feature 144, 145, 161, 167, 168, 194, 224: n = A,T,C or G
ccgggcaggtacacaggaggatatgttcaggtcatatgcaaatactacaccattttctatcagagacttgattgagtctctgtggattttggtatccttggggatctggaatcagtcccccacggaccctgagggctgatgtgnncgtccatcctgggatntgatcnnagtgtctccccagagtcttccgaganggctcagtcttgctctctcagtgtgatttntgtgatattataagcatgtgactggtctgtgtccccagtccctggcagtagagttcttaagcccttgcagttttctgagacctgtaggggtgacaggagcttctttttttctgaggtgactcttggtaggctcctaggaagcttcagggtggccctggtcagaaagaccacacacatgatgagagggttgaaacagtctgtgtgacctctgcacccccagggagagaagagggctggagatagagtgagtcaccagtggccagtgatttaataaatcatgtcacatgatggaacccccataaagcccccaggcaactgggttctgagagctcccacgttggtgaccacggggaggtgctgggagggtgttgtgcccagaaggtataggaactctgggcaccccctggcacggtgccctgtgcatctctttctctggctggtctggagtagtgtcccttattaataaccagtgttaggaagcctgatcctttcctgagtcttgggcataattcagctaatattggaaccggggatggggtatccaacccttcttgaaactggccatcagaatct

SEQ ID NO: 11275 - DNA, 583 bp, Homo sapiens
  misc_feature 9, 28, 400: n = A,T,C or G
ccggcaggnacttatttctttttctttnttttttttttttttgagacatgtactctttctgtcacccatattgtggaggtttctgccagtataaattagctaaatcttatcatttgtgtgtgtgtgctttctcctcataggtgactttacttcctgggacatacaggaatctgaattcagtaatgggtctggaggcagcaagagatgatacgggtggatcttgaaaagattagcctaacagtgagagggtccccaagtcaggcaggaccagccccatagactggggaagaagggctgcttctgctgccaggggaaactcagtgagggttggggtttagggtgctcagatctatccaaatcaatcctgatgttcctattcctagtctcaaggtcccattgntccctaatcagtaaccctgtttttgcatatgagacccggagacccttataaatccacctggcgtggaatttaaacaccctgaaggaattggttttaatgttgaattcaagcttgaataagccttgtcctggaagaaataaaaaggattctttaaaaccaaaaaaaaaaaaaaaaagggccctt

SEQ ID NO: 11276 - DNA, 800 bp, Homo sapiens
aggacaaagaagttaattttttcaaagaataggaattatgactttatattaatctcctttatggttcaataccatatttcacagaatctaaaattccactggctataagacatactattattttatgaataagaaagaagcactgtaataaaactatgacacagtgctaagacatcactaattgtagcacacatcctaattttagagacattaaaatgtaaaaaaaaaaaaaagtgtcaaaaaagcataccttgtttcatgcaatttgataaaattacagaaaatcttagttatgtaatatgaaatacatgtaaaaatacaaagtatatatgtaagctaagaagtataataggtcacccgtgaacctaccacccatcttaagaactagattactactaaatgccttgaatctatccgtgttccttgacttatccccatgcttccacaagaggtaaccactatcctgaattttgtatgcataattcccttgctttaaaaaatagttatcacataggtatgtatctttaaataaaatactgtatatttttgcttggccaatcgattccaaaagtcttactgctcgttcccttgcctctctgcataactacagaccctgtgactctatttcacagactacttttcattctccaaataggccatgtattttttgctctaaatttcttccttgtcaccatcaaatgcccccacgttcaatctctggcgaaatcctactttttcatggacctaaatgcttcctcctaaaaaaacctcatctgaaccttcagcttcatatatctcat

SEQ ID NO: 11277 - DNA, 601 bp, Homo sapiens
ccgggcaggtacatcactctgctgagggacatccaggacaaggtcaccatattctacaaaggcagtcaactacatgacacattccgcttctgcctggtcaccaacttgacgatggactccgtgttggtcactgcaaggcattgttctcctccaatttgggccccagcctggtggagcaagtctttctagataagaccctgaatgcctcattccattggctgggctccacctaccagttggtggacatccatgtgacagaaatggagtcatcagtttatcaaccaacaagcagctccagcacccagcacttctacctgaatttcaccatcaccaacctaccatattcccaggacaaagcccagccaggcaccaccaattaccagaggaacaaaaggaatattgaggatgcgctcaaccaactcttccgaaacagcagcatcaagagttatttttctgactgtcaagtttcaacattcaagtctgtccccaacaggcaccacaccggggtggactccctgtgtaacttctcgccactggctcggagagtagacagagttgccatctatgaagaattttgcggatgacccggaatggtacctcg

SEQ ID NO: 11278 - DNA, 535 bp, Homo sapiens
ccggcaggtacggagaggaacagagtccctcctttacttctccattagaaagaatgtgatggcaagacaatgaaacaggcaaagtgaacagagatgcaagacaaaattcaggtgagagagccagagcatcactcagccattcctgcatgtaaaacaggcaactagaaatttgcagaaaggaagcgaagtctccataaagatgtttttaaagtgagcttgaagtatttggagacaattcagtgttacataaaatctgcaaatctctggataaagaagcagagatcccagcatgggacaaatggagcctcaaaagtgggaagaagacagagaagaccagggcagaatgcatctcttcctttctcttggctttcctggataaggactgcatcattcctgtggaaggacaggccatcagctccgaaacactgtatgtattttccagtatatactgctagctgtgtgatgttgggaaaatttgttaccctgtctaacccccacttccctcatctgtaaaatggaaataatgatagtacct

SEQ ID NO: 11279 - DNA, 629 bp, Homo sapiens
aggacttttttttttttttttttgtcttgaattggcaaatggtttaatttttctgttttgggacgctggccttgctggggcaccatggagcggggccccgtgctggtgggttgttcactgggaccacccttctggaatgtggaggcggcatggcaggacccaccgaatgccttcaaaagccagtggtccatgcccctgtctccttccttagagtcttccagaaaagactggtcagaggtgcagcacagataaacctacaaagcttttcatcaaagcatcacttacaatggtgaaaaggcagaagaatcactgaattccaccaaggtggagcagccgaggaaatcgtgggtagaacactagggagtcacaagaaacaacatatttgaggggacatttatagcagaggaaaatgctcatgatctaatgctacactaaaagggcaggatacaaaataaggtgtattggaagaaagagggtagcatggttgtccatccactgctttcagggactggactaagtgacctggatcagagggagggcaagagatctgcttcctgcctgagccctgtgaacagttgaaatcactcgtgtgtctgcaggaatcattcttatacccgggtaccttgccg

SEQ ID NO: 11280 - DNA, 818 bp, Homo sapiens
  misc_feature 771: n = A,T,C or G
gagtgcgcgtagtactcctaatatgtactactatctggagctccaccgttgtggcggccgcccggcaggtaccgaggtcattttgcttcctatagactgcgaccttttggcaaaagctgttctaactccatctcagcatttacaattccatacctggtggtcagaggaggcccgcctgcaggctcagctaaatcgggctgaggcatccaattactcaggctcagctcacaggctccgataattactctgatactactgctcatttaggctttgatgctctcaccacggaacaagtaacaaaggtgtgtatgagagcttgggataaattacgcaccccaggccaagcttctgtttcttttactattggtaaacagggtcacaatgaattatatcttgattttttagctaaattacaagatgctgttgaaaaatctgtctctgatgagcacactcaaggtattcttcttcatatgttagcttttcaaaatgcgaaccatgagtgtaaaatggccgtgcattccatcctacgtcaaaatttacctgatcatgaggtgttgcctgcatatattaaagcttgtgaaggcgttggatcggagacccacagagctattctgtgggcaccggccatgaagcacggcaaccaaactggctcgactgattcttttcttggagcctgctataatttggggccaactgggtcatacccaaaaaaactacactgttaaaaacctaaaagcgggcaacccggttaacaaacaacgccaaaagctnctggtactgtttggccgcgttggcggaaaagtaaacaattggcaggt

SEQ ID NO: 11281 - DNA, 926 bp, Homo sapiens
  misc_feature 36, 207, 208, 278, 279, 292, 293, 361, 485, 544, 591, 826: n = A,T,C or G
gtagcctgagccccaacctacaaattcgggcgaatnggagtggcaccgcggtgccggccgcccgggcaggtacgcggttacatcaatgcagagtccctttgtgaatttacaatactccaacacccttgagttcagtccttaagaaggaaaattgagcaagtgtttaattggttggacattgcataaaagaggtccatatccagctannactctagaaattttaattctcaaacgttaagttggcccctctttttctttctgtcagaaggaccatttcnnttagtggcactgnngggaaatcttggcacccagaagaaattcaactggcgctttcactgcaaaaataccagatggcctacantttggatttgtaagaaggagaaagggggagccctgtattgtgaggctgtgctatgaaagaaattctttggcccctggaatgggtggtcgattgccaaaaggaaagaatccttggagaaagtcantcaatgggcgttggaaacccaaactttggcatgggtttcctggttttgtgtggtgtagncctggtggaaaaggcccattcgggaacaattggtttttcactttggnagggatgggtggaaccctacttgtgagaacttgattaattatgccctcttttggtaccttcgggccggctcttagaactaagtggaatcccccggggcttggcaggaaattcgaatatcaaagcgttattcgatacccgtccgaaccttgagggggagggccccgataccccagctttttgttccccttttagtggaggggttaatttgcgccggcttggcgggtaatcatgggncaataggctggtttcccggggggaaaattggtattccggtttacaatttcacaacaacattaccaggccggaagcattaaagggtaaaaccctggggtgg

SEQ ID NO: 11282 - DNA, 811 bp, Homo sapiens
  misc_feature 17, 18, 32, 33: n = A,T,C or G
agtagcactgagcgctnnaactgaaggcgacnnggagctccaccgtggtggcggccgacgacaagaaatcgagcacaattgtttcagaagaacagaagacccttccagcgccatttttctgggaggtggtccaaaggaagtcagtggggccagctctctccctcagacagctaacaggagcaaggcttggtcagccttcctgaactctgcaagtccaaggcttctgagctatttattctatacttactttgaaaacacaaaattgctccaacaggatggatatgttacggaacaattaggcataataggatgtgcatttctgtctactgagaaacaccaggtagaaaactgcaccaagctgaattgagcttcgtggtaatacacaaaaaatgcacacagtctcagctcaacaagtgcactgagtcacaccaaacacatttgatgttacaactttccatccaattccagataaccttcctcccactgcttctcaactgctcaaaagcctaactctccaaacccatttccacaaggtaatttgaagactttttcaaataaaatgccaaatttaccatagtagttatgtatttcttaaccatttaacatttataaaactatatcatttttattcagttccttttttcagatgtgtcactgacaaaagtttagaatattgggcccttaaccaaaatttcccgtgagacctgtgggtcattgggcagtcttcttaatgtggtaatttttagaatgcgtatggcatgtggaattgaacagaactatttccagggcttagggaaagaattacatcatt

SEQ ID NO: 11283 - DNA, 423 bp, Homo sapiens
  misc_feature 16, 55, 182, 183, 233, 238, 239, 278, 279, 291, 292: n = A,T,C or G
ccgggcaggtactttntttttttttttttttttttttttatattttttagcatantaaaaaactaggttctccttagggaaaaaatacatgcaaatgctcacaaacttttaaattcacactttagcggggtggtgatttctgaaggcctctttctgtaacccctggtgtcttttcaggaaanncccaggtggagatcccatgttataaattacctttccgtttacaagagcancttcnnttagattctttaaaaaaggacccatcttaaattttacannttactgttacannaaaattagccaggcagtggtggtatttatgcctatagtcccagctactcgggaggctgaggtgggaggatggctttgggcctgggaggcagaggttgcagtaagctaagatcgcactactgcactgcagcc

SEQ ID NO: 11284 - DNA, 811 bp, Homo sapiens
  misc_feature 12, 16, 25, 26, 38, 47, 89, 105, 123, 125, 129, 811: n = A,T,C or G
tgttggctgagngtcnacgctgtannatcgggcgaatnggagtggcnaagcggtgccggccgaggtacgcggggggagctttatgcagngctagctccctttttngggccactgactaccagngngctngggagctgcgtaagacaattccccccaacgcgtccaaaaaataggacatggtccactgcaggagttcataatcaggagtccagagagtccaggctcatcatcccttcagaagaaagaatcttcaggcctctgctcttgtgagagtaatttctcttaacaccgacagtgcagcaatacaactaccaccacctttcaattattgagaggcaatcatctaaagcatttggcaagtgatccacttacggagccaagctaagggagctgaagagaagaggccgccgccccaacccaggtgttgttagttatctagccttttgcaaagcctcttccatttctactctgctctttaagctatttcatgccttgaagatgtctctaccagggaaaataaagagattcagcttttcccccacctccagcctgtttccaagacagagtggggctgatgactggaggtgggaaggactagaggaaggatgccacaaaatttaacaactgggccttgaaattcaccattcacaccataaaactggactaacaggaaagaagattatgtaaggaagggttaaaggagtaacaggaataactcccgcttggaaagaaagaaccatgccctctttccttggtaagggtctggtaacttttaaaaccccaaaacaaattggaactgctttttttgaan

SEQ ID NO: 11285 - DNA, 802 bp, Homo sapiens
  misc_feature 494, 559: n = A,T,C or G
aggtactgcaataaccccctaatagttcttttacccaccaatctggcccccaacaaagtttcctttgatttctccttcctaccaagacattctcaacattctccctccaccaggtggatctggccatgattatcataaatctaattgccttctgcttaaaatatttcagggagacccattaatgcatttggataaaaattatttattagctgtgtgactttgggtgaaagatttgagctcatctgtaaagtaaggcaatatggcacccttgaagagtggtgtgaggattatggtgtttaatgtccaccacaatgcctactgtcttatagaagctgagtgggaactaacgctatttctacttatttttgacaagctgcacgtgacagtgggaaaagtattgtatttggagtcagataataatgataacaaccacaaactactagcaaatgcttacacaatgcttttctgtgtggtaggtctttttccaaatactntacaaatactaattatttttaatcttcacaacaaccagaggtaggtgctggttatcatgcccatntaacagatgagaaaagtgaggcatgaaggttaaagtaatagatctctacaaaagtattaaaagaatcaggacttatgccgtagtagtctggcctcagaatccatgagcttaattaaaatcccaactctattgccagtaacttcagaacctgcctaagtcattttaactacttgaggctaaattttttcttcaaaaaagaaaacatgaacccctacctcaaaagggattacaatcgactgcttt

SEQ ID NO: 11286 - DNA, 452 bp, Homo sapiens
aggtactagcctcaaaagaatcaaactaaatttttagtaacttgattgtgtcccagaacaaaggccaaaaatgtttaaaggaatatttaaagatcctgcaacataaagctcagtgtttagcatccaataaaaaattatcaggcatttaaagaagctggaaaatatggcccataattagggaaaaaattaacagagacatagaaataacccaggtaatcaaattagattaaaatgttaaagctacaaataaaagcaagaattactagaacttgtagaattatttcatttgaaaagtatgaaataatcccatcctctctcctactcaaggacttcactcctaataactattttatgtctctcctggatccatttaatggagatattggttactaattccaacaggaactttttttttcctttgtgaaaggaaggcagataaatgagaaaagatg

SEQ ID NO: 11287 - DNA, 404 bp, Homo sapiens
ccgggcaggtaccatgagacaaagaggcagctttcaacatctgtcaggtctccaacatgtgatgccatcttacgatggcactaattcaggaaaacaaaacaaaactcttttcttcctttcctcaccactttctgtgccttccaatcccagaggagtcaataccaacggctagccagcctggatagccaaggaaggggaagagcaacccagtctcaatgccacccacttactccactgcacacagagactctgtggtgggcccagctgggggaggggagaaaatgtaagttcaatcaagtttagagttttgggttacaatttgaaatggacattctaatttctggatagagtctgagatgatggtttagcatgaatgcaaaggtctctattgcctaacagtacct

SEQ ID NO: 11288 - DNA, 451 bp, Homo sapiens
gggtactttaacccatactttgggcaaaatgaaccactggattataagatgcctgaggacacaactccaatttaatagttccttgataccctcccaaagcacctagcacagtgctaagtctagagaatgcttttgaaatatctctcaaagcagaaacttgtgtgtatatattgggggaaagaaaataggtctacttcttaaaaaaaaaagccttgacctacttgaatgcgatgatgttagggtgcttcaacttcctcaaatgcttgatatccgtctcattctgttctctcactttcttgatggccacctcttccgcccggaacttgcccaagaagaccgctccttgggctccactacccagccactgcagctctgagatctcctcaaatggcacttcccaagtatctaggcacacaagcaagaaataagcttgaagagatctcagaaggga

SEQ ID NO: 11289 - DNA, 456 bp, Homo sapiens
aggtacgcggggacatcaatgcagagtccctctgtttattatcaacacccaacacccatgagttcagtccttaagaaggaaaattgagcaagtatttaattggttggacattgcataaaagaggtccatatccaggctaactctagaaattttattctcaaacttagttggcctctttttcttctgtcagaggaccattcttagtggcactggggaaatcttggcacccagaagaattcaactgcgctcactgcaaaaatacaatggcctacattggatttgtagaggagaaaggagccctgtattgtgagctgtgctatgagaaattctttgcccctgaatgtggtcgatgccaaaggaagatccttggagaagtcatcaatgcgttgaaacaaacttggcatgtttcctgttttgtgtgtgtagcctgtggaaagcccattcggaacaatgttt

SEQ ID NO: 11290 - DNA, 218 bp, Homo sapiens
tgtcgtttctgccctggtatcagagatccaaaggaggaggaagctgaggaggtgaacctgggaccccataaccttggccctgacctgcatctacaccaagaagagaggacagaggccagacttcacagacaccatcattctccggaaaggggcctcagtggagcacgtgtgccaccgcatccaccggtcactcgccagccagttcaagtacctgcccg

SEQ ID NO: 11291 - DNA, 446 bp, Homo sapiens
ccgggcaggtacaaagtccctaaggcaaaagcatttttgctgtgttctaggaaaagcaaggaagacagcatgtctatagcagtgggaggtggaaggataataaacagtaggtgaggttagaggggaccaaatcatgtattttccatccagaggttcccaaccttggctgcacattagatttattctaaggagcttttaaaaaataccaatgactgggtcccagcctagagtgattaaatcagaatctctggaggtagacttgagaatctgatgtttgcaagtttcctaggcaagtcaaggctgaggaagactgctgcaggccattgtaagagccaggcgttgatctcattcaacctttccctcagctcttctagagacagccagcattctcttatggcacaaatacagcctttcaccctcacagaaagacacaggacaacaaattc

SEQ ID NO: 11292 - DNA, 452 bp, Homo sapiens
aggtactttaaaataatagaccttacaaagttttctagactgacttcctgtgaagaacaaggagcagggggaaaggggaaggggtagaatttaccaatctgaatatttcagcaagggagaatgcatgagttttactataaaaccacactgaacattgcaacaatactaaattccatacatatataataatcactgagctataaggttgctgatgtatttgttcttgaaagtgaattagagttactttatgcagaatcagctagttttatgtttcataatgtctttcccttttttgaactttttttaagtctaaagtagggggaaccaagcctgctggtggtgattttggagaagtcttgaattcggctgcaaatgctagtgccaccaccacggagcctcttccagaaaagacacaggaaagcctgtgagattcctacctttgttctgctacc

SEQ ID NO: 11293 - DNA, 454 bp, Homo sapiens
aggtacaaactgatggagtcacctgcaatctcatatcctggtggaatgccatggttattaaagtgtgtttgtgatagtgtcgtcaaaaaaaggtttttgaatagaaattacattctttgacaccctcagttctttcaaactttcaactctgcattttattgcattttctcatttaactgttagtatatgtttgaatataggctgactttttttctctattgcactttcttctttttttctttttagaaaataagcaattaggggttagatgcaatatgaatataaaatagttctgtaaataccaaatattatttttagttctggaagttaaaaatactctccatagtaatgtgtgttataataataaatatttcttttgtttgacttttttaaaattctacaatggtaaaagctattttaatccatgttagcaatttaattcctattaattcag

SEQ ID NO: 11294 - DNA, 459 bp, Homo sapiens
aggtaccaatgaacttcttccctgagttggtctttctcatataacacaaaaggcaattgatagcatgaacaatacaattttcttgccaaaaatatgtgatttgagtctaataaggtctttaggtttaatttcaagtttcctttgtatgtgtctccactgtgcccggtctcttatgcagcccactgggaaggtagacacagggtctttgtgcccatcccataaagggccaaacagcactgcatgccaggaaaatgtgtagagatcagtgcaacgcaatcctcaccagaaaggagctttgtgcaaattttgaagacagaggcaaataggtttttccatatttcatcgcattaacttgttacagcaaacacgctggacttgtatctggatctccaagtatagccatcacaaatgaagtccttgtttaagaataaatttaagcgaaaccagctgttttttttt

SEQ ID NO: 11295 - DNA, 456 bp, Homo sapiens
aggtactaatttaaaactatacatttctaagttaatgatttcagcatcttgcggccataccagacatggcatggaattaaactttcagtcccactgttcattttattcatacattagggtggcaagggtggtcttgctcattgcaagcaaagtcatcctggttcatgaaatgaagaatgtggactgtgcagttttcccagtcatgaagacttttgatacatcacttgaaatgttcctcctgaagttgagggtcttttgtaatatcaccagggcagtgaatggcagagaccagatcatgaatcgcttcatttagagcctgcctccgggcttccctgcactctgtggctgctaataccacacccctgtgtcccttgtggtcttaagtcacaaaaccagctattattagatttgcctggagtgtctgaaaacaggcttaaaatgaggaaaccttgtccc

SEQ ID NO: 11296 - DNA, 459 bp, Homo sapiens
aggtactattctttccttttgtgtatgtttgaaattttttcattataaaaaggacaaaaaaaaaaagagagagaaaactaaaaaagaaaaaatagtgttgcgcttgttagtaaaaccaatcttaaggccagttactaaaaagtaaactcctacaattttgaatagctatttgctaatacagtgatttgctgccttcttggggttagtttagcctgtccattccttatttaacttgctcccttccttcccttttaataaagtcctgcctaagctccaggctctattttccacctctcccctaagatttaggattgttccgttttaagtcagtggccatatgtcttcctgttctcctagtgtaactcttaccttacccagcagcaggccctttgtttagggcagcctataatattgcttttatgattaatcttcccttatccacaaacttaactggggaga

SEQ ID NO: 11297 - DNA, 439 bp, Homo sapiens
  misc_feature 33, 165, 180: n = A,T,C or G
ggagtgtgctgaactccacattgaaggcgactnggagctccaccgtggtggcggccgccgacgcgggaagccggaccaagctgagggaggtggagccagcatcatgcagtggtttcgtgaagggtgagcagtgcgctaacaaagcccttccattcaccagacatntgtctccaacatatncctcttgaaccactctcacagcttctcaagttgcacagccaagtttgcagatggacagcagtgctctgtgccagtttttgacattacacatcagacacctctgtgtgaagaacataccaaaaaaatggataatttcttgagaggagataactcccgtaaagttcagcaccagcagcagaggaaacccaggaaaaaaaccaagcctcctgcactaaccaaaaaaaaaaaaaaaaaggaaaaaaaaaaaagtacctgcccg

SEQ ID NO: 11298 - DNA, 518 bp, Homo sapiens
  misc_feature 79: n = A,T,C or G
gggattatctattcgggcaagttagcgtgaacgcggcggcgggcgaggcacacattttctccatatgttttgaccctcngtttattaccgccggggagagtcttgcacatcatctttgtaaaaacagtctttgttttactcagaaaatttgtattgagccctgctacatacatgctaggcattagggtctaaaaagaatgaaaataaagcatctcagggatggcttttcagaacacatgcccaagcagagacttaaatattgaggctggccagattaaaaggggtagagggcaggaaagggtgacagcatgcccggcagcagcaagagcgggagcgaggcctgaaagaatgaaagtatctgcctacaatagaaggatgagtgagttgggcactaccagcagctcagcaatgccagagaaagggcacacagggaaaaaggctaaagatggagagcggggcagaaagtcacaatatgaaagccctatgtggaattttaagaagcttggacattatgttaa

SEQ ID NO: 11299 - DNA, 752 bp, Homo sapiens
ccgggcaggttcctatgctgtggatctgtgcaccacgcattgtttctatacatattacattaaactgtgcctcatctggattgtggcacaaggtaaaatagatgcaggctgtcaaggctgagaaaaatgtataaaacaagaccagaagactggagggaccaaaagaggtgatgcatacacaaggttctaaagcccaagtctggactccatatgcacattcaaatttgaggaacactgagcagtaacatgcaaatcacctgagaatcttgcttaatcagcttctcattcagcaggtctgggggagaggctgagagtcagcatttcttgcaagttcccaggtgatgccagtctgcggcccacatgttcatctagaccccaaactagtagcaatgtgtgtggacaaggctgggtaacaggcatgaacaatcctccagtcatgagtaatttccttgagagcagttgttttctgtggaagacccagcgctcagcctccatgaacatggtcgagccttccttgaaaacactgccctcctatgctagcacctgtgaaaacatattggaaacaggctataaagagagaaaaacctacagtgtgacacctgggcaggccacaagtgggcacctgagagaaagcagactggttttaacacttcactggttcttttctagaaaggcagttccaccaaaatcctgttatttttgacaactggcggtaaccaaaagccctgaggggttggaacacacacggagtt

SEQ ID NO: 11300 - DNA, 459 bp, Homo sapiens
  misc_feature 149: n = A,T,C or G
aggtacatgatgatttccttgtagtaaatagttttttctaatttttcccatgtagacaaatccaaaatgcatacatgctcatttaaataatttgtccactggtaacctcagctgagcgctgcccttggcagaatatgtttacaggatanttaaatgtgtttaaaatattctttcatattacttggttggcatttagatgtcttaagttgttttaataaattagggaaagctagaatataaaaggtagaaaatatatacattttcagtgttccaagacactttggtggactatagaatgctttaaatgcaagttaagatgaatattttatatttggctgggcataatggctcatgcctataatctcagcactttgggaagccgaggtgggaggatcgcttgagcccgggagttcgggaccagcctgagcaacatagtgggatcccgtttgtacctgcccg

SEQ ID NO: 11301 - DNA, 524 bp, Homo sapiens
  misc_feature 15, 17, 28, 29, 102, 103, 112, 156, 157, 159, 160, 168, 174,175, 176, 200, 201, 211, 212, 226, 234, 236, 241, 247, 258,284, 305, 306, 308, 331, 363, 377, 381, 393, 406, 408, 431,466, 489: n = A,T,C or G
ggtgttttcttactnantttcggcgtannttagcagcaccgcccgggcggccgcccggtcagtttctgactttgattctcaccatttggtacctatcccaannacaggaggnaagagagcctgattcagcaaaagggggggaaggaggcccagaannannggggccancagagnnnagaccacgagggccaccaaccccnncgcccgcggnncagaagccggggangccacaancncaaangccaanccaggcacagnacccgcaaaaccagccaggagaaaanaaaacccaaccaccgggaggnnancaacaccagccgccagccgcaanacaagaaccgcccggccccagagggccaaganggaacccaggcggngcgncccgggccaaanagcaaggcaccanancaacaacccacggcgaaggcggnggaaccaacgggaccccggccgccccaaaacaagnggaacccccgggccgcaggaaancgaaaacaaaccaaacgaaacccgccacccccagg

SEQ ID NO: 11302 - DNA, 493 bp, Homo sapiens
  misc_feature 427: n = A,T,C or G
gtcccatggcaattgaaatcgcaatgtagctccccgggggcggcgggtctgtattgtaaggttttaaagtgcttgctcttacgtaagggttcataagaaagacaaaagtttatgaaactgttactaccagtcataaaagaccttttcctccctcattcacaggctggcttattagctgtaatggcccagatgggttgttacgtccctgctgaagtgtgcaggctcacaccaattgatagagtgtttactagacttggtgcctcagacagaataatgtcaggagagttttgggttccccattaaggttcttattcagtcatttagatgtgataaaagatatttgcttcttgtatatgagccttttaaatctaatatttgatttttctggtgttactttaaaaacatcactttttaagaactgcatagnctctctctcttttttttttgagatggagtttccctcttgttgcccaagctggagtgcaatggcccg

SEQ ID NO: 11303 - DNA, 419 bp, Homo sapiens
aggtacttaccatcttgtttctcagtaggtttttgataccaaagaggaaaatgtttaatatttgctttatctattagatcagaacctcttcgaaaaaagaagaaggtggatcctaaaaaagaccaagaagcaaaggagcgcttgaaaaggaagatccgaaaactggaaaaggctactcaagagctaattcctattgaagattttattacccctctaaagttcttggataaagcaaggtaaggatccttctctagggatgaagtcctcaggacaaaggagtaatatcaacttcaggtagttgtgtctgtagttcacacctgtgatagtcattggtcagtaggcttgagctgacttggccctaatgagtccttgctccttttggaagcaggagaaagcatccttggggtggtacctgcccg

SEQ ID NO: 11304 - DNA, 512 bp, Homo sapiens
aggtacctgcaatgggactctatttctgatattagaaaaccacccaatggaactgataaaaatgagttggaacttgtgaccagcagctggatgagaggagtgtgaatcccccaaatcttatggatatagtgtgctttctttgatgttcctgccaaagtgaggctggaaagctaggaagatctgtaagacgtgtgccagcacaaagtgactacaattcaaaagttccaaaaaccttgcttgaaacaattgcaaatagcttatcattttaaaccagtgagcccaaggctgagtgtttcatcaatttacagaaaaccaagaagagacatcttgccgcttatccagtgtatgacttaccctggagatctttcaaaaagaatcattttggtttgggaaaaaaaaaaaaaattaaaaagggggtccttgcccgggcggggctatttaaaattaggggcccccccggggcggaagaattcaatttaagttttatcaaaccggcaaaccttggggggggc

SEQ ID NO: 11305 - DNA, 463 bp, Homo sapiens
ccgggcaggtactcattgaacttgagctccgagttctgattcacatccaagctcttcatcttctcatcaagagagcccacatcccgaggagacaccaaagggaagggtagagttagaaactggggttcttgagaaagtagggagggaagaactgtcagctgctattctctcaaggcccttccctcagagagcagtggcacctgccccttctctaaagaaggaggctgcagccccaaaactgcaccgccacggggtgcctctccaaggagcaccagcagagaaaggtgggggggcctgagtcctaatgcttgccgttgtgtaaatacttccacgatggctgcttacaaaccacaaacaggttgtcgctgaatacaaagctggaaagaaatccacacaatcttctctcaccagcacaccactgcagctgctgtgggatcggcccaaggaatgccagcatctcagg

SEQ ID NO: 11306 - DNA, 434 bp, Homo sapiens
  misc_feature 22: n = A,T,C or G
gggaaatggctaatcgactacngggcgaattttagctccaccgccgtggcggccgcccgggcagttacctgaaaccatagctggggtcattttgttgcagccaacctgtgcagagagggcaacttctcgttgccttgagttgtggccctccctgtctggtaagagaggaggagacgcctccccgattcagggaaggaggaagagaatgagcggcaggtcgcctacctggacattcttcattgctgcagatccactggctgtttcggcaaatgctgttggagggaaaaagcacaggtcattggtggttctgcaaacacaagggtatgcaaatggatttagagctcatggtagttatcacagtccccaaacgaagggatgtgggaaaagaaaagagctggtgctagcaaaatcttcatagggttaaaattgtacct

SEQ ID NO: 11307 - DNA, 479 bp, Homo sapiens
aggtactttttttttttttttttttggctattatccttataccttttattaaaaagtaaagcaattctactctccttatgagtttgtgtttaacaatgatgaaatatgttaatttgtgcatgcataatgagatgaactctggattatttcatctctgcgattacatgtggaatagagtgattaatcataaaatgtcttcctcatgattccaaaacttggaaattgaagagagcaacagactatatgttttctaaactgatatatctccttgtgatctaaggggattattttcagtgtccatatatatataaacagcctgagggggaaaaacctcaaactgtgacattagaacaagcaccgctggtaacaaatggaaaactgaaaataacaatgcttattttttcaaaacgtttaaaactggactttctagccatttggtggagttgcaaaaagcataaatttacccaatccatggtttt

SEQ ID NO: 11308 - DNA, 487 bp, Homo sapiens
  misc_feature 472: n = A,T,C or G
aggtacatcagttcagcttctgctggcaggattccactaaaatcaaaatagcaccaaaggaagaaatggttaagggcagccagtggaagatcccactctcccgatggcaaattccagagctgtggtttagctctagtttctgggaagagcaatcattacccaactgtgagggtagggtgcattactaagtaattcattgacatttttcccagtagccttttacttaacagcgaataataagaggaaggtaaagtatttaattaagagccacagccctgtaaacatgaaatcattattccagacatcccttcgaatatgttgcctactttaaaaagaagttatttttctcccatctgggagaaatcctcactattaaaaaaaaaggaaaaagtttatcatgaggataatattttgggagtcaaaggccgtggctcatgcctataatcccaacactttgggaggccgaggaggncagatcattgaggtc

SEQ ID NO: 11309 - DNA, 487 bp, Homo sapiens
ccgggcaggtactgttgcttcttgttcattgttggttaaggaaatccacactgttcattactacggttcttatactactgatcgcgagagcttatacgtctcgaagacatttagaatcgctaggctcttactggggctaaaggtctaacttgaaagttagattattttggaagagggggctaatagacagtaccagggaagagaggggtagcttattttaaccaacccaataaattggggcgaaaaatcacatagggagaaagaacttgatgggggagggaatatatgtctgccgaccatattcacagggtgccgcactcagtttacattggtggaatttaaaggcatatatatagccgccgttgctcctctctgtaataccccaagactgtaaatctataaccactgcaatgatttagtgattaaaaacatgataacctattgtgtaactgcaaaccacagaacccctgccaactttttttttcta

SEQ ID NO: 11310 - DNA, 470 bp, Homo sapiens
ccgggcaggtacaaaggaagtggctcacatcatagggtaagaaaaagcaatgttatgcaaagaacaaaataaagaacattccaagaaaagggaacagccagtgtgaaaacccagaggcagaaaaaacttaggtgtgataaaaaaaaaaaatgtaagagaagctggtttacccggaatatcctgagcttgagtgaagtagaaatacaaaagtttggcaaggctggcaggattaaaaacatgaagattttggaggaagactttgttagaaactggaatttatgctaagaacaatggcagtaagccaccaaacatttttttgccaagaaaacatgttctgaattgacagttccaaaacatgactgtcctatggagaatgaattgaaaagatgaaattatagaagggaatatgctggaggttatggcagaattcagatggcttgatcaggaataattacaatggaaatggagaa

SEQ ID NO: 11311 - DNA, 481 bp, Homo sapiens
aggtactcagctgaaaacactgtttcagccccctctctggtgacctcagccttctccaggtgtatctcttgatgatcttggagaccagcagccacagctgctgctactcctgcaggagactgtcaggctgtggtggggggcaggggtgttggaggagaagttgaaaatccgtgtgttctctgcccctctgctcctccatcttagcttctggaggagttaaggcaccaagggcaccaagtcaggttggcagttttgttgcccttgcccaagcctccagcaaaactagctggtcccctgctttgctgggtcccagccaggtgtgattttggttgttgattagtaaccacacattgtttttccccacctttttcattagtggaggtttttgttttgttttgtttttgttttgtttgagacaaagtctcacgctcttttcagactggagtgcaatggtgcgatgtcagctcactgcaacctccac

SEQ ID NO: 11312 - DNA, 435 bp, Homo sapiens
  misc_feature 401: n = A,T,C or G
aggtacataacaaaatgaaaagtctcccatgtctacctgtttatacacagacatggcaaccatccgatttctcaatcttttccccatctctttaaaaaaaaaatgggaatgacaataattatatctgcctcatagtgttattgtgaggattggttaatacaggtaaaggatttagaaaggggcctggcatatagtaagcagtaattttattaattaatttaccttaagccctgtcccaacactccttttttaatatgaaaatactcaggccagcactatggctcacacctgtaatcctaatactttgggaggccgaggcaggaggagtgcttgaggccgggagtttgagaccagtctgggtaatagaacaagactcctgtctctacaaaaatgggttaatnatatttggtagaaaaaaaaataagtacctgcccg

SEQ ID NO: 11313 - DNA, 476 bp, Homo sapiens
  misc_feature 476: n = A,T,C or G
aggtacgcgggccaaatcatgtattttccatccagaggttcccaaccttggctgcacattagatttattctaaggagcttttaaaaaataccaatgactgggtcccagcctagagtgattaaatcagaatctctggaggtagacttgagaatctgatgtttgcaagtttcctaggcaagtcaaggctgaggaagactgctgcaggccattgtaagagccaggcgttgatctcattcaacctttccctcagctcttctagagacagccagcattctcttatggcacaaatacagcctttcaccctcacagaaagacacaggacaacaaattcaataaattaattcactggcatggatgattttctcagactaattgtttccagtttgataggagacaattaaaggctggaaggcactggatgcctgatgatgaagtggactttcaaactggggcactactgaaacgatgggatggcn

SEQ ID NO: 11314 - DNA, 473 bp, Homo sapiens
ccgggcaggtacacaaggattcattatctgtattaatttttctacttttctatgtttatggaaattaccttcaaaatgtaaaatatatgtttggaaacataaaaatatattccaaaatagctcatgaattaaatgtaagtcaccatagaaattacacgttttttggaatagaacagtcatgaattatactatttcaaaacatgtgggatgcaggtaaagcaggacttaagggtaagtttattgacttaagtcttccaaaaaaagatgtaaatgaattaagttcaattcaaaagttagaaaatgaaacacagaaaagctggagggaaaaagaacagaaaaaatagaaataagttaataatgcagtcatcttttattaacaggtagctgagaagattggattgaactaaggcattattctgagggaggttggtctgtaatattcctctctttaatatccttggttctgtctcggg

SEQ ID NO: 11315 - DNA, 348 bp, Homo sapiens
ccgggcaggtactattactaggttcattgtttccagaggggtgaaacggggctttggagaggttaaataacttgcccagggtcacacagctattaagtggtaaagctgggatttacatgagcccagacaaagaacccaagaagctaagctattctcttgtaatacctccaacataggaggcaagaagtgaggtattatacaggttgaggagataaaggggagagaggcctgcagtgctaacaggaggagctgggattcatcctggcttgttctgataggtcagttagtcttagagatacccatgaggtcacctactcaaaatggggctcagagtagccttgtcccatt

SEQ ID NO: 11316 - DNA, 366 bp, Homo sapiens
aggtacctttcattggattgtccatggtgcatcgctttagcaagcggcgtgactctccgctgcccgtcatcttggccaatatctatctgctggttcctcctgtgctcaacccaattgtctatggagtgaagacaaaggagattcgacagcgcatccttcgacttttccatgtggccacacacgcttcagagccctaggtgtcagtgatcaaacttcttttccattcagagtcctctgattcagattttaatgttaacattttggaagacagtattcagaaaaaaaatttccttaataaaaatacaactcagatccttcaaatatgaaactggttggggaatctccattttttcaatattattttct

SEQ ID NO: 11317 - DNA, 360 bp, Homo sapiens
aggtacgcggggacattaatgcagagtccctctgtgaatttacaacacccaacacccatgagttcagtccttaagaaggaaaattgagcaagtatttaattggttggacattgcataaaagaggtccatatccaggctaactctagaaattttattctcaaacttagttggcctcttttttttctgtcagaggaccattcttagtggcactggggaaatcttggcacccagaagaattcaactgcgctcactgcaaaaatacaatggcctacattggatttgtagaggagaaaggagccctgtattgtgagctgtgctatgagaaattctttgcccctgaatgtggtcgatgccaaagga

SEQ ID NO: 11318 - DNA, 363 bp, Homo sapiens
gccggcaggtacacatttcctgatgtaggaaatactaaaatttcagagcctatggcattggctttcaccacctatgcaattttctacacatctgaaaattaccagtttatctaactccttaaatgttcctctcttcaacaacaaaaaacacaaacaaaaattgctggaagaaacaggaagcatccaggtccaaatgacagcataacagactatgaagaaacagggcttaagtgcccatctagaacaagatggtctagattacaataaggaccccatgggacagaacatcaaaacattcaactttcaagtaaatgtcttggaagtaaacatttaaaatttataggacttcctctggcatgtagg

SEQ ID NO: 11319 - DNA, 358 bp, Homo sapiens
aggtacaatcagaatgctgcattctccagccataaagatcgctccctcttcttttaaacatccctgtccctcaaggcctagctcaagacggtcaccttaagaaaagctccttttgtcgagcagtgactccataccaggccctgctttaaacgctttatctgcattatcttacttgattctcgcaatagccctgggtggtaggtgcaattattatctccagtttataaaagaagatactgagggtcagagaagttaagtgaccggctcaaggtgtcacattcagtaagcgttgaaggggtctgtgttggtctgtccttgaagatgccccctacgactacactttcaatgatttctgcct

SEQ ID NO: 11320 - DNA, 362 bp, Homo sapiens
  misc_feature 362: n = A,T,C or G
aggtacgaaaaaatcaggctactaagcccactgttaatatagacgcagaccaattgttaggaacaggtccaaattggagcaccattaaccaacaatcagtgatgcagaatgaggctattgaacaagtaagggctatttgcctcagggcctggggaaaaattcaggacccaggaacagctttccctattaattcaattagacaaggctctaaagagccatatcctgactttgtggcaagattacaagatgctgctcaaaagtctattacagatgacaatgcccgaaaagttattgtagaattaatggcctatgaaaatgcaaatccagaatgtcagtcggccataaagccattaaaaggaaan

SEQ ID NO: 11321 - DNA, 355 bp, Homo sapiens
ccgggcaggacgcgggtcagttaaaaattatttgaatttttccaaacaatcagcgtgggcaaaaaatattatgtctgaatgtattaaaaatagacaaaacattttttgttaattaattacattgaaagttttagtcagctttattccaaaactggtatttgttacttcttaagtcagttttggtaatttctgatttcttagaaattggtgtatttctgaacatttataatttagtagcataaaattgtttgttttgaatctcttgtttctcacttctatatttaaatataaatatatatctacatatacatacacacacagacccttaatgggtttgccaatgatttatcatcca

SEQ ID NO: 11322 - DNA, 361 bp, Homo sapiens
  misc_feature 358: n = A,T,C or G
aggtacgcgggaaccacatatatgtataaattcaccgttactttttagcaatactataaaatccaacagaaaaaaatagcatttactattaaaaaaagaattagtctttgtgggtttggggcaaacaactgcccttctcagttaggatgggggagttctggacatttctagctaaagcccaggggtcaagggaatgataaactcctcggtcttgagcattgagagaaattctaccagctcgccctcagtagaagggtctatagtcctgcccctcacccgcctggcagggagagctgcctttctctcctgccatccccctatatccacggcttctctcagaggagctgctgagtgcatnttg

SEQ ID NO: 11323 - DNA, 455 bp, Homo sapiens
aggtactactcgattgtcaacgtcaaggagtcgcaggtcgcctggttctaggaataatggggggggggaaaggcagaggtgaatatggaagagacagttgccctcagcttggtccaggaaaaaatgctgtgtgatatgatgattcagagcatgggcctgaggccaggctcatattggtgtgaatcctagctctgcctctcatttggtgggaagtttacctctccatatcttatatttcttagctctaaaatggaaataataatatctgtctcatagggttactgttaatattaaatgtgttagaaagcaaattattgccgagtgaaaatgccattaaaatctatccatgtgttcaaactcaaaaaattttttgaagaagcaggtcaatattcgatggaaacaatctagtgccaaaaaacacaagaaagggcaaagccagtttaaatataattgct

SEQ ID NO: 11324 - DNA, 356 bp, Homo sapiens
ccgggcaggtactaccgcattgcttgaacagctggaagagacaacgagagaaggagaaaggagggagcaggtgttgaaagccttatctgaagagaaagacgtattgaaacaacagttgtctgctgcaacctcacgaattgctgaacttgaaagcaaaaccaatacactccgtttatcacagactgtggctccaaactgcttcaactcatcaataaataatattcatgaaatggaaatacagctgaaagatgctctggagaaaaatcagcagtggctcgtgtatgatcagcagcgggaagtctatgtaaaaggacttttagcaaagatctttgagttggaaaagaaaacggaaacag

SEQ ID NO: 11325 - DNA, 354 bp, Homo sapiens
  misc_feature 354: n = A,T,C or G
aggtactgacatgacacttaaagaaaatgctcattgaaccagcattttaggtttcagatttttggatttggaatataacttatacttctggcttacttgtttcttaaggtcatccctttaatgaccttgaaaattagaagaagcaaaattacttttcttatggttagccttctacgctgtgcctcagctctaaatagacattaacaagtagaacatagagatttctggggcttgtagatgtaggaagtattgatataagatgtcgagaaagttctgaatggagcctgttaccaggaggctagaaaaaaatccttccctctaagtaactgctataatgttttgcagaggcaatan

SEQ ID NO: 11326 - DNA, 362 bp, Homo sapiens
aggtacttttttttttttttttttaaatttccaccggtgccgaggcctcagtggagcctggctggcggcttgttagagcctgcagcctacctgtcctgcataggaatgaagccgggaggagttacatgatatgccctagttgcaggccggggacacagctaccgcattcagagaccaggaaacagagcaaaagctgttctcagagtgcggctgagcgaggagctacaggggaatggagggggccaagctgcatggaagattgtcccattaacctggctttttaccagggtggtcctctccctaacccctaagaatcacaccctgcatccaaacggcagcaaccccagaaaacgggctaagaa

SEQ ID NO: 11327 - DNA, 360 bp, Homo sapiens; identical to SEQ ID NO: 2158

SEQ ID NO: 11328 - DNA, 360 bp, Homo sapiens
ccgggcaggaccaaggcccaatcaccccaaacagtgacaggaacataatttcctgttgggaccagttctcggaattttgcaccaacatgatcccatagttccacatctaacgtttccttttcaggaaaccaaggacagtgttcttccactgccctgaatagggtgaccatattttccatgggaacccgaactcccccattttaacaggaatttaatatagcagagataagcataatgtttagactctgcgtgacccatagttaccccggacaatacacagacaactcaccaatcgtcggggagccgaacaagcatttctgtggactggaccgatgaacatttctccgcacctaccaaagg

SEQ ID NO: 11329 - DNA, 345 bp, Homo sapiens
ccgggcaggtactgtcgggacacctttgaccacccgactctcatagaaaacgagagtatatgcgatgagtttgcgccaaatcttaaaggcagaccacgcaaaaagaaaccatgcccacaaagaagagatcattcagtggtgttaaggattccaacaacaattccgatggcaaagccgttgccaaggtgaaatgtgaggccaggtcagccttgaccaagccgaagaataaccataactgtaaaaaagtctcaaatgaagaaaaaccaaaggttgccattggtgaagagtgcagggcagatggacaagccttcttggtggcactttataaatacatgaaagaaagga

SEQ ID NO: 11330 - DNA, 362 bp, Homo sapiens
ccggccaggtacttgattgttctgaaattccttatgcatgattagagaaagagtaaatgacgtattttaggattgtgtttaacaaaagtgagatgctaattcttgaaaattaggcctgtctatggggactgcacgtaatcacattaccctagatcttgagttagcgagagaatattcactgtcaggtgattcactgaccttgcctataacttgaaaccaatagcaaatccagatgtagtttcactggcctttgaagtccagggcaaaaagacagagcgtgactccctgtctccccattgcatcctgattgtctccctgtccagggacagaataaatatcctcaagacattgactcttttaac

SEQ ID NO: 11331 - DNA, 362 bp, Homo sapiens
ccgggcaggtacaatgcagttctaactagcttccttaaatagctaatattaaatgtcgctcatcaactttcacaaaaagtgtttttgggagactctaaaatgcaccatcttaccttaaggatgttttaggagaagctccactacacaaggcagcaaaagttggaagcctggagtgcctaagcctgcttgtagccagtgatgcccaaattgagtgagtatgaaaacagtggcttcacattttatgttttcttggattaaactaatcagactcctgaagcttagttacatgtgcttttaaaaataatgcttgcgtaattgataatttagtgttaatcatttaaatgttaacttaggttgttggt

SEQ ID NO: 11332 - DNA, 346 bp, Homo sapiens
aggtacctgtcagtgttcaatatttaacaaactccagttaaacaggtaagaggtcagcagtagcttataggccttggttctattatccatgtgcccaactgcagccatcgtgggctggtgttaaaattttcctttcaattgtcatttttctaataattgcaatcagtgagaggagaagaaaaagttcaagggaatgacctgacctttcaccatcctacacaggagatgactgatgacatggattcatacactaatgtatatcgtatattctccaaagaccctcaaaaatcgcaagaagttttgaaaaattctgagatcataaactggaaacagaaactccaaatcc

SEQ ID NO: 11333 - DNA, 352 bp, Homo sapiens
aggtaccccagaacttaaagtataattttaaaagaacaaattttcttttaattaagcttttatcatagaacttgtaaagaaaatcgttttcagtctcttactaccacatcatagctgggacaaactgctgatattttaaaagcaacacaaatatcaaacagaaagaactagacttaggaaccaaactcaggtttctgtagtgaacagggcagaatcttaacattcggtccccaccattactccttcagtttggcctttgctagcaaaagatggccttgttatgtagatgagaccacttatataaaaaaaagttttaaaaaatttccaactggattttctgtgtttttttttg

SEQ ID NO: 11334 - DNA, 351 bp, Homo sapiens
ccgggcaggtacttgattgttctgaaattccttatgcatgattagagaaagagtaaatgacgtattttaggattgtgtttaacaaaagtgagatgctaattcttgaaaattaggcctctctatggggactgcacgtaatcacattaccctagatcttgagttagcgagagaatattcactgtcaggtgattcactgaccttgcctataacttgaaaccaatagcaaatccagatgtagtttcactggcctttgaagtccagggcaaaaagacaaagcgtgactccctgtctccccattgcatcctgattgtctccctgtccagggacagaataaatatcctcaagacattg

SEQ ID NO: 11335 - DNA, 347 bp, Homo sapiens
ccgggcaggtacgcgggggagccaaatgcagtgcttgcttcctatctgtggtccattgcatagcagtgtgcttgggtgctgcgtaagacaattccccccaacgcctccaaaaaataggacatggtccactgcaggagttcataatctaggagtccagagagtccaggctcatcatcccttcagaagaaagaatcttcaggcccctgctcttgtgagagtaatttctcttaacaccgacagtgcagcaatacaactaccaccacctttcaattattgagaggcaatcatctaaagcatttggcaagtgatccacttacggagccaagctaagggagctgaagagaaga

SEQ ID NO: 11336 - DNA, 331 bp, Homo sapiens
ccgggcaggtacgcggggagaaaaagggtggggagtgccctttcttgaaggaatcccttaagtgcacgtctcccgttttcttttcacatcaatgcagagtccctctgtgaatttacaacacccaacacccatgagttcagtccttaagaaggaaaattgagcaagtatttaattggttggacattgcataaaagaggtccatatccaggctaactctagaaattttattctcaaacttagttggcctctttttttctgtcagaggaccattcttagtggcactggggaaatcttggcacccagaagaattcaactgcgctcactgcaaaaa

SEQ ID NO: 11337 - DNA, 327 bp, Homo sapiens; identical to SEQ ID NO: 2168

SEQ ID NO: 11338 - DNA, 326 bp, Homo sapiens
aggtactcactctcaagtttacgttaaatactatcccatacaaaaaccactctttctcttgttttcattatttatatgttgtcttgtttaaaggaagaacacaaaaatgccctgctaaagggattctgtttggctgcaggcagcaagagggaaaaacacagagcatattttgcagaaaatgatttattagaagtcagaactatgacacgaagccaagcagggcactctaggactgaatttgctgtgctgccttcatacgctccttgctctttcttttctggtagctgtgactcacacagctcatggagagtatcattccctaagag

SEQ ID NO: 11339 - DNA, 327 bp, Homo sapiens; identical to SEQ ID NO: 2170

SEQ ID NO: 11340 - DNA, 352 bp, Homo sapiens
aggtacctgcctataggccatatcatacttgacagcaagaagtatcttcatggctaagtaacttcattgtggggcaaatgaaaataggaggactccaaaaaagcccttgccattaacaacctatgccattactgctacaaacttttacaacctaggccactgaggaaaacaaagttactgccaacattaaatactgttgataaagctgaacaaagactataccatttcacttatctggaaacagagttactacacccttctcaactagcacactaaggaccaagtgcaggtgaaagcctctatgaaagtgactgtagaaaaatgggaagacgccattgtttcaccagatgca

SEQ ID NO: 11341 - DNA, 346 bp, Homo sapiens
ccgggcaggtacacaaagaaaaataaggcagaggaaggggatggtgactgagaggggaaagggtcaagattctctcaggaggtgctacttaaggagagacgagaataaaatgagggtgtgaaccatgaggatattttggggagaaggcagaggaaacaacaagtgcaaagttcccaaggcaggcacacacttgatctgctctaagaacagcaaaaggatggatggagcagggtgagcagaaggtgtggaaagctagatcacctgaggccatgataaggacttcagcattaattctgaggaaggtggagagccccagagggcactagcaaagaagtgacatgtttta

SEQ ID NO: 11342 - DNA, 350 bp, Homo sapiens
  misc_feature 350: n = A,T,C or G
aggtacgcggggacacacacacacacacagcacctgcacgcagatgcacacatctctagtcaaatgaggctctcagctttttgataggggctttttgatacgtgtataaccaatactttattctcactgtagtcaaggactcattgcaattcagaaatgagaagctgatccggaactccactacagctcaaagaaattctcgaatgttctcacctattaacagttattaaaatggaagaagctggggatgaaattgtgagcaatgccatctcctacgctctatacaaagccttcagcaccagtgagcaagacaaggataactggaatgggcagctgaagcttctgctggn

SEQ ID NO: 11343 - DNA, 483 bp, Homo sapiens; identical to SEQ ID NO: 2174

SEQ ID NO: 11344 - DNA, 355 bp, Homo sapiens
ccgggcaggtaccgactcctcagaaactggcatgccaaatcaaaatgggtctggttcaatcctccctaatggcaatgtaaacccctctaactaatcccacttctcctaattatctttttctccttacgaacctaaaaatctcaccatttctattagcctgaaaataacatccctctgttcttctcttcctccttcagcactggatctcacttacaataggttttatttaataattatcttccttacactttctgtctcaccagtttccccttaaactgatttacctgctacacaaaattattcttattgggcttatgtgccttttcctccacttattcgacctctcacctggatg

SEQ ID NO: 11345 - DNA, 350 bp, Homo sapiens
ccgggcaggtacaatgaggatacaatgtgtagagcacagcatactgaatggcagggaagtgaacagccaggtcactgtgcacaatcatcaaattcttactcagaagtgcaaagacagttggagatagcgcccacatccctattagtgagtttttggcatttccaattgtagtcagggcactgaggtcaaatttaactacaaattttgcattgtctacattgaacacatgattcttaaaagcctcatgttttatttcagaacaggactcaggaagctgcagactgtgcaggaggttgtttagggcacaagtcatttctcccaatattaacttataggcagtctccaaaaag

SEQ ID NO: 11346 - DNA, 615 bp, Homo sapiens
  misc_feature 602, 610, 611: n = A,T,C or G
ccgggcaggtacgcgggggactctttccagacctttgataaaggggctgctcaaaaaagccacgaccttgggcccctgctaaaaccatggctttaagtaaggagggagcagatatataaaaaccttatccctctttctaatctcttatgtcctgtgagtgtcacccattgagtaaacccaagtggaagtcagcaggaaagtagctgggatgatgcagtctttacagggtctctctgtcacccaggctgaagtgaaatggtgtgatctcggctcactgcaacctctgcctcctgggttcaagtgattctccagcctcagcctcccaaatagataccagtaaagatgtcatctggccaatttgtgtgaaaaaaagagaataattctcatccaaaccgcctgtctctggaaataagaaaagctctgagggtctccaaagttaccagaggaaggctgaattttatggcgattgataatatttccaagcttatgaagaaaaaatatcattagtcttttccatggtagaaaagagtaaagcctgtaacaaaaaaagtgatacagtggatgggatgatgagacccttgaaataagcaaggatggaccanaaactggnnacaa

SEQ ID NO: 11347 - DNA, 482 bp, Homo sapiens; identical to SEQ ID NO: 2178

SEQ ID NO: 11348 - DNA, 484 bp, Homo sapiens
ccgggcaggtacgattccttagtgtgggagttcctggaactggaggttgttcactttcctcattatccttctttaaaagggagccaaaatctataccagattttaggaactcagtgtaagtccccttctgcaccattttaccctaaaataaaaataaagaatttcagagagatacatgtgcaggtgataatgttaacctaatctaattctaatccagaaaaagtaactgatcttaagttatgattatacttaggtccggaatcctagttgacaaatctaatacaattcaacttgatacacaactgagtgtttctgttctcagccagactctgtgttaggtcctgaagaatatttttaaaatggtaatagtgtgttacaaatggcgattattatcaacaaatgttggtgaccgtattggtagtcttattacagaacatgaaaactgtgataaaccttatgcaataagattgaaggaatgagtaaa

SEQ ID NO: 11349 - DNA, 475 bp, Homo sapiens
ccgggcaggtacgggggacatcaatgcagagtccctctgtgaatttacaacacccaacacccatgagttcagtccttaagaaggaaaattgagcaagtatttaattggttggacattgcataaaagaggtccatatccaggctaactctagaaattttattctcaaacttagttggcctctttttcttctgtcagaggaccattcttagtggcactggggaaatcttggcacccagaagaattcaactgcgctcactgcaaaaatacaatggcctacattggatttgtagaggagaaaggagccctgtattgtgagctgtgctatgagaaattctttgcccctgaatgtggtcgatgccaaaggaagatccttggaagagacgggggttcacccggtagcccggagggtttcggatctcctaacttcggaatcccgccccctggggcctaaaaagggtggggttctcgaaaggat

SEQ ID NO: 11350 - DNA, 403 bp, Homo sapiens
aggtacaattttactgcaatttcctttgaactttcttgccactgtttggaatcttaaaaattcattagccttctcctctctgacataaagctactcttcatcagagatgagttcctatgcatgtcctttgttccttcaatagctaattaatgtgcttgaggatacttcagtggaaaaaaaggtttaaatatgcaaattactaataaatgtgtaaccttatgtaacttgtgttacatcaagtaacaagctaatctagtttgtttcactggactaggcttgtgctccctacttcagtattttgatgctttccttgatctttgtttcacaaaatgttgtgaattttggtatcattcaaaacaaatgacatttattaggtttcattttgaaacgatgtacctgcccg

SEQ ID NO: 11351 - DNA, 483 bp, Homo sapiens
aggtacgttgaaatattaggggcaggttcccccaatatctggcgcccaacgtgattttctttttcctaagtgcatgtgggaacccgattccctttggtaggtgcggagaaatgttcatcggcccagtccacagaaatgcttgtttggctccccaacgattggtgagttgtctgtgtattctccggggtaactatgggtcacgcagagtctaaacattatgcttatctctgctatattaaattcctgttaaaatgggggagttcgggttcccatggaaaatatggtcaccctattcaggggcagtggaagaacactgtccttggtttcctgaaaagggaacgttagatggggaactatgggatcatgttggtgccaaaattccgagaactggtcccaaagggaaatattgttcctgtaacttgtgggggggattggcccttgtaacttgcccggcgggcggttagaactaggggatccccgggc

SEQ ID NO: 11352 - DNA, 480 bp, Homo sapiens
ccgggcaggtaccacttgttctaccccctgtgaagagctgaatactcgttcatggctttcatccaaaatcaaattaatggtctggtcaaaacctttcagtgttcccacaatcattctcccatctgatgtaataacggcaacagttcctgataactgaatcaaagaaagtgttccttagggaatgcaaattgaaaacagactctggcaagggaatgatttgaatttttagaataaatatgacaactaggtataagtattcaacacagccactaagttcactacataaaaacgttaaaagtttcttcgacgccaaggcaggaggatcactttgggtgagaccagcttgggcaacaacaaaagataaccccccatctttttacacctggcctggtgacctatagtcccagctactcaggaggcagaggcagagcggaggattgcttggctcaagagtaagggttttggcctgatcaaccactg

SEQ ID NO: 11353 - DNA, 473 bp, Homo sapiens
ccgggcaggtacttttttttttttttttttttttgcccctggtaaaagtcagaacctgggatgaccagaaagtaacaggacagatttctcccagcaaatcagtctccacaaccaaatgaatattgttctccaaggagtcaagctatagactcacaatgacaacgtggccatggctcaaaacactctctgaaattacaaaattgctttctgagccaatttaaaagtcacatgattgaatccaagctattttactttaaatggtccttttgctttgcacctgagacctcgcttggccacagacgtcattcgctggactccctgggcactaaatgagtgtctagcatccttaaggctgctcaaacacagccccagactttccctggccgttttaaaaataggggccccccccgggcggggaattgtattaaaatttttaacccccccccctgggggggggcccggcccccactttt

SEQ ID NO: 11354 - DNA, 494 bp, Homo sapiens
ccgggcaggtacgcgggtaatgacagtgcccttttgggtcagtaatgtggcttttcctctcttctctcggctcctcacctcaccctacccaccccctctctcgacgctcagtgctcgccaaacccggagtcatcagtgtgatgggaacctaagcgtgggtggccaacatcatatacctcttgaagaagaaggagtcagccatcgccaacttgtttttgagaaacctcgggtggagaatccttgcactggattaattcatgccttgatttacactccaactcgggagggaacaatccggtggctggaccccacaaaaagggggccaaaaacgtttttgggggcccccttttttttttattttccgcccccccccaaaaaaaaattttttttttgggaaaaaggggagctgctggggcttttttcccccccccccggggggcaaaaatccaaaccaaaggggggggccccttttttaaaaaaaaaaaggggagggg

SEQ ID NO: 11355 - DNA, 487 bp, Homo sapiens
gagtcgctcaccactcgtatactacgaggcgaagcgccgccgcggcggcggccgaggtaccccagccaggcgcacgatgtcgtgtaagcagggtatccttgtgccagcatttgcttctctgtgaaaacacagcgccgtcaacattttgcactttccagggcccttcggaattggaagtgcctgtagctaagctgtttcccctggagagtccagctgttctcctgatccggccctgcacacacacacccagccacaaattactaggatgtcaaacccaggtgatcaggatactctcatggactgccctgctcccccagggctctccctacagtgtaatcctaaagccaaacttcctttcagcagtggctgaagcaaactctgcagtcagaggtcatacccagcaggcttcaccatgcagacttgaatgttgatttgagggcctagctgctcagcacagggcatttgggagacaatgtgtacctgcccg

SEQ ID NO: 11356 - DNA, 500 bp, Homo sapiens
ccgggcaggtaccttagtcttgaggacttatcagcctgatggctctcatgaccagcacgcagttatgcagagctcagcactcagatcagagccacctctaggaaccacatggctgagagcagacacagacaggctccgcagcccctgacacagtcccatggctgggtttacttaagacaacagctacacacagaacgatgtcaagccccattctcccatgtttttcttacctaaggtaatgatggcatgtgctctaatcacagagggcatgacagaccctcggacctgggggggtggctgagacgctgggggctcactggttcccttgaaaaaaggggccccaaaaaaagggggggaaaaggtccccccgaaacctttaaaaaggggtgcgggcttccaaagggtgattttaaaagcctcttcaggggggagaattaggagacaaaacccggagggctttgatttaaaaggggggaaggccttttccccccggtggggaa

SEQ ID NO: 11357 - DNA, 507 bp, Homo sapiens
aggtacataccataggttaagtaggcgcctgatattaggaagatcaataattcatctaagtgctgtatgaaacagcatctacaaaagttgctttattcaacaaactttgagggaaccgtggtacatcaccctgctgagggacatccaggacaaggtcaccacactctacaaaggcagtcaactacatgacacattccgcttctgcctggtcaccaacttgacgatggacttccgtgtggtcactgtcaaggcattgttcttcttcaatttggaccccagcctgttggagcaagtctttttaggatagacccttaatgccccattccatttgctgggctccaccttacaagtggtggacatccatgtgacagaaaagggggtcctcagtttattaaaccacaaggaagttttcggcccccaaaacttttttccttgattttccccattacccaacctcctttttttccaggccaaaaaccccccccggccccccccatttacaaagga

SEQ ID NO: 11358 - DNA, 417 bp, Homo sapiens
aggttctctccaaagccctcaggctggaatgtttaagttgcccgaacgggaaagatggcggcctgccccatcttttctctcagagttttatcttgtttcatggaacttaatttttagcctgttgattttactgtctacattagacttgttgagaaagattctgtaatcttttaggttagacaaatgagaattcattgtcttctgtaaataaacctgttcatgtcttgttctctggaaagaagtctctttcagctctctgactttggtcacaatcatgtagagcagtagccagtctacaatgatgtaattgaatttccatttccagtgtttcgtcgttgtgtcttacattgtccagttcagaactgagcattttattctcagttgtcaacatgctaagctgtccactgtacctgcccg

SEQ ID NO: 11359 - DNA, 767 bp, Homo sapiens
  misc_feature 687: n = A,T,C or G
aggtacaaagtccctgaggcaaaagcatgcttgctgtgttctaggaaaagcaaggaagacagcatgtctatagcagtgggaggtggaaggataataaacagtaggtgaggttagaggggaccaaatcatgtattttcatcagaggttcccaaccttggctgcacattggatttattctaaggagcttttaaaaaataccaatgactgggtcccagcctagagtgattaaatcagaatctctggaggtagacttgagaatctgatgtttgcaagtttcctaggcaagtcaaggctgaggaagactgctgcaggccattgtaagagccaggcgttgatctcattcaacctttccctcagctcttctagagacagccagcattctcttatggcacaaatacagcctttcaccctcacagaaagacacaggacaacaaattcaataaattaattcactggcatggatgattttctcagactaattgtttccagtttgataggagacaattaaaggctggaaggcactggatgcctgatgatgaagtggactttcaaactggggcactactgaaacgatgggatggccagagacacaagagatcaagtggagcaagctcaataaacaagtggttcaacgaggacttgaaatgcatggagctggagctgagtttaaccccaatgtttactagntgaatgaaatgtgatgaatggatgacaattttaactctggccttaggttcccaaccataaagggatcacagttgactata

SEQ ID NO: 11360 - DNA, 847 bp, Homo sapiens
  misc_feature 1, 2, 29, 30, 116, 172: n = A,T,C or G
nnttgtatagttctatactacgggtcaannggagtggcaatgcggagccggccgaggtacttggatcaaatttctactttaattggtcacggtatcattatgaatattaattttgngcggaaatgacccagataaaatcactgttcctttcaacaagcaacaggttagacanagcctttatcaattctgggcatggcagatgtcttgccgattttgtgggaattattgacaatcgttaccccaaaacaaaaatcttccagtttttaaaattgactacttggattttacctaaagttaccaaacataagcctttaaaaaatgctctggcagtgtttactgatggttccagcaatggaaaagtggcttacaccgggccaaaagaatgagtcatcaaaactcagtatcacttgactcaaagagcagagttggttgccgtcattacagtgttaacaagattttaatcagtctattaacattgtatcagattctgcatatgtaggaacagctacaaaggatattgagagaagcctaatcaaatacattatggatgatcaggtaaaccccgctgtttaaattggtacaacaaaatgtaaggaaaaagaaattcccaatttaatattactcatattcgagcacaccactatttaccagggccttttacttaaagcaaatgaaccaactgactttgctggtataatctgcaatcatgggaagcccaagaacctcatgccttgactcaagtaaatgccaatagaataaaaaaataaattggtattacatgggaaacgcccaaaaatatggaacttggcccggcgggcgtttataaacaagggaatccccggcttgg

SEQ ID NO: 11361 - DNA, 832 bp, Homo sapiens
  misc_feature 12, 35, 52, 108: n = A,T,C or G
cgccagacttangctttgatttgacagcgccaacncgagttgcaattgcgangcgcggccgaggtactcggatcaaattctgctttaatagagcacgtttactatganatttaattttgtgcggaaatgacccagataaaatcactgttcctttcaacaggcaacaggttagacaagcctttatcaattctggcgctgcagatgtcttgccgattttgtgggaaatattgacaatcgttaccacaaaacaaaaatcttccagtttttaaaattgactacttggattttacctaaagttaccaaacataagcctttaaaaaatgctctggcagtgtttactgatggttccagcaatggaaaagtggcttacaccgggccaaaagaatgagtcatcaaaactcagtatcacttgactcaaagagcagagttggttgccgtcattacagcgctaacaagattttaatcagtctattaacattgtatcagattctgcatatgtagtacaggctacaaaggatattgagagagccctaatcaaatacattatggatgatcagttaaacccgttgttaatttgttacaaccaaaaggaagaaaaaaaaaatttccaatttatattaccaaaatccggggcaacactaatttaccggggccctttacttaagccaatgaaccagctgacctggtaggataatccgcatcatggaagcccaaaaaccttagccttggctaaggaaaggccaaagggttaaaacaaaaatttgttttccatggaacacaccaaaatatttgccctgcgccgcggcgtttaaaaaaaggggaccccggctcg

SEQ ID NO: 11362 - DNA, 512 bp, Homo sapiens
aggtacctttcattggattgtccatggtgcatcgctttagcaagcggcgttactctccactgcccgtcatcttggccaatatctatctgctggttcctcctgtgctcaacccaattgtctatggagtgaagacaaaggagattcacgcgcatccttcgacttttccatgtggccacacacgcttcagagccctaggtgtcagtgatcaaacttcttttccattcagagtcctctgattcagattttaatgttaacattttggaagacagtattcagaaaaaaaatttccttaataaaaatacaactcagatccttcaaatatgaaactggttggggaatctccattttttcaatattattttcttctttggtttcttgctacatataattattaataccctgactaggttgtggttggagggttattacttttcattttaccatgcagtccaaatctaaactgcttctactgatggtttacagcattctgagataagaatggtaccttgccg

SEQ ID NO: 11363 - DNA, 580 bp, Homo sapiens
  misc_feature 28, 36: n = A,T,C or G
ccccctgagtgctattctaaaactacanggcgaatnggagtggcaacgcggtgccggccgcccggcaggtactgtgttatggcgcagtgggtgacagttggccacatagttgtcaaaagccatggccagcagcactgtggattccatgccagataaggagtggatggcaaacatctgtagcagacaagcatcaaactggatggaggaattgaaccagaagatggccagcattttgggcatggatgaggtggagatgaggatgtcaatgcctgaaagcatgcaaagaaatatatacatgggctcatgcaggctgtgctcagtccgcacaatgtagatgattgtcaagttacctagcacagcaataaggtagagggagcacaatgggaaggccaaccagaactgagcctcttctaaaccagggaggcctattaagatgaagtatgtagcactggattcattgccattgggatccaccatcatgaagaagctgaactgtgaccagcaccaggcaggtagaggctcaaccgtattggaggaatgtgtgaccccctttgtccagtctttcttcccccgcgtacct

SEQ ID NO: 11364 - DNA, 845 bp, Homo sapiens
  misc_feature 27: n = A,T,C or G
cccaagacggcgaaatgcacactacanggcgaattggattgcaccgcggtgccggccgcccggcaggtactttttggccacaagatccaccatcttttgtatgtgagtttattaacccttttgaagactgctgctaaccagaggaaggtaaccattcctccttatataaacacatatggctttgcagtctggaaatgctgttaccaagggttaaccatcaaaatcctcacttgctggccctccctccaccctctctttgcctgcagcaaggcagggaagagataggtggtaggggagggagaacaagactgtttagacccacaggccctttttaatggagattaagtgaccagattggtccttctccagttctctatttgttctatggtctcatttcttcctctcattatttttggtttcacaacgggaaacgttgatttcttggtgcaaggctggtttttgaaaattcgacacttactatccaatttttttgcgacgtcagcacctcgggctcaggggggaggggggaaaattttggagggaaaaaaattaaacaacccacccgggaccaaaacttaattatttaagggggccttaatggatcaaaaaggcttttaaaaaaataaaggcccactcaatattcattttcccccccacccaacttcatttaagggagggggggcgcacgaaaaaggttctgagtgggttcaaaaaggaaaccctttgatgagagaaaatttggttgttttgggaaagggaaagtggttatatttttttgtgggtatgtattgctctctcaatcgttccctgttgaaccggctcattagtgcaacccacagttcttc

SEQ ID NO: 11365 - DNA, 424 bp, Homo sapiens
aggtacttttttttttttttttttttttttgaacctcaagggtatggtgtttaagaatagaggtagcagtttggtgccactgccttgatttgtgctaaggcacaagcaggttcacaaaccattgcttttgcaccacaagcagaatttcaaaatgataaaaaggcaaataatggcttagtatgaaaatagttttgacctcttgaaagaatcacctatctctaggatgtcatctttggcctgggtaaccataacaattttctaactactctccctgcattcacccttgcatccaaatccttccctatactgttttctggccgatttttctgggattcattacttgttatttaaaactcttcaaagctgtctaatttttctttgacatctcagttctttaattagcctataacgctgtacctgcccg

SEQ ID NO: 11366 - DNA, 757 bp, Homo sapiens
  misc_feature 29, 34: n = A,T,C or G
accggacaggtacttatattattattttnttttntttaatgggagattatttttttattgacgtgttaaaaaaaaatgctggtctgtcagtgaggcatgggtttgtaggggtagcacagaaactttcatcgttcatactagattactctgaaattggctctgtcccccacccagaacatcagtaaaactgaaagaaactcagtcagagcctgggatgatgaagatgatgatgagaatatcattcctttctctctatgtccatggagaatttagcaacttccatcgtgaagaaactgaactctttcattactttttctaagggaagacacagttcacaagatttattagcacaagaggaaattttatgtaatgttagagctgaaaggaactatagagattatgaggcagcacctcattttacagataaggaaactgagccttaaaaaatgaatgacctttggcaagcacatttttacagaggaagaagcacaatttccctagttcagcggaaattcccccctctgttggctctttgatttcagagcccccctgaccacccaaggttttaccccaccaagaaagggttcttttttttttttttttttggttcctacttttagggttaaattattttttttttttaaaaggttgttttatcaccaaagccccaacggtccattctttttttggcttccgaacctggccgggattaaaggctcccggggggttcttttaagaagccggagttaaaaaagat

SEQ ID NO: 11367 - DNA, 764 bp, Homo sapiens
  misc_feature 576: n = A,T,C or G
aggtacaagatatcgagcacaattgggtcagattaacagaagatttttccagcgccaattttctgggaggtggtccaaaggaagtcagtggggccagctctctccctcagacagctaacaggagcaaggcttgtcagcttctgaagctctgcaagtccaaggcttctgagctatttattctatacttactttgaaaacacaaaattgctccaacaggatggatatgttacggaacaattaggcataataggatgtgcatttctgtctactgagaaacaccaggtagaaaactgcaccaagctgaattgagcttcgtggtaatacacaaaaaatgcacacagctcagctcaacaagtgcactgagtcacaccaaacacatttgatgttacaactttccatccaattccagataaccttcctcccactgcttctcaactgctcaaaagcctaactctccaaacccatttccacaaggtaatttgaagactttttcaaataaaatgccaaatttaccatagtagttatgtatttcttaacccatttaacattataaaactatatcatttttaattcagntccttttttcagatgtgtcactgacaaagttttaaaaatatgtgcccttaaccaaattttccccgtgagacctggggttcaatggcaagtctgcttatgtggaaattttagaatgcgatggcatgttgaatgaacagactatttccaggctctagggagagatttacatcattcctaaaatacaataa

SEQ ID NO: 11368 - DNA, 559 bp, Homo sapiens
  misc_feature 525, 555: n = A,T,C or G
ccgggcaggtacgcggggactctgatgagggctcagacttgataacgcccgtggtgccccatccctataggagctggtgagattgcagcctgctgccccccctccatcagccacagctattggatttcccacccagaatctttaggtaaatgaggtaagtcctgatttttaaaacttcttttgaatctggaatccaaacacctgagtggaaagagaagcctgctttaaactggacagatgaaactagaacagactcttggagacggctggcaggaagtgaagctcaccttacctgggcttacctcactgggtcaaatcagaattttattttggagggcgggttggctaccttggatattatctgtgaatttcctgcattgtctggacttctaatctctgtgaaattaaaagccccctcgtttccctatgcctgggtggcaaaaccattcccctgggttgaattcttctggaacaaataggcagctagagataggtggctctgatatagctcaaaaaagaagtggntgggctaagtagcttgtagggctcagaggnactt

SEQ ID NO: 11369 - DNA, 494 bp, Homo sapiens
aggtacacgcttgtcttattcagtctccatgttttagaatacttttttggttttcaggccgcagccttggttggggtcaatccagtacacaaaagagagaagagccccaagatctcagtgttgaggcagtctgatgcttacagtcaggatgataaggaagaaacaccaaaaaaacagaaggaacagtttggagatgcgggaataaaaccacgagagcgcagggtcctggaagccacctgctggagggttttccaggtggagggagctattggctgagtcagggagaggagccctgagcattggccatgggagttagtaatgcaaaaccattggtgctaatgagagggtagtgctgtggagtcaagtggaataagttaatagagaatgaaaggagagagattggagaccgtgggcagacattcacaactttttcatgttatctgacttgtaaagaaaggaaaaaaaaaaaaaaaaaaaagtccttgcccgcgggt

SEQ ID NO: 11370 - DNA, 980 bp, Homo sapiens
  misc_feature 87, 88, 89, 90, 91, 92, 123, 125, 126, 131, 290, 291, 360,361, 386, 387, 429, 430, 444, 445, 461, 560, 574, 575, 961: n = A,T,C or G
gggcgtacgtaggctgatacgttacatctgggcgaattggattgccacacgcggtcgcggccgcccgggcaggtacttttttttttnnnnnnaacccccttttcggtttattttattgccccncnncctcngccttgccctaaatgttggcatgtcccatgcaatggtcttgagccctcctcattctcttatccacactctctccttaagcatccacatccagatcttctctgatgatgacctccccaggtggatatctctcagtccaaggccgtcttccctgtacccannactaacgtgcccactctcttcttattttaccagcgacctaccaagtattgcctttacaggcactctcannaacttaacattgtctaaaaccagannacttttttctggcccctggtacctcggcccgctcatagaacnntagtggatcccccnncgggcttgcaggaatnttcgatatcaaagccttaatctgatacccgtccgaccctcgagggggggggcccccggtaccccaggcttttggttcccctttaggtgaggggttaaantgggcgcgccttgnngcgtaatcaatgggtcataagcctgttttcctggtgtgaaaaattgttaatcccgcttcacaaatttcccacacaaacaatactgagcccggggagccataaaggttgtaaaagccctgggggtgccttaatgaagtgaagctaacttcacatttaatttggcgttggcggcttcaactgacccgctttttcaagtcgggaaaacccttgtcgtggccacgcttggatttaattgaatccgggcccaccgccgcgtgggaggagggccgggtttgcgggatttgggcgcctaattacgcttttcttcgttcacattgactcgcctgggccttcggaccgtccggcttgcgggcaaggcggtattaagcttaaatcaaaagcccggnaataacggttaatccacct

SEQ ID NO: 11371 - DNA, 466 bp, Homo sapiens
  misc_feature 402, 403, 404, 405, 406, 410, 416, 466: n = A,T,C or G
aggtactcacctatctcctctacccaacttgtgttttagatgagtccttttggatctttttccccataatggcctctctccttttgctttacagtgcaatcagggcagaataacagatatgttgagtaactaatttatatttctgaagatctccatagaactcttaagttctaagtcttcatagtctttgcaccttgccaagtttgctttcctttgggaattctgtcataaccacaaggttattccccagacatgcagtttggggaaattaacccggcagtagtaaacagactggattagaaaaggtggcagtcgtaataaggatattccaataaccggtgaaagctacagaagggatcttgagctaagatgatgacagttacaatagaaggagacgctcgnnnnncctnttggtnaaaccggaccgccggtcagggtactacatatgcaggatctgatacaatgn

SEQ ID NO: 11372 - DNA, 477 bp, Homo sapiens
aggtacgcggggcttctgggaatctccacaccctgaagacacagtgagttagcaccaccaccaggaattggcctttcagctctgtgcctgtctccagtcaggctggaataagtctcctcatatttgcaagctcggccctcccctggaatctaaagcctcctcagccttctgagtcagcctgaaaggaacaggccgaactgctgtatgggctctgtaagtaaaactgttttgttcaatgaaaatgcttgactctagatgaattggactttctcacccacagggagtaatttcctcacaatgtgcagaattagattagatgttggtatggtgggctgaggaggacggtagaatttcagaattatttattcccaggaaatacgtagagaatgggtattttcgttctgcctgatataggttagataacttgtttttagtcaaatggttaatcagtgtgctgatatatttatcacagtcagt

SEQ ID NO: 11373 - DNA, 472 bp, Homo sapiens
  misc_feature 315, 316: n = A,T,C or G
aggtacatctacctaaaggactattatgtggaataatacatactaatgaagtattacatgatttaaagactacaataaaaccaaacatgcttataacattaagaaaaacaataaagatacatgattgaaaccaagttgaaaaatagcatatgccttggaggaaatgtgctcaaattactaatgatttagtgttgtccctactttctctctcttttttctttctttttttttattatgggttagctgtcacatacaacttttttttttttgagatgggggtctcgcttctgtcaccaggctggagttgcagtggcnngcgatctcggctcactgcaacctccacatcccatgtttggaagtaattcttctgcctcagcctcccgagtagctgggactgagggaacgtgccaccatgactggctaattttctgtattttttagtagagacagaagttaaccatgttgccaggag

SEQ ID NO: 11374 - DNA, 523 bp, Homo sapiens
  misc_feature 31: n = A,T,C or G
ggggcgtacctcgaggcaactgcgcactacngggcgaattttagctccaccgccgtggcggccgcccgggcagttacgcggggctctcaacgcggtgtgtaaggtagcctgttacagtgctggattcataaaagggcctttatggtttgtgaaagaatatctgtgtgcttagggaggaaactttttgatctgcagaaaagccagaagacatctaggacatccataaaaattcatcagagagcattttactactgagctgcaaagggaaaaacttaaaatggatatgaaaagtgaagaaagtgatcataggagaaaaccatttcagatgacaagagcacctcaaaggcagcagcctcaaggagcagccatggccccagacttgtcgcacggatgcagaaaacttaatggaggaggctgaggtcagaagggaagagtttttaaaaaataaaaaggggagctaatatgtgaggaaaaaaaaaaaaaataataatttaatttttaaaaaaatgacgccccgtgcccc

SEQ ID NO: 11375 - DNA, 468 bp, Homo sapiens
  misc_feature 386: n = A,T,C or G
ccgggcaggtacttcaaaaatattatctgtttccttccaaccttcatggtttcagatggaaaatctgctgtggtttacattattgtttttctgtaagaaatgtgccattttctctgtttgctttcaagatttttaattttttttttttcatttccagaaattgaatgtatttgggtgtattctatttagggtttgctctgtttcttgaatatttaggtttatgtcctccatctaatttgggaaggttgaagtcattattttttaatagtttttttagtcccacattctatctcctcgtcttctatatctcctgtgattatgaatgttagctcttttattattgttctaaagtttcctgaaatgctgttaaattttttttatcgggntttcttcttcttgctcagacagtaaatttctgttggcatgttttcagattcactgattccatcttctgctctgtgctctctt

SEQ ID NO: 11376 - DNA, 438 bp, Homo sapiens
gccgaggtactctttttttttttttttttagttcatctactgcaggaatatttggctcttcaagtagactttaacatcatttttgggggcccccctctctccaaaaataattcttttgagattttcactgggttcattttttagtttttaatttcaaattttaaatgtttttctaaatgtgattctaaattagctttttatattcattactgaaacacatttctacattaacatgaaattttattaacatattgagactcacgaaaagaattaagcaccttattgatttttcctcttttctttttttaaaaacagggcctgactctctcaccaagggaagaatgtggcagcatgatctcagcttctgccacctgtgcctcttggcctcaggtgatccttccacctttacctcctaagtattaataattgggatcataa

SEQ ID NO: 11377 - DNA, 386 bp, Homo sapiens
ggggggggggccgggcaggtacttttttttttttttttacactgtagtgagatagttggtcctggatgaggggcctgttgaaaatctgataaaaatatgcacaatatacaatacgtgcaaatacataatatttgcctataatttcagaattgaacatgaacatctgaagtcaatttgtggattcccacttcagatctcctccatgtccaatacttgttggtagcccctaatgctcaaaacattcattgacgtgcccagagatctatgggcagctggtggtgtatttttttaaagctggaatattagactgaggatacagcattgagcttcaggtgctgggaagagaatgagtataaatgctctgggaaaaacaaaagatggtacct

SEQ ID NO: 11378 - DNA, 435 bp, Homo sapiens
aggtacgttgaaatatatggggcaagttcccccattatctggcgcccaacgtggttttctttgtcctaggtgcatgtggggacccgattccctttggtaggtgcggagaaatgttcatcggtccagtccacagaaatgcttgttcggctccccgacgattggtgagttgtctgtgtattgtccggggtaactatgggtcacgcagagtctaaacattatgcttatctctgctatattaaattcctgttaaaatgggggagttcgggttcccatggaaaatatggtcaccctattcagggcagtggaagaacactgtccttggtttcctgaaaagggaacgttagatgtggaactatgggatcatgttggtgcaaaattccgagaactggtcccaacaggaaattatgttcctgtcactgtttggggtgattgggc

SEQ ID NO: 11379 - DNA, 436 bp, Homo sapiens
aggtacgcggggggagtggagattatggttggattagcttcaatttttttttctttgtgggggatgcaatttgcaaaagaaagttcttataagagtgagactttgttcatttgaagaatgatggagctggcttttctgtcaatttctgcagctttttcttattctccaaaaaccagaaagtggtaatatttgttagtgatcaaatcaaagatgatatttaaaaacacatgttgacaggaggacctagaggcattatgagtattagaaagtctgcaaattaggttgtttgctttgtggtgaggtgtgaaacaggatatgcatttttgaaaatgtatctttggatttgctgaactgggctcaaatgtggtcaaattgagagagcttatgatgcccgttttactgcattctttttagatgggttcccccaaaatcctgg

SEQ ID NO: 11380 - DNA, 430 bp, Homo sapiens
ccgggcaggtactattcaaaggacagagagttaaagaataaaaaacaaacagagctgcagaaaaaatgcgggaaattcgtatgttaaaatctaatttccaatgtgatggttttaagagagagggcctttgggagagaattataagggggattagtgcccttataaaaggtgcccttataaaagtggcaaagaacctagaagaattgtttgtgtcctactgttttgtaaaaaagaatttgtaaggaatgatatagaatatttggctgaatacatttctttcttttattttttgagacaggagtctcactctgtcacccaggctggagtgcagtggcgcaatctcggctcactgcaacctctgcctcccaggttcatgcaattctgtctcagcctccagagtagttgagattacaggcacgtgccaccacgc

SEQ ID NO: 11381 - DNA, 433 bp, Homo sapiens
aggtacgcgggacacatcaatgcagagtccctctgtgaatttacaacacccaacacccatgagttcagtccttaagaaggaaaattgagcaagtatttaattggttggacattgcataaaagaggtccatatccaggctaactctagaaattttattctcaaacttagttggcctctttttcttctgtcagaggaccattcttagtggcactggggaaatcttggcacccagaagaattcaactgcgctcactgcaaaaatacaatggcctacattggatttgtagaggagaaaggagccctgaattgtgagctgtgctatgaaaaagtattcgcccctgaatgtggtcgatgccaaaggaagattcttgggacaagtcttaatgagcacaatcaaccttgcctgattcctgtttgtgtgtgcggcccgtgga

SEQ ID NO: 11382 - DNA, 498 bp, Homo sapiens
aggtacaaccaatctggagcttacttaggattttctagtgcagtagttctaaaatatggtccctggatcagtagtgttagcatcccctgggattttgtgttttaacaagttctctatatgattctgatgcacactaaagcttcagaatcactgctgtagtataaactgtgatggttctcagccttccccactgctggcttaggtgtttgctttcttgggcctactaagtcagttagttctttatctgtttcctttccagtttccaaaatttttgttgctatcttttcctctccagttttcctcatatgtgtgaatttatatctttttttaaaaaaatctctttattgtataagaggccaggtatggtggctcacgcctgtggtcccagcactttgggaggccgaggtgggcggatcacttggggtcacgaagttcagaccagcctggccgacgtgttgaaacttcgtctctgttaaaggacctgcccgggcgggcgta

SEQ ID NO: 11383 - DNA, 498 bp, Homo sapiens
ccgggcaggtacactggaggctggagcctgcagatggcatggctctgcggctcaccttgctgcagttggcggtggtgacagagactgcagcttgactgtagtggtggttaccaggagctctgccactgcatgtccactagtgacgggttcgctccaccaccccagctgggtagccgctgctctcacataaggggtccaattaaaattgccaggaataaattcccccggactttgacttctcaagagctaagaaggtttgctgagtattctggcatgatgtttggtgatcaaacaactgctggccaaaaatgatgagtatttccccctcttgctgaagatgtgctccatacaatagtccatcacattcatcattcatcagtctggaagtgtgcagccaatcatattatctattacatggtgttctgggctttttttttttcccatggccagcctaaactataaaggtcctcggcccgtctaaaactagtggatcccccg

SEQ ID NO: 11384 - DNA, 496 bp, Homo sapiens
ccgggcaggtacagggcacatgcacagagctttgaagaacatacacaaacctgttgaatcaagttactttcctcatcctcagagactttgacaattcagagctcacagatggcagggggaattctcaggcttcccttcctcctgattgacactttttaaaggaagtgatgtggaagttgttctagaagttagatggacagtgggagcacattcgtgagtggggcttgggagagcccaaaagtggcactttgattttaggctgggcaggcagaagtctcacagtaaaatatatttcactagacgtccaaaccaacactgcattgtagtaacctcttctgaagtaactggttaaattaataactggtcccataagtcagggtcaagccacatttataacccattcgggccggccatgaagggttctgactcgacattggtatttaaatgctgttactttccccatgcttagtagcacttgagactttatttccatcgg

SEQ ID NO: 11385 - DNA, 496 bp, Homo sapiens
aggtacgcgggacatcaatgcagagtccctctgttatatttacaacacccaacacccatgagttcagtccttaagaaggaaaattgagcaagtatttaattggttggacattgcataaaagaggtccatatccaggctaactctagaaattttattctcaaacttagttggcctctttttcttctgtcagaggaccattcttagtggcactggggaaatcttggcacccggaagaattcaactgcgctcactgcaaaaatacaatggcctacattggatttgtagaggagaaaggagccctgaattgtgagctgtgctatgagaaattctttgcccctgaatgtggtcgaagccaaaggaagatccttggagaagtcatcaatgcattgaaacaaacttggcatggttcctgtttcgtgtgtgaaacctgtggaaagcccattccggaacattgtttttcacttggaggatggggaaccctactgggagactgatg

SEQ ID NO: 11386 - DNA, 520 bp, Homo sapiens
  misc_feature 25: n = A,T,C or G
aaaaaattgatccgttggcacaccngtgcgaccttacgcccgttctctaccttgtgtgatggtgtttgttcgtcttcccagaggccggtctcttccttatgtgatggtgtttgttctgtcttcccagaggctgttctctgccttgtgtgatggtgtttgttctgtcttcccagaggctgtggccctgagaaagatcacgtctacctgcagctgcaccacctgcctccggagcagctggccacgcgcctgcccggcatttcagagacagccatgatcttcgctggtgtggacgtcacgaaggagccgatccctgtcctccccaccgtgcattataacatgggcgggattcccaccaactacaaggggcaggtcctgaagcacgtgaatggccaggatcagattgtgcccgggctgtacgcctgtggggaaggccgctgtgcctcgggacatgggggccaccggctcggggccaacttcctgtgggactggttcgtttttgggcgggcttgtgccctggact

SEQ ID NO: 11387 - DNA, 444 bp, Homo sapiens
ggcaggtacggaaaaacaaaataaggtgatttataaagcgaagcaggtgtccaggtagattgtttctgcttttggaaagccatttgctaaactcatccatcaaaccatcaatgtctcccaggataagaaacttttgaactatatgataatgatcttgattctcttccagaactctctttttgtcagaagcttgaagttcctcaaaaaccttttctaacgtccaggttgctcccagatattctctagggagtttcttcagtttcatccaaagttgctactgatgtctagatctcttgttctaccaaactgtccaccatcacccggaagtaggcccaaaactgtgtcttcccaggtgtcacagacaggaagcagctacttaagattcccacttaaagctgcataaattgctctctcgtatctattaaaaagctcatcttctgccat

SEQ ID NO: 11388 - DNA, 438 bp, Homo sapiens
aggtacaaataaatgttaacgaaattacattattttcacactatctttttccacgattaatatgtatttccttcaattttcagtgaagacttttctaataatactattattaccttcaccccatttcctgtcctcatctactatttagatcacctacatcaaagaaataaaaataggctgggcccagtggcccatacctgtaatcccagcactttgggaggccgagataggcagatcacaaggtcaggagttcgaaaccagccctgccaacatgatgaaaccccatctctactaaaaatacaaaaattagctgggtgtggtggcgcgcgcctatagttccagctactcgggaggctgaggaagaagaatcgcttgaacccgggaggcggaggctgcagtgagccgagatcgcaccactgcactccagcctgggcaaca

SEQ ID NO: 11389 - DNA, 431 bp, Homo sapiens
aggtacatggattcttcacttgttaagagttatttataccaaatcctacaggggattgtgttttgtcactctagaggagttcttcacagagacttaaaacctcaaaatctcttgattgatgacaaaggaacaattaaactggctgattttggccttgccagagcttttggaatacctatcagagtatatacacatgaggtagtaacactctggtacatggattcttcacttgttaagagttatttataccaaatcctacaggggattgtgttttgtcactctagaagagttcttcacagagacttaaaacctcaaaatctcttgattgatgacaaaggaacaattaaactggctgattttggccttgccagagcttttggaatacctatcagagtatatacacacgaggtagtaacactctggtacctgcc

SEQ ID NO: 11390 - DNA, 517 bp, Homo sapiens
aggtactgctccctgcacgatccagtcagcccccgcccggctggttatgtaacaaacaagtctgtgtctgtgtggagtgttgcaggacgagtggaaatgactgtttccaagttcatggcaattcagaaggtccttcagccagactggttccagtgcctctccgatggaggaagtatcttgtaagggaagcaaactttcataaaaaaggggtctagaaagttcttgttgacacgatcacctttcttttttctttggataaccttgtctgtcggcctgcggggtaagaaagtcaagagggtttcttttcagcaagcaagtggtgattcatttggaaggttggattgaaaaggttggtaagaaatgtgatcggaaagcagaagggcctggagggtgtacctctcgtataagaataggcccaatatactgtacatgtggggtgggactttcccttcgtgggtcgggtatattcttttgaaattttcctttcaatccctcttgaagggctaactacttacag

SEQ ID NO: 11391 - DNA, 412 bp, Homo sapiens
aggtacgcggggacatcaatgcagagtccctctgtgaatttacaacacccaacacccatgagttcagtccttaagaaggaaaattgagcaagtatttaattggttggacattgcataaaagaggtccatatccaggctaactctagaaattttattctcaaacttagttggccactttttcttctgtcagaggaccattcttagcggcactggggaaatcttggcacccagaagaattcaactgcgctcactgcaaaaatacaatggcctacattggatttgtagaggagaaaggagccctgtattgtgagctgtgctatgagaaattctttgcccctgaatgtggtcgatgccaaagggagatccttggagaagtcatcaatgcgttgaaacaacttggattttccgtttg

SEQ ID NO: 11392 - DNA, 491 bp, Homo sapiens
ggggatattgactttatgagtctgggcaaattagctcaccgcggtggcggccgcccgggcatgtacttgatggattcatcattacagataactcctcgttggaagggggtatgccttgaagtaagaattgcaaaaggcaatccagctagcaaaagggaataaatgaaaatatcattaaaaaagaaatatcaaaactaattaatggcaataattatcccacagactctgtctaaaaatgcatttgccatgaaaataaatgagagcacatgtaaaaaaggaaatgcagcaatgcatgcaacagaagttagaaagattacagttttaagataaagatgttttgtctacagcaaacaaagtgttcaaatcctctattaaccaatttaacaaagagttatctttcctttgtttctgtccaaacacactaaatggattttggaaaaatctcttctcacgttcttggtgtcatttaatcaccaggtttttaaccctat

SEQ ID NO: 11393 - DNA, 466 bp, Homo sapiens
ccgggcaggtacaaaagttaatagcatgttagagttttgatggcagttgttgtttatgaataagcttcattccatcctaataccttaaaataactaatttgctttcctttccaggtattcctgatgacagtctgcctctatcttacagtaagttgtttttcgaattctatgggcctattatctaatagataacttagccattttgatatttgttaccaaagcctgcttaacccataaagttttctggttcctcttgttctctgtagtgatgtttctagatagatgcccactgatatatgccccttttttctcagatagatgcccactgatctgcccagggtcagacgaatgcttgtcagttgtagctttccaggattctgctccaatgaggaggaaacatcctgccttacccctgttttagcctgggaaccagtaattgtgaactcacccgggttaacatgaaaag

SEQ ID NO: 11394 - DNA, 461 bp, Homo sapiens
aggtactttgcagtgtatgatggacacggtggacctgcagcagctgatttctgtcatacccacatggagaaatgtattatggatttgcttcctaaggagaagaacttggaaactttgttgaccttggcttttctagaaatagataaagccttttcgagtcatgcccgcctgtctgctgatgcaactcttctgacctctgggactactgcaacagtagccctattgcgagatggtattgaactggttgtagccagtgttggggacagccgggctattttgtgtagaaaaggaaaacccatgaagctgaccattgaccatactccagaaagaaaagatgaaaaagaaaggatcaagaaatggggtggttttgtagcttggaatagtttggggcagcctcacgtaaatggcaggcttgcaatgacaagaagtattggagatttggaccttagacaagtgttgtc

SEQ ID NO: 11395 - DNA, 459 bp, Homo sapiens
  misc_feature 133: n = A,T,C or G
aggtcactattcctccacatgtctgtcccctttgctccaagactgcagaggacagtcttgcacatcatctttgtaaaaacagtctttattttactcagaaatttcttattgagtcctgctacatacatgctangtgttagggtttaaaaagaatgaaaataaagcctgtcagggatcgcttttctagaacacctgcccaagcagagacttaaatattgaggctagctagattaaaagtggtagagggcaagaaagggtgacagcatgccacgcagcagcaagagcaggagcgaggcctgaaagagtgaaagtatttgcctgcaatagaaggaggagtgagtagggcattaagagccactcagtaatgccagagaaagggcacacagggaaaagggctaaagatgtagaatagggcagaagtcagattatgaaagccttatgtgtaattttaagatgctg

SEQ ID NO: 11396 - DNA, 467 bp, Homo sapiens
aggtattcaaagttcaaatggagcccagcaagccagatctcctttactcctaagttccctcaacagtttctcctctgctttagagactgccttgaaaatattcttgtcctgctgttgtgttttggctttggaatgatgtgatgcagctcaatgggtcctacccccaagttgatcagagtaagaaacagctgggaaagtcagtgcaaattcaagttcatcatcctccttacagggattctgattcagagggctcaggtggggcctggaatgtgtttgttaacatgactcaaatgtgcagtcagtttggggacccgctgataccatcgaccttatagtttatgggatgattctgttttgctgataaagaaactgaggcatagacagtctgtaacttgcccaagttccccttgctggaagtcctggaaccagattttaaggggagcagccctttccccatccccttcccg

SEQ ID NO: 11397 - DNA, 386 bp, Homo sapiens
aggtacactagccgcacttcaggtgcccagtgtccacactgactagtggtgacggcgttggacagtgcagatacagaacatttctgtcatcacagaaagttcctttggacagagccatgttaagtgatgttatcacaagatggacagaaacattcctgtttgatttatttttcagacccagtttgtggagaaaaataatgatgctttacatatgtctcttgaatccttaatatgtgaatccagagataagtttatacgggaattatttgaatcatccacaaataacaacaaagatactaaacaaaaagcaggaaaacttagcttcatcagcgtgggaaacaagtttaagacacagttaaatttgcttctggataacttttggaagt

SEQ ID NO: 11398 - DNA, 504 bp, Homo sapiens
ggacgtgttgtcgaactatttagcactacagggcgaatttgagctccaccgccgtggcggccgcccgggcttgtacaaagatgctatcaccggataaatggggatctggtgatcctaattttgtcaccagctttgaaatctttagctaggcatttcagccctataaaaatccattttctcacttgtaaaaagaagagttgaagttatgtttttccagggcttttttctctgacaaaccgaattgcagaacaattttatgactcaaccgacgtagcagagtccagagagagtttgaaaaaacaccttacaaaacttataactgaagttctccctccaagggcacttaattttttcaagtgaaagcatgcatgcagattcatccagctgttaccctggaagaggacagagtaaatatactccattttatatgaagcccaaagtgtgattgttaaaaatccccatgcacaattagaaaaccagtggctggtctctggctcatctata

SEQ ID NO: 11399 - DNA, 447 bp, Homo sapiens
aggtacggtattctgtgagctggggaagacagatacccttttattgggggcagggggaggatgtatcaaaggaccaattttcctggagatcctattacgtgaagggacttatactggacacatcatggagaaaatcagaaagaaggctgcttaataagacccactcctggatatggccactctcaattctcagtgtctttgggaagcaaggttcgccatccacttgtctaaacagatgatgacagcagaggtgctgcacaccttctccctgtgacttgtgaatgcctttcgtgctcccaaataaggaacctccttcactgctgtctgctcttgagctgtatttcattttgatagccattttgcaggaaacacctttgaacttcatgcaatgtaaaaaaatgtggtttgagaaattctttaatgggaattctttccctttttcccccg

SEQ ID NO: 11400 - DNA, 382 bp, Homo sapiens
aggtacgcgggggaactgggcgggtgtgatttcacgaggtacacagcgctgctctgcctcagagaaccggacacttcggccccctgagaccagttcacggacggtggcaaatatcacatctgctggtctctgagtcctgaaggaaatgagtgggtgtgtaaggtcaggatacaaacaggaatgctcgacatcaacagagaacaatggtggccagtgttagaattgaggccaacctcagacacatggccacagaagacaaagtggcacagctttgtccttcactaaaccactcacctagctgtctgccccttgtctcctagaagagagtcctttgacatctccattaaaaaaaattaaatacaatataaaaggttcctgcccg

SEQ ID NO: 11401 - DNA, 441 bp, Homo sapiens
ccgggcaggtacatgttcagctcgatttttttgttcaaatatttgccatgtaaggttgggtgactttatggatgcagaacccatgtatatggagagccaaccgtaatctgtaatacatataaaaaatagtgaatagagcagccatgtgtgtaactgtataccacacagaaaagggcctatgaatttacgcttaaacagagagagacagacagtaaacatcaaaacctgggtaattaaataatataatcatgtctcaccttcagctaacttgggtcatttaacttagaaaggtatgatagataaccaacctgaaaagtgtcagcaactcgatgtaggaactcaattacaaagagaggtggcacttcggtctgtatgacagatacaaagaagagcttatcccggtagatactgatgaggtagtggtgaggtgttgaaatgaca

SEQ ID NO: 11402 - DNA, 443 bp, Homo sapiens
ccgggcaggtacagcccacagaactgtgagccttttcaatcccttttctttttcaattacccactctcatgtatatctttatagcagtgtgagaacagattaatacactcctcctcagaaagcattcaatttagctgtgtctaaagtatgccaggtgttctagggtgttatcttagccaataattcttcctcttcagcaagatctatttgcctatgacagcttgacctacatttcctaccatacttgtcagtaacaagtagcccataacatctgaatggacttcattgaaatcacagagggtctttagttctctactttattagcaggcattcgggaaacacatcaactttctaatttaataaggtgcctgttgctttgaaaaactgctcaaaagaagataggagaggcttacttaaagatatcactataggcatggcatgct

SEQ ID NO: 11403 - DNA, 483 bp, Homo sapiens
aggtacaacatcatcaaggcagaaacagttttccaacaggttatattttcttaatggtagtcatgaagtcataaataaaaaaatggaatcatttagtatgttctcttgatttgactttttcttttttttggagacagagtctcactctgtcgcccaggctggagtgcaagtgacgcgatctaggctcactgcaacctctgcctcccaggttcaagcaaactctcctgcctcaagcctcctgagtagcctgggattatggggcacccaccaccacaccccagctaattttttgtaatttttagtaagaggccatgtttttcacccaattttggcccagggctgggtcttcgaaaactcctgaaccttcaaggtgaatccaacccacccttgggccctcccaaatggggccggggaataataggccatggaagccaaccggaacccaaacctcttcctttgtcttttttccttcttgtttccccg

SEQ ID NO: 11404 - DNA, 463 bp, Homo sapiens
aggtacgcggggcctgtggaggtgagtgaagggtctgctgctgaaatttgggggcaaataaccggagtaggtttgttcctgtgccttggcgagtcgccggtgcgtatcggagtctctgccagccattgatttctacgggtttcaagaagagggagaacaggatggaggagatgttgggctgatggtgtttggtcccctgacacccggagaacggctgcccgggttatcccagttaaattcctgggcctgaacggagtgaaacgatgtttttgttcgtgtgcagttgtccatgaggcagtgcttccttcatccgtttcctcccagtccataccttccttggcttgtctgaccagtctctttcctcagcttttctcccccagccattgcataaaagtcttacgtgtggggtttctctttaaagctttcatttctttttcctgaggtgttggcccactggttaccg

SEQ ID NO: 11405 - DNA, 458 bp, Homo sapiens
ccgggcaggtacatgcttcagtcagggctcacatcttcaaattcagtgtctgttctgtagagaaaccttaataatgtgatatatgtgacagcaaagagttataagatatgaatatgttaattttagtagatacttccgaaaagtatttcaaactggttgtgccactataaactctgaccattattaggcaagaattggctttttttttgtttcttttgagacagtcttgctctgtcacccagactggcatgcagtggaatgatcacggctccctgcagccttgacctcccaggctcaagaaatccttctgcctcaaaccctcaaaagctgggactattggcatgcaacaacacgcctggctaaatttttggtgcagagaagggggtctcactatggtgcccaaattgggccttaaacttctgggcttcaagcgattttcccttctaagccttccaagg

SEQ ID NO: 11406 - DNA, 308 bp, Homo sapiens
acgggcaggtacactggaggctggagcctgcagatggcatggctctgcggctcaccttgctgcagttggtggtggtgacagagactgcagcttgactgtagtggtaagaggatgcctgtggcagccagatgataggggccttatagggtgggccagtgcattgagggtgacagcagaggtggttgtattggcatcagtgctagtggtggcagcagcagcaagtctgggaaaagaaaagatgaaaaagaaaaattcacaactgccagatcttctcctgtctggaagtgttgtgtgtgctaccagtacct

SEQ ID NO: 11407 - DNA, 491 bp, Homo sapiens
ccgggcaggtatttcacaaagtttgattactttggtgggcacagtaaagataaaagtaactttctagagcagtgctgctcaaactttcatgtgcatacgaaacagctgggatcttgttaaaatgcagctttagattcagtagggaggagcttaagattctacattcctaacaagctcccagggactgccgaggccacactgccagtccaaggaccacactgtgcatcttaacaaggttctggagaatcttcccctccaggcaaataaagctagaaagtgtgctgggtgcacatgaatgcctcactgaagtgggacgtggggacagcctccagtcactccaggccaggaagactgtagctgcgcccactggacaagaatgggacaaggctactctgagccccattttgagtaggtgacctcatgggtatctctaagactaactgacctatcagaacaagccaggatgaatcccagctcctcctgttagcact

SEQ ID NO: 11408 - DNA, 409 bp, Homo sapiens
aggtacacacaacattctggaatggcggcacgttttggttatgagagagttaaatgtcattacactggaacatagtgatgctaaataaaaggagacatcattctacttcaaatgcacctacaactttaaaatggcatctgacaccaacctggattcttcggatgctgacgattgcctctgacaccctctcaatggctgaggggaagaagagggtaaccgccagccgcacagccccatacagcgtcactgccacgaacacgcggctggctgtgatcacactgccgaggagcacgtaggtggtgaaggtcacaaacacgatgattttgcttgcactgaaaaatgaagccaaattcatccctctgaggcaggaacttctcagaatcttggaaatctccttcctgaagagagt

SEQ ID NO: 11409 - DNA, 483 bp, Homo sapiens
ccgggcaggtacgaaaaaatcaggctactaagcccactgttaatatagacgcagaccaattgttaggaacaggtccaaattggagcaccattaaccaacaatcagtgatgcagaatgaggctattgaacaagtaagggctatttgcctcagggcctggggaaaaattcaggacccaggaacagctttccctattaattcaattagacaaggctctaaagagccatatcctgactttgtggcaagattacaagatgctgctcaaaagtctattacagatgacaatgcccgaaaagttattgtagaattaatggcctatgaaaatgcaaatccagaatgtcagtcggccataaagccattaaaaggaaaagttccagcaggagttgatgtaattacagaatatgtgaaggcttgtgatgggattggaggagctatgcataaagcaatgctaatggctcaagcaatgagggggctcactctaagag

SEQ ID NO: 11410 - DNA, 489 bp, Homo sapiens
aggtacggggaggaacagagtccctcctttacttctccattagaaagaatgagatggcaagacaatgaaacaggcaaagtgaacagagatgcaagacaaaattcaggtgagagagccagagcatcactcagccattcctgacatgtaaaacaggcaactagaaatttgcagaaaggaagcgaagtctccataaagatgtttttaaagtgagcttgaagtatttggagacaattcagtgttacataaaatctgcaaatctctggataaagaagcagagatcccagcatgggacaaatggagcctcaaaagtgggaagaagacagagaagaccagggcagaatgcatctcttcctttctcttggctttcctggataaggactgcatcattcctgtggaaggacaggccatcagctccgaaacactgtatgtattttccagtatatactgctagctgtgtgatgttgggaaaatttggtcccctgtctaacc

SEQ ID NO: 11411 - DNA, 497 bp, Homo sapiens
cgtggtcgcggccgaggtacttcttggatcttacataggcctgaaagtttagttgcactactttaggaatctctttttatgcatttgttcaattaaaaggcaacaaagacaaatccttaagaaaataccagcatttttcctacatatgaaatcaagggtccttgtctgacgatggattttactagcgtggtcgcggccgaggtacgcggggggactgacaacccggatagctcaaggtccaaaaaaccggttttcaaacattataagttccaggctttgcaagtctttattctctggggtaatatccagtctttctgttattgtctcttaaaattctcttccatggcccacattaagggagtttgcagagagtgagggaggcaaaacttgaaaagggcctgcaacactttaaaccttctcaggttcacccacatgaaacagctgtgctgagtgtgctgccggtgcccggggagcttctctgactgtgacccgcagag

SEQ ID NO: 11412 - DNA, 445 bp, Homo sapiens
ccgggcaggtacttttttttttttttttttgctgtgtgtgggatcacatccagagttgttgctgctgatctgggcacctgccctggatgtgcaaaagtggtggtgggaagctgagtggaagtctgctctgcctttttgcttgtgggatctggtcttgaaaaagtaactccagagctccttgccattgcagctggtgtgactgcacttgtaatgtgccctatagagaagggcaactgtgaggtagctgggctgatcatggtttccaaagtgagttcctggggagttgtggccccctgaggagctgaggtagtggctgtggctgatgaacggagatctcccagtgtcccagtcaagagtggacagagaatcaaacagaaaagtggacaggggcgtatttggggtcaatcttttttacctttgccgttttgaactagtggatcccccg

SEQ ID NO: 11413 - DNA, 367 bp, Homo sapiens
ccgggcaggtacgcgggtgtgacagaaatggagtcatcagtttatcaaccaacaagcagctccagcacccagcacttctacctgaatttcaccatcaccaacctaccatattcccaggacaaagcccagccaggcaccaccaattaccagaggaacaaaaggaatattgaggatgcgctcaaccaactcttccgaaacagcagcatcaagagttatttttctgactgtcaagtttcaacattcaggtctgtccccaacaggcaccacaccggggtggactccctgtgtaacttctcgccactggctcggagagtagacagagttgccatctatgaggaatttctgcggatgacccggaatggtacct

SEQ ID NO: 11414 - DNA, 405 bp, Homo sapiens
ccgggcaggtactaatatgatccacagttttcagctgtggaggatctgagaaacagaggggtcaaatgacttgactagagtcacacagctggaatgtggagccaggatatgaacacaaacagtttgaatccagaagctttactcataaccatgattctatgtcatttccagaaatggtggccggcacataatctccctttgcacataacagatttcacacaagcctttcttgccaagaatcaggttcacttctgtaatgctcttgttagtagaaaagataatttcaatctgacaattctatatttcccaacgttcatgggccctttcaaccatcttatcacccagctaatcaagaatcagtgttcccagcaatttctcgaaacgtcatgggcaggatggagaaag

SEQ ID NO: 11415 - DNA, 396 bp, Homo sapiens
aggtaccccacaaataatgcaaaaatatatatgtaaattggatgatgaggctgattaaaaagcttgggctcagtggtcagacttgggcaagtggcctaatgtcgtcccctagtaagtggacttagagtggggtctccaaatacggagaatctttgggttgcagcaggagctttcactgactgctgcgtgagttgctcgttctttttccttcatcaggtgcgtagtttctctgaaaagcatcacccaggtcagaatgaaaggaaactctctgtgcagaccgttgtatgtgggacctttgaagacagtcaaatagtgttcaattcttttgtaagcagattttcttggtctttctggagaattacagttttttggttaaaaattgatccaggttttttt

SEQ ID NO: 11416 - DNA, 394 bp, Homo sapiens
ccgggcaggtactacaactgattactctgtttgaggaattcatgaatttgtctcagtcaaacaagatgaagaggaagtctccccgcctagcgccttgcctccaggtttgggtagtcgggccctggagagaaaagattcaggtgagcgcaagcccagagaaggcatcctgacctcatcctaatacaatcactaatgagctcatttcttgaagctgtattgattctaatccttgtcttattcagattgtagtttttacggcaatctttcattacgtttcctcttacaagaaaactaatgtattgagaaacaattaattttgcatgatacacacgcattcaaggatctagccaaaaataccccaggggttggtctatcatttttaatatttagcaaa

SEQ ID NO: 11417 - DNA, 393 bp, Homo sapiens
aggtacggggacatcaatgcagagtccctttgtgaatttacaacacccaacacccatgagttcagtccttaagaaggaaaattgagcaagtatttaattggttggacattgcataaaagaggtccatatccaggctaactctagaaattttattctcaaacttagttggcctctttttcttctgtcagaggaccattcttagtggcactggggaaatcttggcacccagaagaattcaactgcgctcactgcaaaaatgcaatggcctacattggatttgtagaggagaaaggagccctgtattgtgagctgtgctatgagaaattctttgcccctgaatgtggtcgatgccaaaggaagatccttggaaaagtcatcaatggcttgaaacaa

SEQ ID NO: 11418 - DNA, 473 bp, Homo sapiens
cgtccatgtaccatgagatcaattaccctaaacagtgacagaaacataattttctgttgggaccagttctcggaattttgcaccaacatgatcccatagttccacatctaacgttcccttttcaggaaaccaaggacagtgttcttccactgccctgaatagggtgaccatattttccatgggaacccgaactcccccattttaacaggaatttcatatatcccaaataagcatactgtctaaactctgtgtgacccatagttaccccggacaatacacagacaactcaccaatcgtcggggagccgaacaagcatttctgtggactggaccgatgaacatttctccgcacctaccaaagggaatcgggttcccacatgcacttaggaaaaagaaaaccacgttgggcgccagatattgggggaacctgcccctaatatttcaacgtaccttgggcggtctacaactagaaag

SEQ ID NO: 11419 - DNA, 401 bp, Homo sapiens
ccgggcaggtactgcagacaccatttagttttgcattgaccttactagcaattattattttatactggctttgcccttttcattctgttttttggcactagtctgttttccatcagaatattagacctgcttacttctaaaatatttttgtgagtttgaacacatggatagattttaatggcatttttactctgcattattttgctttctaacacatttaatattcacagtaaccctatgagacagatattattatttccattttagagctaagaaatataagatatggagaggtaaacttcccaccaaatgagaggcagagctaggattcacaccaatatgagcctggcctcaggcccatgctctgaatcatcatatcacacagcattttttcctggacc

SEQ ID NO: 11420 - DNA, 476 bp, Homo sapiens
aggtacatctacattttcctacactcttaaatatatagtagctgcagaatctgtttgtgtatacttaatagaggtaattttttcttcccctagttatttctttcccattgaatcaagttacatacaagtttctaaccattcctgttataggcttgttggtgattgacttcattttaataatctttttatttcattgcctttcacccagttttttaaactcatgaaattccacacccctttccatctctattttccttccttaaatcaatactttactataagcacctcttatatgtgatcctttgaccatagtcatcttggtttttgattagtcccttccctgcctttcatttactgtgttatcaactagaggtcttgtaggaactggagtaaactttacttgaagaaacattcagataagcagttgtcttgagagggctcatcacagtggattcaaagatgaatcagtgaacata

SEQ ID NO: 11421 - DNA, 388 bp, Homo sapiens
aggtacactaggacttgactggaaaattttacaaaccaagaaagcaagggacttctgttcctcttacctcctagtctttctgtctcctagggaaagagaaaaattacaaagaagaaatctctctctctctccattttaaagcaaaaatagagtcgggtgtggtggtgcatgcagatactctggaggctgaggtggaaggattgcttgatctcaggaggtcgaggctgcagtgagccatgatcgtgccactgcactccagcctgggtgacagagcgagaccccatcttgaatgaatgagtgaacggaatgaatgaatgagtgaacggaatgaatgaatgaatcattctctgccttctgggtagtaaccctggtttttagcatgttgtgt

SEQ ID NO: 11422 - DNA, 463 bp, Homo sapiens
aggtacgcggggacatcaatgcagagtccctctgtgaatttacaacacccaacacccatgagttcagtccttaagaaggaaaattgagcaagtatttaattggttggacattgcataaaagaggtccatatccaggctaactctagaaattttattctcaaacttagttggcctctttttcttctgtcagaggaccattcttagtggcactggggaaatcttggcacccagaagaattcaactgcgctcactgcaaaaatacaatggcctacattggatttgtagaggagaaaggagccctgtattgtgagctgtgctatgagaaattctttgcccctgaatgtggtcgatgccaaaggaagatccttggagaagtcatcaatgcgttgaaacaaacttggcatgtttcctgttttgggggtgtagcctgtggaaagcccattcggacaatgtttttcacttg

SEQ ID NO: 11423 - DNA, 462 bp, Homo sapiens
ccgggcaggtaccagttgtaaaattaccaggaaccgccatgcctcaagatcgccctgttttctggcttcatcaatgactgcatgcagtgcaccaccctgtccactacgtgatgctgtagaattaagtctcacagtgggcggctgaggatacagcgccgcgtcctgtgttgctggtgaattagacgccatcgctgtgggttgctggtatggtgccgtgctatttggcacaggacacaccgcttgaggtctgtattgaacctctgaaggaggccgatactgaagctcggttggcagccggtattgataaactaccagcggttgggtcttattttctaccggctgatattgtggatactgtatctgagttggcattgccgggatagagactctgtccctttctacttgattttctcttggggttttggcttgtctaacctgcgtttgagggtgtaatgttacagg

SEQ ID NO: 11424 - DNA, 464 bp, Homo sapiens
aggtactttttttttttttttttgagatatgtgggattcataagggcatatttgtgactaccaagtcaatttctttaaaggatgttggtttactgaggttttctataactccatcgtcagtaaaatcttaagtattagaataatttacattaaaaatgcagcttgaaatttatgaaacagaagagcatactcattacttgtaatccagtaaaattctacttttgtgtagtttttaagctgaaattatcataaacatatagaaaaatgtatatgtatgattaaagttcaatacagcatttattataatgcaaataatttgaaaactatataaatatccaaaaataattgagattgatatttaaagggtgtcctattcatcccattgggtttcctcaagccaatgaaagttgtagtcttgaatcttggggaacattaaagattatgagaaaatctttgtgttggca

SEQ ID NO: 11425 - DNA, 489 bp, Homo sapiens
  misc_feature 23: n = A,T,C or G
ggcgctcgtgcaatagtactacnggccgaatttgagttccaccgccgtggcggccgcccgggcatgtactttcttcttttttttttagatatattttgggctgatagaatttgacattgttcaactttaactttgtcctcattgaactttatcctgctaaggagctaaaaggtccatatgatcaaaaaggcagctctcaacccagcacgaaattctaggctcattcatttctgtttacctactgccaaataagtcagacaactgcatacttgctttacagacgaatagaggacagcatgttgttcaataattgaagtttaaaaagtatatgtaagatacatccacaagaagaaagatagagggagcataccggttgtcttctaagtataggctccctgcccatggagatcacacagtagaattatgatgggtgccttaaagaccagcctcctcaagaacatgagttcaccttggaccaaaggtttggca

SEQ ID NO: 11426 - DNA, 494 bp, Homo sapiens
  misc_feature 14, 28: n = A,T,C or G
cggcggctgagcanctagtacgcaggcngaactgagttccaccgcggcggcggccgaggtaccatttgtaaaattaccaggaaccgccattccttaagatcgccctgttttctggcttcatcaatgactgcatgcagtgcaccaccctgtccactacgtgatgctgtaggattaagtctcacagtgggcggctgaggatacagcgccgcgtcctgtgttgctggtgaattagacgccatcgctgtgggttgctggtatggtgccgtgctatttggcacaggacacaccgcttgaggtctgtattgaacctctgaaggaggccgatactgaagctcggttggcagccggtattgataaactaccagcggttgggtcttattttctaccggctgatattggggatactgtatctgagttggcattgccgggatagagactctgtccctttctacttgattttctttgggggtttgtgcttgtctaaccccggttgg

SEQ ID NO: 11427 - DNA, 328 bp, Homo sapiens
aggtactcaccagaccctatatccctagagttgctccctccattccaacacccttcccagcatattccaactaccgccccaactctgagctctgtcttctcagctcagtaggaccaccactgctgaacttcgttcttcctctgagtcagtcctataagtgattccaggtagacagctggaatcattctagggctcaccttgtttcccatttttaggaattccaatcctatactacctaccttccatccaatgtttgaacgtttttcatatggattttttcctctttttctagttgttttggcaacagagctaatccagtacctgcccg

SEQ ID NO: 11428 - DNA, 386 bp, Homo sapiens
aggtacactagccacacttcaggtgcccagtgtccacactgactagtggtgactgcgttgggcagtgcagatacagaacatttctgtcatcacagaaagttcctttggacagagccatgttaagtgatgttatcacaagatggacagaaacattcctgtttgatttatttttcagacccagtttgtggagaaaaataatgatgctttacatatgtctcttgaatccttaatatgtgaatccagagataagtttatacgggaattatttgaatcatccacaaataacaacaaagatactaaacaaaaagcaggaaaacttagcttcatcagcgtgggaaacaagtttaagacacagttaaatttgcttctggataaatttccgaagt

SEQ ID NO: 11429 - DNA, 348 bp, Homo sapiens
ctagtagctccaccgcggtggcggccgcccgggcaggtacgcggggctcacaaggtctcattgtttaaaagtgtgtagcacctcccccttcgctctgtctctcctgctgtcttgtgaagaagggacttgcttcctctttgccttccaccatgattgtaagtttcctgaggcctcccagccatgcttcctctgaagcctgcggaacttcctgagcctcctacctctgctggaagcccagatcccattgtgtgccaacctagtaccggtgcccatcaccaacgccaccctggaccagatcactggcaagtggttttatatcgcatcggcctttcgaaacgaggagtacct

SEQ ID NO: 11430 - DNA, 457 bp, Homo sapiens
aggtacagatctgggaactaaatattaaaaatgagtgtggctggatatatggagaatgtcgggcccagaaggaaccgtatagatcagatattacaacagctttgttttgagggttagaaatatgaaatgatttggttatgaacgcacagtttaggcagcagggccagaatcctgaccctctgccccgtggttatctcctccccagcttggcttgcctcatgtcatcacagtattccattttgtttgttgcatgtctttgtgaagccatcaagattttctcgtctgtttttctttcattggtaatgcttactttgtgacttcatttcaaatctgtaatcccgttcaaataaatatccacaacaggatctgttttcctgcccattctttaaggaaccaatcaattcattttctaatgtacttcctttacaagcgggaccaggcacatgggcaggcttat

SEQ ID NO: 11431 - DNA, 461 bp, Homo sapiens
gccggggtccgcggggacacacacagcacctgcacgcagatgcacacatctctagtcaaatgaggctctcagctttttgataggggctttttgatacgtgtataaccaatactttattctcactgtagtcaaggactcattgcaattcagaaatgagaagctgatccggaactccactacagctcaaagaaattctcgaatgttctcacctattaacagttattaaaatggaagaagctggggatgaaattgtgagcaatgccatctcctacgctctatacaaagccttcagcaccagtgagcaagacaaggataactggaatgggcagctgaagcttctgctggagtggaaccagctggacttagccaatgatgagattttcaccaatgaccgccgatgggagtctgctgaccttcaaaaagtcatgtttacggctctcataaaggacagacccaagttt

SEQ ID NO: 11432 - DNA, 477 bp, Homo sapiens
ccgggcaggtacttaggaagaccacagctagatggacaaacagcattgggaggccttagccctgctcctctcaattccatcctgtagagaacaggagtcaggagccgctggcgggagacagcatgtcacccaggactctgccggtgcagaatatgaacaatgccatgttcttgcagaaaacgcttagcccgagtttcataggaggtaatcaccagacagctgcagaatgtagaacactgagtaggacagctgacctgtctccttcacatagtccatgtcaccacaaatcacaccaacaaaaaggagaggatttatttttgggttccaaaaaagttaaaagataatggaacctgcatttcttttagttatttttgggcccccaatatttccctcattttttttgttggttgccatggatgggtggtggacatgggcctttgtttttagaagggccgggttaacctttttggttttggg

SEQ ID NO: 11433 - DNA, 465 bp, Homo sapiens
aggtacgcgggggttgtatgtgggtcggcattcttgcatgatgggagtggccacctgctttcatattctgaagtcagagtgttccagacagaagaaatagcaagtgccgagaagttggcatcagaaaaacagaggggagatttgtgtggctgcagccgagggagaccaggaagatctgcatggtgggaaggacctgatgatacagaggtctgtaggccatgggaatgggtttggaattttattcaaagagctatgggaagtgactagaaggtttaaagttggggaagaggttttgtgtttctgttatatttgtgttttatacaaattactctggttgctgtgttgataggacagcaaaagggtaggagcagggacaccagttaagttattgcaatggttaaggtgagaggtggtgggcttgggcctaggcctttttggagtgaaccagctatttgcttggtttcc

SEQ ID NO: 11434 - DNA, 469 bp, Homo sapiens
aggtacatgcatgagtgaacataaagaggatgggattagagaagttctgtagcgaagtcctaaaatgattaaatgctgagaaacatgcaaaaaagcttcttagggcagctatcactgataggtatggtttagtgtgaatcctaataaacagtcgaatggattcaggactggacataaaatgataaaagggaccagaaaaagagaaccaagttttttgcacatagcatttattatcattagggtgtaaacatcatgataaattattgtaaatgataatagcacttttgaggccttgccatgtgccagccactctaccagccctttatctgacacgagagattccacttttgatcactgccacttaaaagcaaaatgctggccagttacacagaattagattgatttgtattgggagggccgtggggatttcagggatgtagggaaagttcttgcctgggcggccgttttt

SEQ ID NO: 11435 - DNA, 462 bp, Homo sapiens
aggtacaaaaatgaggcaggtgtatttttttccatctaacaggggatgaccacatgaaaagaactggtggcctgtgtgtcccatggtcttacagggcagtggtggaaggtggcccggtcatccactttctggggaggcagaaccagaagcaccagttggacaactgcatatgatttcatgtatttggaaataaaaactcatggatagtgactggaagtggatcagtggttacccataaattcattgccaagtgcaaagtccagacgaatatttcctaggttttcttccaggatttttatagtcagaggatgtaatcttatgccaacgggtcttaataatcaaatgacttcacagtgagaatcattactctgaaaaattgatttttgttagaatgatgggaaatttaaatatttgaaagtgaaaacacatgccacctttttcctagaactctgcaaggcaaat

SEQ ID NO: 11436 - DNA, 471 bp, Homo sapiens
aggtactggaacagggataagttcttggattaggtgccaacatacctataaaagctgatttttgagtaaattattgattctaacatatgtaatggatttggtgtgataattttctgatctttaactataagtgactttttattctccaccagaaaagataaatgactgagaatgtaagtctgcgctctgattaacacaatggagaaacggaaaaactatctctgttaaaaactgattcctgtcattcttctgatatcaaataagaggaaggaaaataaacttttttgtgtgtagatagaaaaacatacctgaggccaggtgcagtggatcacgcctgtaatcccagcactttgggaggccaaggcgggcagatcagctgaggtcaggagttcgagaccagcctggccaacatggtgaaattaacgtctttactaaaaatacaaaaattatctgggtgtaaccggtgcctgt

SEQ ID NO: 11437 - DNA, 480 bp, Homo sapiens
aggtacgatttacctttacacctcaaagttttttagatgtgagcagcgctggattatggcaatttaccttataataactcaccatagttggctgttataagaataaatattgttcttctaagatttttaattagttgcttcagttactacatttttttctatttttttttttaaatagagatgaggttttgctatgttgcccaggctggtctcctggactcaagcaatctcccacttcaggctaccaaagtgctgggatttacaggcatgagccacctctcccagtctcagttattattttaataaatgagactgaacgtcctcttataaggctcactcccttgttcctactacatttgctctggttaagtatctctttaaattcttcagttaagatcatcccttttatcagaaacctagacaccaccaagtagctttcttcccttttaatttttctaggggatcactattatactttaa

SEQ ID NO: 11438 - DNA, 483 bp, Homo sapiens
aggtacattggtggaacaattcagtatgatgtattttctgtggtttgaatgtattccctccaaaattccagtattgtcaatgtgatagtaataaagaatggggcgtttaagaggtgattagtctgtgaaggctcctctctctccttactggaagtaagaaccttatgaaagaggtgccacgcaacattccactagcttgctctcctgtccgtatgccatgagaaaacatgaagttcctcctctctggaggatgcagccctcaccagacaaccaaacctgctggtgccttgaatcttggactttctggagccttgaatctggaaagttcccagcttccaaagctgtgaggaaataaatttccattcattataaattattcagtctcagttattctattatagcaaccaaaacgtctggtttcattcaggcttttgggcattaaacattagtacctgcccgggcgggccgttctaaaacaatggg

SEQ ID NO: 11439 - DNA, 437 bp, Homo sapiens
aggtactatggggaatgtggaagtggaaagtagtgtggagttttggaaagatatttctgcctaggagagtagttgggcatgaggacaggactaagaaagagtgagtgaaggaaaaggtgtgaagggagcagaaaagtggaggggggactcgaggtttggagacttgtccattaattcctacaacagacacctgggaggactgggtggttcctgaaaaattaggtaaagcagagtaggttgcctggtattaatttaaaaatatactggcctacctgccaccatcagggttacccttggcttggatgaggcaaaggttagttgccagggtgttctgttccagggcaccatcattcttcaatggcaaggccgatgagatataagtgggaagggtttggcttgctcaagaagggattggggcaatcccttgtgggagctga

SEQ ID NO: 11440 - DNA, 439 bp, Homo sapiens
  misc_feature 233, 290: n = A,T,C or G
ccgggcaggtaccaaatgaagtgtgaagacaaggccatccaccactttatagagggtgtaaaaataaaccagaaatcaagggagaaagaaaagatgaaagacaaactgcaaaaaattgccaaaatgcgactttctaaaaatggagcagattctgaggctttgcatgtcttggcattccttcaggagctgaatgaaaaaatgcaacaagcagatgaagactctgagaggggttntggagtctggaagcctcatcccttcagcatcaagctggaatggggaatgaagaaagnagatgttggtgcccactaggctactgctgaaagggagctgaaattccttcaccaagttggtattcaaaatatgtaatgactggtatggcaaaaagattggactaagacactggccataccctggacaggggttatgttaaccaccgaat

SEQ ID NO: 11441 - DNA, 432 bp, Homo sapiens
ccgggcaggtacgcggggcagtctttatgggaaaaagtttgtgaaaatcagagaaacctgaacgtggaaaccaccagaatcagccactggaaggattatgtgaatgtaaggctagaagctattagagctgagtatcagaagatgcctgcatttcatcatgaagaataaaaacataatttggagatgctgaaaaagaaggggaaagaaatttttcatcgacttcatttaagtaaagccaaaatggctcacatgagggagattttaagaggaacgtatgcggagctgatgaaaatgtgccataaaccagatgtggagctacttcaggcttttggagacatattacacaggagtgagtccgtgctgctgcacatgccccaaccttttaaatttaaacttagggcatggcccatactggactgatggacggctcaa

SEQ ID NO: 11442 - DNA, 435 bp, Homo sapiens
ccgggcagttacatgctccttgctagtagtcctagtctttgaaccctcagagcccaggttccaaacatgattgaagccatcttgaatccatcaaaccaacccatctgccagatgagtacgcgggtcctatattccgttcaatgtaagctctatgagaccaagaacctgggcagttttattcaccataagtattccaagccctagtggttcctggcacattttgtattcacaataaatatttgttaagtcaatgaccagatgaatggcttttaaactcaagatagtttttttttggtttggtatttatttatttatttactttgacagacttttgctcttgttgcccggctggagtgcaattggggcgatcttgggttactgccttaacctcccgagtagctgggattacaagggccccatacaccatcctggtta

SEQ ID NO: 11443 - DNA, 437 bp, Homo sapiens
aggtacatctacctaaaggactattatgtggaataatacatactaatgaagtattacatgatttaaagactacaataaaaccaaacatgcttataacattaagaaaaacaataaagatacatgattgaaaccaagttgaaaaatagcatatgccttggaggaaatgtgctcaaattactaatgatttagtgttgtccctactttctctctctttttcctttctttttttttattatggttagctgtcacatacaactttttttttttgagatggggtctcgctctgtcaccaggctggagttgcagtgggcgccgatctcggctcactgcaacctccaatcccatgttgaaagtaattcttctgcctcacctcccgagtagctgggactaaaggaacgtgccaccatgactggctattttctgtattttttagtaag

SEQ ID NO: 11444 - DNA, 440 bp, Homo sapiens
aggtacgcgggggagttcagtccttaagaaggaaaattgagcaagtatttaattggttggacattgcataaaagaggtccatatccaggctaactctagaaattttattctcaaacttagttggcctctttttcttctgtcagaggaccattcttagtggcactggggaaatcttggcacccagaagaattcaactgcgctcactgcaaaaatacaatggcctacattggatttgtagaggagaaaggagccctgtattgtgagctgtgctatgagaaattctttccccttgatgtgggtcgatgccaaggaaagatccttggaagaagtcatcaatgccgttgaaacaaactgggcatgtttcctgttttggggtgtgtagccctgtggaaagcccattcggaacaatggtttttacttggagggtggggaaaccctct

SEQ ID NO: 11445 - DNA, 504 bp, Homo sapiens
aggtactccagcctttccatgactttttggacagtggcgcttacctcctgaggatatgggtcgcctctgttgaccatctgcagcagagacacaatgggtgttcagccattaacactgggaaggccccgagagcctctgactatgtgctgacacagtgtgagccctggaacaaagccctccctttctgtctcctgcaccaatgatgatatggtctgagttcaatcaccaaacttccttagttccacttcttcatcagccaaagaaaaacaccgcagtcaatcatctctaaggtccctaagagggtggagaattccatgttccacgttattcatgggggactcacaagatctaactaaagaggatggttctctctccctcatccaatagatgaagaagacacagaaaagcttggcaggatgggaaacttctaccctggtggtcatgtgtgtagttgatttcacaacaggaactgaaacagtgctgcatggacaatgtacctgcccg

SEQ ID NO: 11446 - DNA, 918 bp, Homo sapiens
  misc_feature 882: n = A,T,C or G
ccggcaggtacttcccctttatactcttctgtatatttgattttttttttttttaagacagagtcctggctctgtcgcccaggctggagtgcagcgacatagtctcagctcactgcagcatccgtggaggctgaaacaggagaatccatgaattttaaaaaatctaaacatgtaattttaaaacgggcttaagaagaatgataacagttttggtcttcttttttatcaaccatgcttttattttacttgaatctcgtgccaattgctttgtaatattaaagtaggatttacacaagtggaatttagaaaagatgataatctgtcaaatctgtcaataccaattagaatgtaatcaagaaattaggatagtggaggtttgagcacgtaaaggctcacccaaattcaaagccattacttgatgctgagaggggaatatttctgggaaggtaatttttaaaaaattaaagtcacaattttaaatttgtatattgtcctaataaaagaaatctcaactcatgggacaattttgaaattaaaacgctaattggtcctcattcagtgatgaacaagtcaaaacgtttcataacagaaagcctttaagaagaatcccggcccagaaaatgtccttttgaaattgccttcttccccatctctaatgcctatgttaaatttctgacttgcccattaagtaacagtgaggttttcctgtgccgaaattacaatttattgacctgtcacatttgaagaaattcaattatgtacccagaagcttgaataactggcatggttacctggcataagcgcttttgttgttcggtattaaactttatcaagaaattggaatcttaaatataggcggcaatgctggtgctcaaacgcccntctataaggggtatatttgctcttagcccgattacg

SEQ ID NO: 11447 - DNA, 512 bp, Homo sapiens
  misc_feature 346: n = A,T,C or G
aggtacgcgggataaaatagtatgatcaatcacaatgtccatctttagacagttggttaaataaattatctggtctttgaaaagaccgtgctgggcgcggtggttcttgcctgtaatcccagcactttgggaggctgaggcggcagatcacctgagatcgggagtttgagaccaagcctgaccaatatggagaaaccctgtctctactaagaatacaaaattagctgggcatggtggtgcatgcctgtaatcccagctacttgggaggccgaggcaggagaattgcttgaacccgggaggcagaggttgcagtgaggtgagatagcgccattgcactccagcctgngcaacaagagcaaaactctgtctcaaagaaaaaaaaaaatgatggagctccgaatgtgcttaagtggaaaagatatctattgaaatatgggtggttttttaaaacacaaaaattatagaatatgggatcccgtgtgtgtgtgtgtgtgtgtgtgtgtgtgtgtgtg

SEQ ID NO: 11448 - DNA, 365 bp, Homo sapiens
aggtacaaccaatctggagcttacttaggattttctagtgcagtagttctaaaatatggtccctggatcagtagtgttagcatcccctgggattttgtgttttaacaagttctctatatgattctgatgcacactaaagcttcagaatcactgctgtagtataaactgtgatggttctcagccttccccactgctggcttaggtgtttgctttcttgggtctactaagtcagttagttctttatctgtttcctttccagtttccaaaatttttgttgcaatcttttcctctccagttttcctcatatgtgtgaatttatatctttttttaaaaaaatctctttattgtataagagccactgcacc

SEQ ID NO: 11449 - DNA, 821 bp, Homo sapiens
  misc_feature 619, 698: n = A,T,C or G
ccgggcaggtacgcggcgaggggaggggagagcccgagcgctgaatttgttgctgggaaacccggggctaaggttgacaacaggctcgagattgtcctgggtcacataatgccagctgagcgtaaaaagccaacaagtttggaagaaaaagactctttaccaaacaacaaggaaaaagactgcagtgaaaggcggacagtgagcagcatggagaggccaaatgacgatatcaagctcactgccaagaatgaggtcagcaaggcccctgaagacaagaagaagagactggaagatgataagagaaaaaaggaagacaaggaacgcatgataaaagacgaataaaaggtgaaggcagaggaagaatcaaagaaaaaagaagaggaagaaaaaaaagaaacatcaggaggaagagagaaagaagcaagaagagcaggccaaacgtcagcaagaagaaaaagcagctgcttagatgaaagaaaaagaagaatccattcaacttcatcaggaagcttgggaaccacatcatttaagaaagggaactttgtagcaaaaaccaaaatgctccggacaagccgaccagagaaaacttcttcaggcgccttgactcaggtttgagaanaatactgttttggcaagaaccttaaactttacagaaccacagagagacttctttgtccatgaatttaagggcctaaatntaaccaattctttgcaaagcctgtagccttcattgtggaaccaaaactaaaaatctctgatgtgaaccgggctgtgcacccttggttcttttttcacaacgttatgctaccttggcccatact

SEQ ID NO: 11450 - DNA, 497 bp, Homo sapiens
tcggaggctccaccgccgtgccggtccaccggtcaggtacagatcctgtattgcccacccttctctattgctttgtccccgcgcgccctctgttttgcctaaatgggttccaggccatagccaccgactctcgctttgccttctggcctctcggcagtgcgcttcagcaccattgcgccaggtgacgctgctgaaaacagctgagtggccggcactagtgcagctggaagccaaggcccataattctcaggaatctgcactgtacccaggcgaaaagcccaagggctctccccacagcttcccaacatccgtctacagagtgtttaaatattagacttattaacctgtagagatggagagaatcaaagaaatcacaaggtatctctgagggaaaaagaagagcaccagcagtaaatcacttaagagtattgaaccagcaagccagggataggagaatggaatggaaactgacaggatgactgcagaggatggtacct

SEQ ID NO: 11451 - DNA, 814 bp, Homo sapiens
  misc_feature 662: n = A,T,C or G
ccgggcaggtacagcaatgacttcagtaagccaggcatccttggatgtctccatgataataataattcccttaggaccaatttgtgcagggttgctggtaataatggcgctatttgcaactaggtgtacccgcgagaaagaaggacacttagatcctataactgcagggtggccgaatcaacttaccagcaccacccaaaaaggccatcccggcagattcacaaaggggacatcacattggtgcctaccataaatggcactctgcccatcagatctcatcacagatcgtctccatcttcatctactaccttagaaagagggcagatgggcagccggcagagtcacaacagtcaccagtcactcaacagtttggtgacaatctcatcaaaccacgtgccagagaatttctcattagaactcacccacgccactcctgctgttgagcaggtctctcagcttctttcaatgcttcaccaggggcaatatcagccaagaccaagttttcgaggaaacaaatattccaggagctacagatatgcccttcaagacatggacaaatttagcttgaaagacagtggccgtggtgacagtgaagcaggagacagtgattatgatttggggcgagattctccaatagataggctggctggtgaaggattcancgacctgtttcttacagattggaagatttcaacacctataaaatcttcaccgagaagtcaaggtcctggacatttttaccatgctggatgcaacactggccccaccctttttgattattggagtaccatgttctttcagggaagaattccaa

SEQ ID NO: 11452 - DNA, 565 bp, Homo sapiens
  misc_feature 120: n = A,T,C or G
ccgggcaggtacaccactgtgcctgctttgaatcctttacgaagagaaaaaaaaattaaagaaagcctttagatttatccaatgtttactactgggattgcttaaagtgaggcccctccncaccagggggttaattcctgtgattgtgaaaggggctacttccaaggcatcttcatgcaggcagccccttgggagggcacctgagagctggtagagtctgaaattagggatgtgagcctcgtggttactgagtaaggtaaaattgcatccaccattgtttgtgataccttagggaattgcttggacctggtgacgagggctcctgttcaatagtggtgttggggagagagagagcagtgattatagaccgagagagtaggagttgaggtgaggtgaatgaggtgctgggggtgagaatgtcgcctttccccctgggttttggatcactaaattaaggctcttctggatgtttctctgggttggggctggagttcaatgaagtttatttttagctggcccacccaaatacactcagccagaatacctaagattaataccttgggcc

SEQ ID NO: 11453 - DNA, 808 bp, Homo sapiens
  misc_feature 229: n = A,T,C or G
aggtacgaaaaaatcaggctactaagtccactgttaatatagacgcagaccaattgttaggaacaggtccaaattggagcaccattaaccaacaatcagtgatgcagaatgaggctattgaacaagtaagggctatttgcctcagggcctggggaaaaattcaggacccaggaacagctttccctattaattcaattagacaaggctctaaagagccatatcctgactntgtggcaagattacaagatgctgctcaaaagtctattacagatgacaatgcccgaaaagttattgtagaattaatggcctatgaaaatgcaaatccagaatgtcagtcggccataaagccattaaaaggaaaagttccagcaagagttgatgtaattacagaatatgtgaaggcttgtgatgggattggaggagctatgcataaggcaatgctaatggctcaagcaatgagggggctcactctaggaggacaagttagaacatttggggaaaaaatgttataattgtggtcaaatcggtcatctgaaaaggagttgcccaggccttaaataaacggaatattattaatcaggctattaacaacaaaaaataaaaggcctttggcctggttccccaaatgtggaaaagcaaaacattgggccaatcaatgtcattctaaattggataagatgggccacccattgtttgaaaacaggaaaggggccagccttaggcccccaaacaactgggggctttccaagttaaactgttgtccctaaggttttaaaggacaccaaccctaccgaaataccaccctttt

SEQ ID NO: 11454 - DNA, 451 bp, Homo sapiens
  misc_feature 192: n = A,T,C or G
ccgggcaggtacgttgaaatattaggggcaggttcccccaatatctggcgcccaacgtggttttctttttcctaagtgcatgtgggaacccgattccctttggtaggtgcggagaaatgttcatcggtccagtccacagaaatgcttgttcggctccccgacgattggtgagttgtctgtgtattgtccggngtaactatgggtcacgcagagtctaaacattatgcttatctctgctatattaaattcctgttaaaatgggggagttcgggttcccatggaaaatatggtcaccctattcagggcagtggaagaacactgtccttggtttcctgaaaagggaacgttagatgtggaactatgggatcatgttggtgcaaaattccgagaactggtcccaacaggaaattatgttcctgtcactgtttggggtgattgggccttggtacct

SEQ ID NO: 11455 - DNA, 345 bp, Homo sapiens
aggtacaccatgaagtgataagtattaatcattcatttcaatatgtccaatggaccaaaaaaggggcagatgggtattaatgattcccaaaataaatatcccctgttttaaaatttggctaaagagtagctttgcattttcctggaaaagaggttggtgggaaaaaaaagataatatttgaacctgtacttaaatgggcggcatttcccaatgactgaattgtagtagaatctgttctcattggcacgacacaatcctctgtctgctggagtgagacaccatgaggggccgtgaaattcaaaaaggctgggaaccttggttgattgcggagtcagggagttattc

SEQ ID NO: 11456 - DNA, 348 bp, Homo sapiens
  misc_feature 348: n = A,T,C or G
aggtacgcgggacacacagcacctgcacgcagatgcacacatctctagtcaaatgaggctctcagctttttgataggggcttttcgatacgtgtataaccaatactttattctcactgtagtcaaggactcattgcaattcagaaatgagaagctgatccggaactccactacagctcaaagaaattctcgaatgttctcacctattaacagttattaaaatggaagaagctggggatgaaattgtgagcaatgccatctcctacgctctatacaaagccttcagcaccagtgagcaaggcaaggataactggaatgggcagctgaagcttctgctggagtggaaccn

SEQ ID NO: 11457 - DNA, 334 bp, Homo sapiens
aggtactttttttttttttttttctcaagattatggtataaagttttattttaaataacatacctattaacataccaccacatgggaccaaccttatcccagaaactatattcattactgaccctaacagcaaagctcaggaacttttatcatttattttatgtagtcactcattcatttattccctcattcagcaagcattcaaccaacaaggcacatggaatttactacttatcattaactaggctggcacttgggggtgggggttacaattatggtaaaataaggtaattttctataatgattcaaaatgtagggggagcaagaaagaatg

SEQ ID NO: 11458 - DNA, 347 bp, Homo sapiens
  misc_feature 310, 311, 313: n = A,T,C or G
ccgggcaggtactgcttttataatttcttcagataaggtcattttaaaatttaatccagtggttttcaactaggggacaattttggtccccagggaacatttggcagggctggagacatttttggttgtcatagcttgggggagagttgctactggcatccagtgggtaggccagaggtgctgctgaacatcccatagagcatagttcctcacagtgcagggttatcctgcccaaaatgccagtggtactatggagaagagaagtgacttgtgagtcctttgccaggggtaagtgggggggaggggggcnntntatctttatgaagtgttcattctaatgaccagtg

SEQ ID NO: 11459 - DNA, 350 bp, Homo sapiens
ccgggcaggtacgcggggagaagaaatggcaagtgccgagaagctggcatcagaaaaacagaggggagatttgtgtggctgcagccgagggagaccaggaagatctgcatggtgggaaggacctgatgatacagaggtctgtaggccatgggaatgggtttggaattttattcaaagagctatgggaagtgactagaaggtttaaagttggggaagaggttttgtgtttctgttatatttgtgttttatacaaattactctagttgctgtgttgataggacagcagaagggtaggagcagggacaccagttaagttattgcaatggttaaggtgagaggtggtggctggg

SEQ ID NO: 11460 - DNA, 446 bp, Homo sapiens
aggtacgcggggtttgaccacatatctgggcaccgtggcccagccaagttgacatattaaattaacccttgtagtccctttttaaacttacacccattgcaatttaggtcgctgctatggagcaagccacagaacctggcctttaactcatttacccgggctgacccattaggcctttgagtcaccaacacctcactagagaacaagcataatgaagaagctctgctgtaattcgttaatgttaacacttttttctttaaagatgtctcatgctgagcttcgtggcacacgcctataatcccagcactttgggaggctgagatgagaggatggcttgagctcagaggttcgagaccagcctgtgcagcatagtaagattccgtctctacaaaaaagaaaagaaaaaaagttgtctcataattattaaaaaccactattccagatca

SEQ ID NO: 11461 - DNA, 802 bp, Homo sapiens
aggtacattttaacagagggatataacaccattaaggctcatggacttaattcctgtctccagggctatgtatctttcaactgccatactgaggacttttcagccgtggtcccggatgtctggccatacccatcacttgaaacaactgtgtgatagtgagagcactgactcctaattttcagagactgaccaaatcaacctcacgtctttgccccataatactcctttttcttaagtcctacaccactggtttccctttctttgaagggcgtctgtattttgccaaggttaactctaagcttgtgctcttaattccatcctcttgtgctttctttgagaatttcaccttcccatttctttcttaccagcttctagctcctctgcctacaaatgtgatttcttcctatcctaaaaacaacaaaacccaaataaccctcctctgactttgcactagctgagctgttctccatcttctttctttttcttcaccatctgatcttaagatatgtctgcattcatgaactgccactactctctcactctcaaatccagtgcctctactctcacaaatccttgattctttaatcctgcatctgccctgaccactttatatcaatagatctgtcaaagatttaactacaacttttcaagtgccacattaacttggccttttaactcttccattacaaaaaactgcagcggttgacactgagacaactttcttcctctttgtaaatattttgatcactggcacaccaaaacatgcaagccttaggtttccttcctctctttgagccccggt

SEQ ID NO: 11462 - DNA, 352 bp, Homo sapiens
aggtaccccctgaccccttcctccgaatatacttttgtctcttgtcttttattcctgtgttcaccccactgtgttcagtccccctaggtctgtgcgggatacaagtggcgcccaaacagggacagaattgggtgctctacaccctctccttgagcagggactggcctagtgacttacctctattcagaatacggcaaaggcgttggagtctcacctccttaattaagctatacatgtttaaaaaaattattcaatgagaattgttaaagcacagtaaggaagactttattcagggccattatgacaggtatatagacaaatgtaatgggattttgcagtggtagagggtgaa

SEQ ID NO: 11463 - DNA, 557 bp, Homo sapiens
gcacttacaattgcaccccatcctcctacccactctgatcccagaggagagtgcttctgctgtaacctctaaggcacaagtgggtcccaaagtccttaaatatggagggatgtggggaagcagtggtgaagatgcggcaaaggtcagcaggcaacactggtctttgttgtaggtaaccttcatctagagattcttctagttctttccagatttatcttctaaaaactaactggtatggacatattacagtcctgtaattctttcttctaggtcatattgaacattccagatacctatcattactcgatgctgttgataacagcaagatggctttgaactcagtaagtggttaattattaccttcctggccttttctttgttcccttgtcccttctgttattcccaacattgtttggggtcagcaattgcaagggctatttgtagggaacgccgggccacgctgatgctgttcaaggcaccctctagaaagagtgagtcaggtgcgcagccacacaactgcccaagtgagtcgcaagagccatggctgttgggtacct

SEQ ID NO: 11464 - DNA, 624 bp, Homo sapiens
aggtacagcagaactgcatgatcaggtaagtgtgctgagctgttgatcctcctcattcctgagctgggtgtgtagagacaagagcaggagactaggggctgatgatcttttagtcacatccatttaccccagagtgctctatacaaatagcatttttatgtattccccggcatgaaaaagctggaaagcaccaagagaaggttggtgttaaacaacatgaagttttggaatctcagaaagtctgaatgagttaatttttttgagctttagcatacttatcattttataatgaggataattccttaaagcaattctgtccaatagaactttgggatgatagaaatgttctgtatctgagctgtccaatggtgtagccactagtcacatgtggcttttcagcatttaaaaaatggctagtaaggttggggcacagtggcttatgcctgttataccagctggttgggaggccgatgtgggagaactgcttgagtgtaggaatctgaggctggaataggctttatataatgggcccagttcactccaactgggtgacaagagtgagacattggcttttaaataatttaataaatatgttgagggtccctggccgggcgggccgtttaa

SEQ ID NO: 11465 - DNA, 421 bp, Homo sapiens
aggtacagagtgatgccaggcgttcatctccccactgagctcctgctgagtgtttgcctggggccaggtcctccttccgggaagtcattttagctggaaagaacagggtgggggcgggtggcaagggatcagagcatgagcgtttgagggcttcgtcaggggcagtgaggagcctctaaaggactctacatttaggaatgacagagtcaaacaatttaacaaagccctaaaggtccctgccaggaaagaatgagccccatgtatcaccataagcaacttcttagaaacataacccacccctgtcatcccagcactttgggaggccagggagggaggattgcttgaggtcaggagctcgggatcagcctggtcaacatggtgagaccccatctttgcaaaaaaaaaaaaaagtacctgcccg

SEQ ID NO: 11466 - DNA, 379 bp, Homo sapiens
aggtactagttcccataaaatacacaataaataccagttcccattttcactatcactatccatacctacttcaatctattatctccacatagcagacagagtaatcttaaaaatggtaatttatagacctgtggtacggccgggcgcggtggctcacacctgtaatcccagcactttgggaggctgaggcgggcagatcacgaggtcaggagatcgagaccatcctggctaacatgatgaaaccccgtctctactaaaaatacaaaaaagtagccgggcgtggtggtgggcgcctgtagtcccagctactcggaaggctgagccaggcaatttatggctgggcacagtggcttatacctgtaatcccagtacctgcccg

SEQ ID NO: 11467 - DNA, 635 bp, Homo sapiens
  misc_feature 2, 565: n = A,T,C or G
gnggccattgagactgccatggaagacttgaaaggtcacgtagctgagacttctggagagaccattcaaggcttctggctcttgacaaagatagaccactggaacaatgagaaggagagaattctactggtcacagacaagactctcttgatctgcaaatacgacttcatcatgctgagttgtgtgcagctgcagcggattcctctgagcgctgtctatcgcatctgcctgggcaagttcaccttccctgggatgtccctggacaagagacaaggagaaggccttaggatctactgggggagtccggaggagcagtctcttctgtcccgctggaacccatggtccactgaagttccttatgctactttcactgagcatcctatgaaatacaccagtgagaaattccttgaaatttgcaagttgtctgggttcatgtctaagcttgttccagctatccagaatgcccacaagaattcaactggatctggaagaagaaagaaactgatggtggtaactgaacccattttgaatgagacctacacagggctgatgtcattcattgggnaccggaacaaacttggctattcccttgcccgggggagtattggttattgagagtcttttggtaccttggg

SEQ ID NO: 11468 - DNA, 836 bp, Homo sapiens
aggtacttactaacttttagggctgtgtaagtgtagtgttgtttgaagctctgtgtgtgtttctgtaaagactggtctggaaaactgaccagaggaaaacatttccttgcttttcctctgctctcacatgaaaacaacaaacacagttagagtcaacaccaaagacttcaatgacccccagatatgtggggatttccccctaccagcaagcaagcaatcaattctgcagcagacactaactgtgtatcctccaatttaattctgacactatctgcctggaaatagcatcagatccctcatgttgagggctcagtccccaagactgccatcccttcagacaccatgtgcaagtctgggcctatagaacttctgaccagctgagcttcaaattggcattcccagacatttacagtggctcatggctggaggatcacttgaggccaagagtacaagaccagcctgggcaacagagtgagacctgtcttaagaaaataaaaagttaaaatagctgtgccctgagggacctattaatatttctattctaacgacattatattaaagtatttgatacgtatatatttgatgtagtttctgatatatcactgaatgtgagcttaggaatatgttatatatgagtgaaattatttagataatatgtatgaggtattatgtgacatataaatataatatttacgctaaatatttgatgtataagatgaacgtaatattttatattaatgacatgaattaggatcgatgtgaggtaatacgctatttatgagagttaagtgactgtgaaacgtgattaatcattaatatattagatataataattc

SEQ ID NO: 11469 - DNA, 239 bp, Homo sapiens
ccgggcaggacgcgggtgagaatggagtcaaaaaggattcaggtgtttagaggagctgcttttcattaggaccttggagagtcccctcagttttgacacccttgtttcaccacaagaaagcacccgacaccctgggttgcatacttactactcaggggctttccccccagctttcggagcactgaattattgtgagctggtgactctgcaggcctgagtggtattagggttgtggaatg

SEQ ID NO: 11470 - DNA, 845 bp, Homo sapiens
ccgggcaggtacgaaaaaatcaggctactaagcccactgttaatatagacgcagaccaattgttaggaacaggtccaaattggagcaccattaaccaacaatcagtgatgcagaatgaggctattgaacaagtaagggctatttgcctcagggcctggggaaaaattcaggacccaggaacagctttccctattaattcaattagacaaggctctaaagagccatatcctgactttgtggcaagattacaagatgctgctcaaaagtctattacagatgacaatgcccgaaaagttattgtagaattaatggcctatgaaaatgcaaatccagaatgtcagtcggccataaagccattaaaaggaaaagttccagcaggagttgatgtaattacagaatatgtgaaggcttgtgatgggattggaggagctatgcataaggcaatgctaatggctcaagcaatgagggggctcactctaggaggacaagttagaacatttgggaaaaaatgttataattgtggtcaaatcggtcatctgaaaaggagttgcccaggcttaaataacagaatataataaatcaagctattaacagcaaaaaataaaaagccatctggcctgtgttcaaaatgtggaaaagcaaacattgggccaataatggcattcttaatttgattaagatgggcacccattgtctggaaacagaagagagggcagcttaagccccccaacaaactggggcattcccagataaactgtttgttccttagggttttaagggacaacacctcctcaagaaataaccccactttaggaggtaggcaattcaaacattcaacgctttct

SEQ ID NO: 11471 - DNA, 811 bp, Homo sapiens
  misc_feature 489: n = A,T,C or G
aggtaccaaatgcggtatggggggcataggcagcactagagacatgagagttgattgtgatcacataaatcacaattacttatttgtcagacggcaggcagaggtcaggggcatggggtatggccagggaaaagagaaagttattggtccaagaagggttgcctcatgtcttggcttctggaacattgaaataggatgtaagagtgaaggacacatatgcacacacacacaaacacacatacatgcacacacatgcatgtatacacccatatacacacactcacatacctgcacttgtggggagaggggagaagcaaataataagtgagaaagattggatcatgggagagaggcttgagaagcttgaagcttttgagacatgaggagtatgaatcaacctgtcataagacaaccaagagtcattcttccatctttgtttttcccatcaaacactagtttatgtgtaaaaaaaataaagaaacaattggngatatgatattttttttctcccaacagacacttttgttttaactctaagtctttaatttcttctcaaaacaacctgtggccaaaactgggttatttggtgatgtccaagatccagaaaatccatagtggccaaaatatatacgtgacttcttggaattttgcctctaaatttgaacatttttatttttccagttttgttttccaaattctggtttccagtggccagagcttttaaatgatccaaaaggtattttcttttaatcctaaactcattagaaagatgggttaatgtagtatgtgcaaattatatataatttccgtt

SEQ ID NO: 11472 - DNA, 838 bp, Homo sapiens
aggtacctgtcagtgttcaatatttaacaaactccagttaaacaggtaagaggtcagcagtagcttataggccttggttctattatccatgtgcccaactgcagccatcgtgggctggtgttaaaattttcctttcaattgtcatttttctaataattgcaatcagtgagaggagaagaaaaagttcaagggaatgacctgacctttcaccatcctacacaggagatgactgatgacatgggttcatacactaatgtatatcgtatattctccaaagaccctcaaaaatcacaagaagttttgaaaaattctgagatcataaactggaaacagaagctccaaatccaaggtaacaagtctgaagaaatgggcaagcagctgtgcttctcaaattgtgtcttcaactaacagcattagcatcacctgagagctcattagaaatgtaaattcatagaaactctttgagctgggaaaagtggaacaatctgtggtgtgccaaggactatagctgattgtgggtgtaactcaactttgaaaaacactaagcactgaggtattaaataaggtgggaacaatgtaaattgagaaatgtatggtttcccccccccccccccgcctttttttcaggtttaaagaaaatttagggaggggaataaaacacattcatttttaaattcgggagggagagctttctaaacccttctttttgtcacgaaaattcttagacttattcaccaataaaacacacttggtacttggcttaaacagccaccccatatccaatttgaaaggtccttcccgggcggccttatagaatatgaggaccccggctcgaggt

SEQ ID NO: 11473 - DNA, 775 bp, Homo sapiens
aggtacagttatgcagtaaagccattaaaacatcagatatcgacaatcctagccactttgaaaagcaatatgaatctagttcttctagcactcacagtgatagtagcagtgacaatgagcaagactttgtttcctccattctaccaggaaacagaccaaattcaacaaatattagaccacagctgcaccaaaaaagcataatgaaaaagaaagctggtcacaaagctaactccaaacacaaagacaaagaacagacagtagtagatgtcactgagcagttaggcgattgcaaattagatagtcaggagaaagatgctacatgtgaacttcctttacagaaagtaaatactcagagttcttcaaatagcactttgcctgaaagattaaaagcgtcagaaaattctgaaagtgaatacagtaggtcagaaataactctagtaggcataagtaagaaaagtgcagagcattttaagagaaaatttgccaaatcaaaccaagtgtctaggtcagtgtctagttcagtgcaggtgtgttctgaagttggaaagagaaacttacttaaagttttgaaggagactttgattgagtggaagacagaagaaacattgaggtttttgatggcccagattatgccttgggtgtctgaaaccctaagctttcttggtaaagaagaacttgatgaaaatgacctaatcttagaaccagatggcatttcctgcccgaaggaatttaaaaccgcttgatgaagcttaactttagggctcagtcccgcccg

SEQ ID NO: 11474 - DNA, 398 bp, Homo sapiens
ccgggcaggtacctacacatggggagggttattgcaggggttggggagcagtgcatttaaattttgtttcttccctggatctttcacaaacaattatcggtaaggttcctccttccccttggaagcacagaaaagacactgcctatttgaaattatattatttggggttgtcttgggcttctcttacatggaggtgccaccttcattttgtagaacggtgtaagtggtttccattccagcatgaatgtggtcggtcacatggcagtggagtaaccaaattccaggtgttcctggaaacatttctagggtttggtatgttccagggaaaatgtcaaagacatcagaactataaactcccctgtgcttgtattggaagctatggccgtgaaaatgtacct

SEQ ID NO: 11475 - DNA, 482 bp, Homo sapiens
ccgggcaggtacgcgggggatgtgaactcttttaaactataacatggacactttattggaaccaaactttagttttctacattaatgagaaacactggtaactttgcttcattgaaaaaataattgcttgttctctgtcagatgcacttcgtcttagtaacatggccatggggaagacgaccacaggccagatagtcaatctgctgtccaatgatgtgaacaagtttgatcaggtgacagtgttcttacacttcctgtgggcaggaccactgcaggcgatcgcagtgactgccctactctggatggagataggaatatcgtgccttgctgggatggcagttctaatcattctcctgcccttgcaaagctgttttgggaagttgttcttatcactgaggagtgaaactgcaactgtcacggatgccatgatcaggaccatgtatgaagttataactggtattaggataattaaaaatggacct

SEQ ID NO: 11476 - DNA, 874 bp, Homo sapiens
ccgggcaggtacttgggatatattggtgaacaaaacagaaatgtctgtgccttcttggatcgtgtgttttagaattatgagaattaaatgaaaataaatattcaatatggtgccagacacatagaggtgcccacagtgtcttatctcactttcttcctgcttgccatatcttttccatcagggccaaagagaatgggaagtgggaagaaataaactatatatttcatttgtatagctgtggagagtaacaggccctgtgtccctttggggaggtcatgcgaactgggcatggccttctgtcaagaattattagaccaggcatggtggctcatgcctgtaatcctagcacttttggaggctgatgcaagaggattgcttgaggccagtagtttgagaacagcattacccaccatggcgaaaccctgtctctaataaaaatataaaaattagccaggcctggtggcacatgcctgaaatctcaagtcttccagaaggctgaggcatgagaattgcttgaacttgcgaggttgagggttaaattaatttgagattgggccaatgcacttccaccttggccaacgagatgagaactatgtgcttccgatggaaactatgtgacgagagttccctttgccgttattaaaactagtggagtcctccgatacggcatgaatttcgatgtgagatttagtcgagacctgtgacgctataagagggagccccgagacacaacatatgtttccattagagaggagataagaggacacatgacgtgatatatcgtcatgacacaatatcaggtggaaataggatgatcgtgatatgatgtcatatgatatactacgctgagacgctgagactaaagctcgaggcg

SEQ ID NO: 11477 - DNA, 411 bp, Homo sapiens
ccgggcaggtaccaacaacgcacttacccactgttttaatctaggttattcttgaaagcagagcctgagacaaaggtagacacattctatttatgagtctaacacccaggagcaggaatgagagataggggagtgaactggggaaaagggaaactaagtccgagcaaaaccagatactgctcttatcaagtggtccacccctattaatggctacataatgcagaactttctcaggattcttcttaaactttatctcagaactgtctgcctcagggagaaaggagaagtatttctccatcagcagccacctcctgtgtgttgagggctgctccttttgggcattaacccactgcctccaccaccccaaccctctgggctgcaaagagctagctgacagtccagctggtacct

SEQ ID NO: 11478 - DNA, 777 bp, Homo sapiens
ccgggcaggtacagacagaattaaagacctggagaaacagttcgtaaagcctgatggtgagaatagagctcgcttccttccagggaaagatctgaccgaaaaagaaatgatccaaaaatagacaagatgaatggctatcaaagaaggatcaaaaatgcaactgagaaaatgatggctcttgttgctgagctgtccatgaaacaagccctaaccattgaactccaaaaggaagtcagggagaaagaagacttcatcttcacttgcaattccaggatagaaaaaggtctgccactcaataaggaaattgagaaagaatggttgaaagtccttcgagatgaagaaatgcacgccttggccatcgctgaaaagtcttaggagttcttggaagcagaatatcgccaactgcccaatggtgtttacccaactgcagagcagcgtacgtatgcctacatcccagaagcagatgccacttcttacttttgcaaaaatcttatggggcctttggctccttttaaacccagtgaactctgagcccattattaggcacattaaggaaaccggtttataagccagttgaagtctgaatttgtgaaccaatccggccctttcagggaaaaaatttaacaagctttcctgttcctgggcgttttagaagtatggaacccacggctgtgagaattggagtaagcatatccactccgcgaacttagggggggcccgaaacccagtattattacatttgagggggaaaagcgcctatgggtatgaaggtatagg

SEQ ID NO: 11479 - DNA, 504 bp, Homo sapiens
aggtactaagaactactttgtgatcaatataaatctcttcatctcactgtatcattatgtctatatggtttccatttgttctaacagaagctgttgggatggaagccaaaaacaccctttgagacttgtattgaacagttttcatatgcaataaagataactttatgcacatgcagggaaataagagagttgaaaatggaaggaaaatatttgccaaattgtttaagtgttttaaggtgattactggtaacacagtaaagtttccaggggaaaattccatctctcaccctccacataaaaactcacagtcactgatcactgcttgccaagtttgagttcagctctattttctggctttaagattgaagattcaacagaatcaatttgagggcctgatgtgggtggctaacgcctgggatccccaaacttttgggaggccaagacgtgccgatcatgatgtcaagagatcaagatcattctggacacatggtgaacccctgtttt

SEQ ID NO: 11480 - DNA, 488 bp, Homo sapiens
ccgggcaggtacactcacacacacacacacacacagagctcttaacaactggtcctgagtagctctttgtaaattctttattgccaggagtgaaccctaaagtggctcacaagagtgccctatttatttcaattaacttcatggacaaacacatctcacagttgagatacgtgacccttgtgagatggcatgtttctaaaagaatgtcacatacaagagtgtagcagtcagctgtgcagctgatatctttgaaggccaccaaagaggacaggttggatgaggtcattaacattgacatacctctcatcaagaagaactcacttgaaagcagtggggtccggacaaccaaaaatgaagaggagaatgaaaaggaaaaggagctccagctggaatatctgctgggtgcctttgaaagcctgggcaaagcctggccgcgaaacgcggagacccaacgttggtatcgtcaggagctgtgcaactgatgtgtg

SEQ ID NO: 11481 - DNA, 481 bp, Homo sapiens
aggtacatatttttaaatccagcagaataaatgtgaatgttttgattacccatcattaaattttttaaaaaactatccctacttcagctgttggaaaatattatctggcaacttcaggtgacagattaactctgttgtttgttttaaataaagtttaaaggaaataagtatctaataccattttcaactagccatgcaaaattggcttctctccccaaatcctgtatttgaaaaaataactttaacataacgtttggcattaacttatatttgctcatcataaaaaaccaaaagaaatttttatatctcaaattggtaaactttacaaaatatttaacatatgaggaagaggtatatcttacagaattatttggctatgtcataaggcagtaatgaagatggaatttttcctatcataaatctgacataagtgaaagtctataacatggtcattctccataaatctgaaagcttgttggtg

SEQ ID NO: 11482 - DNA, 478 bp, Homo sapiens
aggtactccacacctgatcaagtgacagcgtggcgtcatgtcagccagcaaaatgtttgagtgacttttgagtaatggtggcatagaaggtagagggggttgaaggaaataataatgggaatttttttcctttcctatatattttagcatgtataatgcttcaactctctggtggaaatttggaacacaggatagtaaaatattccttttcctagagggtagtaaaagtggagtagaaagtaggagctgttagaatttccatgataaatataatttgattacatatgttggggtgggttccctctgagctgaggattttactttgagagttgtttcacaatggtatatttctttccagttttcagaagcaaatttagccttaagaatttgccctggccagtcccaatggcttatgcttgaaatcccaacactttgggaggcttaggtgggcggatcactaggttaggaaaatcagacc

SEQ ID NO: 11483 - DNA, 479 bp, Homo sapiens
aggtacgaaaaaatcaggctactaagcccactgttaatatagacgcacaccaattgttaggaacaggtccaaattggagcaccattaaccaacaatcagtgatgcataatgaggctattgaacaagtaagggctatttgcctcagggcctggggaaaaattcaggacccaggaacagctttccctattaattcaattagacaaggctctaaagagccatatcctgactttgtggcaagattacaagatgctgctcaaaagtctattacagatgacaatgcccgaaaagttattgtagaattaatggcctatgaaaatgcgaatccagaatgtcagtcggccataaagccattaaaaggaaaagttccagcaggagttgatgtaattacagaatatgtgaaggcttgtgatgggattggaggagctatgcataaggcaatgctaatggctcaagcaatgaaggggctcacttaagaggac

SEQ ID NO: 11484 - DNA, 483 bp, Homo sapiens
aggtacatctacctaaaggactattatgtggaataatacatactaatgaagtattacatgatttaaagactacaataaaaccaaacatgcttataacattaagaaaaacaataaagatacatgattgaaaccaagttgaaaaatagcatatgccttggaggaaatgtgctcaaattactaatgatttagtgttgtccctactttctctctcttttttctttctttttttttattatggttagctgtcacatacaacttttttttttgagatggggtctcgctctgtcaccaggctggagtgcagtggcgcgatctcggatcactgcaacctccacatcccatgttgaagtaattcttttgccttaaccttccgagtagctgggactagaggaacgtgccaccatgactggctaaatttcggatttattagtagagacagagtttaccatgtttggccaggattgttttgatcttctgcccttg

SEQ ID NO: 11485 - DNA, 486 bp, Homo sapiens
aggtactattttctacaagaagccttcaggggaaataatggatcctagttatgtcaaagaaaacaatgagacaaaatggcaacttcacagtcttcaagtaaatataatccctgatataaatggaaattaacatgtaattttgggggcaatagaaacaacaacaaaaacctgtgacaactctgtcctactcctttaaaaatgagctttgactctgtagtctcttaaggcacaaaacctgatagacggcatttaactggtggcctgcacctctgatttggattttaaaaaacaactattgacatttaaataaaaataaaccattttgttagagctggagattcttggataagttgggagaaatatttcaatgaactagcatcttggatgtataaatatttagtgccaaagttaaaaaaaagtacctggcctggcggtctatttagaactagaggatcccctcggctggaagaattctattataatgtt

SEQ ID NO: 11486 - DNA, 521 bp, Homo sapiens
ccgggcaggtacagcccacagaactgtgagccaattcaatcccttttctttttcaattacccactctcatgtatatctttatagcagtgtgagaacagattaatacactcctcctcagaaagcattcaatttagctgtgtctaaagtatgccaggtgttctagggtgttatcttagccaatacttcttcctcttcagcaagatctatttgcctatgacagcttgacctacatttcctaccatacttgttagtaacaagtagcccataacatcttgatggacttaatttgaatcaccagagggttttttagttttctacttttattttccgggctttttggaaacccacataaacttttttaattaattaaggtgccttgtggttttgaaaaaactgttaaaaaaaaaaaatgggaagggcttcttttaaaaaatttccattttttggcttgggcatggttgtttaaacactttgaaattttaactctttgggaggttgtggagagaagaatcatttgagcg

SEQ ID NO: 11487 - DNA, 511 bp, Homo sapiens
aggtacgcgggggagttcagtccttaagaaggaaaattgagcaagtatttaattggttggacattgcataaaagaggtccatatccaggctaactctagaaattttattctcaaacttagttggcctcttttttttctgtcagaggaccattcttagtggcactggggaaatcttggcacccagaagaattcaactgcgctcactgcaaaaatacaatggcctacattggatttgtagaggagaaaggagccctgtattgtgagctgtgctatgagaaattctttgcccctgaatgtggtcgatgccaaagggaagatccttggagaagtcattaatggcgttgaaacaaacctggggggttgtccccttttggggggttaccccgggggaaaggcccatttggaccaatgttttttaatttggaggagggggacaccttctgggagactggatattttgcccttttggggccctgccccggcggccttttaaaacacgggggggcccccg

SEQ ID NO: 11488 - DNA, 435 bp, Homo sapiens
aggtaccagttgtaaaattaccaggaaccgccgtgcctcaagatcgccctgttttctggcttcatcaatgactgcatgcagtgcaccaccctgtccactacgtgatgctgtaggattaagtctcacagtgggcggctgaggatacagcgccgcgtcctgtgttgctggtgaattagacgccatcgctgtgggttgctggtatggtgccgtgctatttggcacaggacacaccgcttgaggtctgtatgaacctctgaaggaggccgatactgaagctcggttggcagccggtattgataaactaccagcgggtgggtcttattttctaccggctgatattggggatactgtatctgagttggcatttgccgggatagagactctgtccctttctacttgattttctttgggggttgtgcttgaatacccgagttg

SEQ ID NO: 11489 - DNA, 788 bp, Homo sapiens
aggtactgggattacaggtgtgagccaccacacccgggctctgtgatttgtttgttttttgagatggagtctcgcactgtcatccaggctggagtgcaatggtgcaatctctgctcactgcaaactccgcctcctggctcaagctgattctcctgcctcagcactcccgagtatgctgggattacaggcacatgccactgcgccaaactaatttttgtatttttagtagaaacggggtttcaccatgttgcctgggctggtcttgaattcctgacctcaggtgatacttgccttgccctcccaaagtgcttgggttacaggcgtgagccagagcgcccagccgcctctgtgattttttaaattgtgtcactcacactaaatttaacagcacattttttgataactcattttttttggagtctttccaaaacattaaacctaagtttcaaagaaaatcgcaattctttttgatttaattaacttacctaattaaaataaccactggccataaaccagaacttggggaaaacttaaactcttggtaaggttaaaaacctcaattggaggggagttgaagttttccggaaaaaaaacaggaattgggggaaaaccctattaaacctggaatatttaggggtttttttggcataagcagggatgctttacaccagaagaggcctttggattggggaacttgggggggtaggttaagaaaacacctctaatttggggcccccccccccaaaaaaaataattctctgtggcccccccacaaaaaaaagaaaata

SEQ ID NO: 11490 - DNA, 790 bp, Homo sapiens
aggtacgcggggaatgccagatgatctatcattgtctcactttgcccccagataagaccatctagttgcagaaaaataagctcagagcttccactgattctacattatggatatggtgccgccgaagcaagcacaaagccctattttacacatgcctagtgatgcttcatggacaaggcttggctctgttgagtccagctaacctacctgagattctgagatttctcttcaatggcttcctgtgagctagagtttgaaaatatcttaaaatcttgagctagagatggaagtagcttggacgatttttattatcatgtaaatcgggtcactcaaggggccaaccacagctgggagccactgctcaggggaaggttcatatgggactttctactgcccaaggttctatacaggatataaaggtggctcacagtataaatctggtagccaagtaagaagaaacaaacactgatctctttctgcccaccctcttgaccctttggaactcctctgaccctttaggacaagcctacctaaatatctggtaaaaaaaagaccaacaacggccttaaaggaattcttaccattgaaggcttagactaatcttggcttaaaatggggttccaaattagggtctgaatattggggggaaggggcacaattgctaattttgggggggggataaaaggtagggatgctcacagggccccaaaccagggggggcttgcttgcgttttttggggggggaaaacccaaaaattttgggcggcccctttttgtggaaaaggccccg

SEQ ID NO: 11491 - DNA, 582 bp, Homo sapiens
ccgggcaggtacgcgggacacacacacacacagcacctgcacgcagatgcacacatctctagtcaaatgaggctctcagctttttgataggggctttttgatacgtgtataaccaatactttattctcactgtagtcaaggactcattgcacattcagaaatgagaagtctgatcccggaactccactactagctcaaagaaattctcgaatgttctcacctattaacagttattaaaatggaagaagctggggatgaaattgtgagcaatgccatctcctacgctctatacaaagccttcagcaccagtgagcaagacaaggataactggaatgggcagctgaagcttctgctggagtggaaccagctggacttagccaatgatgagattttcaccaatgaccgccgatgggagtctgctgaccttcaagaagtcatgtttacggctctcataaaggacagacccaagtttgtccgcctctttctggagaatggcttgaacctacggaaagttctcacccatgatgtccttactgaactctttttcaaccacttcagcacgcttgggtacctcgggccgtt

SEQ ID NO: 11492 - DNA, 759 bp, Homo sapiens
ccggcaggcacagtggtgcgatctcagctcactgcaagctccgcctcctgggttcacgccattctcctgcctcagcctcccgagtagctgggactacaggcatctgccaccacgcctggctaattttttttgttttagagagacgggatttcactgtattagccaggatggtctcaatctcctgacctcatgatccacctgccttggcctcccaaagtgctgggattacaggcatgagccactgcgcccagccgagtcattttttaatactactgcatgtgagttaacacaatcattcccaaattgaagttttagatgggccctcaaaatttttaggatatggttttcctacaggtttatattgaaagtatggggtatctcctattactcctctttttatttgtcttaaaggagaaagggagaggccagagaccaaatgtccccatttccctatagctaatctctctggaagacaagcagcccagacttgagcttctagatggatacaaccaggtgcatgtccaaggcacagaggagggtatttataacccatagtaacattaaatgcagtgccttctcctggcttgagcgggcacggttaatctggagttgcaggcatccacaccctatatgtagtatagatttctggcggagccttcttccaggtgggaaggccaaataagtgggaggaaaaaggcaccattaaagccccccccaatttttgggggaaaaattttagaattttttttttttgggggg

SEQ ID NO: 11493 - DNA, 597 bp, Homo sapiens
aggtacgcggggagaaaaagggtggggagtgccctttcttgaaggaatcccttaagtgcacgtctcccgttttcttttcacatcaatgcagagtccctctgtgaatttacaacacccaacacccatgagttcagtccttaaaggaaaattgagcaagtatttaattggttggacattgcataaaagaggtccatatccaggctaactctagaaattttattctcaaacttagttggcctctttttcttctgtcagaggaccattcttagtggcactggggaaatcttggcacccagaagaattcaactgcgctcactgcaaaaatacaatggcctacattggatttgtagaggagaaaggagccctgtattgtgagctgtgctatgagaaattctttgcccctgaatgtggtcgatgccaaaggaagatccttggagaagtcatcaatgcgttgaaacaaacttggcatgtttcctgttttgggtgtggagcctgtggaaaagccattcggaacaatgtttttcacttggaggatggtgaaccctacttggagactgattattatgccctctttggaacctggcccggccggcggtt

SEQ ID NO: 11494 - DNA, 760 bp, Homo sapiens
ccgggcaggtacaaagtccctgaggcaaaagcatgcttgctgtgttctaggaaaagcaaggaagacagcatgtctatagcagtgggaggtggaaggataataaacagtaggtgaggttagaggggaccaaatcatgtattttccatccagaggttcccaaccttggctgcacattagatttattctaaggagcttttaaaaaataccaatgactgggtcccagcctagagtgattaaatcagaatctctggaggtagacttgagaatctgatgtttgcaagtttcctaggcaagtcaaggctgaggaagactgctgcaggccattgtaagagccaggcgttgatctcattcaacctttccctcagctcttctagagacagccagcattctcttatggcacaaatacagcctttcaccctcacagaaagacacaggacaacaaattcaataaattaattcactggcatggatgattttctcagactaattggttccagtttgataggagacaattaaaggcttgaaggcactggatgcctgatgatgaagtggacttttaaactggggcactacttgaacgattggattggccgagacaccaggaaatcagatggagcaagcttataacaaaatgggtcaaccaggacttggaaattgcttggaacttgaacttaaaatttaaccccaattggttaacttagattgggagtggaaaattggtgttgggggaatatgaaaataatttgggggggaaaatttt

SEQ ID NO: 11495 - DNA, 422 bp, Homo sapiens
aggtaccgactcctcagaaactggcatgccaaatcaaaatgggtctggttcaatcctccctaatggcaatgtaaacccctctaactaatcccacttctcctaattatctttttctccttacgaacctaaaaatctcaccatttctattagcctgaaaataacatccctctgttcttctcttcctccttcagcactggatctcacttacaataggttttatttaataattatcttccttacactttctgtctcaccagtttccccttaaactgatttacctgctacacaaaattattcttattgggcctatgtgccttttcctccacttattcgacctctcacctggatggatgctcctgcagaaatctatactaacgatagtgtgtggatgcctggaactacagatgaccgttgcaccgctc

SEQ ID NO: 11496 - DNA, 415 bp, Homo sapiens
aggtacgcggggagaagaaatagcaagtgccgagaagctggcatcagaaaaacagaggggagatttgtgtggctgcagccgagggagaccaggaagatctgcatggtgggaaggacctgatgatacagaggtctgtaggccatgggaatgggtttggaattttattcaaagagctatgggaagtgactagaaggtttaaagttggggaagaggttttgtgtttctgttatatttgtgttttatacaaattactctggttgctgtgttgataggacagcagaagggtaggagcagggacaccagttaagttattgcaatggttaaggtgagaggtggtggctgggcctaggcctttttggagtgaacaagctatttgcttggcttccatgatccttctccctccactggaatggag

SEQ ID NO: 11497 - DNA, 401 bp, Homo sapiens
  misc_feature 401: n = A,T,C or G
aggtaccagttgtaaaattaccaggaaccgccatgcctcaagatcgccctgttttctggcttcatcaatgactgcatgcagtgcaccaccctgtccactacgtgatgctgtaggattaagtctcacagtaggcggctgaggatacagcgccgcgtcctgtgttgctggtgaattagacgccatcgctgtgggttgctggtatggtgccgtgctatttggcacaggacacaccgcttgaggtctgtatgaacctctgaaggaggccgatactgaagctcggttggcagccggtattgataaactaccagcggttgggtcttattttctaccggctgatattgtggatactgtatctgagttggcattgccgggatagagactctgtccctttctacttgatn

SEQ ID NO: 11498 - DNA, 406 bp, Homo sapiens
aggtaccgcacacaattgtatgcgctgcactttcatctgactggaagcacagtgggcttacaccagcatcaacacaaacacgtgagcagcgccttgcactacaacagacacgatatccctaggggacagcactgttttcagccccattataatctcatgggactactgttacagatgaggtccaccattgaccaaaacatgtggagcacggcaattaattctggatttggatggggacgcaaaataagcacagctctggcaggtctaatcaagattaagagagaaaagcaactaaaacatctgagaaaacagatacagagggcataacaccacacagaaaatactacatacaactgagctataatttttaattgacttgctggaaattactaaattactaaaattg

SEQ ID NO: 11499 - DNA, 405 bp, Homo sapiens
ccgggcaggtacattatttctccatatgtctgtcccctctgctccaagactgcaggggagagtcttgcacatcatctttgtaaaaacagtctttgttttactcagaaaatttgtattgagtcctgctacatacatgctaggcattagggtctaaaaagaatgaaaataaagcatctcagggatggcttttcagaacacatgcccaagcagagacttaaatattgaggctggccagattaaaaggggtagagggcaggaaagggtgacagcatgcccggcagcagcaagagcgggagcgaggcctgaaagaatgaaagtatttgcctacaatagaaggatgagtgagtagggcactaccagcagctcagcaatgccagagaaagggcacacagggaaaagggctaa

SEQ ID NO: 11500 - DNA, 404 bp, Homo sapiens
ccgggcaggtacttttttttttttttttttttttttggtagagatagggtttcaccatgttggccaggctggtcttgaactcctgggctcaagtgatccacctgccttggcctcccaaagtgctgggattacaggtgtgagccaccacacccagcccaagttcaactttttttttcattctgtttgctgcttgtgtttcttctgctgtgaacactctctgttcatgtcctttgtccattgttctatgggggtgttaacactgttttcttattgatctacaaccacagatattaaggcatttgtttgtcatactttttgcaaatgcttttctcatttgctatttgccttttaactgtacagaaaaggtgaatctgtgttctgtatattctgcctaaggcaaagat

SEQ ID NO: 11501 - DNA, 395 bp, Homo sapiens
ccgggcaggtacgttgaaatattaggggcaggttcccccaatatctggcgcccaacgtggttttctttttcctaagtgcatgtgggaacccgattccctttggtaggtgcggagaaatgttcatcggtccagtccacagaaatgcttgtttggctccccgacgattggtgagttgtctgtgtattgtccggggtaactatgggtcacgcagagtctaaacattatgcttatctctgctatattaaattcctgttaaaatgggggagttcgggttcccatggaaaatatggtcaccctattcagggcagtggaagaacactgtccttggtttcctgaaaagggaacgttagatgtggaactatgggatcatgttggtgcaaaattccgagaactgg

SEQ ID NO: 11502 - DNA, 398 bp, Homo sapiens
aggtacttaatcctggttggtttacccattctaaattatttatgtgagatagctatctatttggaaaaaagtaaagtgaaagtcttacctcaatccacactcaaaaatagtttactatatgacagatctatggcaggcagatttgatggctcaatgaactccaccctcccagtgttcacacctttatgtagttcccacttacagggagccaaaggtccgtgggacgtgaccaactcagcattccactggaggctatatgatcaaacagcaaactgtttatcatgaatgcaggatgtgagcaaactcaccattgctcctgccgacagaaggttttctggaggcaatcactccctggtgctgaggttatctactgcaacatttagagaatgtagtcttgc

SEQ ID NO: 11503 - DNA, 413 bp, Homo sapiens
aggtacatctctagatgatcacgaatgtcaaatatcacactacactgtgatatggggattccccttgggggttttcatgtgtatagggtgcctgcagctacactaaacatcttaaagctaccacaatgttcacttcatattttagctttttataggctttcttggtctcctcctatgttcccatgattttcttgctttgaatctgtaagaatcgagttgaatcttctccattttaaattttccataggctgagaaactgtttagccaagttcggataaaattgtatccaaagtaagagtatacaagctatgggcaagtccaaaatcaagctgttcacaggaccatgttctctctaaaggttctaggagagaatccctcatttccttccagcttctgggtggctgctggcatta

SEQ ID NO: 11504 - DNA, 412 bp, Homo sapiens
ccgggcaggtacattattcctccacatgtctgtcccctctgctccaagactgcaggggagagtcttgcacatcatctttgtaaaaacagtctttgttttactcagaaatattttattgagtcctgctaaatacatgctagtcattagggtttaaaaagaattaaaataaagcctgtcagagatggcttttctagaacacatgcccaagcagagacttaaatattgagactagccagattaaaaggggtagagggcaggaaagggtgacggcatgccacgcagcagcaagagcgggagcgaggcctgaaagagtgaaagtatttgcctacaatagaaggatgagtgagtagggcattgcccgcagcttaataatgccagatacagggcacacaggggaaagggctaaagatgg

SEQ ID NO: 11505 - DNA, 338 bp, Homo sapiens
ccgtgttggcacggaggctgatacagccacaggctctccccatccctccagccttatctaggatcaccatcaacccctcccatgcacctaaacaaaaactaacttgtgatatccttgaacatgtcaggcatacattattctttatgccagagaagcttttgcttgactctgaaatctagaatgacgtaaagatttgaataagttgactatctaacttcatgcaaagaagggacacatatgagattcatcatcacatgagacagcaaatactaaaagtgtaattcgattataagagtctagataaatatatgaaatgcaagagccacacagggaatgtt

SEQ ID NO: 11506 - DNA, 348 bp, Homo sapiens
ccgggcaggtacttttttttttttttttttttcctaattgcctttctcctttaccttccctggagttccacctttgtaattgttagagaaaatccctctgggccttcaggatagtcatcatcaaggatttcaacatgcagacttttcctcatctcccctgcttcaaagaggagctcccctgctgcaggaacaaaatccaagcctgcttccgctgtcccgctcatcgtcttgtggacgcggggacacttcaggtgcccagtgtccacactgactagtggtgacggcgttggacagtgcagatacagaacatttctgtcatcacagaaagttcctttggacagagccatg

SEQ ID NO: 11507 - DNA, 354 bp, Homo sapiens
aggtacttaatcctggttggtttacccattctaaattatttatgtgagatagctatctatttggaaaaaagtaaagtgaaagtcttacctcaatccacactcaaaaatagtttactatatgacagatctatggcaggcagatttgatggctcaatgaactccaccctcccagtgttcacacctttatgtagttcccacttacagggagccaaaggtccgtgggacgtgaccaactcagcattccactggaggctatatgatcaaacagcaaactgtttatcatgaatgcaggatgtgagcaaactcaccattgctcctgccgacagaaggttttctggaggcaatcactccctg

SEQ ID NO: 11508 - DNA, 346 bp, Homo sapiens
aggtacttaatcctggttggtttacccattctaaattatttatgtgagatagctatctatttggaaaaaagtaaagtgaaagtcttacctcaatccacactcaaaaatagtttactatatgacagatctatggcaggcagatttgatggctcaatgaactccaccctcccagtgctcacacctttatgtagttcccacttacagggagccaaaggtccgtgggacgtgaccaactcagcattccactggaggctatatgatcaaacagcaaactgtttatcatgaatgcaggatgtgagcaaactcaccattgctcctgccgacagaaggttttctggaggcaata

SEQ ID NO: 11509 - DNA, 305 bp, Homo sapiens
ccgggcaggtacaaccaatctggagcttacttaggattttctagtgcagtagttctaaaatatggtccctggatcagtagtgttagcatcccctgggattttgtgttttaacaagttctctatatgattctgatgcacactaaagcttcagaatcactgctgtagtataaactgtgatggttctcagccttccccactgctggcttaggtgtttgctttcttgggtctactaagtcagttagttctttatctgtttcctttccagtttccaaaatttttgttgctatcttttcctctccagtttt

SEQ ID NO: 11510 - DNA, 338 bp, Homo sapiens
ccgggcaggtacatctctagatgatcacgaatgtcaaatatcacactacactgtgatatggggattccccttgggggttttcatgtgtatagggtgcctgcagctacactaaacatcttaaagctaccacaatgttcacttcatatttttgctttttataggctttcttggtctcctcctatgttcccatcattttcttgctttgaatctgtaagaatcgagttgaatcttctccattttaaattttccataggctgagaaactgtttagccaagtttggataaaattgtatccaaagtaagagtatacaagctatggccaagtccaaaatcaagctg

SEQ ID NO: 11511 - DNA, 412 bp, Homo sapiens
aggtacatctctagatgatcacgaatgtcaaatatcacactacactgtgatatggggattccccttgggggttttcatgtgtatagggtgcctgcagctacactaaacatcttaaagctaccacaatgttcactacatatttttgctttttataggctttcttggtcttcctcctatgttcccatcattttcttgctttgaatctgtaagaatctagttgaatctcttttcattatacattcatgcattaggcttcaaaaccattttttaaaaaacttgacaacctatttatgtgattccaaatgttatagatttacaattcctatgttacttattttcaaaagaattaagcatttacttcttttttttaaaataccaattaattcctgtttattgattaaaaatttacagg

SEQ ID NO: 11512 - DNA, 373 bp, Homo sapiens
ccgggcaggtacaaaggaatttgagcccaaggggtctgcctcctgaggctggctctcagccaggagacctgtgcttctcaaacgggagcgattgcaccccccggggacatgtgattgtgtcaggaaacatcttccatttgtcacagcttggtcgggtatgggggaatgctactgtcatctcgcgggcagaagctggggatgctgctaatcaccatacaacgcacagggcaaagaattatgcagcccagttccgagcctgagaagccgcatatcacccaacatggcctctctgtaatgccttttaaataaccagctcttaagccctcagtgagcagaactgtatgaagttgccacggcacgactgaagagtgat

SEQ ID NO: 11513 - DNA, 463 bp, Homo sapiens
cgaggtacgcggggggtcttgttaagtggaaactgctgctttagagtttgtttggaaggtccgggtgactcatcccaacatttacatccttaattgttaaagcgctgcctccgagcgcacgcatcctgagaacccgagcctttggttaagaccgagcttctattaagcttgaaaagaataaaaactcctccagatgttcttccagttaatgttcgaacgtttttcatcccaagtgccaccaagggaaaacaaccaatgcgcttcccctccgcggacagacttttcaaatgaacccttgaaggccattttacttgaaagggaagcttgtgtttaaagttttttcaattaaccatcctggctattcggaggtaaaaaactggaaggaggtgggctttttcttaccctttggtacgaaaaaacccagttttgaggaaaaggaaaaataattaatccgcaattattt

SEQ ID NO: 11514 - DNA, 381 bp, Homo sapiens
  misc_feature 308: n = A,T,C or G
ccgggcaggtacttttagcgtgtgctcatggttctttaagggccacgatgccggctctttaaactttttcacaactttcaccaccctccctttattaataaagtcttcaattttttccttctgattataaaaatataactaccgtttggggagaattaaactgttactgaaatatttaaagaaaaatgtttcttaatgagtcatattttagcatatttcctttcagtcctttttttcagggactactcttaagggaagccattgagaaatggaagaggccatattttgtttaagaaataaaatgtggnccggaacacaagtgacttcacgcccttgtaattcccaagcactttttgggaaggcttgagggtgggcccggaa

SEQ ID NO: 11515 - DNA, 378 bp, Homo sapiens
ccgggcaggtaccgaggtcattttgcttcctatagactgccaccttttggcaaaagctgttctaactccatctcagcatttacaattccatacctggtggtcagaggaggcccgcctgcaggttcagctaaatcgggctgatggcattccaattactcaggctcagctcacaggctccgataattactctgatactactgctcatttaggctttgatgctctcaccacggaacaagtaacaaaggtgtgtatgagagcttgggataaattacgcaccccaggccaagcttctgtttcttttactattgttaaacagggtcacaatgaattatatcttgattttttagctaaattacaagatgctgttgaaaaaatctg

SEQ ID NO: 11516 - DNA, 388 bp, Homo sapiens
aggtacgaaaaaatcaggctactaagcccactgttaatatagacgcagaccaattgttaggaacaggtccaaattggagcaccattaaccaacaatcagtggtgcagaatgaggctattgaacaagtaagggctatttgcctcagggcctggggaaaaattcaggacccaggaacagctttccctattaattcaattagacaaggctctaaagagccatatcccgactttgtggcaagattacaagatgctgctcaaaagtctattacagatgacaatgcccgaaaagttattgtagaattaatggcctatgaaaatgcaaatccagaatgtcagtcggtcataaagccattaaaaggaaaagttccagcaggagttgatgtaattac

SEQ ID NO: 11517 - DNA, 387 bp, Homo sapiens
aggtaccaatgtgattgaagcaagggaaattgctatgggatatctgaccaactggatattctgctggaagagcagaatgcacttcaaagactagccaataaaactctcatgtaagatatgtttttctttttgtttctatttaactaatgaatagaacctcagtgatttaaggaaaggcaggcccatgatatggaaagagaaggggatgatgatgatattctggaatggtcgtgcaaggcttcaggaggaagtgagagtggtgattgaatcatataactcctgaataaatatctggaataaacatctccagaataaaacatctggaggattctcagtatacttagaataaaattgagcctcctcatgaaagcctactagcaccttcat

SEQ ID NO: 11518 - DNA, 371 bp, Homo sapiens
ccgggcaggtacgcggggacatcaatgcagagtccctctgtgaatttacaacacccaacacccatgagttcagtccttaagaaggaaaattgagcaagtatttaattggttggacattgcataaaagaggtccatatccaggctaactctagaaattttattctcaaacttagttggcctctttttcttctgtcagaggaccattcttagtggcactggggaaatcttggcacccagaagaattcaactgcgctcactgcaaaaatacaatggcctacattggatttgtagaggagaaaggagccctgtattgtgagctgtgctatgagaaattctttgcccctgaatgtggtcgatgccaaaggaagatc

SEQ ID NO: 11519 - DNA, 386 bp, Homo sapiens
aggtacattattcctccacgtctgtcccctctgctccaagactgcaggggagagtcttgcacatcatctttgtaaaaacagtctttgttttactcagaaatattttattgagtcctgctaaatacatgctaggcattagggtttaaaaagaattaaaataaagcatgtcagagatggcttttctagaacacatgcccaagcagagacttaaatattgagactagccagattaaaaggtgtagagggcaggaaagggtgacggcatgccacgcagcagcaagagcgggagcgaggcctgaaagagtgaaaatatttgcctacaatagaaggatgagtgagtagggcattgccagcagctcagtaatgccagagaaagggcacgcagg

SEQ ID NO: 11520 - DNA, 385 bp, Homo sapiens
aggtacgttgaaatattaggggcaggttcccccaatatctggcgcccaacgtggttttctttttcctaagtgcatgtgggaacccgattccctttggtaggtgcggagaaatgttcatcggtccagtccacagaaatgcttgttcggctccccgacgattggtgagttgtctgtgtattgtccggggtaactatgggtcacgcagagtctaaacattatgcttatctctgctatattaaattcctgttaaaatgggggagttcgggtacccatggaaaatatggtcaccctattcagggcagtggaagaacactgtccttggtttcctgaaaagggaacgttagatgtggaactatgggatcatgttggtgcaaaattccgagaa

SEQ ID NO: 11521 - DNA, 392 bp, Homo sapiens
ccgggcaggtacttttttttttatttgtttgttttttaagaaagactcaaaaggaaaaaaaaaaaaagaaactatagttattttctcatgatataaaaagattctgtagttgtatatacatttgaactttttgtaagacatctcctacccccctaaaattggaagtcatttattaagactttgtgttctgtaagaggattggaaatgaataattaagaacattaaagaggaaagcagggggtggtgggaaagtgtggtcttgagggggtaataaaccttctacaggccacacacacacaagaaaaaaaaaagggcaataagtgtaccccagtaacaataaggtgggggataaggataggggtaaggtttattctacaagttcaaagcccaga

SEQ ID NO: 11522 - DNA, 385 bp, Homo sapiens
aggtacatggtttgccaaccctgtattatgtttatagcatttgttttacaaaatatacctgattctgaaaaaatgaaaaatggttactataggctagatagtaggtagttaagtcctataactactagtaggtagttataggacttaattaacagatagatatgatgtgacaattcagtttaagtgcaactttcagtttctatcttaactataacttgagagattaatttagaattacaaatgtgtgtatatatatatatgagcatatgtatacataacatatttacacacaaggcacacatactatgagcaccctgcagtttgtaggcatttttacatgcgaatgttattggaacagataggcatcacgggaagaaattttgcc

SEQ ID NO: 11523 - DNA, 373 bp, Homo sapiens
ccgggcaggtacttagttttaattgaggaaagctccttaaacacaggatctcagtgaatttgtcttcatccgtgccccatctgttctcaccagctttatagagaatctattcacaagagaatgatattagagacacaattattttctttttgagaggtgacatgagaagaatcggagttgtatttcagaggtcagtgccatcatctattatctaaatctctcactttcagaagactagaaatcaaaaattgggctgtcaggagccaaggagaatgataactaccactggggcaggcaaaaagttagggtttccgatccccaagcttcaggcttctctttcaaacaggaaaaaaaaaaagggaaaagtccctgt

SEQ ID NO: 11524 - DNA, 386 bp, Homo sapiens
aggtcccaccacccatggctcttgcgactcacctgggcagctgtgtggctgcgcacctgactcactctttctagagggtgccttgaacagcatcagcgtggcccggcgttccctacaaatagcccttgcaattgctgaccccaaacaatgttgggaataacagaagggacaagggaacaaagaaaaggccaggaaggtaataattaaccacttactgagttcaaagccatcttgctgttatcaacagcatcgagtaatgataggtatctggaatgttcaatatgacctagaagaaagaattgcaggactgtaatatttccataccagttagtttttagaagataaatctggaaagaactagaagaatctctagatgaaggttacct

SEQ ID NO: 11525 - DNA, 372 bp, Homo sapiens
aggtacgcggggaagggtggggagtgccctttcttgaaggaatcccttaagtgcacgtctcccgttttcttttcacatcaatgcagagtccctctgtgaatttacaacacccaacacccatgagttcagtccttaagaaggaaaattgagcaagtatttaattggttggacattgcataaaagaggtccatatccaggctaactctagaaattttattctcaaacttagttggcctctttttcttctgtcagaggaccattcttagtggcactggggaaatcttggcacccagaagaattcaactgcgctcactgcaaaaatacaatggcctacattggatttgtagaggagaaaggagccctgtattgtgg

SEQ ID NO: 11526 - DNA, 395 bp, Homo sapiens
aggtacacaattaccttaacttcaaataaagtgttcttttctccatactcttctattcccttaacaatccctgttctcaaaggcctttgtgttttattttctgctttataacaaaacaaaaaaacaaacacccaccgtcctatgacacaggtgtttttgaatccatgtcaatttttgtagttagtatatgctggttaaaccacatagcatatcccccaaaaagccagaggcaagcaaaaacttaatttgatgcccttcaagtttcggaaggtcccatttctttttattaaccaaaagataagatgaaagctcagcatggctattggctgtgattagataactttttgatattttcattttcccttaccgagctgctgcttctaagctgaactcat

SEQ ID NO: 11527 - DNA, 481 bp, Homo sapiens
  misc_feature 320: n = A,T,C or G
ttttacggaccgctattctacgactatatggacctctcagcaggctccaccgcggtaggcggccgaggtacagatctcatcaggtatgagggcagtctctgacgcgaacgtctcttcctcgtggtttttattgtcagtattcacacgaagtttaagtctcctagtgggcacccagacgggattgacgatctcctggtaaaacacaagcatacccctcttccccacgttataattgttccaggttcccaggtattggtttgggagtttttccatgacactggcttgccttcgtttagggagaattttttgcctgtataatnagttttttattctacatttcagagtatttgtttcctaggaaccatttaaaaaagctttatatctctgctaaatattatttcttttttctttgtttttatcttttttgtttaatattttattttttcaatatgttatttatttctataattttattattatt

SEQ ID NO: 11528 - DNA, 396 bp, Homo sapiens
aggtacttgtagtgaaaaaatatacatttttactttcaaggttaaaatagaccatcagctcattatctctcttagccaatagctatgaagactaaaatggctcttcttgcttctggctcacttgaacatcttatttgtactgaagacaaaaaggatagcagtgctaaagaaaagggtatacccggttcccaagataggtgcggttgaggttctcgcacaaggtgacttaaaacaaaaataacacaactcagttgatccaatctacacacaatgggtgttgcataatcaacttgttccagccctcagagaagaagctccctggaaaggagcttttaaggattctggccccttgtttgtttcaaacaagagggccttcaagggatgggaaacttggtc

SEQ ID NO: 11529 - DNA, 388 bp, Homo sapiens
ccgggcaggtacgccgggacatcaatgcagagtccctctgtgaatttacaacacccaacacccatgagttcagtccttaagaaggaaaattgagcaagtatttaattggttggacattgcataaaagaggtccatatccaggctaactctagaaattttattctcaaacttagttggcctctttttcttctgtcagaggaccattcttagtggcactggggaaatcttggcacccagaagaattcaactgcgctcactgcaaaaatacaatggcctacattggatttgtagaggagaaaggagccctgtattgtgagctgtgctatgagaaattctttgcccctgaatgtggtcgatgccaaaggaagatccttggagaagtcatcaa

SEQ ID NO: 11530 - DNA, 385 bp, Homo sapiens
ccgggcaggtacgcggggaagacacctgtgatttgatgtgagccagtcacagaggaagccatttccagagaggaacaaccgtgtagactgctttcctgggagtcaagttaaaacttctctcctgtgaccttgtcacccggcagtggaaagttacccttggctgcagccacgacttccgcatactcttcagaacttgctctgcccttgagttttccagctttcctttaatgcactaaacctttaatattgtattctcctaaatgagacgtctcgcatttgagcagggagagtcccgtattctcagagtaaaagttgtttctggaattgatctcgccaaaaaggacatttttggagccagtgatccctatgtgaaactttcattgta

SEQ ID NO: 11531 - DNA, 374 bp, Homo sapiens
cgggcaggtacatctctagatgatcacgaatgtcaaatatcacactacactgtgatatggggattccccttgggggttttcatgtgtatagggtgcctgcagctacactaaacatcttaaagctaccacaatgttcacttcatatttttgctttttataggctttcttggtctcctcctatgttcccatcattttcttgctttgaatctgtaagaatcgagttgaatcttctccattttaaattttccataggctgagaaactgtttagccaagtttggataaaattgtatccaaagtaagagtatacaaggctatgggcaaagtccaaaatcaaagctgttcacagggaccaatgttctctcttaaagggttc

SEQ ID NO: 11532 - DNA, 385 bp, Homo sapiens
ccgggcaggtacgcggggctttcttgaaggaatcccttaagtgcacgtctcccgttttcttttcacatcaatgcagagtccctctgtgaatttacaacacccaacacccatgagttcagtccttaagaaggaaaattgagcaagtatttaattggttggacattgcataaaagaggtccatatccaggctaactctagaaattttattctcaaacttagttggcctcttttttttctgtcagaggaccattcttagtggcactggggaaatcttggcacccagaagaattcaactgcgctcactgcaaaaatacaatggcctacattggatttggagaggagaaaggagccctgtattgtgagctgtgctatgagaaattctttg

SEQ ID NO: 11533 - DNA, 394 bp, Homo sapiens
ccgggcaggtaccgcctgcagagccataatccaaatatatcttttttctttgtaaattactgtctcaggtattcctttatataatgcacaaatagcctaacataacacgcatctcaataattgccccattgtcacatttcaaaaataccttgtgaaggttgttatagagatattggctatctgggttgttttgttttgagaggacagtaacatttgattattaaaaaaaaaaatcctagcacaatgtggcttggcattgtttattgttttctatacaagtcataaaccattattatatgtgctcatgttcctttatatagaaaatatataaaaaaaggatttttgttttactctttaaaaagttttcatggctgggcgtgattggctcacttct

SEQ ID NO: 11534 - DNA, 375 bp, Homo sapiens
ccgggcaggtacgaaaaaatcaggctactaagcccactgttaatatagacgcagaccaattgttaggaacaggtccaaattggagcaccattaaccaacaatcagtgatgcagaatgaggctattgaacaagtaagggctatttgcctcagggcctggggaaaaattcaggacccaggaacagctttccctattaattcaattagacaaggctctaaagagccatatcctgactttgtggcaagattacaagatgctgctcaaaagtctattacagatgacaatgcccgaaaagttattgtaagaattaatggcctatgaaaatgcaaatccagattggtcagtcggccataaagccattaaagggaaaagttcc

SEQ ID NO: 11535 - DNA, 504 bp, Homo sapiens
ccgggcaggtactttgcaaatgattatcgagtagttaaccaatttgccagacattatcagactggacagccactgccaaaaaatatggtgtctcgtctttgtgaatctaaaaaggtttgtgctgcaactgatatgcaactattagggttttttatgcccacttttgggatcaaaatcttaccattgtggaaggcatcccctctgaagggaatttcaatccaccagtacaattcttcaaaggataaccatcaaggagaaaattttcttatgggcccttaccaattatgtttcccaaaattaccttgccttgagcaagcttgacgatttccagacccaactcttcgtagggggttattggttgccttaagataatctaatttctttaacccttcaatgttccaagtaggccgggtccgcccatcccaattgggtttttgggaaagaaaagtggtttttttcttaccatggaattccctttatcaaccaaggggcttggccctgggg

SEQ ID NO: 11536 - DNA, 377 bp, Homo sapiens
aggtacgcgggggaaataaggaatgaacgttatgtaaagaccataatgctagtcagagaatgttccaatggaaaactgatgtttccttctgccaccaggacaaaacttttgtgatctaaaggcaaaacaataacaaaaacagcaacagcaacaaaaaccagcctaacagtcccaagtggtcttcactgtcatgattattaagcattttctccaaagtctgaactacagtttgttgaggtttcattgaaaatgatactaaaacaaatttgcttaaaagtaaaatggagttattggcatcacaaagatcatagtcacctttcttaagaattgcataacctttaatgactgtaaaggatttttaaagaacgaatccttgc

SEQ ID NO: 11537 - DNA, 385 bp, Homo sapiens
aggtacgcggggagagtccctctgtgaatttacaactttccaacacccatgagttcagtccttaagaaggaaaattgagcaagtatttaattggttggacattgcataaaagaggtccatatccaggctaactctagaaattttattctcaaacttagttggcctctttttcttctgtcagaggaccattcttagtggcactggggaaatcttggcacccagaagaattcaactgcgctcactgcaaaaatacaatggcctacattggatttgtagaggagaaaggagccctgtattgtgagctgtgctatgagaaattctttgcccctgaatgtggtcgatgccaaaggaagatccttggagaagtcatcaatgcgttgaaaca

SEQ ID NO: 11538 - DNA, 459 bp, Homo sapiens
gtagcccgatacactactatgggcggattgagctacctcgccgtggcgggcggccgcccgggcaggtaccgaggtcattttgcttcctatagactgcgaccttttggcaaaagctgttctaactccatctcagcatttacaattccatacctggtggtcagaggaggcccgcctgcaggctcagctaaatcgggctgatggcaattccattactcaggctcagctcacaggctccgataattactctgatactactgctcatttaggctttgatgctctcaccacggaacaagtaacaaaggtgtgtatgagagcttgggataaattacgcaccccaggccaagcaaaggttgctggtactatggttaaacagggtaacattgaattatttttttgaaaatccagcttagggtttccagatgtttgttgaaaaaactggctttaaatgaacacactcaa

SEQ ID NO: 11539 - DNA, 398 bp, Homo sapiens
ccgggcaggtacatctctagatgatcacgaatgtcaaatatcacactacactgtgatatggggattccccttgggggttttcatgtgtatagggtgcctgcagctacactaaacatcttaaagctaccacaatgttcacttcataattttggcttttaataagcttttcttggtctcctcctatgttcccatcattttcttgctttgaatctgtaagaatcgagttgaatcttctccattttaaattttccataggctgagaaactgtttagccaagtttggataaaattgtatccaaagtaatagtattcaaactatggttcaagtccaaaaatcaatcttgatcacaagaaccctgtttctctctaaaaggctctaagaaaaataatccctcaatt

SEQ ID NO: 11540 - DNA, 386 bp, Homo sapiens
aggtacgcgggggaaatgacacatgaaaaaaaggttacatcagcccataaagcacatagccaccgtaagtaattgcataatggaacagatataaaaggactgtatgaggcaaaagaagtcttctgggaattctcacacccctgaagacacagtgagttaccaccaccaccaggaattggcctttcagctctgtgcctgtctccagtcaggctggaataagtctcctcatatttgcaagctcggccctcccctggaatctaaagcctcctcagccttctgagtcagcctgaaaggaacaggccgaactgctgtatgggctctactgccagtgtgaccttaccctttccagtcaccccttctttatttccaggctatgaatttcctgc

SEQ ID NO: 11541 - DNA, 397 bp, Homo sapiens
ccgggcaggtactttcttcctcatactgactatagtcatccacctccattcgagactccaagagagaaagaggatcactgcagcacaccccattttcatgaagcccctctgtataagaccccctattttcctcatctcgttttagctggatttttaattttgtagaactactgcctgatcctgagttaaatccattattaagctttgctacatagagattgttatcgttgtcatggtctttgcttaacttgatgcttattttggaagagtttatttccatcattctcttggtcattttgttttgtctggatgctattatgatctctctctgaagtagtcaatattgggatttcctcctaatttatttttctaggaatttacctgttctatttattct

SEQ ID NO: 11542 - DNA, 378 bp, Homo sapiens
ccgggcaggtaccgaggtcattttgcttcctatagactgccaccttttggcaaaagctgttctaactccatctcagcatttacaattccatacctggtggtcagaggaggcccgcctgcaggctcagctaaatcgggctgatggcattccaattactcaggctcagctcacaggctccgataattactctgatactactgctcatttaggctttgatgctctcaccacggaacaagtaacaaaggtgtgtatgagagcttgggataaattacgcaccccaggccaagcttctgtttcttttactattgttaaacagggtcacaatgaattatatcttgattttttagctaaattacaagatgctgttgaaaaatctga

SEQ ID NO: 11543 - DNA, 385 bp, Homo sapiens
aggtacttccaaaccctcctgttctttcctttttgttttccccaattttaacataaggcaaaagcagtaattgagcaattctatcacctggattggcactccggggaacagtggagctgatcactaactgaattccccctttataatctgaataaattaccccagtatgaatttggactcccttcaaatttagacttgatctccctcaaaggcctaccctcccttctggcagcgggccatatacccctctaggaatcttttgtgggggctttccagggagtaaaaagaccatttgggtggaacataaatctactgcggtgctgcctgctgtggcgcgggacaacttgtggatttgatgtatatgtctggccttcttgtatgtgtt

SEQ ID NO: 11544 - DNA, 464 bp, Homo sapiens
aggtacgcgtcacagtagatagtgtcctatagccactggaatgtcctaaaccgaatgaatctgactctggtgacctttcaaacagaagtcacatgagctccttcatttggttgtagttcttcttagaaggtgtgataaccacgatctcaggggaaagaattagaaatggggttgttggaaccatttcttacaaaccaattacagtaatttccacaagcccaattagccatgtctgtttgcttacccttggggatgttcaattttgatgttcattccatattaaatatatccattggtacacaaaagcccaacctttttcattttttttttaaattttattttttgcctttatttaccgggaaaaaaacaacaaccccacattatatttcaaacttatgccaaaggaaggaactgcttttcaggggtcggtgttaaaaatggaaaagggcttttccagggctagg

SEQ ID NO: 11545 - DNA, 406 bp, Homo sapiens
ccgggcaggtaccagttgtaaaattaccaggaaccgccatgcctcaagatcgccctgttttctggcttcatcaatgactgcatgcagtgcaccaccctgtccactacgtgatgctgtaggattaagtctcacagtgggcgggtgaagatacagcgccgcgtcctgtgttgctggtgaattagacgccatcgctgtgggttgctggtatggtgccgtgctatttggcacaggacacaccgcttgaggtctgtattgaacctctgaaggaggccgatactgaagctcggttggcagccggtattgataaactaccaatcggtttgggtcttatttttctaccggctgatattgtggaatactgtttctggattaggcattgtactggaatagagaatttgttcccttt

SEQ ID NO: 11546 - DNA, 398 bp, Homo sapiens
aggtacgcggggcttcttgaaggaatcccttaagtgcacgtctcccgttttcttttcacatcaatgcagagtccctctgtgaatttacaacacccaacacccatgagttcagtccttaagaaggaaaattgagcaagtatttaattggttggacattgcataaaagaggtccatatccaggctaactctagaaattttattctcaaacttagttggcctctttttcttctgtcagaggaccattcttagtggcactggggaaatcttggcacccagaagaattcaactgcgctcactgcaaaaatacaatggcctacattggatttgtagaggagaaaggagccctgtattgtgagctgtgctatgagaaattctttgcccctgaatgtggtcgatgc

SEQ ID NO: 11547 - DNA, 442 bp, Homo sapiens
aggtacatctacctaaaggactattatgtggaataatacatactaatgaagtattacatgatttaaagactacaataaaaccaaacatgcttataacattaagaaaaacaataaagatacatgattgaaaccaagttgaaaaatagcatatggccttggaggaaatgtgctcaaattactaatgatttagtgttgtccctactttctctctcttttttctttctttttttttattatggtaagctgtcacatacaacttttttttttttttttttgagatggggtcatagctctggtcaccatgttttggaatggattgggcttcgatatttatgttttaactgtaatctctaacaattctctaatggtttaaaattattttatttttgtattattataaatttttctgagtttgatctttgcaattatgtttttgaacctg

SEQ ID NO: 11548 - DNA, 385 bp, Homo sapiens
aggtacaaagtccctgaggcaaaagcatgcttgctgtgttctaggaaaagcaaggaagacagcatgtctatagcagtgggaggtggaaggataataaacagtaggtgaggttagaggggaccaaatcatgtattttccatccagaggttcccaaccttggctgcacattagatttattctaaggagcttttaaaaaaataccaatgactgggtcccagcctagagtgattaaatcagaatctctggaggtagacttgagaatctgatgtttgcaagtttcctaggcaagtcaaggctgaggaagactgctgcaggccattgtaagagccaggcgttgatctcattcaacctttccctcagctcttctaaaaacagccagcattct

SEQ ID NO: 11549 - DNA, 396 bp, Homo sapiens
ccgggcaggtaccaggagggtattgatgtttgaggtccaaactgaaaacccatcacctccttcccactgctatagcagcgttagccctggggttcattatctagccagttcacaccttctaaagtggggctctgaaaatgtcttacttccctcacagacaaagcaattctcaagcctcctgagatcacccaccaaccagagcaactgctgtcacttggaggtgcagctgaattcttctaattgtgacacaaactcttgaaactgtaaatgctgaaagattaaatgaggttataacactcagaaggttttacaagtaaaagtaagtcaaatcaataggtctttatttcatatctgtaatggtttagctctgcgggaagtgttagcagctatatgaat

SEQ ID NO: 11550 - DNA, 385 bp, Homo sapiens
ccgggcaggtacgcggggacatcaatgcagagtccctctgtgaatttacaacacccaacacccatgagttcagtccttaagaaggaaaattgagcaagtatttaattggttggacattgcataaaagaggtccatatccaggctaactctagaaattttattctcaaacttagttggcctcttttttttctgtcagaggaccattcttagtggcactggggaaatcttggcacccagaagaattcaactgcgctcactgcaaaaatacaatggcctacattggatttgtagaggagaaaggagccctgtattgtgagctgtgctatgagaaattctttgcccctgaatgtggtcgatgccaaaggaagatccttggagaagtcat

SEQ ID NO: 11551 - DNA, 393 bp, Homo sapiens
ccgggcaggtacgcgggacatcaatgcagagtccctctgtgaatttacaacacccaacacccgtgagttcagtccttaagaaggaaaattgagcaagtatttaattggttggacattgcataaaagaggtccatatccaggctaactctagaaattttattctcaaacttagttggcctcttttttttctgtcagaggaccattcttagtggcactggggaaatcttggcacccagaagaattcaactgcgctcactgcaaaaatacaatggcctacattggatttgtagaggagaaaggagccctgtattgtgagctgtgctatgagaaattctttgcccctgaatgtggtcgatgccaaaggaagatccttggagaagtcatcaatgcgtt

SEQ ID NO: 11552 - DNA, 474 bp, Homo sapiens
aggtactttcttcacaaatggtggaaactcctgagaagacatggcttcttccatggatatcaatgactgccatcaggccagccaggcagactcagtcatcaattgggcccaccattaaaatcagctttcctggttgaggagaacgctaattctttctttggaaaggacacaagcaagcagtgggtgaatacaggtgtgaaggacttaaaagctttttaccaaaagcagcttaccttttttattgaattggttcctcctattcattttaattttattttttttgaggaccaagagttctttaaccttctggtcaccttcaacttgccaacccttctggctttccctggggttttcaataacggaattttcttccctgcccttccatggagataggcttgggggatttaccaaggattgttggcccccggccggaaatttttcctggaatttttttttagctaaggagaaataggg

SEQ ID NO: 11553 - DNA, 391 bp, Homo sapiens
ccgggcaggtacatacattctatgacagactctaaaagttctctgctagacatgcatgatttataacacttaactgatctatgatcgcgaatatctgaaatgctgactgctactctctgagagactgaatgacagaaagatgtgtgtgaacccaaggctgcgcataatagctaactctataaaatagatggataattctaagggtctcctgcaaaagatggccttctgaaggctaactgctgaatgaaagtttctattccaactaaagccttagaatagatggacatgcaaactttcaaaggcagagcctcccgagaagccatctgccttcgagcctgccattgaaatgcaaaagtctgttccaaataaagccttggaattgaagaatgaa

SEQ ID NO: 11554 - DNA, 393 bp, Homo sapiens
  misc_feature 174, 175, 176, 177, 179: n = A,T,C or G
aggtaccatgctgacttcttggtatcttttaaggcctaattttcccttccttgagattactgtagtgtgttccagctaatttctatttggaaacgagttggaacagctgaaaactaggtattattgaaggcaaagcagcctcacgtcatttttttatcagctcatttgggaagnnnntntttttttttttttttttttttggggtaattagaaagtaggctgggcacgggggctcatgcctataatcccagcacttggggaggccgaggatctcctctctggtggatcacttgagggcaggagttaagagaccatcccggccaacatgatgaaaccctgtctctactaaaaatacaaaaagttgctgggcgtggtggcatactcttacaatcc

SEQ ID NO: 11555 - DNA, 401 bp, Homo sapiens
aggtacgcggggacatcaatgcagagtccctctgtgaatttacaacacccaacacccatgagttcagtccttaagaaggaaaattgagcaagtatttaattggttggacattgcataaaagaggtccatatccaggctaactctagaaattttattctcaaacttagttggcctctttttcttctgtcagaggaccattcttagtggcactggggaaatcttggcacccagaaaaattcaactgcgctcactgcaaaaatacaatggcctacattggatttgtacaggattataggtagccctgtattgtctaacttgtgctatacaaaaatttttaatgccccttgtaccttttaccttttcccgtaggaattactccccttgattatcctttgcaaagc

SEQ ID NO: 11556 - DNA, 399 bp, Homo sapiens
ccgggcaggtaccgactcctcagaaactggcatgccaaatcaaaatgggtctggttcaatcctccctaatggcaatgtaaacccctctaactaatcccacttctcctaattatctttttctccttacgaacctaaaaatctcaccatttctattagcctgaaaataacatccctctgttcttctcttcctccttcagcactggatctcacttacaataggttttatttaataattatcttccttacactttctgtctcaccagtttccccttaaactgatttacctgctacacaaaattattcttattgggcttatgtgccttttcctccacttattcgacctctcacctggatggatgctcctgcagaaatctatactaacgatagtgtgtggatgcc

SEQ ID NO: 11557 - DNA, 392 bp, Homo sapiens
aggtaccggccctccaagtagtgtttgcgaatacacgtcctgttgtgaaagaggtgaggagaaaggagtaggaaggctcataggacataacaggcaaaaagaaacaagagaggtaaataaaaagaattaatctaatggcttcacccggcttaggcgcagttttaaggggcctgacccaggctttgggacccatgtttctagttgggctctgttggcctttttgttgtgggagtgatgaatccaagcaggaattccattcccctccagaaccgttggcgttcgtgaggatgtatggtgtttaggtttctttacaagcagtgccgtaagtcctttctttttttggaaacttttttaacaatacacttaagttctactatgacttgaaacaatat

SEQ ID NO: 11558 - DNA, 374 bp, Homo sapiens
aggtacgcggggacatcaatgcagagtccctctgtgaatttacaacacccaacacccatgagttcagtccttaagaaggaaaattgagcaagtatttaattggttggacattgcataaaagaggtccatatccaggctaactctagaaattttattctcaaacttagttggcctcttttttttctgtcagaggaccattcttagtggcactggggaaatcttggcacccagaagaattcaactgcgctcactgcaaaaatacaatggcctacattggatttgtagaggagaaaggagccctgtattgtgagctgtgctatgagaaattctttgcccctgaatgtggtcgatgccaaaggaagatccttggagaa

SEQ ID NO: 11559 - DNA, 396 bp, Homo sapiens
ggcatttctcccagggatctctgtgcttccttttgtgcttcctgtgtgtgtggatatttaaaggggctggaaatgtgcaaaaacatgtcactacttagacattatattgtcatcttgctgtttctagtgatgttaattatctccatttcagcagatgtgtggcctcagatggtaaagtcagcagcctttcttatttctcacctggaaatacatacgaccatttgaggagacaaatggcaaggtgtcagcataccctgaacttgagttgagagctacacacaatattattggtttccgagcatcacaaacaccctctctgtttcttcactgggcacagaattttaatacttatttcagtgggctgttggcaggaacaaatgaagcaatctacataaa

SEQ ID NO: 11560 - DNA, 402 bp, Homo sapiens
aggtaccgaggtcattttgcttcctatagactgcgaccttttggcaaaagctgttctaactccatctcagcatttacaattccatacctggtggtcagaggaggcccgcctgcaggctcagctaaatcgggctgatggcattccaattactcaggctcagctcacaggctccgataattactctgatactactgctcatttaggctttgatgctctcaccacggaacaagtaacaaaggtgtgtatgagagcttgggataaattacgcaccccaggccaagcttctgtttcttttactattgttaaacagggtcacaatgaattatatcttgattttttagctaaattacaagatgctgttgaaaaatctgtctctgatgagcacactcaaggtattcttcc

SEQ ID NO: 11561 - DNA, 387 bp, Homo sapiens
aggtacgcggggacatcaatgcagagtccctctgtgaatttacaacacccaacacccatgagttcagtccttaagaaggaaaattgagcaagtatttaattggttggacattgcataaaagaggtccatatccaggctaactctagaaattttattctcaaacttagttggcctctttttcttctgtcagaggaccattcttagtggcactggggaaatcttggcacccagaagaattcaactgcgctcactgcaaaaatacaatggcctacattggatttgtagaggagaaaggagccctgtattgtgagctgtgctatgagaaattctttgcccctgaatgtggtcaatgccaaaggtaagatccttttagaaagtcattaaatc

SEQ ID NO: 11562 - DNA, 403 bp, Homo sapiens
gccgcccgggcaggtacttcctagaagcactggaagaggactggtgatggtggagggtgagagggtgccgtttcctgctccagctccagaccttgtctgcagaaaacatctgcagtgcagcaaatccatgtccagccaggcaaccagctgctgcctgtggcgtgtgtgggctggatcccttgaaggctgagtttttgagggcagaaagctagctatgggtagccaggtgttacaaaggtgctgctccttctccaacccctacttggtttccctcaccccaagcctcatgttcataccagccagtgggttcagcagaacgcatgacaccttatcacctccctccttgggtgagctctgaacaccagctttggcccctccacagtaaggctgctacatcaggggc

SEQ ID NO: 11563 - DNA, 390 bp, Homo sapiens
aggtaccagttgtaaaattaccaggaaccgccatgcctcaagatcgccctgttttctggcttcatcaatgactgcatgcagtgcaccaccctgtccactacgtgatgctgtaggattaagtctcacagtgggcggctgaggatacagcgccgcgtcctgtgttgctggtgaaatagacgccatcgctgtgggttgctggtatggtgccgtgctatttggcacaggacacaccgcttgaggtctgtattgaacctctgaaggaggccgatactgaagctcggttggcagccggtattgataaactaccagcggttgggtcttattttctaccggctgatattgtggatactgtatctgagttggcattgccgggatagagactctgtccct

SEQ ID NO: 11564 - DNA, 392 bp, Homo sapiens
aggtacttggagcttaaatacaaggcaattgtgtgcctgcaaaaacaaaaagagcaatattatccttaagatttcaacaagacacagtgtctcatcacataatccaaagaagtccaggttacaagccccaaaatattcagcattatgaaaaaccagggagatcttaattcacatggcaaagagaatccttgcataacaatattgagaggacacatatgtcaaaatcatctgacacatacattaaagcagttattataacaatgctcctagaattacgggatagcattcatgaagtgaatggaaagttggaaagtctcaccaaatatttggaatatgtaaacaccaatttaaacttaagaattaaagtattaaccaaaactattaggggaaat

SEQ ID NO: 11565 - DNA, 393 bp, Homo sapiens
aggtacgcgggataggaacttggcttgaaatgttaaaaaggcaggaaaaaacagcagaatctatttttcattgtgggagagcccaggttgtcctgcttatctgaaattaagcccaaatcctaaaatttctgaatacctgctgtcagcttcctgcaaacgggccaggttgcctaaggaatgtcatgagagagctgacagaggcaggggacaggacaggcaccagcaaacaccacttcaccatgcagctattttcatgtcctcccagcccactgaagtgctgataatggcttggatcaattcaacaaacacatttcgtatacctcctttgcaccagacagtgttcaccgaggcacgcagggtggccgcaggtttaaacttacacgaatcgctttt

SEQ ID NO: 11566 - DNA, 388 bp, Homo sapiens
aggtacaagcttcatttgccacaaaactcacaaaaaagtaattgattaaagaatatctcttttatgcaaaatatacattttaggatataatttaattgatattctactatatactgacattgctccttgatcattgaataaaaaaatactctcattgccagaattatgtttttgtaatatttataattgaggtaataatgataaaagacttaaactatgaataatgttggtgagttccatttaagctataacaatttcccagaactaaacaaatatgtgactaaacataggtcatttttgataaatgaatactaacaatttcacaacataattgacaagctgattacatcagtaatttataagaaaattatacaatcaagttcataga

SEQ ID NO: 11567 - DNA, 386 bp, Homo sapiens
aggtaccgaggtcattttgcttcctatagactgccaccttttggcaaaagctgttctaactccatctcagcatttacaattccatacctggtggtcagaggaggcccgcctgcaggctcagctaaatcgggctgatggcattccaattactcaggctcagctcacaggctccgataattactctgatactactgctcatttaggctttgatgctctcaccacggaacaagtaacaaaggtgtgtatgagagcttgggataaattacgcaccccaggccaagcttctgtttcttttactattggtaaacagggtcacaatgaattatatcttgattttttagctaaattacaagatgcttgtgaaaaatctgtctctggtgagcaca

SEQ ID NO: 11568 - DNA, 385 bp, Homo sapiens
aggtaccggtgccatcacacgctggtcagagtggccatttgtcttgtctttctaccgatgataaaatcaggaattgaaggatatatgcacaacggtatactcttcgaccatcaaacttccggacatcagttcactaccagcaagatggagaaacctgtccatccatagatgaagggatgaagaaactgcagtatatctgcacaacacaatactcttcatccataattaatgtaattttcatttggagccatatggatgaaccatgaaagaaaaacgccccaaagaagctgggccacggagaaaccacgccaaagcactgtcctcagcagttagcaccatggacaggaaggtggtttcttccccaagatgcgccctcaagttatcc

SEQ ID NO: 11569 - DNA, 382 bp, Homo sapiens
ccgggcaggtaccatcatgcctcactaatttttttttttgtatttttagtagagatggggtttcatcatgttggtcaggctggtcgtgaactccttacctcgtgatccgcccgccttggcctcccaaagtctgagatgacaggtgtgagccaccgtgcttggctgacatatgattcttttgattatgttgcaaccattgaaaaatataaaatcactcttttttaatatatatttttctttttttaggaaattaaaggaaataagaatggctcctacataggcagagtaggctaaaatcacacttagctgactgtgaagtcatatactgcatatcgttacttcattgatctccttgtctcactttcccacttccctcacccca

SEQ ID NO: 11570 - DNA, 479 bp, Homo sapiens
aggtacccctccaagccggacaacccgggcgaggacgcaccagcggaggacatggccagatactactcagcgctgcgacactacatcaacctcatcaccaggcagagatatggaaaacgatctagcccagagacactgatttcagacctcttgatgagaagaaaagcacataaaatgtttcccagaaacttcggcttgaaaaacccctgccaatggtggtgaatggggaaaatggagaacttgcttcttctgggccttttttccttatttttcaagcccccataattttcaatcggtggtaaaaaacgaagaaattcccaccccaattccttaccccaatggccattgccaagcccaactgtggcttgaaaattccttggcaaatggttttttccctttttggccaatccatttggtaataataatggtggtggttttaaaattaaaaaggtattcaatggccatttccaaaaaaaaaa

SEQ ID NO: 11571 - DNA, 472 bp, Homo sapiens
  misc_feature 197: n = A,T,C or G
aggtacgcggggcttaagtgcacgtctcccgttttcttttcacatcaatgcagagtccctctgtgaatttacaacacccaacacccatgagttcagtccttaagaaggaaaattgagcaagtatttaattggttggacattgcataaaagaaggtccatattccaggcttaactctagaaatttttatttctcaaancttagttttggcctctttttttcttctgttcagagggaccatttcttagtagtgcactgggtgaatatctttggtcactccatgaaggaatttcaaacttgcgtcttcacctggcaaaataatatcaaatgagctctaccatttggaattttgttaggaaggaagaaatagggaggccccctgttattttatggaagccttgttgcctattggaggaaaaatattttttttggccccccttgaaatttgtagggtttcgatatggccccaaaagg

SEQ ID NO: 11572 - DNA, 397 bp, Homo sapiens
aggtacgaaaaaatcaggctactaagcccactgttaatatagacgcagaccaattgttaggaacaggtccaaattggagcaccattaaccaacaatcagtgatgcagaatgaggctattgaacaagtaagggctatttgccttagggcctggggaaaaattcaggacccaggaacagctttccctattaattcaattagacaaggctctaaagagccatatcctgactttgtggcaagattacaagatgctgctcaaaagtctattacagatgacaatgcccgaaaagttattgtagaattaatggcctatgaaaatgcaaatccagaatgtcaagtcggccataaagccattaaaaggaaaagtttccagcaggagttggatgtaattacagaatt

SEQ ID NO: 11573 - DNA, 394 bp, Homo sapiens
aggtacgcggggacatcaatgcagagtccctctgtgaatttacaacacccaacacccatgagttcagtccttaagaaggaaaattgagcaagtatttaattggttggacattgcataaaagaggtccatatccaggctaactctagaaattttattctcaaacttagttggcctctttttcttctgtcagaggaccattcttagtggcactggggaaatcttggcacccagaagaattcaactgtgctcactgcaaaaatacaatggcctacattggattttgtagagggaaaaggagccctgtttttgtgaagctggggcctttgaagaaaattgcttttgccccctgaaatgtgggtcctatgcccaaagggaaagaatcccttgggaagaa

SEQ ID NO: 11574 - DNA, 397 bp, Homo sapiens
aggtacatcatatttgcttgttggctttatgataacttagaaataatattctggattaactgtgtgactcatgagaagatttgtgcaactatgtttccaaatttacttgattttcaagacttacactagaaccgtgagaacagggtaataaataagcatatgtattaatatcacctttggtcaactcttgggtagccccaacggtagtgtaggaattaacgtaatttttcctactaaaagtattggatttgttttgagagaccacagttgaaaatcattgacatacaaagtttaaaaattgttaggttaaaaaattttaaatgcatttgaagtggttttatagaaaaataattatctaacttggtttatattgacaggttgttttcttggataagaa

SEQ ID NO: 11575 - DNA, 378 bp, Homo sapiens
ccgggcaggtaccattcctctaaatttactacctaattctttgcctttaattgtccccatgggggtcactggccctttacctcaaggttcggtgggcctggtgttaggcagggcatccacctcatgatactaaaggtatcatagttcatactagtctcattaattctgattcctctgatgagattaaacttatgtaaacttatggtgtctgccaaagttcctgtttccattccggccagtgagtcaattgctcaattacttttactacctaacattgttttaaacaaaggagataagacatggggccctgggatgggctccagcggtgaaaaagccgcttattggattaatgtaatttctaaacaatggcctacctga

SEQ ID NO: 11576 - DNA, 382 bp, Homo sapiens
aggtacgcggggagtgataacattagaaactcattggagcacgaaccctgttgtgaactgcctatccgaaggatctaggttgtgtgcttcgtatgagaatctaatgccagatgatctatcattgtctcactttgcccccagataagaccatctagttgcagaaaaataagcccagagcttccactgattctacattatggatatgtgccgccgaagcaagcacaaagccctacttttacacatgcctagtgatgcttcatggacaaggcttggctctgttgagtccaactaacctacctgagattctgagatttctcttcaatggcttcctgtgagctagagtttgaaaatatcttaaaatcttgagctagagatggaagta

SEQ ID NO: 11577 - DNA, 379 bp, Homo sapiens
aggtaccatactcttttggttgctataattctgtggtataatatgaagtcagaaaatataattcctccaattttatttatttatttatttttgcttaggatagtattatttcttatagtgaaagcattctatgttatttattattagtctaattttgtagttttacaatgctatcctcttttacaaagctatgatcaactcagtgtgtccagatcaggatcatttgtagctatttgcaaaagtagcaatattctggctgggcatggtggctcatgcttatattcccagcactttgggaggccaagacaggcagatcacctgaggtcagaggttcaagatcagcctggtcaacatggtgaaaccctgtctccaataaaaa

SEQ ID NO: 11578 - DNA, 378 bp, Homo sapiens
ccgggcaggtacgaaaaaatcaggctactaagcccactgttaatatagacgcagaccaattgttaggaacaggtccaaattggagcaccattaaccaacaatcagtgatgcagaatgaggctattgaacaagtaagggctatttgcctcagggcctggggaaaaattcaggatccaggaacagctttccctattaattcaattagacaaggctctaaagagccatatcctgactttgtggcaagattacaagatgctgctcaaaagtctattacagatgacaatgcccgaaaagttattgtagaattaatggcctatgaaaatgcaaatccagaatgtcagtcggccataaagccattaaaaggaaaagttccagcag

SEQ ID NO: 11579 - DNA, 382 bp, Homo sapiens
ccgggcaggtacatctctagatgatcacgaatgtcaaatatcacactacactgtgatatggggattccccttgggggttttcatgtgtatagggtgcctgcagctacactaaacatcttaaagctaccacaatgttcacttcatatttttgctttttataggctttcttggtctcctcctatgttcccatcattttcttgctttgaatctgtaagaatcgagttgaatcttctccattttaaattttccataggctgagaaactgtttagccaagtttggataaaattgtatccaaagtaaagagtatacaatgctatgggccaagtccaaaatcaaagcttgttcacagggaccaatgttctctctaaaaggttctaggag

SEQ ID NO: 11580 - DNA, 386 bp, Homo sapiens
aggtacaggttttttttccctctccctcatgtatcatgtttgaaaatgaagaatctttacccagtctctaaactggattcctttgacacagttatggaataaaatctttgatgtttccttctaaacagtgttcacatttgagggttgatggacttaaaacactaataaagataggcataaacagggccttttggaaataggggaagttgctgttgttgctgaaagaagaaaggtcataggaagggttggctgatgtgggaaaagtgactattccatagtgaagctttgagtatctcccattaattatggacctgttttcactgaataaaagaatatgttggttgtttacatgaaaccgatccaaacgaatgctgatggatttaatg

SEQ ID NO: 11581 - DNA, 385 bp, Homo sapiens
ccgggcaggtaccaaagagggcataataatcagtctcacagtagggttcaccatcctccaagtgaaaaacattgttccgaatgggctttccacaggctacacacacaaaacaggaaacatgccaagtttgtttcaacgcattgatgacttaccacctttccttcaaaggaggaaaattatctcccctgcaaagcccggttctacacagatttcacaaattgtgctaagaaccgtccgtgttctcagaaagcccagtgtttttgcaaataatgaaaagggaccccatatgtagcaaaaatcagggctgggggagagccgggttcattccctgtcctcattggtcgtccctatgaattgtacctgcccgggcggccgcttctagaac

SEQ ID NO: 11582 - DNA, 377 bp, Homo sapiens
ccgggcaggtactttatacagagtccttgtttgcctttagtctgatgccgtgggtgagcctgagttgtcctgtggtccacgttcctgaccaggtgtctttctcacccactggtttcaaaaaagatgttactgggttatagaaggctgggatggaaacaggataccaagttcgcatgaagacagtatctgaaaagagaggtaatttactttaacattttcaaaagaagatgcatatccatattgtgaagaaacgaagaacaaaaccttcactccaaacttctctacctggttgcaaagtatttgaagggaaagctcactaaggaagctactcccatagatcccagaactgttactgggtgtggccaggggactgcaga

SEQ ID NO: 11583 - DNA, 400 bp, Homo sapiens
ccgggcaggtacgcggggctaaggtaaagatttaattaaataattttggcctctcatagttttctctctctttaaagagaataaatagagggccaggtgtggtggctcacgcctgtgatcccagcactttgggaggccaagaggggcggatcatgaggtcaagagatcaagatcatcctggccaacgtggtgaaaccctgtctctactaaaaatacaaaaatgagctgggcatggtggggcgtgcctgtagtcccatgtacctcggccgcccgggcaggtccgggcaggtacattgatgggctggagagcagggtggcagcctgttcttgcacagaaccaagaattacagaaaaaaagtccaggaagctggagaggcacaacatcttccttggtagctca

SEQ ID NO: 11584 - DNA, 385 bp, Homo sapiens
ccgggcaggtacaaagtccctgaggcaaaagcatgcttgctgtgttctaggaaaagcaaggaagacagcatgtctatagcagtgggaggtggaaggataataaacagtatgtgaggttagaggggaccaaatcatgtattttccatccacaggttcccaaccttggctgcacattaaatttattctaaggagcttttaaaaaataccaatgactgggtcccagcctagagtgattaaatcagaatctctggaggtagacttgagaatctgatgtttgcaagtttcctagggcaagtcaaggcctgaggaaagactgcttgcaggccatttgtaagagccagggcgttgaatctcattttcaacccttttccctcaacctctttct

SEQ ID NO: 11585 - DNA, 383 bp, Homo sapiens
aggtacgcggggacatcaatgcagagtccctctgtgaatttacaacacccaacacccatgagttcagtccttaagaaggaaaattgagcaagtatttaattggttggacattgcataaaagaggtccatatccaggctaactctagaaattttattctcaaacttagttggcctctttttcttctgtcagaggaccattcttagtggcactggggaaatcttggcacccagaagaattcaactgcgctcactgcaaaaatacaatggcctacattggatttgtagaggagaaaggagccctgtattgtgagctgtgctatgagaaattctttgcccctgaatgtgggtcgatgccaaaggaagatccttggagaagtcatcaa

SEQ ID NO: 11586 - DNA, 388 bp, Homo sapiens
aggtacctttcattggattgtccatggtgcatcgctttagcaagcggcgtgactctccactgcccgtcatcttggccaatatctatctgctggttcctcctgtgctcaacccaattgtctatggagtgaagacaaaggagattcgacagcgcatccttcgacttttccatgtggccacacacgcttcagagccctaggtgtcagtgatcaaacttcttttccattcagagtcctctgattcagattttaatgttaacattttggaagacagtattcagaaaaaaaatttccttaataaaaatacaactcagatccttcaaatatgaaactggttggggaatctccattttttcaatattattttcttctttgttttcttgctacatat

SEQ ID NO: 11587 - DNA, 406 bp, Homo sapiens
ccgggcaggtacttccaaaccctcctgttctttccgttttgttttccccaattttaacataaggcaaaagcagtaattgagcaattctatcacctggattggcactccggggaacagtggagctgacactaactgaattccccctttataatctgaataaattaccccagtatgaatttggactcccttcaaatttagacttgatctccctaaaataaggcctaccctcccttctggcagcgggccatatacccctctaggaatcttttgtgggggctttccagggagtaaagagaccattttgggtggaacataaatctactgcggtgctgcctgctgtggcgcgggacagctgttggattgttgtaattggctgactccctgaagtggtggtattttcttaggg

SEQ ID NO: 11588 - DNA, 416 bp, Homo sapiens
aggtaccagttgtaaaattaccaggaaccgccatgcctcaagatcgccctgttttctggcttcatcaatgactgcatgcagtgcaccaccctgtccactacgtgatgctgtaggattaagtctcacagtgggcggctgaggatacagcgccgcgtcctgtgtcgctggtgaattagacgccatcgctgtgggttgctggtatggtgccgtgctatttggcacaggacacaccgcttgaggtctgtattgaacctttgaaggaggccgatttctgaaagcttcggttgggcagcccggtatttgaattaaccttaccaagcggtttgggttcttaatttttctaacccgggctggataattgtggggaatactgggattcttgaaatttgggcatttgcccggggtatagaaaactt

SEQ ID NO: 11589 - DNA, 404 bp, Homo sapiens
  misc_feature 296: n = A,T,C or G
aggtacttttttttactttggcaacaaatatttatacatacaagatgctagttcatttgaatatttctcccaacttatccaaggatctccagctctaacaaaatggtttatttttatttaaatgtcaatagtcgttttttaaaatccaaatcaagaggtgcaggccaccagttaaatgccgtctatcaggttttgtgccttaagagactacagagtcaaagctcatttttaaaggagtaggacaaagttgtcacaggtttttgttgttgtttttattgcccccaaaattacatgtntaatttccatttatatcagggaattctatttactttgaagacctgtgaagttgccatttttggtctcattgtttttcttttgacattaacttagggatcccattattt

SEQ ID NO: 11590 - DNA, 473 bp, Homo sapiens
ccgggcaggtactttctctttttttttttttaaataaatgaaaaattataaataaaattataatttaacttacaatattgaaacaaatacagactttcaggaggttgttaaattaatagtcttgcatgcccttcacccagtgatgacatttttttttttgagacgggggtcttgctcttgtcacccaggcttggagtgcagttggcttcgatactcaagctcacttgcaatgctctcgccttcccaggtttcatttgccggttctcccttgaacttaatccctcccatagcttgacttggttatcttaacagggttgcctcgttttaccacttcacctcatcctaaattctcttttgtaattttatttagatttaaataacatctccaatttattataatttggcctttttttcccattctagggtttatttgtttatataattctcttgtgccaagaagttcttccctcccc

SEQ ID NO: 11591 - DNA, 416 bp, Homo sapiens
aggtacattggatgtgaactcttttaaactataacatggacactttattggaaccaaactttagttttctacattaatgagaaacactggtaactttgcttcattgaaaaaataattgcttgttctctgtcagatgcacttcgtcttagtaacatggccatggggaagacaaccacaggccagatagtcaatctgctgtccaatgatgtgaacaagtttgatcaggtgacagtgttcttacacttcctgtgggcaggaccactgcaggcgatcgcagagactgccctactctggatggagaaaggaatattcgcgccttgttgggatgggatgttctaattacttttactggcccttgtatagtctgttttggggaaagcttgttttctatatattatgtgctcataacctgattc

SEQ ID NO: 11592 - DNA, 395 bp, Homo sapiens
  misc_feature 34, 380: n = A,T,C or G
aggtactctgcacggggtgggagaaagacaacanagggcaggtgaagtgggcaggcatgtgctttggcgaccccaaaaagctggcaaggctgcggaggttcaaacttaccttgaacaccaggggggacaaagatgacagtaatcatgatcactacagctaaggagaatcccatagggagacttctttgggacagggtttctgcattttgccccctgaggaaaggggtattgggaagagcaacacagcaggctcagcttgcaggggaatgtgtgtgctgcagcaccccaagaactcttcagggaccagggaaatgggagccccacgctttctttttactttcatctcccagatagtataggaccagtcatgattccatagntaatttataaggaaa

SEQ ID NO: 11593 - DNA, 383 bp, Homo sapiens
aggtacttttttttttttttttttttttttggtagagacagggtttcaccatgttggccaggatgatcttgatctcttgacctcatgatccgcccgtcttggcctcccaaagtgctgggatcacaggcgtgagccaccacacctggccctctatttattctctttaaagagagagaaaactatgagaggccaaaattatttaattaaatctttaccttagcgcaagggaaaaatggaatttgcctaatataggtgatgaagcatacacaatgaacagaaacaatcacattttagtaaaaggcaaaaatttgagacttattaagctttatggtaagcttatttttgggtgggggaagaaatgagaaaagaattttacatctctt

SEQ ID NO: 11594 - DNA, 372 bp, Homo sapiens
ccgggcaggtaccatgacccgttgcagccatcagcagtctccctatcagcttctgtttggggaaccctacatctttgaagaacttctgagcttgaagatccgcatctctccagatgcctttttccagattaacacagctggtgcagagatgctgtatcggactgtgggggagctgactggagtgaactctgacaccatccttcttgacatctgctgtggaactggtgtgattggcctctctctggctcagcatacatctcgggtccttgggattgaattgttggagcaggcagtggaggatgcaagatggactgcagccttcaatggcatcaccaactctgaatttcatactggtcaagcagagaagattta

SEQ ID NO: 11595 - DNA, 388 bp, Homo sapiens
  misc_feature 388: n = A,T,C or G
ccgggcaggtacgcggggacatcaatacagagtccctctgtgaatttacaacacccaacacccatgagttcagtccttaagaaggaaaattgagcaagtatttaattggttggacattgcataaaagaggtccatatccaggctaactctagaaattttattctcaaacttagttggcctcttttccttctgtcagaggaccattcttagtggcactggggaaatcttggcacccagaagaattcaactgcgctcactgcaaaaatacaatggcctacattggatttgtagaggagaaaggagccctgtattgtgagctgtgctatgagaaattctttgcccctgaatgtggtcgatgccaaaggaagatccttggagaagtcatcan

SEQ ID NO: 11596 - DNA, 386 bp, Homo sapiens
aggtacgcggggacatcaatgcagagtccctctgtgaatttacaacacccaacacccatgagttcagtccttaagaaggaaaattgagcaagtatttaattggttggacattgcataaaagaggtccatatccaggctaactctagaaattttattctcaaacttagttggcctctttttcttctgtcagaggaccattcttagtggcactggggaaatcttggcacccagaagaattcaactgcgctcactgcaaaaatacaatggcctacattggatttgtagaggaggaaagggagccctgtattgtgaggctgtgctatgagaaaatttctttgccccctgaatggtgggtcgatggcctaagggaagaatccttggaagaa

SEQ ID NO: 11597 - DNA, 393 bp, Homo sapiens
aggtacaaaaatatcacgctactaaccccactgttaatatagacgcagaccaattgttaggaacaggtccaaattggagcaccattaaccaacaatcagtgatgcataatgaggctattgaacaagtaagggctatttgcctcagggcctgtggaaaaattcaggacccaggaacagctttccctattaattcaattagacaaggctctaaagagccatatcctgactttgtggcaagattacaagatgctgctcaaaagtctattacaggatgacaattgcccgaaaagttattgtaagaattaatgggcctatgcaaaatagcaaattccatgaatggtcaggtcggcgcataaaagccatttaaaagggaaaaagtttccacgcaggaag

SEQ ID NO: 11598 - DNA, 387 bp, Homo sapiens
aggtacaaagtccctgaggcaaaagcatgcttgctgtgttctaggaaaagcaaggaagacagcatgtctatagcagtgggaggtggaaggataataaacagtaggtgaggttagaggggaccaaatcatgtattttccatccagaggttcccaaccttggctgcacattagatttattctaaggagcttttaaaaaataccaatgactgggtcccagcctagagtgattaaatcagaatctctggaggtagacttgagaatctgatgtttgcaagtttcctaggcaagtcaaggctgaggaagactgctgcaggccattgtaagagccaggcgttgatctcattcaacctttccctcagctcttctagagacagccagcattctctt

SEQ ID NO: 11599 - DNA, 395 bp, Homo sapiens
  misc_feature 42: n = A,T,C or G
aggtaccaccctcttgctgaaagcactggttcccctgttganagcttgctagggattacagtgggtttgactcaattcaagtaagtaagcaaacatttaagtatttttcaggcataaatgttagcgttcttatcctgtaatatgcgaagtaataaattatatacttactgcctttgttacaatgcatgcaaacacgtggtaaggtgttcataccttaggaagagatctgattctcaagaacagcagaaaataggaagcagagaatgagttaggatgaaattcaaatgggagaaagaaatgaagaagccagatacttccagtagttaatttcttaacatggctacttataataatagagaaatggttagaaaagaagggaaaagcaagaaaaatgt

SEQ ID NO: 11600 - DNA, 427 bp, Homo sapiens
  misc_feature 229, 365, 402: n = A,T,C or G
ccgggcaggtacacataacagaaaaatttaaaaggttagggatcatttaggaaaaaatgcaaatgccaacaaatgtgagaaaatgctcaatcttacttataatttaagaactacaattcagccaggcgcggtggctcatgcctgtaattcccagctactttgggaggctgaggcacgagaattgcttgaacccaagagggagagggttgcagtgagccaagaatcatgnccacttgggcactccagcctggggcgacagtagcaaagaacttggtcttctaaaaacaaaacaaaaccaaaaatacaaccaataaaaaatttacccaatttaaaaaatgagaaggagtttttttcatttgggcaanaagtttaaaaaaaggaaaagggtggaaaagaaaaaanacccttaacttctttcttccgattg

SEQ ID NO: 11601 - DNA, 399 bp, Homo sapiens
aggtacatcctgactctcaattcttgttttcctttgaagatccttcgaacccaacgtctcaactcacctggactggtttaccccaagggttcagggatagcccccatctatttggccaggcattagcccaagacttgagccagttctcatacctggaccctcttgtcctttggtacgcggggcctctcctctggccgccgcgcgggagagaggccgagatggcagatgagattgccaagggctcaggtcgcttcggccctggtggtcgacaccgatcttttggggaagaatcatcccgctaagggaaataaccagccccaaaaatcatttttttgagggaatgaacccggtggcccttgctttttcccatggacaattttccccctttaagccacccaa

SEQ ID NO: 11602 - DNA, 398 bp, Homo sapiens
ccgggcaggtactggaacgtttgtcagtgagtttcatttccaaagtttaccctacatagggaattgtagaagtgagttagtagaagtgagttcgtgtgaaaccctggaaagaaaacaaaagccccatgcaacgcgttccgggctgttgtgtagatgcttattctagtcactaggggaagcacataaaaacacctgaggtgtgtgtgctgaagggcgaattttgtccttttggggagttcatgatataaacatctagaaccaaaaaggtcaaatcataagggtcagttttaggtcttttagtttttctttgagggaaagattttaaaaggcaattagacctatatttagttttaccccggtttgtaacttaaaaaaattttggccttttaaatttcttt

SEQ ID NO: 11603 - DNA, 381 bp, Homo sapiens
aggtacaatgaaagtttcacatacggatcactggctccaaagatgtcctttttggcgagatcaattccagaaacaacttttactctgagaatacgggactctcccgagtgttacttgctcaaatgcgagacgtctcatttaggagaattcaatattaaaggtttagtgcattaaaggaaagctggaaaactcaagggcagagcaagttctgaagagtatgcggaagtcgtggctgcagccaagggtaactttccactgccgggtgacaaggtcacaggtagagaagttttaactttgacctcccagggaaaggcagtctacacgggttgtttcctcttcttggaaatgggcttccttctggtgactcccccgcggtacctg

SEQ ID NO: 11604 - DNA, 373 bp, Homo sapiens
  misc_feature 322: n = A,T,C or G
ccgggcaggtacgcggggatgtctcttgtcagctgtctttcagaagacctggtggggcaagtccgtgggcatcatgttgaccgagctggagaaagccttgaactctatcatcgacgtctaccacaagtacacctttcacagcagtcttaaagttgcagcagaagaatttaaagttcctgctgcaacaagtgcaattattaccaatgatggaataggaataaatcctgcacagactgctggaaatgtttttctaaaacatggttcagaactgcggattattcctagagatcgtgttggaaggttgttaatatctgctacttgngaacatacgattgcctttcagggataaatattggtatttttttgtttgttg

SEQ ID NO: 11605 - DNA, 384 bp, Homo sapiens
aggtactaacaaatgcagtagccaacaagattaccatgcaatcattaaggagaaccaaagtaagagagccactcaaaccagattttgaacgctactaaaattaaagtagttctttgatgaatatgaatgagtagggaaaggattctttgtaatagtgatacctctgtggtaagagaagggtggtatgtgagttttagtctacagattatggcaaattcagtgacaacaatcaaatggtctaagattgacagtagcacagttttactctgtgaaggtaatgttcaggacaaatttcaagaaaactagaaaaccattctttacagctgaaatctttccctaaccattgttatttccacttttaagtccttaagagatgagaaaagg

SEQ ID NO: 11606 - DNA, 394 bp, Homo sapiens
aggtactattgcattcatgaatgattacgcacttagtttataggctcttagcctgaatagatgttcagtaaacaaggaacttttgaaaaattacatcatattatcagttacatttaataattaatttctgacattaatttgattcctcaaaagtgttgatgatcctctcttattgagtatgtagttgatgcccatcattttcaatatcagttcattgtaaaagttaaaatagcatgagtctttagtgctatctttaccagttgtgaaattagtagtatttaataacactaaaaattctccatcttcattgtcttcagtgatttttagatttttggttattgactgataattcaatgagatcttttgttaaaaactaaattgttactttctgttg

SEQ ID NO: 11607 - DNA, 393 bp, Homo sapiens
aggtacaaggataagaattattgaaatatgttactagttagctttttcctttgtatttcaattctttttgaaatcttggaagtttggcttagtctttgattacaccaaggatacagggctttgaagacctggagaaactagtgagtattcatttcaaaagcaagtcttaagactggttcagaaccacaagcatgtttttttgggaaaagtgggaggattattgaacccaattgaatcacctttttaactgaagcaaactgaaatgaatatagcaaacccatcagttatatcactatattctttttaaactaatctaccatttccttgctcacctatcagttcatccatgttgtatgtatgagacagtatgacgtggtgattaaaagtttggaa

SEQ ID NO: 11608 - DNA, 359 bp, Homo sapiens
aggtacattattcctccacgtctgtcccctctgctccaagactgcaggggagagtcttgcacatcatctttgtaaaaacagtctttgttttactcagaaatattttattgagtcctgctaaatacatgctaggcattagggtttaaaaagaattaaaataaagcatgtcagagatggcttttctagaacacatgcccaagcagagacttaaatattgagactagccagattaaaaggtgtagagggcaggaaagggtgacggcatgccacgcagcagcaagagcgggagcgactcctgaaagagtgaaagtatttgcctacaatagaaggatgagtgagtagggcactgccagcagttc

SEQ ID NO: 11609 - DNA, 383 bp, Homo sapiens
ccgggcaggtacactggaggctggagcctgcagatggcatggctctgcggctcaccttgctgcagttggtggtggtgacagagactgcagcttgactgtagtggtggttaccaggagctctgccactgcatgtccactagtgacgggttcgctccaccaccccagctgggtagccgctgctctcacataaggggtccaattaaaattgccaggaataaattcccccggactttgacttctcaagagctaagaaggtttgctgagtattctggcatgatgtttggtgatcaaacaactgctggccaaaaatgatgagtatttccccctcttgctgaagatgtgctccatacaattattccatcacgttcattattcatcagtcg

SEQ ID NO: 11610 - DNA, 393 bp, Homo sapiens
ccgggcaggtacgcggggtgacacacacacacacacacagcacctgcacgcagatgcacacatctctagtcaaatgaggctctcagctttttgataggggctttttgatacgtgtataaccaatactttattctcactgtagtcaaggactcattgcaattcagaaatgagaagctgatccggaactccactacagctcaaagaaattctcgaatgttctcacctattaacagttattaaaatggaagaagctggggatgaaattgtgagcaatgccatctcctacgctctatacaaagccttcagcaccagtgagcaagacaaggataactggaatgggcagctgaagcttctgctggagtggaaccagctggacttagccaatgatgagat

SEQ ID NO: 11611 - DNA, 383 bp, Homo sapiens
ccgggcaggtacaaagtccctgaggcaaaagcatgcttgctgtgttctaggaaaagcaaggaagacagcatgtctatagcagtgggaggtggaaggataataaacagtaggtgaggttagaggggaccaaatcatgtattttccatccagaggttcccaaccttggctgcacattagatttattctaaggagcttttaaaaaataccaatgactgggtcccagcctagagtgattaaatcagaatctctggaggtagacttgagaatctgatgtttgcaagtttcctaggcaagtcaaggctgaggaagactgctgcaggccattgtaagagccaggcgttgatctcattcaacctttccctcagctcttctagagacagcca

SEQ ID NO: 11612 - DNA, 403 bp, Homo sapiens
aggtactgggcaaagctttgcagtatagatcgccctgaagaaggaggtctgccaccttatgtgtttgccctgatggccattttctttcttcagcagaggaaagaaccccttttgcctgtatatctaggatcatggattgaaggattctcattaagcaaactagggaatttcaaccttcaagacattgaaaaagatgttgtgatctgggaacatactgacagtgctgcaggggacacaggcataacaaaagaagaggcaccaagagaaacgccgattaaaaggggacaggtggtatcatccctactctgcagataatgatagcgcccattttttgaacactgtgtgccaggcactgtgctaagcactttacagacactatctcactcagtcctcccaacaaccc

SEQ ID NO: 11613 - DNA, 383 bp, Homo sapiens
ccgggcaggtactttttttttttttttttttttgtctttgtgccattgctttatctctatttggaatgacactctttcgtccttggtctctcaccaatccctacttcatagtcatcattaaaacccaaattttccttttacgcccaattcaaatgccagttctaccctgaaagctttctgggtctgccaaataagcactaactacttgtctctctctgtttctgtaatggccatcacatgagaacgacaagtgattttacagctgacaatatatatcctatcagcccttccgaattctttctccatccagctctgtgccctggatgtctcgcatggcctaacttgatggatgtccttgccttctagcttctcactgggttcac

SEQ ID NO: 11614 - DNA, 395 bp, Homo sapiens
aggtacttccaaaccctcctgttctttcctttttgttttccccaattttaacataaggcaaaagcagtaattgagcaattctatcacctggattggcactccggggaacagtggagctgatcactaactgaattccccctttataatctgaataaattaccccagtttgaatttggactcccttcaaatttagacttgatctccctcaaaggcctaccctcccttctggcagcgggccatatacccctctaggaatcttttgtgggggctttccagggagtaaaaagaccatttgggtggaacataaattctacttgcggtgctgcctgctgtggcgcgggacaagctgttgggattgattgtaattgggctgacctccctgaagttggtggtat

SEQ ID NO: 11615 - DNA, 397 bp, Homo sapiens
aggtacttaatcctggttggtttacccattctaaattatttatgtgagatagctatctatttggaaaaaagtaaagtgaaagtcttacctcaatccacactcaaaaatagtttactatatgacagatctatggcaggcagatttgatggctcaatgaactccaccctcccagtgttcacacctttatgtagttcccacttacagggagccaaaggtccgtgggacgtgaccaactcagcattccactggaggctatatgatcaaacagcaaactgtttatcatgaatgcaggatgtgagcaaactcaccattgctcctgccgacagaaggttttctggaggcaatcactccctggtgctgaggttatctactgcaacatttagagaatgtagtcttg

SEQ ID NO: 11616 - DNA, 383 bp, Homo sapiens
aggtacgcggggagtgataacattagaaactcattggagcacgaaccctgttgtgaactgcctatccgaaggatctaggttgtgtgcttcgtatgagaatctaatgccagatgatctatcattgtctcactttgcccccagataagaccatctagttgcagaaaaataagcccagagcttccactgattctacattatggatatgtgccgccgaagcaagcacaaagccctacttttacacatgcctagtgatgcttcatggacaaggcttggctctgttgagtccaactaacctacctgagattctgagatttctcttcaatggcttcctgtgagctagagtttgaaaatatcttaaaatcttgagctagagatggaagtag

SEQ ID NO: 11617 - DNA, 382 bp, Homo sapiens
aggtacttggcctggctgtcgaaataattcattccatttctttggtgattgtcaggaagctcttaatattttctgtaagtttttttcttggtttcaccaacaggcttcatcgatccacctctgtttaatataaatgatgcaatagggatgttgctgagcaagtaattatagtgagttattttgtcaatatatgggcttttgggagtaacaataatattcagatgttctcccactagcaaagccttatggttatcagtccaatcaatataaaggtaactttggctgagagatgagtatgctattgctcggtaaccttccctggcctgattttcttctggaagatctggagcatcagttttgacattaaactccagcaccgtca

SEQ ID NO: 11618 - DNA, 378 bp, Homo sapiens
ccgggcaggtacccatctacttggttacagtgactacaccgtaagtggacacttcaatcaagaaaggcctatcagagtcttcctctagactaacctatggtctgagggaaaaaaaaattctttctttccattaaaagctatggctgctggcagccattttgcttgtcccttaagaagaggccatctgttgaacagagaccactggattcaaagatggagagacattatctgagctcccagatccagctcagcctaagccctaaccagacttgccaattattacacacattaacttggttttttttgcttaaggttactgaaatcatatttccaacacctgcatccaagagtcctatataccacaagggggggtaaaca

SEQ ID NO: 11619 - DNA, 393 bp, Homo sapiens
ccgggcaggtacttcagatactcacacaaccatcgtgtttttcacttctggtgaataaagcagcccttatcgatacagtttctactgaatgtgtatcgtgttcacaccatcatcaagtcgaaaaatcatcaagttgaaccgttttaagccggggaccatctgtgttcaactttctgatgactttcacaagctctgcattttatctcccagctctgttgtaaggtattgtcagtgccttgcagaaaagaatcaaattccttccaagtgacatagacagcaagttttggagagctaaggacaaacagggcccgcagcttagctcagttggcttttgctttctcccacaccagcatttcccttgcgcagccccaagtttcttaaataccttctgat

SEQ ID NO: 11620 - DNA, 387 bp, Homo sapiens
aggtacatttacacatgaatgggtgcttggcaaggttaagaaacttgcacaaggtcacacagccaataaatgggggatccagaattccagcccaggtctgttgggctctaaagcctttgcacagtcttagctgttatgttgtattatattgcctcctaggttatgtatgtagaatttttggtcacatttaaatattccccttcgattcatagtgttaagaaatatacttaagcagctacgtatttactagggatgaaaatgtttccaattcataagccagaacacttttttcttcagatatttaacacaaagaagggatgaagaccattttttattcccatctcccatggtttcatattttttttaaacatttcttgaatgcttcat

SEQ ID NO: 11621 - DNA, 402 bp, Homo sapiens
ccgggcaggtacgcggggacatcaatgcagagtccctctgtgaatttacaacacccaacacccatgagttcagtccttaagaaggaaaattgagcaagtatttaattggttggacattgcataaaagaggtccatatccaggctaaccctagaaattttattctcaaacttagttggcctctttttcttctgtcagaggaccattcttagtggcactggggaaatcttggcacccagaagaattcaactgcgctcactgcaaaaatacaatggcctacattggatttgtagaggagaaaggagccctgtattgtgagctgtgctatgagaaattctttgcccctgaatgtggtcgatgccaaaggaagatccttggagaagtcatcaatgcgttgaaacaaa

SEQ ID NO: 11622 - DNA, 424 bp, Homo sapiens
aggtacatctacctaaaggactattatgtggaataatacatactaatgaagtattacatgatttaaagactacaataaaaccaaacatgcttataacattaagaaaaacaataaagatacatgattgaaaccaagttgaaaaatagtatatgccttggaggaaatgtgctcaaattactaatgatttagtgttgtccctactttctctctcttttttctttcttttttgtattatgggaagcttatcaacataaaatttgtttttatttaaaaaggaagaatattaaatttttgtgattaaactttgaatttctttaagttacatattttaattttatttgataataagtggttattttgaaataatacgaagagtaattgagatttttaggaagatatggagtatgtgttgttatgattatgg

SEQ ID NO: 11623 - DNA, 399 bp, Homo sapiens
ccgggcaggtactttaaaagttataatgctgatgaacaaaaaggtatgtaaaaactcaggatttaattaattagatatattttccaccattagaacatttctgctcagaggtcttattacaaagctacatttctgatagtctactacggtgcagcttctgccaaagccactcaatactaacctcttacatagcaactctacttacatgactaaaatgtatatcatactttacatagccaaaaagataaagaaccacctgatttctatttccaagctactcaaccctagtaaatggccttatcatttaccctacccaggcactgatgtaaaaaatctgggagttaatcataatttttctcttcctcttatatcccatatcatttgtaaattttcaacttt

SEQ ID NO: 11624 - DNA, 389 bp, Homo sapiens
aggtaccagttgtaaaattaccaggaaccgccatgcctcaagatcgccctgttttctggcttcatcaatgactgcatgcagtgcaccaccctgtccactacgtgatgctgtaggattaagtctcacagtgggcggctgaggatacagcgccgcgtcctgtgttgctggtgaattagacgccatcgctgtgggttgctggtatggtgccgtgctatttggcacaggacacaccgcttgaggtctgtattgaacctctgaaggaggccgatactgaagctcggttggcagccggtattgataaactaccagcggttgggtcttattttctaccggctgatattgtggatactgtatctgagttggcattgccgggatagagactctgtccc

SEQ ID NO: 11625 - DNA, 378 bp, Homo sapiens
aggtacgcggggtaaccacctgggaaaacttcacagaaaatgagagtttcagatgctgagaatagaaccactaagaagcagaaaagagaagatattctcgtgggggagaacaacggctgggaggggaggaagcatggccaaggcaaagaggtgggcattaataagaactgcttcttgctgccgccatatgaagaaggacgtgttcgcttccccttcctccatgattgtaagtttcctgagaccttgccagccatgctgaactgaatacaacatgtttaagaccacagaacatctgcataggctgtaaatttcgttgaatgatggatgcaaagatggaagacagatggatagaggaaaagacagaatcagatactggat

SEQ ID NO: 11626 - DNA, 804 bp, Homo sapiens
aggtacctacagtcagtgctaccagtagatttacttatcacatggtaagtggaatgtcacagataaataatttacaggacccttcttatcaaagatcattacaatgtaggcctaaggggaaggcttgccccaaggaaattcccaaagaatcaaaaagcccagaagtcttagtctgcggagaatgtgtggctgatactgcagtgtagtacctgcccgggcggccgaggtacgcggggacatcaatgcagagtccctctgtgaatttacaacacccaacacccatgagttcagtccttaagaaggaaaattgagcaagtatttaattggttggacattgcataaaagaggtccatatccaggctaactctagaaattttattctcaaacttagttggcctctttttcttctgtcagaggaccattcttagtggcactggggaaatcttggcacccagaagaattcaactgcgctcactgcaaaaatacaatggcctacattggatttgtagaggagaaaggagccctgtattgtgagctgtgctatgagaaattctttgcccctgaatgtggtccattgccaaagaagatccttggagaagtcatcaatgccttgaaacaaacatggcatggttcctggtttgggtgggaaccctgggaaagcccattcggaacaatggttttcacttgtgaggatggtgaaccctaatgtgagacagatattatgccctctttggtacctgcccggccggcaaggtcaagcgtgtcctgtataaccaacccccctggggacttaattccatttat

SEQ ID NO: 11627 - DNA, 401 bp, Homo sapiens
aggtacgcggggacatcaatgcagagtccctctgtgaatttacaacacccaacacccatgagttcagtccttaagaaggaaaattgagcaagtatttaattggttggacattgcataaaagaggtccatatccaggctaactctagaaattttattctcaaacttagttggcctcttttttttctgtcagaggaccattcttagtggcactggggaaatcttggcacccagaagaattcaactgcgctcactgcaaaaatacaatggcctacattggatttgtagaggagaaaggagccctgtattgtgagctgtgctatgagaaattctttgcccctgaatgtggtcgatgccaaaggaagaatccctggagaagtcatcaatgcctttgaaacaaactc

SEQ ID NO: 11628 - DNA, 399 bp, Homo sapiens
aggtacgcgggtaatctcttgggttatgattactgcaaaatacccatatattcataatattgtctctgttataaacttgtaatttctattggcagaacatatactcaaattatttttctaagtatgggtgatatatttgttttaattcattttacttttgtccctaagatccaacaatctataatgtgaagagagttaactgggtttaaaagtataatctgttcaacagggtggagtcttagtccacagaaaagtaaattatataaactcaattccttcatttttaagttgggtataacaccaactactcgacacctcatagcattaatatgaggacacaacgacgtaataaagacattagtgttactgaagattggcagccaatgctgatgtagtagc

SEQ ID NO: 11629 - DNA, 518 bp, Homo sapiens
tcgaggtacgttcaatccggggaatgatgacatgttcaatggcatttacacgcctgttggttatcttaatagcttcatccaaagtaacaaaagaagtctgcagagaagctagttccaccagtagttccactgctttggcataattcctctttaaatcaagcctaactggttcccccaccttatggctaaaacctagtccagtttcattaactgtacagtttcctttcaatggtaaattgtttcaaaaataacttgtgcaaaaagtaaactaccctgccttaccaattaatccttggctttcaccttcgaaattctttcacctatgccgccttttaatatgaccaattttttggaattaaaccttgtaagttgcctggaaaagttcacccttgtcttgtagaaaactttgggtcttttcaagccttagctggaaaaaagggccgggctttttctatcttccaattacacttttttccctcccaatttcaaaaccaatttttttaaggtccttccttatg

SEQ ID NO: 11630 - DNA, 381 bp, Homo sapiens
  misc_feature 324: n = A,T,C or G
ccgggcaggtaccagttgtaaaattaccaggaaccgccatgcctcaagatcgccctgttttctggcttcatcaatgactgcatgcagtgcaccaccctgtccactacgtgatgctgtaggattaagtctcacagtgggcggctgaggatacagcgccgcgtcctgtgttgctggtgaattagacgccatcgctgtgggttgctggtatggtgccgtgctatttggcacaggacacaccgcttgaggtctgtattgaacctctgaaggaggccgatactgaagctcggttggcagccggtattgataaactaccagcggttgggntcttattttctaccggctgatattgtggatactgtatctgagttggcattgccgggt

SEQ ID NO: 11631 - DNA, 494 bp, Homo sapiens
catcttgggtcatcgatgagcctcgccctgtgcctggtcccgcttgtgagggaaggacattagaaaatgaattgatgtgttccttaaaggatgggcaggaaaacagatcctgttgtggatatttatttgaacgggattaccgatttgaaaatgaaagtcaacaaagttgagcatttacccaatgaagaggaaaaacacgacgagtaaaaattctttgatgggctttcacaatgacattgccaacaaaaacaaaattggtaataccttgtgatgaacattgagggcagcccaaagcctgtgggagtgagaataatccaacggggggccaagaaggggttcagtgattttcttgggccccttgtcttgcacttaaaacctgttggcgttttcattaaacacaaaaatccatttttcaattattttcctaaaccccctcaaaaaaacaaaaagccttgtttgttaaattaattcttggaatcttcttaaccgggttc

SEQ ID NO: 11632 - DNA, 809 bp, Homo sapiens
  misc_feature 513: n = A,T,C or G
aggtacaggatagttgggaaatgtttctcaaccctcagagaatgctcactaggcacatgcataacatgtagatgcccaaagcatttcagaagtagaattacaaaaaacccccaaaacacttgtcatgaaggtttgtgaacctaatctcgcctgtatagactgggctaattctgatagtaagaggagttctcccttctcttaagtaaacaaaaactattggctttcatccaatcggttattctaagaccactgcaacttttttctctcacaaaaaggagttgccctaaagaagtttcatttgctttgatcttttttttcctccctcctctaaaggaaaaaaggtatgtgtgtgttgaaatctaaaatatggcaaagtttccatttaaaaatactttttaaataaccagatttgctcttcgcacaatgaggtctttggtccctgggagatattttatatcatattcccgaatttgttcctggagtcatctttaacggggctagggaacttattgngtgctgtaagaactgttggtatgacccaccatgctctctctggctctctctggaactcctacaactttgactttgagatagatctaaagaagtgagctatcaaattgtggaaatatcaggtaagaagttaagatgggttggtcatgggggctcacacctgtaatcccaacactttaggaggcccaagcaggcaggtcacttgagaccaggagttcaagaccaggagtttgagaccaccctggccaacatggtgaaccacatctctactaaattcaaaaattacaggttgggtgcat

SEQ ID NO: 11633 - DNA, 619 bp, Homo sapiens
  misc_feature 90: n = A,T,C or G
ccgggcaggtaccaggagggtattgatgtttgaggtccaaactgaaaacccatcacctccttcccactgctatagcagcgttagccctgnggttcattatctagccagttcacaaccttctaaagtggggctctgaaatgtcttacttcccttacagacaaaccatttctcaagccctcctgagatcacccaccaaccagagcaactgctgtcacttggaggtgcagctgaattcttctaattgtgacacaaactcttgaaactgtaaatgctgaaagattaaatgaggttataacactcagaaggtttacaagtaaaagtaagtcaaatcaataggtctttatttcatatctgtaatggtttagctctgcgggaagtgttagcagctatatgaattaggaggaatttaaaaaacaatccttaaccacatgaaatggtccaagtaagaagataccatatttttccaaatatttaaagtgaaatgctccaaatatgggaagcttacagttttcaaccaaagctttttagaaaaatatttggacactttttaaagagagctaaacatttctttgccttaggccgaaattcccgaacacagattcaccttttctgtaccttt

SEQ ID NO: 11634 - DNA, 811 bp, Homo sapiens
  misc_feature 494: n = A,T,C or G
ccgggcaggtaccggagttggagccacctgggtctgactcttacctcagtcatggcccagctcttgaagtcacagtctcctcagtgcaaacagggatgaatccctgagcctcacagatctttgtgagatgattttcagccctatatgaacaggcctaacatgtttctaactctgtaagtgcttactatactgctatacttctgctatgactagacaagaccattgcagaacacaggaaccgatcattctatagaaaccaagcatctagtgtgctatgctgtgtctgggccacctcaggaaagctctaagcataggcagcatgaggcattccagagatgacatgtgagcagcagtgaaggagagaggcttccgtgtgaaggtggcctgagccaacctagattcttcagtctgaaaagacacatagagaatgtgacagaatctggaaaataataaagaaaatggtggaggtaaacatcactgtcccatttgaaatntgaatatagtaatttccaggcacacaatacgcaatgagtagtaaaaagaacatgttatatcccataagctgtgatagaggctaaacatagaaattaatcaaaggtttattaaataattcttgattgaccgggcacagtggcttaggcttgtattcccaacacttgtgaaggccaggcaggtggatcacttgcaatcaggaattccggaccagcctggccaacatgtgaaaacccctctttcttaaaattcaaaaattgccagccatgggggctatgcctgttatccaacttctggataggctaaggcaaaaattctt

SEQ ID NO: 11635 - DNA, 804 bp, Homo sapiens
aggtacctgtctcatatgtggcaactacgtggggcagcacactcaaggaatgaaggaagtttcagtgaatgacaactttataaagacagtgttgaggcagcccagtgcagcggtttgggagccaggaacagcgtgtggccggagtgtggctgcaggacaggaggtcaaaaataagggttgagggtggaataggaagaccccggaacgtcatcctgggagcttgagattttattctacatttctcttgttcttaactatttagggtgatggatctctgcagtaagtggaagagttcttcatggcccccaaggttatatccatctagaacttcagcacgtaatttcatctggaaatagtgcctttgcggatataagttaggtaaaactgaagatgagatcatactggattaggatgggatctaaatccaatgaaaatgtctccataaaaaacaggaaagaacccatagaaacacaaggaagaaggtcatgtgaagatggaagcagagattggagggatgcagccaccggcccaggaatgccagcagccacccagaagcttgaaggaaatgaaggattctttcctaaaacctttagagaagacatggtcctgttaacagcttgattttgacttgcccattacttgtatactcttactttggataccaatttattcaaacttggctaacagtttcttaggccatggaaaattaaatggagaaaattaattcgtttttacgattaaagcaggaaatgatgggacctatgagagacaagaaagctataaaggcaaaatttaagtgacctt

SEQ ID NO: 11636 - DNA, 387 bp, Homo sapiens
ccgggcaggtacgcggggacatcaatgcagagtccctctgtgaatttacaacacccaacacccatgagttcagtccttaagaaggaaaattgagcaagtatttaattggttggacattgcataaaagaggtccatatccaggctaactctagaaattttattctcaaacttagttggcctctttttttctgtcagaggaccattcttagtggcactggggaaatcttggcacccagaagaattcaactgcgctcactgcaaaaatacaatggcctacattggatttgtagaggagaaaggagccctgtattgtgagctgtgctatgagaaattctttgcccctgaatgtggtcgatgccaaaggaagatccttggagaagtcatcat

SEQ ID NO: 11637 - DNA, 390 bp, Homo sapiens
aggtacgcggggacatcaatgcagagtccctctgtgaatttacaacacccaacacccatgagttcagtccttaagaaggaaaattgagcaagtatttaattggttggacattgcataaaagaggtccatatccaggctaactctagaaattttattctcaaacttagttggcctctttttcttctgtcagaggaccattcttagtggcactggggaaatcttggcacccagaagaattcaactgcgctcactgcaaaaatacaatggcctacattggatttgtagaggagaaaggagccctgtattgtgagctgtgctatgagaaattctttgcccctgaatgtggtcgatgccaaaggaagatccttggagaagtcatcaatgcgttga

SEQ ID NO: 11638 - DNA, 389 bp, Homo sapiens
ccgggcaggtacttccaaaccctcctgttctttcctttttgttttccccaattttaacataaggcaaaagcagtaattgagcaattctatcacctggattggcactccggggaacagtggagctgatcactaactgaattccccctttataatctgaataaattaccccagtatgaatttggactcccttcaaatttagacttgatctccctcaaaggcctaccctcccttctggcagcgggccatatacccctctaggaatcttttgtgggggctttccagggagtaaaaagaccatttgggtggaacataaatctactgcggtgctgcctgctgtggcgcgggacagctgttggattgttgtaattggctgactccctgaagtggtg

SEQ ID NO: 11639 - DNA, 815 bp, Homo sapiens
aggtacgcggggaatgccagatgatctatcattgtctcactttgcccccagataagaccatctagttgcagaaaaataagctcagagcttgcactgattctacattatggatatgtgccgccgaagcaagcacaaagcctacttttacacatgcctagtgatgcttcatggacaacgcttggctctgttgagtccagctaacctacctgagattctgagatttctcttcaatggcttcctgtgagctagagtttgaaaatatcttaaaatcttgagctagagatggaagtagcttggacgattttcattatcatgtaaatcgggtaactcaaggggccaaccacagctgggagccactgctcacgggaaggttcatatgggactttctactgcccaaggttctatacaggatataaaggtgccttacagtatagatctgggagcaaagtaagaagaaacaaacactgatctctttctgccacccctctgaccctttggaactcctctgaccctttaggacaagcctacctaatatctgctagagaaaagaccaacaacggcctcaaaggatctcttaccatgaaagtttagctaattcttgggctaagatgtgggatccacattaggttctgaatatggggggaagggtcaatttgctcatttgtgtgtgggataaataagatgcccaggggccataacagggggctgcttgttttggaaacatggctgtaccaattacctatggatgggaacaaaaaacaccaaagaccttgattaattggcatgagactgtgggacctgatcttaccgatatt

SEQ ID NO: 11640 - DNA, 393 bp, Homo sapiens
aggtacaatacaccttaattagagaacaaaaatgtaagctcagggttttgaaatcctggcttttcattgagtttttgcagatcataaaatatacttaattcggcaaaatatctaacagtccaaaacatataaacaacattaaaaaagctacagggattgggttaagacaggccaacacatttatcaggttcatctgttttaacaaaatgaaatatattaattgtagataaaaacatagctggagagaaagcaccaaggtaatcaaatagtaagcagcagcagaaccacatgccaagacactaagtgcttcacttgccttacatctcatttattccccacaacaacctaggagacaaacagtattactctgccccctttatcaactatgaagca

SEQ ID NO: 11641 - DNA, 808 bp, Homo sapiens
ccgggcaggtacccttacaaagaagacaccataccttatgcgttattgggtggaataatcattccattcagtattatcgttgtaagttaaatccacttttccaagtttataacttttgggcacttggcttaatttctgtactcttttaatgcttaaatgtgtaatcctccaaaaacaatgtatgctttttaaacctttaattgatgctttatttgatcaagagaatctcagctattttaagtggagtcaaaaaataacaatgtgtaattgtaagagccaggcatggtgacatgcctgtagtcccagctactcgagaggctgaggctagaggattgcttgagtctcggagttggatactataatatgtgatgatcacatctgtgaatagccattatactccagcccagacaacactgcaacatcccatcttaaaaaaaaacagaaaaaaaacacgaaaagaaccttgctggctatgtatagattttatgctaatcttttccatgtcaccgtgattgttagagctctaattttattgttttaataatcttgtgatcaatagttgaatgttatagcaatatgattctagcatactttatacataggatatcattttataatttattggatctgaatgattgacctcggccgcccgggcagggactttaaataaataattttaatactatatgatgggagcaatttgttgtaaagtataaatataaaaagatatttattgagagtatatatgatttattgataataaaaaaaagaaattgtgttttttatgataaaaaaaaacaatcttttc

SEQ ID NO: 11642 - DNA, 386 bp, Homo sapiens
aggtacatttggtggaactgagaaatggcataacaccaaatttaatatatgtcagatgttactatgattatcattcaatctcatagttttgtcatggcccaatttatcctcacttgtgcctcaacaaattgaactgttaacaaaggaatctctggtcctgggttatggctgagcaccactgagcatttccattccagttggcttcttgggtttgctagctgcatcactagtcatcttaaataaatgaagttttaacatttctccagtgatttttttatctcacctttgaagatactatgttatgtgattaaataaagaacttgagaagaacaggtttcattaaacataaaatcaatgtaaacgcaaattttctggatgggcaatac

SEQ ID NO: 11643 - DNA, 383 bp, Homo sapiens
aggtacagcccacagaactgtgagccaattcaatcccttttctttttcaattacccactctcatgtatatctttatagcagtgtgagaacagattaatacactcctcctcagaaagcattcaatttagctgtgtctaaagtatgccaggtgttctagggtgttatcttagccaataattcttcctcttcagcaagatctatttgcctatgacagcttgacctacatttcctaccatacttgtcagtaacaagtagcccataacatctgaatggacttcattgaaatcacagaggttctttagttctctactttattagcaggcattcgggaaacacatcaactttctaatttaataaggtgcctgttgctttgaaaaactgct

SEQ ID NO: 11644 - DNA, 381 bp, Homo sapiens
aggtacgaaaaaatcgggctactaagcccactgttaatatagacgcagaccaattgttaggaacaggtccaaattggagcaccattaaccaacaatcagtgatgcagaatgaggctattgaacaagtaagggctatttgcctcagggcctggggaaaaattcaggacccaggaacagctttccctattaattcaattagacaaggctctaaagagccatatcctgactttgtggcaagattacaagatgctgctcaaaagtctattacagatgacaatgcccgaaaagttattgtagaattaatggcctatgaaaatgcaaatccagaatgtcagtcggccataaagccattaaaaggaaaagttccagcaggagttgatg

SEQ ID NO: 11645 - DNA, 465 bp, Homo sapiens
aggtacatcatatttgcttgttggctttatgataacctagaaataatattctggattaactgtgtgactcatgagaagatttgtgcaactatgtttccaaatttacttgattttcaagacttacactagaactgtgagaacagggtaattaaataaacatattgtattaaatatcaacctttggtcaaactctttgggtacgccccaacggttagtgtagagaattaacagtaatttttttcactacttaaaagatatttgcgattattgtttttgaagaagaccaccagatttgacaaattcaatttgacaatgtcaatagtttttaagaaaatttgtttatggtttataaacaaatttttataaatggcaattctgcaaagtgggttttttattaggaaataactaaatctattcttagactgtgggtttttattattttgaacaaggttttgtttattcttt

SEQ ID NO: 11646 - DNA, 499 bp, Homo sapiens
ggcatttctcccagggatctctgtgcttccttttgtgcttcctgtgtgtgtggatatttaaaggggctggaaatgtgtaaaaacatgtcactacttagacattatattgtcatcttgctgattctagtgatgttaattatctccatttcagcagatgtgtggcctcagatggtaaaagtcaagcagcctttcttaattcctcaccctctgtattattcaggttcctttcccaccatgccaaatcttccctgggtcttcccttcggctggaagccccacacaaaatctcccccctctggttttttcggaaggcccacctttctcgggcaccttggctaattttttttcccccccgcggtaccctgccccggggcggggccggctcttagaacctaaggggaatcccccccgggccttgcaaggaaattccgaaaattcaagccttaatcgaataccccgtccgacccttcaaggggggggggccccgggtaccccaaacg

SEQ ID NO: 11647 - DNA, 389 bp, Homo sapiens
aggtacgtgcaaagcattctatgtatttttagcagaacaggagacttactttacactagctgaactaggtgtccatcagtgcctctgccaaccattggatgttagaggattctgccacctagcttattttatttgtatttaagtgaatataccaaacatttatatgagcaaaccaagttttacataacatgcttttggtatgtattatgactttttacatttctacttggatttcctcttcagatctcagtttccacaaatctgcatccaggttcagggcctctgattctgcacaaatcatatgagccaagtggattgattacttgacagatcagatctcttccccagctaataactctgccttctgattccagtcctcaaaataaatt

SEQ ID NO: 11648 - DNA, 409 bp, Homo sapiens
aggtaccgactcctcagaaactggcatgccaaatcaaaatgggtctggttcaatcctccctaatggcaatgtaaacaccctctaactaatcccacttctcctaattatctttttctccttacgaacctaaaaatctcaccatttctattagcctgaaaataacatccctctgttcttctcttcctccttcagcactggatctcacttacaataggttttatttaataattatcttccttacactttctgtctcaccagtttccccttaaactgatttacctgctacacaaaattattcttattgggcttatgtgccttttcctccacttattcgacctctcacctggatggatgctcctgcacaaatctatactaacgatagtgtgtggatgcctggaactacagatgg

SEQ ID NO: 11649 - DNA, 382 bp, Homo sapiens
ccgggcaggtacatctctagatgatcacgaatgtcaaatatcacactacactgtgatatggggattccccttgggggttttcatgtgtatagggtgcctgcagctacactaaacatcttaaagctaccacaatgttcacttcatatttttgctttttataggctttcttggtctcctcctatgttcccatcattttcttgctttgaatctgtaagaatcgagttgaatcttctccattttaaattttccataggctgagaaactgtttagccaagtttggataaaattgtatccaaagtaagagtatacaagctatgggcaagtccaaaatcaagctgttcacaggaccatgtttctctctaaaggttctaggaaagaatcc

SEQ ID NO: 11650 - DNA, 377 bp, Homo sapiens
aggtactttttttttttttttttttttttttttgtctttatctcattgttagaatgggaacaatgttcttttcagctttctacatcttagccagaaacagaaatctctttcctttggtatggctccacctatatgatatcaagataatttaatagtatgtagccacagtgcactaggaaaattaattggcttttaccagctttctgctgataatgccttaacttgaagaagttaaataattttggaaaagtcagatattgggaacaatcaaatttcgaatatacacatccaatataatcagataagtagtaaatagttaacaacaacaattaacgtcagaaaatagatccaagctctcatacatttgtctatcaaga

SEQ ID NO: 11651 - DNA, 327 bp, Homo sapiens
aggtacgcggggaggtgtgctgaggtccctcggcaagggacgctgctttcccctggcagccacactgctgagcataaatgctttaaagtgtcagcaattgatgtgtggagagaagtatgactgcattacagcttaaagagctttcacattcaggtctctacaggagaagacgagatcgccccgatagtttgagagtaaatgggttaccagaggaagagctaagcaacatggccaacgccctggccagcgccacttgcgagcgctgcaagggcggctttgcgcccgctgagaagatcgtgaacagtaatggggagctgtacctgcccg

SEQ ID NO: 11652 - DNA, 422 bp, Homo sapiens
aggtacttaaaatttacagctgactcaaattgcctcacagaattatttgatgtagaaggctagttgtcttacttcagatcagcaggacagttgggctctcagactcatgaccactgagtttgcttgtgttgaaactgtggtttcatccaacatatgctattggacatgattattattccattcaaatggattacagacttcttgaggacaggacaaacttatctctcatggtgtttttttagaatacttttataaccaaggaagaaaccatgccagctgttaccattcaacttcttaagcagagattaagctttttcatatctgttcttatcctggacatcagtagtttttaattgcccagcatccgttccatcttgtaacaactccctgatgtttcttaaaaccacctcttcctattttcg

SEQ ID NO: 11653 - DNA, 376 bp, Homo sapiens
aggtacatctacctaaaggactattatgtggaataatacatactaatgaagtattacatgatttaaagactacaataaaaccaaacatgcttataacattaagaaaaacaataaagatacatgattgaaaccaagttgaaaaatagcatatgccttggaggaaatgtgctcaaattactaatgatttagtgttgtccctactttctctctcttttttctttcttttttttttattatggttagctgtcacatacaactttttttttttttgaggtggggtctcgctctgtcaccaggctggagtgcagtggcgcgatctcggctcactgcaacctccacatcccatgttgaagtaattcttctgccttaacctcct

SEQ ID NO: 11654 - DNA, 380 bp, Homo sapiens
ccggccaggtacccgactcctcagaaactggcatgccaaatcaaaatgggtctggttcaatcctccctaatggcaatgtaaacccctctaactaatcccacttctcctaattatctttttctccttacgaacctaaaaatctcaccatttctattagcctgaaaataacatccctctgttcttctcttcctccttcagcactggatctcacttacaataggttttatttaataattatcttccttacactttctgtctcaccagtttccccttaaactgatttacctgctacacaaaattattcttattgggcttatgtgccttttcctccacttattcgacctctcacctggatggatgctcctgcagaaaactatact

SEQ ID NO: 11655 - DNA, 377 bp, Homo sapiens
aggtactaacaaatgcagtagccaacaagattaccatgcaatcattaaggagaaccaaagtaagagagccactcaaaccagattttgaacgctactaaaattaaagtagttctttgatgaatatgaatgagtagggaaaggattctttgtaatagtgatacctctgtggtaagagaagggtggtatgtgagttttagtctacagattatggcaaattcagtgacaacaatcaaatggtctaagattgacagtagcacagttttactctgtgaaggtaatgttcaggacaaatttcaagaaaactagaaaaccattctttacagctgaaatctttccctaaccattggtatttccacttttaagtcctcaagagatgc

SEQ ID NO: 11656 - DNA, 385 bp, Homo sapiens
aggtaccagttgtaaaattaccaggaaccgccatgcctcaagatcgccctgttttctggcttcatcaatgactgcatgcagtgcaccaccctgtccactacgtgatgctgtaggattaagtctcacagtgggcggctgaggatacagcgccgcgtcctgtgttgctggtgaattagacgccatcgctgtgggttgctggtatggtgccgtgctatttggcacaggacacaccgcttgaggtctgtattgaacctctgaaggaggccgatactgaagctcggttggcagccggtattgataaactaccagcggttgggtcttattttctaccggctgatattgtggatactggatctgaattggcattgccgggatagagactgtg

SEQ ID NO: 11657 - DNA, 374 bp, Homo sapiens
ccgggcaggtacttattttttttttttttttttttttgcttaagctaaaaaaatatataaactttagggaagagcagaacactcaggaactgcacccatacagactttatattcttcacttcaagaaatacagggtacgggctgggcgtggtggctcatgcctgtaatcccagcactttatcacttgaggtcagcagtttgagaccaacctggccaacatggtgaaactccctctctactaaaaatacaaaaattagccgggtgtggtggcaggcgcctatagtcccagctactcaggaggctgaggcaggaggatcacttgaacccaggaggcaaaggttgcagtgagccaagatcaccccaatgtattccag

SEQ ID NO: 11658 - DNA, 374 bp, Homo sapiens
aggtccaaaaaaatcaggctactaagcccactgttaatatagacgcagaccaattgttaggaacaggtccaaattggagcaccattaaccaacaatcagtgatgcagaatgaggctattgaacaagtaagggctatttgcctcagggcctggggaaaaattcaggacccaggaacagctttccctattaattcaattagacaaggctctaaagagccatatcctgactttgtggcaagattacaagatgctgctcaaaagtctattacagatgacaatgcccgaaaagttattgtagaattaatggcctatgaaaatgcaaatccagaatgtcagtcggccataaagccattaaaaggaaaagttccagcagga

SEQ ID NO: 11659 - DNA, 370 bp, Homo sapiens
ccgggcaggtactattataatatcgattttataggaaattgagacacagatattaagatatcaacgcaaagtcataggggagggaggagagaggggactgtaatttgaacacagtttgtctccagagtttgtgcttttagccactgagtagttgttaaactttagtgtgcatcagaattacttggaagccttgttcaaacattgctgggctccccccgcaatttctgattcagtagccctaggatggggactgagaatttttatttctaacaagttcccaggggatgctggtgctgcaggttcagggaacacacattgagccagtgcactaagccctgctgcctcttttgggtaatctgtgcccatgttt

SEQ ID NO: 11660 - DNA, 372 bp, Homo sapiens
aggtacgttgaaatattaggggcaggttcccccaatatctggcgcccaacgtggttttctttttcctaagtgcatgtgggaacccgattccctttgataggtgcggagaaatgttcatcggtccagtccacagaaatgcttgttcggctccccgacgattggtgagttgtctgtgtattgtccggggtaactatgggtcacgcagagtctaaacattatgcttatctctgctatattaaattcctgttaaaatgggggagttcgggttcccatggaaaatatggtcaccctattcagggcagtggaagaacactgtccttggtttcctgaaaagggaacgttagatgtggaactatgggatcatgttggtgt

SEQ ID NO: 11661 - DNA, 391 bp, Homo sapiens
aggtacgcggggcttcttgaaggaatcccttaagtgcacgtctcccgttttcttttcacatcaatgcagagtccctctgtgaatttacaacacccaacacccatgagttcagtccttaagaaggaaaattgagcaagtatttaattggttggacattgcataaaagaggtccatatccaggctaactttagaaattttattctcaaacttagttggcctctttttcttctgtcaggggaccattcttagtggcactggggaaatcttggcgcccagaagaattcaactgcgcttactgcaaaaatacagtgggcctacattggatttggtagaggaggaaagggagccctgtatttgggaggctgtgccttgaagaaatttttttgccccg

SEQ ID NO: 11662 - DNA, 379 bp, Homo sapiens
ccgggcaggtactcattttccctcatacttcggattgaccacagttgttacggcactcttataaataggattttcaccctacaacaaaaaaaaagtgagaaaaattatcagttaccctactaaaattatgtagaataatttttataaatcaagactaaaagttgcaatcatcttaagaagtcatttctattttatttgtccagatatcacagttgttttaaaggcattaataatggtttatataaaaatagaaaatggaagctttgctttacaagtctaatgatgccccgttatctggtgctatttcattcttgagtccttcctccactggaggcttgatttaagaatgttctccatggcacagaatgtgctgtcatcg

SEQ ID NO: 11663 - DNA, 392 bp, Homo sapiens
aggtacatttttattatccttataccagttataacttcattcatggtcctgatcctggcatccgtgaaagttgcagttttactcctaaggggaaccagacacgggagatgagcctgagcgatcacagcctgcccttatcagcggcaggcacaggcagggacctgcatcgcatggttccctacagcgcttttgattccgacaacacagacaggtcctactcaaaatccaattgaaaaagactttcatttgggagttaacaaattatgcccacttaacaagtattttggagaatatgtaatattctgctgagggaagacattgaaattgagttcaaatgttcattctggtccccttcgagggggcttaacagggtggggcagggaaagggcaat

SEQ ID NO: 11664 - DNA, 379 bp, Homo sapiens
  misc_feature 1: n = A,T,C or G
nccggccaggtacgcttcccttggcaccatgttataccatctgtgctgggctgaatagtgtccccccaaaattgaataatgtccccccaaaattcgtgtataccctgaacattagaatgtgatcttacttggtattacttggtatagggtgttgtagaaataatcaaataaagatgaggtcatactgcatcagggtagaccctaaattcaatgaccaggatttttataagtgaaaggagaggcggattcagagaaaaagacacagacacacacagagagaagacagccatgtgaagacacaagcataaattgaagtgacacagctacaagtccaagggaatgccaaaaattgctggtaaccaccatgaagtagggaaga

SEQ ID NO: 11665 - DNA, 391 bp, Homo sapiens
  misc_feature 297, 309, 313, 314, 331: n = A,T,C or G
aggtacgtgcaaagcattctatgtatttttagcagaacaggagacttactttacactagctgaactaggtgtccatcagtgcctctgccaaccattggatgttagaggattctgccacctagcttattttatttgtatttaagtgaatataccaaacatttatatgagcaaaccaagttttacataacatgcttttggtatgtattatgactttttacatttctacttggatttcctcttcagatctcagtttccacaaatctgcatccaggttcaggggcctctgattctgcacanaatcatatgagnccannagtggattgattactangacagaaatccagatcctttccccccagctaaataaacctctgcccttcttgatttccca

SEQ ID NO: 11666 - DNA, 397 bp, Homo sapiens
ctcacccccggggccggccgaggtccttggaactccaggcccgccccaccatgcccagctcatttttgtatttttagtagagacagggttccaccatgttggccaggatgatcttgatctcttgacctcatgatccgcccctcttggcctcccaaagtgccgggatcacaggcgtgagccgccacacctggccctctatttattctctttaaagagagagaaaactatgagaggccaaaattatttaattaaatctttaccttagcacaagggaaaaaatggaatttgcctaatataggtgatgaagcatacacaatgaacagaaacaatcacattttagtaaaaggcaaaaatttgagacttataagctatatggtacgcttatttttgggtgggg

SEQ ID NO: 11667 - DNA, 414 bp, Homo sapiens
aggtacgaaaaaatcaggctactaagcccactgttaatatagacgcagaccaattgttaggaacaggtccaaattggagcaccattaaccaacaatcagtgatgcagaatgaggctattgaacaagtaagggctatttgcctcagggcctggggaaaaattcaggacccaggaacagctttccctattaattcaattagacaaggctctaaagagccatatcctgactttgtggcaagattacaagatgctgctcaaaagtctattacagatgacaatgcccgaaaagttattgtagaattaatggcctatgaaaatgcaaatccagaatgtcagtcggccataaagccattaaaaggaaaagttccagcaggagttgatgtaattacagaatatgtgaaggcttgtgatgaga

SEQ ID NO: 11668 - DNA, 487 bp, Homo sapiens
ccggccaggtccccggggagtgcaatctgggcgatcgcttcctggtcctcgcctcctccgctgtctccctggagttcttgcaagtcggccaggatgtctcaggctgagtttgagaaagctgcagaggaggttagtgcacctttaagaccaaagccatccggaatgaaggagatgcctgtttcattctattggcccacttacaaaaccaagcaacctgttgggtcgaacataaaataaccagaaacggggccccgggaatagtttggaacatttcaccggggcaaaggtctcaaagttggggaattgcctcttgggaaatgaagacttgtaaaagtgtgaaactttcccaaagtgtaaagtattgtctcaatttgaaaaggcctttaacaattctaaaccaaaagtttatgtaaagtaaggccttaaaaggtaaaaaaaagattaaccgggggcattattggaagaaggaacttggggaatttttggg

SEQ ID NO: 11669 - DNA, 406 bp, Homo sapiens
ccgggcaggtacggggaggaacagagtccctcctttacttctccattagaaagaatgagatgacaagacaatgaaacaggcaaagtgaacagagatgcaagacaaaattcaggtgagagagccagagcatcgctcagccattcctgacatgtaaaacaggcaactagaaatttgcagaaaggaagcgaagtctccataaagatgtttttaaagtgagcttgaagtatttggagacaattcagtgttacataaaatctgcaaatctttggataaagaaagcgagatcccagcatgggacaaatggagcctcaaaagtgggaagaagacagagaagaccaggggcagaatgcattatcttcctttttctcttggcttttcctgggataaggacctggcattaattcct

SEQ ID NO: 11670 - DNA, 415 bp, Homo sapiens
aggtaccagttgtaaaattcccaggaaccgccatgcctcaagatcgccctgttttctggcttcatcaatgactgcatgcagtgcaccaccctgtccactacgtgatgctgtaggattaagtctcacagtgggcggctgaggatacagcgccgcgtcctgtgttgctggtgaattagacgccatcgctgtgggttgctgatatggtgccgtgctatttggcacaggacacaccgcttgaggtctgtattgaacctctgaaggaggccgatactgaagctcggttggcagccggtattgataaactaccagcggttgggtcttattttctaccggctgatattgtggatactgtatctgagttggcattgccgggatagagactctgtccctttctacttgattttctttggggttt

SEQ ID NO: 11671 - DNA, 408 bp, Homo sapiens
ccgggcaggtacatgggactacaggcacgccccaccatgcccagctcatttttgtatttttagtagagacagggtttcaccatgttggccaggatgatcttgatctcttgacctcatgatccgcccctcttggcctcccaaagtgctgggatcacaggcgtgagccaccacacctggccctctatttattctctttaaagagagagaaaactatgagaggccaaaattatttaattaaatctttaccttagcacaagggaaaaaatggaatttgcctaatataggtgatgaagcatacacattggacagaaaccatcccattttagtaaaaggcaaaaatttgagacttataagctatatgggagcttatttttggggtgggggaagaaatgagaaaaggaatttttc

SEQ ID NO: 11672 - DNA, 370 bp, Homo sapiens
  misc_feature 268, 275, 287, 298, 307, 316, 320, 321, 334, 335, 350, 352,353: n = A,T,C or G
aggtacgcggggacatcaatgcagagtccctctgtgaatttacaacacccaacacccatgagttcagtccttaagaaggaaaattgagcaagtatttaattggttggacattgcataaaataggtccatatccaggctaactctagaaattttattctcaaacttagttggcctctttttcttctgtcagaggaccattcttagtggcactggggaaatcttggcacccagaagaattcaactgcgctcaccgcaaaaatacaatggncctacanttggatttgtangaggagaaagngagccctgntattgtgangctnngtgctatgagaannattctttgcccctgnannatgtggtcgaatgccaa

SEQ ID NO: 11673 - DNA, 439 bp, Homo sapiens
aggtaccagttgtaaaattaccaggaaccgccattcctcaagatcgccctgttttctggcttcatcaatgactgcatgcagtgcaccaccctgtccactacgtgatgctgtaggattaagtctcacagtgggcggctgaggatacagcgccgcgtcctgtgttgctggtgaattagacgccatcgctgtgggttgctggtatggtgccgtgctatttggcacaggacacaccgcttgaggtctgtattgaacctctgaaggaggccgatactgaagctcggttggcagccggtattgataaactaccaacggttgggtcttattttctaccggctgatattggggatactgtatctgaattggcattgcccggatagaaactctgtccctttctacttggttttctcttgggggttgggcttgtctaacctgcgtttgg

SEQ ID NO: 11674 - DNA, 506 bp, Homo sapiens
aggtactggtgccaatattgccatggtgagctcctctctaatgtcttccagggcaccaatatctgcccatgtcacattagggacagtgacaaagccttcccttttggcagagggttggactgaggattgagcaaaccaatgaaatcattcaatttcaatgcacaagttcttgcattccgcttcctctgagagggggatcttttggtctcttagcaaaccccagacagccttttgtaatttcattcctgtgttttcagtaagttgggtctcagtttctcccagccttttcccttccttggacttcctttttagatgggcaaaaattcttccattttcaaggaatttttttcttcttgactgtttccctgttagcctttcatttaaagaacctctaatttgaactggcacaaccattggcttgccctcttcggcaacaagtggcccatgaagaatcaggcaaccaaacaaaagccctgggaagtttagggttgttgcctaaagatgaa

SEQ ID NO: 11675 - DNA, 409 bp, Homo sapiens
aggtacttccaaccctcctgttctttccgttttgttttccccaattttaacataaggcaaaagcagtaattgagcaattctatcacctggattggcactccggggaacagtggagctgacactaactgaattccccctttataatctgaataaattaccccagtatgaatttggactcccttcaaatttagacttgatctccctaaaataaggcctaccctcccttctggcagcgggccatatacccctctaggaatcttttgtgggggctttccagggagtaaagagaccatttgggtggaacataaatctactgcggtgctgcctgctgtggcgcgggacagctgttggattgttgtaattggctgactcctgaagtgggggtattttctgaggagtttgttgtcct

SEQ ID NO: 11676 - DNA, 414 bp, Homo sapiens
aggtacactagtatttaacctggacatgaggaaggagtaggaaattttctggtgaatacaggagagcaaagagcagcaggtcagcaggaatgactaatttttttctatgcatgtttaatggaatattcgtgtaggatattttgagtaggtcattggataatcagcatttataactcacatcctactagtttgattctcagtaataagacttgtcaaagatccaagaatctgaaagtcagtaataaatgtccatgtgcatcatcgtccgtgacagaaagtcagcatccacagaacacagaattgggacagatgaacttaatagataaagatgaatatcggagttgttcctcttagggaatgatactctccatgacctgtgtgagtcacagctgcagaaaagaaagagcaaggaga

SEQ ID NO: 11677 - DNA, 390 bp, Homo sapiens
ccgggcaggtacgcgggggcagggcaagctctaggagctggtgagtctagaaggacggactagagagagctggcattggaatggacaatcgctagagggcgccggagcactagcagagtcaacctccgggacccataagcagggcttctaggataaggaatggagtttgacccaaccccaagatatgccctggggatattggttttctcaggtgcatctgactctccggcctggattgcctcgctgcggagaggggacaaaaggttttgccctgagcatctggtgatgtcttccagtgcctggttaggttgctccgcggctggacagtctgactactctcaaaactcctcgtgacaggcctttctggggtctgaacgccctttgtttcct

SEQ ID NO: 11678 - DNA, 392 bp, Homo sapiens
ccgggcaggtacaagaaaaaatcaaacaatcacatcaaaaagtgggcgaaggatatgaacagacacttatcaaaagaagacatttatgcagccaacagacacatgaaaaaatgttcatcatcactggtcatcagagaaatgcaaatcaaaaccacaatccgggaggtcttgccaaagaccacctgggctttccgggcaacgtgctagagcttctgggaagcagtcatggccctttggagattccacggcttcagatccctactgcaggatgctccactgtgcctgccggcctctggcgttttgctgaggggtaacctcggaatggttagaaacaagaacactgagatggcccagtcgtgccccaggcattcccgcacacgtggtggcaaaga

SEQ ID NO: 11679 - DNA, 415 bp, Homo sapiens
ccgggcaggtacatctctagatgatcacgaatgtcaaatatcacactacactgtgatatggggattccccttgggggttttcatgtgtatagggtgcctgcagctacactaaacatcttaaagctaccacaatgttcacttcatatttttgctttttataggctttcttggtctcctcctatgttcccatcattttcttgctttgaatctgtaagaatcgagttgaatcttctccattttaaattttccataggctgagaaactgtttagccaagtttggataaaattgtatccaaagtaagagtatacaagctatgggcaagtccaaaatcaaatctgttcacaggaccatgttctctctaaaggttctaggagagaatccctcatttccttccagcttctggggtggctggtg

SEQ ID NO: 11680 - DNA, 385 bp, Homo sapiens
aggtacgcggggacatcaatgcagagtccctctgtgaatttacaacacccaacacccatgagttcagtccttaagaaggaaaattgagcaagtatttaattggttggacattgcataaaagaggtccatatcccggctaactctagaaattttattctcaaacttagttggcctctttttcttctgtcagaggaccattcttagtgacactggggaaatcttggcacccagaagaattcaactgcgctcactgcaaaaatacaatggcctacattggatttgtagaggagaaaggagccctgtattgtgagctgtgctatgagaaattctttgcccctgaatgtggtcgatgccaaaggaagatccttggagaagtcatcaatgg

SEQ ID NO: 11681 - DNA, 421 bp, Homo sapiens
ccgggcaggtaccagttgtaaaattaccaggaaccgccatgcctcaagatcgccctgttttctggcttcatcaatgactgcatgcagtgcaccaccctgtccactacgtgatgctgtaggattaagtctcacagggggcggttgaggatacagcgccgcgtcctgtgttgctggtgaattagacgccatcgctgtgggttgctggtatggtgccgtgctatttggcacaggacacaccgcttgaggtctgtattgaacctctgaaggaggccgatactgaagctcggttggcagccggtattgataaactaccagcggttgggtcttattttctaccggctgatattgtggatactggatctgggttggcattggcgggatagagaatctgtccctttctacttgaatttctcttgggggt

SEQ ID NO: 11682 - DNA, 486 bp, Homo sapiens
catcttgggtcatcgatgagcctcgccctgtgcctggtcccgcttgtgagggaaggacattagaaaatgaattgatgtgttccttaaaggatgggcaggaaaacagatcctgttgtggatatttatttgaacggggattacagattttgaaattgaaagtcacaaagttgagccattaccaaatgacgaggaaaaacagtacgaagaaaaatcttgaatggccctcacaagtaccatgcaaacaaacaaaaatgggaatacttgtgaatgacattgaaggcattcccaagctgtgggaggtagataaccccacgggtgctagaggggtcagggaattctggtcccttgcctgtccttaaactggtgccgtttcataaaccaaaatccaatttcaatattttcttaaacccttcaaaaacaaaagcttggttgtaaatattcttgatcttctaacgggtttcctttcttgggccccaacatttcttc

SEQ ID NO: 11683 - DNA, 375 bp, Homo sapiens
ccgggcaggtactgagtttcaggaaacagtgagatactttcagcaaaacagtgggcttcatgctgaaagaagtcactccaagtaaacacacatcacacacacacacacacacacacacacacacatacacacacccgcagacaccctagtggccaatgggtcctctcaccaaaaacctgtgatcaggagagcagaaagcctcccaggggtccatcactgccctttctggagccccttatcagatggccagccccaggacagcactgtctgatcctggtccagtccaaaccgccatcaccctgtgatgtgggagctggccacttcaccagaacctctgtgtcagaaaaatttctcttccttttaaaatgatgaggg

SEQ ID NO: 11684 - DNA, 379 bp, Homo sapiens
aggtaccgactcctcagaaactggcatgccaaatcaaaatgggtctggttcaatcctccctaatggcaatgtaaacccctctaactaatcccacttctcctaattatctttttctccttacgaacctaaaaatctcaccatttctattagcctgaaaataacatccctctgttcttctcttcctccttcagcactggatctcacttacaataggttttatttaataattatcttccttacactttctgtctcaccagtttccccttaaactgatttacctgctacacaaaattattcttattgggcttatgtgccttttccttcacttatttgacctctcacctggatggatgctcctgcagaaatctatactaacgat

SEQ ID NO: 11685 - DNA, 445 bp, Homo sapiens
gtgttggaatcctattataaggccaaggggagctgtaccgcggtggcggcgcgaggtacgaaaaaatcaggctactaagcccactgttaatatagactcagaccaattgttaggaacaggtccaaattggagcaccattaaccaacaatcagtgatgcagaatgaggctattgaacaagtaagggctatttgcctcagggcctggggaaaaattcaggacccaggaacagctttccctattaattcaattagacaaggctctaaagagccatatcctgactttgtggcaagattacaagatgctgctcaaaagtctattacagatgacaatgcccgaaaagttattgtagaattaatggcctatgaaaatgcaaatccagaatgttcagtcggccataaagccattaaaaggaaaagttccagcaggagtttgatggtaattaca

SEQ ID NO: 11686 - DNA, 386 bp, Homo sapiens
ccggtcaggtacaaagtctttgaggcaaaagtttgcttgctgtgttctaggaaaagcaaggaagacagcatgtctatagcagtgggaggtggaaggataataaacagtaggtgaggttagaggggaccaaatcatgtattttccatccagaggttcccaaccttggctgcacattagatttattctaaggagcttttaaaaaataccaatgactgggtcccagcctagagtgattaaatcagaatctctggaggtagacttgagaatctgatgtttgcaagtttcctaggcaagtcaaggctgaggaagactgctgcaggccattgtaagagccaggcgttgatctcattcaacctttccctcagctcttctagagacagccagca

SEQ ID NO: 11687 - DNA, 384 bp, Homo sapiens
ccgggcaggtactacagattacagtgctatccagaggaagggaggctgaaagtgtctgattttttatagcattaggttcagtctcactggcattactacttttatactgagctgcagccaatgctgccttgtgcttttttaaatggataaaatcagttgtgcctgagaacccagaactgggttgaacaacacttcctgtcttactactggctaatgtaactggtgctgtggtgctgaccttgcattcttgtttttgagccactggctgactgacactttttgaagatacacattctgatgatgtagaggccaaaatggtatttgataaagaggaaattacttctgaaccaccccagctggaaacactggtagtatcggcagcaa

SEQ ID NO: 11688 - DNA, 507 bp, Homo sapiens
cgcaccggtcgttccacctaactattacggcgaagcgaagctccaccgcggtggcggccgaggtacgaaaaaatcaggctactaagcccactgttaatatagacgcagaccaattgttaggaacaggtccaaattggagcaccattaaccaacaatcagtgatgcagaatgaggctattgaacaagtaagggctatttgcctcagggcctggggaaaaattcaggacccaggaacagctttccctattaattcaattagacaaggctctaaagagccatatcctgactttgtggcaagattacaagatgctgctcaaaagtctattacagatgacaatgcccgaaaagttattgtagaattaatggcctatgaaaatgcaaatccagaatgtcagtcggccataaagccattaaaaggaaaagttccagcaggagttgatgtaattacagaatatgtgaaggcttgtgatgggattggaggagctatgcataaggcaatgctaatgg

SEQ ID NO: 11689 - DNA, 395 bp, Homo sapiens
ccgggcaggacgcggggagaaaaacagaggggagatttgtgtggctgcagccgagggagaccaggaagatctgcatggtgggaaggacctgatgatgcagaggtctgtaggccatgggaatgggtttggaattttattcaaagagctatgggaagtgactagaaggtttaaagttggggaagaggttttgtgtttctgttatatttgtgttttatacaaattactctggttgctgtgttgataggacagcagaagggtaggagcagggacaccagttaagttattgcaatggttaaggtgagaggtggtggctgggcctaggcctttttggagtgaacaagctatttgcttggcttccatgatccttctccctccactggaatggaaaggtcctc

SEQ ID NO: 11690 - DNA, 399 bp, Homo sapiens
aggtacgtaacaggacatcaataaatattagttgaatggaagattaaatcaacaaaatgggtgatggatctctgcagtaagtggaagagttcttcatggcccccaaggttatatccatctagaacttcatcacgttattttcatctggaaatagtgcctttgcggatataagttaggtaaaactgaagatgagatcatactggattaggatgggatctaaatccaatgaaaatgtcttcataaaaaacaggaaagaacccatagaaacacaaggaagaaggtcatgtgaagatggaggcagagattggagggatgcagccaccggcccaggaatgccagcagccacccagaagctggaaggaaatgagggattctttcctagaacccttatagagaaca

SEQ ID NO: 11691 - DNA, 396 bp, Homo sapiens
aggtacttttggcaatctgttgcaacacaatgctgtgtttaattgattctaccatgctatttgttgtctctttgagagtttcaattttctttctctgttcatcttctttgcagttttgaagcttgtcatcaaaaagctttaattgttcaatcaagatttgtaggtaagcatcagcttctgtaagtttcttatcaaaatcttggacactaggaacaaatcctgaatccaaaccttgaagctggagagtatgtcgaagaattgtttcttctaaggcatggatccacttctctcgctcatcagcatcacgggcctggaaatggaaggttttctgatcaacagttattgtgaaggtgctgtcgtcctcatcgtctataccaatcacagctcctctgagtc

SEQ ID NO: 11692 - DNA, 438 bp, Homo sapiens
ggggggggtcgttgaaatccgtctgtgaaggcaattggagcttcaccgcgatggccgccgaggtactttttttttttttttttttttttttgtccgcaaaatttttcattcagatatttgctgagatttttgcttttttatctaacctcatttggtgtcctgtaaagcgcatcttgaacagcccctagagctaaagggtagtcactagaccagcagcatcaacatcagctgggagctttactgaattgcagaatatgaggccccagtccagatggactgagtcaaagtctggggggatgtgacccagcaatctgtgttccaacaagccctctagaagattcgaacacacacgaaagttggacaaccattgctttgaattttgacaccagaaactcagggaaagctacagaatgacgtttgaatgaagaagcaatatta

SEQ ID NO: 11693 - DNA, 391 bp, Homo sapiens
ccgggcaggtacaataaatcttcctgtcccttccaccagaatacacatgtgtgaaggcatcattgacttgcagcgcccaaacaccttcatcatggactcggtatgttgctatacatctctgctggccaagggaccaaaggcgaattgtcccatcaaaactgcctgacaggcattgcgtgccatctctgtttaatagcaatgccttcacattatccgtgtgccctttaagcttcattagttttgcacatgttcttggatcccataccctgaacaccttttcagtggaccctgatacaatgattgttcccagttgattcatggccaggctataaatggaatctttgtttccacttaaagaagaagttgtgacagtgttatttgaggcagtcaa

SEQ ID NO: 11694 - DNA, 444 bp, Homo sapiens
gggggggggtaggatgcaattaggtatatcaggcgaattttagctttcaacgccctggcggccgcccgggcaggttcatggcgaagcttgagactgtaactcttaagattgggacaaattaaagaaaaaaatgtgatttaacacaattacaaaaactgttacgttagggtcaaacaagaaccattttatgaaactgaattacaacaaatgacattatatctaactcttccgggtctccacagcacttatacttacttaagcagcttaaacacttccgagtctccacagcactctgatacttacttaaacagctcttttaacctgccctagtattcttaagtgcagcatatctaatttttttttttcctcagtagttcgaacacttgctggctattttttctgtccaagttctcagtaacttcggcctgtgtagtcagtggttca

SEQ ID NO: 11695 - DNA, 372 bp, Homo sapiens
ccgggcaggtactcattttccctcatacttcggattgaccacagttgttacggcactcttataaataggattttcaccctacaacaaaaaaaagtgagaaaaattatcagttaccctactaaaattatgtagaataatttttataaatcaagactaaaagttgcaatcatcttaagaagtcatttctattttatttgtccagatatcacagttgttttaaaggcattaataatggtttatataaaaatagaaaatggaagctttgctttacaagtctaatgatgccccgttatctggtgctatttcattcttgagtccttcctccactggaggcttgatttaagaatgttctccatggcacagaatgtgctg

SEQ ID NO: 11696 - DNA, 377 bp, Homo sapiens
  misc_feature 297, 350: n = A,T,C or G
aggtacttgcccccaggcccagataatttatttaaaaactttttttgtagagacagggtctcactatgttgcccaggctggtctcaaactcctggcctcaaacaatcctctacctcaacccccctaagtgctggcattacaggcatcagctgccatgcctggctacaaatcttaatgttttccccatggcttctttttctggcgttcttttctcaggtaatggaagtgggcagagaatgatcctttccctaggctccagtgtgtaagaattaaagaaagaggaaagaaacacaatgngcttgatggtcgaggacaggtttattttaaagaaaacaaacccaagagtggcnttctggctgagttagatcagaggcatg

SEQ ID NO: 11697 - DNA, 375 bp, Homo sapiens
aggtacagaacgcaagaagggaataggtggtctgaacgtggtgtctcactctgaaaagcaggaatgtaagatgatgaaagagacaatgtaatactgttggtccaaaagcatttaaaatcaatagatctgggattatgtggccttaggtagctggttgtactgaggctgtatacagccacagcctccccccatccctccagccttatctgtcatcaccatcaacccctcccatgcacctaaacaaaatctaacttgtaattccttgaacatgtcaggcatacattattccttctgcctgagaagctcttccttgtctcttaaatctagaatgatgtaaagttttgaataagtttgactatcttacttcatgcaaag

SEQ ID NO: 11698 - DNA, 383 bp, Homo sapiens
aggtacgcgggctttcttgaaggaatcccttaagtgcacgtctcccgttttcttttcacatcaatgcagagtccctctgtgaatttacaacacccaacacccatgagttcagtccttaagaaggaaaattgagcaagtatttaattggttggacattgcataaaagaggtccatatccaggctaactctagaaattttattctcaaacttagttggcctcttttttttctgtcagaggaccattcttagtggcactggggaaatcttggcacccagaagaattcaactgcgcctcactgcataaaatacaatggtcctacatttggattttgttagagggagaaagggagcccttgtatttgtgagcctgttgctattgagaa

SEQ ID NO: 11699 - DNA, 403 bp, Homo sapiens
aggtaccttctgctgttccctgggtcttcaatgactcaatttcccaccagcagtatcctttaaagccatcctgcatcctgagacaagagattgacaattcattgataagtagtcttaattgtcactattacagggctgtaggtcctttgccagccatgcctttcagtcctaaatggtcttcaaggttgggctgtgttgtccaagagctgaggaccttacatttattgttccaatatttattggctataatgatttctgtggagcagtcagctgtcagaaaattttgtctcctttgtaggtaacctgtcattggtctttggatttttttatagtctccctttgtatctggtgtaatttagtttcaatctgttgtgcctacgtgtagacttcttgcttgaaaagc

SEQ ID NO: 11700 - DNA, 372 bp, Homo sapiens
aggtactaacaaatgcagtagccaacaagattaccatgcaatcattaaggagaaccaaagtaagagagccactcaaaccagattttgaacgctactaaaattaaagtagttctttgatgaatatgaatgagtagggaaaggattctttgtgatagtgatacctctgtggtaagagaagggtggtatgtgagttttagtctacagattatggcaaattcagtgacaacaatcaaatggtctaagattgacagtagcacagttttactctgtgaaggtaatgttcagggacaaattccaagaaaactagaaaaccattctttacagactgaaatctttccctaaccattgttatttccactttttaagtcctca

SEQ ID NO: 11701 - DNA, 377 bp, Homo sapiens
  misc_feature 321: n = A,T,C or G
ccgggcaggtacgctgaaatattaggggcaggttcccccaatatctggcgcccaacgtggttttctttttcctaagtgcatgtgggaacccgattccctttggtaggtgcggagaaatgttcatcggtccagtccacagaaatgcttgtttggctccccaacgattggtgagttgtctgtgtattctccggggtaactatgggtcacgcagagtctaaacattatgcttatctctgctatattaaattcctgttaaaatgggggagttcgggttcccatggaaaatatggtacaccctattcagggcagttggaagaacanctgtccttggttttcctgaaaaggggaacgtttagatgttggaaactatggggatc

SEQ ID NO: 11702 - DNA, 371 bp, Homo sapiens
aggtacgcggggacatcaatgcagagtccctctgtgaatttacaacacccaacacccatgagttcagtccttaagaaggaaaattgagcaagtatttaattggttggacattgcataaaagaggtccatatccaggctaactctagaaattttattctcaaacttagttggcctctttttcttctgtcagaggaccattcttagtggcactggggaaatcttggcacccagaagaattcaactgcgctcactgcaaaaatacaatggcctacattggatttgtagaggagaaaggagccctgtattgtgagctgtgctatgagaaattctttgcccctgaatgtggttcgatgccaaaggaagatccttgg

SEQ ID NO: 11703 - DNA, 401 bp, Homo sapiens
ccgggcaggtacgcgggggcagacagattgccttatttcagctcaataaaacatcaccaaattcccttaggcagaaaaagggtggggagtgccctttcttgaaggaatcccttaagtgcacgtctcccgttttcttttcacatcaatgcagagtccctctgtgaatttacaacacccaacacccatgagttcagtccttaagaaggaaaattgagcaagtatttaattggttggacattgcataaaagaggtccatatccaggctaactctagaaattttattctcaaacttagttggcctctttttttctgtcagaggaccattcttagtggcactggggaaatcttggcacccagaagaattcaactgcgctcactgcaaaaatacaatggcctacatt

SEQ ID NO: 11704 - DNA, 369 bp, Homo sapiens
ccgggcaggtactaatgtaggttttaggcaaccattgggggtcttggaatgtgtcccctgtggatgagaggggattactatattccatattgaaatcttgtcaaagcaaacgatttgcaacttgtctgtgagagtagatctagcttctggatggtccaaaaacttagactctttagaagcttcttataaaaagaaaagatgctcacttgaagaagtgaaccttcaaattcttctgtgaaatgcttaggccagttatacacggtgtttgaaataacaactccctcccctaaactgaacatccaaaactgaaattttatattgcacaaggtctatcacacttattacctagaaactgctttcctaaaaatt

SEQ ID NO: 11705 - DNA, 505 bp, Homo sapiens
gggcatgctgtaatacatctatataggacgacttggagctcatccgcggtggcggccgcccgggcaggtacctcaagttgcgttgtcgtatttatatacattcctatgcttgaaactgcccaataaatggatgaggactcactttacccataaataagagaggtgaacagcacatggggcctgtagatgccttttgcagggccctctttttcttcttctaaagttgcaattttgagtaatttttttagatggggcccattaatagaaacctgccgtcctaaaatcagaagccctggggagaagagatacagggggtaatggcttaacattttgcagaagtggggaaacaagcccccaaaaaaaattaagaattgattataccaaaaaaggctttcctatactgggaaaaaaaacccaatctgggggtaaaaaaaaatcttgttggcacccaaaaaaaagcaattggaacccattctaacattaaactgggtttttaaacaaaaag

SEQ ID NO: 11706 - DNA, 373 bp, Homo sapiens
aggtacatagtccctgaggcaaaagcatgcttgctgtgttctaggaaaagcaaggaagacagcatgtctatagcagtgggaggtggaaggataataaacagtgggtgaggttagaggggaccaaatcatgtattttccatccagaggttcccaaccttggctgcacattagatttattctaaggagcttttaaaaaataccaatgactgggtcccagcctagagtgattaaatcagaatctctggaggtagacttgagaatctgatgtttgcaagtttcctaggcaagtcaaggctgaggaagactgctgcgggccattgtaagagccaggccgttgatctcatttaacctttccctcatctcttctagagtc

SEQ ID NO: 11707 - DNA, 393 bp, Homo sapiens
aggtacaaagtccctgaggcaaaagcatgcttgctgtgttctaggaaaagcaaggaagacagcatgtctatagcagtgggaggtggaaggataataaacagtaggtgaggttagaggggaccaaatcatgtattttccatccagaggttcccaaccttggctgcacattagatttattctaaggagcttttaaaaaataccaatgactgggtcccagcctagagtgattaaatcagaatctctggaggtagacttgagaatctgatgtttgcaagtttcctaggcaagtcaaggcttgaggtaagactgtctgcaggcccatttgtaagtaacccaggcgttgaatcttcattcaaaccttttcccttcagcctttttattaaaagacaggcc

SEQ ID NO: 11708 - DNA, 391 bp, Homo sapiens
aggtaccagttgtaaaattaccaggaaccgccatgcctcaagatcgccctgttttctggcttcatcaatgactgcatgcagtgcaccaccctgtccactacgtgatgctgtaggattaagtctcacagtgggcggctgaggatacagcgccgcgtcctgtgttgctggtgaattagacgccatcgctgtgggttgctggtatggtgccgtgctatttggcacaggacacaccgcttgaggtctgtattgaacctctgaaggaggccgatactgaatctcggttggcagccggtattgataaactaccagcggttgggtcttattttctaccggctgatattgtggatactggatttgagttggcattgtccgggcttgagacttctttcct

SEQ ID NO: 11709 - DNA, 359 bp, Homo sapiens
  misc_feature 303, 314: n = A,T,C or G
aggtacttgctccatgctggtgcctggacaagctccactgcacaagccaacgtggccccaggaaggtgctgtatgcgagagtttgtaaaaatacagcgcagcatcactcacgatgaggcaaagctcctagtgactttaaatttccagatagaccagacaacatcacgaatctcctgaggaatcattaatcattactagagaaacagaaacgtcataaaccctgtccaaagctggacaccggacatggagttgccaccgttagagctaaattttattcttggctttctgatacctaaagtatanttcagaagttnttttttttttttttacaacagccctgtttttgtttttaaacatca

SEQ ID NO: 11710 - DNA, 352 bp, Homo sapiens
ccgggcaggtacgcggggtcacatcaatgcagagtccctctgtgaatttacaacacccaacacccatgagttcagtccttaagaaggaaaattgagcaagtatttaattggttggacattgcataaaagaggtccatatccaggctaactctagaaattttattttcaaacttagttggcctctttttcttctgtcagaggaccattcttagtggcactggggaaatcttggcacccagaagaattcaactgcgctcactgcaaaaatacaatggcctacattggatttgtagaggagaaaggagccctgtattgtgagctgtgctatgagaaattctttgcccctgaatgt

SEQ ID NO: 11711 - DNA, 431 bp, Homo sapiens
aggtacgcgggacatcaatgcagagtccctctgtgaatttacaacacccaacacccatgagttcagtccttaagaaggaaaattgagcaagtatttaattggttggacattgcataaaagaggtccatatccaggcctacttctagaaatttttattcttcaaactttagttgggcctctttttttcttgtcagaaggactcacttctttagtgtgcaccttggggatatatctttgggcacccctagaagtaaattcaacctgccgcctctactttgcaaaaattacaaatgggctctaccattttggattttttgtagaagggaggaaaagggaggctccctgttattttgttgaaggcttgttgcttattgaaggaaaaatttccttttgccccccttgaaaatgttgggtccggattgtctcaaaac

SEQ ID NO: 11712 - DNA, 416 bp, Homo sapiens
ccgggcaggtacgcggggacacacacacacacagcacctgcacgcagatgcacacatctctagtcaaatgaggctctcagctttttgataggggctttttgatacgtgtataaccaatactttattctcactgtagtcaaggacttcattgcaattcagaaatgagaagctgatccggaactccactacagctcaaagaaattctcgaatgttctcacctattaacagttattaaaatggaagaagctggggatgaaattgtgagcaatgccatctcctacgctctatacaaagccttcagcaccagtgagcaagacaaggataactggaatgggcagctgaagcttctgctggagtggaaccagctggacttagccaatgatgagattttcaccaatgaccgccgatgggagttc

SEQ ID NO: 11713 - DNA, 372 bp, Homo sapiens
  misc_feature 317: n = A,T,C or G
aggtaccgactcctcagaaactggcatgccaaatcaaaatgggtctggttcaatcctccctaatggcaatgtaaacccctctaactaatcccacttctcctaattatctttttctccttacgaacctaaaaattctacccatttctattagcctgaaaataacatccctctgttcttctcttcctccttcagcactggatctcacttacaataggttttatttaataattatcttccttacactttctgtctcaccagtgttccccttaaactgatttaccgtgctacacaaaattattccttattggggcttatgntggccttttcctccaacttatttcgacctcttcaccctgggatgggatgcctcct

SEQ ID NO: 11714 - DNA, 406 bp, Homo sapiens
ttcccgggcaggtactattataatgacatttccaaggaacagagattaatcaatgtgcccaaattcacattattcacagagctgggatttaagcctagtctggctgtggaatctgtattcttaatgaccatgctatattgcttaagattaaccttgaaaatttactccagttacaaagattgtttttatttctctgaaactgcccccaatgagccataacaataaattaatcaattatcttggttatctcttttgcccaagtttatatttcaaaaaaaattcaaacataccagaaagatgaaagaatagcacagaatccaatcaaagatcaggcactgcatgtcatgtcttcatttcctttaatctaaaacatgcctctactttctttgatcttccatgacattgg

SEQ ID NO: 11715 - DNA, 355 bp, Homo sapiens
  misc_feature 313: n = A,T,C or G
ccgggcaggtacatctacctaaaggactattatgtggaataatacataccaatgaagtattacatgatttaaagactacaataaaaccaaacatgcttataacattaagaaaaacaataaagatacatgattgaaaccaagttgaaaaatagcatatgccttggaggaaatgtgctcaaattactaatgatttagtgttgtccctactttctctctcttttttctttctttttttttattatggttagctgtcacatacaactttttttttttttgagatggggtctcgctctgtcaccaggctggagtgcangcggcgcgatctcggctcactgcaacctccacatcccatgtt

SEQ ID NO: 11716 - DNA, 386 bp, Homo sapiens
ccgggcaggtacttccaaaccctcctgttctttcctttttgttttccccaattttaacataaggcaaaagcagtaattgagcaattctatcacctggattggcactccggggaacagtggagctgatcactaactgaattccccctttataatctgaataaattaccccagtatgaatttggactcccttcaaatttagacttgatctccctcaaaggcctaccctcccttctggcagcgggccatatacccctctaggaatcttttgtgggggctttccagggagtaaaaagaccatttgggtggaacataaatctactgcggtgctgcctgctgtggcgcgggacagctgttggattgttgtaattggctgactccctgaaggg

SEQ ID NO: 11717 - DNA, 418 bp, Homo sapiens
catcttgggtcatcgatgagcctcgccctgtgcctggtcccgcttgagagggaaggacattagaaaatgaattgatgtgttccttaaaggatgggcaggaaaacagatcctgttgtggatatttatttgaacgggattacagatttgaaatgaagtcacaaagtgagcattaccaatgagaggaaaacagacgagaaaatcttgatggcttcacaagacatgcaacaaacaaaatggaatactgtgatgacatgaggcagccaagctggggaggagataaccacggggcagagggtcaggaatctggccctgctgcctaaactgtgcgttcataaccaaatcatttcatatttctaaccctcaaaacaaagctgttgtaaaatctgatctctaccgttccttctgggcccaacattcg

SEQ ID NO: 11718 - DNA, 417 bp, Homo sapiens
aggtactttttttttttttttttttttcccttcatcaaggaagttcatcaaagaatttcatcaaagttcaatgatgacctctttttaaaattttcttagtattctatgtaactatcaccgatcttttccccacacactccaagagctttttaatataattttctacatagccatcagcacagataaccaatcctctttttttccccactagagatgtgccttccgtaacctctgtcctcttcctttaacctggaatattgctcttcaggcctgttgtgcagctaagagcttcattcctcatcatcctggggttcctttccctctctcttgggctggaatccctcttgcctggatctctcaccttcataaatctagtttactcctttgttttgggagaacacattctccagcagcttt

SEQ ID NO: 11719 - DNA, 375 bp, Homo sapiens
  misc_feature 256, 260, 261, 278, 287, 288, 302, 303, 313, 331, 332, 365,366: n = A,T,C or G
aggtacgttgaaatattaggggcaggttcccccaatatctggcgcccaacgtggttttctttttcctaagtgcatgtgggaacccgattccctttggtaggtgcggagaaatgttcatcggtccagtccacagaaatgcttgtttggctccccaacgattggtgagttgtctgtgtattctccggggtaactatgggtcacgcagagtctaaacattatgcttatctctgctatattaaattcctgttaaaatggngggnnagttcgggttcccatgngaaaatatnnggtcaccctatttnncagggcagtnggaagaaacccactgtcnncttggtttttcctgaaaagggggaacgtttagnnattgtggaa

SEQ ID NO: 11720 - DNA, 362 bp, Homo sapiens
ccgggcaggtacaaaatccgtaaacacttccactaatcgaatctaagtcaaagtccactttggattggggtttgagaaaaaattcatttgctgcaacctctgcctcccgggttcaagcgattcttctacctcagtttcccaagtagctgagactacaggtgcgtgccaccacgcccatctaatttttttgtatttttaatagagacggggtttcgccatgttggccaggatggtctctatctcctcctgacctcgtgatctgcccacctcagccttccaaagtgccttgggattacaggcgtgagcccaccgtgccctggttcattccaacccattgagcctttttgataggactacttctg

SEQ ID NO: 11721 - DNA, 414 bp, Homo sapiens
aggtacgaaaaaatcaggctactaagcccactgttaatatagacgcagaccaattgttaggaacaggtccaaattggagcaccattaaccaacaatcagtgatgcagaatgaggctattgaacaagtaagggctatttgccttaaggcccgggggaaaaatcaggacccaggaacagctttccctattaattcaattagacaaggctctaaagagccatatcctgactttgtggcaagattacaagatgctgctcaaaagtctattacagatgacaatgcccgaaaagttattgtagaattaatggcctatgaaaatgcaaatccagaatgtcagtcggccataaagccattaaaaggaaaagttccagcaggagttgatgtaattacagaatatgtgaaggcttgtgatggga

SEQ ID NO: 11722 - DNA, 471 bp, Homo sapiens
tgcaagaattcgaccaatgtgaaatcggcaattttgctgaaaggtcggcggccgaggtacactgtttttgcattagcattatgcctcctctcttacctcctctgtccttcatacttgcaaccaacaatctattagcaacctgaatttcagggtttctttcagagggagacacagactggaaaatgtgtatgtaacaacgtgaaaagttgtattgacacacagggctggggtctgggccaggcctctgcattcaccttttctatctttaaccctatcttacagatgtccttcaggacgtgtgtctggtgatgggaccggctcttcatttacatttttctgttgacaaacagagtccatgaatattaattattctgaagtttatttgcagaaaaggcactttctaatccttatcaattatttattaaaaatctcccccaccctaataatcttattaacattattatactaagg

SEQ ID NO: 11723 - DNA, 422 bp, Homo sapiens
ccgggcaggtactcggggaggctcctggggtggagtccaatttactcattgtttgtgaaagctgagctcacagcaaaacaagccaccatgaagctgtcggtgtgtctcctgctggtcacgctggccctctgctgctaccaggccaatgccgagttctgcccagctcttgtttctgagctgttagacttcttcttcattagtgaacctctgttcaagttaaagttttgccaaatttgatgccccctccggaagctgttgcagccaaagttaggaagtgaagaagatgccacggatcagaatgttccccttcaggaaaacgaaagccctcatttgcgggaaagtccctgggtgaaaaattattgaaaagaaatggttagtggtggtgaaccatgttaaaaaaccttttcatcccttgggtttcc

SEQ ID NO: 11724 - DNA, 414 bp, Homo sapiens
aggtacgcgggggcgcatagctgcagccgccgagccggacgtgtccgcgaagatggcgggccggagcatgcaagcggcaagatgtcctacagatgaattatctttaaccaattgtgcagttgtgaatgaaaaggatttccagtctggccagtgagtatctgactttgttttcttttaacctgctaagtggcattcgggaaacttccagagagtcatttttaggaaacgttggaaaatatttttaaaaaattcttgctgagttggaaaatggagaggatgagaaaaagttatgtatttgaatcattactgtgtcaaactttgataaatactgtataatgttttaaaaatgttttatgtataaaactctaaattttatcagttttcttagtagagcttaacatactggtttgtatg

SEQ ID NO: 11725 - DNA, 463 bp, Homo sapiens
gagtgaactttgacatgccaatcggtctccgtcaggtcccggccgaggtacgcggggatgctttgtcacacatacacacccacacgttgaccaacccgcagatgcacacatctctaggcaaatgatgctctcagctttttgataggtgctttttgatacgtgtataaccaatactttattctcactgtagtcaagggcttattgcaattcagaaatgagaagctgatccggaactccactacagctcaaagaaattctcgaatgttctcacctattaacagttattaaaatggaagaagctggggatgaaattgtgagcaatgccatctcctacgctctatacaaagccttcagcaccagtgagcaagacaaagataactggaatgggcagctgaagcttctgctggagtggaaccagctggacttacccaatgatgagattttcaccaatgaccgccgatgg

SEQ ID NO: 11726 - DNA, 419 bp, Homo sapiens
acgggctaggacttcggggcttttcttgaaggaatccctaaagtgcacgtgattcgcggtttctttacacatcagtgcaaagcccctctgtgaatttacaacacccaacacccatgagttcagtgcttaagaaggaaaattgagcaagtattttatttggttggacattgcataaaagaggaccatatccaggctaactctataaattttattctcaaacttagttggcctctttttcttctgtcagaggaccattcttagtggcactggggaaatcttggcacccagaagaattcaactgcgctcactgcaaaaatacaatggcctacattggatttgtagaggagaaaggagccctgtattgggaagctggctatgagaaatttctttgcgcttgaatgtgggtcgaagtcaaaggg

SEQ ID NO: 11727 - DNA, 389 bp, Homo sapiens
ccgggcaggtacgaaaaaatcaggctactaagcccactgttaatatagacgcagaccaattgttaggaacaggtccaaattggagcaccattaaccaacaatcagtgatgcagaatgaggctattgaacaagtaagggctatttgcctcagggcctggggaaaaattcaggacccaggaacagctttccctattaattcaattagacaaggctctaaagagccatatcctgactttgtggcaagattacaagctgctgctcaaaagtctattacagatgacaatgcccgaaaagttattgtagaattaatggcctatgaaaatgcaaatccagaatggtcagtcggccataaagccattaaaaggaaaaagttccagcaggagtttgat

SEQ ID NO: 11728 - DNA, 353 bp, Homo sapiens
ccgggcaggtacgtaacaggacatcaataaatattagttgaatggaagattaaatcaacaaaatgggtgatggatctctgcagtaagtggaagagttcttcatggcccccaaggttatatccatctagaacttcagcacgtaatttcatctggaaatagtgcctttgcggatataagttaggtaaaactgaagatgagatcatactggattaggatgggatctaaatccaatgaaaatgtcttcataaaaaaacaggaaagaacccatagaaacacaaggaagaaggtcatgtgaagatggaggcagagattggagggatgcagccaccggcccaggaatgccagcagccacc

SEQ ID NO: 11729 - DNA, 377 bp, Homo sapiens
  misc_feature 377: n = A,T,C or G
aggtacgcggggaatgcagagtccctctgtgaatttacaacacccaacacccatgagttcagtccttaagaaggaaaattgagcaagtatttaattggttggacattgcataaaagaggtccatatccaggctaactctagaaattttattctcaaacttagttggcctctttttcttctgtcagaggaccattcttagtggcactggggaaatcttggcacccagaagaattcaactgcgctcactgcaaaaatacaatggcctacattggatttgtagaggagaaaggagccctgtattgtgagctgtgctatgagaaattctttgcccctgaatgtggtcgatgccaaaggaagatccttggagaagtcatcan

SEQ ID NO: 11730 - DNA, 423 bp, Homo sapiens
ccgggcaggtacggtattggaaatggatctgtctttggtaaagatcagcctataattcttgtgctgatggatatcacccccatgatgggtgtcctggacggtgtcctaatggaactgcaagactgtgcccttcccctcctgaaagatgtcatcgcaacagataaagaagacgttgccttcaaagacctggatgtggccattcttgtgggctccatgccaagaagggaaggcatggagagaaaagatttactgaaagcaaatgtgaaaatctttaaatcccagggtgcagtccttagataaatacgccaagaaagttagttaaaagttattgttgtggggtaaatccagtccaattaccaacttgcctggactgctttccaagtcaagcttccatttcattcccccatggagaaacttcagttg

SEQ ID NO: 11731 - DNA, 366 bp, Homo sapiens
  misc_feature 267, 275, 287, 350: n = A,T,C or G
aggtacgcggggacatcaatgcagagtccctctgtgaatttacaacacccaacacccatgagttcagtccttaagaaggaaaattgagcaagtatttaattggttggacattgcataaaagaggtccatatccaggctaactctagaaattttattctcaaacttagttggcctctttttcttctgtcagaggaccattcttagtggcactggggaaatcttggcacccaggagaattcaactgcgctcactgcaaaaatacaatgngcctacanttggatttgtangaggagaaagggagccctgttatttgtgaagctgtgcctaatgagaaaattcttttgcccctnggaatgtggttcgatg

SEQ ID NO: 11732 - DNA, 405 bp, Homo sapiens
aggtacgcgggacatcaatgcagagtccctctgtgaatttacaacacccaacacccatgagttcagtccttaagaaggaaaattgagtaagtatttaattggttggacattgcataaaagaggtccatatccaggctaactctaaaaattttatttctcaaacttagttggcctctttttcttctgtcagaggaccattcttagtggcactggggaaatcttggcacccagaagaattcaactgcgctcactgcaaaaatacaatggcctacattggatttgtagaggagaaaggagccctgtattgtgagctgtgctatgagaaattctttgcccctgaatgtggtcgatgccaaagggaagatccttggaaaaagtcatcactgccgttgaaacaaaacttgg

SEQ ID NO: 11733 - DNA, 403 bp, Homo sapiens
ccgggcaggtacttgatggactcatcattacagaatactcctcgttggaagggggtatgccttgaagtaagaattgcaaaaggcaatccagctagcaaaagggaataaatgaaaatatcattaaaaaagaaatatcaaaactaattaaatggcaataattatcccacagactctgtctaaaaatgcatttgccgtgaaaataaatgagagcacatgtaaaaaaggaaatgcagcaatgcatgcaacagaagttagaaagattacagttttaagataaagatgttttgtctacagcaaacaaagtgttcaaatcctctattaaccaatttaacaaagagttatctttcctttgtttctgtccaaacacactaaatggattttggaaaaatctcttctcacgttg
